United States Patent Application Publication US 2006/0003322 A1 - sequence listing, part 13

SEQ ID NO: 513267 - RNA, 18 nt, Human
cacacacacacauccauu

SEQ ID NO: 513268 - RNA, 18 nt, Human
cacacgcaugccugugug

SEQ ID NO: 513269 - RNA, 21 nt, Human
cacacgcaugccuguguguuc

SEQ ID NO: 513270 - RNA, 24 nt, Human
cagaguuuaagugugaaaguguua

SEQ ID NO: 513271 - RNA, 21 nt, Human
cagcaauucauuauugguuuc

SEQ ID NO: 513272 - RNA, 27 nt, Human
caguggcacacacucaccgcaagcuuc

SEQ ID NO: 513273 - RNA, 25 nt, Human
cauacacacgcaugccuguguguuc

SEQ ID NO: 513274 - RNA, 24 nt, Human
ccacuaaggaccugccaggcugaa

SEQ ID NO: 513275 - RNA, 20 nt, Human
ccaucugggucauggcuggg

SEQ ID NO: 513276 - RNA, 31 nt, Human
cccauguacgugcacauacacacgcauggug

SEQ ID NO: 513277 - RNA, 18 nt, Human
ccugagcagauuuuugag

SEQ ID NO: 513278 - RNA, 23 nt, Human
ccugcauaaagcagcaaacagcu

SEQ ID NO: 513279 - RNA, 19 nt, Human
ccuugcugcugacccagaa

SEQ ID NO: 513280 - RNA, 22 nt, Human
cucacacacacacauccauuca

SEQ ID NO: 513281 - RNA, 18 nt, Human
cucaccgcaagcuucugg

SEQ ID NO: 513282 - RNA, 23 nt, Human
cucagaaaaaaaaaccaaaacaa

SEQ ID NO: 513283 - RNA, 23 nt, Human
cugccaggcugaaugacaggcgu

SEQ ID NO: 513284 - RNA, 18 nt, Human
cuucuaccuucaaacagu

SEQ ID NO: 513285 - RNA, 19 nt, Human
cuugccccucucucaacuu

SEQ ID NO: 513286 - RNA, 29 nt, Human
gaaaaaaaaaccaaaacaaaacacaagaa

SEQ ID NO: 513287 - RNA, 18 nt, Human
gaacacuuaacaauuguu

SEQ ID NO: 513288 - RNA, 23 nt, Human
gacacuagacucagacaagccag

SEQ ID NO: 513289 - RNA, 23 nt, Human
gaccauuuaaagcucauaccuga

SEQ ID NO: 513290 - RNA, 19 nt, Human
gacccagaaguuggagcag

SEQ ID NO: 513291 - RNA, 18 nt, Human
gcagcugcagugugagca

SEQ ID NO: 513292 - RNA, 19 nt, Human
gcaggguggugauagggca

SEQ ID NO: 513293 - RNA, 24 nt, Human
gcagugugagcaaccccaucagga

SEQ ID NO: 513294 - RNA, 20 nt, Human
ggaggcucuugguccccagu

SEQ ID NO: 513295 - RNA, 22 nt, Human
ggaggugggaugcucgcaggug

SEQ ID NO: 513296 - RNA, 22 nt, Human
ggcagcucaucagaaagguagg

SEQ ID NO: 513297 - RNA, 21 nt, Human
gucaagagcaacuucuguuga

SEQ ID NO: 513298 - RNA, 18 nt, Human
gucauggcugggcuuuca

SEQ ID NO: 513299 - RNA, 27 nt, Human
gugcacauacacacgcaugccugugug

SEQ ID NO: 513300 - RNA, 28 nt, Human
uaaaaucauauuauccaaacacuaccaa

SEQ ID NO: 513301 - RNA, 19 nt, Human
uaaacuauccuguucuuug

SEQ ID NO: 513302 - RNA, 21 nt, Human
uaaagaguccgaguagcucag

SEQ ID NO: 513303 - RNA, 19 nt, Human
uaaagguuuccaaacagca

SEQ ID NO: 513304 - RNA, 18 nt, Human
uaacguuguuuuuggcaa

SEQ ID NO: 513305 - RNA, 19 nt, Human
uaaugcuauuuggguucaa

SEQ ID NO: 513306 - RNA, 25 nt, Human
uaccuaguacuauuuaauaccaaca

SEQ ID NO: 513307 - RNA, 29 nt, Human
uacgugcacauacacacgcaugccugugu

SEQ ID NO: 513308 - RNA, 23 nt, Human
uacuaaacugcuuuugcaaaaca

SEQ ID NO: 513309 - RNA, 29 nt, Human
uacuaaacugcuuuugcaaaacagcuccu

SEQ ID NO: 513310 - RNA, 21 nt, Human
uacuucuccauuugacuugga

SEQ ID NO: 513311 - RNA, 21 nt, Human
uagcccacuaaggaccugcca

SEQ ID NO: 513312 - RNA, 22 nt, Human
uagcccacuaaggaccugccag

SEQ ID NO: 513313 - RNA, 20 nt, Human
uagcuucacaagaaaucaaa

SEQ ID NO: 513314 - RNA, 24 nt, Human
uagcuucaugcaggaaagauuuua

SEQ ID NO: 513315 - RNA, 22 nt, Human
uaggcugcuucuaccuucaaac

SEQ ID NO: 513316 - RNA, 26 nt, Human
uauucaucugaccaaaauucaacaua

SEQ ID NO: 513317 - RNA, 26 nt, Human
ucaaaauuagcuucacaagaaaucaa

SEQ ID NO: 513318 - RNA, 21 nt, Human
ucagaaaaaaaaaccaaaaca

SEQ ID NO: 513319 - RNA, 26 nt, Human
ucagcuuucuaaugcuauuuggguuc

SEQ ID NO: 513320 - RNA, 22 nt, Human
ucauuugcaaccaaacauuuaa

SEQ ID NO: 513321 - RNA, 22 nt, Human
uccaaacacuaccagaagaaca

SEQ ID NO: 513322 - RNA, 23 nt, Human
ucccuugccccucucucaacuug

SEQ ID NO: 513323 - RNA, 25 nt, Human
uccgaguagcucagaaaaaaaaacc

SEQ ID NO: 513324 - RNA, 23 nt, Human
uccugguugcgaagccuuugacc

SEQ ID NO: 513325 - RNA, 27 nt, Human
ucuaccuucaaacagucaagagcaacu

SEQ ID NO: 513326 - RNA, 19 nt, Human
ucucacauuagcacucuga

SEQ ID NO: 513327 - RNA, 21 nt, Human
ucugaggaaauuacuaccuca

SEQ ID NO: 513328 - RNA, 19 nt, Human
ucuggcccauguacgugca

SEQ ID NO: 513329 - RNA, 24 nt, Human
ucuugcgcugggggcgggcagcuc

SEQ ID NO: 513330 - RNA, 22 nt, Human
ucuuucuacaggggugucugua

SEQ ID NO: 513331 - RNA, 19 nt, Human
ugacagauuuuaaaaucgg

SEQ ID NO: 513332 - RNA, 23 nt, Human
ugaccaaaauucaacauaaccuu

SEQ ID NO: 513333 - RNA, 18 nt, Human
ugagcacaaguuuccaug

SEQ ID NO: 513334 - RNA, 26 nt, Human
ugaggaaauuacuaccucaaaaaaau

SEQ ID NO: 513335 - RNA, 19 nt, Human
ugcaaaacagcucccugca

SEQ ID NO: 513336 - RNA, 18 nt, Human
ugcaaacaucuacaaaga

SEQ ID NO: 513337 - RNA, 22 nt, Human
ugcacagaucuggauaaacugu

SEQ ID NO: 513338 - RNA, 27 nt, Human
ugcacagaucuggauaaacugugcaaa

SEQ ID NO: 513339 - RNA, 21 nt, Human
ugcauaaauaacaacaugaag

SEQ ID NO: 513340 - RNA, 23 nt, Human
ugcugcugacccagaaguuggag

SEQ ID NO: 513341 - RNA, 18 nt, Human
uggaggccaggcucucug

SEQ ID NO: 513342 - RNA, 19 nt, Human
uggauuacaaucagggcac

SEQ ID NO: 513343 - RNA, 23 nt, Human
uggcaaaagguuuuuauucagac

SEQ ID NO: 513344 - RNA, 18 nt, Human
uggcuggcauuuuacaau

SEQ ID NO: 513345 - RNA, 23 nt, Human
ugggaugcucgcaggugcccagg

SEQ ID NO: 513346 - RNA, 23 nt, Human
uggguggucauguugagagcagg

SEQ ID NO: 513347 - RNA, 19 nt, Human
uggguguagacacaauacc

SEQ ID NO: 513348 - RNA, 18 nt, Human
uggugggugggcuuggag

SEQ ID NO: 513349 - RNA, 21 nt, Human
uguguuaaaaaugccaaccaa

SEQ ID NO: 513350 - RNA, 23 nt, Human
uguguuaaaaaugccaaccaagg

SEQ ID NO: 513351 - RNA, 20 nt, Human
uucacugcuuguaaaugcaa

SEQ ID NO: 513352 - RNA, 21 nt, Human
uucucacucacaaaguggcug

SEQ ID NO: 513353 - RNA, 21 nt, Human
uucuggcccauguacgugcac

SEQ ID NO: 513354 - RNA, 18 nt, Human
uucuucccaauaaacuaa

SEQ ID NO: 513355 - RNA, 22 nt, Human
uugcauccugguugcgaagccu

SEQ ID NO: 513356 - RNA, 18 nt, Human
uuggagcuccaucagugg

SEQ ID NO: 513357 - RNA, 19 nt, Human
uuguuuuguuuuuaaaaua

SEQ ID NO: 513358 - RNA, 24 nt, Human
uuuagcuucaugcaggaaagauuu

SEQ ID NO: 513359 - RNA, 21 nt, Human
uuucuaguucauaaauuuugg

SEQ ID NO: 513360 - RNA, 18 nt, Human
uuuuuuuuuuuuuuuuug

SEQ ID NO: 513361 - RNA, 18 nt, Human
accugggguaguggucgg

SEQ ID NO: 513362 - RNA, 21 nt, Human
agaagcaaguuacaaaguuag

SEQ ID NO: 513363 - RNA, 22 nt, Human
agacagcuccgggauccucuca

SEQ ID NO: 513364 - RNA, 24 nt, Human
agcaaguuacaaaguuagaaaccu

SEQ ID NO: 513365 - RNA, 24 nt, Human
agcugguaggugagcagaggguuc

SEQ ID NO: 513366 - RNA, 18 nt, Human
agggagaggaggaugggg

SEQ ID NO: 513367 - RNA, 18 nt, Human
agggagaggaggaugggg

SEQ ID NO: 513368 - RNA, 19 nt, Human
agggagaggaggauggggu

SEQ ID NO: 513369 - RNA, 18 nt, Human
agggugguggggggaugg

SEQ ID NO: 513370 - RNA, 21 nt, Human
cagccuagccccucccacccc

SEQ ID NO: 513371 - RNA, 21 nt, Human
caggauggagggugguggggg

SEQ ID NO: 513372 - RNA, 21 nt, Human
cagggccagacagcuccggga

SEQ ID NO: 513373 - RNA, 25 nt, Human
ccccucccaccccagauuugugcga

SEQ ID NO: 513374 - RNA, 21 nt, Human
ccuagccccucccaccccaga

SEQ ID NO: 513375 - RNA, 20 nt, Human
ccuggagggagaggaggaug

SEQ ID NO: 513376 - RNA, 19 nt, Human
cgagggcccccaggaugga

SEQ ID NO: 513377 - RNA, 26 nt, Human
cggaaguagagcuugcagagggagga

SEQ ID NO: 513378 - RNA, 25 nt, Human
cugagauuauagguuagggacccac

SEQ ID NO: 513379 - RNA, 26 nt, Human
gaaugcagggccagacagcuccggga

SEQ ID NO: 513380 - RNA, 22 nt, Human
gagggagaggaggaugggguca

SEQ ID NO: 513381 - RNA, 21 nt, Human
gagggcccccaggauggaggg

SEQ ID NO: 513382 - RNA, 21 nt, Human
gcacaggucaggacaugcugg

SEQ ID NO: 513383 - RNA, 19 nt, Human
ggacaugcugggggcuccu

SEQ ID NO: 513384 - RNA, 22 nt, Human
ggaggacacgcuguggaugucc

SEQ ID NO: 513385 - RNA, 21 nt, Human
ggagggagaggaggauggggu

SEQ ID NO: 513386 - RNA, 20 nt, Human
ggcuccuggagggagaggag

SEQ ID NO: 513387 - RNA, 25 nt, Human
gggaggacacgcuguggauguccug

SEQ ID NO: 513388 - RNA, 25 nt, Human
gggcagacccuucaguccaggguug

SEQ ID NO: 513389 - RNA, 22 nt, Human
gggcuccuggagggagaggagg

SEQ ID NO: 513390 - RNA, 21 nt, Human
gggugguggggggaugggcag

SEQ ID NO: 513391 - RNA, 19 nt, Human
uagccccucccaccccaga

SEQ ID NO: 513392 - RNA, 23 nt, Human
ucccauagagcugguaggugagc

SEQ ID NO: 513393 - RNA, 23 nt, Human
uccuggagggagaggaggauggg

SEQ ID NO: 513394 - RNA, 21 nt, Human
ugagcagaggguucggaagcu

SEQ ID NO: 513395 - RNA, 19 nt, Human
ugcugggggcuccuggagg

SEQ ID NO: 513396 - RNA, 20 nt, Human
uggagggagaggaggauggg

SEQ ID NO: 513397 - RNA, 22 nt, Human
uggagggagaggaggauggggu

SEQ ID NO: 513398 - RNA, 24 nt, Human
uggagggugguggggggaugggca

SEQ ID NO: 513399 - RNA, 21 nt, Human
uggggaaagaaggguaggagu

SEQ ID NO: 513400 - RNA, 18 nt, Human
ugguggggggaugggcag

SEQ ID NO: 513401 - RNA, 23 nt, Human
ugguggggggaugggcagacccu

SEQ ID NO: 513402 - RNA, 21 nt, Human
uuauucauuaauguugucaga

SEQ ID NO: 513403 - RNA, 22 nt, Human
aaaaaaaagcauaguaaaggua

SEQ ID NO: 513404 - RNA, 23 nt, Human
aaaaaaaagcauaguaaagguaa

SEQ ID NO: 513405 - RNA, 20 nt, Human
aaaaaagcauaguaaaggua

SEQ ID NO: 513406 - RNA, 22 nt, Human
aacucugcaagccugcagaaca

SEQ ID NO: 513407 - RNA, 19 nt, Human
aaugaacaaaaucaauuuu

SEQ ID NO: 513408 - RNA, 20 nt, Human
aaugacaaaagagccaguua

SEQ ID NO: 513409 - RNA, 22 nt, Human
aaugacaaaagagccaguuaaa

SEQ ID NO: 513410 - RNA, 18 nt, Human
acaucuucagaguuaggg

SEQ ID NO: 513411 - RNA, 20 nt, Human
agcacaaugacaaaagagcc

SEQ ID NO: 513412 - RNA, 21 nt, Human
agcacaaugacaaaagagcca

SEQ ID NO: 513413 - RNA, 22 nt, Human
caaaagagccaguuaaauggua

SEQ ID NO: 513414 - RNA, 24 nt, Human
cacaauaugacagucagccaaaaa

SEQ ID NO: 513415 - RNA, 26 nt, Human
cacgcgcugugcccgacgcgcaugcg

SEQ ID NO: 513416 - RNA, 23 nt, Human
cagcacaaugacaaaagagccag

SEQ ID NO: 513417 - RNA, 22 nt, Human
gaccacaauaugacagucagcc

SEQ ID NO: 513418 - RNA, 25 nt, Human
gagaagaacucugcaagccugcaga

SEQ ID NO: 513419 - RNA, 22 nt, Human
ggcgccggagaccagaagagcu

SEQ ID NO: 513420 - RNA, 19 nt, Human
gugcccgacgcgcaugcgc

SEQ ID NO: 513421 - RNA, 18 nt, Human
uaacagcacaaugacaaa

SEQ ID NO: 513422 - RNA, 19 nt, Human
uaaggaccacaauaugaca

SEQ ID NO: 513423 - RNA, 23 nt, Human
uaaugaacaaaaucaauuuugaa

SEQ ID NO: 513424 - RNA, 21 nt, Human
ucaaaauauugaagaacauug

SEQ ID NO: 513425 - RNA, 18 nt, Human
ucugcaagccugcagaac

SEQ ID NO: 513426 - RNA, 21 nt, Human
uguaaaaaaaagcauaguaaa

SEQ ID NO: 513427 - RNA, 19 nt, Human
uguacaaacugcuuuaaac

SEQ ID NO: 513428 - RNA, 24 nt, Human
uuaaguagguaaugaacaaaauca

SEQ ID NO: 513429 - RNA, 27 nt, Human
uuaccgaaucaauuaugacauuuguac

SEQ ID NO: 513430 - RNA, 25 nt, Human
aaaaggcuaggguggcccuucugca

SEQ ID NO: 513431 - RNA, 19 nt, Human
aagcaguuaaaaggcuagg

SEQ ID NO: 513432 - RNA, 21 nt, Human
accccgggcccccucccucgc

SEQ ID NO: 513433 - RNA, 23 nt, Human
accccgggcccccucccucgccc

SEQ ID NO: 513434 - RNA, 18 nt, Human
caaccccgggcccccucc

SEQ ID NO: 513435 - RNA, 21 nt, Human
cacccugacccuggcgugccc

SEQ ID NO: 513436 - RNA, 22 nt, Human
cagcaacggugccccgaggccu

SEQ ID NO: 513437 - RNA, 25 nt, Human
ccacucccgggccccugccgguccc

SEQ ID NO: 513438 - RNA, 22 nt, Human
ccccgaggccugcagggcuguu

SEQ ID NO: 513439 - RNA, 21 nt, Human
ccccgccugggccccggccuc

SEQ ID NO: 513440 - RNA, 21 nt, Human
ccccggccucgcucgccaccu

SEQ ID NO: 513441 - RNA, 22 nt, Human
ccccgggcccccucccucgccc

SEQ ID NO: 513442 - RNA, 21 nt, Human
ccccgggcccccuuccccaac

SEQ ID NO: 513443 - RNA, 23 nt, Human
ccccgggcccccuuccccaaccc

SEQ ID NO: 513444 - RNA, 21 nt, Human
cccgcucgcggccucuccccc

SEQ ID NO: 513445 - RNA, 20 nt, Human
cccuggcgugcccgccacuc

SEQ ID NO: 513446 - RNA, 21 nt, Human
ccgggccccugccgguccccg

SEQ ID NO: 513447 - RNA, 18 nt, Human
ccucccucgcccggcacc

SEQ ID NO: 513448 - RNA, 18 nt, Human
ccugacccuggcgugccc

SEQ ID NO: 513449 - RNA, 20 nt, Human
ccugggccccggccucgcuc

SEQ ID NO: 513450 - RNA, 25 nt, Human
ccugucuucagaccucugcucuggg

SEQ ID NO: 513451 - RNA, 22 nt, Human
cgccggcgccgcccagcaacgg

SEQ ID NO: 513452 - RNA, 22 nt, Human
cgccugggccccggccucgcuc

SEQ ID NO: 513453 - RNA, 21 nt, Human
cgggcccccuuccccaacccc

SEQ ID NO: 513454 - RNA, 22 nt, Human
cggucccgcucgcggccucucc

SEQ ID NO: 513455 - RNA, 24 nt, Human
cucgcccggcacccugacccuggc

SEQ ID NO: 513456 - RNA, 23 nt, Human
gaccucugcucccagcccacuuc

SEQ ID NO: 513457 - RNA, 20 nt, Human
gauccucagcauggagcucc

SEQ ID NO: 513458 - RNA, 21 nt, Human
gcagggcuguuuaccucccuc

SEQ ID NO: 513459 - RNA, 22 nt, Human
gcccccuuccccaaccccgggc

SEQ ID NO: 513460 - RNA, 21 nt, Human
gcucgccaccuccgcgaccuc

SEQ ID NO: 513461 - RNA, 21 nt, Human
ggcuaggguggcccuucugca

SEQ ID NO: 513462 - RNA, 25 nt, Human
gguccaacccuguccuuugcagcca

SEQ ID NO: 513463 - RNA, 23 nt, Human
uccccaaccccgggcccccuccc

SEQ ID NO: 513464 - RNA, 25 nt, Human
ucccccgcggcacucgggcaggggc

SEQ ID NO: 513465 - RNA, 25 nt, Human
uccccgggcccccuuccccaacccc

SEQ ID NO: 513466 - RNA, 18 nt, Human
ucugcucugggauugggu

SEQ ID NO: 513467 - RNA, 19 nt, Human
ugacaaagcaguuaaaagg

SEQ ID NO: 513468 - RNA, 20 nt, Human
ugccccgaggccugcagggc

SEQ ID NO: 513469 - RNA, 20 nt, Human
ugcuccugucuucagaccuc

SEQ ID NO: 513470 - RNA, 22 nt, Human
ugggauuggguccaacccuguc

SEQ ID NO: 513471 - RNA, 19 nt, Human
uuccccaaccccgggcccc

SEQ ID NO: 513472 - RNA, 18 nt, Human
uuuuuuuuuuuuuuucug

SEQ ID NO: 513473 - RNA, 19 nt, Human
uuuuuuuuuuuuuuucugu

SEQ ID NO: 513474 - RNA, 23 nt, Human
acaaacaucuauugagcaucucc

SEQ ID NO: 513475 - RNA, 21 nt, Human
acaauaucaacagcagcucca

SEQ ID NO: 513476 - RNA, 22 nt, Human
acaauaucaacagcagcuccaa

SEQ ID NO: 513477 - RNA, 20 nt, Human
acacaggacagauggaucuc

SEQ ID NO: 513478 - RNA, 24 nt, Human
agaauacaugcaaacaaguaaacu

SEQ ID NO: 513479 - RNA, 18 nt, Human
agaccggaccaagcugga

SEQ ID NO: 513480 - RNA, 21 nt, Human
agcucugguucuugucuuugu

SEQ ID NO: 513481 - RNA, 20 nt, Human
caccugaaaggaauucacac

SEQ ID NO: 513482 - RNA, 21 nt, Human
caccugaaaggaauucacacg

SEQ ID NO: 513483 - RNA, 20 nt, Human
caggacagauggaucuccaa

SEQ ID NO: 513484 - RNA, 22 nt, Human
cccgggucaacaggaccaggag

SEQ ID NO: 513485 - RNA, 24 nt, Human
ccuuuaauuugauaaucauucauu

SEQ ID NO: 513486 - RNA, 24 nt, Human
cugagaaacucuuuaaaaguuuau

SEQ ID NO: 513487 - RNA, 18 nt, Human
gcauaaauaggaaauccu

SEQ ID NO: 513488 - RNA, 22 nt, Human
ggaaauaacaaaagaaacaugc

SEQ ID NO: 513489 - RNA, 24 nt, Human
ggaaauaacaaaagaaacaugcag

SEQ ID NO: 513490 - RNA, 26 nt, Human
ggaaauaacaaaagaaaccgguaccc

SEQ ID NO: 513491 - RNA, 23 nt, Human
ggaaauccuuuaauuugauaauc

SEQ ID NO: 513492 - RNA, 21 nt, Human
ggagguuccgaggggcccggg

SEQ ID NO: 513493 - RNA, 20 nt, Human
gggaggagaaugcccagcuc

SEQ ID NO: 513494 - RNA, 22 nt, Human
ggggaggagaaugcccagcucu

SEQ ID NO: 513495 - RNA, 22 nt, Human
gggggaggagaaugcccagcuc

SEQ ID NO: 513496 - RNA, 23 nt, Human
gguaaaggaaauaacaaaagaaa

SEQ ID NO: 513497 - RNA, 21 nt, Human
uaaaggaaauaacaaaagaaa

SEQ ID NO: 513498 - RNA, 19 nt, Human
uacagcaguuaacauucag

SEQ ID NO: 513499 - RNA, 21 nt, Human
uagcggguggacgcugauguc

SEQ ID NO: 513500 - RNA, 22 nt, Human
uaucaacagcagcuccaagcag

SEQ ID NO: 513501 - RNA, 21 nt, Human
ucaaugcaaugcucuuauccc

SEQ ID NO: 513502 - RNA, 22 nt, Human
uccugagcugacugcuggccuc

SEQ ID NO: 513503 - RNA, 20 nt, Human
ugaaggcagauuggcauuac

SEQ ID NO: 513504 - RNA, 22 nt, Human
ugacaauaucaacagcagcucc

SEQ ID NO: 513505 - RNA, 21 nt, Human
ugcaaacaaguaaacuuaaaa

SEQ ID NO: 513506 - RNA, 19 nt, Human
ugccucaaccugcuacuau

SEQ ID NO: 513507 - RNA, 18 nt, Human
uggccucggugugcuccu

SEQ ID NO: 513508 - RNA, 24 nt, Human
uggugcugacacugcacauaugug

SEQ ID NO: 513509 - RNA, 18 nt, Human
ugugaauauuccucucug

SEQ ID NO: 513510 - RNA, 21 nt, Human
uuccacacaggacagauggau

SEQ ID NO: 513511 - RNA, 21 nt, Human
uuccagucccagaccggaccu

SEQ ID NO: 513512 - RNA, 23 nt, Human
uuccgaggggcccgggucaacag

SEQ ID NO: 513513 - RNA, 23 nt, Human
uuuucuuuuuuaaaauuuguuuu

SEQ ID NO: 513514 - RNA, 18 nt, Human
aaaacuaaaccaaauaua

SEQ ID NO: 513515 - RNA, 19 nt, Human
aaggugcaucuaucaugcu

SEQ ID NO: 513516 - RNA, 19 nt, Human
aagguguucuauuuucuuu

SEQ ID NO: 513517 - RNA, 18 nt, Human
aauggaauuauacaguau

SEQ ID NO: 513518 - RNA, 24 nt, Human
acaagacacagcaauacacuucaa

SEQ ID NO: 513519 - RNA, 20 nt, Human
acuaaaauacauaaaaagcu

SEQ ID NO: 513520 - RNA, 25 nt, Human
acuucagguguaaacauuuccauuu

SEQ ID NO: 513521 - RNA, 21 nt, Human
agaagaagauguacuaugaca

SEQ ID NO: 513522 - RNA, 19 nt, Human
agcaagcaugagggcugac

SEQ ID NO: 513523 - RNA, 19 nt, Human
agcgagggcagcucccugu

SEQ ID NO: 513524 - RNA, 23 nt, Human
auacaguaugguaaacacacuuu

SEQ ID NO: 513525 - RNA, 22 nt, Human
caaaguaaacuauaaauaccaa

SEQ ID NO: 513526 - RNA, 24 nt, Human
caacuaaaauacauaaaaagcuag

SEQ ID NO: 513527 - RNA, 22 nt, Human
caagacacagcaauacacuuca

SEQ ID NO: 513528 - RNA, 20 nt, Human
caccccccuccccgaccccg

SEQ ID NO: 513529 - RNA, 23 nt, Human
caccccccuccccgaccccggcc

SEQ ID NO: 513530 - RNA, 19 nt, Human
cacuucaauucaucugggg

SEQ ID NO: 513531 - RNA, 20 nt, Human
cagcagaauaacggcacaag

SEQ ID NO: 513532 - RNA, 22 nt, Human
cagcagcagaagaagauguacu

SEQ ID NO: 513533 - RNA, 21 nt, Human
cagcuuccagccccagccccu

SEQ ID NO: 513534 - RNA, 19 nt, Human
caggaucuuccauuucagu

SEQ ID NO: 513535 - RNA, 18 nt, Human
ccaccccccuccccgacc

SEQ ID NO: 513536 - RNA, 22 nt, Human
ccccuugcaaacaugaaucuac

SEQ ID NO: 513537 - RNA, 18 nt, Human
cccggccgacccagcccc

SEQ ID NO: 513538 - RNA, 22 nt, Human
ccuccccgaccccggccgaccc

SEQ ID NO: 513539 - RNA, 21 nt, Human
ccuccuggcaauggacagccu

SEQ ID NO: 513540 - RNA, 20 nt, Human
ccucugaagccacugguaag

SEQ ID NO: 513541 - RNA, 20 nt, Human
ccuuuucaccaccccccucc

SEQ ID NO: 513542 - RNA, 20 nt, Human
cggcauguguacuugcuuug

SEQ ID NO: 513543 - RNA, 21 nt, Human
cuaaauuaugauuuuauaaca

SEQ ID NO: 513544 - RNA, 25 nt, Human
cucccugucaccuuuucaccacccc

SEQ ID NO: 513545 - RNA, 18 nt, Human
cucuuuccuuucuaauuc

SEQ ID NO: 513546 - RNA, 20 nt, Human
cuuccagccccagccccuuu

SEQ ID NO: 513547 - RNA, 21 nt, Human
cuugcaaacaugaaucuacuu

SEQ ID NO: 513548 - RNA, 25 nt, Human
cuuuccuuucuaauucuucucuuuu

SEQ ID NO: 513549 - RNA, 20 nt, Human
cuuuguugcucuuccucuga

SEQ ID NO: 513550 - RNA, 24 nt, Human
cuuuucaccaccccccuccccgac

SEQ ID NO: 513551 - RNA, 24 nt, Human
cuuuuuuuuuuuuguacagcauau

SEQ ID NO: 513552 - RNA, 21 nt, Human
gaaaagcaguuuuucugccag

SEQ ID NO: 513553 - RNA, 20 nt, Human
gaaaugaggcauguuucuaa

SEQ ID NO: 513554 - RNA, 20 nt, Human
gcaauggacagccuguauca

SEQ ID NO: 513555 - RNA, 20 nt, Human
gcucuugagcgagggcagcu

SEQ ID NO: 513556 - RNA, 19 nt, Human
gcugagguuauguuuuccc

SEQ ID NO: 513557 - RNA, 21 nt, Human
gcugagguuauguuuucccaa

SEQ ID NO: 513558 - RNA, 25 nt, Human
gcuuccagccccagccccuugcaaa

SEQ ID NO: 513559 - RNA, 21 nt, Human
gugcuucaauauuugcaccau

SEQ ID NO: 513560 - RNA, 21 nt, Human
uaaaaagcuaguuaaagcaag

SEQ ID NO: 513561 - RNA, 20 nt, Human
uaaaauuucauaggugacac

SEQ ID NO: 513562 - RNA, 22 nt, Human
uaaacacauuuuuccuuuuuuu

SEQ ID NO: 513563 - RNA, 22 nt, Human
uaaauggaauuauacaguaugg

SEQ ID NO: 513564 - RNA, 22 nt, Human
uaacaaguaggugccuuuaaaa

SEQ ID NO: 513565 - RNA, 21 nt, Human
uaagccgauauaguaaacaac

SEQ ID NO: 513566 - RNA, 19 nt, Human
uaagguuuggaauggugcc

SEQ ID NO: 513567 - RNA, 25 nt, Human
uacaguaugguaaacacacuuuuaa

SEQ ID NO: 513568 - RNA, 20 nt, Human
uaccuuaaaauaugacucug

SEQ ID NO: 513569 - RNA, 21 nt, Human
uagaauguaucuguuuuaacu

SEQ ID NO: 513570 - RNA, 20 nt, Human
uauaacaaguaggugccuuu

SEQ ID NO: 513571 - RNA, 19 nt, Human
ucacagcaggaucuuccau

SEQ ID NO: 513572 - RNA, 25 nt, Human
ucaccaccccccuccccgaccccgg

SEQ ID NO: 513573 - RNA, 25 nt, Human
ucacuguaagauuccucaugcccau

SEQ ID NO: 513574 - RNA, 20 nt, Human
ucagacccccaaccaccggc

SEQ ID NO: 513575 - RNA, 23 nt, Human
ucaugcucuuccuucaguuucuu

SEQ ID NO: 513576 - RNA, 20 nt, Human
uccccgaccccggccgaccc

SEQ ID NO: 513577 - RNA, 24 nt, Human
ucccugucaccuuuucaccacccc

SEQ ID NO: 513578 - RNA, 21 nt, Human
ucuacaauccaacuuuagagc

SEQ ID NO: 513579 - RNA, 18 nt, Human
ucucuuuccuuucuaauu

SEQ ID NO: 513580 - RNA, 25 nt, Human
ucugugccuaauaaaauuucauagg

SEQ ID NO: 513581 - RNA, 23 nt, Human
ucuuuccuuucuaauucuucccu

SEQ ID NO: 513582 - RNA, 23 nt, Human
ucuuuguacugcuccuuucacag

SEQ ID NO: 513583 - RNA, 19 nt, Human
ugaaauauaauuuacauac

SEQ ID NO: 513584 - RNA, 24 nt, Human
ugaaauauaauuuacauacuauag

SEQ ID NO: 513585 - RNA, 26 nt, Human
ugaaauauaauuuacauacuauagaa

SEQ ID NO: 513586 - RNA, 19 nt, Human
ugaccacuuucacauggcc

SEQ ID NO: 513587 - RNA, 18 nt, Human
ugcacagcaagcaugagg

SEQ ID NO: 513588 - RNA, 23 nt, Human
ugcuuuguuuuucaauaaaaauu

SEQ ID NO: 513589 - RNA, 25 nt, Human
uggaaaagcaguuuuucugccagug

SEQ ID NO: 513590 - RNA, 22 nt, Human
ugggguauuauuguccuugucc

SEQ ID NO: 513591 - RNA, 22 nt, Human
uggugccaucuuccagcagaau

SEQ ID NO: 513592 - RNA, 21 nt, Human
uguacugcuccuuucacagca

SEQ ID NO: 513593 - RNA, 18 nt, Human
ugucacagauaucaaucu

SEQ ID NO: 513594 - RNA, 23 nt, Human
uguuaaccaggagagugaccacu

SEQ ID NO: 513595 - RNA, 23 nt, Human
uucaccaccccccuccccgaccc

SEQ ID NO: 513596 - RNA, 24 nt, Human
uucuggaugcuucauguaaaugga

SEQ ID NO: 513597 - RNA, 21 nt, Human
uugaaaauacucacuucaggu

SEQ ID NO: 513598 - RNA, 22 nt, Human
uuguacugcuccuuucacagca

SEQ ID NO: 513599 - RNA, 18 nt, Human
uuucccaaucuuucuuug

SEQ ID NO: 513600 - RNA, 23 nt, Human
uuucuaagccgauauaguaaaca

SEQ ID NO: 513601 - RNA, 23 nt, Human
uuuuaaggugcaucuaucaugcu

SEQ ID NO: 513602 - RNA, 18 nt, Human
uuuucaccaccccccucc

SEQ ID NO: 513603 - RNA, 19 nt, Human
uuuucuguuaaccaggaga

SEQ ID NO: 513604 - RNA, 25 nt, Human
aagccuuggacacggcggccagccu

SEQ ID NO: 513605 - RNA, 24 nt, Human
cagccucugcuccacacgggcgcc

SEQ ID NO: 513606 - RNA, 24 nt, Human
uuuuuuuuuuuuuuuugggcuuuu

SEQ ID NO: 513607 - RNA, 24 nt, Human
uuuuuuuuuuuuuuuuuuuuuggg

SEQ ID NO: 513608 - RNA, 19 nt, Human
aagagccagauaacggcca

SEQ ID NO: 513609 - RNA, 20 nt, Human
agcaaugacauaguugguaa

SEQ ID NO: 513610 - RNA, 18 nt, Human
aggccucuggaucccagc

SEQ ID NO: 513611 - RNA, 21 nt, Human
aucccagcgggcaccuuccag

SEQ ID NO: 513612 - RNA, 21 nt, Human
cagcuccuugggcugagacuc

SEQ ID NO: 513613 - RNA, 24 nt, Human
ccagggcacagaugagggccacac

SEQ ID NO: 513614 - RNA, 22 nt, Human
ccccagcccuucugucugaguc

SEQ ID NO: 513615 - RNA, 18 nt, Human
ccucuggaucccagcggg

SEQ ID NO: 513616 - RNA, 18 nt, Human
cugauggguggggaucuc

SEQ ID NO: 513617 - RNA, 18 nt, Human
cuggaaggccucuggauc

SEQ ID NO: 513618 - RNA, 18 nt, Human
cugguccugggccuugcg

SEQ ID NO: 513619 - RNA, 20 nt, Human
cuuagaaaauucagcuuuaa

SEQ ID NO: 513620 - RNA, 20 nt, Human
gccacaccacgcuuuaucca

SEQ ID NO: 513621 - RNA, 18 nt, Human
gcuggggcugaugggugg

SEQ ID NO: 513622 - RNA, 22 nt, Human
guccugguccugggccuugcgg

SEQ ID NO: 513623 - RNA, 18 nt, Human
gugucgcuggggcugaug

SEQ ID NO: 513624 - RNA, 19 nt, Human
gugucgcuggggcugaugg

SEQ ID NO: 513625 - RNA, 20 nt, Human
guguuccagcacgagucagu

SEQ ID NO: 513626 - RNA, 18 nt, Human
guuccagcacgagucagu

SEQ ID NO: 513627 - RNA, 19 nt, Human
uauccagugucgcuggggc

SEQ ID NO: 513628 - RNA, 24 nt, Human
ucgcuggggcugauggguggggau

SEQ ID NO: 513629 - RNA, 22 nt, Human
ucuccacagcaaugacauaguu

SEQ ID NO: 513630 - RNA, 22 nt, Human
ugacauaguugguagagugucc

SEQ ID NO: 513631 - RNA, 20 nt, Human
uggggcacagguaaaagucc

SEQ ID NO: 513632 - RNA, 24 nt, Human
uggugccucaaacaucaccuugaa

SEQ ID NO: 513633 - RNA, 21 nt, Human
ugguugauaguguuccagcac

SEQ ID NO: 513634 - RNA, 18 nt, Human
ugucgcuggggcugaugg

SEQ ID NO: 513635 - RNA, 19 nt, Human
uuaauggccccagcccuuc

SEQ ID NO: 513636 - RNA, 18 nt, Human
uuccaggaauaauccaug

SEQ ID NO: 513637 - RNA, 19 nt, Human
uuccaggaauaauccaugg

SEQ ID NO: 513638 - RNA, 21 nt, Human
aaaaagcaauguaaucaucac

SEQ ID NO: 513639 - RNA, 24 nt, Human
aaaauaagacuuuggaacaggaua

SEQ ID NO: 513640 - RNA, 19 nt, Human
aaacaaagcaggaacacua

SEQ ID NO: 513641 - RNA, 19 nt, Human
aaacagaaaagaaguuauc

SEQ ID NO: 513642 - RNA, 20 nt, Human
aacauggagaaaccccgucu

SEQ ID NO: 513643 - RNA, 21 nt, Human
aacauggagaaaccccgucuc

SEQ ID NO: 513644 - RNA, 21 nt, Human
aaccugauuaaucaucuacag

SEQ ID NO: 513645 - RNA, 18 nt, Human
aagaaagauuaugggcag

SEQ ID NO: 513646 - RNA, 19 nt, Human
aagaaagauuaugggcagc

SEQ ID NO: 513647 - RNA, 18 nt, Human
aagcaauguaaucaucac

SEQ ID NO: 513648 - RNA, 19 nt, Human
aagcacccuaugaagcaga

SEQ ID NO: 513649 - RNA, 18 nt, Human
aagcauuuggcccguuag

SEQ ID NO: 513650 - RNA, 24 nt, Human
aaucacuugaacccaggaggugga

SEQ ID NO: 513651 - RNA, 18 nt, Human
aauuagccaggcauggug

SEQ ID NO: 513652 - RNA, 23 nt, Human
acaaagcaggaacacuauauccu

SEQ ID NO: 513653 - RNA, 18 nt, Human
acacuuuuaaaccuacau

SEQ ID NO: 513654 - RNA, 21 nt, Human
accauucuuccugugguuuuc

SEQ ID NO: 513655 - RNA, 24 nt, Human
acccaggagguggaaguugcagug

SEQ ID NO: 513656 - RNA, 24 nt, Human
accccgucucuacuaaaaauacaa

SEQ ID NO: 513657 - RNA, 24 nt, Human
accuacaugaagcucauucuucac

SEQ ID NO: 513658 - RNA, 28 nt, Human
agaaaagaaguuaucauuaaaaaaauac

SEQ ID NO: 513659 - RNA, 23 nt, Human
agacugcaucaaagaaaucuuca

SEQ ID NO: 513660 - RNA, 23 nt, Human
agauauccucaguuaaacaaaaa

SEQ ID NO: 513661 - RNA, 22 nt, Human
agaucaccugagguugggaguu

SEQ ID NO: 513662 - RNA, 24 nt, Human
agcaauguaaucaucacaaacuaa

SEQ ID NO: 513663 - RNA, 24 nt, Human
agcacuuugggaggccgaggcagg

SEQ ID NO: 513664 - RNA, 23 nt, Human
agccaggcaugguggugcaugcc

SEQ ID NO: 513665 - RNA, 25 nt, Human
agccugcaugaaacuugguauugcc

SEQ ID NO: 513666 - RNA, 26 nt, Human
aggcagaucaccugagguugggaguu

SEQ ID NO: 513667 - RNA, 18 nt, Human
aggcaggagaaucacuug

SEQ ID NO: 513668 - RNA, 23 nt, Human
aggcaggagaaucacuugaaccc

SEQ ID NO: 513669 - RNA, 24 nt, Human
aggcaggagaaucacuugaaccca

SEQ ID NO: 513670 - RNA, 22 nt, Human
aggcaggcagaucaccugaggg

SEQ ID NO: 513671 - RNA, 22 nt, Human
aggcaggcagaucaccugaggu

SEQ ID NO: 513672 - RNA, 26 nt, Human
aggcaggcagaucaccugagguuggg

SEQ ID NO: 513673 - RNA, 24 nt, Human
aggcaugguggugcaugccuguaa

SEQ ID NO: 513674 - RNA, 24 nt, Human
aggugcaguggcucacgccucuaa

SEQ ID NO: 513675 - RNA, 19 nt, Human
agguggaaguugcagugag

SEQ ID NO: 513676 - RNA, 24 nt, Human
agguggaaguugcagugagccaag

SEQ ID NO: 513677 - RNA, 24 nt, Human
aguggcucacgccucuaaucccag

SEQ ID NO: 513678 - RNA, 25 nt, Human
auauauguguauauauguacacaaa

SEQ ID NO: 513679 - RNA, 23 nt, Human
auauguguauauauguacacaaa

SEQ ID NO: 513680 - RNA, 20 nt, Human
aucaccugagguugggaguu

SEQ ID NO: 513681 - RNA, 24 nt, Human
aucacgccauugcccuccagccug

SEQ ID NO: 513682 - RNA, 19 nt, Human
augccauggcaacuccgug

SEQ ID NO: 513683 - RNA, 18 nt, Human
auugcccuccagccuggg

SEQ ID NO: 513684 - RNA, 19 nt, Human
auuuucguguguuuccuuu

SEQ ID NO: 513685 - RNA, 22 nt, Human
caaacaaagaaccauucuguau

SEQ ID NO: 513686 - RNA, 20 nt, Human
caaagaaaucuucaaagcac

SEQ ID NO: 513687 - RNA, 23 nt, Human
caaagaaccauucuguauacuaa

SEQ ID NO: 513688 - RNA, 19 nt, Human
caaaucccuccaguacucc

SEQ ID NO: 513689 - RNA, 24 nt, Human
caacauggagaaaccccgucucua

SEQ ID NO: 513690 - RNA, 19 nt, Human
caaguuuaaaugagguucu

SEQ ID NO: 513691 - RNA, 28 nt, Human
cacaauccaguucauucugaggucaucc

SEQ ID NO: 513692 - RNA, 24 nt, Human
cacgccucuaaucccagcacuuug

SEQ ID NO: 513693 - RNA, 24 nt, Human
cagaucaccugagguugggaguuu

SEQ ID NO: 513694 - RNA, 24 nt, Human
cagcacuuugggaggccgaggcag

SEQ ID NO: 513695 - RNA, 25 nt, Human
cagcacuuugggaggccgaggcagg

SEQ ID NO: 513696 - RNA, 24 nt, Human
cagcagcagcaccagcuuucccaa

SEQ ID NO: 513697 - RNA, 24 nt, Human
cagccuuaccaacauggagaaacc

SEQ ID NO: 513698 - RNA, 23 nt, Human
caggccaggugcaguggcucacg

SEQ ID NO: 513699 - RNA, 24 nt, Human
caugccuguaaucccagcuacuug

SEQ ID NO: 513700 - RNA, 19 nt, Human
cauugcccuccagccuggg

SEQ ID NO: 513701 - RNA, 22 nt, Human
cauugcccuccagccugggcaa

SEQ ID NO: 513702 - RNA, 23 nt, Human
cauugcccuccagccugggcaac

SEQ ID NO: 513703 - RNA, 24 nt, Human
cauugcccuccagccugggcaaca

SEQ ID NO: 513704 - RNA, 23 nt, Human
ccaagaaagauuaugggcagccc

SEQ ID NO: 513705 - RNA, 21 nt, Human
ccauugcccuccagccugggc

SEQ ID NO: 513706 - RNA, 23 nt, Human
ccauugcccuccagccugggcaa

SEQ ID NO: 513707 - RNA, 24 nt, Human
ccauugcccuccagccugggcaac

SEQ ID NO: 513708 - RNA, 18 nt, Human
ccccgacgcccgccccuc

SEQ ID NO: 513709 - RNA, 22 nt, Human
cccuccaguacuccugugaagu

SEQ ID NO: 513710 - RNA, 22 nt, Human
ccucuaaucccagcacuuuggg

SEQ ID NO: 513711 - RNA, 18 nt, Human
ccuguaaucccagcuacu

SEQ ID NO: 513712 - RNA, 21 nt, Human
ccuguaaucccagcuacuugg

SEQ ID NO: 513713 - RNA, 22 nt, Human
ccuguaaucccagcuacuuggg

SEQ ID NO: 513714 - RNA, 18 nt, Human
ccuuugaaaagcagcuua

SEQ ID NO: 513715 - RNA, 20 nt, Human
cgaggcaggcagaucaccug

SEQ ID NO: 513716 - RNA, 24 nt, Human
cgccauugcccuccagccugggca

SEQ ID NO: 513717 - RNA, 23 nt, Human
cgccucuaaucccagcacuuugg

SEQ ID NO: 513718 - RNA, 22 nt, Human
cucacgccucuaaucccagcac

SEQ ID NO: 513719 - RNA, 24 nt, Human
cucacgccucuaaucccagcacuu

SEQ ID NO: 513720 - RNA, 19 nt, Human
cugucggcgggaaucaggc

SEQ ID NO: 513721 - RNA, 20 nt, Human
cuugugaacaccacaaucca

SEQ ID NO: 513722 - RNA, 19 nt, Human
gaaguugcagugagccaag

SEQ ID NO: 513723 - RNA, 26 nt, Human
gacagauuauuucuuauuuaaaacac

SEQ ID NO: 513724 - RNA, 19 nt, Human
gaccauucuuccugugguu

SEQ ID NO: 513725 - RNA, 21 nt, Human
gagaaaccccgucucuacuaa

SEQ ID NO: 513726 - RNA, 23 nt, Human
gagaaucacuugaacccaggagg

SEQ ID NO: 513727 - RNA, 19 nt, Human
gagagagguggggaagagg

SEQ ID NO: 513728 - RNA, 24 nt, Human
gaucaccugagguugggaguuuga

SEQ ID NO: 513729 - RNA, 24 nt, Human
gaugagagagguggggaagaggga

SEQ ID NO: 513730 - RNA, 21 nt, Human
gcagaucaccugagguuggga

SEQ ID NO: 513731 - RNA, 22 nt, Human
gcaggagaaucacuugaaccca

SEQ ID NO: 513732 - RNA, 22 nt, Human
gccauugcccuccagccugggc

SEQ ID NO: 513733 - RNA, 20 nt, Human
gccuguaaucccagcuacuu

SEQ ID NO: 513734 - RNA, 20 nt, Human
ggaaguugcagugagccaag

SEQ ID NO: 513735 - RNA, 24 nt, Human
ggaaguugcagugagccaagauca

SEQ ID NO: 513736 - RNA, 19 nt, Human
ggacaaggccuguccggua

SEQ ID NO: 513737 - RNA, 24 nt, Human
ggcagcagcagcaccagcuuuccc

SEQ ID NO: 513738 - RNA, 22 nt, Human
ggcucagaauacacuuuuaaac

SEQ ID NO: 513739 - RNA, 24 nt, Human
gguggugcaugccuguaaucccag

SEQ ID NO: 513740 - RNA, 19 nt, Human
gguugggaguuugagauca

SEQ ID NO: 513741 - RNA, 20 nt, Human
uaaaaauacaaaauuagcca

SEQ ID NO: 513742 - RNA, 22 nt, Human
uaaaaauacaaaauuagccagg

SEQ ID NO: 513743 - RNA, 23 nt, Human
uaaaaauacaaaauuagccaggc

SEQ ID NO: 513744 - RNA, 22 nt, Human
uaaaauaguauaccccgaagga

SEQ ID NO: 513745 - RNA, 18 nt, Human
uaaacaaagcaggaacac

SEQ ID NO: 513746 - RNA, 25 nt, Human
uaaacagaaaagaaguuaucauuaa

SEQ ID NO: 513747 - RNA, 23 nt, Human
uaaacuacuggacaacaaaaagc

SEQ ID NO: 513748 - RNA, 26 nt, Human
uaagacuuuggaacaggauagaaaug

SEQ ID NO: 513749 - RNA, 23 nt, Human
uaaucaucuacaggcucagaaua

SEQ ID NO: 513750 - RNA, 21 nt, Human
uaccuuugaaaagcagcuuau

SEQ ID NO: 513751 - RNA, 28 nt, Human
uagcuugcaaaucccuccaguacuccuu

SEQ ID NO: 513752 - RNA, 18 nt, Human
uaguauaccccgaaggaa

SEQ ID NO: 513753 - RNA, 31 nt, Human
uagugcaaaauauauauguguauauauguaa

SEQ ID NO: 513754 - RNA, 19 nt, Human
uauaaaauaagacuuugga

SEQ ID NO: 513755 - RNA, 20 nt, Human
uauaaauaaguuuucauuuu

SEQ ID NO: 513756 - RNA, 18 nt, Human
uauauacaagaacugugu

SEQ ID NO: 513757 - RNA, 21 nt, Human
uauauacaagaacugugugca

SEQ ID NO: 513758 - RNA, 22 nt, Human
uauauauguguauauauguaca

SEQ ID NO: 513759 - RNA, 19 nt, Human
uauauguguauauauguac

SEQ ID NO: 513760 - RNA, 22 nt, Human
uauauguguauauauguacaca

SEQ ID NO: 513761 - RNA, 23 nt, Human
ucaaguaucagcaauauuagucc

SEQ ID NO: 513762 - RNA, 20 nt, Human
ucaaguuuaaaugagguucu

SEQ ID NO: 513763 - RNA, 18 nt, Human
ucaccugagguugggagu

SEQ ID NO: 513764 - RNA, 23 nt, Human
ucacgccauugcccuccagccug

SEQ ID NO: 513765 - RNA, 19 nt, Human
ucaggcagcagcagcacca

SEQ ID NO: 513766 - RNA, 21 nt, Human
ucaguggguuaugucuagccu

SEQ ID NO: 513767 - RNA, 23 nt, Human
ucccuccaguacuccugugaagu

SEQ ID NO: 513768 - RNA, 23 nt, Human
ucguguguuuccuuuuugacugu

SEQ ID NO: 513769 - RNA, 21 nt, Human
ucuacaggcucagaauacacu

SEQ ID NO: 513770 - RNA, 20 nt, Human
ucucuacuaaaaauacaaaa

SEQ ID NO: 513771 - RNA, 22 nt, Human
ugaaagaaaaaaauaaggaaaa

SEQ ID NO: 513772 - RNA, 21 nt, Human
ugaagcagacacuagauaucc

SEQ ID NO: 513773 - RNA, 24 nt, Human
ugagaucagccuuaccaacaugga

SEQ ID NO: 513774 - RNA, 23 nt, Human
ugagcaggaaguuuuggaaggca

SEQ ID NO: 513775 - RNA, 20 nt, Human
ugaggcaggagaaucacuug

SEQ ID NO: 513776 - RNA, 24 nt, Human
ugaggcaggagaaucacuugaacc

SEQ ID NO: 513777 - RNA, 25 nt, Human
ugaggcaggagaaucacuugaaccc

SEQ ID NO: 513778 - RNA, 20 nt, Human
ugcaucaaagaaaucuucaa

SEQ ID NO: 513779 - RNA, 25 nt, Human
ugccauggcaacuccgugacuaaga

SEQ ID NO: 513780 - RNA, 19 nt, Human
ugcccuccagccugggcaa

SEQ ID NO: 513781 - RNA, 24 nt, Human
ugccuguaaucccagcuacuuggg

SEQ ID NO: 513782 - RNA, 22 nt, Human
uggaagcauuuggcccguuagc

SEQ ID NO: 513783 - RNA, 21 nt, Human
uggcucacgccucuaauccca

SEQ ID NO: 513784 - RNA, 24 nt, Human
uggcucacgccucuaaucccagca

SEQ ID NO: 513785 - RNA, 20 nt, Human
ugggaggccgaggcaggcag

SEQ ID NO: 513786 - RNA, 24 nt, Human
ugggaggccgaggcaggcagauca

SEQ ID NO: 513787 - RNA, 21 nt, Human
uggugcaugccuguaauccca

SEQ ID NO: 513788 - RNA, 22 nt, Human
uggugcaugccuguaaucccag

SEQ ID NO: 513789 - RNA, 24 nt, Human
ugguggugcaugccuguaauccca

SEQ ID NO: 513790 - RNA, 25 nt, Human
uguguagugcaaaauauauaugugu

SEQ ID NO: 513791 - RNA, 18 nt, Human
uguguauauauguacaca

SEQ ID NO: 513792 - RNA, 24 nt, Human
uuaaaagcaaauaguaguagaucc

SEQ ID NO: 513793 - RNA, 21 nt, Human
uucaaagcacccuaugaagca

SEQ ID NO: 513794 - RNA, 20 nt, Human
uugcagugagccaagaucac

SEQ ID NO: 513795 - RNA, 20 nt, Human
uugcuugcuucacuuuuucc

SEQ ID NO: 513796 - RNA, 25 nt, Human
uugggaggccgaggcaggcagauca

SEQ ID NO: 513797 - RNA, 20 nt, Human
uugggaguuugagaucagcc

SEQ ID NO: 513798 - RNA, 20 nt, Human
uuuauuuauauacuaagaga

SEQ ID NO: 513799 - RNA, 20 nt, Human
uuucuacuacaugccauggc

SEQ ID NO: 513800 - RNA, 25 nt, Human
uuucuugugaacaccacaauccagu

SEQ ID NO: 513801 - RNA, 18 nt, Human
uuuuuggucuagaugaga

SEQ ID NO: 513802 - RNA, 18 nt, Human
accccgggacuccucgca

SEQ ID NO: 513803 - RNA, 22 nt, Human
accuggagcacagaccccauga

SEQ ID NO: 513804 - RNA, 23 nt, Human
agauauggucccagccucccccg

SEQ ID NO: 513805 - RNA, 23 nt, Human
agguucccuccugaguccacccc

SEQ ID NO: 513806 - RNA, 22 nt, Human
agguucccuccugaguccaccu

SEQ ID NO: 513807 - RNA, 21 nt, Human
caccauguuggcccgucuggu

SEQ ID NO: 513808 - RNA, 23 nt, Human
caccauguuggcccgucugguuu

SEQ ID NO: 513809 - RNA, 23 nt, Human
cacccagaccuggagcacagacc

SEQ ID NO: 513810 - RNA, 22 nt, Human
cagagauauggucccagccucc

SEQ ID NO: 513811 - RNA, 24 nt, Human
cagcagacggggccaugggccucu

SEQ ID NO: 513812 - RNA, 22 nt, Human
cagccguggcccuugggcucgu

SEQ ID NO: 513813 - RNA, 23 nt, Human
cagccuugaucccccaaacuggg

SEQ ID NO: 513814 - RNA, 21 nt, Human
caugggccucugguggggcac

SEQ ID NO: 513815 - RNA, 23 nt, Human
ccacauugcucccacggugcaca

SEQ ID NO: 513816 - RNA, 20 nt, Human
cccacggugcacacuccagc

SEQ ID NO: 513817 - RNA, 21 nt, Human
ccccacaccccgggacuccuc

SEQ ID NO: 513818 - RNA, 19 nt, Human
ccgcagccuuggggccagg

SEQ ID NO: 513819 - RNA, 22 nt, Human
ccgcagccuuggggccagguuc

SEQ ID NO: 513820 - RNA, 25 nt, Human
ccggugcgaugacacacuguccccc

SEQ ID NO: 513821 - RNA, 21 nt, Human
ccucugaaguggccgcagccu

SEQ ID NO: 513822 - RNA, 22 nt, Human
ccucugguggggcacucggcuc

SEQ ID NO: 513823 - RNA, 19 nt, Human
ccugcauguaggugugugg

SEQ ID NO: 513824 - RNA, 21 nt, Human
cucagccuugaucccccaaac

SEQ ID NO: 513825 - RNA, 18 nt, Human
cuccggggggcccuggug

SEQ ID NO: 513826 - RNA, 23 nt, Human
cuccugaguccaccugggccaca

SEQ ID NO: 513827 - RNA, 22 nt, Human
cucugguggggcacucggcucc

SEQ ID NO: 513828 - RNA, 23 nt, Human
gacuccucgcagacggggacacc

SEQ ID NO: 513829 - RNA, 18 nt, Human
gcccuugggcucgugagg

SEQ ID NO: 513830 - RNA, 19 nt, Human
ggccaugggccucuggugg

SEQ ID NO: 513831 - RNA, 22 nt, Human
ggcccuugggcucgugaggcug

SEQ ID NO: 513832 - RNA, 22 nt, Human
ggcgaucacccagaccuggagc

SEQ ID NO: 513833 - RNA, 21 nt, Human
guggcccuugggcucgugagg

SEQ ID NO: 513834 - RNA, 20 nt, Human
ucccagccguggcccuuggg

SEQ ID NO: 513835 - RNA, 21 nt, Human
ucccagccguggcccuugggc

SEQ ID NO: 513836 - RNA, 21 nt, Human
ugaccuaggugaucugcccac

SEQ ID NO: 513837 - RNA, 20 nt, Human
ugccguagucccagccgugg

SEQ ID NO: 513838 - RNA, 23 nt, Human
ugggccacauugcucccacggug

SEQ ID NO: 513839 - RNA, 22 nt, Human
ugguuugaaacucuugaccuag

SEQ ID NO: 513840 - RNA, 24 nt, Human
ugguuugaaacucuugaccuaggu

SEQ ID NO: 513841 - RNA, 18 nt, Human
uguagguguguggggggg

SEQ ID NO: 513842 - RNA, 20 nt, Human
uguaggugugugggggggcc

SEQ ID NO: 513843 - RNA, 20 nt, Human
ugucccccggcucaggcugu

SEQ ID NO: 513844 - RNA, 19 nt, Human
ugugggggggccucagcag

SEQ ID NO: 513845 - RNA, 18 nt, Human
uugaucccccaaacuggg

SEQ ID NO: 513846 - RNA, 18 nt, Human
uuggggccagguucccuc

SEQ ID NO: 513847 - RNA, 23 nt, Human
aaaaaauuuaaacuauaaagagu

SEQ ID NO: 513848 - RNA, 20 nt, Human
aaaaacgccacauugaacga

SEQ ID NO: 513849 - RNA, 25 nt, Human
aaaacgccacauugaacgaggcaau

SEQ ID NO: 513850 - RNA, 26 nt, Human
aaaagaaagaucucagccaaaaagaa

SEQ ID NO: 513851 - RNA, 23 nt, Human
aagaaagaucucagccaaaaaga

SEQ ID NO: 513852 - RNA, 23 nt, Human
aaguaaaagaaagaucucagccc

SEQ ID NO: 513853 - RNA, 19 nt, Human
agacaagauguggcacaug

SEQ ID NO: 513854 - RNA, 20 nt, Human
agccaaaaagaagguaccag

SEQ ID NO: 513855 - RNA, 30 nt, Human
aguaaaagaaagaucucagccaaaaagaaa

SEQ ID NO: 513856 - RNA, 21 nt, Human
aguuuuuuuuguuuucuuucc

SEQ ID NO: 513857 - RNA, 24 nt, Human
aucacaaguaaaagaaagaucuca

SEQ ID NO: 513858 - RNA, 18 nt, Human
auuaucuagcuacaugac

SEQ ID NO: 513859 - RNA, 21 nt, Human
caauuaccauaauuaucuagc

SEQ ID NO: 513860 - RNA, 23 nt, Human
cacuuuacugagacaaagacaau

SEQ ID NO: 513861 - RNA, 19 nt, Human
cgaaacugguagcauccuc

SEQ ID NO: 513862 - RNA, 26 nt, Human
cugagacaaagacaauggccauuuau

SEQ ID NO: 513863 - RNA, 20 nt, Human
gaacagguuugauuuaaaau

SEQ ID NO: 513864 - RNA, 18 nt, Human
guaagacaagauguggca

SEQ ID NO: 513865 - RNA, 21 nt, Human
uaaaauguauuaugccaagaa

SEQ ID NO: 513866 - RNA, 21 nt, Human
uaagacaagauguggcacaug

SEQ ID NO: 513867 - RNA, 24 nt, Human
uagaaaauaaguaaacuagagaaa

SEQ ID NO: 513868 - RNA, 23 nt, Human
uaugccaagaaacaagcauagaa

SEQ ID NO: 513869 - RNA, 22 nt, Human
ucacaaguaaaagaaagaucuc

SEQ ID NO: 513870 - RNA, 21 nt, Human
ugagacaaagacaauggccau

SEQ ID NO: 513871 - RNA, 24 nt, Human
ugccaagaaacaagcauagaaaua

SEQ ID NO: 513872 - RNA, 20 nt, Human
uggcuuuuauguguaagaca

SEQ ID NO: 513873 - RNA, 24 nt, Human
uggcuuuuauguguaagacaagau

SEQ ID NO: 513874 - RNA, 18 nt, Human
uguaagacaagauguggc

SEQ ID NO: 513875 - RNA, 21 nt, Human
uuaccagguauuuuuugcuua

SEQ ID NO: 513876 - RNA, 23 nt, Human
uuaccauaauuaucuagcuacau

SEQ ID NO: 513877 - RNA, 25 nt, Human
uuuguuuucuuuccuuuuguuuuuu

SEQ ID NO: 513878 - RNA, 20 nt, Human
uuuuuuuuuuucugaaggau

SEQ ID NO: 513879 - RNA, 22 nt, Human
uuuuuuuuuuuuuuucugaagg

SEQ ID NO: 513880 - RNA, 27 nt, Human
uuuuuuuuuuuuuuuuuuuuucugggg

SEQ ID NO: 513881 - RNA, 19 nt, Human
aaaaaaaaaaaaaaagaca

SEQ ID NO: 513882 - RNA, 24 nt, Human
aaaaaaaaaaaaaaagacagccag

SEQ ID NO: 513883 - RNA, 24 nt, Human
aaaaaagcacacacauaaacugcg

SEQ ID NO: 513884 - RNA, 24 nt, Human
aaaaguccugggugugaaccagga

SEQ ID NO: 513885 - RNA, 24 nt, Human
aaacaggaaaagagauccuucuag

SEQ ID NO: 513886 - RNA, 21 nt, Human
aaagggguggguuuuuguuuu

SEQ ID NO: 513887 - RNA, 19 nt, Human
aaaguccugggugugaacc

SEQ ID NO: 513888 - RNA, 20 nt, Human
aacagagugaaacuuggucu

SEQ ID NO: 513889 - RNA, 19 nt, Human
aacauaaugaaaccccauc

SEQ ID NO: 513890 - RNA, 21 nt, Human
aacauaaugaaaccccaucuc

SEQ ID NO: 513891 - RNA, 21 nt, Human
aacauaaugaaaccccaucuc

SEQ ID NO: 513892 - RNA, 28 nt, Human
aaccccgaagcccuccugaagacgcccc

SEQ ID NO: 513893 - RNA, 21 nt, Human
aagacuccauuccucccacgg

SEQ ID NO: 513894 - RNA, 23 nt, Human
aagguggguggaucaccugaggu

SEQ ID NO: 513895 - RNA, 23 nt, Human
aauugcuugaacccgggaggcgg

SEQ ID NO: 513896 - RNA, 21 nt, Human
acacagacacagccacaaaag

SEQ ID NO: 513897 - RNA, 21 nt, Human
acacagccacaaaaguccagc

SEQ ID NO: 513898 - RNA, 21 nt, Human
acacugaacaucagucaaagg

SEQ ID NO: 513899 - RNA, 23 nt, Human
acagcgcgggcacagcaggcacc

SEQ ID NO: 513900 - RNA, 22 nt, Human
acaguaucuuaguuuuugacug

SEQ ID NO: 513901 - RNA, 19 nt, Human
accaaagacuccauuccuc

SEQ ID NO: 513902 - RNA, 23 nt, Human
accaacagaagaacacauagcaa

SEQ ID NO: 513903 - RNA, 19 nt, Human
acccacaggccacaaagug

SEQ ID NO: 513904 - RNA, 24 nt, Human
accccaucucuacuaaaaauacaa

SEQ ID NO: 513905 - RNA, 24 nt, Human
acgccacugcacucuaccuugggc

SEQ ID NO: 513906 - RNA, 21 nt, Human
acggggcagccugggcuccuc

SEQ ID NO: 513907 - RNA, 20 nt, Human
acuaccuucuacuucauucc

SEQ ID NO: 513908 - RNA, 18 nt, Human
acugcacucuaccuuggg

SEQ ID NO: 513909 - RNA, 24 nt, Human
acugcacucuaccuugggcaacag

SEQ ID NO: 513910 - RNA, 20 nt, Human
agacaagauacaucucugaa

SEQ ID NO: 513911 - RNA, 26 nt, Human
agacacagacacagccacaaaagucc

SEQ ID NO: 513912 - RNA, 18 nt, Human
agacccccgggccccagc

SEQ ID NO: 513913 - RNA, 19 nt, Human
agagaucacgccacugcac

SEQ ID NO: 513914 - RNA, 22 nt, Human
agagcacccagcacccagaagu

SEQ ID NO: 513915 - RNA, 28 nt, Human
agcaaaaccccgaagcccuccugaagac

SEQ ID NO: 513916 - RNA, 19 nt, Human
agcaaacauuaaaaccauu

SEQ ID NO: 513917 - RNA, 24 nt, Human
agcacuucgggaggccaagguggg

SEQ ID NO: 513918 - RNA, 18 nt, Human
agccaggaacgccguugg

SEQ ID NO: 513919 - RNA, 24 nt, Human
agccggggucucucauacccgcag

SEQ ID NO: 513920 - RNA, 24 nt, Human
agccuggccaacauaaugaaaccc

SEQ ID NO: 513921 - RNA, 23 nt, Human
agcgagcagacagcucaauggga

SEQ ID NO: 513922 - RNA, 21 nt, Human
agcucacgccuguagucccag

SEQ ID NO: 513923 - RNA, 22 nt, Human
agcugcuaaccucggugaggaa

SEQ ID NO: 513924 - RNA, 23 nt, Human
aggaaaagagauccuucuagugu

SEQ ID NO: 513925 - RNA, 19 nt, Human
aggaggcauuaaggaaccc

SEQ ID NO: 513926 - RNA, 21 nt, Human
aggcaaucaaagaaagaaggc

SEQ ID NO: 513927 - RNA, 25 nt, Human
aggcagggugggagccacaaugggu

SEQ ID NO: 513928 - RNA, 21 nt, Human
aggccaagguggguggaucac

SEQ ID NO: 513929 - RNA, 19 nt, Human
aggcggcaguugcaaugag

SEQ ID NO: 513930 - RNA, 18 nt, Human
aggucaucgggugcgugg

SEQ ID NO: 513931 - RNA, 19 nt, Human
agugacugcugaacucuac

SEQ ID NO: 513932 - RNA, 23 nt, Human
aguggcucaugccuguaauccca

SEQ ID NO: 513933 - RNA, 24 nt, Human
aguggcucaugccuguaaucccag

SEQ ID NO: 513934 - RNA, 22 nt, Human
auauaccccgcaaugacaaaau

SEQ ID NO: 513935 - RNA, 23 nt, Human
aucacgccacugcacucuaccuu

SEQ ID NO: 513936 - RNA, 22 nt, Human
aucccagcacuucgggaggcca

SEQ ID NO: 513937 - RNA, 18 nt, Human
auccugcuaggaaggccc

SEQ ID NO: 513938 - RNA, 19 nt, Human
augccuguaaucccagcac

SEQ ID NO: 513939 - RNA, 24 nt, Human
auuagccgggcaugguagcucacg

SEQ ID NO: 513940 - RNA, 20 nt, Human
caaagaaagaaggcaucacc

SEQ ID NO: 513941 - RNA, 20 nt, Human
caaagacuccauuccuccca

SEQ ID NO: 513942 - RNA, 22 nt, Human
caaagcacaaaaaacauuuaca

SEQ ID NO: 513943 - RNA, 21 nt, Human
caaauuugaaacuagcauuca

SEQ ID NO: 513944 - RNA, 20 nt, Human
caacaacguggccccuguuc

SEQ ID NO: 513945 - RNA, 21 nt, Human
caagguggguggaucaccuga

SEQ ID NO: 513946 - RNA, 24 nt, Human
caagguggguggaucaccugaggu

SEQ ID NO: 513947 - RNA, 19 nt, Human
cacaaaaguccagcagcag

SEQ ID NO: 513948 - RNA, 19 nt, Human
cacagacacagccacaaaa

SEQ ID NO: 513949 - RNA, 20 nt, Human
cacccagaaguuucccagau

SEQ ID NO: 513950 - RNA, 21 nt, Human
caccuaagaaauauuuugaau

SEQ ID NO: 513951 - RNA, 22 nt, Human
cacgaccugacaggcugaccga

SEQ ID NO: 513952 - RNA, 23 nt, Human
cacucuaccuugggcaacagagu

SEQ ID NO: 513953 - RNA, 23 nt, Human
cacugcacucuaccuugggcaac

SEQ ID NO: 513954 - RNA, 24 nt, Human
cacugcacucuaccuugggcaaca

SEQ ID NO: 513955 - RNA, 18 nt, Human
cacugggaucguccugga

SEQ ID NO: 513956 - RNA, 21 nt, Human
cagagcacccagcacccagaa

SEQ ID NO: 513957 - RNA, 24 nt, Human
cagcacccagaaguuucccagaug

SEQ ID NO: 513958 - RNA, 24 nt, Human
cagcacuucgggaggccaaggugg

SEQ ID NO: 513959 - RNA, 20 nt, Human
cagcagagcacccagcaccc

SEQ ID NO: 513960 - RNA, 21 nt, Human
cagcagcagagcacccagcac

SEQ ID NO: 513961 - RNA, 19 nt, Human
cagcagcagagcacccagg

SEQ ID NO: 513962 - RNA, 20 nt, Human
cagcccucuuacucuagccc

SEQ ID NO: 513963 - RNA, 19 nt, Human
caggccacaaagugaugga

SEQ ID NO: 513964 - RNA, 23 nt, Human
cauauaccccgcaaugacaaaau

SEQ ID NO: 513965 - RNA, 21 nt, Human
caucgggugcguggggaaucu

SEQ ID NO: 513966 - RNA, 20 nt, Human
caugccuguaaucccagcac

SEQ ID NO: 513967 - RNA, 22 nt, Human
cauuccugaaacucauuggcgc

SEQ ID NO: 513968 - RNA, 20 nt, Human
ccacugcacucuaccuuggg

SEQ ID NO: 513969 - RNA, 21 nt, Human
ccacugcacucuaccuugggc

SEQ ID NO: 513970 - RNA, 22 nt, Human
ccacugcacucuaccuugggca

SEQ ID NO: 513971 - RNA, 23 nt, Human
ccacugcacucuaccuugggcaa

SEQ ID NO: 513972 - RNA, 24 nt, Human
ccacugcacucuaccuugggcaac

SEQ ID NO: 513973 - RNA, 19 nt, Human
ccagcagcagagcacccag

SEQ ID NO: 513974 - RNA, 25 nt, Human
ccauggccgggcgcaguggcucaug

SEQ ID NO: 513975 - RNA, 21 nt, Human
cccacagggcgaucuaauuua

SEQ ID NO: 513976 - RNA, 25 nt, Human
cccagcacccagaaguuucccagau

SEQ ID NO: 513977 - RNA, 22 nt, Human
cccagguacuugggaggcugau

SEQ ID NO: 513978 - RNA, 18 nt, Human
cccccgggccccagcagg

SEQ ID NO: 513979 - RNA, 21 nt, Human
ccccgaagcccuccugaagac

SEQ ID NO: 513980 - RNA, 23 nt, Human
ccccgaagcccuccugaagacgc

SEQ ID NO: 513981 - RNA, 19 nt, Human
ccccgggccccagcaggau

SEQ ID NO: 513982 - RNA, 20 nt, Human
ccccgggccccagcaggauc

SEQ ID NO: 513983 - RNA, 20 nt, Human
ccugaagacgccccuucucc

SEQ ID NO: 513984 - RNA, 24 nt, Human
ccuggccaacauaaugaaacccca

SEQ ID NO: 513985 - RNA, 20 nt, Human
ccuguaaucccagcacuucg

SEQ ID NO: 513986 - RNA, 20 nt, Human
ccuguaaucccagcacuucg

SEQ ID NO: 513987 - RNA, 22 nt, Human
ccuguaaucccagcacuucggg

SEQ ID NO: 513988 - RNA, 21 nt, Human
ccuguagucccagguacuugg

SEQ ID NO: 513989 - RNA, 22 nt, Human
ccuguagucccagguacuuggg

SEQ ID NO: 513990 - RNA, 21 nt, Human
ccugugggcaggagagccagg

SEQ ID NO: 513991 - RNA, 21 nt, Human
cgagaccagccuggccaacau

SEQ ID NO: 513992 - RNA, 22 nt, Human
cgggcacagcaggcacagcggg

SEQ ID NO: 513993 - RNA, 25 nt, Human
cucacgccuguagucccagguacuu

SEQ ID NO: 513994 - RNA, 20 nt, Human
cucagucaagcuaagaguug

SEQ ID NO: 513995 - RNA, 21 nt, Human
cucaugaagcacuuuuauaga

SEQ ID NO: 513996 - RNA, 24 nt, Human
cucaugccuguaaucccagcacuu

SEQ ID NO: 513997 - RNA, 21 nt, Human
cuccaccaacagaagaacaca

SEQ ID NO: 513998 - RNA, 26 nt, Human
cugacaaagacaagauacaucucuga

SEQ ID NO: 513999 - RNA, 23 nt, Human
cugcaaaccccacagggcgaucu

SEQ ID NO: 514000 - RNA, 23 nt, Human
cuggccaacauaaugaaacccca

SEQ ID NO: 514001 - RNA, 21 nt, Human
cuugaacccgggaggcggcag

SEQ ID NO: 514002 - RNA, 22 nt, Human
cuuucuauccugcuaggaaggc

SEQ ID NO: 514003 - RNA, 18 nt, Human
gaacccgggaggcggcag

SEQ ID NO: 514004 - RNA, 20 nt, Human
gaagcacuuuuauagaguga

SEQ ID NO: 514005 - RNA, 19 nt, Human
gaagggccugacaaagaca

SEQ ID NO: 514006 - RNA, 22 nt, Human
gaccagcaaacauuaaaaccaa

SEQ ID NO: 514007 - RNA, 21 nt, Human
gacuagacuacaaugcacaaa

SEQ ID NO: 514008 - RNA, 24 nt, Human
gaucaccugagguaaggaguucga

SEQ ID NO: 514009 - RNA, 20 nt, Human
gcagagaucacgccacugca

SEQ ID NO: 514010 - RNA, 20 nt, Human
gcagcaacuaugggacucac

SEQ ID NO: 514011 - RNA, 24 nt, Human
gcagcagagcacccagcacccaga

SEQ ID NO: 514012 - RNA, 22 nt, Human
gcagcggcgacagcgcgggcac

SEQ ID NO: 514013 - RNA, 24 nt, Human
gcagggagguugaaaucaacuucc

SEQ ID NO: 514014 - RNA, 21 nt, Human
gcaugagaauugcuugaaccc

SEQ ID NO: 514015 - RNA, 22 nt, Human
gcaugagaauugcuugaacccg

SEQ ID NO: 514016 - RNA, 24 nt, Human
gccacugcacucuaccuugggcaa

SEQ ID NO: 514017 - RNA, 19 nt, Human
gcccauuugucugucugac

SEQ ID NO: 514018 - RNA, 23 nt, Human
gccuguagucccagguacuuggg

SEQ ID NO: 514019 - RNA, 18 nt, Human
gcuguguauagagccauc

SEQ ID NO: 514020 - RNA, 22 nt, Human
ggccacagacgguuucauaacc

SEQ ID NO: 514021 - RNA, 19 nt, Human
ggccaugaagaugaagggc

SEQ ID NO: 514022 - RNA, 18 nt, Human
ggcccagugaaggaggca

SEQ ID NO: 514023 - RNA, 19 nt, Human
ggcuugguacaagaucuuu

SEQ ID NO: 514024 - RNA, 24 nt, Human
gggaccaaaggucacggcagaaaa

SEQ ID NO: 514025 - RNA, 23 nt, Human
gggaggccaagguggguggauca

SEQ ID NO: 514026 - RNA, 24 nt, Human
gggcacagcaggcacagcgggcaa

SEQ ID NO: 514027 - RNA, 24 nt, Human
gggcaugguagcucacgccuguag

SEQ ID NO: 514028 - RNA, 24 nt, Human
gggcgcaguggcucaugccuguaa

SEQ ID NO: 514029 - RNA, 19 nt, Human
gguagcagcggcgacagcg

SEQ ID NO: 514030 - RNA, 24 nt, Human
gguagcucacgccuguagucccag

SEQ ID NO: 514031 - RNA, 25 nt, Human
ggugggccaugaagaugaagggccu

SEQ ID NO: 514032 - RNA, 18 nt, Human
gguuuuuguuuuguuuua

SEQ ID NO: 514033 - RNA, 18 nt, Human
uaaaaauaaaagcaaaac

SEQ ID NO: 514034 - RNA, 21 nt, Human
uacgacuagacuacaaugcac

SEQ ID NO: 514035 - RNA, 24 nt, Human
uagaauuucuuguccagucuacag

SEQ ID NO: 514036 - RNA, 21 nt, Human
uagacuacaaugcacaaagca

SEQ ID NO: 514037 - RNA, 22 nt, Human
uagcucacgccuguagucccag

SEQ ID NO: 514038 - RNA, 22 nt, Human
uagcucacgccuguagucccag

SEQ ID NO: 514039 - RNA, 25 nt, Human
uagcucacgccuguagucccaggua

SEQ ID NO: 514040 - RNA, 23 nt, Human
uagggcaaaacuccuaaggaagc

SEQ ID NO: 514041 - RNA, 19 nt, Human
ucagucaagcuaagaguug

SEQ ID NO: 514042 - RNA, 19 nt, Human
ucaugcaaagcacaaaaaa

SEQ ID NO: 514043 - RNA, 22 nt, Human
ucaugccuguaaucccagcacu

SEQ ID NO: 514044 - RNA, 19 nt, Human
uccauauaccccgcaauga

SEQ ID NO: 514045 - RNA, 20 nt, Human
uccauggccgggcgcagugg

SEQ ID NO: 514046 - RNA, 18 nt, Human
uccauuuucugaagacaa

SEQ ID NO: 514047 - RNA, 22 nt, Human
ucccgcguccagcagacgcggu

SEQ ID NO: 514048 - RNA, 19 nt, Human
uccgaggcagggugggagc

SEQ ID NO: 514049 - RNA, 18 nt, Human
uccucgggcagagcuggg

SEQ ID NO: 514050 - RNA, 18 nt, Human
ucgggaaaaaaaaaaaaa

SEQ ID NO: 514051 - RNA, 24 nt, Human
ucucgucucaguggaaccuuacga

SEQ ID NO: 514052 - RNA, 21 nt, Human
ucucuacuaaaaauacaaaaa

SEQ ID NO: 514053 - RNA, 24 nt, Human
ucucucgcugucaugaggccacag

SEQ ID NO: 514054 - RNA, 24 nt, Human
ucugcaaaaaaaugcuauuuacaa

SEQ ID NO: 514055 - RNA, 18 nt, Human
ugaaaaaauaggucaucg

SEQ ID NO: 514056 - RNA, 22 nt, Human
ugaaaaaauaggucaucgggug

SEQ ID NO: 514057 - RNA, 19 nt, Human
ugaaaccccaucucuacua

SEQ ID NO: 514058 - RNA, 19 nt, Human
ugaaccaggacacguaaac

SEQ ID NO: 514059 - RNA, 24 nt, Human
ugacaggcugaccgaauucuuccu

SEQ ID NO: 514060 - RNA, 22 nt, Human
ugagguaaggaguucgagacca

SEQ ID NO: 514061 - RNA, 22 nt, Human
ugagugagccuacagacaauau

SEQ ID NO: 514062 - RNA, 23 nt, Human
ugauaaagacagccagguccaug

SEQ ID NO: 514063 - RNA, 21 nt, Human
ugcaaagaaaaguccugggug

SEQ ID NO: 514064 - RNA, 25 nt, Human
ugcaaagcacaaaaaacauuuacaa

SEQ ID NO: 514065 - RNA, 21 nt, Human
ugccagggcggagccgggguc

SEQ ID NO: 514066 - RNA, 23 nt, Human
ugccuguaaucccagcacuucgg

SEQ ID NO: 514067 - RNA, 25 nt, Human
ugcugaacucuacauaaaccagcac

SEQ ID NO: 514068 - RNA, 24 nt, Human
ugcuucagugaggggaugagaugu

SEQ ID NO: 514069 - RNA, 24 nt, Human
uggaucaccugagguaaggaguuc

SEQ ID NO: 514070 - RNA, 19 nt, Human
uggcagggagguugaaauc

SEQ ID NO: 514071 - RNA, 24 nt, Human
uggccgggcgcaguggcucaugcc

SEQ ID NO: 514072 - RNA, 24 nt, Human
uggcucaugccuguaaucccagca

SEQ ID NO: 514073 - RNA, 18 nt, Human
uggggucaacucacacug

SEQ ID NO: 514074 - RNA, 24 nt, Human
uggggucaacucacacuggaaguu

SEQ ID NO: 514075 - RNA, 24 nt, Human
uggguggaucaccugagguaagga

SEQ ID NO: 514076 - RNA, 24 nt, Human
ugguagcucacgccuguaguccca

SEQ ID NO: 514077 - RNA, 23 nt, Human
ugugggcaggagagccaggaacg

SEQ ID NO: 514078 - RNA, 24 nt, Human
uucauaaccacaaacugagcugcu

SEQ ID NO: 514079 - RNA, 18 nt, Human
uugaagggggccuguggc

SEQ ID NO: 514080 - RNA, 18 nt, Human
uugcuugaacccgggagg

SEQ ID NO: 514081 - RNA, 24 nt, Human
uugcuugaacccgggaggcggcag

SEQ ID NO: 514082 - RNA, 23 nt, Human
uugggaggcugaugcaugagaau

SEQ ID NO: 514083 - RNA, 21 nt, Human
uugugagcuucaaaugguuug

SEQ ID NO: 514084 - RNA, 20 nt, Human
uuguggggaugauaaagaca

SEQ ID NO: 514085 - RNA, 19 nt, Human
uuguuuccauuuucugaag

SEQ ID NO: 514086 - RNA, 18 nt, Human
uuuaaauaacuaccuucu

SEQ ID NO: 514087 - RNA, 22 nt, Human
uuucaaaauguuuguggggaug

SEQ ID NO: 514088 - RNA, 23 nt, Human
uuuccugacucuccauauacccc

SEQ ID NO: 514089 - RNA, 25 nt, Human
aacaaggcacuuccagcugggggcc

SEQ ID NO: 514090 - RNA, 21 nt, Human
aaggggcagggguuucagggg

SEQ ID NO: 514091 - RNA, 20 nt, Human
aaggggcuucugagggagac

SEQ ID NO: 514092 - RNA, 22 nt, Human
aauuugccuuuggccuugaccu

SEQ ID NO: 514093 - RNA, 21 nt, Human
acaucuacagaccugacucac

SEQ ID NO: 514094 - RNA, 18 nt, Human
acaugaacgccccucccc

SEQ ID NO: 514095 - RNA, 19 nt, Human
accccgugcacaucuacag

SEQ ID NO: 514096 - RNA, 18 nt, Human
accccgugcucagcacug

SEQ ID NO: 514097 - RNA, 22 nt, Human
accugaaagugauuacagaaac

SEQ ID NO: 514098 - RNA, 23 nt, Human
acucuggggacaccaacacuggg

SEQ ID NO: 514099 - RNA, 18 nt, Human
agagacagcaauggggga

SEQ ID NO: 514100 - RNA, 23 nt, Human
agcugcccucugccugugcccuc

SEQ ID NO: 514101 - RNA, 18 nt, Human
agcugggggccucggagg

SEQ ID NO: 514102 - RNA, 19 nt, Human
aggacaagggcagugggga

SEQ ID NO: 514103 - RNA, 19 nt, Human
aggccucagcccuggguuu

SEQ ID NO: 514104 - RNA, 23 nt, Human
agggggcucagccucuucauggg

SEQ ID NO: 514105 - RNA, 20 nt, Human
aucgcagugcucugaagauu

SEQ ID NO: 514106 - RNA, 19 nt, Human
augccacagcccccauugu

SEQ ID NO: 514107 - RNA, 22 nt, Human
auguccccaaggccucugacag

SEQ ID NO: 514108 - RNA, 22 nt, Human
cacaucuacagaccugacucac

SEQ ID NO: 514109 - RNA, 20 nt, Human
cacccgaggcccuugugccc

SEQ ID NO: 514110 - RNA, 22 nt, Human
cacgaucccauaucaaggcagg

SEQ ID NO: 514111 - RNA, 23 nt, Human
cacgcacacagagcuucauccac

SEQ ID NO: 514112 - RNA, 21 nt, Human
cacuggguuuuucuccuguuu

SEQ ID NO: 514113 - RNA, 21 nt, Human
cacuugcccuuggcucccacu

SEQ ID NO: 514114 - RNA, 19 nt, Human
cagcccugaccccgugcuc

SEQ ID NO: 514115 - RNA, 22 nt, Human
cagcuucuuaaguccacacacc

SEQ ID NO: 514116 - RNA, 19 nt, Human
caggccccugcgccucugg

SEQ ID NO: 514117 - RNA, 18 nt, Human
caggggcuucccuagcuu

SEQ ID NO: 514118 - RNA, 21 nt, Human
ccagacccacucccagaaucc

SEQ ID NO: 514119 - RNA, 21 nt, Human
ccagccugggagcugcccucu

SEQ ID NO: 514120 - RNA, 20 nt, Human
ccauuguccuaaggccuguc

SEQ ID NO: 514121 - RNA, 18 nt, Human
ccccaaggccucugacag

SEQ ID NO: 514122 - RNA, 21 nt, Human
ccccauuguccuaaggccugg

SEQ ID NO: 514123 - RNA, 22 nt, Human
cccccauuguccuaaggccugu

SEQ ID NO: 514124 - RNA, 20 nt, Human
ccccgugcucagcacugucc

SEQ ID NO: 514125 - RNA, 23 nt, Human
ccccugaacaucgcagugcucug

SEQ ID NO: 514126 - RNA, 20 nt, Human
cccuacugcccugggaugug

SEQ ID NO: 514127 - RNA, 18 nt, Human
cccucaaaccccugcagc

SEQ ID NO: 514128 - RNA, 24 nt, Human
cccuccagcccugaccccgugcuc

SEQ ID NO: 514129 - RNA, 19 nt, Human
ccugaggcccagcacgaac

SEQ ID NO: 514130 - RNA, 22 nt, Human
ccugcagccugaccuauaccau

SEQ ID NO: 514131 - RNA, 23 nt, Human
ccugugcccuccagcccugaccg

SEQ ID NO: 514132 - RNA, 22 nt, Human
cggaggcacaggagagcaggag

SEQ ID NO: 514133 - RNA, 25 nt, Human
cuccagcccugaccccgugcucagc

SEQ ID NO: 514134 - RNA, 19 nt, Human
cucccacugucccaggacc

SEQ ID NO: 514135 - RNA, 24 nt, Human
cucucugccccugggaccucuaac

SEQ ID NO: 514136 - RNA, 24 nt, Human
cugaagauucugauauacaacuga

SEQ ID NO: 514137 - RNA, 19 nt, Human
cugcccucugccugugccc

SEQ ID NO: 514138 - RNA, 19 nt, Human
cugcccucugccugugccc

SEQ ID NO: 514139 - RNA, 21 nt, Human
cuugcccuuggcucccacugu

SEQ ID NO: 514140 - RNA, 19 nt, Human
gaaaggaggggagaagagg

SEQ ID NO: 514141 - RNA, 20 nt, Human
gaaaggaggggagaagaggg

SEQ ID NO: 514142 - RNA, 22 nt, Human
gacacacacaagagacagcaau

SEQ ID NO: 514143 - RNA, 21 nt, Human
gacaccaacacuggguuuuuc

SEQ ID NO: 514144 - RNA, 21 nt, Human
gcacaaggcccugacacaccu

SEQ ID NO: 514145 - RNA, 23 nt, Human
gccugugcccuccagcccugacc

SEQ ID NO: 514146 - RNA, 19 nt, Human
gcugcccucugccugugcc

SEQ ID NO: 514147 - RNA, 18 nt, Human
gggcagaggcaacaaggc

SEQ ID NO: 514148 - RNA, 23 nt, Human
ggggcuucugagggagaccagcu

SEQ ID NO: 514149 - RNA, 19 nt, Human
gucccaggaccugucacuc

SEQ ID NO: 514150 - RNA, 19 nt, Human
gugccagccagccugggag

SEQ ID NO: 514151 - RNA, 25 nt, Human
guugcuaagguacuccucgcacgca

SEQ ID NO: 514152 - RNA, 22 nt, Human
uaaauguccccaaggccucuga

SEQ ID NO: 514153 - RNA, 23 nt, Human
uaaauucacugcaacucuagcac

SEQ ID NO: 514154 - RNA, 20 nt, Human
uacaacugaggcccucaaac

SEQ ID NO: 514155 - RNA, 23 nt, Human
uacaacugaggcccucaaacccc

SEQ ID NO: 514156 - RNA, 24 nt, Human
uaccauaaaagcuuaagcaugggg

SEQ ID NO: 514157 - RNA, 23 nt, Human
uacuucacuuguuucuuuuuauu

SEQ ID NO: 514158 - RNA, 19 nt, Human
uagcccacagaaacacuaa

SEQ ID NO: 514159 - RNA, 19 nt, Human
uauacaugaacgccccucc

SEQ ID NO: 514160 - RNA, 18 nt, Human
uaucaaggcagguaaccu

SEQ ID NO: 514161 - RNA, 19 nt, Human
ucacucgaggcucugcccu

SEQ ID NO: 514162 - RNA, 22 nt, Human
ucacugcaacucuagcacuugc

SEQ ID NO: 514163 - RNA, 19 nt, Human
ucauaucccccaggccccu

SEQ ID NO: 514164 - RNA, 19 nt, Human
uccacaaacucuggggaca

SEQ ID NO: 514165 - RNA, 24 nt, Human
uccacacaccagaaauccagaccc

SEQ ID NO: 514166 - RNA, 22 nt, Human
uccaggacaagggcagugggga

SEQ ID NO: 514167 - RNA, 21 nt, Human
uccccaaggccucugacagca

SEQ ID NO: 514168 - RNA, 26 nt, Human
uccccaaggccucugacagcaccuau

SEQ ID NO: 514169 - RNA, 25 nt, Human
uccucgcacgcacacagagcuucau

SEQ ID NO: 514170 - RNA, 23 nt, Human
ucuagcacuugcccuuggcuccc

SEQ ID NO: 514171 - RNA, 22 nt, Human
ucucuggccacacccgaggccc

SEQ ID NO: 514172 - RNA, 18 nt, Human
ucuguggaggaaggggcu

SEQ ID NO: 514173 - RNA, 18 nt, Human
ucuuaaguccacacacca

SEQ ID NO: 514174 - RNA, 20 nt, Human
ugaaaggaggggagaagagg

SEQ ID NO: 514175 - RNA, 20 nt, Human
ugaaagugauuacagaaacu

SEQ ID NO: 514176 - RNA, 22 nt, Human
ugaaagugauuacagaaacuga

SEQ ID NO: 514177 - RNA, 22 nt, Human
ugaacgccccucccccaagucu

SEQ ID NO: 514178 - RNA, 21 nt, Human
ugaggcccagcacgaaccuag

SEQ ID NO: 514179 - RNA, 19 nt, Human
ugccagccagccugggagc

SEQ ID NO: 514180 - RNA, 23 nt, Human
ugccccugggaccucuaacacac

SEQ ID NO: 514181 - RNA, 21 nt, Human
ugcccuaaauguccccaaggc

SEQ ID NO: 514182 - RNA, 20 nt, Human
ugcccucugccugugcccuc

SEQ ID NO: 514183 - RNA, 20 nt, Human
ugccuaaaaugcaccuggga

SEQ ID NO: 514184 - RNA, 19 nt, Human
uggcuucaggaugcugggu

SEQ ID NO: 514185 - RNA, 26 nt, Human
ugggaccucuaacacaccugaggcuc

SEQ ID NO: 514186 - RNA, 18 nt, Human
ugggagcugcccucugcc

SEQ ID NO: 514187 - RNA, 21 nt, Human
ugggagggaaaugaagaccuu

SEQ ID NO: 514188 - RNA, 22 nt, Human
uggggugccagccagccuggga

SEQ ID NO: 514189 - RNA, 24 nt, Human
uguccccaaggccucugacagcac

SEQ ID NO: 514190 - RNA, 22 nt, Human
ugugugcacuguuacugcacaa

SEQ ID NO: 514191 - RNA, 19 nt, Human
uuacugcacaaggcccuga

SEQ ID NO: 514192 - RNA, 21 nt, Human
uucggugggagggaaaugaag

SEQ ID NO: 514193 - RNA, 20 nt, Human
uugccuuuggccuugaccuu

SEQ ID NO: 514194 - RNA, 20 nt, Human
uugccuuuggccuugaccuu

SEQ ID NO: 514195 - RNA, 22 nt, Human
uuggccuugaccuuccgacagg

SEQ ID NO: 514196 - RNA, 20 nt, Human
uuucagggggcucagccucu

SEQ ID NO: 514197 - RNA, 21 nt, Human
uuucuugggcugcuugucucc

SEQ ID NO: 514198 - RNA, 24 nt, Human
uuuggccuugaccuuccgacaggu

SEQ ID NO: 514199 - RNA, 26 nt, Human
uuuuuuuuuuuuuuacuucacuuggu

SEQ ID NO: 514200 - RNA, 26 nt, Human
accacaccaucccagugccuagccca

SEQ ID NO: 514201 - RNA, 19 nt, Human
agagcaauccuggacagga

SEQ ID NO: 514202 - RNA, 24 nt, Human
aguguguaccaguuguacaagaaa

SEQ ID NO: 514203 - RNA, 18 nt, Human
caggagaaaaaaacacgu

SEQ ID NO: 514204 - RNA, 22 nt, Human
ccagccucuguuugacacucaa

SEQ ID NO: 514205 - RNA, 19 nt, Human
ccucuguuugacacucaau

SEQ ID NO: 514206 - RNA, 21 nt, Human
ccucuguuugacacucaauuu

SEQ ID NO: 514207 - RNA, 21 nt, Human
ccuuuaaaauugccaaaauug

SEQ ID NO: 514208 - RNA, 23 nt, Human
cucaggagaaaaaaacacguuaa

SEQ ID NO: 514209 - RNA, 25 nt, Human
cucaggagaaaaaaacacguuaaga

SEQ ID NO: 514210 - RNA, 21 nt, Human
gcccagugccuggaacuuagu

SEQ ID NO: 514211 - RNA, 24 nt, Human
gucauucugaaguacaaucaucuc

SEQ ID NO: 514212 - RNA, 23 nt, Human
uccacggcaggacuggucaguuu

SEQ ID NO: 514213 - RNA, 22 nt, Human
ucucccccagcaaacuccacgg

SEQ ID NO: 514214 - RNA, 22 nt, Human
ugagauaaauugcuauccuuag

SEQ ID NO: 514215 - RNA, 20 nt, Human
uggauuuugggugguauaug

SEQ ID NO: 514216 - RNA, 21 nt, Human
ugggcacauguagauggcagg

SEQ ID NO: 514217 - RNA, 20 nt, Human
ugguauauggguuucagucc

SEQ ID NO: 514218 - RNA, 22 nt, Human
uuaguguucaauagguacuagu

SEQ ID NO: 514219 - RNA, 19 nt, Human
uugguuggccuauucucag

SEQ ID NO: 514220 - RNA, 24 nt, Human
aaagugcugggauuacaggcguga

SEQ ID NO: 514221 - RNA, 22 nt, Human
aagcuugcaaacucuaccccag

SEQ ID NO: 514222 - RNA, 19 nt, Human
aaguagcugggacuacagg

SEQ ID NO: 514223 - RNA, 20 nt, Human
aaguagcugggacuacaggc

SEQ ID NO: 514224 - RNA, 26 nt, Human
aaguagcugggacuacaggcgccugc

SEQ ID NO: 514225 - RNA, 19 nt, Human
aagugcugggauuacaggc

SEQ ID NO: 514226 - RNA, 19 nt, Human
aagugcugggauuacaggc

SEQ ID NO: 514227 - RNA, 18 nt, Human
acgggguuucacuguguu

SEQ ID NO: 514228 - RNA, 19 nt, Human
acgggguuucacuguguua

SEQ ID NO: 514229 - RNA, 20 nt, Human
acgggguuucacuguguuag

SEQ ID NO: 514230 - RNA, 24 nt, Human
acgggguuucacuguguuagccag

SEQ ID NO: 514231 - RNA, 20 nt, Human
acugcaagcuccgccuccca

SEQ ID NO: 514232 - RNA, 22 nt, Human
agacaaaauuuuuaagaaaaca

SEQ ID NO: 514233 - RNA, 20 nt, Human
aggcgccugccaccaugcuu

SEQ ID NO: 514234 - RNA, 18 nt, Human
agugcugggauuacaggc

SEQ ID NO: 514235 - RNA, 24 nt, Human
caaagugcugggauuacaggcgug

SEQ ID NO: 514236 - RNA, 22 nt, Human
cacaccauucuccugccucagc

SEQ ID NO: 514237 - RNA, 24 nt, Human
caccucagccucccaaagugcugg

SEQ ID NO: 514238 - RNA, 23 nt, Human
cacgcccagcugucagacaaaau

SEQ ID NO: 514239 - RNA, 18 nt, Human
cacuguguuagccaggau

SEQ ID NO: 514240 - RNA, 19 nt, Human
cacuguguuagccaggaug

SEQ ID NO: 514241 - RNA, 24 nt, Human
cacuguguuagccaggauggucuu

SEQ ID NO: 514242 - RNA, 20 nt, Human
caggaccgccaucuuccccc

SEQ ID NO: 514243 - RNA, 26 nt, Human
caucuucccccgccgccuucuugcug

SEQ ID NO: 514244 - RNA, 20 nt, Human
ccaaagugcugggauuacag

SEQ ID NO: 514245 - RNA, 22 nt, Human
ccaaagugcugggauuacaggc

SEQ ID NO: 514246 - RNA, 22 nt, Human
ccaaagugcugggauuacaggc

SEQ ID NO: 514247 - RNA, 24 nt, Human
ccaaagugcugggauuacaggcgu

SEQ ID NO: 514248 - RNA, 23 nt, Human
cccaaguagcugggacuacaggc

SEQ ID NO: 514249 - RNA, 23 nt, Human
cccaaguagcugggacuacaggc

SEQ ID NO: 514250 - RNA, 20 nt, Human
cccagguucacaccauucuc

SEQ ID NO: 514251 - RNA, 22 nt, Human
ccccaggaccgccaucuucccc

SEQ ID NO: 514252 - RNA, 26 nt, Human
ccgcccaccucagccucccaaagugc

SEQ ID NO: 514253 - RNA, 23 nt, Human
ccugccucagccucccaaguagc

SEQ ID NO: 514254 - RNA, 22 nt, Human
ccuucuugcugguuuuucuucc

SEQ ID NO: 514255 - RNA, 21 nt, Human
cgcccagcugucagacaaaau

SEQ ID NO: 514256 - RNA, 19 nt, Human
cgccucccagguucacacc

SEQ ID NO: 514257 - RNA, 22 nt, Human
cgcucugucgcccaggcuggag

SEQ ID NO: 514258 - RNA, 24 nt, Human
cgggguuucacuguguuagccagg

SEQ ID NO: 514259 - RNA, 24 nt, Human
cucagccucccaaguagcugggac

SEQ ID NO: 514260 - RNA, 25 nt, Human
cuccugccucagccucccaaguagc

SEQ ID NO: 514261 - RNA, 24 nt, Human
cucgcucugucgcccaggcuggag

SEQ ID NO: 514262 - RNA, 24 nt, Human
cugcaagcuccgccucccagguuc

SEQ ID NO: 514263 - RNA, 23 nt, Human
cugccucagccucccaaguagcu

SEQ ID NO: 514264 - RNA, 25 nt, Human
cuugcaaacucuaccccaggaccgc

SEQ ID NO: 514265 - RNA, 22 nt, Human
cuugcugguuuuucuuccgcgc

SEQ ID NO: 514266 - RNA, 24 nt, Human
gacuacaggcgccugccaccaugc

SEQ ID NO: 514267 - RNA, 22 nt, Human
gcaagcuccgccucccagguuc

SEQ ID NO: 514268 - RNA, 25 nt, Human
gccucccagguucacaccauucucc

SEQ ID NO: 514269 - RNA, 25 nt, Human
gcucugucgcccaggcuggagcaca

SEQ ID NO: 514270 - RNA, 23 nt, Human
gggguuucacuguguuagccagg

SEQ ID NO: 514271 - RNA, 24 nt, Human
gugagccgcccaccucagccuccc

SEQ ID NO: 514272 - RNA, 23 nt, Human
guggagacgggguuucacugugu

SEQ ID NO: 514273 - RNA, 27 nt, Human
uaauuuuuuuguauuuuuuaguggaga

SEQ ID NO: 514274 - RNA, 20 nt, Human
uaguggagacgggguuucac

SEQ ID NO: 514275 - RNA, 22 nt, Human
uaguggagacgggguuucacug

SEQ ID NO: 514276 - RNA, 24 nt, Human
uaguggagacgggguuucacugug

SEQ ID NO: 514277 - RNA, 21 nt, Human
ucacaccauucuccugccuca

SEQ ID NO: 514278 - RNA, 18 nt, Human
ucacugcaagcuccgccu

SEQ ID NO: 514279 - RNA, 19 nt, Human
ucacugcaagcuccgccuc

SEQ ID NO: 514280 - RNA, 19 nt, Human
ucacugcaagcuccgccuc

SEQ ID NO: 514281 - RNA, 24 nt, Human
ucacugcaagcuccgccucccagg

SEQ ID NO: 514282 - RNA, 24 nt, Human
ucacuguguuagccaggauggucu

SEQ ID NO: 514283 - RNA, 18 nt, Human
ucagccucccaaagugcu

SEQ ID NO: 514284 - RNA, 20 nt, Human
ucagccucccaaguagcugg

SEQ ID NO: 514285 - RNA, 24 nt, Human
ucccaaagugcugggauuacaggc

SEQ ID NO: 514286 - RNA, 24 nt, Human
ucccaaguagcugggacuacaggc

SEQ ID NO: 514287 - RNA, 21 nt, Human
ucccagguucacaccauucuc

SEQ ID NO: 514288 - RNA, 24 nt, Human
ucccagguucacaccauucuccug

SEQ ID NO: 514289 - RNA, 21 nt, Human
ucgcccaggcuggagcacagu

SEQ ID NO: 514290 - RNA, 19 nt, Human
ucucgcucugucgcccagg

SEQ ID NO: 514291 - RNA, 23 nt, Human
ucucgcucugucgcccaggcugg

SEQ ID NO: 514292 - RNA, 24 nt, Human
ucucgcucugucgcccaggcugga

SEQ ID NO: 514293 - RNA, 25 nt, Human
ucucgcucugucgcccaggcuggag

SEQ ID NO: 514294 - RNA, 18 nt, Human
ucugucgcccaggcugga

SEQ ID NO: 514295 - RNA, 22 nt, Human
ugaacuacacuguaacuuuaau

SEQ ID NO: 514296 - RNA, 21 nt, Human
ugaauaaaugaacuacacugu

SEQ ID NO: 514297 - RNA, 22 nt, Human
ugagacggagucucgcucuguc

SEQ ID NO: 514298 - RNA, 21 nt, Human
ugcaaacucuaccccaggacc

SEQ ID NO: 514299 - RNA, 24 nt, Human
ugccucagccucccaaguagcugg

SEQ ID NO: 514300 - RNA, 23 nt, Human
ugcugggauuacaggcgugagca

SEQ ID NO: 514301 - RNA, 21 nt, Human
ugggacuacaggcgccugcca

SEQ ID NO: 514302 - RNA, 22 nt, Human
ugggacuacaggcgccugccac

SEQ ID NO: 514303 - RNA, 24 nt, Human
ugggacuacaggcgccugccacca

SEQ ID NO: 514304 - RNA, 25 nt, Human
ugggacuacaggcgccugccaccau

SEQ ID NO: 514305 - RNA, 18 nt, Human
ugggauuacaggcgugag

SEQ ID NO: 514306 - RNA, 19 nt, Human
ugggauuacaggcgugagc

SEQ ID NO: 514307 - RNA, 24 nt, Human
ugggauuacaggcgugagcaacca

SEQ ID NO: 514308 - RNA, 18 nt, Human
uuaguggagacgggguuu

SEQ ID NO: 514309 - RNA, 21 nt, Human
uuaguggagacgggguuucac

SEQ ID NO: 514310 - RNA, 21 nt, Human
uuaguggagacgggguuucac

SEQ ID NO: 514311 - RNA, 24 nt, Human
uuaguggagacgggguuucacugu

SEQ ID NO: 514312 - RNA, 21 nt, Human
uucacuguguuagccaggaug

SEQ ID NO: 514313 - RNA, 19 nt, Human
uuucacuguguuagccagg

SEQ ID NO: 514314 - RNA, 24 nt, Human
uuuuuaguggagacgggguuucac

SEQ ID NO: 514315 - RNA, 22 nt, Human
uuuuuguauuuuuuaguggaga

SEQ ID NO: 514316 - RNA, 23 nt, Human
uuuuuuaguggagacgggguuuc

SEQ ID NO: 514317 - RNA, 22 nt, Human
uuuuuuguauuuuuuaguggag

SEQ ID NO: 514318 - RNA, 25 nt, Human
uuuuuuguauuuuuuaguggagacg

SEQ ID NO: 514319 - RNA, 22 nt, Human
aaaaaacccaaaagucugagaa

SEQ ID NO: 514320 - RNA, 21 nt, Human
aaaaauauagugaguugacaa

SEQ ID NO: 514321 - RNA, 22 nt, Human
aaaagucugagaaugccaagug

SEQ ID NO: 514322 - RNA, 26 nt, Human
aaacaaaaagacaaugcagaaaagaa

SEQ ID NO: 514323 - RNA, 21 nt, Human
aaacaucuuaaaacaaaaaga

SEQ ID NO: 514324 - RNA, 23 nt, Human
aaaccaaaaacauaacugaguaa

SEQ ID NO: 514325 - RNA, 27 nt, Human
aaaccaaaaacauaacugaguaauaau

SEQ ID NO: 514326 - RNA, 19 nt, Human
aaagacaaugcagaaaaga

SEQ ID NO: 514327 - RNA, 25 nt, Human
aacaaaaagacaaugcagaaaagaa

SEQ ID NO: 514328 - RNA, 18 nt, Human
aaccaaaaacauaacuga

SEQ ID NO: 514329 - RNA, 18 nt, Human
aaccccauacuaccucca

SEQ ID NO: 514330 - RNA, 19 nt, Human
aagacaaugcagaaaagaa

SEQ ID NO: 514331 - RNA, 22 nt, Human
acaagcaaagggcaaacaucuu

SEQ ID NO: 514332 - RNA, 20 nt, Human
acacacacaaaguucuccca

SEQ ID NO: 514333 - RNA, 23 nt, Human
accuacacaccucuacacacaca

SEQ ID NO: 514334 - RNA, 18 nt, Human
acucagggcugugugcgg

SEQ ID NO: 514335 - RNA, 18 nt, Human
acugaccagggugaccac

SEQ ID NO: 514336 - RNA, 20 nt, Human
agccagagcaacuccaggcu

SEQ ID NO: 514337 - RNA, 21 nt, Human
aggcagaaagggacgcuuuga

SEQ ID NO: 514338 - RNA, 18 nt, Human
aggcaggugaaauauccc

SEQ ID NO: 514339 - RNA, 19 nt, Human
aggucuuugguuccuggau

SEQ ID NO: 514340 - RNA, 26 nt, Human
auaacacacacacacauacacaccgc

SEQ ID NO: 514341 - RNA, 23 nt, Human
auaggccaaaaaaaacccaaaag

SEQ ID NO: 514342 - RNA, 24 nt, Human
aucacacuuauuagagucaaagau

SEQ ID NO: 514343 - RNA, 27 nt, Human
augccacccacaccuacacaccucuac

SEQ ID NO: 514344 - RNA, 22 nt, Human
caauaaagauugggucaauuca

SEQ ID NO: 514345 - RNA, 23 nt, Human
cacacacacacauacacaccgcu

SEQ ID NO: 514346 - RNA, 19 nt, Human
cacacaugccacccacacc

SEQ ID NO: 514347 - RNA, 21 nt, Human
cacacuuauuagagucaaaga

SEQ ID NO: 514348 - RNA, 18 nt, Human
cacccacaccuacacacc

SEQ ID NO: 514349 - RNA, 19 nt, Human
cacccacaccuacacaccu

SEQ ID NO: 514350 - RNA, 23 nt, Human
cagcagagaaaagauugaucaca

SEQ ID NO: 514351 - RNA, 23 nt, Human
cagcuaaagaaaauaugacacau

SEQ ID NO: 514352 - RNA, 19 nt, Human
caggcgggcacacaugcca

SEQ ID NO: 514353 - RNA, 20 nt, Human
caucaggauggaugcucauu

SEQ ID NO: 514354 - RNA, 19 nt, Human
caugccacccacaccuaca

SEQ ID NO: 514355 - RNA, 20 nt, Human
caugccacccacaccuacac

SEQ ID NO: 514356 - RNA, 19 nt, Human
ccaaguguuggugaaggug

SEQ ID NO: 514357 - RNA, 19 nt, Human
ccacccacaccuacacacc

SEQ ID NO: 514358 - RNA, 20 nt, Human
ccagcuaaagaaaauaugac

SEQ ID NO: 514359 - RNA, 20 nt, Human
ccauacccuuugccccagaa

SEQ ID NO: 514360 - RNA, 22 nt, Human
cccauacccuuugccccagaaa

SEQ ID NO: 514361 - RNA, 20 nt, Human
ccccagaaaucccguacgga

SEQ ID NO: 514362 - RNA, 23 nt, Human
ccccauacuaccuccaccauccc

SEQ ID NO: 514363 - RNA, 24 nt, Human
ccuacacaccucuacacacacaca

SEQ ID NO: 514364 - RNA, 26 nt, Human
ccuacacaccucuacacacacacaaa

SEQ ID NO: 514365 - RNA, 21 nt, Human
ccucacucugugucuccugga

SEQ ID NO: 514366 - RNA, 19 nt, Human
cucacucugugucuccugg

SEQ ID NO: 514367 - RNA, 20 nt, Human
cuccaaccucauccucccuc

SEQ ID NO: 514368 - RNA, 21 nt, Human
cuccuaaauaggccaaaaaaa

SEQ ID NO: 514369 - RNA, 22 nt, Human
gaaaauuuaaagucuauaaaga

SEQ ID NO: 514370 - RNA, 22 nt, Human
gagaaauguaaauugacaccac

SEQ ID NO: 514371 - RNA, 25 nt, Human
gcaggcgggcacacaugccacccac

SEQ ID NO: 514372 - RNA, 22 nt, Human
gcauaugcacgugcaucacaca

SEQ ID NO: 514373 - RNA, 22 nt, Human
gggcacacaugccacccacacc

SEQ ID NO: 514374 - RNA, 18 nt, Human
gucuuugguuccuggauc

SEQ ID NO: 514375 - RNA, 18 nt, Human
gugacauccuugugcccc

SEQ ID NO: 514376 - RNA, 19 nt, Human
uaaaacaaaaagacaaugc

SEQ ID NO: 514377 - RNA, 25 nt, Human
uaaaacaaaaagacaaugcagaaaa

SEQ ID NO: 514378 - RNA, 19 nt, Human
uaaauaggccaaaaaaaac

SEQ ID NO: 514379 - RNA, 23 nt, Human
uacacacacacaaaguucuccca

SEQ ID NO: 514380 - RNA, 26 nt, Human
uacacaccucuacacacacacaaagu

SEQ ID NO: 514381 - RNA, 19 nt, Human
uacccuuugccccagaaau

SEQ ID NO: 514382 - RNA, 22 nt, Human
uacugaaugcccauacccuuug

SEQ ID NO: 514383 - RNA, 21 nt, Human
ucagccagagcaacuccaggc

SEQ ID NO: 514384 - RNA, 18 nt, Human
uccaacaaauuaacaagc

SEQ ID NO: 514385 - RNA, 19 nt, Human
uccaccaucccaggcaggu

SEQ ID NO: 514386 - RNA, 24 nt, Human
uccaccaucccaggcaggugaaau

SEQ ID NO: 514387 - RNA, 22 nt, Human
ucccaggcaggugaaauauccc

SEQ ID NO: 514388 - RNA, 26 nt, Human
ucccugggaguggacugaccagggug

SEQ ID NO: 514389 - RNA, 24 nt, Human
uccuaaauaggccaaaaaaaaccc

SEQ ID NO: 514390 - RNA, 18 nt, Human
ucugagaaugccaagugu

SEQ ID NO: 514391 - RNA, 21 nt, Human
ucugagaaugccaaguguugg

SEQ ID NO: 514392 - RNA, 29 nt, Human
ucuguaauugaugaaaaauuggagcuacu

SEQ ID NO: 514393 - RNA, 18 nt, Human
ugaaauaucccgugacau

SEQ ID NO: 514394 - RNA, 21 nt, Human
ugaaauaucccgugacauccu

SEQ ID NO: 514395 - RNA, 22 nt, Human
ugaaauaucccgugacauccuu

SEQ ID NO: 514396 - RNA, 22 nt, Human
ugaauaacacacacacacauac

SEQ ID NO: 514397 - RNA, 25 nt, Human
ugaauaacacacacacacauacaca

SEQ ID NO: 514398 - RNA, 24 nt, Human
ugaccacacuuucauuuuuuaauu

SEQ ID NO: 514399 - RNA, 20 nt, Human
ugacucagggcugugugcgg

SEQ ID NO: 514400 - RNA, 20 nt, Human
ugaguugacaaagcaugacc

SEQ ID NO: 514401 - RNA, 22 nt, Human
ugcaugcaggcgggcacacaug

SEQ ID NO: 514402 - RNA, 18 nt, Human
uggcuucuggcuuuuccc

SEQ ID NO: 514403 - RNA, 18 nt, Human
uggcuucuggcuuuuccc

SEQ ID NO: 514404 - RNA, 21 nt, Human
ugggagaaauguaaauugaca

SEQ ID NO: 514405 - RNA, 21 nt, Human
ugguuccuggaucuccaaccu

SEQ ID NO: 514406 - RNA, 22 nt, Human
ugguuccuggaucuccaaccuc

SEQ ID NO: 514407 - RNA, 24 nt, Human
uguccucaagaugagugagcccaa

SEQ ID NO: 514408 - RNA, 19 nt, Human
uguuggugaagguguagaa

SEQ ID NO: 514409 - RNA, 23 nt, Human
uucauuuuuuaauuugcauguag

SEQ ID NO: 514410 - RNA, 23 nt, Human
uugccccagaaaucccguacgga

SEQ ID NO: 514411 - RNA, 22 nt, Human
uuuuuacugagcauguauuacu

SEQ ID NO: 514412 - RNA, 18 nt, Human
aaaggcuuuuaucuugag

SEQ ID NO: 514413 - RNA, 22 nt, Human
aaauccucagcaguauuaauuu

SEQ ID NO: 514414 - RNA, 21 nt, Human
aacaaagacagacccugucuc

SEQ ID NO: 514415 - RNA, 19 nt, Human
aaucaguuugguuccagaa

SEQ ID NO: 514416 - RNA, 18 nt, Human
acaccacuguacuccagc

SEQ ID NO: 514417 - RNA, 22 nt, Human
acaccacuguacuccagccugg

SEQ ID NO: 514418 - RNA, 22 nt, Human
acagccccagaaaagcccccag

SEQ ID NO: 514419 - RNA, 19 nt, Human
accacuguacuccagccug

SEQ ID NO: 514420 - RNA, 23 nt, Human
accacuguacuccagccugggua

SEQ ID NO: 514421 - RNA, 24 nt, Human
accacuguacuccagccuggguaa

SEQ ID NO: 514422 - RNA, 18 nt, Human
acuguacuccagccuggg

SEQ ID NO: 514423 - RNA, 23 nt, Human
acuguacuccagccuggguaaca

SEQ ID NO: 514424 - RNA, 19 nt, Human
agaggaggcugaggcaaga

SEQ ID NO: 514425 - RNA, 21 nt, Human
agccccagaaaagcccccagg

SEQ ID NO: 514426 - RNA, 25 nt, Human
aggaguuggaggcugcacugagcuu

SEQ ID NO: 514427 - RNA, 23 nt, Human
aggcaagaguauugagcccagga

SEQ ID NO: 514428 - RNA, 20 nt, Human
aggcugaggcaagaguauug

SEQ ID NO: 514429 - RNA, 18 nt, Human
agggugucaaauugagaa

SEQ ID NO: 514430 - RNA, 19 nt, Human
aguuggaggcugcacugag

SEQ ID NO: 514431 - RNA, 24 nt, Human
augacaccacuguacuccagccug

SEQ ID NO: 514432 - RNA, 22 nt, Human
caccacaaacacugggaagccu

SEQ ID NO: 514433 - RNA, 20 nt, Human
caccaccacaaacacuggga

SEQ ID NO: 514434 - RNA, 24 nt, Human
caccaccacaaacacugggaagcc

SEQ ID NO: 514435 - RNA, 19 nt, Human
cacuguacuccagccuggg

SEQ ID NO: 514436 - RNA, 19 nt, Human
cacuguacuccagccuggg

SEQ ID NO: 514437 - RNA, 21 nt, Human
cacuguacuccagccugggua

SEQ ID NO: 514438 - RNA, 22 nt, Human
cacuguacuccagccuggguaa

SEQ ID NO: 514439 - RNA, 23 nt, Human
cacuguacuccagccuggguaac

SEQ ID NO: 514440 - RNA, 24 nt, Human
cacuguacuccagccuggguaaca

SEQ ID NO: 514441 - RNA, 19 nt, Human
cagaaaagcccccagguga

SEQ ID NO: 514442 - RNA, 18 nt, Human
cagaagccuuuggggucg

SEQ ID NO: 514443 - RNA, 19 nt, Human
cagaagccuuuggggucgu

SEQ ID NO: 514444 - RNA, 24 nt, Human
caguugacagccccagaaaagccc

SEQ ID NO: 514445 - RNA, 20 nt, Human
ccacuguacuccagccuggg

SEQ ID NO: 514446 - RNA, 20 nt, Human
ccacuguacuccagccuggg

SEQ ID NO: 514447 - RNA, 20 nt, Human
ccacuguacuccagccuggg

SEQ ID NO: 514448 - RNA, 21 nt, Human
ccacuguacuccagccugggu

SEQ ID NO: 514449 - RNA, 22 nt, Human
ccacuguacuccagccugggua

SEQ ID NO: 514450 - RNA, 24 nt, Human
ccacuguacuccagccuggguaac

SEQ ID NO: 514451 - RNA, 21 nt, Human
ccaggcagauccaccaccaca

SEQ ID NO: 514452 - RNA, 24 nt, Human
gccuggguaacaaagacagacccu

SEQ ID NO: 514453 - RNA, 20 nt, Human
ggaggcugcacugagcuuug

SEQ ID NO: 514454 - RNA, 21 nt, Human
guguuccaguugacagcccca

SEQ ID NO: 514455 - RNA, 22 nt, Human
uaacaaagacagacccugucuc

SEQ ID NO: 514456 - RNA, 24 nt, Human
uaacaaagacagacccugucucuu

SEQ ID NO: 514457 - RNA, 27 nt, Human
uaacaaagacagacccugucucuuaau

SEQ ID NO: 514458 - RNA, 22 nt, Human
uacuccagccuggguaacaaag

SEQ ID NO: 514459 - RNA, 23 nt, Human
uagggugucaaauugagaaccag

SEQ ID NO: 514460 - RNA, 20 nt, Human
ugacaccacuguacuccagc

SEQ ID NO: 514461 - RNA, 22 nt, Human
ugacaccacuguacuccagccu

SEQ ID NO: 514462 - RNA, 21 nt, Human
ugacagccccagaaaagcccc

SEQ ID NO: 514463 - RNA, 23 nt, Human
ugaggaaacccaggccacaugga

SEQ ID NO: 514464 - RNA, 21 nt, Human
ugaggcaagaguauugagccc

SEQ ID NO: 514465 - RNA, 20 nt, Human
uggagaaauccugcgguguu

SEQ ID NO: 514466 - RNA, 24 nt, Human
ugucuguaguugcagcuacucagg

SEQ ID NO: 514467 - RNA, 22 nt, Human
uucauguugacuugauaccuac

SEQ ID NO: 514468 - RNA, 22 nt, Human
uuccaguugacagccccagaaa

SEQ ID NO: 514469 - RNA, 21 nt, Human
uugacagccccagaaaagccc

SEQ ID NO: 514470 - RNA, 18 nt, Human
uugguuccagaagccuuu

SEQ ID NO: 514471 - RNA, 20 nt, Human
uugguuccagaagccuuugg

SEQ ID NO: 514472 - RNA, 20 nt, Human
uuuuucuuuuucgaacuugg

SEQ ID NO: 514473 - RNA, 19 nt, Human
uuuuuuuucaucuccacaa

SEQ ID NO: 514474 - RNA, 24 nt, Human
aaacaaaaauccagucucauuagc

SEQ ID NO: 514475 - RNA, 21 nt, Human
aaagcacauccaaagcuaggc

SEQ ID NO: 514476 - RNA, 24 nt, Human
aaaugaucagugaaaacauaaaac

SEQ ID NO: 514477 - RNA, 23 nt, Human
aacacggaauggaaaucaugauc

SEQ ID NO: 514478 - RNA, 24 nt, Human
aaccaacuccuuuccuagcccgcg

SEQ ID NO: 514479 - RNA, 22 nt, Human
aacuggccccacuccuccccug

SEQ ID NO: 514480 - RNA, 20 nt, Human
aagaaagaggaaccucacau

SEQ ID NO: 514481 - RNA, 21 nt, Human
acaaagacauugucaucaaga

SEQ ID NO: 514482 - RNA, 21 nt, Human
acauaaaacauccaugaucug

SEQ ID NO: 514483 - RNA, 22 nt, Human
acuggaccgcaaagaagaaccc

SEQ ID NO: 514484 - RNA, 24 nt, Human
agacgcagcccacggccagcgcca

SEQ ID NO: 514485 - RNA, 25 nt, Human
agagaagaugaaucgguuggcaugg

SEQ ID NO: 514486 - RNA, 20 nt, Human
agagaccaggauguugggug

SEQ ID NO: 514487 - RNA, 18 nt, Human
agagcaggagacugagaa

SEQ ID NO: 514488 - RNA, 20 nt, Human
agccugggccacgugaaccu

SEQ ID NO: 514489 - RNA, 19 nt, Human
agcgagcuccagagagagc

SEQ ID NO: 514490 - RNA, 20 nt, Human
agcgcagcgccgagccuggc

SEQ ID NO: 514491 - RNA, 22 nt, Human
aggcucagaacgaacaaaaauc

SEQ ID NO: 514492 - RNA, 20 nt, Human
agugggcaaggaagaacugc

SEQ ID NO: 514493 - RNA, 25 nt, Human
auccacuuccugcaaugacucuggu

SEQ ID NO: 514494 - RNA, 22 nt, Human
auggcagaaagcacauccaaag

SEQ ID NO: 514495 - RNA, 21 nt, Human
auguagcuuuggaccaacugg

SEQ ID NO: 514496 - RNA, 22 nt, Human
auuguaacacggaauggaaauc

SEQ ID NO: 514497 - RNA, 24 nt, Human
caaagaagaaccccacugccacgc

SEQ ID NO: 514498 - RNA, 23 nt, Human
cacugagcugaaagaaagaggaa

SEQ ID NO: 514499 - RNA, 23 nt, Human
cacugccacgcggcgccagcgcc

SEQ ID NO: 514500 - RNA, 18 nt, Human
cagaggcuccccagcccc

SEQ ID NO: 514501 - RNA, 25 nt, Human
cagccagccuauaaccuauggagcc

SEQ ID NO: 514502 - RNA, 19 nt, Human
cagcgccgagccuggcagg

SEQ ID NO: 514503 - RNA, 23 nt, Human
ccaacaggcuggaauguaccuga

SEQ ID NO: 514504 - RNA, 23 nt, Human
ccacuuccugcaaugacucuggu

SEQ ID NO: 514505 - RNA, 24 nt, Human
ccaggauguugggugagugggcgu

SEQ ID NO: 514506 - RNA, 23 nt, Human
cccacggccagcgccaggaagcc

SEQ ID NO: 514507 - RNA, 18 nt, Human
cccaugggcacugagcug

SEQ ID NO: 514508 - RNA, 23 nt, Human
ccccagacacagcgagcuccaga

SEQ ID NO: 514509 - RNA, 22 nt, Human
cccucagaggcuccccagcccc

SEQ ID NO: 514510 - RNA, 20 nt, Human
ccuauggagccaggacagga

SEQ ID NO: 514511 - RNA, 22 nt, Human
ccucagaggcuccccagccccu

SEQ ID NO: 514512 - RNA, 21 nt, Human
ccuggcagcucuggcuccagc

SEQ ID NO: 514513 - RNA, 21 nt, Human
ccuucagcucaugacgccacc

SEQ ID NO: 514514 - RNA, 22 nt, Human
ccuuccucagaaaaauuacccc

SEQ ID NO: 514515 - RNA, 23 nt, Human
ccuugcccaugggcacugagcug

SEQ ID NO: 514516 - RNA, 21 nt, Human
cuaaaaugagguggaacucau

SEQ ID NO: 514517 - RNA, 24 nt, Human
cucagaacgaacaaaaaucagucu

SEQ ID NO: 514518 - RNA, 21 nt, Human
cucauccacuuccugcaauga

SEQ ID NO: 514519 - RNA, 21 nt, Human
cuccagcaggaagacgcagcc

SEQ ID NO: 514520 - RNA, 19 nt, Human
cucuguccuaaauuugaga

SEQ ID NO: 514521 - RNA, 22 nt, Human
cugaaagaaagaggaaccucac

SEQ ID NO: 514522 - RNA, 24 nt, Human
cugcagaaugaaagagucccucag

SEQ ID NO: 514523 - RNA, 23 nt, Human
cugcuuuucuccagcugacaugc

SEQ ID NO: 514524 - RNA, 24 nt, Human
cuggaauguaccugauacaauuua

SEQ ID NO: 514525 - RNA, 23 nt, Human
cuguaauucuuaaguuggcuagu

SEQ ID NO: 514526 - RNA, 18 nt, Human
cugucuuccaaaccacuu

SEQ ID NO: 514527 - RNA, 21 nt, Human
gacacacaacauaaaaaacaa

SEQ ID NO: 514528 - RNA, 20 nt, Human
gaccaggauguugggugagu

SEQ ID NO: 514529 - RNA, 22 nt, Human
gagcuuuuaacuggccccacuc

SEQ ID NO: 514530 - RNA, 19 nt, Human
gccacgcggcgccagcgcc

SEQ ID NO: 514531 - RNA, 22 nt, Human
gccagcgccggacuggccgcac

SEQ ID NO: 514532 - RNA, 21 nt, Human
gccccacuccuccccugcuug

SEQ ID NO: 514533 - RNA, 22 nt, Human
gccgcgccacagcgccaugggg

SEQ ID NO: 514534 - RNA, 18 nt, Human
gccugggccacgugaacc

SEQ ID NO: 514535 - RNA, 19 nt, Human
gccugggccacgugaaccu

SEQ ID NO: 514536 - RNA, 25 nt, Human
gcgagcuccagagagaggggaacgc

SEQ ID NO: 514537 - RNA, 19 nt, Human
gcgggccccagacacagcg

SEQ ID NO: 514538 - RNA, 22 nt, Human
ggcagaaagcacauccaaagcu

SEQ ID NO: 514539 - RNA, 21 nt, Human
ggcuaguucuccuuccucaga

SEQ ID NO: 514540 - RNA, 21 nt, Human
ggcucggcgcgcgccgauguc

SEQ ID NO: 514541 - RNA, 18 nt, Human
gggagggauuguuuuguc

SEQ ID NO: 514542 - RNA, 22 nt, Human
gggccccagacacagcgagcuc

SEQ ID NO: 514543 - RNA, 23 nt, Human
gggccccagacacagcgagcucc

SEQ ID NO: 514544 - RNA, 19 nt, Human
uaacacacacaggagcaua

SEQ ID NO: 514545 - RNA, 19 nt, Human
uaacaugacaaauuuacug

SEQ ID NO: 514546 - RNA, 19 nt, Human
ucaagugggcaaggaagaa

SEQ ID NO: 514547 - RNA, 19 nt, Human
ucagaacgaacaaaaauca

SEQ ID NO: 514548 - RNA, 25 nt, Human
uccaaaccacuuucuuccuguaauu

SEQ ID NO: 514549 - RNA, 22 nt, Human
ugaaccuuucaccagccagccu

SEQ ID NO: 514550 - RNA, 20 nt, Human
ugaagaaguuuagcuuaaaa

SEQ ID NO: 514551 - RNA, 20 nt, Human
ugaaucgguuggcaugggga

SEQ ID NO: 514552 - RNA, 21 nt, Human
ugagagaagaugaaucgguug

SEQ ID NO: 514553 - RNA, 23 nt, Human
ugaguuuuuagcucugugacaca

SEQ ID NO: 514554 - RNA, 21 nt, Human
ugcacuucucaagugggcaag

SEQ ID NO: 514555 - RNA, 22 nt, Human
ugcagaaugaaagagucccuca

SEQ ID NO: 514556 - RNA, 21 nt, Human
uggagccaggacaggaaagcu

SEQ ID NO: 514557 - RNA, 20 nt, Human
uggcagaaagcacauccaaa

SEQ ID NO: 514558 - RNA, 22 nt, Human
uggcagaaagcacauccaaagc

SEQ ID NO: 514559 - RNA, 18 nt, Human
ugggaacugaguuuuuag

SEQ ID NO: 514560 - RNA, 21 nt, Human
uuccaaaccacuuucuuccug

SEQ ID NO: 514561 - RNA, 24 nt, Human
uuccaguuguaaaaaacaaauucc

SEQ ID NO: 514562 - RNA, 22 nt, Human
uuccuagagaccaggauguugg

SEQ ID NO: 514563 - RNA, 20 nt, Human
uuccucagaaaaauuacccc

SEQ ID NO: 514564 - RNA, 18 nt, Human
uucuuuggcugucuucca

SEQ ID NO: 514565 - RNA, 22 nt, Human
uuggcuaguucuccuuccucag

SEQ ID NO: 514566 - RNA, 23 nt, Human
uuuaacuggccccacuccucccc

SEQ ID NO: 514567 - RNA, 25 nt, Human
aggcuaaaaaagaauuugugacuga

SEQ ID NO: 514568 - RNA, 22 nt, Human
gagugaauuuuuucuuggggac

SEQ ID NO: 514569 - RNA, 22 nt, Human
uaaaaaaccauauauauugugg

SEQ ID NO: 514570 - RNA, 21 nt, Human
uaaaugauccaacauuuucuu

SEQ ID NO: 514571 - RNA, 23 nt, Human
ugagagaaaauauuuuuucucua

SEQ ID NO: 514572 - RNA, 20 nt, Human
acagcagcgugaccggccgc

SEQ ID NO: 514573 - RNA, 24 nt, Human
accccugcccggccucccccaagc

SEQ ID NO: 514574 - RNA, 22 nt, Human
aggggucccgguggcuccagug

SEQ ID NO: 514575 - RNA, 18 nt, Human
aguggugucucuggggcu

SEQ ID NO: 514576 - RNA, 22 nt, Human
caacggggagcccgccaggccc

SEQ ID NO: 514577 - RNA, 21 nt, Human
caagcaucacagcugcgugag

SEQ ID NO: 514578 - RNA, 20 nt, Human
cacaaccacagccaggagca

SEQ ID NO: 514579 - RNA, 18 nt, Human
cacaggccccaggucugg

SEQ ID NO: 514580 - RNA, 20 nt, Human
caccucagcgccucuggcug

SEQ ID NO: 514581 - RNA, 24 nt, Human
cacgcagagcccgccucaccuccc

SEQ ID NO: 514582 - RNA, 19 nt, Human
cacguacagguaccuguug

SEQ ID NO: 514583 - RNA, 24 nt, Human
cacugggccaccguccagggcccc

SEQ ID NO: 514584 - RNA, 20 nt, Human
cagagcccgccucaccuccc

SEQ ID NO: 514585 - RNA, 23 nt, Human
cagcacaccucagcgccucuggc

SEQ ID NO: 514586 - RNA, 22 nt, Human
cagccaggagcagccccugcca

SEQ ID NO: 514587 - RNA, 19 nt, Human
caggaccccugcccggccu

SEQ ID NO: 514588 - RNA, 25 nt, Human
caucuccaccucucccgcucgggaa

SEQ ID NO: 514589 - RNA, 26 nt, Human
ccacugaguugaccacauccucgugc

SEQ ID NO: 514590 - RNA, 22 nt, Human
ccagggccccacaggaccagcc

SEQ ID NO: 514591 - RNA, 20 nt, Human
cccacaggaccagccgaagg

SEQ ID NO: 514592 - RNA, 23 nt, Human
cccacaggccccaggucugggcu

SEQ ID NO: 514593 - RNA, 19 nt, Human
cccaggcggcccacggccg

SEQ ID NO: 514594 - RNA, 18 nt, Human
cccccaguauccugugua

SEQ ID NO: 514595 - RNA, 22 nt, Human
cccccaguauccuguguacccc

SEQ ID NO: 514596 - RNA, 20 nt, Human
ccccgcccugcgcgacccgg

SEQ ID NO: 514597 - RNA, 21 nt, Human
ccccgcccugcgcgacccgga

SEQ ID NO: 514598 - RNA, 24 nt, Human
ccccugcccggccucccccaagcu

SEQ ID NO: 514599 - RNA, 19 nt, Human
cccgcugcgccgcccccgc

SEQ ID NO: 514600 - RNA, 22 nt, Human
cccgcuuccgcugccgcagccg

SEQ ID NO: 514601 - RNA, 22 nt, Human
cccgggcgcacaaccacagcca

SEQ ID NO: 514602 - RNA, 18 nt, Human
cccugcccggccuccccc

SEQ ID NO: 514603 - RNA, 18 nt, Human
ccgacgccacgagccccg

SEQ ID NO: 514604 - RNA, 20 nt, Human
ccgcccgcugcgccgccccc

SEQ ID NO: 514605 - RNA, 22 nt, Human
ccgcucccaagccccgggcgca

SEQ ID NO: 514606 - RNA, 20 nt, Human
ccgcugcgccgcccccgccc

SEQ ID NO: 514607 - RNA, 21 nt, Human
ccgcugcgccgcccccgcccu

SEQ ID NO: 514608 - RNA, 21 nt, Human
ccggacccgcuuccgcugccg

SEQ ID NO: 514609 - RNA, 22 nt, Human
ccgugccgguccuccgccccgc

SEQ ID NO: 514610 - RNA, 23 nt, Human
ccguguaugucuaugacgugguc

SEQ ID NO: 514611 - RNA, 21 nt, Human
ccucaguggugucucuggggc

SEQ ID NO: 514612 - RNA, 20 nt, Human
ccucgugccgcagccuggcc

SEQ ID NO: 514613 - RNA, 21 nt, Human
ccuguggacuugcuugcuguc

SEQ ID NO: 514614 - RNA, 22 nt, Human
cgcccccgcccugcgcgacccg

SEQ ID NO: 514615 - RNA, 18 nt, Human
cgccucaccucccgcaug

SEQ ID NO: 514616 - RNA, 21 nt, Human
cgcucccaagccccgggcgca

SEQ ID NO: 514617 - RNA, 22 nt, Human
cgggaaaaagccacagagccug

SEQ ID NO: 514618 - RNA, 21 nt, Human
cguccagggccccacaggacc

SEQ ID NO: 514619 - RNA, 19 nt, Human
cgugaccggccgcucccaa

SEQ ID NO: 514620 - RNA, 23 nt, Human
cgugccaagcaucacagcugcgu

SEQ ID NO: 514621 - RNA, 20 nt, Human
cguguaugucuaugacgugg

SEQ ID NO: 514622 - RNA, 21 nt, Human
cucaggaccccugcccggccu

SEQ ID NO: 514623 - RNA, 20 nt, Human
cugcgccgcccccgcccugc

SEQ ID NO: 514624 - RNA, 23 nt, Human
gaccacauccucgugccgcagcc

SEQ ID NO: 514625 - RNA, 20 nt, Human
gagcguguggcggggccugg

SEQ ID NO: 514626 - RNA, 18 nt, Human
gauguguccguguauguc

SEQ ID NO: 514627 - RNA, 20 nt, Human
gcagccccugccaccacugg

SEQ ID NO: 514628 - RNA, 18 nt, Human
gcccccgcccugcgcgac

SEQ ID NO: 514629 - RNA, 19 nt, Human
gccgcccccgcccaacggg

SEQ ID NO: 514630 - RNA, 18 nt, Human
gcgccgcccccgcccugc

SEQ ID NO: 514631 - RNA, 21 nt, Human
gcuugugaccccaggggcgag

SEQ ID NO: 514632 - RNA, 20 nt, Human
ggaccgccgcccccgcccaa

SEQ ID NO: 514633 - RNA, 21 nt, Human
ggagccccggcccucacccag

SEQ ID NO: 514634 - RNA, 18 nt, Human
ggaggacgcgcauggugc

SEQ ID NO: 514635 - RNA, 24 nt, Human
ggccgaggccagcugggucaggug

SEQ ID NO: 514636 - RNA, 22 nt, Human
ggcgcacaaccacagccaggag

SEQ ID NO: 514637 - RNA, 26 nt, Human
gggccgaggccagcugggucaggugu

SEQ ID NO: 514638 - RNA, 21 nt, Human
ggucuugaggucgaacaccag

SEQ ID NO: 514639 - RNA, 19 nt, Human
guaccuguugucgggcgac

SEQ ID NO: 514640 - RNA, 22 nt, Human
guggggagcgccaggcuuugau

SEQ ID NO: 514641 - RNA, 18 nt, Human
guggugucucuggggcug

SEQ ID NO: 514642 - RNA, 18 nt, Human
guuguccccuuccuaagg

SEQ ID NO: 514643 - RNA, 18 nt, Human
uauaagcaucuccaccuc

SEQ ID NO: 514644 - RNA, 21 nt, Human
ucccacaggccccaggucugg

SEQ ID NO: 514645 - RNA, 19 nt, Human
ucccugcugacguccagga

SEQ ID NO: 514646 - RNA, 22 nt, Human
ucccugcugacguccaggaaga

SEQ ID NO: 514647 - RNA, 22 nt, Human
uccgugggcacugccugcuccg

SEQ ID NO: 514648 - RNA, 23 nt, Human
ucugcuugaugccucaguggugu

SEQ ID NO: 514649 - RNA, 19 nt, Human
ugacgugguccagcgcguc

SEQ ID NO: 514650 - RNA, 18 nt, Human
ugcaacacacucgggccc

SEQ ID NO: 514651 - RNA, 19 nt, Human
ugcacuggccaccccgugc

SEQ ID NO: 514652 - RNA, 28 nt, Human
ugcccaggaggccgagggggccuugggc

SEQ ID NO: 514653 - RNA, 20 nt, Human
ugccccgggccgaggccagc

SEQ ID NO: 514654 - RNA, 19 nt, Human
ugccgguccuccgccccgc

SEQ ID NO: 514655 - RNA, 19 nt, Human
ugcgaggccgugggcgagg

SEQ ID NO: 514656 - RNA, 23 nt, Human
ugcgaggccgugggcgaggugcc

SEQ ID NO: 514657 - RNA, 23 nt, Human
uggccacgaagucccugcugacg

SEQ ID NO: 514658 - RNA, 21 nt, Human
uggcuccagugcacccagcac

SEQ ID NO: 514659 - RNA, 23 nt, Human
uggugcguggggagcgccaggcu

SEQ ID NO: 514660 - RNA, 19 nt, Human
uguaccccaaguugcccag

SEQ ID NO: 514661 - RNA, 20 nt, Human
ugugagcguguggcggggcc

SEQ ID NO: 514662 - RNA, 18 nt, Human
uguggcaggaucugcuug

SEQ ID NO: 514663 - RNA, 23 nt, Human
caccuucuaagcaaccuuuauuu

SEQ ID NO: 514664 - RNA, 18 nt, Human
cagcccacucccgcccaa

SEQ ID NO: 514665 - RNA, 20 nt, Human
ccaaacccaaaaugcagagg

SEQ ID NO: 514666 - RNA, 23 nt, Human
ccagcccacucccgcccaaaccc

SEQ ID NO: 514667 - RNA, 25 nt, Human
cccaaacccaaaaugcagaggagac

SEQ ID NO: 514668 - RNA, 19 nt, Human
cccagcccacucccgccca

SEQ ID NO: 514669 - RNA, 21 nt, Human
cccagcccacucccgcccaaa

SEQ ID NO: 514670 - RNA, 22 nt, Human
ccccccagcccacucccgccca

SEQ ID NO: 514671 - RNA, 18 nt, Human
ccgcccaaacccaaaaug

SEQ ID NO: 514672 - RNA, 22 nt, Human
cgaggcggacagugucacguuu

SEQ ID NO: 514673 - RNA, 27 nt, Human
cgcccaaacccaaaaugcagaggagac

SEQ ID NO: 514674 - RNA, 24 nt, Human
cuccccccagcccacucccgccca

SEQ ID NO: 514675 - RNA, 24 nt, Human
cuuuauuugcaaacucugagguug

SEQ ID NO: 514676 - RNA, 18 nt, Human
gacuucucucucucucuc

SEQ ID NO: 514677 - RNA, 21 nt, Human
ggacagugucacguuucucuc

SEQ ID NO: 514678 - RNA, 21 nt, Human
gggaggcagcauggcagcagu

SEQ ID NO: 514679 - RNA, 21 nt, Human
gucacguuucucucccuccac

SEQ ID NO: 514680 - RNA, 20 nt, Human
ucagggacccaggcgggggc

SEQ ID NO: 514681 - RNA, 22 nt, Human
ucccgcccaaacccaaaaugca

SEQ ID NO: 514682 - RNA, 20 nt, Human
ucccuccacuuuccccuggc

SEQ ID NO: 514683 - RNA, 24 nt, Human
ugcuccagccucuccccccagccc

SEQ ID NO: 514684 - RNA, 20 nt, Human
ugcucgcuccucuggggcca

SEQ ID NO: 514685 - RNA, 23 nt, Human
uggggaggcagcauggcagcagu

SEQ ID NO: 514686 - RNA, 23 nt, Human
uggggccagccuggggaggcagc

SEQ ID NO: 514687 - RNA, 21 nt, Human
uucuaagcaaccuuuauuugc

SEQ ID NO: 514688 - RNA, 23 nt, Human
uucucucucucucucucccgcca

SEQ ID NO: 514689 - RNA, 22 nt, Human
uuggggugcuccagccucuccc

SEQ ID NO: 514690 - RNA, 22 nt, Human
uuugcaaacucugagguuggac

SEQ ID NO: 514691 - RNA, 18 nt, Human
aaaaaaaaccaaggaaca

SEQ ID NO: 514692 - RNA, 22 nt, Human
aaaaaaaaccaaggaacagaag

SEQ ID NO: 514693 - RNA, 19 nt, Human
aaaaacagaaacacaaacc

SEQ ID NO: 514694 - RNA, 27 nt, Human
aaaacagaaacacaaaccaaaagagaa

SEQ ID NO: 514695 - RNA, 18 nt, Human
aaaacccaaaagauacag

SEQ ID NO: 514696 - RNA, 23 nt, Human
aaaagaaaaaaaaaaaaaccaag

SEQ ID NO: 514697 - RNA, 21 nt, Human
aaaagggacaaggacaauaua

SEQ ID NO: 514698 - RNA, 22 nt, Human
aaacaacuauuucuuucauaaa

SEQ ID NO: 514699 - RNA, 18 nt, Human
aaacagaaaagaaaaaaa

SEQ ID NO: 514700 - RNA, 19 nt, Human
aaacagaaacacaaaccaa

SEQ ID NO: 514701 - RNA, 21 nt, Human
aaacagaaacacaaaccaaaa

SEQ ID NO: 514702 - RNA, 21 nt, Human
aaaccaaggaacagaagccug

SEQ ID NO: 514703 - RNA, 22 nt, Human
aaagaaauguucauauuagaaa

SEQ ID NO: 514704 - RNA, 21 nt, Human
aaaguuuauuuuaaggcuuua

SEQ ID NO: 514705 - RNA, 24 nt, Human
aaauccuuaccaaaacaaaacaaa

SEQ ID NO: 514706 - RNA, 23 nt, Human
aacaagucacacacauacauagu

SEQ ID NO: 514707 - RNA, 24 nt, Human
aacagaaacacaaaccaaaagaga

SEQ ID NO: 514708 - RNA, 21 nt, Human
aaccagaugugucacuuccac

SEQ ID NO: 514709 - RNA, 28 nt, Human
aaccuucugguuuuuaaaacucagagga

SEQ ID NO: 514710 - RNA, 20 nt, Human
aacuaagaaauccuucugaa

SEQ ID NO: 514711 - RNA, 21 nt, Human
aacuucuaccucugaaugcuc

SEQ ID NO: 514712 - RNA, 24 nt, Human
aagaaaaaacaacuauuucuuuca

SEQ ID NO: 514713 - RNA, 18 nt, Human
aagccaaucuuaguucaa

SEQ ID NO: 514714 - RNA, 19 nt, Human
aauucugcauccauacgaa

SEQ ID NO: 514715 - RNA, 24 nt, Human
acaaccuauuuucaacaucacaca

SEQ ID NO: 514716 - RNA, 18 nt, Human
accaaacagaaaagaaaa

SEQ ID NO: 514717 - RNA, 25 nt, Human
accaaacagaaaagaaaaaaaaaaa

SEQ ID NO: 514718 - RNA, 24 nt, Human
accuauuggacauguacggauucu

SEQ ID NO: 514719 - RNA, 22 nt, Human
agaaaaaaaaaaaaaccaagga

SEQ ID NO: 514720 - RNA, 20 nt, Human
agaaaaaugaaacauuuaau

SEQ ID NO: 514721 - RNA, 22 nt, Human
agaaagggcucaagagacaaaa

SEQ ID NO: 514722 - RNA, 18 nt, Human
agaagaaaucaaagaaag

SEQ ID NO: 514723 - RNA, 22 nt, Human
agaagccuggcauaauagagga

SEQ ID NO: 514724 - RNA, 22 nt, Human
agaaucacagaaauaauugccg

SEQ ID NO: 514725 - RNA, 18 nt, Human
agagacaaaacaguaaaa

SEQ ID NO: 514726 - RNA, 19 nt, Human
agagacaaaacaguaaaac

SEQ ID NO: 514727 - RNA, 18 nt, Human
auaaagaaggaagccaua

SEQ ID NO: 514728 - RNA, 19 nt, Human
auacauaaagaaggaagcc

SEQ ID NO: 514729 - RNA, 25 nt, Human
aucauuauuuccagauggggaaaca

SEQ ID NO: 514730 - RNA, 24 nt, Human
augccccaucgauacagaauaaaa

SEQ ID NO: 514731 - RNA, 24 nt, Human
caaaaaugacuauaauaaugccau

SEQ ID NO: 514732 - RNA, 28 nt, Human
caaaacaaaacaaacccagguagguuca

SEQ ID NO: 514733 - RNA, 22 nt, Human
caaaacccaaaagauacagaaa

SEQ ID NO: 514734 - RNA, 23 nt, Human
caaaagauacagaaauauuucac

SEQ ID NO: 514735 - RNA, 23 nt, Human
caaauggccauaauaugucacuc

SEQ ID NO: 514736 - RNA, 20 nt, Human
caagauaaucccaccucuga

SEQ ID NO: 514737 - RNA, 20 nt, Human
caaguaucucugcgguuuua

SEQ ID NO: 514738 - RNA, 18 nt, Human
caccaugaaagacugcua

SEQ ID NO: 514739 - RNA, 21 nt, Human
cacuaaaugcccagauuuuaa

SEQ ID NO: 514740 - RNA, 20 nt, Human
cacuugaaugguaucaaaug

SEQ ID NO: 514741 - RNA, 19 nt, Human
cagaagccuggcauaauag

SEQ ID NO: 514742 - RNA, 20 nt, Human
caguacacuuguacugggac

SEQ ID NO: 514743 - RNA, 23 nt, Human
ccaaacagaaaagaaaaaaaaaa

SEQ ID NO: 514744 - RNA, 19 nt, Human
ccacuccagcuccagagca

SEQ ID NO: 514745 - RNA, 22 nt, Human
cccacuccagcuccagagcaca

SEQ ID NO: 514746 - RNA, 18 nt, Human
cccauguuucagaaauca

SEQ ID NO: 514747 - RNA, 22 nt, Human
cccuuucugauaaucaucauca

SEQ ID NO: 514748 - RNA, 20 nt, Human
ccuguuuauccucuuggucu

SEQ ID NO: 514749 - RNA, 22 nt, Human
cgccagaaggaauuuaacuuag

SEQ ID NO: 514750 - RNA, 25 nt, Human
cuaacauagaaauuagcaacuucua

SEQ ID NO: 514751 - RNA, 22 nt, Human
cucaagagacaaaacaguaaaa

SEQ ID NO: 514752 - RNA, 23 nt, Human
cucaagagacaaaacaguaaaac

SEQ ID NO: 514753 - RNA, 25 nt, Human
cugaaaauacacaaauuauuuucaa

SEQ ID NO: 514754 - RNA, 21 nt, Human
cugaagccaaucuuaguucaa

SEQ ID NO: 514755 - RNA, 24 nt, Human
cugaagccaaucuuaguucaagua

SEQ ID NO: 514756 - RNA, 20 nt, Human
gaaaaacagaaacacaaacc

SEQ ID NO: 514757 - RNA, 21 nt, Human
gaucauuuuugugacuuuaac

SEQ ID NO: 514758 - RNA, 20 nt, Human
gcuuuaggggguuucguggg

SEQ ID NO: 514759 - RNA, 25 nt, Human
ggaaaaacagaaacacaaaccaaaa

SEQ ID NO: 514760 - RNA, 18 nt, Human
ggaagccauacaugguua

SEQ ID NO: 514761 - RNA, 18 nt, Human
gguuuucuuuuuuuauuu

SEQ ID NO: 514762 - RNA, 19 nt, Human
guccuguuuauccucuugg

SEQ ID NO: 514763 - RNA, 20 nt, Human
uaaaaagucuuccaugaaga

SEQ ID NO: 514764 - RNA, 21 nt, Human
uaaaacuccaaauaggaauua

SEQ ID NO: 514765 - RNA, 19 nt, Human
uaaaauagcccauacuuac

SEQ ID NO: 514766 - RNA, 20 nt, Human
uaaauauauacauauguaug

SEQ ID NO: 514767 - RNA, 23 nt, Human
uaaauauauacauauguaugacc

SEQ ID NO: 514768 - RNA, 23 nt, Human
uaaauccuuaccaaaacaaaaca

SEQ ID NO: 514769 - RNA, 25 nt, Human
uaauugccgaggcuccauggcuagu

SEQ ID NO: 514770 - RNA, 18 nt, Human
uacaguacacaaaccugg

SEQ ID NO: 514771 - RNA, 24 nt, Human
uacauagugcuuacuauauguuag

SEQ ID NO: 514772 - RNA, 19 nt, Human
uaccaaaacaaaacaaacc

SEQ ID NO: 514773 - RNA, 19 nt, Human
uaccaaaacaaaacaaacc

SEQ ID NO: 514774 - RNA, 21 nt, Human
uaccaaaacaaaacaaaccca

SEQ ID NO: 514775 - RNA, 23 nt, Human
uagaaaugagaccauaccacuca

SEQ ID NO: 514776 - RNA, 22 nt, Human
uagauagauggauauguauuuu

SEQ ID NO: 514777 - RNA, 18 nt, Human
uauaugccugaaaacaga

SEQ ID NO: 514778 - RNA, 24 nt, Human
uaucagagaaauucaguucuauaa

SEQ ID NO: 514779 - RNA, 20 nt, Human
uaucuugcucaccuauucuc

SEQ ID NO: 514780 - RNA, 19 nt, Human
uaugcauaacaauauauag

SEQ ID NO: 514781 - RNA, 21 nt, Human
uauuagucagguuaaaucaaa

SEQ ID NO: 514782 - RNA, 21 nt, Human
ucaaaacccaaaagauacaga

SEQ ID NO: 514783 - RNA, 18 nt, Human
ucaaaagggacaaggaca

SEQ ID NO: 514784 - RNA, 18 nt, Human
ucaacuuucccuaacucu

SEQ ID NO: 514785 - RNA, 21 nt, Human
ucaauauuucaacugucaaaa

SEQ ID NO: 514786 - RNA, 23 nt, Human
ucacacauuaaaagaacuaagaa

SEQ ID NO: 514787 - RNA, 20 nt, Human
ucacugcaaugcuaugagau

SEQ ID NO: 514788 - RNA, 21 nt, Human
ucacuugaaugguaucaaaug

SEQ ID NO: 514789 - RNA, 23 nt, Human
ucagcacugauaugaaaaauacg

SEQ ID NO: 514790 - RNA, 24 nt, Human
ucauuauuuccagauggggaaaca

SEQ ID NO: 514791 - RNA, 20 nt, Human
uccagauggggaaacagaau

SEQ ID NO: 514792 - RNA, 18 nt, Human
uccagcuccagagcacau

SEQ ID NO: 514793 - RNA, 21 nt, Human
ucucacugcaaugcuaugaga

SEQ ID NO: 514794 - RNA, 22 nt, Human
ucugaaugcucacucaguaaau

SEQ ID NO: 514795 - RNA, 19 nt, Human
ucugucacuaaaugcccag

SEQ ID NO: 514796 - RNA, 26 nt, Human
ugaaaaaauaucugauuuuaagucag

SEQ ID NO: 514797 - RNA, 23 nt, Human
ugaaaaguauucaucaaagcuaa

SEQ ID NO: 514798 - RNA, 26 nt, Human
ugaaagagccaaagcuugcaucugag

SEQ ID NO: 514799 - RNA, 24 nt, Human
ugaaaggauggauuauuaaggcca

SEQ ID NO: 514800 - RNA, 21 nt, Human
ugaacccacuccagcuccaga

SEQ ID NO: 514801 - RNA, 21 nt, Human
ugaagaaauucacagcuuaaa

SEQ ID NO: 514802 - RNA, 20 nt, Human
ugaaguuuuuauuaaagagc

SEQ ID NO: 514803 - RNA, 19 nt, Human
ugagauaagugguauuauc

SEQ ID NO: 514804 - RNA, 22 nt, Human
ugaucugucacuaaaugcccag

SEQ ID NO: 514805 - RNA, 27 nt, Human
ugccauguggcuuuggggacucuggag

SEQ ID NO: 514806 - RNA, 19 nt, Human
ugccccaucgauacagaau

SEQ ID NO: 514807 - RNA, 18 nt, Human
ugcgguuuuaguccuuca

SEQ ID NO: 514808 - RNA, 23 nt, Human
uggaaaaacagaaacacaaacca

SEQ ID NO: 514809 - RNA, 25 nt, Human
uggaaaaacagaaacacaaaccaaa

SEQ ID NO: 514810 - RNA, 28 nt, Human
uggaaaaacagaaacacaaaccaaaaga

SEQ ID NO: 514811 - RNA, 21 nt, Human
uguauacacaguuuauauaua

SEQ ID NO: 514812 - RNA, 22 nt, Human
uguauggagacacauaugcaua

SEQ ID NO: 514813 - RNA, 19 nt, Human
ugucagcacugauaugaaa

SEQ ID NO: 514814 - RNA, 19 nt, Human
uuaaauaaacaucacaaaa

SEQ ID NO: 514815 - RNA, 21 nt, Human
uuauauuguccuguuuauccu

SEQ ID NO: 514816 - RNA, 19 nt, Human
uucaaaaaguuugacuauu

SEQ ID NO: 514817 - RNA, 18 nt, Human
uucaaccagaugugucac

SEQ ID NO: 514818 - RNA, 18 nt, Human
uuccaaguaucucugcgg

SEQ ID NO: 514819 - RNA, 20 nt, Human
uuccagauggggaaacagaa

SEQ ID NO: 514820 - RNA, 18 nt, Human
uucuggaaaaacagaaac

SEQ ID NO: 514821 - RNA, 22 nt, Human
uuuaugaaagagccaaagcuug

SEQ ID NO: 514822 - RNA, 20 nt, Human
aaaacacaaaagggaaugua

SEQ ID NO: 514823 - RNA, 28 nt, Human
aaaauaggagaaaacucucaauaaggaa

SEQ ID NO: 514824 - RNA, 19 nt, Human
aaagagacaaaacagccaa

SEQ ID NO: 514825 - RNA, 19 nt, Human
aacccgagcacagggacac

SEQ ID NO: 514826 - RNA, 18 nt, Human
aagagaagagaacaaaga

SEQ ID NO: 514827 - RNA, 25 nt, Human
aagagaagagaacaaagagacaaaa

SEQ ID NO: 514828 - RNA, 22 nt, Human
aagagacaaaacagccaaagcg

SEQ ID NO: 514829 - RNA, 20 nt, Human
aagcccagggaaagaaggau

SEQ ID NO: 514830 - RNA, 21 nt, Human
aaugugcagccuccaaacccc

SEQ ID NO: 514831 - RNA, 20 nt, Human
acaaaagggaauguagacac

SEQ ID NO: 514832 - RNA, 19 nt, Human
acaaacagggucacggugc

SEQ ID NO: 514833 - RNA, 19 nt, Human
acccgagcacagggacaca

SEQ ID NO: 514834 - RNA, 20 nt, Human
acuguguuugaacugggauu

SEQ ID NO: 514835 - RNA, 23 nt, Human
agaaccaccaggggugggaggaa

SEQ ID NO: 514836 - RNA, 18 nt, Human
agacaaaacagccaaagc

SEQ ID NO: 514837 - RNA, 21 nt, Human
agagaggggcacacagggucu

SEQ ID NO: 514838 - RNA, 24 nt, Human
agaggaagagaagagaacaaagag

SEQ ID NO: 514839 - RNA, 18 nt, Human
agaguugaaaggaagaug

SEQ ID NO: 514840 - RNA, 24 nt, Human
agccaaagcggggucccacaaaca

SEQ ID NO: 514841 - RNA, 25 nt, Human
agccaaagcggggucccacaaacag

SEQ ID NO: 514842 - RNA, 24 nt, Human
agcgggugggcuggggaagcccag

SEQ ID NO: 514843 - RNA, 22 nt, Human
agugaauaaaacacaaaaggga

SEQ ID NO: 514844 - RNA, 27 nt, Human
auaaaacacaaaagggaauguagacaa

SEQ ID NO: 514845 - RNA, 23 nt, Human
caagaacagcuccaggggagucc

SEQ ID NO: 514846 - RNA, 18 nt, Human
caauaagcucuaccaacc

SEQ ID NO: 514847 - RNA, 18 nt, Human
cacagggucugagagucu

SEQ ID NO: 514848 - RNA, 23 nt, Human
cagcggcuaacuagauggcuggu

SEQ ID NO: 514849 - RNA, 20 nt, Human
cagggucugagagucugggg

SEQ ID NO: 514850 - RNA, 23 nt, Human
cauauaaaacuccccucauggaa

SEQ ID NO: 514851 - RNA, 22 nt, Human
ccacuucacgaaaggaccagcu

SEQ ID NO: 514852 - RNA, 18 nt, Human
ccccucauggaagccagg

SEQ ID NO: 514853 - RNA, 26 nt, Human
ccgcugagugaccagugcagccaugc

SEQ ID NO: 514854 - RNA, 18 nt, Human
ccuccagcagcaugaggg

SEQ ID NO: 514855 - RNA, 18 nt, Human
ccucuaggauacucaacu

SEQ ID NO: 514856 - RNA, 24 nt, Human
cggugcagagaggggcacacaggg

SEQ ID NO: 514857 - RNA, 22 nt, Human
cuaccaaccaacaaucuauguu

SEQ ID NO: 514858 - RNA, 18 nt, Human
cucucaauaaggauuuuu

SEQ ID NO: 514859 - RNA, 22 nt, Human
cugcacugacugggacaccgca

SEQ ID NO: 514860 - RNA, 20 nt, Human
cuucacgaaaggaccagcuu

SEQ ID NO: 514861 - RNA, 25 nt, Human
cuuucuggcaaugugcagccuccaa

SEQ ID NO: 514862 - RNA, 19 nt, Human
gaaaggcuuccugaaggag

SEQ ID NO: 514863 - RNA, 20 nt, Human
gaaaucaaucauuugucagg

SEQ ID NO: 514864 - RNA, 19 nt, Human
gaagagaagagaacaaaga

SEQ ID NO: 514865 - RNA, 20 nt, Human
gaagagaagagaacaaagag

SEQ ID NO: 514866 - RNA, 23 nt, Human
gaagaggcuccaaaagccaggga

SEQ ID NO: 514867 - RNA, 24 nt, Human
gaagcuguaugcguggucugcagg

SEQ ID NO: 514868 - RNA, 20 nt, Human
gacucagaaaacggagucag

SEQ ID NO: 514869 - RNA, 18 nt, Human
gacuguguuugaacuggg

SEQ ID NO: 514870 - RNA, 22 nt, Human
gagaacaaagagacaaaacagc

SEQ ID NO: 514871 - RNA, 19 nt, Human
gagacaaaacagccaaagc

SEQ ID NO: 514872 - RNA, 21 nt, Human
gagugacgaagagggaaggga

SEQ ID NO: 514873 - RNA, 22 nt, Human
gaguugaaaggaagaugaggcu

SEQ ID NO: 514874 - RNA, 20 nt, Human
ggaaagaaggaucucuucag

SEQ ID NO: 514875 - RNA, 22 nt, Human
ggaaaucacagaaagguggagc

SEQ ID NO: 514876 - RNA, 20 nt, Human
ggaagcccagggaaagaagg

SEQ ID NO: 514877 - RNA, 23 nt, Human
ggagauagcugggccgcugagug

SEQ ID NO: 514878 - RNA, 18 nt, Human
ggagcuggaacuagguag

SEQ ID NO: 514879 - RNA, 23 nt, Human
ggccgcugagugaccagugcagc

SEQ ID NO: 514880 - RNA, 19 nt, Human
gggaagcccagggaaagaa

SEQ ID NO: 514881 - RNA, 18 nt, Human
gggagugacgaagaggga

SEQ ID NO: 514882 - RNA, 24 nt, Human
ggggugggaggaaggggauggcug

SEQ ID NO: 514883 - RNA, 26 nt, Human
gucaagaacagcuccaggggagucca

SEQ ID NO: 514884 - RNA, 24 nt, Human
gugaagaucacaguaaggaccaga

SEQ ID NO: 514885 - RNA, 22 nt, Human
uaaaauaggagaaaacucucaa

SEQ ID NO: 514886 - RNA, 20 nt, Human
uaaauucuuucaugucaccu

SEQ ID NO: 514887 - RNA, 19 nt, Human
uaagaacacaaaucacucc

SEQ ID NO: 514888 - RNA, 24 nt, Human
uaagaagacaagguucuugacuca

SEQ ID NO: 514889 - RNA, 19 nt, Human
uaagcucuaccaaccaaca

SEQ ID NO: 514890 - RNA, 21 nt, Human
uagcaggacucagaaaacgga

SEQ ID NO: 514891 - RNA, 26 nt, Human
uaggagaagcuguaugcguggucugc

SEQ ID NO: 514892 - RNA, 24 nt, Human
ucaaauuuagcaauaagcucuacc

SEQ ID NO: 514893 - RNA, 26 nt, Human
ucaagaacagcuccaggggaguccac

SEQ ID NO: 514894 - RNA, 22 nt, Human
ucaagaggaagagaagagaaca

SEQ ID NO: 514895 - RNA, 22 nt, Human
ucacaguaaggaccagacaauc

SEQ ID NO: 514896 - RNA, 21 nt, Human
ucuucagagaccaagaaaggc

SEQ ID NO: 514897 - RNA, 24 nt, Human
ugaauaaaacacaaaagggaaugu

SEQ ID NO: 514898 - RNA, 23 nt, Human
ugaggcuucuaagaacacaaauc

SEQ ID NO: 514899 - RNA, 20 nt, Human
ugauuuaaaauaggagaaaa

SEQ ID NO: 514900 - RNA, 20 nt, Human
ugcguggucugcaggcagau

SEQ ID NO: 514901 - RNA, 21 nt, Human
uggcuggugauaccauucaca

SEQ ID NO: 514902 - RNA, 20 nt, Human
ugggaggaaggggauggcug

SEQ ID NO: 514903 - RNA, 24 nt, Human
ugugcagccuccaaaccccacuuc

SEQ ID NO: 514904 - RNA, 23 nt, Human
ugugugccugaggccugcauggg

SEQ ID NO: 514905 - RNA, 20 nt, Human
uguuuggggaugccagugag

SEQ ID NO: 514906 - RNA, 21 nt, Human
uguuuggggaugccagugagg

SEQ ID NO: 514907 - RNA, 24 nt, Human
uguuuggggaugccagugaggcug

SEQ ID NO: 514908 - RNA, 22 nt, Human
uucaagaggaagagaagagaac

SEQ ID NO: 514909 - RNA, 24 nt, Human
aaaaccaccaugagacaccagcuc

SEQ ID NO: 514910 - RNA, 19 nt, Human
aaacaaaaaaaagucacug

SEQ ID NO: 514911 - RNA, 19 nt, Human
aaacagcagcaagcacaug

SEQ ID NO: 514912 - RNA, 19 nt, Human
aaaccaccaugagacacca

SEQ ID NO: 514913 - RNA, 22 nt, Human
aaagcuccguggccugggcagg

SEQ ID NO: 514914 - RNA, 26 nt, Human
aaccugcugcccaaacugacccaugg

SEQ ID NO: 514915 - RNA, 23 nt, Human
aagagcacaugcguccaagaaca

SEQ ID NO: 514916 - RNA, 19 nt, Human
aagcaggugaggugaggga

SEQ ID NO: 514917 - RNA, 23 nt, Human
aagcaggugaggugagggacaga

SEQ ID NO: 514918 - RNA, 18 nt, Human
aagccucggaacacagac

SEQ ID NO: 514919 - RNA, 23 nt, Human
aaggacucccuccccaacgagcc

SEQ ID NO: 514920 - RNA, 20 nt, Human
aauugcuugagcccaggagg

SEQ ID NO: 514921 - RNA, 24 nt, Human
aauugcuugagcccaggaggcgga

SEQ ID NO: 514922 - RNA, 22 nt, Human
acaagaaaaaauauauuaauua

SEQ ID NO: 514923 - RNA, 21 nt, Human
acaagacccccagccucacac

SEQ ID NO: 514924 - RNA, 20 nt, Human
acagagcaagacccugucuc

SEQ ID NO: 514925 - RNA, 20 nt, Human
acagagcaagacccugucuc

SEQ ID NO: 514926 - RNA, 22 nt, Human
accagagucaccguggcaacag

SEQ ID NO: 514927 - RNA, 19 nt, Human
acccaaccugcugcccaaa

SEQ ID NO: 514928 - RNA, 18 nt, Human
acgccacuguacuccagc

SEQ ID NO: 514929 - RNA, 21 nt, Human
acgccacuguacuccagccug

SEQ ID NO: 514930 - RNA, 24 nt, Human
acgcccccuggccagccccgacuc

SEQ ID NO: 514931 - RNA, 20 nt, Human
acucaagaggcugagguggg

SEQ ID NO: 514932 - RNA, 24 nt, Human
acugcuguuuuaaaccacuaaggu

SEQ ID NO: 514933 - RNA, 24 nt, Human
acuguacuccagccugggugacag

SEQ ID NO: 514934 - RNA, 26 nt, Human
acuguacuccagccugggugacagag

SEQ ID NO: 514935 - RNA, 21 nt, Human
agaaaaauuugaggacagagg

SEQ ID NO: 514936 - RNA, 22 nt, Human
agaaaaauuugaggacagaggg

SEQ ID NO: 514937 - RNA, 22 nt, Human
agaaacaaacaaaaaaaaguca

SEQ ID NO: 514938 - RNA, 18 nt, Human
agacagaaaucacacaac

SEQ ID NO: 514939 - RNA, 20 nt, Human
agacccccagccucacacaa

SEQ ID NO: 514940 - RNA, 22 nt, Human
agacgcucaaagucacgagucc

SEQ ID NO: 514941 - RNA, 20 nt, Human
agagacaccuggccuuggga

SEQ ID NO: 514942 - RNA, 18 nt, Human
agccaccaucccguccug

SEQ ID NO: 514943 - RNA, 21 nt, Human
agcccagcagcccugagccuu

SEQ ID NO: 514944 - RNA, 22 nt, Human
agccugggcaacauacugagac

SEQ ID NO: 514945 - RNA, 18 nt, Human
agccuugugcugggggau

SEQ ID NO: 514946 - RNA, 24 nt, Human
agcuacucaggaggcugagguggg

SEQ ID NO: 514947 - RNA, 22 nt, Human
agcuggcaugguggugcgugcc

SEQ ID NO: 514948 - RNA, 20 nt, Human
aggaauuugagaucagccug

SEQ ID NO: 514949 - RNA, 24 nt, Human
aggaucgcuugaggccaggaauuu

SEQ ID NO: 514950 - RNA, 23 nt, Human
aggcaggcagggagugcaccugg

SEQ ID NO: 514951 - RNA, 23 nt, Human
aggcagggagugcaccuggaggg

SEQ ID NO: 514952 - RNA, 21 nt, Human
aggccucuccuccucccgccu

SEQ ID NO: 514953 - RNA, 19 nt, Human
aggcggaggcuguaaugag

SEQ ID NO: 514954 - RNA, 24 nt, Human
aggcugaggugggagaauugcuug

SEQ ID NO: 514955 - RNA, 24 nt, Human
aggcugaggugggaggaucgcuug

SEQ ID NO: 514956 - RNA, 21 nt, Human
aggugaggugagggacagaga

SEQ ID NO: 514957 - RNA, 18 nt, Human
aggugggaggaucgcuug

SEQ ID NO: 514958 - RNA, 23 nt, Human
aggugggaggaucgcuugaggcc

SEQ ID NO: 514959 - RNA, 24 nt, Human
aguggcucucgccuauaaucccag

SEQ ID NO: 514960 - RNA, 24 nt, Human
aucacgccacuguacuccagccug

SEQ ID NO: 514961 - RNA, 20 nt, Human
aucgcuugaggccaggaauu

SEQ ID NO: 514962 - RNA, 22 nt, Human
augacccugaggccgugugggc

SEQ ID NO: 514963 - RNA, 20 nt, Human
augcaggggugcaaagagga

SEQ ID NO: 514964 - RNA, 24 nt, Human
caaaaccaccaugagacaccagcu

SEQ ID NO: 514965 - RNA, 24 nt, Human
caaaaucacgccacuguacuccag

SEQ ID NO: 514966 - RNA, 23 nt, Human
caacauacugagacccagucagu

SEQ ID NO: 514967 - RNA, 22 nt, Human
caagacccccagccucacacaa

SEQ ID NO: 514968 - RNA, 25 nt, Human
caagacccccagccucacacaaugg

SEQ ID NO: 514969 - RNA, 24 nt, Human
caaggacucccuccccaacgagcc

SEQ ID NO: 514970 - RNA, 22 nt, Human
cacaugcguccaagaacagcag

SEQ ID NO: 514971 - RNA, 22 nt, Human
caccagaagagcacaugcgucc

SEQ ID NO: 514972 - RNA, 22 nt, Human
caccaggggccuggcuccccac

SEQ ID NO: 514973 - RNA, 25 nt, Human
caccaugagacaccagcucacccca

SEQ ID NO: 514974 - RNA, 20 nt, Human
caccguggcaacaggugaca

SEQ ID NO: 514975 - RNA, 21 nt, Human
cacguauucacgggucccacc

SEQ ID NO: 514976 - RNA, 22 nt, Human
cacugcaggaccaacauucucc

SEQ ID NO: 514977 - RNA, 19 nt, Human
cacuguacuccagccuggg

SEQ ID NO: 514978 - RNA, 19 nt, Human
cacuguacuccagccuggg

SEQ ID NO: 514979 - RNA, 19 nt, Human
cacuguacuccagccuggg

SEQ ID NO: 514980 - RNA, 21 nt, Human
cacuguacuccagccugggug

SEQ ID NO: 514981 - RNA, 22 nt, Human
cacuguacuccagccuggguga

SEQ ID NO: 514982 - RNA, 24 nt, Human
cacuguacuccagccugggugaca

SEQ ID NO: 514983 - RNA, 25 nt, Human
cacuguacuccagccugggugacag

SEQ ID NO: 514984 - RNA, 26 nt, Human
cagaagagcacaugcguccaagaaca

SEQ ID NO: 514985 - RNA, 21 nt, Human
cagagcaagacccugucucuu

SEQ ID NO: 514986 - RNA, 21 nt, Human
cagcagcccugagccuuacac

SEQ ID NO: 514987 - RNA, 19 nt, Human
cagccccucucugagccac

SEQ ID NO: 514988 - RNA, 19 nt, Human
cagccggccccuccugaag

SEQ ID NO: 514989 - RNA, 24 nt, Human
cagcuacucaggaggcugaggugg

SEQ ID NO: 514990 - RNA, 22 nt, Human
caggacaggcaaaucaaaacca

SEQ ID NO: 514991 - RNA, 18 nt, Human
caggaccaacauucucca

SEQ ID NO: 514992 - RNA, 19 nt, Human
caggaggcaggcagggagu

SEQ ID NO: 514993 - RNA, 24 nt, Human
cagguacucaagaggcugaggugg

SEQ ID NO: 514994 - RNA, 20 nt, Human
caguuccccucuccccaaac

SEQ ID NO: 514995 - RNA, 20 nt, Human
caucagagcccagcagcccu

SEQ ID NO: 514996 - RNA, 26 nt, Human
caugacccugaggccgugugggcaga

SEQ ID NO: 514997 - RNA, 21 nt, Human
caugucagaugugcacaugcc

SEQ ID NO: 514998 - RNA, 22 nt, Human
ccacacaccuccaaugggugcu

SEQ ID NO: 514999 - RNA, 20 nt, Human
ccacuguacuccagccuggg

SEQ ID NO: 515000 - RNA, 20 nt, Human
ccacuguacuccagccuggg

SEQ ID NO: 515001 - RNA, 20 nt, Human
ccacuguacuccagccuggg

SEQ ID NO: 515002 - RNA, 21 nt, Human
ccacuguacuccagccugggu

SEQ ID NO: 515003 - RNA, 21 nt, Human
ccacuguacuccagccugggu

SEQ ID NO: 515004 - RNA, 24 nt, Human
ccacuguacuccagccugggugac

SEQ ID NO: 515005 - RNA, 21 nt, Human
ccagaccaggcagccccucuc

SEQ ID NO: 515006 - RNA, 19 nt, Human
ccaugcccaggaaaggaac

SEQ ID NO: 515007 - RNA, 24 nt, Human
cccaaacugacccaugggggagac

SEQ ID NO: 515008 - RNA, 21 nt, Human
cccacaagacccccagccuca

SEQ ID NO: 515009 - RNA, 24 nt, Human
cccacaccaggggccuggcucccc

SEQ ID NO: 515010 - RNA, 23 nt, Human
cccagcagcccugagccuuacac

SEQ ID NO: 515011 - RNA, 21 nt, Human
cccccgccugacugccuccuc

SEQ ID NO: 515012 - RNA, 18 nt, Human
ccccucucugagccacca

SEQ ID NO: 515013 - RNA, 22 nt, Human
ccccucucugagccaccauccc

SEQ ID NO: 515014 - RNA, 18 nt, Human
ccccuggccagccccgac

SEQ ID NO: 515015 - RNA, 20 nt, Human
ccccuggccagccccgacuc

SEQ ID NO: 515016 - RNA, 21 nt, Human
ccuauaaucccagcuacucag

SEQ ID NO: 515017 - RNA, 22 nt, Human
ccuauaaucccagcuacucagg

SEQ ID NO: 515018 - RNA, 24 nt, Human
ccucccgccugucaggccccagac

SEQ ID NO: 515019 - RNA, 18 nt, Human
ccucuccuccucccgccu

SEQ ID NO: 515020 - RNA, 22 nt, Human
ccugcagaaaacucaugacccu

SEQ ID NO: 515021 - RNA, 22 nt, Human
ccuggagggugggcucugugga

SEQ ID NO: 515022 - RNA, 20 nt, Human
ccugggugacagagcaagac

SEQ ID NO: 515023 - RNA, 20 nt, Human
ccuugugcugggggaucccc

SEQ ID NO: 515024 - RNA, 24 nt, Human
cgccaaggacucccuccccaacga

SEQ ID NO: 515025 - RNA, 18 nt, Human
cgccuauaaucccagcua

SEQ ID NO: 515026 - RNA, 24 nt, Human
cgccuauaaucccagcuacucagg

SEQ ID NO: 515027 - RNA, 21 nt, Human
cggaacacagacggggaccaa

SEQ ID NO: 515028 - RNA, 18 nt, Human
cucaagaggcugaggugg

SEQ ID NO: 515029 - RNA, 21 nt, Human
cucacacaauggggugugccc

SEQ ID NO: 515030 - RNA, 18 nt, Human
cucaggaggcugaggugg

SEQ ID NO: 515031 - RNA, 24 nt, Human
cucccgccugucaggccccagacc

SEQ ID NO: 515032 - RNA, 20 nt, Human
cuccguggccugggcaggag

SEQ ID NO: 515033 - RNA, 21 nt, Human
cugggccaccaugcccaggaa

SEQ ID NO: 515034 - RNA, 24 nt, Human
cuggguccugucugcccuaugcgg

SEQ ID NO: 515035 - RNA, 21 nt, Human
cugucaggccccagaccaggc

SEQ ID NO: 515036 - RNA, 18 nt, Human
gaacagcagcugggcagg

SEQ ID NO: 515037 - RNA, 20 nt, Human
gaacagcagcugggcagggg

SEQ ID NO: 515038 - RNA, 23 nt, Human
gaagggaguagucugauccuagc

SEQ ID NO: 515039 - RNA, 19 nt, Human
gacaccagcucaccccauc

SEQ ID NO: 515040 - RNA, 24 nt, Human
gaccaacaguuccccucuccccaa

SEQ ID NO: 515041 - RNA, 18 nt, Human
gagggacagagagggcug

SEQ ID NO: 515042 - RNA, 24 nt, Human
gaggugggagaauugcuugagccc

SEQ ID NO: 515043 - RNA, 22 nt, Human
gaggugggaggaucgcuugagg

SEQ ID NO: 515044 - RNA, 24 nt, Human
gaggugggaggaucgcuugaggcc

SEQ ID NO: 515045 - RNA, 24 nt, Human
gaucgcuugaggccaggaauuuga

SEQ ID NO: 515046 - RNA, 23 nt, Human
gcaagaaugagagggaagacaga

SEQ ID NO: 515047 - RNA, 23 nt, Human
gcaggcaggcacguguguccugc

SEQ ID NO: 515048 - RNA, 23 nt, Human
gcauuggcugagcgucuguggug

SEQ ID NO: 515049 - RNA, 19 nt, Human
gccacuguacuccagccug

SEQ ID NO: 515050 - RNA, 24 nt, Human
gccacuguacuccagccuggguga

SEQ ID NO: 515051 - RNA, 19 nt, Human
gccccgacucucucucuca

SEQ ID NO: 515052 - RNA, 22 nt, Human
gccuggcugagcagcugagggg

SEQ ID NO: 515053 - RNA, 22 nt, Human
gcugggccaccaugcccaggaa

SEQ ID NO: 515054 - RNA, 23 nt, Human
ggcaaaucaaaaccaccaugaga

SEQ ID NO: 515055 - RNA, 23 nt, Human
ggccccaauuaagugaagaaugc

SEQ ID NO: 515056 - RNA, 20 nt, Human
gggcuucugagcagggaccc

SEQ ID NO: 515057 - RNA, 22 nt, Human
ggggcugcguggggcuucugag

SEQ ID NO: 515058 - RNA, 20 nt, Human
ggguagcaggcaggcacgug

SEQ ID NO: 515059 - RNA, 20 nt, Human
gggugggcucuguggacagg

SEQ ID NO: 515060 - RNA, 24 nt, Human
guacuccagccugggugacagagc

SEQ ID NO: 515061 - RNA, 19 nt, Human
guggguauggggggcuuuc

SEQ ID NO: 515062 - RNA, 20 nt, Human
uaaaagguuaaaaugguaag

SEQ ID NO: 515063 - RNA, 19 nt, Human
uaaaaugguaaguccuaug

SEQ ID NO: 515064 - RNA, 26 nt, Human
uaaaccacuaagguuugcuagaauuu

SEQ ID NO: 515065 - RNA, 23 nt, Human
uaaucgccacugcaggaccaaca

SEQ ID NO: 515066 - RNA, 22 nt, Human
uacuccagccugggugacagag

SEQ ID NO: 515067 - RNA, 22 nt, Human
uagcaaccagagucaccguggc

SEQ ID NO: 515068 - RNA, 21 nt, Human
ucaaaucugagcgccaaggac

SEQ ID NO: 515069 - RNA, 23 nt, Human
ucaccaagccucggaacacagac

SEQ ID NO: 515070 - RNA, 23 nt, Human
ucacgccacuguacuccagccug

SEQ ID NO: 515071 - RNA, 22 nt, Human
ucaggacaggcaaaucaaaacc

SEQ ID NO: 515072 - RNA, 19 nt, Human
ucagguggcugccugcaga

SEQ ID NO: 515073 - RNA, 24 nt, Human
uccagccugggugacagagcaaga

SEQ ID NO: 515074 - RNA, 26 nt, Human
ucccaccagaagagcacaugcgucca

SEQ ID NO: 515075 - RNA, 22 nt, Human
uccccaaacaagacaggggcca

SEQ ID NO: 515076 - RNA, 19 nt, Human
uccccaacgagccuugugc

SEQ ID NO: 515077 - RNA, 22 nt, Human
ucuccccaaacaagacaggggc

SEQ ID NO: 515078 - RNA, 19 nt, Human
ucucugagccaccaucccg

SEQ ID NO: 515079 - RNA, 18 nt, Human
ucugagcgccaaggacuc

SEQ ID NO: 515080 - RNA, 18 nt, Human
ucugcccaagccacgccc

SEQ ID NO: 515081 - RNA, 23 nt, Human
ucugcccuaugcggaacaagauc

SEQ ID NO: 515082 - RNA, 22 nt, Human
ugacagagcaagacccugucuc

SEQ ID NO: 515083 - RNA, 21 nt, Human
ugagcacucuccucugcccaa

SEQ ID NO: 515084 - RNA, 21 nt, Human
ugagcagcugaggggucagcc

SEQ ID NO: 515085 - RNA, 23 nt, Human
ugagcagggacccacaccagggg

SEQ ID NO: 515086 - RNA, 21 nt, Human
ugagccuuacacgggacccaa

SEQ ID NO: 515087 - RNA, 20 nt, Human
ugaggugagggacagagagg

SEQ ID NO: 515088 - RNA, 23 nt, Human
ugaggugggagaauugcuugagc

SEQ ID NO: 515089 - RNA, 24 nt, Human
ugaggugggagaauugcuugagcc

SEQ ID NO: 515090 - RNA, 20 nt, Human
ugaggugggaggaucgcuug

SEQ ID NO: 515091 - RNA, 23 nt, Human
ugaggugggaggaucgcuugagg

SEQ ID NO: 515092 - RNA, 24 nt, Human
ugaggugggaggaucgcuugaggc

SEQ ID NO: 515093 - RNA, 26 nt, Human
ugaggugggaggaucgcuugaggcca

SEQ ID NO: 515094 - RNA, 19 nt, Human
ugcaggaggcaggcaggga

SEQ ID NO: 515095 - RNA, 21 nt, Human
ugcccaaacugacccaugggg

SEQ ID NO: 515096 - RNA, 18 nt, Human
ugccccaggaccgugagc

SEQ ID NO: 515097 - RNA, 18 nt, Human
ugcugcccaaacugaccc

SEQ ID NO: 515098 - RNA, 19 nt, Human
ugcugggcgaccacacacc

SEQ ID NO: 515099 - RNA, 21 nt, Human
ugcuguguccucuggguccug

SEQ ID NO: 515100 - RNA, 18 nt, Human
uggaugcaguggcucucg

SEQ ID NO: 515101 - RNA, 21 nt, Human
uggcaacaggugacaucagag

SEQ ID NO: 515102 - RNA, 26 nt, Human
uggccagccccgacucucucucucaa

SEQ ID NO: 515103 - RNA, 19 nt, Human
ugggcaggagcgcccccgc

SEQ ID NO: 515104 - RNA, 24 nt, Human
ugguggugcgugccuaccauccca

SEQ ID NO: 515105 - RNA, 24 nt, Human
ugguguguccacugcaaaggcaga

SEQ ID NO: 515106 - RNA, 21 nt, Human
ugucaggccccagaccaggca

SEQ ID NO: 515107 - RNA, 24 nt, Human
uguccucuggguccugucugcccu

SEQ ID NO: 515108 - RNA, 21 nt, Human
ugugcugggggauccccuugg

SEQ ID NO: 515109 - RNA, 19 nt, Human
uuagcuggcaugguggugc

SEQ ID NO: 515110 - RNA, 19 nt, Human
uuagcuggcaugguggugc

SEQ ID NO: 515111 - RNA, 24 nt, Human
uucgggauacagugugcccaggaa

SEQ ID NO: 515112 - RNA, 20 nt, Human
uugaggacagagggcugugg

SEQ ID NO: 515113 - RNA, 24 nt, Human
uugcuugagcccaggaggcggagg

SEQ ID NO: 515114 - RNA, 20 nt, Human
uuugcuagaauuugucacca

SEQ ID NO: 515115 - RNA, 24 nt, Human
uuuuaaaccacuaagguuugcuag

SEQ ID NO: 515116 - RNA, 20 nt, Human
uuuuuuuuuucuucagcugg

SEQ ID NO: 515117 - RNA, 25 nt, Human
uuuuuuuuuuuuuucuucagcuggg

SEQ ID NO: 515118 - RNA, 22 nt, Human
uuuuuuuuuuuuuuuucuucag

SEQ ID NO: 515119 - RNA, 21 nt, Human
aagccaaucccccacauccuc

SEQ ID NO: 515120 - RNA, 23 nt, Human
aagcccaacaggaaaccagcagg

SEQ ID NO: 515121 - RNA, 21 nt, Human
aagccucugggcaggcaucug

SEQ ID NO: 515122 - RNA, 18 nt, Human
aagggccgagagacaaca

SEQ ID NO: 515123 - RNA, 26 nt, Human
acaacagaaacagacaccggcacagg

SEQ ID NO: 515124 - RNA, 21 nt, Human
acaacccacuccccacugccu

SEQ ID NO: 515125 - RNA, 21 nt, Human
acagaaaucccaucaagaaca

SEQ ID NO: 515126 - RNA, 21 nt, Human
agaaaucccaucaagaacagc

SEQ ID NO: 515127 - RNA, 22 nt, Human
agagggcccggccugggcuccu

SEQ ID NO: 515128 - RNA, 20 nt, Human
agcacaacccacuccccacu

SEQ ID NO: 515129 - RNA, 19 nt, Human
agcaucaggguuaggguga

SEQ ID NO: 515130 - RNA, 21 nt, Human
agccagcuccuguggggccug

SEQ ID NO: 515131 - RNA, 22 nt, Human
agcugcccaagacggcagcccc

SEQ ID NO: 515132 - RNA, 23 nt, Human
aggaagccucugggcaggcaucu

SEQ ID NO: 515133 - RNA, 22 nt, Human
aggaaggccagccagaccaggc

SEQ ID NO: 515134 - RNA, 20 nt, Human
aggacuccgcgccgcccucc

SEQ ID NO: 515135 - RNA, 22 nt, Human
aggauugggucgggucaggggu

SEQ ID NO: 515136 - RNA, 23 nt, Human
aggcaaggcugggggccccaggc

SEQ ID NO: 515137 - RNA, 18 nt, Human
aggcaucuggggcuccaa

SEQ ID NO: 515138 - RNA, 23 nt, Human
agggugaggauugggucaggggu

SEQ ID NO: 515139 - RNA, 27 nt, Human
aggguuagggugaggauugggucaggg

SEQ ID NO: 515140 - RNA, 23 nt, Human
caacagaaacagacaccggcaca

SEQ ID NO: 515141 - RNA, 18 nt, Human
caacccacuccccacugc

SEQ ID NO: 515142 - RNA, 19 nt, Human
caacccacuccccacugcc

SEQ ID NO: 515143 - RNA, 18 nt, Human
caagaacagcugcaggga

SEQ ID NO: 515144 - RNA, 19 nt, Human
caagacggcagccccacuc

SEQ ID NO: 515145 - RNA, 26 nt, Human
caagacggcagccccacuccagaccc

SEQ ID NO: 515146 - RNA, 21 nt, Human
cacaguucaggauccaagucc

SEQ ID NO: 515147 - RNA, 24 nt, Human
cacgcaacccccggcaggcccacg

SEQ ID NO: 515148 - RNA, 23 nt, Human
cagccagaccaggccuaagccaa

SEQ ID NO: 515149 - RNA, 20 nt, Human
cagcucugggcccauccccc

SEQ ID NO: 515150 - RNA, 20 nt, Human
caucuggggcuccaaagccc

SEQ ID NO: 515151 - RNA, 23 nt, Human
ccacaccugcucagaguuccuua

SEQ ID NO: 515152 - RNA, 18 nt, Human
ccagccagaccaggccua

SEQ ID NO: 515153 - RNA, 18 nt, Human
ccagccagcuccuguggg

SEQ ID NO: 515154 - RNA, 23 nt, Human
ccagcuccuguggggccugcgcc

SEQ ID NO: 515155 - RNA, 19 nt, Human
cccacagcugccagcacaa

SEQ ID NO: 515156 - RNA, 23 nt, Human
cccacagcugccagcacaaccca

SEQ ID NO: 515157 - RNA, 25 nt, Human
cccacagcugccagcacaacccacu

SEQ ID NO: 515158 - RNA, 18 nt, Human
cccaccccgcacaaggaa

SEQ ID NO: 515159 - RNA, 19 nt, Human
cccagguagguucccgggg

SEQ ID NO: 515160 - RNA, 20 nt, Human
cccauagccuccagccagcu

SEQ ID NO: 515161 - RNA, 26 nt, Human
ccccacugccugucacgcaacccccg

SEQ ID NO: 515162 - RNA, 18 nt, Human
ccccauguccugcccaga

SEQ ID NO: 515163 - RNA, 22 nt, Human
ccccgcacccauagccuccagc

SEQ ID NO: 515164 - RNA, 19 nt, Human
cccggcaggcccacgcccc

SEQ ID NO: 515165 - RNA, 21 nt, Human
cccuggccucaguggccuucc

SEQ ID NO: 515166 - RNA, 20 nt, Human
cccuguaggcaaggcugggg

SEQ ID NO: 515167 - RNA, 21 nt, Human
ccgcacccauagccuccagcc

SEQ ID NO: 515168 - RNA, 18 nt, Human
ccgcgccgcccuccgugc

SEQ ID NO: 515169 - RNA, 24 nt, Human
ccucacucacccacagcugccagc

SEQ ID NO: 515170 - RNA, 23 nt, Human
ccuccagccagcuccuguggggc

SEQ ID NO: 515171 - RNA, 24 nt, Human
ccucccagccauggaccacaccug

SEQ ID NO: 515172 - RNA, 24 nt, Human
ccucugggcaggcaucuggggcuc

SEQ ID NO: 515173 - RNA, 22 nt, Human
ccuggccacugcgguccaggaa

SEQ ID NO: 515174 - RNA, 19 nt, Human
ccuugccuugcugccuugg

SEQ ID NO: 515175 - RNA, 21 nt, Human
cgaggauuggguuaggguggg

SEQ ID NO: 515176 - RNA, 18 nt, Human
cgcacccauagccuccag

SEQ ID NO: 515177 - RNA, 24 nt, Human
cgggaggagcugcccaagacggca

SEQ ID NO: 515178 - RNA, 22 nt, Human
cguccaggacuccgcgccgccc

SEQ ID NO: 515179 - RNA, 23 nt, Human
cucacccacagcugccagcacaa

SEQ ID NO: 515180 - RNA, 25 nt, Human
cuccaaagcccaacaggaaaccagc

SEQ ID NO: 515181 - RNA, 25 nt, Human
cucccagccauggaccacaccugcu

SEQ ID NO: 515182 - RNA, 19 nt, Human
cuccuguggggccugcgcc

SEQ ID NO: 515183 - RNA, 20 nt, Human
cuccuguggggccugcgccg

SEQ ID NO: 515184 - RNA, 20 nt, Human
cucucagggccagauuccac

SEQ ID NO: 515185 - RNA, 18 nt, Human
cugccucccaugaugccc

SEQ ID NO: 515186 - RNA, 18 nt, Human
cuggccucaguggccuuc

SEQ ID NO: 515187 - RNA, 21 nt, Human
cuggccucaguggccuuccug

SEQ ID NO: 515188 - RNA, 21 nt, Human
cuguggggccagcugccuccc

SEQ ID NO: 515189 - RNA, 24 nt, Human
cuuccccagggcccuucaugagag

SEQ ID NO: 515190 - RNA, 20 nt, Human
gaguuagcuuuagaguuggg

SEQ ID NO: 515191 - RNA, 25 nt, Human
gaguuagggcuggguuggguuaggu

SEQ ID NO: 515192 - RNA, 19 nt, Human
gccaaucccccacauccuc

SEQ ID NO: 515193 - RNA, 23 nt, Human
gccccgcacccauagccuccagc

SEQ ID NO: 515194 - RNA, 19 nt, Human
gccuaagccaaucccccac

SEQ ID NO: 515195 - RNA, 24 nt, Human
gcuccaaagcccaacaggaaacca

SEQ ID NO: 515196 - RNA, 27 nt, Human
gcuccaaagcccaacaggaaaccagca

SEQ ID NO: 515197 - RNA, 20 nt, Human
gcugggggccccaggcucug

SEQ ID NO: 515198 - RNA, 18 nt, Human
ggaaggccagccagacca

SEQ ID NO: 515199 - RNA, 20 nt, Human
ggaggugguccccgguuccc

SEQ ID NO: 515200 - RNA, 26 nt, Human
ggaucaggauggcucugcugguggcc

SEQ ID NO: 515201 - RNA, 18 nt, Human
ggcacaggcugggccagc

SEQ ID NO: 515202 - RNA, 19 nt, Human
ggccccaccccaccaggga

SEQ ID NO: 515203 - RNA, 24 nt, Human
ggucagggguuagcaucaggguua

SEQ ID NO: 515204 - RNA, 24 nt, Human
ggucagggguuagcauuaggguua

SEQ ID NO: 515205 - RNA, 20 nt, Human
gguuaggaguuagcuuuaga

SEQ ID NO: 515206 - RNA, 19 nt, Human
gugaccucugcauuuugca

SEQ ID NO: 515207 - RNA, 23 nt, Human
gugguccccgguuccccuccugc

SEQ ID NO: 515208 - RNA, 27 nt, Human
guucccggggugaaaguggugaauggg

SEQ ID NO: 515209 - RNA, 23 nt, Human
guuuacacucucaucuacccucc

SEQ ID NO: 515210 - RNA, 24 nt, Human
uacaaaauggcccucugcuggccg

SEQ ID NO: 515211 - RNA, 20 nt, Human
uacacucucaucuacccucc

SEQ ID NO: 515212 - RNA, 20 nt, Human
uagcccaaccucauaugcag

SEQ ID NO: 515213 - RNA, 19 nt, Human
uagccuccagccagcuccu

SEQ ID NO: 515214 - RNA, 18 nt, Human
ucacgcaacccccggcag

SEQ ID NO: 515215 - RNA, 24 nt, Human
ucacgcaacccccggcaggcccac

SEQ ID NO: 515216 - RNA, 19 nt, Human
ucacugggcagagccggag

SEQ ID NO: 515217 - RNA, 20 nt, Human
ucacugggcagagccggaga

SEQ ID NO: 515218 - RNA, 22 nt, Human
ucaggauggcucugcugguggc

SEQ ID NO: 515219 - RNA, 21 nt, Human
uccaaagcccaacaggaaacc

SEQ ID NO: 515220 - RNA, 25 nt, Human
uccaaagcccaacaggaaaccagca

SEQ ID NO: 515221 - RNA, 23 nt, Human
uccaggaaggccagccagaccag

SEQ ID NO: 515222 - RNA, 23 nt, Human
uccagguuuagcccaaccucaua

SEQ ID NO: 515223 - RNA, 22 nt, Human
ucccaugaugcccagguagguu

SEQ ID NO: 515224 - RNA, 30 nt, Human
ucccccacauccuccaugaggggaccugcu

SEQ ID NO: 515225 - RNA, 20 nt, Human
uccccgguuccccuccugcc

SEQ ID NO: 515226 - RNA, 21 nt, Human
uccccgguuccccuccugcca

SEQ ID NO: 515227 - RNA, 24 nt, Human
ucccuggccucaguggccuuccug

SEQ ID NO: 515228 - RNA, 23 nt, Human
ucccuguaggcaaggcugggggc

SEQ ID NO: 515229 - RNA, 23 nt, Human
uccuccaugaggggaccugccaa

SEQ ID NO: 515230 - RNA, 21 nt, Human
uccuggcugcuuugguuauga

SEQ ID NO: 515231 - RNA, 24 nt, Human
ucugacuggcgaacagaaauccca

SEQ ID NO: 515232 - RNA, 25 nt, Human
ugaccagcuguggagcuucgaggcc

SEQ ID NO: 515233 - RNA, 24 nt, Human
ugaccucugcauuuugcagacacc

SEQ ID NO: 515234 - RNA, 24 nt, Human
ugaggggaccugccaagagcgucc

SEQ ID NO: 515235 - RNA, 23 nt, Human
ugaucacugggcagagccggaga

SEQ ID NO: 515236 - RNA, 19 nt, Human
ugcccaagacggcagcccc

SEQ ID NO: 515237 - RNA, 23 nt, Human
ugccuugcugccuuggcucuggu

SEQ ID NO: 515238 - RNA, 20 nt, Human
ugccuuggcucuggugaccu

SEQ ID NO: 515239 - RNA, 21 nt, Human
ugcuaugugcuguggggccag

SEQ ID NO: 515240 - RNA, 22 nt, Human
uggccgggcccugacuucagcc

SEQ ID NO: 515241 - RNA, 18 nt, Human
ugggcaggcaucuggggc

SEQ ID NO: 515242 - RNA, 18 nt, Human
uggggccagcugccuccc

SEQ ID NO: 515243 - RNA, 23 nt, Human
ugggggccccaggcucuguggcg

SEQ ID NO: 515244 - RNA, 28 nt, Human
uggggucacgguuuucagccgggucccc

SEQ ID NO: 515245 - RNA, 23 nt, Human
ugggucagggguuagcaucaggg

SEQ ID NO: 515246 - RNA, 22 nt, Human
uggguuggguuagguuaagggu

SEQ ID NO: 515247 - RNA, 18 nt, Human
uguccugcccagaugauc

SEQ ID NO: 515248 - RNA, 21 nt, Human
uuagcaucaggguuaggguga

SEQ ID NO: 515249 - RNA, 25 nt, Human
uuagggugggggaugguuuaggggu

SEQ ID NO: 515250 - RNA, 19 nt, Human
uuccccuccugccagcagc

SEQ ID NO: 515251 - RNA, 20 nt, Human
uuccccuccugccagcagcc

SEQ ID NO: 515252 - RNA, 20 nt, Human
uuggguugggguucaggcuc

SEQ ID NO: 515253 - RNA, 18 nt, Human
aaagaaguccagagccuu

SEQ ID NO: 515254 - RNA, 24 nt, Human
aaaggggggcugcccgaagagggc

SEQ ID NO: 515255 - RNA, 22 nt, Human
aaauucacuuuguccucauaag

SEQ ID NO: 515256 - RNA, 19 nt, Human
aagaagccugcucgccagg

SEQ ID NO: 515257 - RNA, 22 nt, Human
aagccacuuccagggcagcuag

SEQ ID NO: 515258 - RNA, 18 nt, Human
aaggaacccuccugagug

SEQ ID NO: 515259 - RNA, 21 nt, Human
acaaagaaguccagagccuug

SEQ ID NO: 515260 - RNA, 22 nt, Human
acagcucuugcccaaggaagca

SEQ ID NO: 515261 - RNA, 28 nt, Human
acaggacccaguaaccaccgaguaacaa

SEQ ID NO: 515262 - RNA, 18 nt, Human
accaagauggcgggcagg

SEQ ID NO: 515263 - RNA, 23 nt, Human
accgaguaacaaaggucucauga

SEQ ID NO: 515264 - RNA, 21 nt, Human
accuggaggcaaaggggggcu

SEQ ID NO: 515265 - RNA, 19 nt, Human
agaaagacugguggguucu

SEQ ID NO: 515266 - RNA, 19 nt, Human
agaaguacccugcgggggc

SEQ ID NO: 515267 - RNA, 23 nt, Human
agagaaaauaauuuaauagagaa

SEQ ID NO: 515268 - RNA, 19 nt, Human
agagaugaggaccaaggaa

SEQ ID NO: 515269 - RNA, 20 nt, Human
agcaggggcccugggccagc

SEQ ID NO: 515270 - RNA, 24 nt, Human
agccugcucgccagggcugcagug

SEQ ID NO: 515271 - RNA, 19 nt, Human
agcucccgccuccggcccg

SEQ ID NO: 515272 - RNA, 23 nt, Human
aggaagcauuuaagggcagaagg

SEQ ID NO: 515273 - RNA, 20 nt, Human
aggcacaggacccaguaacc

SEQ ID NO: 515274 - RNA, 23 nt, Human
aggcugggagggaaugggucaag

SEQ ID NO: 515275 - RNA, 19 nt, Human
agggaggcuggggacucug

SEQ ID NO: 515276 - RNA, 25 nt, Human
agguccccugccucagcagggccug

SEQ ID NO: 515277 - RNA, 24 nt, Human
aggucucaugaaagaagugcuguu

SEQ ID NO: 515278 - RNA, 24 nt, Human
aguaacaaaggucucaugaaagaa

SEQ ID NO: 515279 - RNA, 23 nt, Human
agugccccucugcuccagauggc

SEQ ID NO: 515280 - RNA, 20 nt, Human
agugcuguucucccagaguc

SEQ ID NO: 515281 - RNA, 19 nt, Human
auagagggcugcaugcccc

SEQ ID NO: 515282 - RNA, 18 nt, Human
aucuugaccugcuccuuc

SEQ ID NO: 515283 - RNA, 22 nt, Human
caaaacggacaggcacaggacc

SEQ ID NO: 515284 - RNA, 27 nt, Human
caaaacggacaggcacaggacccagua

SEQ ID NO: 515285 - RNA, 20 nt, Human
caaguauucagcucgggcca

SEQ ID NO: 515286 - RNA, 19 nt, Human
cacguggggauacggaggc

SEQ ID NO: 515287 - RNA, 19 nt, Human
cagccuggguuagugcccc

SEQ ID NO: 515288 - RNA, 23 nt, Human
cagccuggguuagugccccucug

SEQ ID NO: 515289 - RNA, 21 nt, Human
cagcugcugaaucccccuccu

SEQ ID NO: 515290 - RNA, 25 nt, Human
caggaacaaggcuugggcuucuuaa

SEQ ID NO: 515291 - RNA, 20 nt, Human
caggacccaguaaccaccga

SEQ ID NO: 515292 - RNA, 20 nt, Human
caguaggucccggcagucuc

SEQ ID NO: 515293 - RNA, 20 nt, Human
caucagaacccuucagaagu

SEQ ID NO: 515294 - RNA, 20 nt, Human
caugccccaaaacggacagg

SEQ ID NO: 515295 - RNA, 22 nt, Human
ccaaggaagcauuuaagggcag

SEQ ID NO: 515296 - RNA, 23 nt, Human
ccaccgaguaacaaaggucucau

SEQ ID NO: 515297 - RNA, 23 nt, Human
cccaaaagauccagcuuucaugc

SEQ ID NO: 515298 - RNA, 19 nt, Human
cccagaaaggggaaagagc

SEQ ID NO: 515299 - RNA, 20 nt, Human
ccccaaaacggacaggcaca

SEQ ID NO: 515300 - RNA, 18 nt, Human
ccccugccucagcagggc

SEQ ID NO: 515301 - RNA, 26 nt, Human
ccccuugcccucuucucggagccaaa

SEQ ID NO: 515302 - RNA, 20 nt, Human
ccggcucccggcgccccucc

SEQ ID NO: 515303 - RNA, 19 nt, Human
ccuaggccagggcaggaac

SEQ ID NO: 515304 - RNA, 24 nt, Human
ccuaggccagggcaggaacaaggc

SEQ ID NO: 515305 - RNA, 23 nt, Human
ccuccccuccaguauacagcacc

SEQ ID NO: 515306 - RNA, 22 nt, Human
ccucccucucccugucccaggc

SEQ ID NO: 515307 - RNA, 20 nt, Human
ccugcgggggccccuugccc

SEQ ID NO: 515308 - RNA, 18 nt, Human
ccuggccugacgccccuc

SEQ ID NO: 515309 - RNA, 21 nt, Human
ccuggccugacgccccucagc

SEQ ID NO: 515310 - RNA, 21 nt, Human
ccuucaaguauucagcucggg

SEQ ID NO: 515311 - RNA, 18 nt, Human
ccuucagaaguggcccag

SEQ ID NO: 515312 - RNA, 18 nt, Human
ccuugccugaggaaacug

SEQ ID NO: 515313 - RNA, 19 nt, Human
cgccuccggcccgggggcu

SEQ ID NO: 515314 - RNA, 26 nt, Human
cggacaggcacaggacccaguaacca

SEQ ID NO: 515315 - RNA, 19 nt, Human
cggaggcugggagggaaug

SEQ ID NO: 515316 - RNA, 22 nt, Human
cggcucccggcgccccuccccu

SEQ ID NO: 515317 - RNA, 23 nt, Human
cgggcaggugugaguucccagaa

SEQ ID NO: 515318 - RNA, 22 nt, Human
cuccccacugggcaugugcucc

SEQ ID NO: 515319 - RNA, 23 nt, Human
cugcgggggccccuugcccucuu

SEQ ID NO: 515320 - RNA, 22 nt, Human
cugcuccagauggcucacaucu

SEQ ID NO: 515321 - RNA, 24 nt, Human
cuucuagggucacugaagggugca

SEQ ID NO: 515322 - RNA, 20 nt, Human
cuugucccgggccaucucuc

SEQ ID NO: 515323 - RNA, 19 nt, Human
gaagggcaggccaggggca

SEQ ID NO: 515324 - RNA, 23 nt, Human
gaaguacccugcgggggccccuc

SEQ ID NO: 515325 - RNA, 20 nt, Human
gaccaaggaacccuccugag

SEQ ID NO: 515326 - RNA, 18 nt, Human
gaccugcuccuucaagua

SEQ ID NO: 515327 - RNA, 21 nt, Human
gaccuggaggcaaaggggggc

SEQ ID NO: 515328 - RNA, 25 nt, Human
gagauucccucaucuugaccugcuc

SEQ ID NO: 515329 - RNA, 19 nt, Human
gaggcuggggacucuggga

SEQ ID NO: 515330 - RNA, 21 nt, Human
gcaaagaggagcugaguugga

SEQ ID NO: 515331 - RNA, 19 nt, Human
gcagggaggacagacagcu

SEQ ID NO: 515332 - RNA, 21 nt, Human
gcagggaggacagacagcucu

SEQ ID NO: 515333 - RNA, 18 nt, Human
gcccagagggaacggagg

SEQ ID NO: 515334 - RNA, 18 nt, Human
gccccagacucuccccac

SEQ ID NO: 515335 - RNA, 22 nt, Human
gcccgaagagggcuucugugga

SEQ ID NO: 515336 - RNA, 20 nt, Human
gcccgggacacguacugccc

SEQ ID NO: 515337 - RNA, 20 nt, Human
gcgccccgccaguuccugca

SEQ ID NO: 515338 - RNA, 18 nt, Human
gcucccggcgccccuccc

SEQ ID NO: 515339 - RNA, 19 nt, Human
gcuugcccagggcuccacg

SEQ ID NO: 515340 - RNA, 23 nt, Human
ggcagaagggcuacaaaucacca

SEQ ID NO: 515341 - RNA, 25 nt, Human
ggccauggcagcugaagccacuucc

SEQ ID NO: 515342 - RNA, 20 nt, Human
ggcccgggggcuccgcuugg

SEQ ID NO: 515343 - RNA, 21 nt, Human
ggcggcagggcaggccuagaa

SEQ ID NO: 515344 - RNA, 18 nt, Human
gggaaagagcuugcccag

SEQ ID NO: 515345 - RNA, 19 nt, Human
gggaacggaggugggagag

SEQ ID NO: 515346 - RNA, 22 nt, Human
gggagagcaggggccgcaaggg

SEQ ID NO: 515347 - RNA, 24 nt, Human
gggcaggaacaaggcuugggcuuc

SEQ ID NO: 515348 - RNA, 21 nt, Human
ggggacucugggauauggggg

SEQ ID NO: 515349 - RNA, 19 nt, Human
gggggcugcccgaagaggg

SEQ ID NO: 515350 - RNA, 19 nt, Human
ggguucuguggggcugagu

SEQ ID NO: 515351 - RNA, 21 nt, Human
ggguucuguggggcugagugc

SEQ ID NO: 515352 - RNA, 22 nt, Human
gguggucccugagggguguugg

SEQ ID NO: 515353 - RNA, 24 nt, Human
gucaguuuucaucagaacccuuca

SEQ ID NO: 515354 - RNA, 24 nt, Human
gucccgggaagggcaggccagggg

SEQ ID NO: 515355 - RNA, 19 nt, Human
guggaagggaggcagagcg

SEQ ID NO: 515356 - RNA, 19 nt, Human
uaaaccccaaaagauccag

SEQ ID NO: 515357 - RNA, 19 nt, Human
uaggccagggcaggaacaa

SEQ ID NO: 515358 - RNA, 22 nt, Human
ucaaaccaucuguggggugcag

SEQ ID NO: 515359 - RNA, 25 nt, Human
ucaaauacauucuuuuccagguucc

SEQ ID NO: 515360 - RNA, 20 nt, Human
ucacaucuguccaaucauuc

SEQ ID NO: 515361 - RNA, 21 nt, Human
ucagcacuguccauccaagaa

SEQ ID NO: 515362 - RNA, 22 nt, Human
ucagcccgggacacguacugcc

SEQ ID NO: 515363 - RNA, 19 nt, Human
uccaagccucccucucccu

SEQ ID NO: 515364 - RNA, 20 nt, Human
uccagcacaaggcccgcgcu

SEQ ID NO: 515365 - RNA, 23 nt, Human
ucccagaguccugcccuccccuc

SEQ ID NO: 515366 - RNA, 21 nt, Human
ucccagcgagauucccucauc

SEQ ID NO: 515367 - RNA, 24 nt, Human
ucccccuccuggucuuucuucaca

SEQ ID NO: 515368 - RNA, 18 nt, Human
uccccugccucagcaggg

SEQ ID NO: 515369 - RNA, 21 nt, Human
uccgcccggcucccggcgccc

SEQ ID NO: 515370 - RNA, 23 nt, Human
uccugcagggcccacguggggau

SEQ ID NO: 515371 - RNA, 23 nt, Human
uccuggucuuucuucacagccug

SEQ ID NO: 515372 - RNA, 18 nt, Human
ugagguucugaaccucag

SEQ ID NO: 515373 - RNA, 19 nt, Human
ugaguuggaauaagggguc

SEQ ID NO: 515374 - RNA, 25 nt, Human
ugcccgaagagggcuucuguggaag

SEQ ID NO: 515375 - RNA, 20 nt, Human
ugccugaggaaacuguaggc

SEQ ID NO: 515376 - RNA, 21 nt, Human
ugcuacggaucuucucuucca

SEQ ID NO: 515377 - RNA, 19 nt, Human
ugcuugagggauuaaccua

SEQ ID NO: 515378 - RNA, 21 nt, Human
uggaaggagaugcgacggcug

SEQ ID NO: 515379 - RNA, 22 nt, Human
uggaaggagaugcgacggcugg

SEQ ID NO: 515380 - RNA, 21 nt, Human
uggccuugagcuccucagccc

SEQ ID NO: 515381 - RNA, 18 nt, Human
ugggcugugaagguauca

SEQ ID NO: 515382 - RNA, 25 nt, Human
uggggcccagagggaacggaggugg

SEQ ID NO: 515383 - RNA, 23 nt, Human
ugggucaagccuggccugacgcc

SEQ ID NO: 515384 - RNA, 21 nt, Human
ugggucagacugucuccaagc

SEQ ID NO: 515385 - RNA, 22 nt, Human
ugucccaggcucaaacuccagc

SEQ ID NO: 515386 - RNA, 19 nt, Human
ugugaagguaucagcccca

SEQ ID NO: 515387 - RNA, 18 nt, Human
uuacacucagccuccugc

SEQ ID NO: 515388 - RNA, 24 nt, Human
uuccugcagggcccacguggggau

SEQ ID NO: 515389 - RNA, 22 nt, Human
uucuagggucacugaagggugc

SEQ ID NO: 515390 - RNA, 24 nt, Human
uucuguggaagggaggcagagcgg

SEQ ID NO: 515391 - RNA, 21 nt, Human
uugcccagggcuccacggcgg

SEQ ID NO: 515392 - RNA, 26 nt, Human
uuggaagaggagacgauggccuugag

SEQ ID NO: 515393 - RNA, 19 nt, Human
aaaacaaugcuuucuaaag

SEQ ID NO: 515394 - RNA, 24 nt, Human
aaacagagcaaaggauaagacccg

SEQ ID NO: 515395 - RNA, 24 nt, Human
aaagugcugggauuacaggcguga

SEQ ID NO: 515396 - RNA, 20 nt, Human
aaccuagaaacagaaggaga

SEQ ID NO: 515397 - RNA, 22 nt, Human
aaccuugugauccacccaccuc

SEQ ID NO: 515398 - RNA, 22 nt, Human
aaccuugugauccacccaccuc

SEQ ID NO: 515399 - RNA, 24 nt, Human
aaccuugugauccacccaccucgg

SEQ ID NO: 515400 - RNA, 18 nt, Human
aagcucuccagcuccugc

SEQ ID NO: 515401 - RNA, 19 nt, Human
aagcugcugggacuacagg

SEQ ID NO: 515402 - RNA, 20 nt, Human
aagcugcugggacuacaggc

SEQ ID NO: 515403 - RNA, 23 nt, Human
aagcuuccugagaaggauccgaa

SEQ ID NO: 515404 - RNA, 19 nt, Human
aagugcugggauuacaggc

SEQ ID NO: 515405 - RNA, 19 nt, Human
aagugcugggauuacaggc

SEQ ID NO: 515406 - RNA, 26 nt, Human
aagugcugggauuacaggcgugagcc

SEQ ID NO: 515407 - RNA, 21 nt, Human
aaucacgucuacuccuggaca

SEQ ID NO: 515408 - RNA, 25 nt, Human
aauuuuuuguauuuuuuuaguagag

SEQ ID NO: 515409 - RNA, 26 nt, Human
aauuuuuuguauuuuuuuaguagaga

SEQ ID NO: 515410 - RNA, 22 nt, Human
acacuccccccaaccccuacuc

SEQ ID NO: 515411 - RNA, 21 nt, Human
acagacuaucaggacuggacg

SEQ ID NO: 515412 - RNA, 18 nt, Human
acaggguuucacuguguu

SEQ ID NO: 515413 - RNA, 19 nt, Human
acaggguuucacuguguua

SEQ ID NO: 515414 - RNA, 20 nt, Human
acaggguuucacuguguuag

SEQ ID NO: 515415 - RNA, 24 nt, Human
acaggguuucacuguguuagccag

SEQ ID NO: 515416 - RNA, 18 nt, Human
accauucuccagccucag

SEQ ID NO: 515417 - RNA, 19 nt, Human
accuagaaacagaaggaga

SEQ ID NO: 515418 - RNA, 20 nt, Human
accugucugaccauggcugg

SEQ ID NO: 515419 - RNA, 24 nt, Human
accuugugauccacccaccucggc

SEQ ID NO: 515420 - RNA, 22 nt, Human
acuaaaacaaugcuuucuaaag

SEQ ID NO: 515421 - RNA, 26 nt, Human
acuacaggcgcccaccaccacgccaa

SEQ ID NO: 515422 - RNA, 20 nt, Human
acugcaagcuccgccuccug

SEQ ID NO: 515423 - RNA, 20 nt, Human
agaaaaacagagcaaagggg

SEQ ID NO: 515424 - RNA, 22 nt, Human
agaaggauccgaaauccacaga

SEQ ID NO: 515425 - RNA, 21 nt, Human
agacaauccuagaaugggaca

SEQ ID NO: 515426 - RNA, 18 nt, Human
agacaggguuucacugug

SEQ ID NO: 515427 - RNA, 18 nt, Human
agacccggaugacagaug

SEQ ID NO: 515428 - RNA, 21 nt, Human
agagaaaaacagagcaaagga

SEQ ID NO: 515429 - RNA, 19 nt, Human
agagacaggguuucacugu

SEQ ID NO: 515430 - RNA, 22 nt, Human
agagcaaaggauaagacccgga

SEQ ID NO: 515431 - RNA, 22 nt, Human
agcacagcacuccccuagccuc

SEQ ID NO: 515432 - RNA, 21 nt, Human
agccccaagggccuucagaga

SEQ ID NO: 515433 - RNA, 20 nt, Human
agccucaccucuucccccag

SEQ ID NO: 515434 - RNA, 18 nt, Human
agcuccgccuccuggguu

SEQ ID NO: 515435 - RNA, 18 nt, Human
agcugugaggucagucug

SEQ ID NO: 515436 - RNA, 22 nt, Human
aggaagaggagcucuggcuacu

SEQ ID NO: 515437 - RNA, 19 nt, Human
aggaccaggggagggaggg

SEQ ID NO: 515438 - RNA, 22 nt, Human
agggguaaacugaggcucugag

SEQ ID NO: 515439 - RNA, 20 nt, Human
agugcaguggcgcgaucaug

SEQ ID NO: 515440 - RNA, 23 nt, Human
agugcaguggcgcgaucauggcu

SEQ ID NO: 515441 - RNA, 24 nt, Human
agugcaguggcgcgaucauggcuc

SEQ ID NO: 515442 - RNA, 18 nt, Human
agugcugggauuacaggc

SEQ ID NO: 515443 - RNA, 18 nt, Human
caaaggauaagacccgga

SEQ ID NO: 515444 - RNA, 24 nt, Human
caaagugcugggauuacaggcgug

SEQ ID NO: 515445 - RNA, 22 nt, Human
caaccaccaagcuugccccugu

SEQ ID NO: 515446 - RNA, 26 nt, Human
caagacugaagggccaggagggcuga

SEQ ID NO: 515447 - RNA, 18 nt, Human
cacagcacuccccuagcc

SEQ ID NO: 515448 - RNA, 22 nt, Human
cacagcacuccccuagccucac

SEQ ID NO: 515449 - RNA, 26 nt, Human
caccaagacugaagggccaggagggc

SEQ ID NO: 515450 - RNA, 22 nt, Human
caccaaucacgucuacuccugg

SEQ ID NO: 515451 - RNA, 22 nt, Human
cacccaccucggccucccaaag

SEQ ID NO: 515452 - RNA, 23 nt, Human
cacccaccucggccucccaaagu

SEQ ID NO: 515453 - RNA, 22 nt, Human
caccccuuuucacugaugggga

SEQ ID NO: 515454 - RNA, 24 nt, Human
cacccgggcuggagugcaguggcg

SEQ ID NO: 515455 - RNA, 24 nt, Human
caccucggccucccaaagugcugg

SEQ ID NO: 515456 - RNA, 21 nt, Human
caccucugaacuucuaaaccu

SEQ ID NO: 515457 - RNA, 24 nt, Human
caccucugaacuucuaaaccuaga

SEQ ID NO: 515458 - RNA, 20 nt, Human
caccuuccccacucugauuu

SEQ ID NO: 515459 - RNA, 18 nt, Human
cacuccccuagccucacc

SEQ ID NO: 515460 - RNA, 19 nt, Human
cacuccccuagccucaccu

SEQ ID NO: 515461 - RNA, 18 nt, Human
cacuguguuagccaggau

SEQ ID NO: 515462 - RNA, 19 nt, Human
cacuguguuagccaggaug

SEQ ID NO: 515463 - RNA, 24 nt, Human
cacuguguuagccaggauggucuc

SEQ ID NO: 515464 - RNA, 18 nt, Human
cagaaggagacuguacac

SEQ ID NO: 515465 - RNA, 20 nt, Human
cagagcaaaggauaagaccc

SEQ ID NO: 515466 - RNA, 24 nt, Human
cagaugugcuuugcaaaaagcuuc

SEQ ID NO: 515467 - RNA, 23 nt, Human
cagccucagccucccaagcugcu

SEQ ID NO: 515468 - RNA, 25 nt, Human
cagccucagccucccaagcugcugg

SEQ ID NO: 515469 - RNA, 20 nt, Human
caggacuggacggccugcug

SEQ ID NO: 515470 - RNA, 21 nt, Human
caggacuggacggccugcuga

SEQ ID NO: 515471 - RNA, 24 nt, Human
caggguuucacuguguuagccagg

SEQ ID NO: 515472 - RNA, 21 nt, Human
caguggcgcgaucauggcuca

SEQ ID NO: 515473 - RNA, 20 nt, Human
cauggcucacugcaagcucc

SEQ ID NO: 515474 - RNA, 20 nt, Human
ccaaagugcugggauuacag

SEQ ID NO: 515475 - RNA, 22 nt, Human
ccaaagugcugggauuacaggc

SEQ ID NO: 515476 - RNA, 22 nt, Human
ccaaagugcugggauuacaggc

SEQ ID NO: 515477 - RNA, 24 nt, Human
ccaaagugcugggauuacaggcgu

SEQ ID NO: 515478 - RNA, 19 nt, Human
ccaagcuugccccugugcc

SEQ ID NO: 515479 - RNA, 19 nt, Human
ccaccaccacgccaagcga

SEQ ID NO: 515480 - RNA, 20 nt, Human
ccaccauuuuaaugcagggg

SEQ ID NO: 515481 - RNA, 19 nt, Human
ccaugaggaucagccgccu

SEQ ID NO: 515482 - RNA, 22 nt, Human
cccaaccuugugauccacccac

SEQ ID NO: 515483 - RNA, 23 nt, Human
cccaagcugcugggacuacaggc

SEQ ID NO: 515484 - RNA, 18 nt, Human
cccagaacuggcuggggc

SEQ ID NO: 515485 - RNA, 18 nt, Human
ccccaaauaacuuggcca

SEQ ID NO: 515486 - RNA, 21 nt, Human
ccccaaauaacuuggccacca

SEQ ID NO: 515487 - RNA, 21 nt, Human
ccccaagggccuucagagacc

SEQ ID NO: 515488 - RNA, 20 nt, Human
cccccaaccccuacucuggc

SEQ ID NO: 515489 - RNA, 23 nt, Human
ccccucucuaccacucaccuucc

SEQ ID NO: 515490 - RNA, 23 nt, Human
ccccugugcccagguggcaccaa

SEQ ID NO: 515491 - RNA, 18 nt, Human
cccucucuaccacucacc

SEQ ID NO: 515492 - RNA, 24 nt, Human
ccucucuaccacucaccuucccca

SEQ ID NO: 515493 - RNA, 18 nt, Human
ccuggacuaaaacaaugc

SEQ ID NO: 515494 - RNA, 28 nt, Human
ccuggacuaaaacaaugcuuucuaaagc

SEQ ID NO: 515495 - RNA, 19 nt, Human
ccuggggcugaagcugggg

SEQ ID NO: 515496 - RNA, 19 nt, Human
cgccuccuggguucacacc

SEQ ID NO: 515497 - RNA, 22 nt, Human
cuccagccucagccucccaagc

SEQ ID NO: 515498 - RNA, 25 nt, Human
cucccaaccuugugauccacccacc

SEQ ID NO: 515499 - RNA, 21 nt, Human
cucccaagcugcugggacuac

SEQ ID NO: 515500 - RNA, 27 nt, Human
cucccagaacuggcuggggcucccaua

SEQ ID NO: 515501 - RNA, 23 nt, Human
cuccccuagccucaccucuuccc

SEQ ID NO: 515502 - RNA, 18 nt, Human
cucccuuuccuucuccac

SEQ ID NO: 515503 - RNA, 20 nt, Human
cuccuccacccucuucauuu

SEQ ID NO: 515504 - RNA, 21 nt, Human
cuccuggguucacaccauucu

SEQ ID NO: 515505 - RNA, 21 nt, Human
cugacgcuggcuuagggccug

SEQ ID NO: 515506 - RNA, 19 nt, Human
cugcagccugaugugccug

SEQ ID NO: 515507 - RNA, 24 nt, Human
cugccuggcccugucagccccaag

SEQ ID NO: 515508 - RNA, 23 nt, Human
cuggggcugaagcuggggaccuu

SEQ ID NO: 515509 - RNA, 22 nt, Human
cuggugccgcucagccuccucu

SEQ ID NO: 515510 - RNA, 19 nt, Human
cugugccuggacuaaaaca

SEQ ID NO: 515511 - RNA, 18 nt, Human
cuucagagacccccucuc

SEQ ID NO: 515512 - RNA, 24 nt, Human
cuucuaaaccuagaaacagaagga

SEQ ID NO: 515513 - RNA, 24 nt, Human
cuugcucugucacccgggcuggag

SEQ ID NO: 515514 - RNA, 18 nt, Human
gaccauggcuggagaauc

SEQ ID NO: 515515 - RNA, 18 nt, Human
gaccuugagcaaggcccu

SEQ ID NO: 515516 - RNA, 21 nt, Human
gagacggagucuugcucuguc

SEQ ID NO: 515517 - RNA, 18 nt, Human
gaggcucugagcaggcca

SEQ ID NO: 515518 - RNA, 18 nt, Human
gauuacaggcgugagcca

SEQ ID NO: 515519 - RNA, 21 nt, Human
gauuacaggcgugagccacug

SEQ ID NO: 515520 - RNA, 24 nt, Human
gauuacaggcgugagccacugugc

SEQ ID NO: 515521 - RNA, 18 nt, Human
gccucaccucuuccccca

SEQ ID NO: 515522 - RNA, 25 nt, Human
gccuccuggguucacaccauucucc

SEQ ID NO: 515523 - RNA, 18 nt, Human
gccuggaaagccuccagc

SEQ ID NO: 515524 - RNA, 20 nt, Human
gccuucagagacccccucuc

SEQ ID NO: 515525 - RNA, 21 nt, Human
gcucacugcaagcuccgccuc

SEQ ID NO: 515526 - RNA, 19 nt, Human
gcuggagugcaguggcgcg

SEQ ID NO: 515527 - RNA, 23 nt, Human
gcuguggaaauggagaaacacag

SEQ ID NO: 515528 - RNA, 22 nt, Human
ggacaguuauagcugugucccc

SEQ ID NO: 515529 - RNA, 20 nt, Human
ggagaaacacagucaccucu

SEQ ID NO: 515530 - RNA, 21 nt, Human
ggaucaggggcagugggagga

SEQ ID NO: 515531 - RNA, 22 nt, Human
ggaucaggggcagugggaggag

SEQ ID NO: 515532 - RNA, 18 nt, Human
ggaugcaccuugccuggu

SEQ ID NO: 515533 - RNA, 20 nt, Human
ggcagugggaggaggaguua

SEQ ID NO: 515534 - RNA, 19 nt, Human
gggccagggagaggaagau

SEQ ID NO: 515535 - RNA, 19 nt, Human
ggugagaggugugggaggg

SEQ ID NO: 515536 - RNA, 22 nt, Human
ggugagggccagggagaggaag

SEQ ID NO: 515537 - RNA, 24 nt, Human
ggugugggagggacagaagcuuug

SEQ ID NO: 515538 - RNA, 18 nt, Human
guaaaagccugggccugg

SEQ ID NO: 515539 - RNA, 24 nt, Human
gugauccacccaccucggccuccc

SEQ ID NO: 515540 - RNA, 19 nt, Human
guggacacgacucuggccc

SEQ ID NO: 515541 - RNA, 23 nt, Human
uaaaccuagaaacagaaggagac

SEQ ID NO: 515542 - RNA, 23 nt, Human
uaagaguccuuugaccagucccc

SEQ ID NO: 515543 - RNA, 22 nt, Human
uacaggcgugagccacugugcc

SEQ ID NO: 515544 - RNA, 22 nt, Human
uacaggcgugagccacugugcc

SEQ ID NO: 515545 - RNA, 23 nt, Human
uacaggcgugagccacugugccu

SEQ ID NO: 515546 - RNA, 21 nt, Human
uacgcucauucuucaucucga

SEQ ID NO: 515547 - RNA, 22 nt, Human
uacucuggccuucagacaaucc

SEQ ID NO: 515548 - RNA, 22 nt, Human
uagagacaggguuucacugugu

SEQ ID NO: 515549 - RNA, 22 nt, Human
uagaugaauggacucacaacca

SEQ ID NO: 515550 - RNA, 20 nt, Human
uaguagagacaggguuucac

SEQ ID NO: 515551 - RNA, 24 nt, Human
uaguagagacaggguuucacugug

SEQ ID NO: 515552 - RNA, 19 nt, Human
ucaaucucccaaccuugug

SEQ ID NO: 515553 - RNA, 20 nt, Human
ucaaucucccaaccuuguga

SEQ ID NO: 515554 - RNA, 19 nt, Human
ucacagaucugauuuucca

SEQ ID NO: 515555 - RNA, 24 nt, Human
ucacccgggcuggagugcaguggc

SEQ ID NO: 515556 - RNA, 18 nt, Human
ucacugcaagcuccgccu

SEQ ID NO: 515557 - RNA, 23 nt, Human
ucacugcaagcuccgccuccugg

SEQ ID NO: 515558 - RNA, 24 nt, Human
ucacugcaagcuccgccuccuggg

SEQ ID NO: 515559 - RNA, 24 nt, Human
ucacuguguuagccaggauggucu

SEQ ID NO: 515560 - RNA, 20 nt, Human
uccacacuccccccaacccc

SEQ ID NO: 515561 - RNA, 24 nt, Human
ucccaaagugcugggauuacaggc

SEQ ID NO: 515562 - RNA, 23 nt, Human
ucccaaccuugugauccacccac

SEQ ID NO: 515563 - RNA, 24 nt, Human
ucccaagcugcugggacuacaggc

SEQ ID NO: 515564 - RNA, 20 nt, Human
uccccaaauaacuuggccac

SEQ ID NO: 515565 - RNA, 24 nt, Human
uccccccaaccccuacucuggccu

SEQ ID NO: 515566 - RNA, 21 nt, Human
uccccccaccauuuuaaugca

SEQ ID NO: 515567 - RNA, 22 nt, Human
uccgaaauccacagacuaucag

SEQ ID NO: 515568 - RNA, 22 nt, Human
uccugcucccagaacuggcugg

SEQ ID NO: 515569 - RNA, 19 nt, Human
uccuguugcagggucguaa

SEQ ID NO: 515570 - RNA, 24 nt, Human
ucgaugacaaaguguaagcucucc

SEQ ID NO: 515571 - RNA, 18 nt, Human
ucggccucccaaagugcu

SEQ ID NO: 515572 - RNA, 23 nt, Human
ucuaaagcgcauucugcagccug

SEQ ID NO: 515573 - RNA, 18 nt, Human
ucuauggucuccugcugg

SEQ ID NO: 515574 - RNA, 24 nt, Human
ucuccagccucagccucccaagcu

SEQ ID NO: 515575 - RNA, 20 nt, Human
ucuccagcuccugcucccag

SEQ ID NO: 515576 - RNA, 24 nt, Human
ucugucacccgggcuggagugcag

SEQ ID NO: 515577 - RNA, 23 nt, Human
ucuugcucugucacccgggcugg

SEQ ID NO: 515578 - RNA, 24 nt, Human
ucuugcucugucacccgggcugga

SEQ ID NO: 515579 - RNA, 20 nt, Human
ugaaaaagaaacuaaguggg

SEQ ID NO: 515580 - RNA, 25 nt, Human
ugaacuucuaaaccuagaaacagaa

SEQ ID NO: 515581 - RNA, 19 nt, Human
ugaagggccaggagggcug

SEQ ID NO: 515582 - RNA, 22 nt, Human
ugaauggacucacaaccaccaa

SEQ ID NO: 515583 - RNA, 19 nt, Human
ugagcaggccaggguggag

SEQ ID NO: 515584 - RNA, 18 nt, Human
ugaggaauaggaaccugc

SEQ ID NO: 515585 - RNA, 23 nt, Human
ugagggccagggagaggaagauu

SEQ ID NO: 515586 - RNA, 21 nt, Human
ugaggugagaggugugggagg

SEQ ID NO: 515587 - RNA, 24 nt, Human
ugauccacccaccucggccuccca

SEQ ID NO: 515588 - RNA, 22 nt, Human
ugaugccucagcuggggaggcu

SEQ ID NO: 515589 - RNA, 22 nt, Human
ugcccagguggcaccaagacug

SEQ ID NO: 515590 - RNA, 19 nt, Human
ugccgcucagccuccucug

SEQ ID NO: 515591 - RNA, 20 nt, Human
ugccuggacuaaaacaaugc

SEQ ID NO: 515592 - RNA, 24 nt, Human
ugcgggguuuguccacacuccccc

SEQ ID NO: 515593 - RNA, 24 nt, Human
ugcucugucacccgggcuggagug

SEQ ID NO: 515594 - RNA, 21 nt, Human
ugcugggacuacaggcgccca

SEQ ID NO: 515595 - RNA, 24 nt, Human
ugcugggauuacaggcgugagcca

SEQ ID NO: 515596 - RNA, 22 nt, Human
uggagaaacacagucaccucug

SEQ ID NO: 515597 - RNA, 21 nt, Human
uggagugcaguggcgcgauca

SEQ ID NO: 515598 - RNA, 24 nt, Human
uggagugcaguggcgcgaucaugg

SEQ ID NO: 515599 - RNA, 20 nt, Human
uggccuggaaagccuccagc

SEQ ID NO: 515600 - RNA, 23 nt, Human
uggccuggaaagccuccagcugu

SEQ ID NO: 515601 - RNA, 18 nt, Human
uggccuucagacaauccu

SEQ ID NO: 515602 - RNA, 20 nt, Human
uggcuggggcucccauaauc

SEQ ID NO: 515603 - RNA, 25 nt, Human
uggcuguggaaauggagaaacacag

SEQ ID NO: 515604 - RNA, 21 nt, Human
ugggacuacaggcgcccacca

SEQ ID NO: 515605 - RNA, 24 nt, Human
ugggacuacaggcgcccaccacca

SEQ ID NO: 515606 - RNA, 18 nt, Human
ugggaucaggggcagugg

SEQ ID NO: 515607 - RNA, 18 nt, Human
ugggauuacaggcgugag

SEQ ID NO: 515608 - RNA, 21 nt, Human
ugggauuacaggcgugagcca

SEQ ID NO: 515609 - RNA, 22 nt, Human
ugggauuacaggcgugagccac

SEQ ID NO: 515610 - RNA, 22 nt, Human
ugggauuacaggcgugagccac

SEQ ID NO: 515611 - RNA, 22 nt, Human
ugggauuacaggcgugagccac

SEQ ID NO: 515612 - RNA, 23 nt, Human
ugggauuacaggcgugagccacu

SEQ ID NO: 515613 - RNA, 24 nt, Human
ugggauuacaggcgugagccacug

SEQ ID NO: 515614 - RNA, 18 nt, Human
uguaaaagccugggccug

SEQ ID NO: 515615 - RNA, 23 nt, Human
ugugaggugagaggugugggagg

SEQ ID NO: 515616 - RNA, 21 nt, Human
uuaguagagacaggguuucac

SEQ ID NO: 515617 - RNA, 24 nt, Human
uuaguagagacaggguuucacugu

SEQ ID NO: 515618 - RNA, 21 nt, Human
uucacuguguuagccaggaug

SEQ ID NO: 515619 - RNA, 23 nt, Human
uuccagagccugaagagaaaaac

SEQ ID NO: 515620 - RNA, 26 nt, Human
uucuucuuuuccuccucauguugcug

SEQ ID NO: 515621 - RNA, 22 nt, Human
uugcagggucguaauuuuuucc

SEQ ID NO: 515622 - RNA, 24 nt, Human
uugcucugucacccgggcuggagu

SEQ ID NO: 515623 - RNA, 20 nt, Human
uugguggacacgacucuggc

SEQ ID NO: 515624 - RNA, 23 nt, Human
uuguccacacuccccccaacccc

SEQ ID NO: 515625 - RNA, 19 nt, Human
uuucacuguguuagccagg

SEQ ID NO: 515626 - RNA, 24 nt, Human
uuuuuaguagagacaggguuucac

SEQ ID NO: 515627 - RNA, 23 nt, Human
uuuuuguauuuuuuuaguagaga

SEQ ID NO: 515628 - RNA, 23 nt, Human
uuuuuuaguagagacaggguuuc

SEQ ID NO: 515629 - RNA, 26 nt, Human
uuuuuuguauuuuuuuaguagagaca

SEQ ID NO: 515630 - RNA, 19 nt, Human
aaacaaagaagaaaacacc

SEQ ID NO: 515631 - RNA, 22 nt, Human
aaacaaagaagaaaacaccugu

SEQ ID NO: 515632 - RNA, 18 nt, Human
aaacauaacuagcuggca

SEQ ID NO: 515633 - RNA, 23 nt, Human
aaacauggaauaaacaaagaaga

SEQ ID NO: 515634 - RNA, 22 nt, Human
aacauuucucuaaacauaacua

SEQ ID NO: 515635 - RNA, 18 nt, Human
aaccucggccucuugagc

SEQ ID NO: 515636 - RNA, 24 nt, Human
aagugauccuucugccuuggccuc

SEQ ID NO: 515637 - RNA, 19 nt, Human
aaugugcugggauuacagg

SEQ ID NO: 515638 - RNA, 22 nt, Human
acaugcucacaauucuacaaga

SEQ ID NO: 515639 - RNA, 19 nt, Human
acuacaggugugugccauu

SEQ ID NO: 515640 - RNA, 21 nt, Human
acuugugcuuugugugugguu

SEQ ID NO: 515641 - RNA, 22 nt, Human
agaaaauaacccauuucuuaac

SEQ ID NO: 515642 - RNA, 18 nt, Human
agaucugaaccugaacuc

SEQ ID NO: 515643 - RNA, 21 nt, Human
agcuaaucugaauacugucuc

SEQ ID NO: 515644 - RNA, 18 nt, Human
agcuacuuuagauuucca

SEQ ID NO: 515645 - RNA, 21 nt, Human
agcuucccgaguagcugggac

SEQ ID NO: 515646 - RNA, 22 nt, Human
aggcacugagagguuaguaacu

SEQ ID NO: 515647 - RNA, 22 nt, Human
agggaacaggcacugagagguu

SEQ ID NO: 515648 - RNA, 25 nt, Human
aggugauccucccaccuuagcuucc

SEQ ID NO: 515649 - RNA, 23 nt, Human
aguagcugggacuacaggugugu

SEQ ID NO: 515650 - RNA, 24 nt, Human
aguggcaucugauguauggggaga

SEQ ID NO: 515651 - RNA, 21 nt, Human
aguuucacauuauuuugcuag

SEQ ID NO: 515652 - RNA, 24 nt, Human
auccucauuuugcaaacgagggaa

SEQ ID NO: 515653 - RNA, 19 nt, Human
augugcugggauuacaggu

SEQ ID NO: 515654 - RNA, 18 nt, Human
caaagacccggcaugaag

SEQ ID NO: 515655 - RNA, 19 nt, Human
caacuaaaccaacaagcag

SEQ ID NO: 515656 - RNA, 19 nt, Human
caaggcuggguccagcauc

SEQ ID NO: 515657 - RNA, 22 nt, Human
caagugauccuucugccuuggc

SEQ ID NO: 515658 - RNA, 27 nt, Human
caagugauccuucugccuuggccuccc

SEQ ID NO: 515659 - RNA, 27 nt, Human
caagugauccuucugccuuggccuccc

SEQ ID NO: 515660 - RNA, 27 nt, Human
caaugugcugggauuacaggugucagu

SEQ ID NO: 515661 - RNA, 24 nt, Human
caccuuagcuucccgaguagcugg

SEQ ID NO: 515662 - RNA, 19 nt, Human
cagaauacauagauguuca

SEQ ID NO: 515663 - RNA, 19 nt, Human
cagcccaggaaaagggcua

SEQ ID NO: 515664 - RNA, 24 nt, Human
cagcggcauuagguugguuagugg

SEQ ID NO: 515665 - RNA, 24 nt, Human
caggguuuucccauguuguccagg

SEQ ID NO: 515666 - RNA, 25 nt, Human
caggugugugccauuaugccuggcu

SEQ ID NO: 515667 - RNA, 19 nt, Human
caguaccaaaauuacacac

SEQ ID NO: 515668 - RNA, 21 nt, Human
caugauacaaaaucugaaaac

SEQ ID NO: 515669 - RNA, 19 nt, Human
caugcucacaucccuggcu

SEQ ID NO: 515670 - RNA, 23 nt, Human
cauguuguccaggcuggucucaa

SEQ ID NO: 515671 - RNA, 24 nt, Human
cauguuguccaggcuggucucaaa

SEQ ID NO: 515672 - RNA, 25 nt, Human
ccaaacucuaguugacuauguauau

SEQ ID NO: 515673 - RNA, 18 nt, Human
ccaacuaaaccaacaagc

SEQ ID NO: 515674 - RNA, 21 nt, Human
ccaaugugcugggauuacagg

SEQ ID NO: 515675 - RNA, 24 nt, Human
ccaaugugcugggauuacaggugu

SEQ ID NO: 515676 - RNA, 19 nt, Human
ccaccaggaccucuggaac

SEQ ID NO: 515677 - RNA, 23 nt, Human
ccagaauacauagauguucagua

SEQ ID NO: 515678 - RNA, 19 nt, Human
ccauccaacuaaaccaaca

SEQ ID NO: 515679 - RNA, 24 nt, Human
ccauccaacuaaaccaacaagcag

SEQ ID NO: 515680 - RNA, 24 nt, Human
cccaccuuagcuucccgaguagcu

SEQ ID NO: 515681 - RNA, 19 nt, Human
cccauguuguccaggcugg

SEQ ID NO: 515682 - RNA, 22 nt, Human
cccccuggguugugccagcagc

SEQ ID NO: 515683 - RNA, 23 nt, Human
cccgaguagcugggacuacaggu

SEQ ID NO: 515684 - RNA, 24 nt, Human
cccgaguagcugggacuacaggug

SEQ ID NO: 515685 - RNA, 19 nt, Human
ccuccauuuucuccccuuc

SEQ ID NO: 515686 - RNA, 24 nt, Human
ccucccaccuuagcuucccgagua

SEQ ID NO: 515687 - RNA, 19 nt, Human
ccugggcucaagugauccu

SEQ ID NO: 515688 - RNA, 20 nt, Human
ccugggcucaagugauccuu

SEQ ID NO: 515689 - RNA, 22 nt, Human
ccugggcucaagugauccuucu

SEQ ID NO: 515690 - RNA, 24 nt, Human
cggcacaaucacggcucacugcaa

SEQ ID NO: 515691 - RNA, 28 nt, Human
cggcacaaucacggcucacugcaaccuc

SEQ ID NO: 515692 - RNA, 21 nt, Human
cggcaugaagucuugccagag

SEQ ID NO: 515693 - RNA, 20 nt, Human
cuaaaaaucagcaaaaugcu

SEQ ID NO: 515694 - RNA, 24 nt, Human
cucaagugauccuucugccuuggc

SEQ ID NO: 515695 - RNA, 24 nt, Human
cucaggugauccucccaccuuagc

SEQ ID NO: 515696 - RNA, 18 nt, Human
cuccauuuucuccccuuc

SEQ ID NO: 515697 - RNA, 21 nt, Human
cucgcaagccccggaucucag

SEQ ID NO: 515698 - RNA, 18 nt, Human
cugcagcaggcucugacc

SEQ ID NO: 515699 - RNA, 20 nt, Human
cugccuuggccucccaaugu

SEQ ID NO: 515700 - RNA, 23 nt, Human
cugccuuggccucccaaugugcu

SEQ ID NO: 515701 - RNA, 25 nt, Human
cugggcugcacugcagcaggcuccc

SEQ ID NO: 515702 - RNA, 23 nt, Human
cuggggccacugacuggucuucu

SEQ ID NO: 515703 - RNA, 22 nt, Human
cuggguccagcaucucccuggg

SEQ ID NO: 515704 - RNA, 20 nt, Human
cuguugcuuaguuacaaagu

SEQ ID NO: 515705 - RNA, 24 nt, Human
cuuagcuucccgaguagcugggac

SEQ ID NO: 515706 - RNA, 18 nt, Human
cuucugcuggaagcugag

SEQ ID NO: 515707 - RNA, 24 nt, Human
gaagaugcaugcccuuugaauggc

SEQ ID NO: 515708 - RNA, 23 nt, Human
gacaggguuuucccauguugucc

SEQ ID NO: 515709 - RNA, 24 nt, Human
gacuacaggugugugccauuaugc

SEQ ID NO: 515710 - RNA, 20 nt, Human
gagacaggguuuucccaugu

SEQ ID NO: 515711 - RNA, 24 nt, Human
gagcucaggugauccucccaccuu

SEQ ID NO: 515712 - RNA, 26 nt, Human
gaguagcugggacuacaggugugugc

SEQ ID NO: 515713 - RNA, 25 nt, Human
gaguggcucucugguuagagaaagg

SEQ ID NO: 515714 - RNA, 23 nt, Human
gauccagcugcuuccaaaacugg

SEQ ID NO: 515715 - RNA, 21 nt, Human
gcggacacauauguaugaaug

SEQ ID NO: 515716 - RNA, 24 nt, Human
ggacuacaggugugugccauuaug

SEQ ID NO: 515717 - RNA, 26 nt, Human
ggagaugcaaauucccacauaccccc

SEQ ID NO: 515718 - RNA, 24 nt, Human
ggccucuugagcucaggugauccu

SEQ ID NO: 515719 - RNA, 19 nt, Human
ggcucacugcaaccucggc

SEQ ID NO: 515720 - RNA, 18 nt, Human
gggacacagucgugcucc

SEQ ID NO: 515721 - RNA, 22 nt, Human
gggagagggggauagagacagg

SEQ ID NO: 515722 - RNA, 21 nt, Human
gggcucaagugauccuucugc

SEQ ID NO: 515723 - RNA, 22 nt, Human
gggcucaagugauccuucugcc

SEQ ID NO: 515724 - RNA, 24 nt, Human
gggggagagggggauagagacagg

SEQ ID NO: 515725 - RNA, 19 nt, Human
guaaaacauggaauaaaca

SEQ ID NO: 515726 - RNA, 18 nt, Human
guacauuuugguagcuuu

SEQ ID NO: 515727 - RNA, 18 nt, Human
guggagugccuggugucc

SEQ ID NO: 515728 - RNA, 23 nt, Human
guggagugccugguguccaguau

SEQ ID NO: 515729 - RNA, 22 nt, Human
guuuucccauguuguccaggcu

SEQ ID NO: 515730 - RNA, 23 nt, Human
guuuucccauguuguccaggcug

SEQ ID NO: 515731 - RNA, 24 nt, Human
guuuucccauguuguccaggcugg

SEQ ID NO: 515732 - RNA, 25 nt, Human
uaaacaaaggucacgccaaucaacg

SEQ ID NO: 515733 - RNA, 24 nt, Human
uaacugcccgcggugacacaacua

SEQ ID NO: 515734 - RNA, 25 nt, Human
uaagugcaaagcccagaucugaacc

SEQ ID NO: 515735 - RNA, 19 nt, Human
uacaaaaucugaaaacuga

SEQ ID NO: 515736 - RNA, 23 nt, Human
uagaaaauaacccauuucuuaac

SEQ ID NO: 515737 - RNA, 22 nt, Human
uagagacaggguuuucccaugu

SEQ ID NO: 515738 - RNA, 22 nt, Human
uaguacaagauggcggcacuuu

SEQ ID NO: 515739 - RNA, 22 nt, Human
uaguaucauccucauuuugcaa

SEQ ID NO: 515740 - RNA, 23 nt, Human
uaucuguuuucucagucuucaaa

SEQ ID NO: 515741 - RNA, 19 nt, Human
ucacaaaggacacaagagc

SEQ ID NO: 515742 - RNA, 19 nt, Human
ucacugcaaccucggccuc

SEQ ID NO: 515743 - RNA, 22 nt, Human
ucacugcaaccucggccucuug

SEQ ID NO: 515744 - RNA, 24 nt, Human
ucacugcaaccucggccucuugag

SEQ ID NO: 515745 - RNA, 23 nt, Human
ucagaggcagcccaggaaaaggg

SEQ ID NO: 515746 - RNA, 18 nt, Human
ucauguaaucuuuuacau

SEQ ID NO: 515747 - RNA, 23 nt, Human
ucccaaugugcugggauuacagg

SEQ ID NO: 515748 - RNA, 24 nt, Human
ucccauguuguccaggcuggucuc

SEQ ID NO: 515749 - RNA, 22 nt, Human
uccccguggccacagacugccc

SEQ ID NO: 515750 - RNA, 23 nt, Human
ucccgaguagcugggacuacagg

SEQ ID NO: 515751 - RNA, 24 nt, Human
ucccuggcugguucuacaggccuu

SEQ ID NO: 515752 - RNA, 19 nt, Human
ucccugggcugcacugcag

SEQ ID NO: 515753 - RNA, 24 nt, Human
uccgucauccaggcugaggugguu

SEQ ID NO: 515754 - RNA, 20 nt, Human
uccugggcucaagugauccu

SEQ ID NO: 515755 - RNA, 21 nt, Human
uccugggcucaagugauccuu

SEQ ID NO: 515756 - RNA, 24 nt, Human
uccugggcucaagugauccuucug

SEQ ID NO: 515757 - RNA, 18 nt, Human
ucgcaagccccggaucuc

SEQ ID NO: 515758 - RNA, 24 nt, Human
ucgugcuccgucauccaggcugag

SEQ ID NO: 515759 - RNA, 22 nt, Human
ucuacaggccuuccaccaggga

SEQ ID NO: 515760 - RNA, 24 nt, Human
ugagcucaggugauccucccaccu

SEQ ID NO: 515761 - RNA, 23 nt, Human
ugaggugguugcggcacaaucac

SEQ ID NO: 515762 - RNA, 25 nt, Human
ugauacaaaaucugaaaacugaaua

SEQ ID NO: 515763 - RNA, 18 nt, Human
ugaugcaauuuuuuccaa

SEQ ID NO: 515764 - RNA, 18 nt, Human
ugcaaggcuuuacuugug

SEQ ID NO: 515765 - RNA, 21 nt, Human
ugcggaaaggcaacgcucauc

SEQ ID NO: 515766 - RNA, 22 nt, Human
ugcuacaccauuuccuaaacuc

SEQ ID NO: 515767 - RNA, 20 nt, Human
ugcugggaguggcaucugau

SEQ ID NO: 515768 - RNA, 22 nt, Human
ugcugggaguggcaucugaugu

SEQ ID NO: 515769 - RNA, 20 nt, Human
ugcugggauuacagguguca

SEQ ID NO: 515770 - RNA, 28 nt, Human
uggaauaaacaaagaagaaaacaccugu

SEQ ID NO: 515771 - RNA, 21 nt, Human
uggauacagacuccaaagacc

SEQ ID NO: 515772 - RNA, 19 nt, Human
uggcaaaggucucguauaa

SEQ ID NO: 515773 - RNA, 18 nt, Human
uggccagaauacauagau

SEQ ID NO: 515774 - RNA, 22 nt, Human
uggcucucugguuagagaaagg

SEQ ID NO: 515775 - RNA, 22 nt, Human
uggcugcggacacauauguaug

SEQ ID NO: 515776 - RNA, 19 nt, Human
ugggacuacaggugugugc

SEQ ID NO: 515777 - RNA, 21 nt, Human
ugggacuacaggugugugcca

SEQ ID NO: 515778 - RNA, 21 nt, Human
ugggacuacaggugugugcca

SEQ ID NO: 515779 - RNA, 22 nt, Human
ugggacuacaggugugugccau

SEQ ID NO: 515780 - RNA, 24 nt, Human
ugggacuacaggugugugccauua

SEQ ID NO: 515781 - RNA, 18 nt, Human
ugggauuacaggugucag

SEQ ID NO: 515782 - RNA, 18 nt, Human
ugggauuacaggugucag

SEQ ID NO: 515783 - RNA, 21 nt, Human
ugggauuacaggugucaguau

SEQ ID NO: 515784 - RNA, 20 nt, Human
ugggcucaagugauccuucu

SEQ ID NO: 515785 - RNA, 24 nt, Human
ugggcucaagugauccuucugccu

SEQ ID NO: 515786 - RNA, 21 nt, Human
uggguagaaaauaacccauuu

SEQ ID NO: 515787 - RNA, 22 nt, Human
uggguccagcaucucccugggc

SEQ ID NO: 515788 - RNA, 20 nt, Human
uggucagcaaauaugucugg

SEQ ID NO: 515789 - RNA, 24 nt, Human
uguccaggcuggucucaaauuccu

SEQ ID NO: 515790 - RNA, 21 nt, Human
ugugaaaaaccaauuuggcac

SEQ ID NO: 515791 - RNA, 18 nt, Human
uguuacucauaucuuccu

SEQ ID NO: 515792 - RNA, 21 nt, Human
uguuauagguaaaacauggaa

SEQ ID NO: 515793 - RNA, 25 nt, Human
uucaauuauauucugacuucuugau

SEQ ID NO: 515794 - RNA, 19 nt, Human
uucccauguuguccaggcu

SEQ ID NO: 515795 - RNA, 23 nt, Human
uuccugggcucaagugauccuuc

SEQ ID NO: 515796 - RNA, 24 nt, Human
uucucagucuucaaagggucccac

SEQ ID NO: 515797 - RNA, 21 nt, Human
uugaaacccagaauacaauuu

SEQ ID NO: 515798 - RNA, 20 nt, Human
uugauuucaauuauauucug

SEQ ID NO: 515799 - RNA, 21 nt, Human
uuggguagaaaauaacccauu

SEQ ID NO: 515800 - RNA, 20 nt, Human
uugguccauggacuuaugaa

SEQ ID NO: 515801 - RNA, 22 nt, Human
uugguccauggacuuaugaaua

SEQ ID NO: 515802 - RNA, 20 nt, Human
uuggucccgaauggccagaa

SEQ ID NO: 515803 - RNA, 19 nt, Human
uuguuccuaaucaccauuu

SEQ ID NO: 515804 - RNA, 22 nt, Human
uuuaagucugaggaagccagac

SEQ ID NO: 515805 - RNA, 19 nt, Human
uuuauguauguuaacucau

SEQ ID NO: 515806 - RNA, 23 nt, Human
aaaaggaaagaaagggaauccaa

SEQ ID NO: 515807 - RNA, 20 nt, Human
aaaccagacagugauggccc

SEQ ID NO: 515808 - RNA, 23 nt, Human
aaaccagacagugauggcccaug

SEQ ID NO: 515809 - RNA, 19 nt, Human
aaagaucucagagacagac

SEQ ID NO: 515810 - RNA, 23 nt, Human
aaagcagcugaugcaccuucuca

SEQ ID NO: 515811 - RNA, 18 nt, Human
aaaugaauaagaaggggu

SEQ ID NO: 515812 - RNA, 19 nt, Human
aacacuuuguguguucucc

SEQ ID NO: 515813 - RNA, 20 nt, Human
aacacuuuguguguucuccu

SEQ ID NO: 515814 - RNA, 19 nt, Human
aacauggugaaaccccguu

SEQ ID NO: 515815 - RNA, 20 nt, Human
aacauggugaaaccccguuu

SEQ ID NO: 515816 - RNA, 21 nt, Human
aacauggugaaaccccguuuc

SEQ ID NO: 515817 - RNA, 21 nt, Human
aacauggugaaaccccguuuc

SEQ ID NO: 515818 - RNA, 21 nt, Human
aacucagaaaggaaagagccc

SEQ ID NO: 515819 - RNA, 18 nt, Human
aaggcagcccuguccauc

SEQ ID NO: 515820 - RNA, 23 nt, Human
aaggcggguggaucacgagguca

SEQ ID NO: 515821 - RNA, 20 nt, Human
aaggcugaaguaaauggacu

SEQ ID NO: 515822 - RNA, 19 nt, Human
aauaaaaggaaagaaaggg

SEQ ID NO: 515823 - RNA, 19 nt, Human
aaugcaaaccaaacuauga

SEQ ID NO: 515824 - RNA, 26 nt, Human
acaaugcaaaccaaacuaugaaaaca

SEQ ID NO: 515825 - RNA, 21 nt, Human
acagacuuuuuuucagaagag

SEQ ID NO: 515826 - RNA, 23 nt, Human
acagggugagacucugucucaaa

SEQ ID NO: 515827 - RNA, 24 nt, Human
acagggugagacucugucucaaaa

SEQ ID NO: 515828 - RNA, 22 nt, Human
accauugcacuccagccugggc

SEQ ID NO: 515829 - RNA, 24 nt, Human
accccguuucuacuaaaaauacaa

SEQ ID NO: 515830 - RNA, 24 nt, Human
acuccagccugggcaacaggguga

SEQ ID NO: 515831 - RNA, 22 nt, Human
acuuuuuguuuuuugcuuuuaa

SEQ ID NO: 515832 - RNA, 23 nt, Human
acuuuuuuucagaagagggaaau

SEQ ID NO: 515833 - RNA, 20 nt, Human
agaaaaaaaaaaucucucau

SEQ ID NO: 515834 - RNA, 19 nt, Human
agacagacaacagagagcc

SEQ ID NO: 515835 - RNA, 21 nt, Human
agacagacaacagagagccuc

SEQ ID NO: 515836 - RNA, 19 nt, Human
agaucuguuugucugauua

SEQ ID NO: 515837 - RNA, 22 nt, Human
agccaaugaagugcacgacucu

SEQ ID NO: 515838 - RNA, 24 nt, Human
agccugggcaacagggugagacuc

SEQ ID NO: 515839 - RNA, 21 nt, Human
aggaaagaaagggaauccaag

SEQ ID NO: 515840 - RNA, 18 nt, Human
aggcagaaaccacauccc

SEQ ID NO: 515841 - RNA, 18 nt, Human
aggcaggggaaucacuug

SEQ ID NO: 515842 - RNA, 21 nt, Human
aggcaggggaaucacuugaac

SEQ ID NO: 515843 - RNA, 26 nt, Human
aggcauaaagaaaaucuaguuucugg

SEQ ID NO: 515844 - RNA, 21 nt, Human
aggccaaggcggguggaucac

SEQ ID NO: 515845 - RNA, 24 nt, Human
aggcggguggaucacgaggucagg

SEQ ID NO: 515846 - RNA, 24 nt, Human
aggcugaggcaggggaaucacuug

SEQ ID NO: 515847 - RNA, 21 nt, Human
agggguggaggcauaaagaaa

SEQ ID NO: 515848 - RNA, 22 nt, Human
aggucucagaaaucacacagcu

SEQ ID NO: 515849 - RNA, 24 nt, Human
agguggagguugcagugagccaag

SEQ ID NO: 515850 - RNA, 19 nt, Human
auaagaagggguggaggca

SEQ ID NO: 515851 - RNA, 20 nt, Human
aucacgaggucaggagauuc

SEQ ID NO: 515852 - RNA, 21 nt, Human
auccuggccaacauggugaaa

SEQ ID NO: 515853 - RNA, 24 nt, Human
aucgcaccauugcacuccagccug

SEQ ID NO: 515854 - RNA, 28 nt, Human
aucgcaccauugcacuccagccugggca

SEQ ID NO: 515855 - RNA, 18 nt, Human
aucuaggucucagaaauc

SEQ ID NO: 515856 - RNA, 19 nt, Human
augaguuaaauccuguaac

SEQ ID NO: 515857 - RNA, 22 nt, Human
auggcccauguacaagacuugu

SEQ ID NO: 515858 - RNA, 24 nt, Human
auugcacuccagccugggcaacag

SEQ ID NO: 515859 - RNA, 21 nt, Human
caaaacaaucuucagccuuca

SEQ ID NO: 515860 - RNA, 24 nt, Human
caaaacaaucuucagccuucaaag

SEQ ID NO: 515861 - RNA, 21 nt, Human
caaaaggacauuucauaguac

SEQ ID NO: 515862 - RNA, 23 nt, Human
caaaccaaacuaugaaaacacag

SEQ ID NO: 515863 - RNA, 24 nt, Human
caacauggugaaaccccguuucua

SEQ ID NO: 515864 - RNA, 25 nt, Human
caacucagaaaggaaagagcccaaa

SEQ ID NO: 515865 - RNA, 20 nt, Human
cacacagcuggccucgugau

SEQ ID NO: 515866 - RNA, 22 nt, Human
cacagaaaccugccaaaauaga

SEQ ID NO: 515867 - RNA, 23 nt, Human
cacgcuuguaaucccgcacuuug

SEQ ID NO: 515868 - RNA, 20 nt, Human
cacuccagccugggcaacag

SEQ ID NO: 515869 - RNA, 23 nt, Human
cacuccagccugggcaacagggu

SEQ ID NO: 515870 - RNA, 24 nt, Human
cacuccagccugggcaacagggug

SEQ ID NO: 515871 - RNA, 26 nt, Human
cagaaaccacaucccacaaccuucag

SEQ ID NO: 515872 - RNA, 19 nt, Human
caggcaccaaaacccauuc

SEQ ID NO: 515873 - RNA, 18 nt, Human
caucaaacuccauaccua

SEQ ID NO: 515874 - RNA, 19 nt, Human
cauugcacuccagccuggg

SEQ ID NO: 515875 - RNA, 21 nt, Human
cauugcacuccagccugggca

SEQ ID NO: 515876 - RNA, 24 nt, Human
cauugcacuccagccugggcaaca

SEQ ID NO: 515877 - RNA, 23 nt, Human
ccagcaaccaaagaggaggcaau

SEQ ID NO: 515878 - RNA, 20 nt, Human
ccauugcacuccagccuggg

SEQ ID NO: 515879 - RNA, 21 nt, Human
ccauugcacuccagccugggc

SEQ ID NO: 515880 - RNA, 23 nt, Human
ccauugcacuccagccugggcaa

SEQ ID NO: 515881 - RNA, 24 nt, Human
ccauugcacuccagccugggcaac

SEQ ID NO: 515882 - RNA, 23 nt, Human
cccacacuccuaugcaauuuguu

SEQ ID NO: 515883 - RNA, 24 nt, Human
ccgcacuuugggaggccaaggcgg

SEQ ID NO: 515884 - RNA, 22 nt, Human
ccuggccaacauggugaaaccc

SEQ ID NO: 515885 - RNA, 23 nt, Human
ccuggccaacauggugaaacccc

SEQ ID NO: 515886 - RNA, 24 nt, Human
ccuggccaacauggugaaaccccg

SEQ ID NO: 515887 - RNA, 22 nt, Human
ccugggcaacagggugagacuc

SEQ ID NO: 515888 - RNA, 25 nt, Human
ccuguaacaaugaauuucaaccauu

SEQ ID NO: 515889 - RNA, 20 nt, Human
ccuguaguccuagcuacucg

SEQ ID NO: 515890 - RNA, 23 nt, Human
ccuguaguccuagcuacucgcga

SEQ ID NO: 515891 - RNA, 18 nt, Human
ccuucuuuccauuagaug

SEQ ID NO: 515892 - RNA, 24 nt, Human
cgagagaaccugcuuguuagcuca

SEQ ID NO: 515893 - RNA, 19 nt, Human
cgaggcugaggcaggggaa

SEQ ID NO: 515894 - RNA, 21 nt, Human
cgcaccauugcacuccagccu

SEQ ID NO: 515895 - RNA, 22 nt, Human
cgccuguaguccuagcuacucg

SEQ ID NO: 515896 - RNA, 24 nt, Human
cgcgaggcugaggcaggggaauca

SEQ ID NO: 515897 - RNA, 23 nt, Human
cgcuuguaaucccgcacuuuggg

SEQ ID NO: 515898 - RNA, 20 nt, Human
cuccagcaaccaaagaggag

SEQ ID NO: 515899 - RNA, 23 nt, Human
cugcugccuuggugggccuugga

SEQ ID NO: 515900 - RNA, 22 nt, Human
cuguacauggauuucuugaccu

SEQ ID NO: 515901 - RNA, 24 nt, Human
cuugaacugggagguggagguugc

SEQ ID NO: 515902 - RNA, 24 nt, Human
gaaaacacagacuuuuuuucagaa

SEQ ID NO: 515903 - RNA, 19 nt, Human
gaagaaccaccauaaagua

SEQ ID NO: 515904 - RNA, 21 nt, Human
gacacaaagaucucagagaca

SEQ ID NO: 515905 - RNA, 22 nt, Human
gacagugauggcccauguacaa

SEQ ID NO: 515906 - RNA, 21 nt, Human
gagaaccugcuuguuagcuca

SEQ ID NO: 515907 - RNA, 19 nt, Human
gagcucugucugggauuuc

SEQ ID NO: 515908 - RNA, 24 nt, Human
gaggaucauccuggccaacauggu

SEQ ID NO: 515909 - RNA, 18 nt, Human
gagguugcagugagccaa

SEQ ID NO: 515910 - RNA, 23 nt, Human
gagguugcagugagccaagaucg

SEQ ID NO: 515911 - RNA, 22 nt, Human
gauuaacagucugcugccuugg

SEQ ID NO: 515912 - RNA, 24 nt, Human
gcaacagggugagacucugucuca

SEQ ID NO: 515913 - RNA, 20 nt, Human
gcaccauugcacuccagccu

SEQ ID NO: 515914 - RNA, 21 nt, Human
gcacuccagccugggcaacag

SEQ ID NO: 515915 - RNA, 22 nt, Human
gcacuuugggaggccaaggcgg

SEQ ID NO: 515916 - RNA, 21 nt, Human
gccaaaauagauauuuuuuuc

SEQ ID NO: 515917 - RNA, 21 nt, Human
gccaacauggugaaaccccgu

SEQ ID NO: 515918 - RNA, 19 nt, Human
gcccuguccaucaaacucc

SEQ ID NO: 515919 - RNA, 25 nt, Human
ggaaauaaaggcacagaaaccugcc

SEQ ID NO: 515920 - RNA, 23 nt, Human
ggaaucacuugaacugggaggug

SEQ ID NO: 515921 - RNA, 20 nt, Human
ggagguugcagugagccaag

SEQ ID NO: 515922 - RNA, 24 nt, Human
ggagguugcagugagccaagaucg

SEQ ID NO: 515923 - RNA, 22 nt, Human
ggcuuggugacaugcgccugua

SEQ ID NO: 515924 - RNA, 22 nt, Human
gggaaucacuugaacugggagg

SEQ ID NO: 515925 - RNA, 18 nt, Human
gggagguggagguugcag

SEQ ID NO: 515926 - RNA, 24 nt, Human
ggugacaugcgccuguaguccuag

SEQ ID NO: 515927 - RNA, 21 nt, Human
gguggaucacgaggucaggag

SEQ ID NO: 515928 - RNA, 22 nt, Human
ggugguucacgcuuguaauccc

SEQ ID NO: 515929 - RNA, 23 nt, Human
ggugguucacgcuuguaaucccg

SEQ ID NO: 515930 - RNA, 19 nt, Human
uaaaaaagcagcuaaaugu

SEQ ID NO: 515931 - RNA, 19 nt, Human
uaaaaggaaagaaagggaa

SEQ ID NO: 515932 - RNA, 23 nt, Human
uaaaauaaaaggaaagaaaggga

SEQ ID NO: 515933 - RNA, 21 nt, Human
uaaaggcacagaaaccugcca

SEQ ID NO: 515934 - RNA, 22 nt, Human
uaaauggacucucaucuagguc

SEQ ID NO: 515935 - RNA, 23 nt, Human
uaacauggaauagacuuagcaac

SEQ ID NO: 515936 - RNA, 24 nt, Human
uaagugacuuagugaccuucacac

SEQ ID NO: 515937 - RNA, 18 nt, Human
uagaaggcagaaaccaca

SEQ ID NO: 515938 - RNA, 24 nt, Human
uagauaaugccacuaacgcaccac

SEQ ID NO: 515939 - RNA, 24 nt, Human
uaggaaacacacgaagugaaacca

SEQ ID NO: 515940 - RNA, 18 nt, Human
ucacgaggucaggagauu

SEQ ID NO: 515941 - RNA, 21 nt, Human
ucacgaggucaggagauugag

SEQ ID NO: 515942 - RNA, 22 nt, Human
ucacgcuuguaaucccgcacuu

SEQ ID NO: 515943 - RNA, 20 nt, Human
ucagagaucuguuugucuga

SEQ ID NO: 515944 - RNA, 21 nt, Human
ucaggcaccaaaacccauucc

SEQ ID NO: 515945 - RNA, 23 nt, Human
uccagccugggcaacagggugag

SEQ ID NO: 515946 - RNA, 24 nt, Human
uccagccugggcaacagggugaga

SEQ ID NO: 515947 - RNA, 22 nt, Human
uccguguucaucugcccgaggc

SEQ ID NO: 515948 - RNA, 23 nt, Human
ucgcaccauugcacuccagccug

SEQ ID NO: 515949 - RNA, 31 nt, Human
ucgcaccauugcacuccagccugggcaacaa

SEQ ID NO: 515950 - RNA, 19 nt, Human
ucucagagaucuguuuguc

SEQ ID NO: 515951 - RNA, 22 nt, Human
ucucuccagcaaccaaagagga

SEQ ID NO: 515952 - RNA, 18 nt, Human
ucuggcugggcagggugg

SEQ ID NO: 515953 - RNA, 20 nt, Human
ugaauaaucaucaaaaauau

SEQ ID NO: 515954 - RNA, 23 nt, Human
ugacuuagugaccuucacacuca

SEQ ID NO: 515955 - RNA, 20 nt, Human
ugaggcaggggaaucacuuc

SEQ ID NO: 515956 - RNA, 20 nt, Human
ugaggcaggggaaucacuug

SEQ ID NO: 515957 - RNA, 23 nt, Human
ugaggcaggggaaucacuugaac

SEQ ID NO: 515958 - RNA, 23 nt, Human
ugaggcaggggaaucacuugaac

SEQ ID NO: 515959 - RNA, 18 nt, Human
ugauuaacagucugcugc

SEQ ID NO: 515960 - RNA, 22 nt, Human
ugcacuccagccugggcaacag

SEQ ID NO: 515961 - RNA, 19 nt, Human
ugcagagaaaaaaaaaauc

SEQ ID NO: 515962 - RNA, 21 nt, Human
ugcgccuguaguccuagcuac

SEQ ID NO: 515963 - RNA, 24 nt, Human
uggccaacauggugaaaccccguu

SEQ ID NO: 515964 - RNA, 22 nt, Human
uggcugggcagggugguucacg

SEQ ID NO: 515965 - RNA, 24 nt, Human
ugggaggccaaggcggguggauca

SEQ ID NO: 515966 - RNA, 18 nt, Human
ugggagguggagguugca

SEQ ID NO: 515967 - RNA, 29 nt, Human
ugggagguggagguugcagugacaacggu

SEQ ID NO: 515968 - RNA, 24 nt, Human
ugggagguggagguugcagugagc

SEQ ID NO: 515969 - RNA, 21 nt, Human
ugggcaacagggugagacucu

SEQ ID NO: 515970 - RNA, 22 nt, Human
uggugacaugcgccuguagucc

SEQ ID NO: 515971 - RNA, 23 nt, Human
ugguucacgcuuguaaucccgca

SEQ ID NO: 515972 - RNA, 22 nt, Human
uguguaaauaacacuuugugug

SEQ ID NO: 515973 - RNA, 27 nt, Human
uguuccuuuuuaugucauguaugguug

SEQ ID NO: 515974 - RNA, 20 nt, Human
uguuuuguuuuuuauacuua

SEQ ID NO: 515975 - RNA, 20 nt, Human
uguuuuguuuuuuauacuua

SEQ ID NO: 515976 - RNA, 19 nt, Human
uuacugaaucaaaggcuga

SEQ ID NO: 515977 - RNA, 20 nt, Human
uucacaagacaguaugucac

SEQ ID NO: 515978 - RNA, 24 nt, Human
uucagaagagggaaauaaaggcac

SEQ ID NO: 515979 - RNA, 22 nt, Human
uugcagugagccaagaucgcac

SEQ ID NO: 515980 - RNA, 20 nt, Human
uuggugggccuuggucuugg

SEQ ID NO: 515981 - RNA, 19 nt, Human
uuuaaaauaaaaggaaaga

SEQ ID NO: 515982 - RNA, 20 nt, Human
uuuaucacuaguaaaacuug

SEQ ID NO: 515983 - RNA, 21 nt, Human
uuucuacuaaaaauacaaaaa

SEQ ID NO: 515984 - RNA, 22 nt, Human
uuucuggcugggcagggugguu

SEQ ID NO: 515985 - RNA, 20 nt, Human
aaaaugccuuuccccucgug

SEQ ID NO: 515986 - RNA, 19 nt, Human
acaaaucccuggccugcca

SEQ ID NO: 515987 - RNA, 20 nt, Human
auggagccacuggccagcug

SEQ ID NO: 515988 - RNA, 21 nt, Human
caaaucccuggccugccaccu

SEQ ID NO: 515989 - RNA, 21 nt, Human
caaaucccuggccugccaccu

SEQ ID NO: 515990 - RNA, 24 nt, Human
cccacagaguucaguccccuuuau

SEQ ID NO: 515991 - RNA, 25 nt, Human
ccuggccugccaccugguccccugg

SEQ ID NO: 515992 - RNA, 19 nt, Human
gauacugaaguccacacag

SEQ ID NO: 515993 - RNA, 20 nt, Human
gccagcugcuuuguguugau

SEQ ID NO: 515994 - RNA, 22 nt, Human
uccaccgagcuccugauuccug

SEQ ID NO: 515995 - RNA, 22 nt, Human
ucccacagaguucaguccccuu

SEQ ID NO: 515996 - RNA, 24 nt, Human
ucucgguggcccuuaaaaugccuu

SEQ ID NO: 515997 - RNA, 21 nt, Human
ugaguccauggagccacuggc

SEQ ID NO: 515998 - RNA, 23 nt, Human
ugaguccauggagccacuggcca

SEQ ID NO: 515999 - RNA, 21 nt, Human
uggccugccaccugcaaaucc

SEQ ID NO: 516000 - RNA, 25 nt, Human
uugauacugaaguccacacagguaa

SEQ ID NO: 516001 - RNA, 23 nt, Human
uuuuuuuuuuuuuuuuuuuccca

SEQ ID NO: 516002 - RNA, 23 nt, Human
uuuuuuuuuuuuuuuuuuuuccc

SEQ ID NO: 516003 - RNA, 24 nt, Human
uuuuuuuuuuuuuuuuuuuuuccu

SEQ ID NO: 516004 - RNA, 25 nt, Human
aaaaaaaaaauuguuagauauaaaa

SEQ ID NO: 516005 - RNA, 28 nt, Human
aaaaauauaaaagagguaaccgguaccc

SEQ ID NO: 516006 - RNA, 18 nt, Human
aaaguccuggccgcugcc

SEQ ID NO: 516007 - RNA, 18 nt, Human
acaacacuugaagcaucu

SEQ ID NO: 516008 - RNA, 19 nt, Human
acaggaagaaaaccccauu

SEQ ID NO: 516009 - RNA, 23 nt, Human
auagaaaauaccugaaaaagaua

SEQ ID NO: 516010 - RNA, 21 nt, Human
cauaauccaaacaagucucug

SEQ ID NO: 516011 - RNA, 23 nt, Human
cgccccuuuuuuuuuuuuuuuuu

SEQ ID NO: 516012 - RNA, 25 nt, Human
cugagguaaacaccaaaaguuuaaa

SEQ ID NO: 516013 - RNA, 23 nt, Human
gaaaaguccuggccgcugccucc

SEQ ID NO: 516014 - RNA, 29 nt, Human
gagcggccgccccuuuuuuuuuuuuuuuu

SEQ ID NO: 516015 - RNA, 21 nt, Human
gccccuuuuuuuuuuuuuuuu

SEQ ID NO: 516016 - RNA, 23 nt, Human
ggccgccccuuuuuuuuuuuuuu

SEQ ID NO: 516017 - RNA, 23 nt, Human
uaaaacuccaaauaugaaaaaag

SEQ ID NO: 516018 - RNA, 24 nt, Human
uaaaacuccaaauaugaaaaaagu

SEQ ID NO: 516019 - RNA, 18 nt, Human
uacaaaucaaccucuuuc

SEQ ID NO: 516020 - RNA, 26 nt, Human
uagagcggccgccccuuuuuuuuuuu

SEQ ID NO: 516021 - RNA, 21 nt, Human
uauagaaaauaccugaaaaag

SEQ ID NO: 516022 - RNA, 18 nt, Human
uccaaauaugaaaaaagu

SEQ ID NO: 516023 - RNA, 20 nt, Human
uccccaggucggccuuugga

SEQ ID NO: 516024 - RNA, 22 nt, Human
ucccugcaggaucgcccaguuu

SEQ ID NO: 516025 - RNA, 24 nt, Human
ugaaaaagauacauguauauaaaa

SEQ ID NO: 516026 - RNA, 19 nt, Human
uuagagcggccgccccuuu

SEQ ID NO: 516027 - RNA, 20 nt, Human
uucacaagaaaaaaugaagu

SEQ ID NO: 516028 - RNA, 24 nt, Human
uugaagcaucugaaaacuauuaaa

SEQ ID NO: 516029 - RNA, 22 nt, Human
uuuguaaaaaaaaaaaauuguu

SEQ ID NO: 516030 - RNA, 26 nt, Human
uuuuuuuuuuagagcggccgccccuu

SEQ ID NO: 516031 - RNA, 21 nt, Human
uuuuuuuuuuuuagagcggcc

SEQ ID NO: 516032 - RNA, 19 nt, Human
uuuuuuuuuuuuagagucu

SEQ ID NO: 516033 - RNA, 19 nt, Human
uaaaaacaguuccuuuaga

SEQ ID NO: 516034 - RNA, 24 nt, Human
ucacaucuccuuccugcuuuggug

SEQ ID NO: 516035 - RNA, 18 nt, Human
ucaggcuaagacaaugca

SEQ ID NO: 516036 - RNA, 20 nt, Human
uggaaaacacauaauaggga

SEQ ID NO: 516037 - RNA, 22 nt, Human
uggaaaacacauaauagggaaa

SEQ ID NO: 516038 - RNA, 20 nt, Human
uuagaauucuuauuguuuuc

SEQ ID NO: 516039 - RNA, 19 nt, Human
uucacaucuccuuccugcu

SEQ ID NO: 516040 - RNA, 21 nt, Human
uuucucuauucuuuuucaggc

SEQ ID NO: 516041 - RNA, 25 nt, Human
ccccaaaugaguaucaaaugguaca

SEQ ID NO: 516042 - RNA, 22 nt, Human
ccuccccuucuuccuuuauucu

SEQ ID NO: 516043 - RNA, 24 nt, Human
cuuucagggauccuggcaucuggc

SEQ ID NO: 516044 - RNA, 19 nt, Human
ggucuccuuucagggaucc

SEQ ID NO: 516045 - RNA, 21 nt, Human
uaaaacuccccaaauauauau

SEQ ID NO: 516046 - RNA, 19 nt, Human
uaaacuaaaacuccccaaa

SEQ ID NO: 516047 - RNA, 20 nt, Human
uaaauauaaugccccaaaug

SEQ ID NO: 516048 - RNA, 19 nt, Human
uacaguauauggucuccuu

SEQ ID NO: 516049 - RNA, 24 nt, Human
uagaagauguacacaucuauagca

SEQ ID NO: 516050 - RNA, 19 nt, Human
uauagcauauaaaagaauu

SEQ ID NO: 516051 - RNA, 24 nt, Human
uauauauagaagauguacacaucu

SEQ ID NO: 516052 - RNA, 18 nt, Human
ugggauauaaauauaaug

SEQ ID NO: 516053 - RNA, 21 nt, Human
uguacacaucuauagcauaua

SEQ ID NO: 516054 - RNA, 19 nt, Human
uguggaccuuccuggaauc

SEQ ID NO: 516055 - RNA, 20 nt, Human
uguuaucaaguauuggaaaa

SEQ ID NO: 516056 - RNA, 21 nt, Human
uuaaucuucaaauaugccugg

SEQ ID NO: 516057 - RNA, 24 nt, Human
uuccuccccuucuuccuuuauucu

SEQ ID NO: 516058 - RNA, 21 nt, Human
uuucagggauccuggcaucug

SEQ ID NO: 516059 - RNA, 22 nt, Human
aaaaacaaacaaaaaacaaaaa

SEQ ID NO: 516060 - RNA, 23 nt, Human
aaaaacaaacaaaaaacaaaaac

SEQ ID NO: 516061 - RNA, 19 nt, Human
aaaaagacccacccauaag

SEQ ID NO: 516062 - RNA, 21 nt, Human
aaaacaaacaaaaaacaaaaa

SEQ ID NO: 516063 - RNA, 31 nt, Human
aaaagacacacacauacacacacacacacag

SEQ ID NO: 516064 - RNA, 19 nt, Human
aaacaaaaaacaaaaaccc

SEQ ID NO: 516065 - RNA, 19 nt, Human
aaacaaaaaacaaaaaccc

SEQ ID NO: 516066 - RNA, 25 nt, Human
aaacaaaaaacaaaaacccagugcu

SEQ ID NO: 516067 - RNA, 26 nt, Human
aaacaaaaaacaaaaacccagugcug

SEQ ID NO: 516068 - RNA, 26 nt, Human
aaacaaaaucaaaaauguuaagccug

SEQ ID NO: 516069 - RNA, 21 nt, Human
aaacaaacaaaaaacaaaaac

SEQ ID NO: 516070 - RNA, 24 nt, Human
aaacaaacaaaaaacaaaaaccca

SEQ ID NO: 516071 - RNA, 18 nt, Human
aacacaaaaguggccaga

SEQ ID NO: 516072 - RNA, 22 nt, Human
aacacaguaucacggcccuauc

SEQ ID NO: 516073 - RNA, 19 nt, Human
aagaaaaaaagacccaccc

SEQ ID NO: 516074 - RNA, 19 nt, Human
aagaaauuacuuaaccuuc

SEQ ID NO: 516075 - RNA, 18 nt, Human
aagcaaacagcacugaac

SEQ ID NO: 516076 - RNA, 22 nt, Human
aagcuaccucauauuacaggau

SEQ ID NO: 516077 - RNA, 19 nt, Human
aaugaaaccaaauuacaaa

SEQ ID NO: 516078 - RNA, 25 nt, Human
acaaacaaaaaacaaaaacccagug

SEQ ID NO: 516079 - RNA, 23 nt, Human
acacaaccuucuguggcucaaaa

SEQ ID NO: 516080 - RNA, 23 nt, Human
acacacacacacacacacacaca

SEQ ID NO: 516081 - RNA, 23 nt, Human
acacacacacacacacacacaca

SEQ ID NO: 516082 - RNA, 23 nt, Human
acacacacacacacacacacaca

SEQ ID NO: 516083 - RNA, 23 nt, Human
acacacacacacacacacacaca

SEQ ID NO: 516084 - RNA, 23 nt, Human
acacacacacacacacacacaca

SEQ ID NO: 516085 - RNA, 23 nt, Human
acacacacacacacacacacaca

SEQ ID NO: 516086 - RNA, 29 nt, Human
acacacacacacacacacacacaaccuuc

SEQ ID NO: 516087 - RNA, 23 nt, Human
acacacacauacacacacacaca

SEQ ID NO: 516088 - RNA, 23 nt, Human
acaugcaagcaaacagcacugaa

SEQ ID NO: 516089 - RNA, 23 nt, Human
acccagugcuggugacaaaugua

SEQ ID NO: 516090 - RNA, 24 nt, Human
agacccaacauggcggcggcgccg

SEQ ID NO: 516091 - RNA, 19 nt, Human
agauaaugaaauaauguau

SEQ ID NO: 516092 - RNA, 20 nt, Human
aggaaaaacagguucauuga

SEQ ID NO: 516093 - RNA, 22 nt, Human
aggcauaauaggaaaaacaggu

SEQ ID NO: 516094 - RNA, 25 nt, Human
aggcauaauaggaaaaaccgguacc

SEQ ID NO: 516095 - RNA, 23 nt, Human
auaaaaugaaaauaaaaaauguc

SEQ ID NO: 516096 - RNA, 24 nt, Human
auaaugaaaccaaauuacaaaaca

SEQ ID NO: 516097 - RNA, 23 nt, Human
auacacacacacacacacacaca

SEQ ID NO: 516098 - RNA, 21 nt, Human
auaugccauuugcuacaaaau

SEQ ID NO: 516099 - RNA, 21 nt, Human
augaaaaaauacuuguuaagu

SEQ ID NO: 516100 - RNA, 25 nt, Human
augaaaccaaauuacaaaacacugc

SEQ ID NO: 516101 - RNA, 21 nt, Human
augagccuuccacccccaaaa

SEQ ID NO: 516102 - RNA, 19 nt, Human
caaaacacaguaucacggc

SEQ ID NO: 516103 - RNA, 18 nt, Human
caaagacugaaaucaaug

SEQ ID NO: 516104 - RNA, 21 nt, Human
caagcaaacagcacugaacaa

SEQ ID NO: 516105 - RNA, 18 nt, Human
caaggacacaguauguuu

SEQ ID NO: 516106 - RNA, 22 nt, Human
caauugccaaauacaauuuagu

SEQ ID NO: 516107 - RNA, 22 nt, Human
cacaaccuucuguggcucaaaa

SEQ ID NO: 516108 - RNA, 20 nt, Human
cacacacacacacacacaca

SEQ ID NO: 516109 - RNA, 20 nt, Human
cacacacacacacacacaca

SEQ ID NO: 516110 - RNA, 20 nt, Human
cacacacacacacacacaca

SEQ ID NO: 516111 - RNA, 20 nt, Human
cacacacacacacacacaca

SEQ ID NO: 516112 - RNA, 20 nt, Human
cacacacacacacacacaca

SEQ ID NO: 516113 - RNA, 20 nt, Human
cacacacacacacacacaca

SEQ ID NO: 516114 - RNA, 20 nt, Human
cacacacacacacacacaca

SEQ ID NO: 516115 - RNA, 20 nt, Human
cacacacacacacacacaca

SEQ ID NO: 516116 - RNA, 20 nt, Human
cacacacacacacacacaca

SEQ ID NO: 516117 - RNA, 20 nt, Human
cacacacacacacacacaca

SEQ ID NO: 516118 - RNA, 22 nt, Human
cacacacacacacacacacaca

SEQ ID NO: 516119 - RNA, 22 nt, Human
cacacacacacacacacacaca

SEQ ID NO: 516120 - RNA, 22 nt, Human
cacacacacacacacacacaca

SEQ ID NO: 516121 - RNA, 22 nt, Human
cacacacacacacacacacaca

SEQ ID NO: 516122 - RNA, 26 nt, Human
cacacacacacacacacacacacaca

SEQ ID NO: 516123 - RNA, 26 nt, Human
cacacacacacacacacacacacaca

SEQ ID NO: 516124 - RNA, 26 nt, Human
cacacacacacacacacacacacaca

SEQ ID NO: 516125 - RNA, 26 nt, Human
cacacacacacacacacacacacaca

SEQ ID NO: 516126 - RNA, 26 nt, Human
cacacacacacacacacacacacaca

SEQ ID NO: 516127 - RNA, 20 nt, Human
cacacacauacacacacaca

SEQ ID NO: 516128 - RNA, 28 nt, Human
cacacacauacacacacacacacacaca

SEQ ID NO: 516129 - RNA, 22 nt, Human
cacacauacacacacacacaca

SEQ ID NO: 516130 - RNA, 26 nt, Human
cacaguaucacggcccuaucugcagg

SEQ ID NO: 516131 - RNA, 26 nt, Human
cacauacacacacacacacacacaca

SEQ ID NO: 516132 - RNA, 23 nt, Human
cacaucaacuucugcaaggacac

SEQ ID NO: 516133 - RNA, 18 nt, Human
cagagaggcagaucccac

SEQ ID NO: 516134 - RNA, 23 nt, Human
cagaucccacgccacugucgccc

SEQ ID NO: 516135 - RNA, 21 nt, Human
cagcagccgcuucagacccaa

SEQ ID NO: 516136 - RNA, 19 nt, Human
cagccgcuucagacccaac

SEQ ID NO: 516137 - RNA, 20 nt, Human
cagcuauacaaaguucuuaa

SEQ ID NO: 516138 - RNA, 19 nt, Human
cagugcaguuucuauaucu

SEQ ID NO: 516139 - RNA, 19 nt, Human
cagugcaguuucuauaucu

SEQ ID NO: 516140 - RNA, 24 nt, Human
caucuccaacagucuacacaugua

SEQ ID NO: 516141 - RNA, 27 nt, Human
ccaacauggcggcggcgccggcuccuu

SEQ ID NO: 516142 - RNA, 18 nt, Human
ccacugucgcccgcuccg

SEQ ID NO: 516143 - RNA, 19 nt, Human
cccacgccacugucgcccg

SEQ ID NO: 516144 - RNA, 23 nt, Human
ccccagccucccgcccucaagcc

SEQ ID NO: 516145 - RNA, 20 nt, Human
ccgccgccgcucccagcugc

SEQ ID NO: 516146 - RNA, 20 nt, Human
ccgccgccgcucccagcugc

SEQ ID NO: 516147 - RNA, 22 nt, Human
ccgccgccgcucccagcugcuc

SEQ ID NO: 516148 - RNA, 22 nt, Human
ccgcuccgcacgcccgcucgcu

SEQ ID NO: 516149 - RNA, 24 nt, Human
ccuacagcagccgcuucagaccca

SEQ ID NO: 516150 - RNA, 18 nt, Human
ccuacagugcaguuucua

SEQ ID NO: 516151 - RNA, 22 nt, Human
cgccgccgccgccgcucccagc

SEQ ID NO: 516152 - RNA, 21 nt, Human
cgccggcuccgcuacccuccc

SEQ ID NO: 516153 - RNA, 29 nt, Human
cgcggcgcggcggcggcggcggcggcgac

SEQ ID NO: 516154 - RNA, 21 nt, Human
cgcggcggcggcggcggcggc

SEQ ID NO: 516155 - RNA, 18 nt, Human
cggcgccuacagcagccg

SEQ ID NO: 516156 - RNA, 20 nt, Human
cggcgccuacagcagccgcu

SEQ ID NO: 516157 - RNA, 22 nt, Human
cuaccaaaauaauuucuagcac

SEQ ID NO: 516158 - RNA, 18 nt, Human
cuugcaauugccaaauac

SEQ ID NO: 516159 - RNA, 19 nt, Human
gagccuuccacccccaaaa

SEQ ID NO: 516160 - RNA, 22 nt, Human
gauaugccauuugcuacaaaau

SEQ ID NO: 516161 - RNA, 26 nt, Human
gcaagcaaacagcacugaacaauauu

SEQ ID NO: 516162 - RNA, 19 nt, Human
gcagguaugccaugcugcc

SEQ ID NO: 516163 - RNA, 20 nt, Human
gcggcggcggcggcggcggc

SEQ ID NO: 516164 - RNA, 18 nt, Human
gcuccgcuacccuccccc

SEQ ID NO: 516165 - RNA, 24 nt, Human
gcuccgcuacccucccccagccuc

SEQ ID NO: 516166 - RNA, 21 nt, Human
gcuggggcacaaaacgcccca

SEQ ID NO: 516167 - RNA, 22 nt, Human
ggaaaaacaaacaaaaaacaaa

SEQ ID NO: 516168 - RNA, 30 nt, Human
ggaaaaagacacacacauacacacacacag

SEQ ID NO: 516169 - RNA, 19 nt, Human
ggcaauggaauauaaugga

SEQ ID NO: 516170 - RNA, 22 nt, Human
ggcgcggcggcggcggcggcgg

SEQ ID NO: 516171 - RNA, 20 nt, Human
ggcggcggcggcggcggcgg

SEQ ID NO: 516172 - RNA, 19 nt, Human
ggcucaaaacacaguauca

SEQ ID NO: 516173 - RNA, 21 nt, Human
guaagggguacugcagguaug

SEQ ID NO: 516174 - RNA, 25 nt, Human
guacuggaucuucauaaugaaacca

SEQ ID NO: 516175 - RNA, 23 nt, Human
guuaacaugcaagcaaacagcac

SEQ ID NO: 516176 - RNA, 20 nt, Human
uaaaaacacaaaaguggcca

SEQ ID NO: 516177 - RNA, 18 nt, Human
uaagaaaaaaagacccac

SEQ ID NO: 516178 - RNA, 23 nt, Human
uaagaaaacaaucaaaauauuag

SEQ ID NO: 516179 - RNA, 19 nt, Human
uaagaugagccuuccaccc

SEQ ID NO: 516180 - RNA, 26 nt, Human
uacaaaagauauaaaaugaaaauaaa

SEQ ID NO: 516181 - RNA, 20 nt, Human
uacacacacacacacacaca

SEQ ID NO: 516182 - RNA, 25 nt, Human
uacacacacacacacacacacacac

SEQ ID NO: 516183 - RNA, 21 nt, Human
uaccaaaauaauuucuagcac

SEQ ID NO: 516184 - RNA, 18 nt, Human
uaggaaaaacagguucau

SEQ ID NO: 516185 - RNA, 23 nt, Human
uaggaaaaacagguucauugaug

SEQ ID NO: 516186 - RNA, 18 nt, Human
uauacaaaagauauaaaa

SEQ ID NO: 516187 - RNA, 19 nt, Human
uauacaaaagauauaaaau

SEQ ID NO: 516188 - RNA, 20 nt, Human
uaucuggacagauccuguga

SEQ ID NO: 516189 - RNA, 24 nt, Human
ucaagccgcggcgcggcggcggcg

SEQ ID NO: 516190 - RNA, 23 nt, Human
ucagacccaacauggcggcggcg

SEQ ID NO: 516191 - RNA, 24 nt, Human
ucagcacaucaacuucugcaagga

SEQ ID NO: 516192 - RNA, 18 nt, Human
ucagugaugaaaaaauac

SEQ ID NO: 516193 - RNA, 24 nt, Human
uccaaacauuaaaaaacaaaauca

SEQ ID NO: 516194 - RNA, 25 nt, Human
uccaacagucuacacauguauugcc

SEQ ID NO: 516195 - RNA, 21 nt, Human
ucccacgccacugucgcccgc

SEQ ID NO: 516196 - RNA, 22 nt, Human
uccccaaaagaaaggaggaaaa

SEQ ID NO: 516197 - RNA, 21 nt, Human
uccgcacgcccgcucgcuccg

SEQ ID NO: 516198 - RNA, 19 nt, Human
uccuacaaaaggggggaag

SEQ ID NO: 516199 - RNA, 22 nt, Human
ucugugauuauuuacauuugua

SEQ ID NO: 516200 - RNA, 21 nt, Human
ugaaaauacagcuaaguacau

SEQ ID NO: 516201 - RNA, 25 nt, Human
ugacugacaaaauucucuaccaucc

SEQ ID NO: 516202 - RNA, 21 nt, Human
ugcucgcagagaggcagaucc

SEQ ID NO: 516203 - RNA, 22 nt, Human
uggaaaacuaagaaaaaaagac

SEQ ID NO: 516204 - RNA, 22 nt, Human
uggcccgggacaucuccaacag

SEQ ID NO: 516205 - RNA, 23 nt, Human
uggcucaaaacacaguaucacgg

SEQ ID NO: 516206 - RNA, 23 nt, Human
uuauuccauggccuucauaaaaa

SEQ ID NO: 516207 - RNA, 21 nt, Human
uucaauaucaugauuuguggg

SEQ ID NO: 516208 - RNA, 24 nt, Human
uuccauggccuucauaaaaacaca

SEQ ID NO: 516209 - RNA, 23 nt, Human
uugaugccuaguuuuaaaguccu

SEQ ID NO: 516210 - RNA, 20 nt, Human
uuguuaagucccacugaagu

SEQ ID NO: 516211 - RNA, 22 nt, Human
uuuaaggagaaaguuaagaaaa

SEQ ID NO: 516212 - RNA, 21 nt, Human
uuuguggguccucuaaaaggu

SEQ ID NO: 516213 - RNA, 26 nt, Human
uuuuacaacuauauaaaaaaguuacc

SEQ ID NO: 516214 - RNA, 23 nt, Human
aaaagaaaaaaaaaggcagggaa

SEQ ID NO: 516215 - RNA, 19 nt, Human
aaacuaggaggagcagaga

SEQ ID NO: 516216 - RNA, 20 nt, Human
aacaauaaaacuagcccaga

SEQ ID NO: 516217 - RNA, 20 nt, Human
aacaugaugaaacccugucu

SEQ ID NO: 516218 - RNA, 21 nt, Human
aacaugaugaaacccugucuc

SEQ ID NO: 516219 - RNA, 24 nt, Human
aacuagcccagaaccaaccagccc

SEQ ID NO: 516220 - RNA, 24 nt, Human
aagcagagguugcagugggccaag

SEQ ID NO: 516221 - RNA, 25 nt, Human
aagcagagguugcagugggccaaga

SEQ ID NO: 516222 - RNA, 18 nt, Human
aauaaaacuagcccagaa

SEQ ID NO: 516223 - RNA, 24 nt, Human
aaucacuugaaccuaggaagcaga

SEQ ID NO: 516224 - RNA, 24 nt, Human
accacuauacucuagccugggcga

SEQ ID NO: 516225 - RNA, 24 nt, Human
acccugucucuacuaaaaauacaa

SEQ ID NO: 516226 - RNA, 18 nt, Human
acuauacucuagccuggg

SEQ ID NO: 516227 - RNA, 24 nt, Human
acuauacucuagccugggcgacag

SEQ ID NO: 516228 - RNA, 22 nt, Human
agaaucacuugaaccuaggaag

SEQ ID NO: 516229 - RNA, 21 nt, Human
agagaccauccuggccaacau

SEQ ID NO: 516230 - RNA, 20 nt, Human
agagguugcagugggccaag

SEQ ID NO: 516231 - RNA, 23 nt, Human
agagguugcagugggccaagauc

SEQ ID NO: 516232 - RNA, 24 nt, Human
agagguugcagugggccaagauca

SEQ ID NO: 516233 - RNA, 24 nt, Human
agcacccacuaccccguggguggc

SEQ ID NO: 516234 - RNA, 20 nt, Human
agcccagaaccaaccagccc

SEQ ID NO: 516235 - RNA, 21 nt, Human
agccugggcgacagagguggg

SEQ ID NO: 516236 - RNA, 18 nt, Human
agcgcagccgcgagagcu

SEQ ID NO: 516237 - RNA, 20 nt, Human
agcugggcgugguggcauac

SEQ ID NO: 516238 - RNA, 20 nt, Human
aggaagcagagguugcagug

SEQ ID NO: 516239 - RNA, 18 nt, Human
aggcaggagaaucacuug

SEQ ID NO: 516240 - RNA, 22 nt, Human
aggcaggagaaucacuugaacc

SEQ ID NO: 516241 - RNA, 24 nt, Human
aggcaggagaaucacuugaaccua

SEQ ID NO: 516242 - RNA, 24 nt, Human
aggcugaggcaggagaaucacuug

SEQ ID NO: 516243 - RNA, 24 nt, Human
aguaacaaaagaccaucugagaga

SEQ ID NO: 516244 - RNA, 23 nt, Human
agugggccaagaucacaccacua

SEQ ID NO: 516245 - RNA, 24 nt, Human
aucacaccacuauacucuagccug

SEQ ID NO: 516246 - RNA, 21 nt, Human
auccuggccaacaugaugaaa

SEQ ID NO: 516247 - RNA, 19 nt, Human
augccuauaaucccagcac

SEQ ID NO: 516248 - RNA, 18 nt, Human
caaaagaccaucugagag

SEQ ID NO: 516249 - RNA, 24 nt, Human
caaaauuaacaauaaaacuagccc

SEQ ID NO: 516250 - RNA, 24 nt, Human
caacaugaugaaacccugucucua

SEQ ID NO: 516251 - RNA, 24 nt, Human
cacuauacucuagccugggcgaca

SEQ ID NO: 516252 - RNA, 20 nt, Human
cagaaccaaccagcccggua

SEQ ID NO: 516253 - RNA, 18 nt, Human
cagcacuuggggaggccg

SEQ ID NO: 516254 - RNA, 20 nt, Human
cagcacuuggggaggccgag

SEQ ID NO: 516255 - RNA, 24 nt, Human
cagcuacuugggaggcugaggcag

SEQ ID NO: 516256 - RNA, 20 nt, Human
caugccuauaaucccagcac

SEQ ID NO: 516257 - RNA, 23 nt, Human
caugccuauaaucccagcacuug

SEQ ID NO: 516258 - RNA, 20 nt, Human
ccacuauacucuagccuggg

SEQ ID NO: 516259 - RNA, 21 nt, Human
ccacuauacucuagccugggc

SEQ ID NO: 516260 - RNA, 21 nt, Human
ccacuauacucuagccugggc

SEQ ID NO: 516261 - RNA, 24 nt, Human
ccacuauacucuagccugggcgac

SEQ ID NO: 516262 - RNA, 19 nt, Human
cccguggguggcccggguc

SEQ ID NO: 516263 - RNA, 21 nt, Human
ccuauaaucccagcacuuggg

SEQ ID NO: 516264 - RNA, 22 nt, Human
ccuggccaacaugaugaaaccc

SEQ ID NO: 516265 - RNA, 24 nt, Human
ccuggccaacaugaugaaacccug

SEQ ID NO: 516266 - RNA, 20 nt, Human
cucaccuucugaacucuacc

SEQ ID NO: 516267 - RNA, 24 nt, Human
cucaugccuauaaucccagcacuu

SEQ ID NO: 516268 - RNA, 21 nt, Human
cucuacuaaaaauacaaaaag

SEQ ID NO: 516269 - RNA, 24 nt, Human
cucuuacaaucccagcuacuuggg

SEQ ID NO: 516270 - RNA, 18 nt, Human
cugaacucuaccaguucc

SEQ ID NO: 516271 - RNA, 21 nt, Human
cuuacaaucccagcuacuugg

SEQ ID NO: 516272 - RNA, 24 nt, Human
cuuuccuucuaaugaggaaaaagg

SEQ ID NO: 516273 - RNA, 19 nt, Human
gaaacccugucucuacuaa

SEQ ID NO: 516274 - RNA, 21 nt, Human
gaggaucuccucucuggugga

SEQ ID NO: 516275 - RNA, 18 nt, Human
gaucacuugagggcagga

SEQ ID NO: 516276 - RNA, 23 nt, Human
gaucacuugagggcaggaguuaa

SEQ ID NO: 516277 - RNA, 21 nt, Human
gcaggagaaucacuugaaccu

SEQ ID NO: 516278 - RNA, 24 nt, Human
gccaacaugaugaaacccugucuc

SEQ ID NO: 516279 - RNA, 19 nt, Human
gcuaauacugggagaacca

SEQ ID NO: 516280 - RNA, 22 nt, Human
gcugggcacgguggcucaugcc

SEQ ID NO: 516281 - RNA, 22 nt, Human
ggaacaaccuggcaagcuuaaa

SEQ ID NO: 516282 - RNA, 23 nt, Human
ggcacgguggcucaugccuauaa

SEQ ID NO: 516283 - RNA, 21 nt, Human
ggcgacagagguggggaaaaa

SEQ ID NO: 516284 - RNA, 21 nt, Human
ggcucaugccuauaaucccag

SEQ ID NO: 516285 - RNA, 23 nt, Human
ggcugggcacgguggcucaugcc

SEQ ID NO: 516286 - RNA, 23 nt, Human
ggugaaacuaggaggagcagaga

SEQ ID NO: 516287 - RNA, 23 nt, Human
gguggcucaugccuauaauccca

SEQ ID NO: 516288 - RNA, 24 nt, Human
gguggcucaugccuauaaucccag

SEQ ID NO: 516289 - RNA, 18 nt, Human
guguaccucaggaggucu

SEQ ID NO: 516290 - RNA, 25 nt, Human
uaaaaucagauguaaaaaaagaaaa

SEQ ID NO: 516291 - RNA, 23 nt, Human
uaacaauaaaacuagcccagaac

SEQ ID NO: 516292 - RNA, 22 nt, Human
uaagagaccauccuggccaaca

SEQ ID NO: 516293 - RNA, 19 nt, Human
uaagugucgugcaaaucuu

SEQ ID NO: 516294 - RNA, 22 nt, Human
uaauacugggagaaccauacaa

SEQ ID NO: 516295 - RNA, 23 nt, Human
uaaugcaaggauagagaaaacca

SEQ ID NO: 516296 - RNA, 22 nt, Human
uacucuagccugggcgacagag

SEQ ID NO: 516297 - RNA, 25 nt, Human
uacucuagccugggcgacagaggug

SEQ ID NO: 516298 - RNA, 19 nt, Human
uagaaaaacaacagcucac

SEQ ID NO: 516299 - RNA, 19 nt, Human
uagcugggcgugguggcau

SEQ ID NO: 516300 - RNA, 24 nt, Human
uaggaagcagagguugcagugggc

SEQ ID NO: 516301 - RNA, 23 nt, Human
uaggcugggcacgguggcucaug

SEQ ID NO: 516302 - RNA, 20 nt, Human
uauugccagaacauggugaa

SEQ ID NO: 516303 - RNA, 18 nt, Human
ucacuugagggcaggagu

SEQ ID NO: 516304 - RNA, 19 nt, Human
ucacuugagggcaggaguu

SEQ ID NO: 516305 - RNA, 24 nt, Human
ucagauguaaaaaaagaaaaaaaa

SEQ ID NO: 516306 - RNA, 22 nt, Human
ucaugccuauaaucccagcacu

SEQ ID NO: 516307 - RNA, 25 nt, Human
ucuagccugggcgacagaggugggg

SEQ ID NO: 516308 - RNA, 20 nt, Human
ucucacauauaugaacccau

SEQ ID NO: 516309 - RNA, 23 nt, Human
ucucuacuaaaaauacaaaaagu

SEQ ID NO: 516310 - RNA, 23 nt, Human
ucuuacaaucccagcuacuuggg

SEQ ID NO: 516311 - RNA, 24 nt, Human
ugacaaaauuaacaauaaaacuag

SEQ ID NO: 516312 - RNA, 20 nt, Human
ugaccugaucccugaaguga

SEQ ID NO: 516313 - RNA, 20 nt, Human
ugaggcaggagaaucacuug

SEQ ID NO: 516314 - RNA, 24 nt, Human
ugaggcaggagaaucacuugaacc

SEQ ID NO: 516315 - RNA, 25 nt, Human
ugaggcaggagaaucacuugaaccu

SEQ ID NO: 516316 - RNA, 23 nt, Human
uggaucacuugagggcaggaguu

SEQ ID NO: 516317 - RNA, 24 nt, Human
uggccaacaugaugaaacccuguc

SEQ ID NO: 516318 - RNA, 21 nt, Human
uggcucaugccuauaauccca

SEQ ID NO: 516319 - RNA, 24 nt, Human
uggcucaugccuauaaucccagca

SEQ ID NO: 516320 - RNA, 19 nt, Human
ugggaggcugaggcaggag

SEQ ID NO: 516321 - RNA, 24 nt, Human
ugggaggcugaggcaggagaauca

SEQ ID NO: 516322 - RNA, 19 nt, Human
ugguggaucacuugagggc

SEQ ID NO: 516323 - RNA, 20 nt, Human
uugcagugggccaagaucac

SEQ ID NO: 516324 - RNA, 25 nt, Human
uugggaggcugaggcaggagaauca

SEQ ID NO: 516325 - RNA, 18 nt, Human
uuuacagauauacaaucu

SEQ ID NO: 516326 - RNA, 18 nt, Human
uuuucguucuuuuaauua

SEQ ID NO: 516327 - RNA, 18 nt, Human
aaaauaacuuuggacaaa

SEQ ID NO: 516328 - RNA, 21 nt, Human
aaacaaaccaacacugaagau

SEQ ID NO: 516329 - RNA, 20 nt, Human
aacaacacacacuagcaaaa

SEQ ID NO: 516330 - RNA, 20 nt, Human
aaggaucccuccuguguuac

SEQ ID NO: 516331 - RNA, 21 nt, Human
aaggugucucuaaaagggaca

SEQ ID NO: 516332 - RNA, 21 nt, Human
aauaauagacacaggcaggga

SEQ ID NO: 516333 - RNA, 19 nt, Human
aaugacaacaacaaaaaga

SEQ ID NO: 516334 - RNA, 21 nt, Human
acacugaagauacaaagaaug

SEQ ID NO: 516335 - RNA, 18 nt, Human
acagcugaccuguccucu

SEQ ID NO: 516336 - RNA, 21 nt, Human
acagcugaccuguccucuaca

SEQ ID NO: 516337 - RNA, 21 nt, Human
accaaaaucaaugacaacaac

SEQ ID NO: 516338 - RNA, 19 nt, Human
accgcgcucgcucagaagc

SEQ ID NO: 516339 - RNA, 22 nt, Human
acuggaauacaggacauuucua

SEQ ID NO: 516340 - RNA, 18 nt, Human
agaccuucucugcccaca

SEQ ID NO: 516341 - RNA, 18 nt, Human
agacugagcacagguggc

SEQ ID NO: 516342 - RNA, 21 nt, Human
agcaggacuaaggccucccaa

SEQ ID NO: 516343 - RNA, 23 nt, Human
agcagucagugguucugaaauac

SEQ ID NO: 516344 - RNA, 23 nt, Human
aggcacccucaggaggacggcaa

SEQ ID NO: 516345 - RNA, 21 nt, Human
aggcagcaaauuuccagcgua

SEQ ID NO: 516346 - RNA, 27 nt, Human
augaaaccaggguaacaccuuuggaug

SEQ ID NO: 516347 - RNA, 25 nt, Human
augacaacaacaaaaagaugaggaa

SEQ ID NO: 516348 - RNA, 24 nt, Human
caaaaacaaaggcacaguaaacaa

SEQ ID NO: 516349 - RNA, 26 nt, Human
caaaagcaccgcgcucgcucagaagc

SEQ ID NO: 516350 - RNA, 24 nt, Human
caaaaucaaugacaacaacaaaaa

SEQ ID NO: 516351 - RNA, 26 nt, Human
caaaccaacacugaagauacaaagaa

SEQ ID NO: 516352 - RNA, 27 nt, Human
caacacacacuagcaaaaacaaaggca

SEQ ID NO: 516353 - RNA, 22 nt, Human
caagagcacacagcacugaagc

SEQ ID NO: 516354 - RNA, 19 nt, Human
caaugaaaccaggguaaca

SEQ ID NO: 516355 - RNA, 18 nt, Human
cacacagcacugaagcuc

SEQ ID NO: 516356 - RNA, 22 nt, Human
cacacagcacugaagcuccaga

SEQ ID NO: 516357 - RNA, 21 nt, Human
cacacagugcuuaagcuccag

SEQ ID NO: 516358 - RNA, 21 nt, Human
caccaaaaucaaugacaacaa

SEQ ID NO: 516359 - RNA, 21 nt, Human
cacuggcagagucccagguga

SEQ ID NO: 516360 - RNA, 19 nt, Human
cagacaacuucagaaugua

SEQ ID NO: 516361 - RNA, 19 nt, Human
cagcaaauuuccagcguag

SEQ ID NO: 516362 - RNA, 21 nt, Human
cagcacugaagcuccagauac

SEQ ID NO: 516363 - RNA, 21 nt, Human
caguguggaggccaagagcac

SEQ ID NO: 516364 - RNA, 21 nt, Human
caguguggaggccaagagcac

SEQ ID NO: 516365 - RNA, 20 nt, Human
caucagugauucgggcuccu

SEQ ID NO: 516366 - RNA, 23 nt, Human
caugcccacuuucccauccuaug

SEQ ID NO: 516367 - RNA, 21 nt, Human
caugugcuacauagucgugug

SEQ ID NO: 516368 - RNA, 24 nt, Human
ccaucagugauucgggcuccuucc

SEQ ID NO: 516369 - RNA, 19 nt, Human
cccaaaauaucucuccucc

SEQ ID NO: 516370 - RNA, 24 nt, Human
cccaaaauaucucuccuccuuuuu

SEQ ID NO: 516371 - RNA, 26 nt, Human
ccccuccuuaaccaaguaaccagucc

SEQ ID NO: 516372 - RNA, 21 nt, Human
cccgucccgcguucccaaaag

SEQ ID NO: 516373 - RNA, 18 nt, Human
ccgccacccagccccucg

SEQ ID NO: 516374 - RNA, 24 nt, Human
ccgccgcgccucggcccagcuccu

SEQ ID NO: 516375 - RNA, 23 nt, Human
ccgcgccgccgcgccucggccca

SEQ ID NO: 516376 - RNA, 20 nt, Human
ccucagaaacgcugggugga

SEQ ID NO: 516377 - RNA, 18 nt, Human
ccugcaaaaugaaacccc

SEQ ID NO: 516378 - RNA, 19 nt, Human
ccugccugcagcaaugaca

SEQ ID NO: 516379 - RNA, 20 nt, Human
ccuuccaaggcuccccauga

SEQ ID NO: 516380 - RNA, 22 nt, Human
cgcccgucccgcguucccaaaa

SEQ ID NO: 516381 - RNA, 21 nt, Human
cguagagauaugaauauaaua

SEQ ID NO: 516382 - RNA, 23 nt, Human
cuaaaacaaaccaacacugaaga

SEQ ID NO: 516383 - RNA, 21 nt, Human
cuccagauacccucaggagga

SEQ ID NO: 516384 - RNA, 25 nt, Human
cucgcgacccucaccuacgccuccc

SEQ ID NO: 516385 - RNA, 18 nt, Human
cucggcccagcuccuggc

SEQ ID NO: 516386 - RNA, 21 nt, Human
cucugcccacagaugggcuga

SEQ ID NO: 516387 - RNA, 18 nt, Human
cucuugccagcggcuccu

SEQ ID NO: 516388 - RNA, 19 nt, Human
cugaacccaaaauaucucu

SEQ ID NO: 516389 - RNA, 22 nt, Human
cugaccuugagcagguauagaa

SEQ ID NO: 516390 - RNA, 22 nt, Human
cugcugaaccaucuccaugcac

SEQ ID NO: 516391 - RNA, 23 nt, Human
cuugaugaaacguuuaggcugaa

SEQ ID NO: 516392 - RNA, 21 nt, Human
cuugccagcggcuccugacuc

SEQ ID NO: 516393 - RNA, 19 nt, Human
cuuugaaaaaccacucucc

SEQ ID NO: 516394 - RNA, 18 nt, Human
gaaaaaccacucucccaa

SEQ ID NO: 516395 - RNA, 19 nt, Human
gaaagauuggccaucuucc

SEQ ID NO: 516396 - RNA, 21 nt, Human
gaacccaaaauaucucuccuc

SEQ ID NO: 516397 - RNA, 18 nt, Human
gaagacauuuucagacaa

SEQ ID NO: 516398 - RNA, 20 nt, Human
gaccuggacuugccccugca

SEQ ID NO: 516399 - RNA, 22 nt, Human
gaccuucucugcccacagaugg

SEQ ID NO: 516400 - RNA, 20 nt, Human
gagcacagguggccacuggc

SEQ ID NO: 516401 - RNA, 21 nt, Human
gagccaugcccacuuucccaa

SEQ ID NO: 516402 - RNA, 18 nt, Human
gauuaccuccuaugaaac

SEQ ID NO: 516403 - RNA, 19 nt, Human
gcccgggucaccgggaacc

SEQ ID NO: 516404 - RNA, 24 nt, Human
ggaaccuucgccugggucuaaaca

SEQ ID NO: 516405 - RNA, 24 nt, Human
ggaaccuucgccugggucuaaaca

SEQ ID NO: 516406 - RNA, 23 nt, Human
gggguucaaaauaacuaaagaaa

SEQ ID NO: 516407 - RNA, 19 nt, Human
gucccgcguucccaaaagc

SEQ ID NO: 516408 - RNA, 25 nt, Human
gugguucugaaauacaauccucagc

SEQ ID NO: 516409 - RNA, 21 nt, Human
uaaaacaaaccaacacugaag

SEQ ID NO: 516410 - RNA, 24 nt, Human
uaaaacaaaccaacacugaagaua

SEQ ID NO: 516411 - RNA, 18 nt, Human
uaaagaaauguagcuaca

SEQ ID NO: 516412 - RNA, 22 nt, Human
uaacuaaagaaauguagcuaca

SEQ ID NO: 516413 - RNA, 23 nt, Human
uaacuaaagaaauguagcuacau

SEQ ID NO: 516414 - RNA, 23 nt, Human
uaacuuggguccaacgucuucag

SEQ ID NO: 516415 - RNA, 24 nt, Human
uacagauggaucagcuaaaacaaa

SEQ ID NO: 516416 - RNA, 19 nt, Human
uagaccuucucugcccaca

SEQ ID NO: 516417 - RNA, 22 nt, Human
uagagccaugcccacuuucccc

SEQ ID NO: 516418 - RNA, 19 nt, Human
uagaggaugaucacuggaa

SEQ ID NO: 516419 - RNA, 18 nt, Human
uagcaaaaacaaaggcac

SEQ ID NO: 516420 - RNA, 19 nt, Human
uagcaaaaacaaaggcaca

SEQ ID NO: 516421 - RNA, 21 nt, Human
uagcaaaaacaaaggcacagu

SEQ ID NO: 516422 - RNA, 22 nt, Human
uagcuguggucuuccuaaguau

SEQ ID NO: 516423 - RNA, 20 nt, Human
uaggaauagagccaugccca

SEQ ID NO: 516424 - RNA, 23 nt, Human
uaucauuuacuucuucugaaccc

SEQ ID NO: 516425 - RNA, 18 nt, Human
ucagagacaugccugcaa

SEQ ID NO: 516426 - RNA, 21 nt, Human
uccaaggcuccccaugacugc

SEQ ID NO: 516427 - RNA, 26 nt, Human
ucccgcguucccaaaagcaccgcgcu

SEQ ID NO: 516428 - RNA, 21 nt, Human
uccuguucuuuacaggaugga

SEQ ID NO: 516429 - RNA, 21 nt, Human
ucucaaccgccacccagcccc

SEQ ID NO: 516430 - RNA, 19 nt, Human
ucucucagcuuaguaaggg

SEQ ID NO: 516431 - RNA, 21 nt, Human
ucucucagcuuaguaagggcu

SEQ ID NO: 516432 - RNA, 24 nt, Human
ucuugaugaaacguuuaggcugaa

SEQ ID NO: 516433 - RNA, 19 nt, Human
ugaaaaaccacucucccaa

SEQ ID NO: 516434 - RNA, 21 nt, Human
ugaaaccaggguaacaccuuu

SEQ ID NO: 516435 - RNA, 18 nt, Human
ugaaaccccugaggaacu

SEQ ID NO: 516436 - RNA, 21 nt, Human
ugaaauacaauccucagccaa

SEQ ID NO: 516437 - RNA, 21 nt, Human
ugaauauaauaauagacacag

SEQ ID NO: 516438 - RNA, 22 nt, Human
ugaauucuuagcaguacgauuc

SEQ ID NO: 516439 - RNA, 24 nt, Human
ugacaacaacaaaaagaugaggaa

SEQ ID NO: 516440 - RNA, 24 nt, Human
ugacaugcugucucuugccagcgg

SEQ ID NO: 516441 - RNA, 22 nt, Human
ugaccuguccucuacaaacaag

SEQ ID NO: 516442 - RNA, 26 nt, Human
ugagagccugggucaccaggaaccuu

SEQ ID NO: 516443 - RNA, 18 nt, Human
ugagccagacagcugacc

SEQ ID NO: 516444 - RNA, 24 nt, Human
ugaggaacuuuguagcuacccaga

SEQ ID NO: 516445 - RNA, 24 nt, Human
ugauucgggcuccuuccaaggcuc

SEQ ID NO: 516446 - RNA, 21 nt, Human
ugcugauggacaaacuagacc

SEQ ID NO: 516447 - RNA, 22 nt, Human
uggaaacucacaguaucgacuc

SEQ ID NO: 516448 - RNA, 29 nt, Human
ugucucaaccgccacccagccccucgcug

SEQ ID NO: 516449 - RNA, 19 nt, Human
uguggaggccaagagcaca

SEQ ID NO: 516450 - RNA, 19 nt, Human
uguggaggccaagagcaca

SEQ ID NO: 516451 - RNA, 24 nt, Human
uucaaugaaaccaggguaacaccu

SEQ ID NO: 516452 - RNA, 23 nt, Human
uucagauugccucagaaacgcug

SEQ ID NO: 516453 - RNA, 22 nt, Human
uuuuuuuuuuugauaggcaaaa

SEQ ID NO: 516454 - RNA, 23 nt, Human
uuuuuuuuuuuuuuuuugauagg

SEQ ID NO: 516455 - RNA, 20 nt, Human
uuuuuuuuuuuuuuuuuugg

SEQ ID NO: 516456 - RNA, 26 nt, Human
aacuuguuuccucaaucaagaaaucc

SEQ ID NO: 516457 - RNA, 19 nt, Human
aaggaccccacguugagaa

SEQ ID NO: 516458 - RNA, 19 nt, Human
aaggauaauaagucacugu

SEQ ID NO: 516459 - RNA, 18 nt, Human
aauaguaucauuauccuc

SEQ ID NO: 516460 - RNA, 18 nt, Human
acauuugguuuuaacugu

SEQ ID NO: 516461 - RNA, 20 nt, Human
acugcucuuguuuuuucugg

SEQ ID NO: 516462 - RNA, 24 nt, Human
aggaaggauaauaagucacugucc

SEQ ID NO: 516463 - RNA, 18 nt, Human
aggauaauaagucacugu

SEQ ID NO: 516464 - RNA, 23 nt, Human
agucucuucuuugaaauugugcu

SEQ ID NO: 516465 - RNA, 21 nt, Human
auaguaucuuuuccucaccca

SEQ ID NO: 516466 - RNA, 18 nt, Human
aucaauauccaauguucu

SEQ ID NO: 516467 - RNA, 24 nt, Human
caagaaauugugacaucaacaaug

SEQ ID NO: 516468 - RNA, 21 nt, Human
cacagcccacaggcaccuagg

SEQ ID NO: 516469 - RNA, 21 nt, Human
cagcaaucacaaccuuuagau

SEQ ID NO: 516470 - RNA, 20 nt, Human
cagcaugaaagacucaucug

SEQ ID NO: 516471 - RNA, 23 nt, Human
cagcaugaaagacucaucuguua

SEQ ID NO: 516472 - RNA, 19 nt, Human
caucugccuuuuuuguuuc

SEQ ID NO: 516473 - RNA, 18 nt, Human
cauuugguuuuaacuguu

SEQ ID NO: 516474 - RNA, 24 nt, Human
ccacaggcaccuaggggugcugag

SEQ ID NO: 516475 - RNA, 22 nt, Human
cccaauucaucucugggcucac

SEQ ID NO: 516476 - RNA, 21 nt, Human
cccacaagguagaugaaaggg

SEQ ID NO: 516477 - RNA, 24 nt, Human
cccacaggcaccuaggggugcuga

SEQ ID NO: 516478 - RNA, 22 nt, Human
cccaucacuugcuguccaagga

SEQ ID NO: 516479 - RNA, 22 nt, Human
cccauccugccccaggaaaugu

SEQ ID NO: 516480 - RNA, 18 nt, Human
ccccacagcaaucacaac

SEQ ID NO: 516481 - RNA, 18 nt, Human
ccccugggaacaucgucu

SEQ ID NO: 516482 - RNA, 20 nt, Human
ccuagucuuucuccaggaac

SEQ ID NO: 516483 - RNA, 20 nt, Human
ccucuggauaucccaggcuu

SEQ ID NO: 516484 - RNA, 24 nt, Human
ccucuuugagacccaaaugaaaau

SEQ ID NO: 516485 - RNA, 23 nt, Human
ccuucagaauauggauuagcuug

SEQ ID NO: 516486 - RNA, 25 nt, Human
cuguuuugacugcucuuguuuuuuc

SEQ ID NO: 516487 - RNA, 20 nt, Human
gaagaugccucuggauaucc

SEQ ID NO: 516488 - RNA, 24 nt, Human
gagagguugacuuguugaaucugu

SEQ ID NO: 516489 - RNA, 19 nt, Human
gauucugaaugcccagguu

SEQ ID NO: 516490 - RNA, 20 nt, Human
guacuuuuucauuuccagaa

SEQ ID NO: 516491 - RNA, 24 nt, Human
uaaauguaaggcacagcccacagg

SEQ ID NO: 516492 - RNA, 18 nt, Human
uacuugaacauuuucagu

SEQ ID NO: 516493 - RNA, 23 nt, Human
uaggcugcaaagagccaucuuca

SEQ ID NO: 516494 - RNA, 24 nt, Human
uaggcugcaaagagccaucuucaa

SEQ ID NO: 516495 - RNA, 24 nt, Human
uauaaagaggaugucucaccagga

SEQ ID NO: 516496 - RNA, 20 nt, Human
uauacuugaacauuuucagu

SEQ ID NO: 516497 - RNA, 19 nt, Human
uauuuucuguauucuuuaa

SEQ ID NO: 516498 - RNA, 18 nt, Human
ucacuauuucaacagaau

SEQ ID NO: 516499 - RNA, 21 nt, Human
uccagaauuagcauuguagag

SEQ ID NO: 516500 - RNA, 25 nt, Human
ucccaaaucacagcaugaaagacuc

SEQ ID NO: 516501 - RNA, 19 nt, Human
ucccauccugccccaggaa

SEQ ID NO: 516502 - RNA, 25 nt, Human
uccuaaaucucccacguuuccaagg

SEQ ID NO: 516503 - RNA, 25 nt, Human
uccuucagaauauggauuagcuuga

SEQ ID NO: 516504 - RNA, 18 nt, Human
ugagguugugauuuuucc

SEQ ID NO: 516505 - RNA, 24 nt, Human
ugcccaauucaucucugggcucaa

SEQ ID NO: 516506 - RNA, 23 nt, Human
ugccucuggauaucccaggcuug

SEQ ID NO: 516507 - RNA, 25 nt, Human
ugccugaacagagagguucggugcc

SEQ ID NO: 516508 - RNA, 20 nt, Human
ugcugaggaagaugccucug

SEQ ID NO: 516509 - RNA, 18 nt, Human
uggaaaagggauuccaau

SEQ ID NO: 516510 - RNA, 19 nt, Human
uggaaaauauugucuucaa

SEQ ID NO: 516511 - RNA, 19 nt, Human
ugggcuuacaggugcuugc

SEQ ID NO: 516512 - RNA, 18 nt, Human
ugucugacgucuguaguu

SEQ ID NO: 516513 - RNA, 21 nt, Human
uuaaucccaaaucacagcaug

SEQ ID NO: 516514 - RNA, 18 nt, Human
uucaagaaauugugacau

SEQ ID NO: 516515 - RNA, 24 nt, Human
uucaauuuuuuagguaagaugaaa

SEQ ID NO: 516516 - RNA, 25 nt, Human
uucagaauauggauuagcuugagaa

SEQ ID NO: 516517 - RNA, 21 nt, Human
uucauuuccagaauuagcauu

SEQ ID NO: 516518 - RNA, 19 nt, Human
uuccugagguugugauuuu

SEQ ID NO: 516519 - RNA, 22 nt, Human
uuuaaaaaaaccuucaauuuuc

SEQ ID NO: 516520 - RNA, 23 nt, Human
uuugaaauguuaucaacuuugca

SEQ ID NO: 516521 - RNA, 18 nt, Human
aaaaaagacuuucagaca

SEQ ID NO: 516522 - RNA, 21 nt, Human
aaaaaccaaaaaggagaccaa

SEQ ID NO: 516523 - RNA, 19 nt, Human
aaaaaggagaccaaaaaaa

SEQ ID NO: 516524 - RNA, 25 nt, Human
aaaauagaagacaaaagaaagaaaa

SEQ ID NO: 516525 - RNA, 18 nt, Human
aaacaagaauaggaugca

SEQ ID NO: 516526 - RNA, 29 nt, Human
aaacaagaauaggaugcaaaagggacccc

SEQ ID NO: 516527 - RNA, 19 nt, Human
aaacagauguuagucaucu

SEQ ID NO: 516528 - RNA, 20 nt, Human
aaaccucuuuccuuuauaaa

SEQ ID NO: 516529 - RNA, 22 nt, Human
aaagaaaaccaaagacuaaucu

SEQ ID NO: 516530 - RNA, 20 nt, Human
aaagagacagggucuugcug

SEQ ID NO: 516531 - RNA, 24 nt, Human
aaaguacuaggauuacaggcauga

SEQ ID NO: 516532 - RNA, 24 nt, Human
aaagugcugggauuauaaguguga

SEQ ID NO: 516533 - RNA, 24 nt, Human
aaagugcugggauuauagguguga

SEQ ID NO: 516534 - RNA, 22 nt, Human
aagagacagggucuugcugugu

SEQ ID NO: 516535 - RNA, 21 nt, Human
aagcaagugaaagacaugaga

SEQ ID NO: 516536 - RNA, 25 nt, Human
aagcaauccucccgcccuggccucc

SEQ ID NO: 516537 - RNA, 25 nt, Human
aagcaauccucccgcccuggccucc

SEQ ID NO: 516538 - RNA, 19 nt, Human
aaguacuaggauuacaggc

SEQ ID NO: 516539 - RNA, 24 nt, Human
aagugauccuccugccuuggccuc

SEQ ID NO: 516540 - RNA, 18 nt, Human
aagugcugggauuauaag

SEQ ID NO: 516541 - RNA, 26 nt, Human
aagugcugggauuauaagugugagcc

SEQ ID NO: 516542 - RNA, 18 nt, Human
aagugcugggauuauagg

SEQ ID NO: 516543 - RNA, 26 nt, Human
aagugcugggauuauaggugugagcc

SEQ ID NO: 516544 - RNA, 19 nt, Human
aagugugagccaccaugcc

SEQ ID NO: 516545 - RNA, 20 nt, Human
aaugagagugugcaccaagc

SEQ ID NO: 516546 - RNA, 24 nt, Human
acaagcaccuaaaagauacaaagc

SEQ ID NO: 516547 - RNA, 21 nt, Human
acacucaacagaaggguugga

SEQ ID NO: 516548 - RNA, 20 nt, Human
acagacaaaaaagacuuuca

SEQ ID NO: 516549 - RNA, 24 nt, Human
acaguaaaugggggacccccuaga

SEQ ID NO: 516550 - RNA, 22 nt, Human
accagcuccccagcaaucucaa

SEQ ID NO: 516551 - RNA, 25 nt, Human
accauguugcccaggcugaucucaa

SEQ ID NO: 516552 - RNA, 25 nt, Human
accauguugcccaggcuggucucaa

SEQ ID NO: 516553 - RNA, 21 nt, Human
accuaaaagauacaaagcuuu

SEQ ID NO: 516554 - RNA, 22 nt, Human
acggauuuccaaagcucuuacc

SEQ ID NO: 516555 - RNA, 18 nt, Human
acgggguuucaccauguu

SEQ ID NO: 516556 - RNA, 19 nt, Human
acgggguuucaccauguug

SEQ ID NO: 516557 - RNA, 24 nt, Human
acgggguuucaccauguugcccag

SEQ ID NO: 516558 - RNA, 21 nt, Human
acucacaucaaagcacaucac

SEQ ID NO: 516559 - RNA, 21 nt, Human
acugaaaacuaauuagccaaa

SEQ ID NO: 516560 - RNA, 23 nt, Human
agaaaaaaaccaaaaaggagacc

SEQ ID NO: 516561 - RNA, 19 nt, Human
agaaagagaacagagaaaa

SEQ ID NO: 516562 - RNA, 19 nt, Human
agacaaaagaaagaaaacc

SEQ ID NO: 516563 - RNA, 23 nt, Human
agacaaaagaaagaaaaccaaag

SEQ ID NO: 516564 - RNA, 18 nt, Human
agacagggucuugcugug

SEQ ID NO: 516565 - RNA, 23 nt, Human
agacagggucuugcuguguugcc

SEQ ID NO: 516566 - RNA, 20 nt, Human
agaccaaaaaaacccaaaac

SEQ ID NO: 516567 - RNA, 22 nt, Human
agagaaaacagaugggacaaaa

SEQ ID NO: 516568 - RNA, 19 nt, Human
agagaacagcaagaaaaga

SEQ ID NO: 516569 - RNA, 28 nt, Human
agagaacagcaagaaaagagagaguuac

SEQ ID NO: 516570 - RNA, 24 nt, Human
agagaagaacauuaugcagggaag

SEQ ID NO: 516571 - RNA, 19 nt, Human
agagacaggguuccaccau

SEQ ID NO: 516572 - RNA, 22 nt, Human
agaggugugaccauaccagcuc

SEQ ID NO: 516573 - RNA, 24 nt, Human
agcaagaaaagagagaguuccugg

SEQ ID NO: 516574 - RNA, 20 nt, Human
agcaagugaaagacaugaga

SEQ ID NO: 516575 - RNA, 21 nt, Human
agcaauccucccgcccuggcc

SEQ ID NO: 516576 - RNA, 23 nt, Human
agcaauccucccgcccuggccuc

SEQ ID NO: 516577 - RNA, 24 nt, Human
agcacaucacugagagaauucaga

SEQ ID NO: 516578 - RNA, 23 nt, Human
aggacucaagugauccuccugcc

SEQ ID NO: 516579 - RNA, 23 nt, Human
aggagaccaaaaaaacccaaaac

SEQ ID NO: 516580 - RNA, 23 nt, Human
aggcaguggcacaaucuuggcuc

SEQ ID NO: 516581 - RNA, 20 nt, Human
agggccaaaugcucagagga

SEQ ID NO: 516582 - RNA, 18 nt, Human
aguaaaugggggaccccc

SEQ ID NO: 516583 - RNA, 22 nt, Human
aguagagacgggguuucaccau

SEQ ID NO: 516584 - RNA, 19 nt, Human
aguauucuccuacucugcu

SEQ ID NO: 516585 - RNA, 24 nt, Human
agugcugggauuauaagugugagc

SEQ ID NO: 516586 - RNA, 21 nt, Human
auaaaaacagacucacaucaa

SEQ ID NO: 516587 - RNA, 20 nt, Human
auagaagacaaaagaaagaa

SEQ ID NO: 516588 - RNA, 21 nt, Human
augcuuccagaaauaacauac

SEQ ID NO: 516589 - RNA, 18 nt, Human
augugccaccacgcccag

SEQ ID NO: 516590 - RNA, 24 nt, Human
auuuuaguagagacgggguuucac

SEQ ID NO: 516591 - RNA, 18 nt, Human
caaaaaggagaccaaaaa

SEQ ID NO: 516592 - RNA, 20 nt, Human
caaaaaggagaccaaaaaaa

SEQ ID NO: 516593 - RNA, 26 nt, Human
caaaaaggagaccaaaaaaacccaag

SEQ ID NO: 516594 - RNA, 22 nt, Human
caaaagaaagaaaaccaaagac

SEQ ID NO: 516595 - RNA, 19 nt, Human
caaaaugagagugugcacc

SEQ ID NO: 516596 - RNA, 24 nt, Human
caaaguacuaggauuacaggcaug

SEQ ID NO: 516597 - RNA, 24 nt, Human
caaagugcugggauuauaagugug

SEQ ID NO: 516598 - RNA, 24 nt, Human
caaagugcugggauuauaggugug

SEQ ID NO: 516599 - RNA, 20 nt, Human
caagcaagugaaagacauga

SEQ ID NO: 516600 - RNA, 27 nt, Human
caagcaauccucccgcccuggccuccc

SEQ ID NO: 516601 - RNA, 22 nt, Human
caagcaauucuccugccucagc

SEQ ID NO: 516602 - RNA, 22 nt, Human
caagugauccuccugccuuggc

SEQ ID NO: 516603 - RNA, 27 nt, Human
caagugauccuccugccuuggccuccc

SEQ ID NO: 516604 - RNA, 27 nt, Human
caagugauccuccugccuuggccuccc

SEQ ID NO: 516605 - RNA, 20 nt, Human
caccaagcaagugaaagaca

SEQ ID NO: 516606 - RNA, 20 nt, Human
caccaugccuggccuuguug

SEQ ID NO: 516607 - RNA, 24 nt, Human
caccauguugcccaggcugaucuc

SEQ ID NO: 516608 - RNA, 27 nt, Human
caccauguugcccaggcugaucucaaa

SEQ ID NO: 516609 - RNA, 24 nt, Human
caccauguugcccaggcuggucuc

SEQ ID NO: 516610 - RNA, 27 nt, Human
caccauguugcccaggcuggucucaaa

SEQ ID NO: 516611 - RNA, 21 nt, Human
cacugcaacuuccgccuccca

SEQ ID NO: 516612 - RNA, 21 nt, Human
cagagcacuggggaaaaauaa

SEQ ID NO: 516613 - RNA, 23 nt, Human
cagauaaaaacagacucacauca

SEQ ID NO: 516614 - RNA, 27 nt, Human
cagauaaaacagauaaaaacagacuuc

SEQ ID NO: 516615 - RNA, 23 nt, Human
cagcaaugaucucaaaauuuuaa

SEQ ID NO: 516616 - RNA, 21 nt, Human
cagcaugagaacagacuaacg

SEQ ID NO: 516617 - RNA, 21 nt, Human
cagccaaucaaaccaccaaau

SEQ ID NO: 516618 - RNA, 23 nt, Human
cagggucuugcuguguugcccag

SEQ ID NO: 516619 - RNA, 24 nt, Human
caggguuccaccauguugcccagg

SEQ ID NO: 516620 - RNA, 26 nt, Human
cauaauagugaauaaguguuacgaga

SEQ ID NO: 516621 - RNA, 21 nt, Human
caugugccaccacgcccagcu

SEQ ID NO: 516622 - RNA, 21 nt, Human
cauguuccccuucucaggaaa

SEQ ID NO: 516623 - RNA, 23 nt, Human
cauguugcccaggcugaucucaa

SEQ ID NO: 516624 - RNA, 24 nt, Human
cauguugcccaggcugaucucaaa

SEQ ID NO: 516625 - RNA, 23 nt, Human
cauguugcccaggcuggucucaa

SEQ ID NO: 516626 - RNA, 24 nt, Human
cauguugcccaggcuggucucaaa

SEQ ID NO: 516627 - RNA, 18 nt, Human
ccaaagcagagcaaaaga

SEQ ID NO: 516628 - RNA, 24 nt, Human
ccaaaguacuaggauuacaggcau

SEQ ID NO: 516629 - RNA, 18 nt, Human
ccaaagugcugggauuau

SEQ ID NO: 516630 - RNA, 21 nt, Human
ccaaagugcugggauuauaag

SEQ ID NO: 516631 - RNA, 24 nt, Human
ccaaagugcugggauuauaagugu

SEQ ID NO: 516632 - RNA, 20 nt, Human
ccaaagugcugggauuauag

SEQ ID NO: 516633 - RNA, 21 nt, Human
ccaaagugcugggauuauagg

SEQ ID NO: 516634 - RNA, 24 nt, Human
ccaaagugcugggauuauaggugu

SEQ ID NO: 516635 - RNA, 22 nt, Human
ccaagcagcugggcuaugagac

SEQ ID NO: 516636 - RNA, 20 nt, Human
ccaccacgcccagcuaauuu

SEQ ID NO: 516637 - RNA, 19 nt, Human
ccaggccggaggcaguggc

SEQ ID NO: 516638 - RNA, 22 nt, Human
ccaggccggaggcaguggcaca

SEQ ID NO: 516639 - RNA, 23 nt, Human
cccaagcaauccucccgcccugg

SEQ ID NO: 516640 - RNA, 23 nt, Human
cccagguucaagcaauucuccug

SEQ ID NO: 516641 - RNA, 21 nt, Human
ccccugcacaugcucucuugc

SEQ ID NO: 516642 - RNA, 27 nt, Human
ccgccucccagguucaagcaauucuuu

SEQ ID NO: 516643 - RNA, 18 nt, Human
ccucauucaccuuccgcc

SEQ ID NO: 516644 - RNA, 24 nt, Human
ccucccagguucaagcaauucucc

SEQ ID NO: 516645 - RNA, 26 nt, Human
ccucccgcccuggccucccaaagugc

SEQ ID NO: 516646 - RNA, 26 nt, Human
ccuccugccuuggccucccaaagugc

SEQ ID NO: 516647 - RNA, 24 nt, Human
cgggguuucaccauguugcccagg

SEQ ID NO: 516648 - RNA, 22 nt, Human
cguuguguucacuuuuguaucc

SEQ ID NO: 516649 - RNA, 22 nt, Human
cucaaaggugggacuacaggca

SEQ ID NO: 516650 - RNA, 24 nt, Human
cucaagugauccuccugccuuggc

SEQ ID NO: 516651 - RNA, 19 nt, Human
cucacaucaaagcacauca

SEQ ID NO: 516652 - RNA, 23 nt, Human
cugcaacuuccgccucccagguu

SEQ ID NO: 516653 - RNA, 23 nt, Human
cugccuuggccucccaaagugcu

SEQ ID NO: 516654 - RNA, 21 nt, Human
cugggauuauaggugugagcc

SEQ ID NO: 516655 - RNA, 22 nt, Human
cuguaaccaagaguguggaagc

SEQ ID NO: 516656 - RNA, 23 nt, Human
cuuccagaaauaacauacacaaa

SEQ ID NO: 516657 - RNA, 22 nt, Human
cuugcuguguugcccagacugg

SEQ ID NO: 516658 - RNA, 24 nt, Human
cuuuguccuccaaagagaugucaa

SEQ ID NO: 516659 - RNA, 26 nt, Human
gaaaaaaaccaaaaaggagaccaaaa

SEQ ID NO: 516660 - RNA, 30 nt, Human
gaaaaaaaccaaaaaggagaccaaaaaaag

SEQ ID NO: 516661 - RNA, 21 nt, Human
gaagacaaaagaaagaaaacc

SEQ ID NO: 516662 - RNA, 21 nt, Human
gaagacaaaagaaagaaaacc

SEQ ID NO: 516663 - RNA, 21 nt, Human
gaccaaaaaaacccaaaacag

SEQ ID NO: 516664 - RNA, 22 nt, Human
gacucaagugauccuccugccu

SEQ ID NO: 516665 - RNA, 18 nt, Human
gagaaaaaaaccaaaaag

SEQ ID NO: 516666 - RNA, 20 nt, Human
gagaaaaaaaccaaaaagga

SEQ ID NO: 516667 - RNA, 23 nt, Human
gagacgggguuucaccauguugc

SEQ ID NO: 516668 - RNA, 24 nt, Human
gagacgggguuucaccauguugcc

SEQ ID NO: 516669 - RNA, 19 nt, Human
gagcagcuggcacaugaga

SEQ ID NO: 516670 - RNA, 24 nt, Human
gauaaaaacagacucacaucaaag

SEQ ID NO: 516671 - RNA, 18 nt, Human
gauuacaggcaugaguca

SEQ ID NO: 516672 - RNA, 21 nt, Human
gauuacaggcaugagucacca

SEQ ID NO: 516673 - RNA, 22 nt, Human
gauuacaggcaugagucaccac

SEQ ID NO: 516674 - RNA, 18 nt, Human
gauuauaagugugagcca

SEQ ID NO: 516675 - RNA, 24 nt, Human
gauuauaagugugagccaccaugc

SEQ ID NO: 516676 - RNA, 18 nt, Human
gauuauaggugugagcca

SEQ ID NO: 516677 - RNA, 22 nt, Human
gauuauaggugugagccaccgc

SEQ ID NO: 516678 - RNA, 23 nt, Human
gauuauaggugugagccaccgca

SEQ ID NO: 516679 - RNA, 23 nt, Human
gcaaaaaacaggagcauucagag

SEQ ID NO: 516680 - RNA, 22 nt, Human
gcaacuuccgccucccagguuc

SEQ ID NO: 516681 - RNA, 25 nt, Human
gcaaucucaaacccagggauuagaa

SEQ ID NO: 516682 - RNA, 21 nt, Human
gcaguggcacaaucuuggcuc

SEQ ID NO: 516683 - RNA, 23 nt, Human
gcccagcuaauuuuuuguauuuu

SEQ ID NO: 516684 - RNA, 20 nt, Human
gcccaggccggaggcagugg

SEQ ID NO: 516685 - RNA, 22 nt, Human
gcccuggccucccaaagugcug

SEQ ID NO: 516686 - RNA, 22 nt, Human
gccuuggccucccaaagugcug

SEQ ID NO: 516687 - RNA, 22 nt, Human
gcucaaaggugggacuacaggc

SEQ ID NO: 516688 - RNA, 22 nt, Human
ggaaagguguacucuguggcuc

SEQ ID NO: 516689 - RNA, 21 nt, Human
ggaagaaaagaguauucuccu

SEQ ID NO: 516690 - RNA, 19 nt, Human
ggacuacaggcaugugcca

SEQ ID NO: 516691 - RNA, 22 nt, Human
ggaggcaguggcacaaucuugg

SEQ ID NO: 516692 - RNA, 23 nt, Human
ggagggugcguacauuugaugag

SEQ ID NO: 516693 - RNA, 19 nt, Human
ggauuacaggcaugaguca

SEQ ID NO: 516694 - RNA, 22 nt, Human
ggauuacaggcaugagucacca

SEQ ID NO: 516695 - RNA, 24 nt, Human
ggauuauaagugugagccaccaug

SEQ ID NO: 516696 - RNA, 23 nt, Human
ggcaaucugccugucucggccuc

SEQ ID NO: 516697 - RNA, 21 nt, Human
gggaaggaaagguguacucug

SEQ ID NO: 516698 - RNA, 22 nt, Human
gggaaggaaagguguacucugu

SEQ ID NO: 516699 - RNA, 23 nt, Human
gggguuucaccauguugcccagg

SEQ ID NO: 516700 - RNA, 22 nt, Human
gguaaaacagauaaaacagaua

SEQ ID NO: 516701 - RNA, 20 nt, Human
gguaauugaaucacgaaggc

SEQ ID NO: 516702 - RNA, 20 nt, Human
guaagacaugauuuugcucc

SEQ ID NO: 516703 - RNA, 19 nt, Human
guagagaaggaccaacgaa

SEQ ID NO: 516704 - RNA, 23 nt, Human
guagagacgggguuucaccaugu

SEQ ID NO: 516705 - RNA, 23 nt, Human
uaaaaaauagaagacaaaagaaa

SEQ ID NO: 516706 - RNA, 22 nt, Human
uaaaagggagcuccccugcaca

SEQ ID NO: 516707 - RNA, 22 nt, Human
uaacauacacaaaggauuaaga

SEQ ID NO: 516708 - RNA, 23 nt, Human
uaacauacacaaaggauuaagaa

SEQ ID NO: 516709 - RNA, 21 nt, Human
uaaccaagaguguggaagcca

SEQ ID NO: 516710 - RNA, 22 nt, Human
uaauuagccaaaaccaccagac

SEQ ID NO: 516711 - RNA, 23 nt, Human
uaauuuuuuguauuuuaguagag

SEQ ID NO: 516712 - RNA, 24 nt, Human
uaauuuuuuguauuuuaguagaga

SEQ ID NO: 516713 - RNA, 21 nt, Human
uacacuguaaccaagagugug

SEQ ID NO: 516714 - RNA, 19 nt, Human
uacagccacuuuguccucc

SEQ ID NO: 516715 - RNA, 24 nt, Human
uacaggcaugagucaccacaucca

SEQ ID NO: 516716 - RNA, 24 nt, Human
uacaggcaugugccaccacgccca

SEQ ID NO: 516717 - RNA, 24 nt, Human
uacuaggauuacaggcaugaguca

SEQ ID NO: 516718 - RNA, 18 nt, Human
uagaagacaaaagaaaga

SEQ ID NO: 516719 - RNA, 24 nt, Human
uagaagacaaaagaaagaaaacca

SEQ ID NO: 516720 - RNA, 25 nt, Human
uagaagacaaaagaaagaaaaccaa

SEQ ID NO: 516721 - RNA, 22 nt, Human
uagagacaggguuccaccaugu

SEQ ID NO: 516722 - RNA, 22 nt, Human
uagagacgggguuucaccaugu

SEQ ID NO: 516723 - RNA, 23 nt, Human
uagcagcaugagaacagacuaac

SEQ ID NO: 516724 - RNA, 18 nt, Human
uagcaugucucuuuuccc

SEQ ID NO: 516725 - RNA, 18 nt, Human
uaggauuacaggcaugag

SEQ ID NO: 516726 - RNA, 22 nt, Human
uaggauuacaggcaugagucac

SEQ ID NO: 516727 - RNA, 24 nt, Human
uaggauuacaggcaugagucacca

SEQ ID NO: 516728 - RNA, 24 nt, Human
uaguagagacgggguuucaccaug

SEQ ID NO: 516729 - RNA, 26 nt, Human
uaguagagacgggguuucaccauguu

SEQ ID NO: 516730 - RNA, 21 nt, Human
uauaaacacucaacagaaggg

SEQ ID NO: 516731 - RNA, 23 nt, Human
uauaggugugagccaccgcaucu

SEQ ID NO: 516732 - RNA, 26 nt, Human
uaugagacacugagaggugugaccau

SEQ ID NO: 516733 - RNA, 23 nt, Human
ucacaagcaccuaaaagauacaa

SEQ ID NO: 516734 - RNA, 19 nt, Human
ucacugcaacuuccgccuc

SEQ ID NO: 516735 - RNA, 23 nt, Human
ucacugcaacuuccgccucccag

SEQ ID NO: 516736 - RNA, 24 nt, Human
ucacugcaacuuccgccucccagg

SEQ ID NO: 516737 - RNA, 19 nt, Human
ucacuugaugaugccaaau

SEQ ID NO: 516738 - RNA, 18 nt, Human
uccaaagcucuuaccagc

SEQ ID NO: 516739 - RNA, 27 nt, Human
uccagaaagagaacagagaaaacagau

SEQ ID NO: 516740 - RNA, 24 nt, Human
ucccaaaguacuaggauuacaggc

SEQ ID NO: 516741 - RNA, 23 nt, Human
ucccaaagugcugggauuauaag

SEQ ID NO: 516742 - RNA, 23 nt, Human
ucccaaagugcugggauuauagg

SEQ ID NO: 516743 - RNA, 21 nt, Human
ucccagguucaagcaauucuc

SEQ ID NO: 516744 - RNA, 24 nt, Human
ucccagguucaagcaauucuccug

SEQ ID NO: 516745 - RNA, 22 nt, Human
uccccuuuuugggcuaccucug

SEQ ID NO: 516746 - RNA, 21 nt, Human
uccuagaaguaaaagauaaau

SEQ ID NO: 516747 - RNA, 19 nt, Human
ucucacucucgcccaggcc

SEQ ID NO: 516748 - RNA, 22 nt, Human
ucucacucucgcccaggccgga

SEQ ID NO: 516749 - RNA, 24 nt, Human
ucugagacacccccagccaugugg

SEQ ID NO: 516750 - RNA, 19 nt, Human
ucuuauacuagacggucuc

SEQ ID NO: 516751 - RNA, 21 nt, Human
ucuugaacucuugagcccaag

SEQ ID NO: 516752 - RNA, 18 nt, Human
ucuugcuguguugcccag

SEQ ID NO: 516753 - RNA, 19 nt, Human
ucuugcuguguugcccaga

SEQ ID NO: 516754 - RNA, 24 nt, Human
ucuugcuguguugcccagacuggu

SEQ ID NO: 516755 - RNA, 20 nt, Human
ucuuuccagugauucaggag

SEQ ID NO: 516756 - RNA, 23 nt, Human
ugaaagcccugcgagaaaaaaac

SEQ ID NO: 516757 - RNA, 26 nt, Human
ugaaagcccugcgagaaaaaaaccaa

SEQ ID NO: 516758 - RNA, 22 nt, Human
ugaagaaagccugaacuagaaa

SEQ ID NO: 516759 - RNA, 24 nt, Human
ugaagaaagccugaacuagaaaag

SEQ ID NO: 516760 - RNA, 18 nt, Human
ugauacagccacuuuguc

SEQ ID NO: 516761 - RNA, 24 nt, Human
ugauucugagacacccccagccau

SEQ ID NO: 516762 - RNA, 23 nt, Human
ugcaacuuccgccucccagguuc

SEQ ID NO: 516763 - RNA, 24 nt, Human
ugcccagacuggucuugaacucuu

SEQ ID NO: 516764 - RNA, 28 nt, Human
ugcccaggcuggucucaaaccccugagc

SEQ ID NO: 516765 - RNA, 19 nt, Human
ugccugccgccauguaaga

SEQ ID NO: 516766 - RNA, 24 nt, Human
ugcgagaaaaaaaccaaaaaggag

SEQ ID NO: 516767 - RNA, 24 nt, Human
ugcugggauuauaagugugagcca

SEQ ID NO: 516768 - RNA, 24 nt, Human
ugcuguguugcccagacuggucuu

SEQ ID NO: 516769 - RNA, 19 nt, Human
uggaaaaaaugggaagaaa

SEQ ID NO: 516770 - RNA, 22 nt, Human
uggaaaaugugcuucaccaaaa

SEQ ID NO: 516771 - RNA, 24 nt, Human
uggcacaaucuuggcucacugcaa

SEQ ID NO: 516772 - RNA, 18 nt, Human
ugggacuacaggcaugug

SEQ ID NO: 516773 - RNA, 21 nt, Human
ugggacuacaggcaugugcca

SEQ ID NO: 516774 - RNA, 22 nt, Human
ugggacuacaggcaugugccac

SEQ ID NO: 516775 - RNA, 24 nt, Human
ugggacuacaggcaugugccacca

SEQ ID NO: 516776 - RNA, 18 nt, Human
ugggauuauaagugugag

SEQ ID NO: 516777 - RNA, 22 nt, Human
ugggauuauaagugugagccac

SEQ ID NO: 516778 - RNA, 23 nt, Human
ugggauuauaagugugagccacc

SEQ ID NO: 516779 - RNA, 24 nt, Human
ugggauuauaagugugagccacca

SEQ ID NO: 516780 - RNA, 25 nt, Human
ugggauuauaagugugagccaccau

SEQ ID NO: 516781 - RNA, 18 nt, Human
ugggauuauaggugugag

SEQ ID NO: 516782 - RNA, 19 nt, Human
ugggauuauaggugugagc

SEQ ID NO: 516783 - RNA, 21 nt, Human
ugggauuauaggugugagcca

SEQ ID NO: 516784 - RNA, 22 nt, Human
ugggauuauaggugugagccac

SEQ ID NO: 516785 - RNA, 23 nt, Human
ugggauuauaggugugagccacc

SEQ ID NO: 516786 - RNA, 24 nt, Human
ugggauuauaggugugagccaccg

SEQ ID NO: 516787 - RNA, 19 nt, Human
uggggaaaaauaaagaccu

SEQ ID NO: 516788 - RNA, 25 nt, Human
ugugagccaccaugccuggccuugu

SEQ ID NO: 516789 - RNA, 19 nt, Human
uguguucacuuuuguaucc

SEQ ID NO: 516790 - RNA, 24 nt, Human
uguguugcccagacuggucuugaa

SEQ ID NO: 516791 - RNA, 22 nt, Human
uguugcccagacuggucuugaa

SEQ ID NO: 516792 - RNA, 24 nt, Human
uuagccaaaaccaccagacaacua

SEQ ID NO: 516793 - RNA, 18 nt, Human
uuaguagagacgggguuu

SEQ ID NO: 516794 - RNA, 22 nt, Human
uuaguagagacgggguuucacc

SEQ ID NO: 516795 - RNA, 24 nt, Human
uuaguagagacgggguuucaccau

SEQ ID NO: 516796 - RNA, 21 nt, Human
uucaagcaauucuccugccuc

SEQ ID NO: 516797 - RNA, 26 nt, Human
uucaagcaauucuccugccucagccg

SEQ ID NO: 516798 - RNA, 22 nt, Human
uucacaagcaccuaaaagauac

SEQ ID NO: 516799 - RNA, 20 nt, Human
uuccccuucucaggaaauua

SEQ ID NO: 516800 - RNA, 23 nt, Human
uucugagacacccccagccaugu

SEQ ID NO: 516801 - RNA, 18 nt, Human
uugagaaauucgagaaaa

SEQ ID NO: 516802 - RNA, 21 nt, Human
uugagaaauucgagaaaaucu

SEQ ID NO: 516803 - RNA, 18 nt, Human
uuggccucccaaagugcu

SEQ ID NO: 516804 - RNA, 22 nt, Human
uuucaccauguugcccaggcug

SEQ ID NO: 516805 - RNA, 23 nt, Human
uuucaccauguugcccaggcugg

SEQ ID NO: 516806 - RNA, 24 nt, Human
uuucaccauguugcccaggcuggu

SEQ ID NO: 516807 - RNA, 24 nt, Human
uuuuagagacaggguuccaccaug

SEQ ID NO: 516808 - RNA, 20 nt, Human
uuuuguauuuuaguagagac

SEQ ID NO: 516809 - RNA, 20 nt, Human
uuuuuguauuuuaguagaga

SEQ ID NO: 516810 - RNA, 27 nt, Human
uuuuuuuuuuuuuuuuuuuuuuugggg

SEQ ID NO: 516811 - RNA, 19 nt, Human
aaguagcugggacuacagg

SEQ ID NO: 516812 - RNA, 20 nt, Human
aaguagcugggacuacaggc

SEQ ID NO: 516813 - RNA, 25 nt, Human
aaguagcugggacuacaggcgcccg

SEQ ID NO: 516814 - RNA, 18 nt, Human
acugcaagcuccgccucc

SEQ ID NO: 516815 - RNA, 21 nt, Human
auucuccugccucagccuccc

SEQ ID NO: 516816 - RNA, 22 nt, Human
cacaccauucuccugccucagc

SEQ ID NO: 516817 - RNA, 24 nt, Human
caccaaagucaucuuaugcacuga

SEQ ID NO: 516818 - RNA, 27 nt, Human
cacugaguccuuuuccuugagagguuu

SEQ ID NO: 516819 - RNA, 21 nt, Human
caggcgcccgccacuacgccc

SEQ ID NO: 516820 - RNA, 23 nt, Human
cccaaguagcugggacuacaggc

SEQ ID NO: 516821 - RNA, 23 nt, Human
cccaaguagcugggacuacaggc

SEQ ID NO: 516822 - RNA, 24 nt, Human
ccugccucagccucccaaguagcu

SEQ ID NO: 516823 - RNA, 19 nt, Human
cgccucccggguucacacc

SEQ ID NO: 516824 - RNA, 23 nt, Human
cgugcaguggcgggaucucggcu

SEQ ID NO: 516825 - RNA, 24 nt, Human
cucagccucccaaguagcugggac

SEQ ID NO: 516826 - RNA, 21 nt, Human
cucccggguucacaccauucu

SEQ ID NO: 516827 - RNA, 20 nt, Human
cucugucgcccaggcuggcg

SEQ ID NO: 516828 - RNA, 25 nt, Human
cucuuucuucuucccucauccucau

SEQ ID NO: 516829 - RNA, 23 nt, Human
cuggcgugcaguggcgggaucuc

SEQ ID NO: 516830 - RNA, 19 nt, Human
cuuucuucuucccucaucc

SEQ ID NO: 516831 - RNA, 23 nt, Human
gcccggcuaauuuuuuguauuuu

SEQ ID NO: 516832 - RNA, 20 nt, Human
gccucagccucccaaguagc

SEQ ID NO: 516833 - RNA, 25 nt, Human
gccucccggguucacaccauucucc

SEQ ID NO: 516834 - RNA, 25 nt, Human
gcucugucgcccaggcuggcgugca

SEQ ID NO: 516835 - RNA, 23 nt, Human
gugcaguggcgggaucucggcuc

SEQ ID NO: 516836 - RNA, 24 nt, Human
uaauuuuuuguauuuuuaguagag

SEQ ID NO: 516837 - RNA, 25 nt, Human
uaauuuuuuguauuuuuaguagaga

SEQ ID NO: 516838 - RNA, 26 nt, Human
uacucuuucuucuucccucauccuca

SEQ ID NO: 516839 - RNA, 22 nt, Human
uaguagagacgggguuucacca

SEQ ID NO: 516840 - RNA, 23 nt, Human
uaguagagacgggguuucaccaa

SEQ ID NO: 516841 - RNA, 26 nt, Human
uaguagagacgggguuucaccaaagu

SEQ ID NO: 516842 - RNA, 21 nt, Human
ucacaccauucuccugccuca

SEQ ID NO: 516843 - RNA, 18 nt, Human
ucacugcaagcuccgccu

SEQ ID NO: 516844 - RNA, 19 nt, Human
ucacugcaagcuccgccuc

SEQ ID NO: 516845 - RNA, 24 nt, Human
ucacugcaagcuccgccucccggg

SEQ ID NO: 516846 - RNA, 18 nt, Human
ucagccucccaaguagcu

SEQ ID NO: 516847 - RNA, 20 nt, Human
ucagccucccaaguagcugg

SEQ ID NO: 516848 - RNA, 24 nt, Human
ucccaaguagcugggacuacaggc

SEQ ID NO: 516849 - RNA, 21 nt, Human
ucccggguucacaccauucuc

SEQ ID NO: 516850 - RNA, 24 nt, Human
ucccggguucacaccauucuccug

SEQ ID NO: 516851 - RNA, 18 nt, Human
ucgcccaggcuggcgugc

SEQ ID NO: 516852 - RNA, 26 nt, Human
ucuccugccucagccucccaaguagc

SEQ ID NO: 516853 - RNA, 18 nt, Human
ucucgcucugucgcccag

SEQ ID NO: 516854 - RNA, 18 nt, Human
ucucgcucugucgcccag

SEQ ID NO: 516855 - RNA, 19 nt, Human
ucucgcucugucgcccagg

SEQ ID NO: 516856 - RNA, 23 nt, Human
ucucgcucugucgcccaggcugg

SEQ ID NO: 516857 - RNA, 24 nt, Human
ucucgcucugucgcccaggcuggc

SEQ ID NO: 516858 - RNA, 26 nt, Human
ucucgcucugucgcccaggcuggcgu

SEQ ID NO: 516859 - RNA, 27 nt, Human
ucucgcucugucgcccaggcuggcgug

SEQ ID NO: 516860 - RNA, 24 nt, Human
ucugucgcccaggcuggcgugcag

SEQ ID NO: 516861 - RNA, 22 nt, Human
ugagacggagucucgcucuguc

SEQ ID NO: 516862 - RNA, 24 nt, Human
ugccucagccucccaaguagcugg

SEQ ID NO: 516863 - RNA, 24 nt, Human
uggcgugcaguggcgggaucucgg

SEQ ID NO: 516864 - RNA, 21 nt, Human
ugggacuacaggcgcccgcca

SEQ ID NO: 516865 - RNA, 22 nt, Human
ugggacuacaggcgcccgccac

SEQ ID NO: 516866 - RNA, 22 nt, Human
ugggacuacaggcgcccgccac

SEQ ID NO: 516867 - RNA, 24 nt, Human
ugggacuacaggcgcccgccacua

SEQ ID NO: 516868 - RNA, 21 nt, Human
uguauuuuuaguagagacggg

SEQ ID NO: 516869 - RNA, 21 nt, Human
uuacucuuucuucuucccuca

SEQ ID NO: 516870 - RNA, 18 nt, Human
uuaguagagacgggguuu

SEQ ID NO: 516871 - RNA, 22 nt, Human
uuaguagagacgggguuucacc

SEQ ID NO: 516872 - RNA, 23 nt, Human
uuaguagagacgggguuucacca

SEQ ID NO: 516873 - RNA, 23 nt, Human
uuguauuuuuaguagagacgggg

SEQ ID NO: 516874 - RNA, 21 nt, Human
uuuuguauuuuuaguagagac

SEQ ID NO: 516875 - RNA, 24 nt, Human
uuuuuaguagagacgggguuucac

SEQ ID NO: 516876 - RNA, 21 nt, Human
uuuuuguauuuuuaguagaga

SEQ ID NO: 516877 - RNA, 25 nt, Human
uuuuuuuuuuuugagacggagucuc

SEQ ID NO: 516878 - RNA, 22 nt, Human
uuuuuuuuuuuuuugagacgga

SEQ ID NO: 516879 - RNA, 18 nt, Human
uuuuuuuuuuuuuuuuug

SEQ ID NO: 516880 - RNA, 23 nt, Human
aagaacauuucugagaacagcua

SEQ ID NO: 516881 - RNA, 26 nt, Human
aaggacaccaaggguggcuggagacc

SEQ ID NO: 516882 - RNA, 19 nt, Human
aaggugucugggagcugac

SEQ ID NO: 516883 - RNA, 21 nt, Human
agggcuggggccacagggcgg

SEQ ID NO: 516884 - RNA, 20 nt, Human
auagucaacaaccguggagc

SEQ ID NO: 516885 - RNA, 23 nt, Human
caaaagcugacaaugugaucuug

SEQ ID NO: 516886 - RNA, 24 nt, Human
caccaaggguggcaguauauaguc

SEQ ID NO: 516887 - RNA, 21 nt, Human
cacuugggccaccagguucug

SEQ ID NO: 516888 - RNA, 19 nt, Human
cagagcauaugcugguacu

SEQ ID NO: 516889 - RNA, 23 nt, Human
cagcuaacaaaccugggcuuccc

SEQ ID NO: 516890 - RNA, 20 nt, Human
caggcagugcuaaccuuagc

SEQ ID NO: 516891 - RNA, 23 nt, Human
caggcagugcuaaccuuagccca

SEQ ID NO: 516892 - RNA, 18 nt, Human
cauccgagggcuggggcc

SEQ ID NO: 516893 - RNA, 18 nt, Human
cccacacagagagggaaa

SEQ ID NO: 516894 - RNA, 28 nt, Human
gagcaaccgcaagcuaaagagucuccac

SEQ ID NO: 516895 - RNA, 22 nt, Human
gcuucccagaugcauuccacag

SEQ ID NO: 516896 - RNA, 22 nt, Human
ggaaagaacauuucugagaaca

SEQ ID NO: 516897 - RNA, 19 nt, Human
ggcuggggccacagggcgg

SEQ ID NO: 516898 - RNA, 21 nt, Human
uaaccuuagcccaccuggccc

SEQ ID NO: 516899 - RNA, 21 nt, Human
uccugguucacgaguagagau

SEQ ID NO: 516900 - RNA, 20 nt, Human
ucugggagcugaccuugcuu

SEQ ID NO: 516901 - RNA, 19 nt, Human
ugaggggauguggcaaagg

SEQ ID NO: 516902 - RNA, 21 nt, Human
uggcuuugaaccaaggacacc

SEQ ID NO: 516903 - RNA, 20 nt, Human
uucaaaagcugacaauguga

SEQ ID NO: 516904 - RNA, 23 nt, Human
aaaaaaaaaauucuaaaaaugaa

SEQ ID NO: 516905 - RNA, 20 nt, Human
aaacaagaaagagcaugcag

SEQ ID NO: 516906 - RNA, 22 nt, Human
aaacaagaaagagcaugcagag

SEQ ID NO: 516907 - RNA, 21 nt, Human
aaagcucugucccuccuaccc

SEQ ID NO: 516908 - RNA, 23 nt, Human
aaagcucugucccuccuaccccc

SEQ ID NO: 516909 - RNA, 20 nt, Human
aaauucaccugcaccaaacc

SEQ ID NO: 516910 - RNA, 22 nt, Human
aacaaaacaaaaaaaaaauucu

SEQ ID NO: 516911 - RNA, 27 nt, Human
aacaaaacaaaaaaaaaauucuaaaaa

SEQ ID NO: 516912 - RNA, 18 nt, Human
aacauacauacuauacau

SEQ ID NO: 516913 - RNA, 23 nt, Human
aaccaauaaggcaccaagaaaaa

SEQ ID NO: 516914 - RNA, 22 nt, Human
aacugcuguuucuacugacucc

SEQ ID NO: 516915 - RNA, 22 nt, Human
aagcagaaacaaaaacucauca

SEQ ID NO: 516916 - RNA, 23 nt, Human
aagcagaaacaaaaacucaucaa

SEQ ID NO: 516917 - RNA, 24 nt, Human
aagcagaaacaaaaacucaucaag

SEQ ID NO: 516918 - RNA, 27 nt, Human
aagcagaaacaaaaacucaucaagcug

SEQ ID NO: 516919 - RNA, 21 nt, Human
acacuauccuggcugaaauaa

SEQ ID NO: 516920 - RNA, 18 nt, Human
agaaagcaguuauucaaa

SEQ ID NO: 516921 - RNA, 20 nt, Human
agaaagcaguuauucaaagc

SEQ ID NO: 516922 - RNA, 22 nt, Human
agccggugucaggauuagcgca

SEQ ID NO: 516923 - RNA, 22 nt, Human
aguuggucuggaauuagacccc

SEQ ID NO: 516924 - RNA, 25 nt, Human
auacaacccacaaaacauacauacu

SEQ ID NO: 516925 - RNA, 20 nt, Human
aucuuugucucucuuagggg

SEQ ID NO: 516926 - RNA, 21 nt, Human
augaagucauacugucuuaaa

SEQ ID NO: 516927 - RNA, 19 nt, Human
auggauggaaacagggggu

SEQ ID NO: 516928 - RNA, 24 nt, Human
caauucuuagccacugucccucac

SEQ ID NO: 516929 - RNA, 21 nt, Human
cacagacagacacuauccugg

SEQ ID NO: 516930 - RNA, 21 nt, Human
cacuauccuggcugaaauaaa

SEQ ID NO: 516931 - RNA, 24 nt, Human
cagcagaggugagaacagagacaa

SEQ ID NO: 516932 - RNA, 18 nt, Human
cagcccaggaggcaacag

SEQ ID NO: 516933 - RNA, 22 nt, Human
cagcuccagcccaggaggcaac

SEQ ID NO: 516934 - RNA, 20 nt, Human
caucaggcugcuagcuuuug

SEQ ID NO: 516935 - RNA, 18 nt, Human
ccagacagauuuguuucc

SEQ ID NO: 516936 - RNA, 21 nt, Human
ccagacagauuuguuucccag

SEQ ID NO: 516937 - RNA, 20 nt, Human
ccaggaacgaagcagaaaca

SEQ ID NO: 516938 - RNA, 20 nt, Human
cccacaauuacacacaacac

SEQ ID NO: 516939 - RNA, 19 nt, Human
ccccaaagauccugacuaa

SEQ ID NO: 516940 - RNA, 21 nt, Human
ccccccacuugggcuuagcgu

SEQ ID NO: 516941 - RNA, 24 nt, Human
ccugcaccaaacccguaucaaaag

SEQ ID NO: 516942 - RNA, 26 nt, Human
cuaaaacaaaacaaaaaaaaaauucu

SEQ ID NO: 516943 - RNA, 25 nt, Human
cucaaaugauuauuuuaccuuccca

SEQ ID NO: 516944 - RNA, 20 nt, Human
cucugucccuccuacccccc

SEQ ID NO: 516945 - RNA, 18 nt, Human
cuggagagugcaggucac

SEQ ID NO: 516946 - RNA, 21 nt, Human
cuuauauucugccuacucuuc

SEQ ID NO: 516947 - RNA, 19 nt, Human
cuugacucagguuagcuac

SEQ ID NO: 516948 - RNA, 20 nt, Human
cuuucagaaccacccuccgc

SEQ ID NO: 516949 - RNA, 19 nt, Human
gaaacaagaaagagcaugc

SEQ ID NO: 516950 - RNA, 23 nt, Human
gaacuguaaucauguaucaucug

SEQ ID NO: 516951 - RNA, 19 nt, Human
gaagcagaaacaaaaacuc

SEQ ID NO: 516952 - RNA, 23 nt, Human
gagcaggcaauucuuagccacug

SEQ ID NO: 516953 - RNA, 26 nt, Human
gaggugagaacagagacaaagaagug

SEQ ID NO: 516954 - RNA, 21 nt, Human
gcaguucuuucagaaccaccc

SEQ ID NO: 516955 - RNA, 19 nt, Human
ggaaacaagaaagagcaug

SEQ ID NO: 516956 - RNA, 21 nt, Human
gggacagcagaggugagaaca

SEQ ID NO: 516957 - RNA, 21 nt, Human
ggggaugagggaagagaggga

SEQ ID NO: 516958 - RNA, 19 nt, Human
gugauccaugagguuuucu

SEQ ID NO: 516959 - RNA, 19 nt, Human
uaaaaaucucaaaugauua

SEQ ID NO: 516960 - RNA, 22 nt, Human
uaaggcaccaagaaaaagggag

SEQ ID NO: 516961 - RNA, 22 nt, Human
uacaaaauuuuucugaaguaag

SEQ ID NO: 516962 - RNA, 21 nt, Human
uacaacugcuguuucuacuga

SEQ ID NO: 516963 - RNA, 24 nt, Human
uacacacaacacacacaugggccu

SEQ ID NO: 516964 - RNA, 22 nt, Human
uacauacuauacauaguuugua

SEQ ID NO: 516965 - RNA, 20 nt, Human
uacgugugaugugcucuguc

SEQ ID NO: 516966 - RNA, 21 nt, Human
uauauauuauguauauauaca

SEQ ID NO: 516967 - RNA, 23 nt, Human
uauggauggaaacaggggguggc

SEQ ID NO: 516968 - RNA, 20 nt, Human
ucauacugucuuaaaaugau

SEQ ID NO: 516969 - RNA, 22 nt, Human
ucccacaaauauaauacauaca

SEQ ID NO: 516970 - RNA, 19 nt, Human
ucccaggaucacuugauug

SEQ ID NO: 516971 - RNA, 22 nt, Human
ucgcuggcucuaguguaacuuc

SEQ ID NO: 516972 - RNA, 21 nt, Human
ugacuacagcaugggauaggc

SEQ ID NO: 516973 - RNA, 25 nt, Human
ugagggaagagagggacagcagagg

SEQ ID NO: 516974 - RNA, 24 nt, Human
ugcaccaaacccguaucaaaaguc

SEQ ID NO: 516975 - RNA, 24 nt, Human
ugcccacaauuacacacaacacac

SEQ ID NO: 516976 - RNA, 25 nt, Human
ugcccuggacuucaacuacugacuc

SEQ ID NO: 516977 - RNA, 25 nt, Human
ugcucuguccuguuggccacauuua

SEQ ID NO: 516978 - RNA, 21 nt, Human
uggaaacaagaaagagcaugc

SEQ ID NO: 516979 - RNA, 21 nt, Human
uguaaucauguaucaucugcc

SEQ ID NO: 516980 - RNA, 25 nt, Human
uguagagcacaaaagugaaagaagc

SEQ ID NO: 516981 - RNA, 18 nt, Human
ugucccucacaccugccu

SEQ ID NO: 516982 - RNA, 25 nt, Human
uguugcuaaaacaaaacaaaaaaaa

SEQ ID NO: 516983 - RNA, 27 nt, Human
uguugcuaaaacaaaacaaaaaaaaaa

SEQ ID NO: 516984 - RNA, 20 nt, Human
uuacacacaacacacacaug

SEQ ID NO: 516985 - RNA, 20 nt, Human
uuagaccccaaagauccuga

SEQ ID NO: 516986 - RNA, 22 nt, Human
uucagcauguugcuaaaacaaa

SEQ ID NO: 516987 - RNA, 18 nt, Human
uugccccccacuugggcu

SEQ ID NO: 516988 - RNA, 21 nt, Human
uuggccacauuuaguguuaga

SEQ ID NO: 516989 - RNA, 22 nt, Human
uuggccacauuuaguguuagaa

SEQ ID NO: 516990 - RNA, 19 nt, Human
aaaguauguauuuccagaa

SEQ ID NO: 516991 - RNA, 23 nt, Human
cucgugacaacggaagggguggg

SEQ ID NO: 516992 - RNA, 21 nt, Human
gacgguuggucauucagaaag

SEQ ID NO: 516993 - RNA, 23 nt, Human
gcaggccggaacauuccacaguc

SEQ ID NO: 516994 - RNA, 22 nt, Human
gugacaacggaaggggugggca

SEQ ID NO: 516995 - RNA, 19 nt, Human
uccacaguccagggacggu

SEQ ID NO: 516996 - RNA, 20 nt, Human
ugggcagaaaugcaggccgg

SEQ ID NO: 516997 - RNA, 24 nt, Human
aaaaauaccccaaaugggauaaag

SEQ ID NO: 516998 - RNA, 18 nt, Human
aaaagacagauaaaaacc

SEQ ID NO: 516999 - RNA, 20 nt, Human
aaaauaccccaaaugggaua

SEQ ID NO: 517000 - RNA, 18 nt, Human
aaacaauguggcugaaga

SEQ ID NO: 517001 - RNA, 18 nt, Human
aaaccuuaaaaacugaua

SEQ ID NO: 517002 - RNA, 19 nt, Human
aaagugcugggauuacagg

SEQ ID NO: 517003 - RNA, 24 nt, Human
aaagugcugggauuacaggcuuga

SEQ ID NO: 517004 - RNA, 23 nt, Human
aaauaugaaaccucaccacgacc

SEQ ID NO: 517005 - RNA, 18 nt, Human
aacaugaauuuaaaaugg

SEQ ID NO: 517006 - RNA, 19 nt, Human
aacucuacgaacguaaaaa

SEQ ID NO: 517007 - RNA, 18 nt, Human
aacuguaacaugacggca

SEQ ID NO: 517008 - RNA, 19 nt, Human
aacuuccgcccgcgcccuc

SEQ ID NO: 517009 - RNA, 20 nt, Human
aagaaaaaucugcaaucuug

SEQ ID NO: 517010 - RNA, 19 nt, Human
aagcagccgguauuucauc

SEQ ID NO: 517011 - RNA, 19 nt, Human
aagugcugggauuacaggc

SEQ ID NO: 517012 - RNA, 19 nt, Human
aagugcugggauuacaggc

SEQ ID NO: 517013 - RNA, 26 nt, Human
aagugcugggauuacaggcuugagcc

SEQ ID NO: 517014 - RNA, 23 nt, Human
aauccuuucaacuuuuuuuuuuu

SEQ ID NO: 517015 - RNA, 24 nt, Human
aaucgcuugaacccgggaggcgga

SEQ ID NO: 517016 - RNA, 23 nt, Human
aaucuuguaacucaagucuaaca

SEQ ID NO: 517017 - RNA, 25 nt, Human
acagacuaacaaacugaaccaaaac

SEQ ID NO: 517018 - RNA, 21 nt, Human
acaggacacuuccuacaacac

SEQ ID NO: 517019 - RNA, 30 nt, Human
acccgggugggaggcaggagugggucuggg

SEQ ID NO: 517020 - RNA, 27 nt, Human
acccugucgcccaggcuggagugcaau

SEQ ID NO: 517021 - RNA, 18 nt, Human
acgggguuucaccauauu

SEQ ID NO: 517022 - RNA, 20 nt, Human
acgggguuucaccauauugg

SEQ ID NO: 517023 - RNA, 24 nt, Human
acgggguuucaccauauuggccag

SEQ ID NO: 517024 - RNA, 24 nt, Human
acugcacuccagccugggcaacag

SEQ ID NO: 517025 - RNA, 21 nt, Human
acuuaguggcaagaugcauaa

SEQ ID NO: 517026 - RNA, 21 nt, Human
acuuggaauucuggcccuccu

SEQ ID NO: 517027 - RNA, 22 nt, Human
agaaugcaguauaacgagcugu

SEQ ID NO: 517028 - RNA, 19 nt, Human
agacacgauccugaaguuc

SEQ ID NO: 517029 - RNA, 25 nt, Human
agacggccucccugaggggaagagg

SEQ ID NO: 517030 - RNA, 22 nt, Human
agacuaacaaacugaaccaaaa

SEQ ID NO: 517031 - RNA, 19 nt, Human
agccacagcgcccggccuc

SEQ ID NO: 517032 - RNA, 24 nt, Human
agccugggcaacagacugagacuc

SEQ ID NO: 517033 - RNA, 23 nt, Human
aggaagacgacauucugaaaaaa

SEQ ID NO: 517034 - RNA, 24 nt, Human
aggcaggagaaucgcuugaacccg

SEQ ID NO: 517035 - RNA, 24 nt, Human
aggcaggagugggucuggucagga

SEQ ID NO: 517036 - RNA, 24 nt, Human
aggcaggagugggucuggucagga

SEQ ID NO: 517037 - RNA, 21 nt, Human
aggcggagguugcagugagcc

SEQ ID NO: 517038 - RNA, 24 nt, Human
aggcggagguugcagugagccgag

SEQ ID NO: 517039 - RNA, 18 nt, Human
aggcguugcaaagcaucu

SEQ ID NO: 517040 - RNA, 20 nt, Human
aggcugaggcaggagaaucg

SEQ ID NO: 517041 - RNA, 24 nt, Human
aggcugaggcaggagaaucgcuug

SEQ ID NO: 517042 - RNA, 24 nt, Human
agggauucuccugccucagccucc

SEQ ID NO: 517043 - RNA, 19 nt, Human
aguagcugggauuacaagc

SEQ ID NO: 517044 - RNA, 23 nt, Human
agugcaauggugugaucuuggcu

SEQ ID NO: 517045 - RNA, 24 nt, Human
agugcaauggugugaucuuggcuc

SEQ ID NO: 517046 - RNA, 20 nt, Human
aucauggucugcaaaauuug

SEQ ID NO: 517047 - RNA, 24 nt, Human
auccucaugauccaccugauccuc

SEQ ID NO: 517048 - RNA, 23 nt, Human
auccucaugauccuccugaccuc

SEQ ID NO: 517049 - RNA, 24 nt, Human
aucgcgccacugcacuccagccug

SEQ ID NO: 517050 - RNA, 21 nt, Human
aucuccccccaaguuuuguca

SEQ ID NO: 517051 - RNA, 24 nt, Human
augauccacccgccucggccuccc

SEQ ID NO: 517052 - RNA, 20 nt, Human
auucugaaaaaauaaaucga

SEQ ID NO: 517053 - RNA, 20 nt, Human
caaaagacagauaaaaacca

SEQ ID NO: 517054 - RNA, 23 nt, Human
caaagugcugggauuacaggcuu

SEQ ID NO: 517055 - RNA, 25 nt, Human
caacagacuaacaaacugaaccaaa

SEQ ID NO: 517056 - RNA, 24 nt, Human
caacagacugagacuccauucccc

SEQ ID NO: 517057 - RNA, 22 nt, Human
caagggauucuccugccucagc

SEQ ID NO: 517058 - RNA, 24 nt, Human
cacaauacuggauggcuggggcaa

SEQ ID NO: 517059 - RNA, 21 nt, Human
caccauauuggccaggcugac

SEQ ID NO: 517060 - RNA, 24 nt, Human
caccauauuggccaggcugaccuc

SEQ ID NO: 517061 - RNA, 23 nt, Human
cacccgccucggccucccaaagu

SEQ ID NO: 517062 - RNA, 24 nt, Human
cacccugucgcccaggcuggagug

SEQ ID NO: 517063 - RNA, 25 nt, Human
cacccugucgcccaggcuggagugc

SEQ ID NO: 517064 - RNA, 25 nt, Human
caccuacaacuguaacaugacggca

SEQ ID NO: 517065 - RNA, 22 nt, Human
cacgauccugaaguucaacaga

SEQ ID NO: 517066 - RNA, 21 nt, Human
cacugcaaccuccgccuccca

SEQ ID NO: 517067 - RNA, 18 nt, Human
cacugcacuccagccugg

SEQ ID NO: 517068 - RNA, 19 nt, Human
cacugcacuccagccuggg

SEQ ID NO: 517069 - RNA, 21 nt, Human
cacugcacuccagccugggca

SEQ ID NO: 517070 - RNA, 23 nt, Human
cacugcacuccagccugggcaac

SEQ ID NO: 517071 - RNA, 24 nt, Human
cacugcacuccagccugggcaaca

SEQ ID NO: 517072 - RNA, 23 nt, Human
cagccuaaaauaacccuaaacac

SEQ ID NO: 517073 - RNA, 20 nt, Human
cagccuccugaguagcuggg

SEQ ID NO: 517074 - RNA, 19 nt, Human
cagcgcccggccucaacuu

SEQ ID NO: 517075 - RNA, 24 nt, Human
cagcuauucgggaggcugaggcag

SEQ ID NO: 517076 - RNA, 25 nt, Human
cauauuggccaggcugaccuccuga

SEQ ID NO: 517077 - RNA, 19 nt, Human
ccaaagugcugggauuaca

SEQ ID NO: 517078 - RNA, 22 nt, Human
ccaaagugcugggauuacaggc

SEQ ID NO: 517079 - RNA, 23 nt, Human
ccaaagugcugggauuacaggcu

SEQ ID NO: 517080 - RNA, 21 nt, Human
ccacaauugaaacagugaggc

SEQ ID NO: 517081 - RNA, 18 nt, Human
ccacagcgcccggccuca

SEQ ID NO: 517082 - RNA, 19 nt, Human
ccacuagcguuugccccgg

SEQ ID NO: 517083 - RNA, 18 nt, Human
ccacugcacuccagccug

SEQ ID NO: 517084 - RNA, 20 nt, Human
ccacugcacuccagccuggg

SEQ ID NO: 517085 - RNA, 21 nt, Human
ccacugcacuccagccugggc

SEQ ID NO: 517086 - RNA, 22 nt, Human
ccacugcacuccagccugggca

SEQ ID NO: 517087 - RNA, 23 nt, Human
ccacugcacuccagccugggcaa

SEQ ID NO: 517088 - RNA, 24 nt, Human
ccacugcacuccagccugggcaac

SEQ ID NO: 517089 - RNA, 24 nt, Human
cccaaagugcugggauuacaggcu

SEQ ID NO: 517090 - RNA, 21 nt, Human
cccaacucugcauucugggac

SEQ ID NO: 517091 - RNA, 21 nt, Human
cccagguucaagggauucucc

SEQ ID NO: 517092 - RNA, 24 nt, Human
cccccaaguuuugucagugagaau

SEQ ID NO: 517093 - RNA, 21 nt, Human
cccgaccccgucccccuaaaa

SEQ ID NO: 517094 - RNA, 18 nt, Human
cccggccccacgccuggc

SEQ ID NO: 517095 - RNA, 24 nt, Human
ccgcgcccucgcccucgcccggcg

SEQ ID NO: 517096 - RNA, 24 nt, Human
ccucccagguucaagggauucucc

SEQ ID NO: 517097 - RNA, 23 nt, Human
ccucgcccggcgcugccccggcc

SEQ ID NO: 517098 - RNA, 20 nt, Human
ccucuguacacaaagaugaa

SEQ ID NO: 517099 - RNA, 20 nt, Human
ccugaccucaugauccaccc

SEQ ID NO: 517100 - RNA, 19 nt, Human
ccugaguagcugggauuac

SEQ ID NO: 517101 - RNA, 23 nt, Human
ccugccucagccuccugaguagc

SEQ ID NO: 517102 - RNA, 21 nt, Human
ccuguaaucccagcuauucgg

SEQ ID NO: 517103 - RNA, 21 nt, Human
ccugucaaaccuuucaacaac

SEQ ID NO: 517104 - RNA, 24 nt, Human
ccugucgcccaggcuggagugcaa

SEQ ID NO: 517105 - RNA, 22 nt, Human
cgaaauaugaaaccucaccacg

SEQ ID NO: 517106 - RNA, 26 nt, Human
cgaacguaaaaaaaaacauacuagca

SEQ ID NO: 517107 - RNA, 24 nt, Human
cgagaucgcgccacugcacuccag

SEQ ID NO: 517108 - RNA, 24 nt, Human
cgccucggccucccaaagugcugg

SEQ ID NO: 517109 - RNA, 23 nt, Human
cgccuguaaucccagcuauucgg

SEQ ID NO: 517110 - RNA, 24 nt, Human
cgccuguaaucccagcuauucggg

SEQ ID NO: 517111 - RNA, 29 nt, Human
cggcuaauuuuguauuuuuaguagagacg

SEQ ID NO: 517112 - RNA, 24 nt, Human
cgggaggcggagguugcagugagc

SEQ ID NO: 517113 - RNA, 24 nt, Human
cgggguuucaccauauuggccagg

SEQ ID NO: 517114 - RNA, 25 nt, Human
cguaaaaaaaaacauacuagcaaau

SEQ ID NO: 517115 - RNA, 24 nt, Human
cguggcgggcgccuguaaucccag

SEQ ID NO: 517116 - RNA, 20 nt, Human
cuaccuauaaaacucuacga

SEQ ID NO: 517117 - RNA, 24 nt, Human
cucacccugucgcccaggcuggag

SEQ ID NO: 517118 - RNA, 24 nt, Human
cucacugcaaccuccgccucccag

SEQ ID NO: 517119 - RNA, 23 nt, Human
cucagccuccugaguagcuggga

SEQ ID NO: 517120 - RNA, 19 nt, Human
cucaugauccuccugaccu

SEQ ID NO: 517121 - RNA, 24 nt, Human
cuccugaccucaugauccacccgc

SEQ ID NO: 517122 - RNA, 22 nt, Human
cuccugccucagccuccugagu

SEQ ID NO: 517123 - RNA, 21 nt, Human
cugaaguucaacagacuaaca

SEQ ID NO: 517124 - RNA, 23 nt, Human
cugcaaccuccgccucccagguu

SEQ ID NO: 517125 - RNA, 24 nt, Human
cugcaaccuccgccucccagguuc

SEQ ID NO: 517126 - RNA, 23 nt, Human
cugccucagccuccugaguagcu

SEQ ID NO: 517127 - RNA, 20 nt, Human
cugggaccacuagcguuugc

SEQ ID NO: 517128 - RNA, 22 nt, Human
cuucagcacagaagcgagcucc

SEQ ID NO: 517129 - RNA, 22 nt, Human
gaccucaugauccacccgccuc

SEQ ID NO: 517130 - RNA, 23 nt, Human
gagaaucgcuugaacccgggagg

SEQ ID NO: 517131 - RNA, 24 nt, Human
gagacgggguuucaccauauuggc

SEQ ID NO: 517132 - RNA, 23 nt, Human
gagguugcagugagccgagaucg

SEQ ID NO: 517133 - RNA, 24 nt, Human
gaguagcugggauuacaagcacgc

SEQ ID NO: 517134 - RNA, 18 nt, Human
gauuacaggcuugagcca

SEQ ID NO: 517135 - RNA, 22 nt, Human
gauuacaggcuugagccacagc

SEQ ID NO: 517136 - RNA, 21 nt, Human
gauucuccugccucagccucc

SEQ ID NO: 517137 - RNA, 23 nt, Human
gcaaagcaucuucagcacagaag

SEQ ID NO: 517138 - RNA, 22 nt, Human
gcaaccuccgccucccagguuc

SEQ ID NO: 517139 - RNA, 22 nt, Human
gccacugcacuccagccugggc

SEQ ID NO: 517140 - RNA, 24 nt, Human
gccacugcacuccagccugggcaa

SEQ ID NO: 517141 - RNA, 20 nt, Human
gcccaggcuggagugcaaug

SEQ ID NO: 517142 - RNA, 24 nt, Human
gcccaggcuggagugcaauggugu

SEQ ID NO: 517143 - RNA, 21 nt, Human
gcccccaacucugcauucugg

SEQ ID NO: 517144 - RNA, 18 nt, Human
gccccgaacccuagacuc

SEQ ID NO: 517145 - RNA, 20 nt, Human
gccgagaucgcgccacugca

SEQ ID NO: 517146 - RNA, 18 nt, Human
gccuuuuugccuuuacuu

SEQ ID NO: 517147 - RNA, 20 nt, Human
gcgggcgccuguaaucccag

SEQ ID NO: 517148 - RNA, 21 nt, Human
gcucaucccugauuuuucuca

SEQ ID NO: 517149 - RNA, 19 nt, Human
gcugcgaaauaugaaaccu

SEQ ID NO: 517150 - RNA, 21 nt, Human
gcugggauuacaggcuugagc

SEQ ID NO: 517151 - RNA, 19 nt, Human
ggaaaacaauguacaaaag

SEQ ID NO: 517152 - RNA, 23 nt, Human
ggaaaaccauucuaucuauccac

SEQ ID NO: 517153 - RNA, 22 nt, Human
ggaagaacucuaaaauuaaucc

SEQ ID NO: 517154 - RNA, 24 nt, Human
ggaauaguuaucauggucugcaaa

SEQ ID NO: 517155 - RNA, 20 nt, Human
ggagguugcagugagccgag

SEQ ID NO: 517156 - RNA, 22 nt, Human
ggagguugcagugagccgagau

SEQ ID NO: 517157 - RNA, 24 nt, Human
ggagguugcagugagccgagaucg

SEQ ID NO: 517158 - RNA, 20 nt, Human
ggcaggagugggucugguca

SEQ ID NO: 517159 - RNA, 23 nt, Human
ggcgccguggcgggcgccuguaa

SEQ ID NO: 517160 - RNA, 22 nt, Human
ggcuggagugcaauggugugau

SEQ ID NO: 517161 - RNA, 23 nt, Human
gggguuucaccauauuggccagg

SEQ ID NO: 517162 - RNA, 18 nt, Human
guagcugggauuacaagc

SEQ ID NO: 517163 - RNA, 19 nt, Human
guugcagugagccgagauc

SEQ ID NO: 517164 - RNA, 21 nt, Human
guugcagugagccgagaucgc

SEQ ID NO: 517165 - RNA, 20 nt, Human
uaaaaggaaaacuacccgaa

SEQ ID NO: 517166 - RNA, 23 nt, Human
uaaauagcucucagugcuaaguc

SEQ ID NO: 517167 - RNA, 19 nt, Human
uaaaucacuuacaaaaaua

SEQ ID NO: 517168 - RNA, 21 nt, Human
uaacaaacugaaccaaaacca

SEQ ID NO: 517169 - RNA, 19 nt, Human
uaauauagguccaucuaac

SEQ ID NO: 517170 - RNA, 23 nt, Human
uacaagcacgcgccaccacaccc

SEQ ID NO: 517171 - RNA, 24 nt, Human
uacgaacguaaaaaaaaacauacu

SEQ ID NO: 517172 - RNA, 24 nt, Human
uacuacuucucucacuuuuggugu

SEQ ID NO: 517173 - RNA, 23 nt, Human
uagcaaaucaagaaaaaucugca

SEQ ID NO: 517174 - RNA, 23 nt, Human
uaguagagacgggguuucaccau

SEQ ID NO: 517175 - RNA, 26 nt, Human
uaguagagacgggguuucaccauauu

SEQ ID NO: 517176 - RNA, 21 nt, Human
uaucuaccuauaaaacucuac

SEQ ID NO: 517177 - RNA, 20 nt, Human
ucaauuuucguuuaaguucu

SEQ ID NO: 517178 - RNA, 21 nt, Human
ucaauuuucguuuaaguucuu

SEQ ID NO: 517179 - RNA, 22 nt, Human
ucaauuuucguuuaaguucuug

SEQ ID NO: 517180 - RNA, 24 nt, Human
ucacccugucgcccaggcuggagu

SEQ ID NO: 517181 - RNA, 19 nt, Human
ucacugcaaccuccgccuc

SEQ ID NO: 517182 - RNA, 24 nt, Human
ucacugcaaccuccgccucccagg

SEQ ID NO: 517183 - RNA, 25 nt, Human
ucacugcaaccuccgccucccaggu

SEQ ID NO: 517184 - RNA, 27 nt, Human
ucacugcaaccuccgccucccagguuc

SEQ ID NO: 517185 - RNA, 20 nt, Human
ucagccuccugaguagcugg

SEQ ID NO: 517186 - RNA, 24 nt, Human
ucccaaagugcugggauuacaggc

SEQ ID NO: 517187 - RNA, 21 nt, Human
ucccagguucaagggauucuc

SEQ ID NO: 517188 - RNA, 24 nt, Human
ucccagguucaagggauucuccug

SEQ ID NO: 517189 - RNA, 18 nt, Human
ucccugaggggaagaggu

SEQ ID NO: 517190 - RNA, 18 nt, Human
uccgcccgcgcccucgcc

SEQ ID NO: 517191 - RNA, 18 nt, Human
uccugaguagcugggauu

SEQ ID NO: 517192 - RNA, 22 nt, Human
uccuggaacuuccgcccgcgcc

SEQ ID NO: 517193 - RNA, 20 nt, Human
uccuugaggcccccaacucu

SEQ ID NO: 517194 - RNA, 18 nt, Human
ucgcccaggcuggagugc

SEQ ID NO: 517195 - RNA, 24 nt, Human
ucgcuugaacccgggaggcggagg

SEQ ID NO: 517196 - RNA, 18 nt, Human
ucggccucccaaagugcu

SEQ ID NO: 517197 - RNA, 24 nt, Human
ucgggaggcugaggcaggagaauc

SEQ ID NO: 517198 - RNA, 24 nt, Human
ucucacccugucgcccaggcugga

SEQ ID NO: 517199 - RNA, 26 nt, Human
ucucacccugucgcccaggcuggagu

SEQ ID NO: 517200 - RNA, 27 nt, Human
ucucacccugucgcccaggcuggagug

SEQ ID NO: 517201 - RNA, 18 nt, Human
ucucagugcuaagucaag

SEQ ID NO: 517202 - RNA, 19 nt, Human
ucugcgccgaggcagccug

SEQ ID NO: 517203 - RNA, 22 nt, Human
ugaaaaaauaaaucgcgcuuca

SEQ ID NO: 517204 - RNA, 20 nt, Human
ugaaaccucaccacgaccuc

SEQ ID NO: 517205 - RNA, 21 nt, Human
ugaccucaugauccacccgcc

SEQ ID NO: 517206 - RNA, 22 nt, Human
ugagacuccauuccccgacccc

SEQ ID NO: 517207 - RNA, 22 nt, Human
ugagccgagaucgcgccacugc

SEQ ID NO: 517208 - RNA, 20 nt, Human
ugaggcaggagaaucgcuug

SEQ ID NO: 517209 - RNA, 24 nt, Human
ugaggcaggagaaucgcuugaacc

SEQ ID NO: 517210 - RNA, 25 nt, Human
ugaggcaggagaaucgcuugaaccc

SEQ ID NO: 517211 - RNA, 23 nt, Human
ugaggcccccaacucugcauucu

SEQ ID NO: 517212 - RNA, 23 nt, Human
ugcaauggugugaucuuggcucc

SEQ ID NO: 517213 - RNA, 24 nt, Human
ugccucagccuccugaguagcugg

SEQ ID NO: 517214 - RNA, 24 nt, Human
uggaaauuguuuuaaaggugaacu

SEQ ID NO: 517215 - RNA, 19 nt, Human
uggagugcaauggugugau

SEQ ID NO: 517216 - RNA, 23 nt, Human
uggagugcaauggugugaucuug

SEQ ID NO: 517217 - RNA, 24 nt, Human
uggagugcaauggugugaucuugg

SEQ ID NO: 517218 - RNA, 21 nt, Human
uggcaagaugcauaaaagagg

SEQ ID NO: 517219 - RNA, 23 nt, Human
uggcaagaugcauaaaagaucuu

SEQ ID NO: 517220 - RNA, 21 nt, Human
uggcgggcgccuguaauccca

SEQ ID NO: 517221 - RNA, 22 nt, Human
uggcgggcgccuguaaucccag

SEQ ID NO: 517222 - RNA, 18 nt, Human
ugggaggcaggagugggu

SEQ ID NO: 517223 - RNA, 22 nt, Human
ugggaggcaggagugggucugg

SEQ ID NO: 517224 - RNA, 21 nt, Human
ugggauuacaagcacgcgcca

SEQ ID NO: 517225 - RNA, 22 nt, Human
ugggauuacaagcacgcgccac

SEQ ID NO: 517226 - RNA, 24 nt, Human
ugggauuacaagcacgcgccacca

SEQ ID NO: 517227 - RNA, 18 nt, Human
ugggauuacaggcuugag

SEQ ID NO: 517228 - RNA, 19 nt, Human
ugggauuacaggcuugagc

SEQ ID NO: 517229 - RNA, 21 nt, Human
ugggauuacaggcuugagcca

SEQ ID NO: 517230 - RNA, 22 nt, Human
ugggauuacaggcuugagccac

SEQ ID NO: 517231 - RNA, 26 nt, Human
ugggauuacaggcuugagccacagcg

SEQ ID NO: 517232 - RNA, 23 nt, Human
uguagaaagggaaaacaauguac

SEQ ID NO: 517233 - RNA, 23 nt, Human
uguagaauccuuucaacuuuuuu

SEQ ID NO: 517234 - RNA, 21 nt, Human
uguauuuuuaguagagacggg

SEQ ID NO: 517235 - RNA, 20 nt, Human
ugucgcccaggcuggagugc

SEQ ID NO: 517236 - RNA, 20 nt, Human
uguuaacaacuuuagaauuu

SEQ ID NO: 517237 - RNA, 27 nt, Human
uguuccugucaaaccuuucccccgucg

SEQ ID NO: 517238 - RNA, 21 nt, Human
uuaaauagcucucagugcuaa

SEQ ID NO: 517239 - RNA, 18 nt, Human
uuaguagagacgggguuu

SEQ ID NO: 517240 - RNA, 22 nt, Human
uuaguagagacgggguuucacc

SEQ ID NO: 517241 - RNA, 24 nt, Human
uuaguagagacgggguuucaccau

SEQ ID NO: 517242 - RNA, 22 nt, Human
uuauaaagacaaaagacccacg

SEQ ID NO: 517243 - RNA, 22 nt, Human
uucaacagacuaacaaacugaa

SEQ ID NO: 517244 - RNA, 18 nt, Human
uucaagggauucuccugc

SEQ ID NO: 517245 - RNA, 23 nt, Human
uucaagggauucuccugccucag

SEQ ID NO: 517246 - RNA, 25 nt, Human
uucacaucuccccccaaguuuuguc

SEQ ID NO: 517247 - RNA, 22 nt, Human
uugaaacagugaggcuuuggcc

SEQ ID NO: 517248 - RNA, 24 nt, Human
uugaacccgggaggcggagguugc

SEQ ID NO: 517249 - RNA, 19 nt, Human
uugcagugagccgagaucg

SEQ ID NO: 517250 - RNA, 22 nt, Human
uugcagugagccgagaucgcgc

SEQ ID NO: 517251 - RNA, 23 nt, Human
uuguauuuuuaguagagacgggg

SEQ ID NO: 517252 - RNA, 21 nt, Human
uuucaccauauuggccaggcu

SEQ ID NO: 517253 - RNA, 19 nt, Human
uuuuguauuuuuaguagag

SEQ ID NO: 517254 - RNA, 20 nt, Human
uuuuguauuuuuaguagaga

SEQ ID NO: 517255 - RNA, 24 nt, Human
uuuuuaguagagacgggguuucac

SEQ ID NO: 517256 - RNA, 24 nt, Human
aaaaauuaacagaagacugaauua

SEQ ID NO: 517257 - RNA, 21 nt, Human
aaaauaauuuuacaaacuaca

SEQ ID NO: 517258 - RNA, 24 nt, Human
aaaguacacauccuucaaaacccc

SEQ ID NO: 517259 - RNA, 23 nt, Human
aaccaaaauaauuuuacaaacua

SEQ ID NO: 517260 - RNA, 18 nt, Human
acaagccgcguccuggaa

SEQ ID NO: 517261 - RNA, 21 nt, Human
acacauccuucaaaaccccgc

SEQ ID NO: 517262 - RNA, 21 nt, Human
acauccuucaaaaccccgcua

SEQ ID NO: 517263 - RNA, 22 nt, Human
agccgcggaagcccccacugcc

SEQ ID NO: 517264 - RNA, 22 nt, Human
auauuuuaauucuggacuuuca

SEQ ID NO: 517265 - RNA, 19 nt, Human
cacuucugaauucagcccu

SEQ ID NO: 517266 - RNA, 18 nt, Human
ccgcuggcuugcagccgc

SEQ ID NO: 517267 - RNA, 22 nt, Human
cggcgagaaaggcugcaggacc

SEQ ID NO: 517268 - RNA, 23 nt, Human
cuaccaagcauccuaaucaauua

SEQ ID NO: 517269 - RNA, 25 nt, Human
cucacucccgcgcccuuucuccgcc

SEQ ID NO: 517270 - RNA, 24 nt, Human
cuccuccucaaccuucccucgcug

SEQ ID NO: 517271 - RNA, 20 nt, Human
cucucucacucccgcgcccu

SEQ ID NO: 517272 - RNA, 18 nt, Human
gaacagacugcggcacgg

SEQ ID NO: 517273 - RNA, 19 nt, Human
gacaguggcugacucaccc

SEQ ID NO: 517274 - RNA, 24 nt, Human
gaccaggcucuggcuccuccucaa

SEQ ID NO: 517275 - RNA, 18 nt, Human
gcccgggagaacuccgcu

SEQ ID NO: 517276 - RNA, 21 nt, Human
gccgcggaagcccccacugcc

SEQ ID NO: 517277 - RNA, 23 nt, Human
ggcugacucacccucucucacuc

SEQ ID NO: 517278 - RNA, 20 nt, Human
guaaaauuuugaaaaucuac

SEQ ID NO: 517279 - RNA, 19 nt, Human
guggcugacucacccucuc

SEQ ID NO: 517280 - RNA, 23 nt, Human
uaaaaaaaaagcauacuaacuaa

SEQ ID NO: 517281 - RNA, 23 nt, Human
uaaaauuuugaaaaucuaccacu

SEQ ID NO: 517282 - RNA, 22 nt, Human
uaaucaacuuuuuuuccaagaa

SEQ ID NO: 517283 - RNA, 20 nt, Human
uauugcauagacaguggcug

SEQ ID NO: 517284 - RNA, 18 nt, Human
ucaaaacaauccacugug

SEQ ID NO: 517285 - RNA, 21 nt, Human
uccgcucgcccucacaggacc

SEQ ID NO: 517286 - RNA, 24 nt, Human
uccuaaucaacuuuuuuuccaaga

SEQ ID NO: 517287 - RNA, 24 nt, Human
ucugcacauuaucaaaaugaaauc

SEQ ID NO: 517288 - RNA, 22 nt, Human
ucuggcuccuccucaaccuucc

SEQ ID NO: 517289 - RNA, 21 nt, Human
ugaaaaaaaccuaccaagcau

SEQ ID NO: 517290 - RNA, 19 nt, Human
ugacggcgagaaaggcugc

SEQ ID NO: 517291 - RNA, 23 nt, Human
ugcggcacgggccgcacuucuga

SEQ ID NO: 517292 - RNA, 20 nt, Human
uuccaagaaaaagaaacgau

SEQ ID NO: 517293 - RNA, 21 nt, Human
uuuuuuuuuuuuuuuugcuuu

SEQ ID NO: 517294 - RNA, 24 nt, Human
uuuuuuuuuuuuuuuugcuuucug

SEQ ID NO: 517295 - RNA, 19 nt, Human
aaacaucaccuccucuccc

SEQ ID NO: 517296 - RNA, 21 nt, Human
aaaccagcauacagaccaauu

SEQ ID NO: 517297 - RNA, 24 nt, Human
aaagaaaccaauauaaauuucaaa

SEQ ID NO: 517298 - RNA, 20 nt, Human
aaagacuaguaggacuugga

SEQ ID NO: 517299 - RNA, 20 nt, Human
aacauggcgaaacccugucu

SEQ ID NO: 517300 - RNA, 21 nt, Human
aacauggcgaaacccugucuc

SEQ ID NO: 517301 - RNA, 23 nt, Human
aaccuguuuguuuaaagaaugaa

SEQ ID NO: 517302 - RNA, 22 nt, Human
aagaauuugccuuucuaacaag

SEQ ID NO: 517303 - RNA, 21 nt, Human
aagcaguuaggauucgaaugc

SEQ ID NO: 517304 - RNA, 23 nt, Human
aagccccagaaccuaacagagaa

SEQ ID NO: 517305 - RNA, 24 nt, Human
aagccccagaaccuaacagagaag

SEQ ID NO: 517306 - RNA, 25 nt, Human
aaggugggcggaucacauaaggcca

SEQ ID NO: 517307 - RNA, 24 nt, Human
aauugcuugaacccaggagucgga

SEQ ID NO: 517308 - RNA, 21 nt, Human
acaccagcuugaaaagaaacc

SEQ ID NO: 517309 - RNA, 23 nt, Human
acagagugagacucugucucaaa

SEQ ID NO: 517310 - RNA, 24 nt, Human
acagagugagacucugucucaaaa

SEQ ID NO: 517311 - RNA, 24 nt, Human
acauaaggccaggaguucaagacc

SEQ ID NO: 517312 - RNA, 24 nt, Human
accacuccucucuuuuuucuccca

SEQ ID NO: 517313 - RNA, 21 nt, Human
acccagaagacauaacuugau

SEQ ID NO: 517314 - RNA, 24 nt, Human
acccugucucuacuaaaaauacaa

SEQ ID NO: 517315 - RNA, 23 nt, Human
acucagguugcugggccccacag

SEQ ID NO: 517316 - RNA, 21 nt, Human
acuccagccuaggugacagag

SEQ ID NO: 517317 - RNA, 23 nt, Human
acuccagccuaggugacagagug

SEQ ID NO: 517318 - RNA, 24 nt, Human
acuccagccuaggugacagaguga

SEQ ID NO: 517319 - RNA, 21 nt, Human
acugccccagggugcacguac

SEQ ID NO: 517320 - RNA, 19 nt, Human
acuuagaugacggcuucac

SEQ ID NO: 517321 - RNA, 23 nt, Human
acuucauacccaggccgcaucug

SEQ ID NO: 517322 - RNA, 24 nt, Human
agaaaccaauauaaauuucaaaau

SEQ ID NO: 517323 - RNA, 20 nt, Human
agacuucuacaaccacuccu

SEQ ID NO: 517324 - RNA, 22 nt, Human
agaggaaaaguuugcugcugcu

SEQ ID NO: 517325 - RNA, 24 nt, Human
agcacuuugggaagccaagguggg

SEQ ID NO: 517326 - RNA, 24 nt, Human
agccuaggugacagagugagacuc

SEQ ID NO: 517327 - RNA, 24 nt, Human
agccuggccaacauggcgaaaccc

SEQ ID NO: 517328 - RNA, 23 nt, Human
aggcagaagaauugcuugaaccc

SEQ ID NO: 517329 - RNA, 24 nt, Human
aggcgagguggcucaugccuguaa

SEQ ID NO: 517330 - RNA, 24 nt, Human
aggcugaggcagaagaauugcuug

SEQ ID NO: 517331 - RNA, 18 nt, Human
aggguccucucuggguuc

SEQ ID NO: 517332 - RNA, 19 nt, Human
aguacuuggaggacuggau

SEQ ID NO: 517333 - RNA, 24 nt, Human
agucggagguugcagugagccgag

SEQ ID NO: 517334 - RNA, 21 nt, Human
agugagccgagaucaaaccac

SEQ ID NO: 517335 - RNA, 21 nt, Human
agugaugggaaaagaagggcu

SEQ ID NO: 517336 - RNA, 22 nt, Human
auacacccaaaauaugagagga

SEQ ID NO: 517337 - RNA, 21 nt, Human
aucaccuccucuccccgaccc

SEQ ID NO: 517338 - RNA, 22 nt, Human
aucccagcacuuugggaagcca

SEQ ID NO: 517339 - RNA, 24 nt, Human
aucuuuguuuuacacagucucaga

SEQ ID NO: 517340 - RNA, 19 nt, Human
augccuguaaucccagcac

SEQ ID NO: 517341 - RNA, 22 nt, Human
auuauucaaauguauuucuuga

SEQ ID NO: 517342 - RNA, 23 nt, Human
caaaauaaaccagcauacagacc

SEQ ID NO: 517343 - RNA, 24 nt, Human
caaaauaaaccagcauacagacca

SEQ ID NO: 517344 - RNA, 20 nt, Human
caaaccacugcaacuccagc

SEQ ID NO: 517345 - RNA, 19 nt, Human
caaaggaucacuuaaaaca

SEQ ID NO: 517346 - RNA, 22 nt, Human
caaaguaucguuccaaaguaga

SEQ ID NO: 517347 - RNA, 26 nt, Human
caacacaucaccaccauaagacaagc

SEQ ID NO: 517348 - RNA, 24 nt, Human
caacauggcgaaacccugucucua

SEQ ID NO: 517349 - RNA, 24 nt, Human
caacuccagccuaggugacagagu

SEQ ID NO: 517350 - RNA, 20 nt, Human
caagaguugcuacauuuaac

SEQ ID NO: 517351 - RNA, 23 nt, Human
caagccccagaaccuaacagaga

SEQ ID NO: 517352 - RNA, 22 nt, Human
caaggaaagcaaugcuauuucc

SEQ ID NO: 517353 - RNA, 19 nt, Human
caaggugggcggaucacau

SEQ ID NO: 517354 - RNA, 19 nt, Human
cacacaguagugacaaagc

SEQ ID NO: 517355 - RNA, 19 nt, Human
cacaucuguaaucccagcu

SEQ ID NO: 517356 - RNA, 18 nt, Human
caccuccucuccccgacc

SEQ ID NO: 517357 - RNA, 20 nt, Human
caccuccucuccccgacccc

SEQ ID NO: 517358 - RNA, 19 nt, Human
cacuauaugagccagcacc

SEQ ID NO: 517359 - RNA, 21 nt, Human
cacuauaugagccagcaccau

SEQ ID NO: 517360 - RNA, 18 nt, Human
cacugcaacuccagccua

SEQ ID NO: 517361 - RNA, 23 nt, Human
cagaccccaaagugaaaaugcaa

SEQ ID NO: 517362 - RNA, 18 nt, Human
cagcaccaggguccucuc

SEQ ID NO: 517363 - RNA, 24 nt, Human
cagcacuuugggaagccaaggugg

SEQ ID NO: 517364 - RNA, 24 nt, Human
cagcuacucaggaggcugaggcag

SEQ ID NO: 517365 - RNA, 21 nt, Human
cagcuugaaaagaaaccaaua

SEQ ID NO: 517366 - RNA, 27 nt, Human
caggaggcugaggcagaagaauugcuu

SEQ ID NO: 517367 - RNA, 18 nt, Human
caggagugccugcccagc

SEQ ID NO: 517368 - RNA, 22 nt, Human
caggcgggaaacacugcccccu

SEQ ID NO: 517369 - RNA, 18 nt, Human
cagugagccgagaucaaa

SEQ ID NO: 517370 - RNA, 21 nt, Human
cauaagacaagcuauuuuguc

SEQ ID NO: 517371 - RNA, 24 nt, Human
caucuguaaucccagcuacucagg

SEQ ID NO: 517372 - RNA, 20 nt, Human
caugccuguaaucccagcac

SEQ ID NO: 517373 - RNA, 24 nt, Human
caugccuguaaucccagcacuuug

SEQ ID NO: 517374 - RNA, 23 nt, Human
cauuuaacuguauccccauuuau

SEQ ID NO: 517375 - RNA, 21 nt, Human
ccacugcaacuccagccuagg

SEQ ID NO: 517376 - RNA, 22 nt, Human
ccacugcaacuccagccuaggu

SEQ ID NO: 517377 - RNA, 25 nt, Human
ccacugcaacuccagccuaggugac

SEQ ID NO: 517378 - RNA, 19 nt, Human
ccagaaccuaacagagaag

SEQ ID NO: 517379 - RNA, 28 nt, Human
ccagaagacauaacuugauaggacauca

SEQ ID NO: 517380 - RNA, 21 nt, Human
ccaucacucucuucugaacac

SEQ ID NO: 517381 - RNA, 18 nt, Human
ccauuccagggacuacac

SEQ ID NO: 517382 - RNA, 21 nt, Human
cccagaaccuaacagagaagc

SEQ ID NO: 517383 - RNA, 21 nt, Human
cccaucacucucuucugaaca

SEQ ID NO: 517384 - RNA, 23 nt, Human
ccccagaaccuaacagagaagca

SEQ ID NO: 517385 - RNA, 22 nt, Human
ccuaggugacagagugagacuc

SEQ ID NO: 517386 - RNA, 19 nt, Human
ccuccucuccccgacccca

SEQ ID NO: 517387 - RNA, 22 nt, Human
ccucggucauuagggggaaagg

SEQ ID NO: 517388 - RNA, 19 nt, Human
ccugccuuagaaacucaaa

SEQ ID NO: 517389 - RNA, 22 nt, Human
ccuggccaacauggcgaaaccc

SEQ ID NO: 517390 - RNA, 24 nt, Human
ccuggccaacauggcgaaacccug

SEQ ID NO: 517391 - RNA, 20 nt, Human
ccuuagaaauaaagugggcc

SEQ ID NO: 517392 - RNA, 20 nt, Human
ccuuggucaucugugaacga

SEQ ID NO: 517393 - RNA, 22 nt, Human
cgagaucaaaccacugcaacuc

SEQ ID NO: 517394 - RNA, 24 nt, Human
cggaucacauaaggccaggaguuc

SEQ ID NO: 517395 - RNA, 23 nt, Human
cucaugccuguaaucccagcacu

SEQ ID NO: 517396 - RNA, 24 nt, Human
cucaugccuguaaucccagcacuu

SEQ ID NO: 517397 - RNA, 24 nt, Human
cuccuuuauugugaaacagaacaa

SEQ ID NO: 517398 - RNA, 19 nt, Human
cucucucucucucauuuug

SEQ ID NO: 517399 - RNA, 19 nt, Human
cucugucucaaaaaaaaaa

SEQ ID NO: 517400 - RNA, 22 nt, Human
cugaaaaugcagaacccaguga

SEQ ID NO: 517401 - RNA, 22 nt, Human
cugaggggaaagggaagaggag

SEQ ID NO: 517402 - RNA, 18 nt, Human
cugauugcuugacauguc

SEQ ID NO: 517403 - RNA, 21 nt, Human
cuguaaucccagcuacucagg

SEQ ID NO: 517404 - RNA, 24 nt, Human
cuguuuguuuaaagaaugaaggcc

SEQ ID NO: 517405 - RNA, 20 nt, Human
cuucaaaaacaguuuuucuc

SEQ ID NO: 517406 - RNA, 26 nt, Human
cuugcaaagagccucagcagucuccc

SEQ ID NO: 517407 - RNA, 20 nt, Human
gaaaaugcaacacaucacca

SEQ ID NO: 517408 - RNA, 19 nt, Human
gaaacccugucucuacuaa

SEQ ID NO: 517409 - RNA, 26 nt, Human
gaaacuugcucuuauuauuuucuaaa

SEQ ID NO: 517410 - RNA, 19 nt, Human
gaagaggaggagauaucag

SEQ ID NO: 517411 - RNA, 20 nt, Human
gagaugacaccagcuugaaa

SEQ ID NO: 517412 - RNA, 22 nt, Human
gagguugcagugagccgagauc

SEQ ID NO: 517413 - RNA, 21 nt, Human
gagucggagguugcagugagc

SEQ ID NO: 517414 - RNA, 24 nt, Human
gaucacauaaggccaggaguucaa

SEQ ID NO: 517415 - RNA, 18 nt, Human
gauugcaagccccagaac

SEQ ID NO: 517416 - RNA, 21 nt, Human
gcaaaauaccuucaggauaaa

SEQ ID NO: 517417 - RNA, 22 nt, Human
gcagaagaauugcuugaaccca

SEQ ID NO: 517418 - RNA, 24 nt, Human
gccaacauggcgaaacccugucuc

SEQ ID NO: 517419 - RNA, 19 nt, Human
gcugauuugcucuggauuc

SEQ ID NO: 517420 - RNA, 18 nt, Human
gcugcuuccaaaagugcc

SEQ ID NO: 517421 - RNA, 24 nt, Human
gcuggugcacaucuguaaucccag

SEQ ID NO: 517422 - RNA, 18 nt, Human
ggacugucuaacucaaaa

SEQ ID NO: 517423 - RNA, 18 nt, Human
ggacuucaaagacuagua

SEQ ID NO: 517424 - RNA, 20 nt, Human
ggaggacuggauugggagcc

SEQ ID NO: 517425 - RNA, 20 nt, Human
ggagguugcagugagccgag

SEQ ID NO: 517426 - RNA, 22 nt, Human
ggagguugcagugagccgagau

SEQ ID NO: 517427 - RNA, 23 nt, Human
ggagguugcagugagccgagauc

SEQ ID NO: 517428 - RNA, 24 nt, Human
ggagguugcagugagccgagauca

SEQ ID NO: 517429 - RNA, 21 nt, Human
ggccaggcgagguggcucaug

SEQ ID NO: 517430 - RNA, 24 nt, Human
gggcagggucagggaccccgaaau

SEQ ID NO: 517431 - RNA, 23 nt, Human
gggugugcuggugcacaucugua

SEQ ID NO: 517432 - RNA, 23 nt, Human
gguggcucaugccuguaauccca

SEQ ID NO: 517433 - RNA, 24 nt, Human
gguggcucaugccuguaaucccag

SEQ ID NO: 517434 - RNA, 24 nt, Human
gugacagagugagacucugucuca

SEQ ID NO: 517435 - RNA, 23 nt, Human
guggcucaugccuguaaucccag

SEQ ID NO: 517436 - RNA, 24 nt, Human
guuacaucccuuauucauacggug

SEQ ID NO: 517437 - RNA, 19 nt, Human
guugcagugagccgagauc

SEQ ID NO: 517438 - RNA, 20 nt, Human
guuggcagucgcuccaucua

SEQ ID NO: 517439 - RNA, 19 nt, Human
uaaaacaggagugccugcc

SEQ ID NO: 517440 - RNA, 23 nt, Human
uaaaacaggagugccugcccagc

SEQ ID NO: 517441 - RNA, 23 nt, Human
uaaaauuaaaugcaaacacuaaa

SEQ ID NO: 517442 - RNA, 21 nt, Human
uaaagugggccacugaaauca

SEQ ID NO: 517443 - RNA, 24 nt, Human
uaaauuucaaaauaaaccagcaua

SEQ ID NO: 517444 - RNA, 21 nt, Human
uaacaaguuccugggugaugu

SEQ ID NO: 517445 - RNA, 22 nt, Human
uaacagagaagcacuuaaacau

SEQ ID NO: 517446 - RNA, 25 nt, Human
uaacccagcuugguguuuuccuaag

SEQ ID NO: 517447 - RNA, 21 nt, Human
uaaugggcuuuuaguguuaca

SEQ ID NO: 517448 - RNA, 24 nt, Human
uagaaacaucaccuccucuccccg

SEQ ID NO: 517449 - RNA, 18 nt, Human
uagaggcaaaugccuucc

SEQ ID NO: 517450 - RNA, 20 nt, Human
uagcauuuguuguagugauu

SEQ ID NO: 517451 - RNA, 21 nt, Human
uagggagacuucuacaaccac

SEQ ID NO: 517452 - RNA, 21 nt, Human
uaggugacagagugagacucu

SEQ ID NO: 517453 - RNA, 25 nt, Human
uaucucacaacagggugagauuuua

SEQ ID NO: 517454 - RNA, 23 nt, Human
ucaaaauaaaccagcauacagac

SEQ ID NO: 517455 - RNA, 22 nt, Human
ucaaggaaagcaaugcuauuuc

SEQ ID NO: 517456 - RNA, 23 nt, Human
uccagccuaggugacagagugag

SEQ ID NO: 517457 - RNA, 24 nt, Human
uccagccuaggugacagagugaga

SEQ ID NO: 517458 - RNA, 22 nt, Human
ucccugaaggagagagacaauc

SEQ ID NO: 517459 - RNA, 26 nt, Human
ucccugaaggagagagacaaucaagg

SEQ ID NO: 517460 - RNA, 24 nt, Human
uccuaagggagcuacaaauucugg

SEQ ID NO: 517461 - RNA, 24 nt, Human
ucucaagcccaggacugucuaacu

SEQ ID NO: 517462 - RNA, 22 nt, Human
ucucuacuaaaaauacaaaaaa

SEQ ID NO: 517463 - RNA, 22 nt, Human
ucuguaaucccagcuacucagg

SEQ ID NO: 517464 - RNA, 22 nt, Human
ucugucucaaaaaaaaaaaaaa

SEQ ID NO: 517465 - RNA, 18 nt, Human
ucuuacagaccccaaagu

SEQ ID NO: 517466 - RNA, 21 nt, Human
ugaaaaugcaacacaucaccc

SEQ ID NO: 517467 - RNA, 25 nt, Human
ugaaacaaaacaauucaucuaaaau

SEQ ID NO: 517468 - RNA, 20 nt, Human
ugaaggccuuaaggaaaagc

SEQ ID NO: 517469 - RNA, 25 nt, Human
ugaaggccuuaaggaaaagccuuau

SEQ ID NO: 517470 - RNA, 19 nt, Human
ugacaccagcuugaaaaga

SEQ ID NO: 517471 - RNA, 25 nt, Human
ugacaggugcccgagggcaagugca

SEQ ID NO: 517472 - RNA, 24 nt, Human
ugaggcagaagaauugcuugaacc

SEQ ID NO: 517473 - RNA, 25 nt, Human
ugaggcagaagaauugcuugaaccc

SEQ ID NO: 517474 - RNA, 22 nt, Human
ugauacacccaaaauaugagag

SEQ ID NO: 517475 - RNA, 25 nt, Human
ugcaaagagccucagcagucuccca

SEQ ID NO: 517476 - RNA, 25 nt, Human
ugcauguauggucccaaagacuuuu

SEQ ID NO: 517477 - RNA, 23 nt, Human
ugccuguaaucccagcacuuugg

SEQ ID NO: 517478 - RNA, 23 nt, Human
ugccuguaaucccagcacuuugg

SEQ ID NO: 517479 - RNA, 24 nt, Human
ugccuguaaucccagcacuuuggg

SEQ ID NO: 517480 - RNA, 19 nt, Human
ugcuagcaucuggccaggc

SEQ ID NO: 517481 - RNA, 25 nt, Human
ugcugcuguuacuguugcugcuucc

SEQ ID NO: 517482 - RNA, 18 nt, Human
ugcugcuuccaaaagugc

SEQ ID NO: 517483 - RNA, 19 nt, Human
ugcugggccccacagccag

SEQ ID NO: 517484 - RNA, 24 nt, Human
ugcuggugcacaucuguaauccca

SEQ ID NO: 517485 - RNA, 18 nt, Human
uggagaggacccagagga

SEQ ID NO: 517486 - RNA, 22 nt, Human
uggagcaucccaugaggaugau

SEQ ID NO: 517487 - RNA, 21 nt, Human
uggagucccuagagaagccgu

SEQ ID NO: 517488 - RNA, 24 nt, Human
uggccaacauggcgaaacccuguc

SEQ ID NO: 517489 - RNA, 22 nt, Human
uggcucaugccuguaaucccag

SEQ ID NO: 517490 - RNA, 24 nt, Human
uggcucaugccuguaaucccagca

SEQ ID NO: 517491 - RNA, 19 nt, Human
uggcuucugggacacaguc

SEQ ID NO: 517492 - RNA, 20 nt, Human
uggcuucugggacacagucu

SEQ ID NO: 517493 - RNA, 24 nt, Human
ugggaagccaaggugggcggauca

SEQ ID NO: 517494 - RNA, 26 nt, Human
ugggaagggugcggacagauugggua

SEQ ID NO: 517495 - RNA, 23 nt, Human
ugggagccacucaggaaaggccu

SEQ ID NO: 517496 - RNA, 22 nt, Human
ugggccccacagccaggacccu

SEQ ID NO: 517497 - RNA, 24 nt, Human
ugggcggaucacauaaggccagga

SEQ ID NO: 517498 - RNA, 24 nt, Human
ugucgggaaaugaaguuggcaguc

SEQ ID NO: 517499 - RNA, 24 nt, Human
ugugaaacaaaacaauucaucuaa

SEQ ID NO: 517500 - RNA, 21 nt, Human
uuaacuguauccccauuuauc

SEQ ID NO: 517501 - RNA, 23 nt, Human
uucaagacucuccacacuuacuu

SEQ ID NO: 517502 - RNA, 26 nt, Human
uucacugacaguuucuuacagacccc

SEQ ID NO: 517503 - RNA, 24 nt, Human
uucgugaaagcucaucaaggggau

SEQ ID NO: 517504 - RNA, 18 nt, Human
uugcagugagccgagauc

SEQ ID NO: 517505 - RNA, 19 nt, Human
uugcagugagccgagauca

SEQ ID NO: 517506 - RNA, 25 nt, Human
uugcagugagccgagaucaaaccac

SEQ ID NO: 517507 - RNA, 24 nt, Human
uugcugcugcuguuacuguugcug

SEQ ID NO: 517508 - RNA, 25 nt, Human
uugcugcugcuguuacuguugcugc

SEQ ID NO: 517509 - RNA, 24 nt, Human
uugcuugaacccaggagucggagg

SEQ ID NO: 517510 - RNA, 18 nt, Human
uugcuugacaugucugau

SEQ ID NO: 517511 - RNA, 21 nt, Human
uuggaggacuggauugggagc

SEQ ID NO: 517512 - RNA, 26 nt, Human
uuuaaacuuaagcauuaauaaaagau

SEQ ID NO: 517513 - RNA, 21 nt, Human
uuuacacagucucagagagau

SEQ ID NO: 517514 - RNA, 21 nt, Human
uuucucauccuuugccuucgg

SEQ ID NO: 517515 - RNA, 18 nt, Human
uuugaggacuucaaagac

SEQ ID NO: 517516 - RNA, 18 nt, Human
uuugauaaaggaaaagga

SEQ ID NO: 517517 - RNA, 19 nt, Human
uuuguuguagugauuuuca

SEQ ID NO: 517518 - RNA, 18 nt, Human
uuuugucugucacccaga

SEQ ID NO: 517519 - RNA, 21 nt, Human
aaccccaaucuuuuacuaaaa

SEQ ID NO: 517520 - RNA, 22 nt, Human
accccggaguacaggguuccug

SEQ ID NO: 517521 - RNA, 20 nt, Human
agagaagccggcgaccccgg

SEQ ID NO: 517522 - RNA, 21 nt, Human
agaggggagggaacagagggc

SEQ ID NO: 517523 - RNA, 25 nt, Human
agcccuucucccccgcgcgaacccc

SEQ ID NO: 517524 - RNA, 26 nt, Human
agggaacagagggcuagaggggcccg

SEQ ID NO: 517525 - RNA, 21 nt, Human
agggaggaacaaaagagggga

SEQ ID NO: 517526 - RNA, 22 nt, Human
aggggagggaacagagggcuag

SEQ ID NO: 517527 - RNA, 23 nt, Human
aggugggcuggccuggucagccu

SEQ ID NO: 517528 - RNA, 21 nt, Human
cacacugucagcccugagggc

SEQ ID NO: 517529 - RNA, 18 nt, Human
cagcaggggagcgaggag

SEQ ID NO: 517530 - RNA, 19 nt, Human
caggcaagcucaaauucac

SEQ ID NO: 517531 - RNA, 18 nt, Human
ccaaucagccugacaggc

SEQ ID NO: 517532 - RNA, 23 nt, Human
ccacacugucagcccugagggcg

SEQ ID NO: 517533 - RNA, 21 nt, Human
cccagcaggggagcgaggaga

SEQ ID NO: 517534 - RNA, 21 nt, Human
cccagguugggaccccagaac

SEQ ID NO: 517535 - RNA, 20 nt, Human
cccggaguacaggguuccug

SEQ ID NO: 517536 - RNA, 23 nt, Human
cccuggcugagcggugaggggac

SEQ ID NO: 517537 - RNA, 23 nt, Human
cgggaagggcccagagggacguc

SEQ ID NO: 517538 - RNA, 18 nt, Human
cucccccgcgcgaacccc

SEQ ID NO: 517539 - RNA, 19 nt, Human
cucgguacccccaucagcc

SEQ ID NO: 517540 - RNA, 20 nt, Human
cucggucagucaaucccagc

SEQ ID NO: 517541 - RNA, 18 nt, Human
cugcuuggucccgggcug

SEQ ID NO: 517542 - RNA, 23 nt, Human
cugucaguuucaugucugacuuc

SEQ ID NO: 517543 - RNA, 21 nt, Human
gagggcuagaggggcccgggg

SEQ ID NO: 517544 - RNA, 22 nt, Human
gcagcccuucucccccgcgcga

SEQ ID NO: 517545 - RNA, 26 nt, Human
gcaggagagaagccggcgaccccgga

SEQ ID NO: 517546 - RNA, 20 nt, Human
gcuggccuggucagccuggg

SEQ ID NO: 517547 - RNA, 24 nt, Human
gcuggccuggucagccugggugga

SEQ ID NO: 517548 - RNA, 23 nt, Human
ggaagacucuagcuggacauucc

SEQ ID NO: 517549 - RNA, 24 nt, Human
ggacgagaaccagagggcccgggg

SEQ ID NO: 517550 - RNA, 21 nt, Human
ggacgucaaggaccgagcuac

SEQ ID NO: 517551 - RNA, 22 nt, Human
ggaggaacaaaagaggggaggg

SEQ ID NO: 517552 - RNA, 23 nt, Human
ggaggaacaaaagaggggaggga

SEQ ID NO: 517553 - RNA, 22 nt, Human
ggagggaacagagggcuagagg

SEQ ID NO: 517554 - RNA, 22 nt, Human
ggccaccucucgguacccccau

SEQ ID NO: 517555 - RNA, 19 nt, Human
ggccuggucagccugggug

SEQ ID NO: 517556 - RNA, 25 nt, Human
ggcgaccccggaguacaggguuccu

SEQ ID NO: 517557 - RNA, 21 nt, Human
ggcgcaguggcgcgggggagc

SEQ ID NO: 517558 - RNA, 23 nt, Human
ggcggcggggcucuagggaggaa

SEQ ID NO: 517559 - RNA, 18 nt, Human
gggaccggaggcaggaga

SEQ ID NO: 517560 - RNA, 22 nt, Human
gggaggaacaaaagaggggagg

SEQ ID NO: 517561 - RNA, 20 nt, Human
gggcccggggacucaggcga

SEQ ID NO: 517562 - RNA, 22 nt, Human
ggucagugaggugggcuggccu

SEQ ID NO: 517563 - RNA, 20 nt, Human
ggucccgggcuggucagucu

SEQ ID NO: 517564 - RNA, 24 nt, Human
ucagccaaucagccugacaggcaa

SEQ ID NO: 517565 - RNA, 20 nt, Human
uccugggagcggcgcagugg

SEQ ID NO: 517566 - RNA, 21 nt, Human
ugagggcggcggggcucuagg

SEQ ID NO: 517567 - RNA, 23 nt, Human
ugaggucaggggucaggagguca

SEQ ID NO: 517568 - RNA, 21 nt, Human
ugaggugggcuggccugguca

SEQ ID NO: 517569 - RNA, 24 nt, Human
ugggagcggcgcaguggcgcgggg

SEQ ID NO: 517570 - RNA, 23 nt, Human
ugggcuggccuggucagccuggg

SEQ ID NO: 517571 - RNA, 23 nt, Human
uuagugagccaauccagggcugu

SEQ ID NO: 517572 - RNA, 22 nt, Human
uucacuggagucugucagucca

SEQ ID NO: 517573 - RNA, 22 nt, Human
uucaugucugacuuccacggaa

SEQ ID NO: 517574 - RNA, 18 nt, Human
uuccugggagcggcgcag

SEQ ID NO: 517575 - RNA, 22 nt, Human
uucucccccgcgcgaaccccaa

SEQ ID NO: 517576 - RNA, 18 nt, Human
aaaccccaaucucacagc

SEQ ID NO: 517577 - RNA, 18 nt, Human
aauuacagucgugagcca

SEQ ID NO: 517578 - RNA, 21 nt, Human
aauuacagucgugagccacug

SEQ ID NO: 517579 - RNA, 19 nt, Human
acaccagaagagccacacu

SEQ ID NO: 517580 - RNA, 21 nt, Human
acaggcgcccgccaccacacc

SEQ ID NO: 517581 - RNA, 18 nt, Human
acaggguuucaccauguu

SEQ ID NO: 517582 - RNA, 21 nt, Human
acaggguuucaccauguuggc

SEQ ID NO: 517583 - RNA, 24 nt, Human
acaggguuucaccauguuggccag

SEQ ID NO: 517584 - RNA, 18 nt, Human
accauguuggccaggcug

SEQ ID NO: 517585 - RNA, 23 nt, Human
accccucucuccccaagcugaaa

SEQ ID NO: 517586 - RNA, 21 nt, Human
accgcaaccuccgccugcugg

SEQ ID NO: 517587 - RNA, 18 nt, Human
accuccgccugcuggguu

SEQ ID NO: 517588 - RNA, 21 nt, Human
acuuuaguaggcuuuucacua

SEQ ID NO: 517589 - RNA, 26 nt, Human
agaggaaggccaccccucucucccca

SEQ ID NO: 517590 - RNA, 18 nt, Human
agagggagcaagaugggc

SEQ ID NO: 517591 - RNA, 23 nt, Human
agccucagccuccugaguaguug

SEQ ID NO: 517592 - RNA, 18 nt, Human
aggccauaaagccugaaa

SEQ ID NO: 517593 - RNA, 18 nt, Human
aguaguugggauuacagg

SEQ ID NO: 517594 - RNA, 22 nt, Human
aguccggcucggcgccggccuc

SEQ ID NO: 517595 - RNA, 23 nt, Human
agucgugagccacugugccuggu

SEQ ID NO: 517596 - RNA, 24 nt, Human
agugauucucuagccucagccucc

SEQ ID NO: 517597 - RNA, 20 nt, Human
agugcaauggcgugaucucg

SEQ ID NO: 517598 - RNA, 24 nt, Human
agugcaauggcgugaucucgacuc

SEQ ID NO: 517599 - RNA, 21 nt, Human
aguggugggaaguacaaguac

SEQ ID NO: 517600 - RNA, 19 nt, Human
auaaaauguucuaaacccc

SEQ ID NO: 517601 - RNA, 19 nt, Human
caaagaaugaaauguggcc

SEQ ID NO: 517602 - RNA, 22 nt, Human
caagugauucucuagccucagc

SEQ ID NO: 517603 - RNA, 24 nt, Human
caccacaccuggcuaauuuuugua

SEQ ID NO: 517604 - RNA, 21 nt, Human
caccauguuggccaggcuggu

SEQ ID NO: 517605 - RNA, 24 nt, Human
caccauguuggccaggcuggucuc

SEQ ID NO: 517606 - RNA, 18 nt, Human
caccccucucuccccaag

SEQ ID NO: 517607 - RNA, 27 nt, Human
caccuuaguguacugaaagaaaaacaa

SEQ ID NO: 517608 - RNA, 20 nt, Human
cagccuccugaguaguuggg

SEQ ID NO: 517609 - RNA, 23 nt, Human
cagcucccacacuccauuggccu

SEQ ID NO: 517610 - RNA, 24 nt, Human
caggguuucaccauguuggccagg

SEQ ID NO: 517611 - RNA, 20 nt, Human
caucacauuacauucacacc

SEQ ID NO: 517612 - RNA, 25 nt, Human
cauguuggccaggcuggucuccgga

SEQ ID NO: 517613 - RNA, 20 nt, Human
ccaccccucucuccccaagc

SEQ ID NO: 517614 - RNA, 25 nt, Human
ccaccccucucuccccaagcugaaa

SEQ ID NO: 517615 - RNA, 21 nt, Human
ccaccuacagggcccgggaau

SEQ ID NO: 517616 - RNA, 24 nt, Human
cccaagcugaaacaccagaagagc

SEQ ID NO: 517617 - RNA, 21 nt, Human
cccaccuacagggcccgggaa

SEQ ID NO: 517618 - RNA, 19 nt, Human
ccccucucuccccaagcug

SEQ ID NO: 517619 - RNA, 21 nt, Human
ccccucucuccccaagcugaa

SEQ ID NO: 517620 - RNA, 24 nt, Human
ccgcaaccuccgccugcuggguuc

SEQ ID NO: 517621 - RNA, 23 nt, Human
ccugaguaguugggauuacaggc

SEQ ID NO: 517622 - RNA, 24 nt, Human
ccugaguaguugggauuacaggcg

SEQ ID NO: 517623 - RNA, 20 nt, Human
ccuuucagcucccacacucc

SEQ ID NO: 517624 - RNA, 21 nt, Human
cggcgccggccucaacugcaa

SEQ ID NO: 517625 - RNA, 20 nt, Human
cgggaauccuagggagcggg

SEQ ID NO: 517626 - RNA, 24 nt, Human
cuaaacugcuggaauuacagucgu

SEQ ID NO: 517627 - RNA, 22 nt, Human
cuagccucagccuccugaguag

SEQ ID NO: 517628 - RNA, 24 nt, Human
cuagccucagccuccugaguaguu

SEQ ID NO: 517629 - RNA, 24 nt, Human
cuaguagagacaggguuucaccau

SEQ ID NO: 517630 - RNA, 20 nt, Human
cucacagcacuuuaguaggc

SEQ ID NO: 517631 - RNA, 21 nt, Human
cucggcgccggccucaacugc

SEQ ID NO: 517632 - RNA, 25 nt, Human
cugaaaauaaaauguucuaaacccc

SEQ ID NO: 517633 - RNA, 22 nt, Human
cugaacaccauucacaaaaugu

SEQ ID NO: 517634 - RNA, 22 nt, Human
cuuucagcucccacacuccauu

SEQ ID NO: 517635 - RNA, 23 nt, Human
gaccucaggugaucugcacacuu

SEQ ID NO: 517636 - RNA, 19 nt, Human
gagagggagcaagaugggc

SEQ ID NO: 517637 - RNA, 18 nt, Human
gagggagcaagaugggcu

SEQ ID NO: 517638 - RNA, 25 nt, Human
gaguaguugggauuacaggcgcccg

SEQ ID NO: 517639 - RNA, 18 nt, Human
gauuacaggcgcccgcca

SEQ ID NO: 517640 - RNA, 24 nt, Human
gcacaggcuggagugcaauggcgu

SEQ ID NO: 517641 - RNA, 20 nt, Human
gcaguaccuuugauaauucc

SEQ ID NO: 517642 - RNA, 23 nt, Human
gccacacucggccguucccaacc

SEQ ID NO: 517643 - RNA, 19 nt, Human
gccucagccuccugaguag

SEQ ID NO: 517644 - RNA, 21 nt, Human
gccugaaguccggcucggcgc

SEQ ID NO: 517645 - RNA, 23 nt, Human
gcugaaacaccagaagagccagu

SEQ ID NO: 517646 - RNA, 19 nt, Human
gcuggagugcaauggcgug

SEQ ID NO: 517647 - RNA, 22 nt, Human
ggcuggagugcaauggcgugau

SEQ ID NO: 517648 - RNA, 22 nt, Human
ggguuucaccauguuggccagg

SEQ ID NO: 517649 - RNA, 21 nt, Human
gguaaacuuuccuauaggucu

SEQ ID NO: 517650 - RNA, 20 nt, Human
ggucaggucacgccgccgga

SEQ ID NO: 517651 - RNA, 24 nt, Human
gugauucucuagccucagccuccu

SEQ ID NO: 517652 - RNA, 21 nt, Human
uaaaaucuuuuugagacagag

SEQ ID NO: 517653 - RNA, 18 nt, Human
uaaaauguucuaaacccc

SEQ ID NO: 517654 - RNA, 22 nt, Human
uaaaccccaaucucacagcacu

SEQ ID NO: 517655 - RNA, 19 nt, Human
uaaagaacuugagcaacug

SEQ ID NO: 517656 - RNA, 23 nt, Human
uaauuugguuuguuggucccaca

SEQ ID NO: 517657 - RNA, 24 nt, Human
uaauuuuuguauuucuaguagaga

SEQ ID NO: 517658 - RNA, 22 nt, Human
uacaggcgcccgccaccacacc

SEQ ID NO: 517659 - RNA, 22 nt, Human
uacagucgugagccacugugcc

SEQ ID NO: 517660 - RNA, 22 nt, Human
uagagacaggguuucaccaugu

SEQ ID NO: 517661 - RNA, 18 nt, Human
uagcaaagcugcaaagaa

SEQ ID NO: 517662 - RNA, 18 nt, Human
uaggcaucuuuaaaguau

SEQ ID NO: 517663 - RNA, 19 nt, Human
uaggccauaaagccugaaa

SEQ ID NO: 517664 - RNA, 24 nt, Human
uaguagagacaggguuucaccaug

SEQ ID NO: 517665 - RNA, 26 nt, Human
uaguagagacaggguuucaccauguu

SEQ ID NO: 517666 - RNA, 22 nt, Human
uaguaggcuuuucacuaggcau

SEQ ID NO: 517667 - RNA, 22 nt, Human
ucaaaagagcuucaaggaaaaa

SEQ ID NO: 517668 - RNA, 22 nt, Human
ucaauguaugugcuauuuacaa

SEQ ID NO: 517669 - RNA, 18 nt, Human
ucacaccuuuugcuaacc

SEQ ID NO: 517670 - RNA, 20 nt, Human
ucaccgcaaccuccgccugc

SEQ ID NO: 517671 - RNA, 24 nt, Human
ucaccgcaaccuccgccugcuggg

SEQ ID NO: 517672 - RNA, 27 nt, Human
ucaccgcaaccuccgccugcuggguuc

SEQ ID NO: 517673 - RNA, 20 nt, Human
ucagccuccugaguaguugg

SEQ ID NO: 517674 - RNA, 22 nt, Human
uccaagaucccuaacacugucu

SEQ ID NO: 517675 - RNA, 18 nt, Human
uccaucacauuacauuca

SEQ ID NO: 517676 - RNA, 20 nt, Human
uccaucacauuacauucaca

SEQ ID NO: 517677 - RNA, 25 nt, Human
uccccaagcugaaacaccagaagag

SEQ ID NO: 517678 - RNA, 24 nt, Human
uccugaguaguugggauuacaggc

SEQ ID NO: 517679 - RNA, 18 nt, Human
ucgcacaggcuggagugc

SEQ ID NO: 517680 - RNA, 22 nt, Human
ucgcucuugucgcacaggcugg

SEQ ID NO: 517681 - RNA, 22 nt, Human
ucuaaaccccaaucucacagca

SEQ ID NO: 517682 - RNA, 21 nt, Human
ucugcccuuccuuugggccag

SEQ ID NO: 517683 - RNA, 23 nt, Human
ucuugcggucaggucacgccgcc

SEQ ID NO: 517684 - RNA, 21 nt, Human
ugacacaauggaaaauaggcc

SEQ ID NO: 517685 - RNA, 21 nt, Human
ugcaaagaaugaaauguggcc

SEQ ID NO: 517686 - RNA, 25 nt, Human
ugcuucauuccuucagguugaggua

SEQ ID NO: 517687 - RNA, 22 nt, Human
uggaauuacagucgugagccac

SEQ ID NO: 517688 - RNA, 22 nt, Human
uggaauuacagucgugagccac

SEQ ID NO: 517689 - RNA, 24 nt, Human
uggaauuacagucgugagccacug

SEQ ID NO: 517690 - RNA, 19 nt, Human
uggagugcaauggcgugau

SEQ ID NO: 517691 - RNA, 23 nt, Human
uggagugcaauggcgugaucucg

SEQ ID NO: 517692 - RNA, 23 nt, Human
uggauuagcaaagcugcaaagaa

SEQ ID NO: 517693 - RNA, 23 nt, Human
uggccaggcuggucuccggaccu

SEQ ID NO: 517694 - RNA, 21 nt, Human
uggcgugaucucgacucaccg

SEQ ID NO: 517695 - RNA, 21 nt, Human
ugggauuacaggcgcccgcca

SEQ ID NO: 517696 - RNA, 22 nt, Human
ugggauuacaggcgcccgccac

SEQ ID NO: 517697 - RNA, 24 nt, Human
ugggauuacaggcgcccgccacca

SEQ ID NO: 517698 - RNA, 23 nt, Human
uggguucaagugauucucuagcc

SEQ ID NO: 517699 - RNA, 20 nt, Human
uggguucaagugauucucuu

SEQ ID NO: 517700 - RNA, 18 nt, Human
ugucgcacaggcuggagu

SEQ ID NO: 517701 - RNA, 22 nt, Human
ugucgcacaggcuggagugcaa

SEQ ID NO: 517702 - RNA, 19 nt, Human
uuaaugugaauaacagaug

SEQ ID NO: 517703 - RNA, 21 nt, Human
uuauguucucugcccuuccuu

SEQ ID NO: 517704 - RNA, 23 nt, Human
uucaagugauucucuagccucag

SEQ ID NO: 517705 - RNA, 18 nt, Human
uuggucccacaccccauc

SEQ ID NO: 517706 - RNA, 24 nt, Human
uuucaccauguuggccaggcuggu

SEQ ID NO: 517707 - RNA, 24 nt, Human
uuucgcucuugucgcacaggcugg

SEQ ID NO: 517708 - RNA, 24 nt, Human
uuucuaguagagacaggguuucac

SEQ ID NO: 517709 - RNA, 20 nt, Human
uuuuuccucuccaaguucuu

SEQ ID NO: 517710 - RNA, 20 nt, Human
uuuuuguauuucuaguagag

SEQ ID NO: 517711 - RNA, 23 nt, Human
uuuuuguauuucuaguagagaca

SEQ ID NO: 517712 - RNA, 19 nt, Human
acccuuuucuaaaguaugu

SEQ ID NO: 517713 - RNA, 19 nt, Human
aggcaaagacaagaaaaga

SEQ ID NO: 517714 - RNA, 20 nt, Human
caaguaauuuuaugcugcua

SEQ ID NO: 517715 - RNA, 19 nt, Human
gguccccuuuaauuugccu

SEQ ID NO: 517716 - RNA, 23 nt, Human
uaagcaauuuuuuucaauuauaa

SEQ ID NO: 517717 - RNA, 22 nt, Human
uccccuuuaauuugccuuauug

SEQ ID NO: 517718 - RNA, 20 nt, Human
ucuaaaguauguucuuccaa

SEQ ID NO: 517719 - RNA, 21 nt, Human
uuuauuguucauuuuccaacc

SEQ ID NO: 517720 - RNA, 23 nt, Human
uuuuuuuuuuuuuuuuccacuag

SEQ ID NO: 517721 - RNA, 22 nt, Human
uuuuuuuuuuuuuuuuuccacu

SEQ ID NO: 517722 - RNA, 24 nt, Human
uuuuuuuuuuuuuuuuuccacuag

SEQ ID NO: 517723 - RNA, 20 nt, Human
aaaaagcgaaagcuaggccu

SEQ ID NO: 517724 - RNA, 28 nt, Human
aaaggcaggcgcuuggcuucccaagggg

SEQ ID NO: 517725 - RNA, 19 nt, Human
aaagugaacaaaugagagu

SEQ ID NO: 517726 - RNA, 21 nt, Human
aagaagaggccaauuugagga

SEQ ID NO: 517727 - RNA, 21 nt, Human
aagaggaaugagcugggccua

SEQ ID NO: 517728 - RNA, 23 nt, Human
aaggccacagugaggcaugagcg

SEQ ID NO: 517729 - RNA, 20 nt, Human
acacagcagggaggaagagc

SEQ ID NO: 517730 - RNA, 24 nt, Human
accaaaaggcaggagcugggccug

SEQ ID NO: 517731 - RNA, 23 nt, Human
agaaaauuuugagccuacaaagg

SEQ ID NO: 517732 - RNA, 22 nt, Human
agacacagcagggaggaagagc

SEQ ID NO: 517733 - RNA, 24 nt, Human
agaggcaucaacuggaccuaaaca

SEQ ID NO: 517734 - RNA, 19 nt, Human
agaggccauugucaggcag

SEQ ID NO: 517735 - RNA, 27 nt, Human
agaggcugacugggggaaguucuggga

SEQ ID NO: 517736 - RNA, 19 nt, Human
agaucugagguaggagaug

SEQ ID NO: 517737 - RNA, 18 nt, Human
agcagggccugcagaggc

SEQ ID NO: 517738 - RNA, 22 nt, Human
agcuggaucuggaagaggcaac

SEQ ID NO: 517739 - RNA, 27 nt, Human
agcuggguguggagagucccgugugug

SEQ ID NO: 517740 - RNA, 21 nt, Human
aggaagagcucggccugcaga

SEQ ID NO: 517741 - RNA, 22 nt, Human
aggaaugagcugggccuaaaca

SEQ ID NO: 517742 - RNA, 21 nt, Human
aggaggcagcaacugggccua

SEQ ID NO: 517743 - RNA, 18 nt, Human
aggcaagagaugggccug

SEQ ID NO: 517744 - RNA, 18 nt, Human
aggcaagagcaaaaccag

SEQ ID NO: 517745 - RNA, 19 nt, Human
aggcaagagcaaaaccaga

SEQ ID NO: 517746 - RNA, 24 nt, Human
aggcaagagcaaaaccagaagagg

SEQ ID NO: 517747 - RNA, 21 nt, Human
aggcaagaggugggacuggaa

SEQ ID NO: 517748 - RNA, 23 nt, Human
aggcaagaggugggacuggaagg

SEQ ID NO: 517749 - RNA, 18 nt, Human
aggcaugagcugggccug

SEQ ID NO: 517750 - RNA, 18 nt, Human
aggccaccaggagcuggg

SEQ ID NO: 517751 - RNA, 23 nt, Human
aggcugcugggaggcaggcggga

SEQ ID NO: 517752 - RNA, 18 nt, Human
agggaaaaacugggccug

SEQ ID NO: 517753 - RNA, 19 nt, Human
aguucugggccuggagagg

SEQ ID NO: 517754 - RNA, 22 nt, Human
caaaaccagaagaggcuaccau

SEQ ID NO: 517755 - RNA, 25 nt, Human
caacaggcaaaagcugggccuggag

SEQ ID NO: 517756 - RNA, 19 nt, Human
caacuggaggacgauuugg

SEQ ID NO: 517757 - RNA, 19 nt, Human
caagagaugggccuggaga

SEQ ID NO: 517758 - RNA, 20 nt, Human
caagagcagggccugcagag

SEQ ID NO: 517759 - RNA, 24 nt, Human
caaguucugggccugaagaggcca

SEQ ID NO: 517760 - RNA, 18 nt, Human
caccaaaaggcaggagcu

SEQ ID NO: 517761 - RNA, 20 nt, Human
caccaagucaaaagcagggc

SEQ ID NO: 517762 - RNA, 21 nt, Human
caccaagucaaaagcagggcc

SEQ ID NO: 517763 - RNA, 23 nt, Human
caccaagucaaaagcagggccug

SEQ ID NO: 517764 - RNA, 18 nt, Human
cacugugaggcagaagau

SEQ ID NO: 517765 - RNA, 22 nt, Human
cagaagaggcuaccaugaggca

SEQ ID NO: 517766 - RNA, 19 nt, Human
caguaggccuggagagcuu

SEQ ID NO: 517767 - RNA, 21 nt, Human
cagugugaggcagaagcuggg

SEQ ID NO: 517768 - RNA, 21 nt, Human
cagugugaggcaggagcuggg

SEQ ID NO: 517769 - RNA, 20 nt, Human
cauugucaggcaggagcugg

SEQ ID NO: 517770 - RNA, 18 nt, Human
ccagaagaggcuaccaug

SEQ ID NO: 517771 - RNA, 23 nt, Human
ccaugaggcaaaagaugggccuu

SEQ ID NO: 517772 - RNA, 21 nt, Human
ccuaaacaagccauugugagg

SEQ ID NO: 517773 - RNA, 18 nt, Human
ccugcagaggaugccagg

SEQ ID NO: 517774 - RNA, 20 nt, Human
ccugcagagguugcugggag

SEQ ID NO: 517775 - RNA, 20 nt, Human
cgaggcaggagaaaagccug

SEQ ID NO: 517776 - RNA, 23 nt, Human
cgccaaaagggaaaaacugggcc

SEQ ID NO: 517777 - RNA, 20 nt, Human
cuaggccuggaaaggccaca

SEQ ID NO: 517778 - RNA, 19 nt, Human
cuggaaaaaccaacuggag

SEQ ID NO: 517779 - RNA, 22 nt, Human
cuggagaggccauugucaggca

SEQ ID NO: 517780 - RNA, 18 nt, Human
cuggagagggagcuaaga

SEQ ID NO: 517781 - RNA, 18 nt, Human
cugggccuaaagaggccg

SEQ ID NO: 517782 - RNA, 22 nt, Human
cugggccugaagaggccaccaa

SEQ ID NO: 517783 - RNA, 22 nt, Human
cugggccuggagaggccgccaa

SEQ ID NO: 517784 - RNA, 23 nt, Human
gagcggggccuaaagaggucauu

SEQ ID NO: 517785 - RNA, 26 nt, Human
gagcugggccuggaaagccugcugcg

SEQ ID NO: 517786 - RNA, 21 nt, Human
gaggcaagagcaaaaccagaa

SEQ ID NO: 517787 - RNA, 19 nt, Human
gaggcaugagcugggccug

SEQ ID NO: 517788 - RNA, 23 nt, Human
gaggcugacuugaguucaaguuc

SEQ ID NO: 517789 - RNA, 18 nt, Human
gcaggagaaaagccugga

SEQ ID NO: 517790 - RNA, 19 nt, Human
gccgaaaggcaggaaccug

SEQ ID NO: 517791 - RNA, 22 nt, Human
gccuaaacaggccaguaugaga

SEQ ID NO: 517792 - RNA, 24 nt, Human
gcgaggcaggagaaaagccuggag

SEQ ID NO: 517793 - RNA, 20 nt, Human
ggaaaaaccaacuggaggac

SEQ ID NO: 517794 - RNA, 28 nt, Human
ggaaaaaccaacuggaggacgauuuggg

SEQ ID NO: 517795 - RNA, 19 nt, Human
ggaaccuggucagaggagg

SEQ ID NO: 517796 - RNA, 18 nt, Human
ggaaggccaccaugaggc

SEQ ID NO: 517797 - RNA, 19 nt, Human
ggaaguucugggccuggag

SEQ ID NO: 517798 - RNA, 21 nt, Human
ggaccuaaacaagccauugug

SEQ ID NO: 517799 - RNA, 18 nt, Human
ggaggaaguuuugcaccu

SEQ ID NO: 517800 - RNA, 24 nt, Human
ggaggcagaucugagguaggagaa

SEQ ID NO: 517801 - RNA, 20 nt, Human
ggcaggagcuggguguguag

SEQ ID NO: 517802 - RNA, 21 nt, Human
ggcaugagcguggccuacaaa

SEQ ID NO: 517803 - RNA, 22 nt, Human
ggccaccaagucaaaagcaggg

SEQ ID NO: 517804 - RNA, 23 nt, Human
ggccuaaacaggccaguaugaga

SEQ ID NO: 517805 - RNA, 18 nt, Human
ggccuaaagaggucauug

SEQ ID NO: 517806 - RNA, 22 nt, Human
gggaggaaguuuugcaccugga

SEQ ID NO: 517807 - RNA, 18 nt, Human
ggucagaggaggccaugg

SEQ ID NO: 517808 - RNA, 19 nt, Human
ggugggacuggaaggugca

SEQ ID NO: 517809 - RNA, 23 nt, Human
guaagagagaccaccaugagaca

SEQ ID NO: 517810 - RNA, 18 nt, Human
guccagggaagcuuuagg

SEQ ID NO: 517811 - RNA, 20 nt, Human
gugaggcagaagcugggccg

SEQ ID NO: 517812 - RNA, 21 nt, Human
gugaggcagaugcugggccug

SEQ ID NO: 517813 - RNA, 19 nt, Human
gugcacugugagguagagg

SEQ ID NO: 517814 - RNA, 18 nt, Human
guggagaguccgcuguga

SEQ ID NO: 517815 - RNA, 22 nt, Human
uaaagugaacaaaugagagucc

SEQ ID NO: 517816 - RNA, 22 nt, Human
uaaagugaacaaaugagagucc

SEQ ID NO: 517817 - RNA, 20 nt, Human
uagaggcugccgaaaggcag

SEQ ID NO: 517818 - RNA, 20 nt, Human
uagaggcugcugaaaggcag

SEQ ID NO: 517819 - RNA, 21 nt, Human
ucuucagaggccaccaggagg

SEQ ID NO: 517820 - RNA, 22 nt, Human
ugaaaggcaggcgcuuggcuug

SEQ ID NO: 517821 - RNA, 20 nt, Human
ugagaaggccaccaagaggc

SEQ ID NO: 517822 - RNA, 19 nt, Human
ugaggcaaaagaugggccu

SEQ ID NO: 517823 - RNA, 20 nt, Human
ugaggcaagagaugggccuc

SEQ ID NO: 517824 - RNA, 20 nt, Human
ugaggcaagagaugggccug

SEQ ID NO: 517825 - RNA, 23 nt, Human
ugaggcaagagcaaaaccagaag

SEQ ID NO: 517826 - RNA, 20 nt, Human
ugaggcaagagcugggccug

SEQ ID NO: 517827 - RNA, 19 nt, Human
ugaggcaagaggugggacu

SEQ ID NO: 517828 - RNA, 19 nt, Human
ugaggcaagaggugggacu

SEQ ID NO: 517829 - RNA, 18 nt, Human
ugaggcagaagaugggcc

SEQ ID NO: 517830 - RNA, 18 nt, Human
ugaggcagaagaugggcc

SEQ ID NO: 517831 - RNA, 18 nt, Human
ugaggcagaugcugggcc

SEQ ID NO: 517832 - RNA, 18 nt, Human
ugaggcaggagcugggcc

SEQ ID NO: 517833 - RNA, 20 nt, Human
ugaggcaggagcugggccug

SEQ ID NO: 517834 - RNA, 20 nt, Human
ugaggcaggaguugggccug

SEQ ID NO: 517835 - RNA, 22 nt, Human
ugagguaggagaugggcguagu

SEQ ID NO: 517836 - RNA, 21 nt, Human
ugaguccaaggagguuguugu

SEQ ID NO: 517837 - RNA, 23 nt, Human
ugauuugggccugcagagguugc

SEQ ID NO: 517838 - RNA, 21 nt, Human
ugccagaggcaucaacuggac

SEQ ID NO: 517839 - RNA, 19 nt, Human
ugccgaaaggcaggaaccu

SEQ ID NO: 517840 - RNA, 21 nt, Human
ugcugggaggaagagcugggc

SEQ ID NO: 517841 - RNA, 20 nt, Human
uggaagaggcaacugugagg

SEQ ID NO: 517842 - RNA, 19 nt, Human
uggagaggcugacuggggg

SEQ ID NO: 517843 - RNA, 21 nt, Human
uggcaggagcuggguguguag

SEQ ID NO: 517844 - RNA, 26 nt, Human
uggcaggagcuggguguguagaggcu

SEQ ID NO: 517845 - RNA, 22 nt, Human
uggccaaaaagcgaaagcuagg

SEQ ID NO: 517846 - RNA, 24 nt, Human
uggccggggaaggccaccaugagg

SEQ ID NO: 517847 - RNA, 21 nt, Human
ugggaggaaguuuugcaccug

SEQ ID NO: 517848 - RNA, 21 nt, Human
ugggaggaaguuuugcaccug

SEQ ID NO: 517849 - RNA, 21 nt, Human
ugggccuggaaagccugcugc

SEQ ID NO: 517850 - RNA, 18 nt, Human
ugggccuggaaaggccgu

SEQ ID NO: 517851 - RNA, 21 nt, Human
ugggccuggacagguugccag

SEQ ID NO: 517852 - RNA, 18 nt, Human
ugggccuggaguggccaa

SEQ ID NO: 517853 - RNA, 21 nt, Human
ugggccuguagacacagcagg

SEQ ID NO: 517854 - RNA, 18 nt, Human
uggggaggcuacagugag

SEQ ID NO: 517855 - RNA, 22 nt, Human
uggggggccacggugaggcaga

SEQ ID NO: 517856 - RNA, 18 nt, Human
uggguggcaggagcuggg

SEQ ID NO: 517857 - RNA, 22 nt, Human
uggguggcaggagcugggugug

SEQ ID NO: 517858 - RNA, 19 nt, Human
uguaaggaaugagcggggc

SEQ ID NO: 517859 - RNA, 18 nt, Human
ugugaggcaggagcuggg

SEQ ID NO: 517860 - RNA, 18 nt, Human
ugugagguagaggcuggg

SEQ ID NO: 517861 - RNA, 19 nt, Human
uguggggggccacggugag

SEQ ID NO: 517862 - RNA, 26 nt, Human
uuuuuuuuuugaaaccacacaggggu

SEQ ID NO: 517863 - RNA, 19 nt, Human
aaacaaaaaguacaagugc

SEQ ID NO: 517864 - RNA, 20 nt, Human
aacauggcgaaaucccaucu

SEQ ID NO: 517865 - RNA, 21 nt, Human
aacauggcgaaaucccaucuc

SEQ ID NO: 517866 - RNA, 24 nt, Human
aauagcuggaacccaggaggcaga

SEQ ID NO: 517867 - RNA, 23 nt, Human
aauggcuuaugccuguaauccca

SEQ ID NO: 517868 - RNA, 23 nt, Human
accaagggacaaccccuaacccc

SEQ ID NO: 517869 - RNA, 21 nt, Human
agacaggccacaggggucccc

SEQ ID NO: 517870 - RNA, 24 nt, Human
agagccugcagugagcugagauca

SEQ ID NO: 517871 - RNA, 24 nt, Human
agccuggccaacauggcgaaaucc

SEQ ID NO: 517872 - RNA, 18 nt, Human
aggaacuuucauucaauu

SEQ ID NO: 517873 - RNA, 24 nt, Human
aggaagucccagcacaggcagauc

SEQ ID NO: 517874 - RNA, 25 nt, Human
aggaggcagagccugcagugagcug

SEQ ID NO: 517875 - RNA, 19 nt, Human
aggcagagccugcagugag

SEQ ID NO: 517876 - RNA, 20 nt, Human
aggcagagccugcagugagc

SEQ ID NO: 517877 - RNA, 24 nt, Human
aggcagagccugcagugagcugag

SEQ ID NO: 517878 - RNA, 24 nt, Human
aggcaggacaauagcuggaaccca

SEQ ID NO: 517879 - RNA, 30 nt, Human
aggccgggcacaauggcuuaugccuguaaa

SEQ ID NO: 517880 - RNA, 22 nt, Human
aggggguggaggauucuggagg

SEQ ID NO: 517881 - RNA, 23 nt, Human
aucacccauugcacuccagccug

SEQ ID NO: 517882 - RNA, 18 nt, Human
aucagacacuugaucuca

SEQ ID NO: 517883 - RNA, 18 nt, Human
auugcacuccagccuggg

SEQ ID NO: 517884 - RNA, 21 nt, Human
caagggacaaccccuaacccc

SEQ ID NO: 517885 - RNA, 22 nt, Human
caauagcuggaacccaggaggc

SEQ ID NO: 517886 - RNA, 25 nt, Human
cacacgccaccuuuccuuuuuuaca

SEQ ID NO: 517887 - RNA, 22 nt, Human
cacaggcagaucugcugacgcc

SEQ ID NO: 517888 - RNA, 25 nt, Human
cacaggccgggcacaauggcuuaug

SEQ ID NO: 517889 - RNA, 23 nt, Human
caccuggaaucccagcuacucgg

SEQ ID NO: 517890 - RNA, 24 nt, Human
caccuggaaucccagcuacucggg

SEQ ID NO: 517891 - RNA, 24 nt, Human
cacuccagccugggaaacaagagc

SEQ ID NO: 517892 - RNA, 21 nt, Human
cacuuuggccaaggucaggag

SEQ ID NO: 517893 - RNA, 21 nt, Human
cagcacaagcgcaucaaugaa

SEQ ID NO: 517894 - RNA, 24 nt, Human
cagcacaggcagaucugcugacgc

SEQ ID NO: 517895 - RNA, 24 nt, Human
cagcuacucgggaggcugaggcag

SEQ ID NO: 517896 - RNA, 20 nt, Human
caggaguuggagaacagccu

SEQ ID NO: 517897 - RNA, 20 nt, Human
caggcagaucugcugacgcc

SEQ ID NO: 517898 - RNA, 18 nt, Human
cauaaaaauuagccaggc

SEQ ID NO: 517899 - RNA, 22 nt, Human
cauucaauuaaagcuucuagga

SEQ ID NO: 517900 - RNA, 18 nt, Human
cauugcacuccagccugg

SEQ ID NO: 517901 - RNA, 19 nt, Human
cauugcacuccagccuggg

SEQ ID NO: 517902 - RNA, 19 nt, Human
cauugcacuccagccuggg

SEQ ID NO: 517903 - RNA, 23 nt, Human
cauugcacuccagccugggaaac

SEQ ID NO: 517904 - RNA, 24 nt, Human
cauugcacuccagccugggaaaca

SEQ ID NO: 517905 - RNA, 21 nt, Human
ccagcaaugugaugcuuacag

SEQ ID NO: 517906 - RNA, 19 nt, Human
ccauugcacuccagccugg

SEQ ID NO: 517907 - RNA, 20 nt, Human
ccauugcacuccagccuggg

SEQ ID NO: 517908 - RNA, 24 nt, Human
ccauugcacuccagccugggaaac

SEQ ID NO: 517909 - RNA, 19 nt, Human
cccaucucuacuaaaaaca

SEQ ID NO: 517910 - RNA, 24 nt, Human
cccauugcacuccagccugggaaa

SEQ ID NO: 517911 - RNA, 20 nt, Human
ccccagggaggaucaggggg

SEQ ID NO: 517912 - RNA, 21 nt, Human
ccuaguaccaggccuccccuc

SEQ ID NO: 517913 - RNA, 24 nt, Human
ccuggccaacauggcgaaauccca

SEQ ID NO: 517914 - RNA, 23 nt, Human
ccugggaaacaagagcaagacuc

SEQ ID NO: 517915 - RNA, 20 nt, Human
ccuguaaucccaacacuuug

SEQ ID NO: 517916 - RNA, 25 nt, Human
ccuuggccuugaggaagucaucuua

SEQ ID NO: 517917 - RNA, 23 nt, Human
cucaaacaaacaaacaaaaagua

SEQ ID NO: 517918 - RNA, 24 nt, Human
cucagugagacaggccacaggggu

SEQ ID NO: 517919 - RNA, 20 nt, Human
cucauauucugguuuguauu

SEQ ID NO: 517920 - RNA, 23 nt, Human
cucuguucuggaccuguuuuuuc

SEQ ID NO: 517921 - RNA, 20 nt, Human
cugcagugagcugagaucac

SEQ ID NO: 517922 - RNA, 26 nt, Human
cugcagugagcugagaucacccauug

SEQ ID NO: 517923 - RNA, 19 nt, Human
cuggagguuuccagccuug

SEQ ID NO: 517924 - RNA, 23 nt, Human
cuggccaacauggcgaaauccca

SEQ ID NO: 517925 - RNA, 23 nt, Human
gacaauagcuggaacccaggagg

SEQ ID NO: 517926 - RNA, 20 nt, Human
gagcaagacucaaucucaaa

SEQ ID NO: 517927 - RNA, 19 nt, Human
gaggagaaaccagcccaac

SEQ ID NO: 517928 - RNA, 24 nt, Human
gccaacauggcgaaaucccaucuc

SEQ ID NO: 517929 - RNA, 25 nt, Human
gccuccccucccacgauucaaagac

SEQ ID NO: 517930 - RNA, 19 nt, Human
gccuguaaucccaacacuu

SEQ ID NO: 517931 - RNA, 21 nt, Human
ggacaauagcuggaacccagg

SEQ ID NO: 517932 - RNA, 22 nt, Human
ggacucccuuguacagcagccc

SEQ ID NO: 517933 - RNA, 23 nt, Human
ggccgggcacaauggcuuaugcc

SEQ ID NO: 517934 - RNA, 20 nt, Human
ggcuuaugccuguaauccca

SEQ ID NO: 517935 - RNA, 19 nt, Human
gggacaaccccuaaccccu

SEQ ID NO: 517936 - RNA, 25 nt, Human
gggcucugugguuccucaaagaggu

SEQ ID NO: 517937 - RNA, 20 nt, Human
guauuugaagccugcuaaua

SEQ ID NO: 517938 - RNA, 21 nt, Human
gucaagacuacuguccaaggu

SEQ ID NO: 517939 - RNA, 20 nt, Human
gugaugagggccacugcugc

SEQ ID NO: 517940 - RNA, 24 nt, Human
gugccacgaugaaauuaaaaacac

SEQ ID NO: 517941 - RNA, 18 nt, Human
uaaaaacacaggccgggc

SEQ ID NO: 517942 - RNA, 21 nt, Human
uaaaaacacaggccgggcaca

SEQ ID NO: 517943 - RNA, 19 nt, Human
uaaaaauuagccaggcaca

SEQ ID NO: 517944 - RNA, 18 nt, Human
uaagauccuggagaagcc

SEQ ID NO: 517945 - RNA, 24 nt, Human
uacacugaggcuugaucagacacu

SEQ ID NO: 517946 - RNA, 21 nt, Human
uacauggcagacuagcugugu

SEQ ID NO: 517947 - RNA, 25 nt, Human
uaccaggccuccccucccacgauuc

SEQ ID NO: 517948 - RNA, 21 nt, Human
uaccuccugaauuaagauccu

SEQ ID NO: 517949 - RNA, 23 nt, Human
uaggaacuuuaacauccuccuuu

SEQ ID NO: 517950 - RNA, 20 nt, Human
uaugccuguaaucccaacac

SEQ ID NO: 517951 - RNA, 21 nt, Human
ucaaucucaaacaaacaaaca

SEQ ID NO: 517952 - RNA, 21 nt, Human
ucagcacaagcgcaucaauga

SEQ ID NO: 517953 - RNA, 24 nt, Human
uccagcaucaggaacucuguucug

SEQ ID NO: 517954 - RNA, 21 nt, Human
ucccagcacaggcagaucugc

SEQ ID NO: 517955 - RNA, 20 nt, Human
ucccuuguacagcagcccag

SEQ ID NO: 517956 - RNA, 21 nt, Human
ucucaagcuccauucuaccuc

SEQ ID NO: 517957 - RNA, 23 nt, Human
ucucuacuaaaaacauaaaaauu

SEQ ID NO: 517958 - RNA, 22 nt, Human
ucucugauccucaugauccauu

SEQ ID NO: 517959 - RNA, 23 nt, Human
ucuggcaugagauuuuccuccag

SEQ ID NO: 517960 - RNA, 18 nt, Human
ucugguuuguauuugaag

SEQ ID NO: 517961 - RNA, 18 nt, Human
ucuguucuggaccuguuu

SEQ ID NO: 517962 - RNA, 19 nt, Human
ucuguucuggaccuguuuu

SEQ ID NO: 517963 - RNA, 20 nt, Human
ugaaauuaaaaacacaggcc

SEQ ID NO: 517964 - RNA, 21 nt, Human
ugaaauuaaaaacacaggccg

SEQ ID NO: 517965 - RNA, 19 nt, Human
ugaauuaagauccuggaga

SEQ ID NO: 517966 - RNA, 22 nt, Human
ugagacaggccacagggguccc

SEQ ID NO: 517967 - RNA, 20 nt, Human
ugagaucacccauugcacuc

SEQ ID NO: 517968 - RNA, 23 nt, Human
ugagaucacccauugcacuccag

SEQ ID NO: 517969 - RNA, 20 nt, Human
ugagccugauaagaaaguug

SEQ ID NO: 517970 - RNA, 19 nt, Human
ugaggcaggacaauagcug

SEQ ID NO: 517971 - RNA, 24 nt, Human
ugaggcaggacaauagcuggaacc

SEQ ID NO: 517972 - RNA, 25 nt, Human
ugaggcaggacaauagcuggaaccc

SEQ ID NO: 517973 - RNA, 18 nt, Human
ugaggguacugagcucca

SEQ ID NO: 517974 - RNA, 23 nt, Human
ugccuguaaucccaacacuuugg

SEQ ID NO: 517975 - RNA, 21 nt, Human
uggauguuugcuggggaccuc

SEQ ID NO: 517976 - RNA, 19 nt, Human
uggcagcacucccgauguc

SEQ ID NO: 517977 - RNA, 21 nt, Human
uggcaugagauuuuccuccag

SEQ ID NO: 517978 - RNA, 24 nt, Human
uggcuuaugccuguaaucccaaca

SEQ ID NO: 517979 - RNA, 18 nt, Human
ugggcaagugacuuuucc

SEQ ID NO: 517980 - RNA, 19 nt, Human
uggggucuccauuucccug

SEQ ID NO: 517981 - RNA, 21 nt, Human
ugguuuguauuugaagccugc

SEQ ID NO: 517982 - RNA, 21 nt, Human
uguauuugaagccugcuaaua

SEQ ID NO: 517983 - RNA, 23 nt, Human
ugucagcaauaaguucacuggca

SEQ ID NO: 517984 - RNA, 23 nt, Human
ugugaugagggccacugcugcug

SEQ ID NO: 517985 - RNA, 20 nt, Human
uucaccauuccccuagaaca

SEQ ID NO: 517986 - RNA, 20 nt, Human
uucacuggcauuccugcagg

SEQ ID NO: 517987 - RNA, 20 nt, Human
uuggggucuccauuucccug

SEQ ID NO: 517988 - RNA, 22 nt, Human
uuuuuacauggcagacuagcug

SEQ ID NO: 517989 - RNA, 23 nt, Human
aaacaggacuggaacccaggacu

SEQ ID NO: 517990 - RNA, 18 nt, Human
aaagugcugggauuacaa

SEQ ID NO: 517991 - RNA, 24 nt, Human
aaagugcugggauuacaaauguga

SEQ ID NO: 517992 - RNA, 20 nt, Human
aacaggacuggaacccagga

SEQ ID NO: 517993 - RNA, 18 nt, Human
aagacugcggccaacuug

SEQ ID NO: 517994 - RNA, 24 nt, Human
aagcaaucccgccucagccuccca

SEQ ID NO: 517995 - RNA, 21 nt, Human
aagcagucaggauggaacuga

SEQ ID NO: 517996 - RNA, 20 nt, Human
aagcauggauggacucaagg

SEQ ID NO: 517997 - RNA, 26 nt, Human
aagugcugggauuacaaaugugaacc

SEQ ID NO: 517998 - RNA, 21 nt, Human
accacccguuauaaucauccc

SEQ ID NO: 517999 - RNA, 18 nt, Human
acuacaggugugugccac

SEQ ID NO: 518000 - RNA, 18 nt, Human
acugcccagacccucagc

SEQ ID NO: 518001 - RNA, 23 nt, Human
acuggucuggaacuccugggcuc

SEQ ID NO: 518002 - RNA, 19 nt, Human
aggaauugagaucuucagg

SEQ ID NO: 518003 - RNA, 20 nt, Human
aggcaggguuucacuacguu

SEQ ID NO: 518004 - RNA, 23 nt, Human
aggcaggguuucacuacguugcc

SEQ ID NO: 518005 - RNA, 23 nt, Human
agggucuugcuauacugcccagg

SEQ ID NO: 518006 - RNA, 22 nt, Human
aguaauggcaaacaggacugga

SEQ ID NO: 518007 - RNA, 24 nt, Human
caaagugcugggauuacaaaugug

SEQ ID NO: 518008 - RNA, 20 nt, Human
caaaugugaaccacugugcc

SEQ ID NO: 518009 - RNA, 22 nt, Human
caaggaguucacaaaccacugg

SEQ ID NO: 518010 - RNA, 22 nt, Human
caagugauucuucuaccuuggc

SEQ ID NO: 518011 - RNA, 22 nt, Human
cacaugaaacagagggccuggg

SEQ ID NO: 518012 - RNA, 18 nt, Human
cacccguuauaaucaucc

SEQ ID NO: 518013 - RNA, 20 nt, Human
cacuccccaccccaaccuuu

SEQ ID NO: 518014 - RNA, 23 nt, Human
cagaguccauccuuuuucuuuuc

SEQ ID NO: 518015 - RNA, 19 nt, Human
cagcagccuccuaagaaca

SEQ ID NO: 518016 - RNA, 24 nt, Human
cagcucccugccuaccaucugccc

SEQ ID NO: 518017 - RNA, 18 nt, Human
caggguuucacuacguug

SEQ ID NO: 518018 - RNA, 22 nt, Human
cagguaggacaugacccugcca

SEQ ID NO: 518019 - RNA, 18 nt, Human
cauggauggacucaaggu

SEQ ID NO: 518020 - RNA, 18 nt, Human
cauuaugugcuaagggcu

SEQ ID NO: 518021 - RNA, 21 nt, Human
ccaaagugcugggauuacaaa

SEQ ID NO: 518022 - RNA, 21 nt, Human
ccaaagugcugggauuacaaa

SEQ ID NO: 518023 - RNA, 22 nt, Human
ccaaagugcugggauuacaaau

SEQ ID NO: 518024 - RNA, 24 nt, Human
ccaaagugcugggauuacaaaugu

SEQ ID NO: 518025 - RNA, 24 nt, Human
ccaacuagcagagaauucuuaaca

SEQ ID NO: 518026 - RNA, 25 nt, Human
ccaagcccaacuugcuguaucagaa

SEQ ID NO: 518027 - RNA, 19 nt, Human
ccauguagcugggacuaca

SEQ ID NO: 518028 - RNA, 18 nt, Human
cccacacuggucuggaac

SEQ ID NO: 518029 - RNA, 26 nt, Human
cccccagcucccugccuaccaucugc

SEQ ID NO: 518030 - RNA, 22 nt, Human
ccuaagaacaccuguagucuca

SEQ ID NO: 518031 - RNA, 24 nt, Human
ccucaucucuucacuuuucuccag

SEQ ID NO: 518032 - RNA, 23 nt, Human
ccugccuaccaucugcccagggg

SEQ ID NO: 518033 - RNA, 22 nt, Human
ccugggcucaagugauucuucu

SEQ ID NO: 518034 - RNA, 19 nt, Human
ccuugcuguugcuuacuua

SEQ ID NO: 518035 - RNA, 20 nt, Human
cgcuuuauucuuuuuaugag

SEQ ID NO: 518036 - RNA, 21 nt, Human
cgcuuuauucuuuuuaugaga

SEQ ID NO: 518037 - RNA, 22 nt, Human
cuaagaacaccuguagucucac

SEQ ID NO: 518038 - RNA, 24 nt, Human
cuagcagagaauucuuaacaagcc

SEQ ID NO: 518039 - RNA, 21 nt, Human
cucaagcaaucccgccucagc

SEQ ID NO: 518040 - RNA, 20 nt, Human
cucaagugauucuucuaccu

SEQ ID NO: 518041 - RNA, 24 nt, Human
cucaagugauucuucuaccuuggc

SEQ ID NO: 518042 - RNA, 23 nt, Human
cucaccaugaaugucaccccaga

SEQ ID NO: 518043 - RNA, 24 nt, Human
cucagccucccauguagcugggac

SEQ ID NO: 518044 - RNA, 24 nt, Human
cuccagcagccuccuaagaacacc

SEQ ID NO: 518045 - RNA, 23 nt, Human
cuccaggaccacuacuuuagccu

SEQ ID NO: 518046 - RNA, 23 nt, Human
cucccauguagcugggacuacag

SEQ ID NO: 518047 - RNA, 20 nt, Human
cuccugggcucaagugauuc

SEQ ID NO: 518048 - RNA, 21 nt, Human
cuccugggcucaagugauucu

SEQ ID NO: 518049 - RNA, 18 nt, Human
cucuuccacaucccccag

SEQ ID NO: 518050 - RNA, 25 nt, Human
cugaggauagagacuuuuuucucac

SEQ ID NO: 518051 - RNA, 19 nt, Human
cugcaugccuguuccugcc

SEQ ID NO: 518052 - RNA, 21 nt, Human
cugggucuuguuugaccuagg

SEQ ID NO: 518053 - RNA, 23 nt, Human
gacuacaggugugugccacugca

SEQ ID NO: 518054 - RNA, 24 nt, Human
gagggucuugcuauacugcccagg

SEQ ID NO: 518055 - RNA, 20 nt, Human
gccucagccucccauguagc

SEQ ID NO: 518056 - RNA, 23 nt, Human
gccucagccucccauguagcugg

SEQ ID NO: 518057 - RNA, 21 nt, Human
ggaaacugggcagguaugagc

SEQ ID NO: 518058 - RNA, 20 nt, Human
ggacuacaggugugugccac

SEQ ID NO: 518059 - RNA, 22 nt, Human
ggacuacaggugugugccacug

SEQ ID NO: 518060 - RNA, 23 nt, Human
ggcaaacaggacuggaacccagg

SEQ ID NO: 518061 - RNA, 19 nt, Human
ggcacuuucuacuuucuuc

SEQ ID NO: 518062 - RNA, 22 nt, Human
gggcucaagugauucuucuacc

SEQ ID NO: 518063 - RNA, 22 nt, Human
guagcugggacuacaggugugu

SEQ ID NO: 518064 - RNA, 19 nt, Human
gugaaccacugugccuggc

SEQ ID NO: 518065 - RNA, 18 nt, Human
guggauccugccaucugu

SEQ ID NO: 518066 - RNA, 18 nt, Human
uaaaagggugaaaagugg

SEQ ID NO: 518067 - RNA, 23 nt, Human
uaacagaguccauccuuuuucuu

SEQ ID NO: 518068 - RNA, 24 nt, Human
uacguugcccacacuggucuggaa

SEQ ID NO: 518069 - RNA, 21 nt, Human
uagacugcccagacccucagc

SEQ ID NO: 518070 - RNA, 24 nt, Human
uaggacaugacccugccaaggagu

SEQ ID NO: 518071 - RNA, 23 nt, Human
uaggaggaagcuaacauguaaug

SEQ ID NO: 518072 - RNA, 23 nt, Human
uauacugcccaggcuggacucaa

SEQ ID NO: 518073 - RNA, 19 nt, Human
uaucuggaccaucccugcu

SEQ ID NO: 518074 - RNA, 24 nt, Human
uaugugcuaagggcuauacauggu

SEQ ID NO: 518075 - RNA, 23 nt, Human
ucaccucuucuucucuggugaga

SEQ ID NO: 518076 - RNA, 19 nt, Human
ucacuccccaccccaaccu

SEQ ID NO: 518077 - RNA, 21 nt, Human
ucacugguacugauaauucuc

SEQ ID NO: 518078 - RNA, 24 nt, Human
ucccauguagcugggacuacaggu

SEQ ID NO: 518079 - RNA, 21 nt, Human
ucccccagcucccugccuacc

SEQ ID NO: 518080 - RNA, 25 nt, Human
ucccuggggccugaacaguugccuu

SEQ ID NO: 518081 - RNA, 23 nt, Human
uccuaagaacaccuguagucuca

SEQ ID NO: 518082 - RNA, 21 nt, Human
uccugggcucaagugauucuu

SEQ ID NO: 518083 - RNA, 23 nt, Human
uccugggcucaagugauucuucu

SEQ ID NO: 518084 - RNA, 18 nt, Human
ucucacuccccaccccaa

SEQ ID NO: 518085 - RNA, 18 nt, Human
ucucacuccccaccccaa

SEQ ID NO: 518086 - RNA, 22 nt, Human
ucuccagccucaucucuucacu

SEQ ID NO: 518087 - RNA, 23 nt, Human
ucucuggugagagucugaggaua

SEQ ID NO: 518088 - RNA, 22 nt, Human
ucucuguuaccaucuacuaccc

SEQ ID NO: 518089 - RNA, 21 nt, Human
ucuggaacuccugggcucaag

SEQ ID NO: 518090 - RNA, 23 nt, Human
ucuugcuauacugcccaggcugg

SEQ ID NO: 518091 - RNA, 24 nt, Human
ucuugcuauacugcccaggcugga

SEQ ID NO: 518092 - RNA, 20 nt, Human
ugaaaagugguuugcugaag

SEQ ID NO: 518093 - RNA, 21 nt, Human
ugaaaagugguuugcugaaga

SEQ ID NO: 518094 - RNA, 20 nt, Human
ugaggauagagacuuuuuuc

SEQ ID NO: 518095 - RNA, 20 nt, Human
ugcccaggcuggacucaagc

SEQ ID NO: 518096 - RNA, 24 nt, Human
ugcuauacugcccaggcuggacuc

SEQ ID NO: 518097 - RNA, 18 nt, Human
ugcugggauuacaaaugu

SEQ ID NO: 518098 - RNA, 23 nt, Human
ugcugggauuacaaaugugaacc

SEQ ID NO: 518099 - RNA, 23 nt, Human
uggaacccaggacuucaggccuc

SEQ ID NO: 518100 - RNA, 21 nt, Human
uggcagguaggacaugacccu

SEQ ID NO: 518101 - RNA, 21 nt, Human
ugggacuacaggugugugcca

SEQ ID NO: 518102 - RNA, 22 nt, Human
ugggacuacaggugugugccac

SEQ ID NO: 518103 - RNA, 22 nt, Human
ugggacuacaggugugugccac

SEQ ID NO: 518104 - RNA, 24 nt, Human
ugggacuacaggugugugccacug

SEQ ID NO: 518105 - RNA, 21 nt, Human
ugggagguaggguacagucuc

SEQ ID NO: 518106 - RNA, 21 nt, Human
ugggauuacaaaugugaacca

SEQ ID NO: 518107 - RNA, 22 nt, Human
ugggauuacaaaugugaaccac

SEQ ID NO: 518108 - RNA, 24 nt, Human
ugggauuacaaaugugaaccacug

SEQ ID NO: 518109 - RNA, 19 nt, Human
ugggcucaagugauucuuc

SEQ ID NO: 518110 - RNA, 25 nt, Human
uguagcugggacuacaggugugugc

SEQ ID NO: 518111 - RNA, 20 nt, Human
ugugaagguauuagaggcug

SEQ ID NO: 518112 - RNA, 24 nt, Human
uguggguaacagaguccauccuuu

SEQ ID NO: 518113 - RNA, 20 nt, Human
ugugugccacugcacccaac

SEQ ID NO: 518114 - RNA, 19 nt, Human
uuaaaaggaugauaucacc

SEQ ID NO: 518115 - RNA, 26 nt, Human
uugcugaggagcagcugcuaaagcau

SEQ ID NO: 518116 - RNA, 22 nt, Human
uuugggcacuuucuacuuucuu

SEQ ID NO: 518117 - RNA, 22 nt, Human
uuuuuuuuuucuagaggcaggg

SEQ ID NO: 518118 - RNA, 27 nt, Human
uuuuuuuuuucuagaggcaggguuuca

SEQ ID NO: 518119 - RNA, 25 nt, Human
aacaagaaaccaauuccugagacag

SEQ ID NO: 518120 - RNA, 20 nt, Human
aagaaaccaauuccugagac

SEQ ID NO: 518121 - RNA, 19 nt, Human
aaguguuaucugcagagac

SEQ ID NO: 518122 - RNA, 22 nt, Human
aaguguuaucugcagagacccu

SEQ ID NO: 518123 - RNA, 21 nt, Human
acacuauucaacaugggaaac

SEQ ID NO: 518124 - RNA, 19 nt, Human
augccuguaaucccagcac

SEQ ID NO: 518125 - RNA, 24 nt, Human
auuuggucaugccuguaaucccag

SEQ ID NO: 518126 - RNA, 21 nt, Human
caagaaaccaauuccugaggg

SEQ ID NO: 518127 - RNA, 27 nt, Human
caauuccugagacagaaacaauuggua

SEQ ID NO: 518128 - RNA, 20 nt, Human
caugccuguaaucccagcac

SEQ ID NO: 518129 - RNA, 23 nt, Human
ccaguugaggaaagacaugaaac

SEQ ID NO: 518130 - RNA, 20 nt, Human
ccgucuucccuguaggucuc

SEQ ID NO: 518131 - RNA, 18 nt, Human
ccgugacuguaggcagcg

SEQ ID NO: 518132 - RNA, 18 nt, Human
ccugagacagaaacaauu

SEQ ID NO: 518133 - RNA, 20 nt, Human
ccuguaaucccagcacuuug

SEQ ID NO: 518134 - RNA, 23 nt, Human
cguaacuccagacucugccuccc

SEQ ID NO: 518135 - RNA, 19 nt, Human
gacacagccauuggcuuua

SEQ ID NO: 518136 - RNA, 22 nt, Human
gacagaaacaauugguaaagga

SEQ ID NO: 518137 - RNA, 24 nt, Human
gagcacauuuggucaugccuguaa

SEQ ID NO: 518138 - RNA, 20 nt, Human
ggucaugccuguaaucccag

SEQ ID NO: 518139 - RNA, 26 nt, Human
guaucacagugcaacaagaaaccaau

SEQ ID NO: 518140 - RNA, 23 nt, Human
gucaugccuguaaucccagcacu

SEQ ID NO: 518141 - RNA, 25 nt, Human
gucaugccuguaaucccagcacuuu

SEQ ID NO: 518142 - RNA, 19 nt, Human
uaaagcccccuuucuuuuc

SEQ ID NO: 518143 - RNA, 30 nt, Human
uaaugaguucugccucuguuauaaagcccu

SEQ ID NO: 518144 - RNA, 23 nt, Human
uaggcagcguaacuccagacucu

SEQ ID NO: 518145 - RNA, 18 nt, Human
ucacgaggccagaaauuc

SEQ ID NO: 518146 - RNA, 23 nt, Human
ucaugccuguaaucccagcacuu

SEQ ID NO: 518147 - RNA, 21 nt, Human
ucccauggccgucuucccugu

SEQ ID NO: 518148 - RNA, 23 nt, Human
uccgugacuguaggcagcguaac

SEQ ID NO: 518149 - RNA, 21 nt, Human
ucugcagagacccuguuucca

SEQ ID NO: 518150 - RNA, 21 nt, Human
ugacuguaggcagcguaacuc

SEQ ID NO: 518151 - RNA, 20 nt, Human
ugagacagaaacaauuggua

SEQ ID NO: 518152 - RNA, 22 nt, Human
ugccuguaaucccagcacuuug

SEQ ID NO: 518153 - RNA, 20 nt, Human
uggucaugccuguaauccca

SEQ ID NO: 518154 - RNA, 21 nt, Human
uggucaugccuguaaucccag

SEQ ID NO: 518155 - RNA, 23 nt, Human
uggucaugccuguaaucccagca

SEQ ID NO: 518156 - RNA, 21 nt, Human
ugucccauggccgucuucccu

SEQ ID NO: 518157 - RNA, 24 nt, Human
uuggucaugccuguaaucccagca

SEQ ID NO: 518158 - RNA, 23 nt, Human
uuuccagcuguccuuggcauucc

SEQ ID NO: 518159 - RNA, 18 nt, Human
uuuuuuuuuuuuuuuuug

SEQ ID NO: 518160 - RNA, 24 nt, Human
aaacucacuuuaauaugagauaag

SEQ ID NO: 518161 - RNA, 24 nt, Human
aacaagaaaacauaaaugucagga

SEQ ID NO: 518162 - RNA, 22 nt, Human
aacuccaaacucacuuuaauau

SEQ ID NO: 518163 - RNA, 22 nt, Human
aagagaaauaaugguuguaacc

SEQ ID NO: 518164 - RNA, 24 nt, Human
agaacuccaaacucacuuuaauau

SEQ ID NO: 518165 - RNA, 19 nt, Human
agaggcggaccuauguaua

SEQ ID NO: 518166 - RNA, 19 nt, Human
agcaaaugaagagaaauaa

SEQ ID NO: 518167 - RNA, 24 nt, Human
agccaaaaaagaaauacuuguuga

SEQ ID NO: 518168 - RNA, 20 nt, Human
caagaaaacauaaaugucaa

SEQ ID NO: 518169 - RNA, 19 nt, Human
cucacauaugaacgaacau

SEQ ID NO: 518170 - RNA, 24 nt, Human
cugugaguccaggugguacuucca

SEQ ID NO: 518171 - RNA, 25 nt, Human
uaaauguagacugaacugaaaugaa

SEQ ID NO: 518172 - RNA, 25 nt, Human
uaaaugucaggagcuacaaacuuua

SEQ ID NO: 518173 - RNA, 23 nt, Human
uacaaacuuuaguauucagaggc

SEQ ID NO: 518174 - RNA, 23 nt, Human
uagacugaacugaaaugaacucc

SEQ ID NO: 518175 - RNA, 24 nt, Human
uccaacauauaaacaagaaaacau

SEQ ID NO: 518176 - RNA, 21 nt, Human
uccuugcuaucucccaccccc

SEQ ID NO: 518177 - RNA, 20 nt, Human
ugaaaugaacuccugugcaa

SEQ ID NO: 518178 - RNA, 21 nt, Human
ugcaaugcugcacuaaagcag

SEQ ID NO: 518179 - RNA, 21 nt, Human
uuaguauucagaggcggaccu

SEQ ID NO: 518180 - RNA, 18 nt, Human
uugcuaucucccaccccc

SEQ ID NO: 518181 - RNA, 19 nt, Human
agaauaaggauccugagaa

SEQ ID NO: 518182 - RNA, 23 nt, Human
aggugccuggagucccgcgggug

SEQ ID NO: 518183 - RNA, 28 nt, Human
aggugccuggagucccgcgggugggccg

SEQ ID NO: 518184 - RNA, 21 nt, Human
auucuuagcaaaucccucuuu

SEQ ID NO: 518185 - RNA, 24 nt, Human
caagggggacgccgggggcaggcc

SEQ ID NO: 518186 - RNA, 21 nt, Human
caccaaggaguaaagauucag

SEQ ID NO: 518187 - RNA, 21 nt, Human
ccaagccugaccuauacccag

SEQ ID NO: 518188 - RNA, 19 nt, Human
cccgggaggggucgcgggg

SEQ ID NO: 518189 - RNA, 19 nt, Human
cccucuuuuauuuuugcca

SEQ ID NO: 518190 - RNA, 21 nt, Human
ccggggucccgggaggggucg

SEQ ID NO: 518191 - RNA, 21 nt, Human
cgccgggggcaggccggcugu

SEQ ID NO: 518192 - RNA, 22 nt, Human
cgccgggggcaggccggcuguc

SEQ ID NO: 518193 - RNA, 21 nt, Human
cgggcagaagaggugccugga

SEQ ID NO: 518194 - RNA, 23 nt, Human
cgggcagaagaggugccuggagu

SEQ ID NO: 518195 - RNA, 21 nt, Human
cuagcugacuugacucccagc

SEQ ID NO: 518196 - RNA, 21 nt, Human
cugggaucaaggcugccaagc

SEQ ID NO: 518197 - RNA, 23 nt, Human
gacuagaauaugaguagaaagug

SEQ ID NO: 518198 - RNA, 18 nt, Human
gaguagaaagugugaggu

SEQ ID NO: 518199 - RNA, 20 nt, Human
gcagaagaggugccuggagu

SEQ ID NO: 518200 - RNA, 19 nt, Human
ggaaaaacggagcaagggg

SEQ ID NO: 518201 - RNA, 18 nt, Human
ggggcaggccggcugucu

SEQ ID NO: 518202 - RNA, 21 nt, Human
gucccgggaggggucgcgggg

SEQ ID NO: 518203 - RNA, 19 nt, Human
uaacaggugggagugagga

SEQ ID NO: 518204 - RNA, 18 nt, Human
uaagaaguuacuccagga

SEQ ID NO: 518205 - RNA, 21 nt, Human
ucagaguuacuguugccugcg

SEQ ID NO: 518206 - RNA, 18 nt, Human
ucaggagaucgucggugg

SEQ ID NO: 518207 - RNA, 20 nt, Human
ucaguuccaugggccccacu

SEQ ID NO: 518208 - RNA, 22 nt, Human
uccaggcguauuuucugaaacu

SEQ ID NO: 518209 - RNA, 20 nt, Human
uccggggucccgggaggggu

SEQ ID NO: 518210 - RNA, 21 nt, Human
uccggggucccgggagggguc

SEQ ID NO: 518211 - RNA, 18 nt, Human
ugccuggagucccgcggg

SEQ ID NO: 518212 - RNA, 24 nt, Human
ugcgggcagaagaggugccuggag

SEQ ID NO: 518213 - RNA, 23 nt, Human
ugggaaaaacggagcaaggcaac

SEQ ID NO: 518214 - RNA, 19 nt, Human
uugaugaagccagugcuuu

SEQ ID NO: 518215 - RNA, 18 nt, Human
uugggaaaaacggagcaa

SEQ ID NO: 518216 - RNA, 24 nt, Human
uugugauaggccagguguuuuguc

SEQ ID NO: 518217 - RNA, 23 nt, Human
uuugggaaaaacggagcaaggca

SEQ ID NO: 518218 - RNA, 18 nt, Human
aagccgcgacgggacacc

SEQ ID NO: 518219 - RNA, 19 nt, Human
agaaaguucacacccuggc

SEQ ID NO: 518220 - RNA, 24 nt, Human
agagacuaaaccaugggagaaagu

SEQ ID NO: 518221 - RNA, 21 nt, Human
cacaacacacaggcugcugag

SEQ ID NO: 518222 - RNA, 18 nt, Human
cacacaggcugcugaggg

SEQ ID NO: 518223 - RNA, 21 nt, Human
cacagcacuugccaggcgccc

SEQ ID NO: 518224 - RNA, 19 nt, Human
caccaggaaagaaaacggc

SEQ ID NO: 518225 - RNA, 23 nt, Human
cacccuggccugggccacccacc

SEQ ID NO: 518226 - RNA, 26 nt, Human
cccaagccgcgacgggacaccaggaa

SEQ ID NO: 518227 - RNA, 18 nt, Human
ccuggccugggccaccca

SEQ ID NO: 518228 - RNA, 19 nt, Human
cgcacgcuggccccaagag

SEQ ID NO: 518229 - RNA, 23 nt, Human
cgugggcacagcacuugccaggc

SEQ ID NO: 518230 - RNA, 18 nt, Human
cuggccccaagagcuuca

SEQ ID NO: 518231 - RNA, 19 nt, Human
gccccuggcaggggcucuu

SEQ ID NO: 518232 - RNA, 23 nt, Human
gccugggccacccaccuucagcu

SEQ ID NO: 518233 - RNA, 18 nt, Human
ggccugggccacccaccu

SEQ ID NO: 518234 - RNA, 22 nt, Human
ucaguugaacuuccggcccagu

SEQ ID NO: 518235 - RNA, 26 nt, Human
ugccaggcgccccuggcaggggcucu

SEQ ID NO: 518236 - RNA, 24 nt, Human
uggccugggccacccaccuucagc

SEQ ID NO: 518237 - RNA, 18 nt, Human
uggguccugggcggacgu

SEQ ID NO: 518238 - RNA, 19 nt, Human
uuucacacaacacacaggc

SEQ ID NO: 518239 - RNA, 21 nt, Human
uuuuuuuuuuuuuucuuguuu

SEQ ID NO: 518240 - RNA, 20 nt, Human
uuuuuuuuuuuuuuucuugg

SEQ ID NO: 518241 - RNA, 20 nt, Human
aacuacaaauggaaauauca

SEQ ID NO: 518242 - RNA, 20 nt, Human
acuccaaggagccugugugg

SEQ ID NO: 518243 - RNA, 20 nt, Human
agacccugaggacaauauua

SEQ ID NO: 518244 - RNA, 26 nt, Human
aguuucucacacucuuacuccaagga

SEQ ID NO: 518245 - RNA, 22 nt, Human
aucucugcacuuaagcuagaag

SEQ ID NO: 518246 - RNA, 19 nt, Human
auuugaugauguaaaugug

SEQ ID NO: 518247 - RNA, 26 nt, Human
caccauaaagaggaccacuugauucc

SEQ ID NO: 518248 - RNA, 29 nt, Human
caccauaaagaggaccacuugauuccuca

SEQ ID NO: 518249 - RNA, 27 nt, Human
cacucuuacuccaaggagccugugugg

SEQ ID NO: 518250 - RNA, 21 nt, Human
ccaguaauauuuauuuguagc

SEQ ID NO: 518251 - RNA, 24 nt, Human
ccucacuuccagaugugcucagac

SEQ ID NO: 518252 - RNA, 24 nt, Human
cucauaauaugucuagacugaguu

SEQ ID NO: 518253 - RNA, 21 nt, Human
cucugcacuuaagcuagaagu

SEQ ID NO: 518254 - RNA, 26 nt, Human
ucccagccucauaauaugucuagacu

SEQ ID NO: 518255 - RNA, 18 nt, Human
uguugaucuccuuaaauc

SEQ ID NO: 518256 - RNA, 23 nt, Human
uguugaucuccuuaaaucucugc

SEQ ID NO: 518257 - RNA, 21 nt, Human
uucucacacucuuacuccaag

SEQ ID NO: 518258 - RNA, 21 nt, Human
uugugguguguuuauuuuccc

SEQ ID NO: 518259 - RNA, 23 nt, Human
uuugugguguguuuauuuucccc

SEQ ID NO: 518260 - RNA, 23 nt, Human
uuuuuagauuuacaugugccacc

SEQ ID NO: 518261 - RNA, 25 nt, Human
acagucccccagcacugggacucag

SEQ ID NO: 518262 - RNA, 19 nt, Human
agggagcucugggcccggc

SEQ ID NO: 518263 - RNA, 20 nt, Human
caccuggacagggcaggggg

SEQ ID NO: 518264 - RNA, 19 nt, Human
cacgagcuucugcuucucg

SEQ ID NO: 518265 - RNA, 20 nt, Human
cagccuccuucagcuggggg

SEQ ID NO: 518266 - RNA, 19 nt, Human
caggcagagggagcucugg

SEQ ID NO: 518267 - RNA, 22 nt, Human
caggggguucucuugccaacuc

SEQ ID NO: 518268 - RNA, 24 nt, Human
ccaccuggacagggcaggggguuc

SEQ ID NO: 518269 - RNA, 22 nt, Human
cggggaaggggaccuugguccg

SEQ ID NO: 518270 - RNA, 19 nt, Human
cuugccaacuccugccagc

SEQ ID NO: 518271 - RNA, 19 nt, Human
cuuuauucucaugccccuc

SEQ ID NO: 518272 - RNA, 23 nt, Human
gcgcaugggugccggggaagggg

SEQ ID NO: 518273 - RNA, 19 nt, Human
ggcccggcgcaugggugcc

SEQ ID NO: 518274 - RNA, 23 nt, Human
gggaccuugguccggggcagggg

SEQ ID NO: 518275 - RNA, 20 nt, Human
gggcacaggcuccagcacgc

SEQ ID NO: 518276 - RNA, 23 nt, Human
gggcaggggcacaggcuccagca

SEQ ID NO: 518277 - RNA, 20 nt, Human
ggggaaggggaccuuggucc

SEQ ID NO: 518278 - RNA, 23 nt, Human
ucagcuucccaccuggacagggc

SEQ ID NO: 518279 - RNA, 22 nt, Human
uccacgagcuucugcuucucgc

SEQ ID NO: 518280 - RNA, 22 nt, Human
ucccccagcacugggacucagc

SEQ ID NO: 518281 - RNA, 24 nt, Human
ucccccagcacugggacucagcuu

SEQ ID NO: 518282 - RNA, 20 nt, Human
ugguccggggcaggggcaca

SEQ ID NO: 518283 - RNA, 20 nt, Human
uucucaugccccucaugucc

SEQ ID NO: 518284 - RNA, 19 nt, Human
uuuuuuuuuuucaggaggc

SEQ ID NO: 518285 - RNA, 23 nt, Human
uuuuuuuuuuuuuuuuuuucagg

SEQ ID NO: 518286 - RNA, 24 nt, Human
acccauucucacccgccucccccc

SEQ ID NO: 518287 - RNA, 18 nt, Human
agccuggaaagggcagca

SEQ ID NO: 518288 - RNA, 21 nt, Human
aggcaguggcugagcaggaaa

SEQ ID NO: 518289 - RNA, 21 nt, Human
cccccgguagagagaaaugga

SEQ ID NO: 518290 - RNA, 24 nt, Human
cccccgguagagagaaauggaagc

SEQ ID NO: 518291 - RNA, 20 nt, Human
gggcagcacgaugaagacuu

SEQ ID NO: 518292 - RNA, 26 nt, Human
uacagacccauucucacccgccuccc

SEQ ID NO: 518293 - RNA, 21 nt, Human
uccacgcugggggcgcaggaa

SEQ ID NO: 518294 - RNA, 19 nt, Human
uggaaagggcagcacgaug

SEQ ID NO: 518295 - RNA, 21 nt, Human
uggaacaagaucuucucuauc

SEQ ID NO: 518296 - RNA, 23 nt, Human
uggaagccuuuccacgcuggggg

SEQ ID NO: 518297 - RNA, 20 nt, Human
uggaggcaguggcugagcag

SEQ ID NO: 518298 - RNA, 24 nt, Human
aagcugcugguagcugaggcagug

SEQ ID NO: 518299 - RNA, 18 nt, Human
aauuucuggcaaucaauu

SEQ ID NO: 518300 - RNA, 28 nt, Human
acaaaaaaaaauagcuuacaauuucuca

SEQ ID NO: 518301 - RNA, 19 nt, Human
accacuaaaaaauacacca

SEQ ID NO: 518302 - RNA, 25 nt, Human
accacuaaaaaauacaccaaaaaau

SEQ ID NO: 518303 - RNA, 20 nt, Human
accuuuucauucugcaaucc

SEQ ID NO: 518304 - RNA, 19 nt, Human
agccuggggcggcagucgg

SEQ ID NO: 518305 - RNA, 22 nt, Human
agcgccccugccacugaauccc

SEQ ID NO: 518306 - RNA, 24 nt, Human
aucacaauauuuccuugggcaauu

SEQ ID NO: 518307 - RNA, 23 nt, Human
aucacugcaauuuagacaucagg

SEQ ID NO: 518308 - RNA, 26 nt, Human
aucaggacaaaaaaaaauagcuuaca

SEQ ID NO: 518309 - RNA, 23 nt, Human
auuguagcugaaauugaucuucu

SEQ ID NO: 518310 - RNA, 21 nt, Human
auuucuggcaaucaauucuaa

SEQ ID NO: 518311 - RNA, 18 nt, Human
caaucaauucuaagacaa

SEQ ID NO: 518312 - RNA, 20 nt, Human
cacucuuguccauuacuuca

SEQ ID NO: 518313 - RNA, 20 nt, Human
cacugcaauuuagacaucag

SEQ ID NO: 518314 - RNA, 20 nt, Human
cagaugaguauuguagcuga

SEQ ID NO: 518315 - RNA, 21 nt, Human
ccaggauauggcaucuugcca

SEQ ID NO: 518316 - RNA, 23 nt, Human
ccaucuacuaaauuaaaaaguua

SEQ ID NO: 518317 - RNA, 20 nt, Human
ccaucuggaagacacaaagc

SEQ ID NO: 518318 - RNA, 27 nt, Human
ccaucuggaagacacaaagcuagucac

SEQ ID NO: 518319 - RNA, 21 nt, Human
ccccgauccagagaugcuccc

SEQ ID NO: 518320 - RNA, 20 nt, Human
ccccugccacugaauccccg

SEQ ID NO: 518321 - RNA, 22 nt, Human
ccccugccacugaauccccgau

SEQ ID NO: 518322 - RNA, 18 nt, Human
ccggagaagcugcuggua

SEQ ID NO: 518323 - RNA, 22 nt, Human
cggagccuggggcggcagucgg

SEQ ID NO: 518324 - RNA, 19 nt, Human
cggggucgagcgccccugc

SEQ ID NO: 518325 - RNA, 18 nt, Human
cucaaagauaauaucacc

SEQ ID NO: 518326 - RNA, 19 nt, Human
cucuuuuuucccacucuug

SEQ ID NO: 518327 - RNA, 19 nt, Human
cuuaucacugcaauuuaga

SEQ ID NO: 518328 - RNA, 21 nt, Human
cuuuugguccauaacauaacu

SEQ ID NO: 518329 - RNA, 19 nt, Human
gcggagccuggggcggcag

SEQ ID NO: 518330 - RNA, 21 nt, Human
ggguauuucauuaaccuaaaa

SEQ ID NO: 518331 - RNA, 22 nt, Human
uaaaaaguuauuucuaugagag

SEQ ID NO: 518332 - RNA, 24 nt, Human
uaaaauaaccacuaaaaaauacac

SEQ ID NO: 518333 - RNA, 28 nt, Human
uaaaauaaccacuaaaaaauacaccaaa

SEQ ID NO: 518334 - RNA, 18 nt, Human
uaacauaacugacuuggc

SEQ ID NO: 518335 - RNA, 22 nt, Human
uaaccuuuucauucugcaaucc

SEQ ID NO: 518336 - RNA, 22 nt, Human
uagcugaaauugaucuucucaa

SEQ ID NO: 518337 - RNA, 25 nt, Human
ucaaugguuuuaaugaauauuuccu

SEQ ID NO: 518338 - RNA, 22 nt, Human
ucacugcaauuuagacaucagg

SEQ ID NO: 518339 - RNA, 23 nt, Human
ucacuucuauuacagacaagcca

SEQ ID NO: 518340 - RNA, 19 nt, Human
ucccuaggcccaacuucua

SEQ ID NO: 518341 - RNA, 20 nt, Human
ucuauuacagacaagccagu

SEQ ID NO: 518342 - RNA, 19 nt, Human
ucuggaagacacaaagcua

SEQ ID NO: 518343 - RNA, 19 nt, Human
ugaauaguccuccugcucc

SEQ ID NO: 518344 - RNA, 22 nt, Human
ugaauaguccuccugcuccuca

SEQ ID NO: 518345 - RNA, 19 nt, Human
ugacaauauguacacagug

SEQ ID NO: 518346 - RNA, 21 nt, Human
ugacuuaaucuauccaguuau

SEQ ID NO: 518347 - RNA, 23 nt, Human
ugaggccacacacucugcauacu

SEQ ID NO: 518348 - RNA, 24 nt, Human
ugccacugaauccccgauccagag

SEQ ID NO: 518349 - RNA, 18 nt, Human
ugcuaaaauuauguaggg

SEQ ID NO: 518350 - RNA, 18 nt, Human
ugggaaagucgauugaua

SEQ ID NO: 518351 - RNA, 19 nt, Human
uguaggaacuauaaccuuu

SEQ ID NO: 518352 - RNA, 20 nt, Human
uguagggucagauggagauu

SEQ ID NO: 518353 - RNA, 23 nt, Human
ugugaucagccaucugugguacc

SEQ ID NO: 518354 - RNA, 22 nt, Human
uuaacagauguuagccauacuu

SEQ ID NO: 518355 - RNA, 21 nt, Human
uuagacaucaggacaaaaaaa

SEQ ID NO: 518356 - RNA, 19 nt, Human
uuaggaucacaauauuucc

SEQ ID NO: 518357 - RNA, 22 nt, Human
uugcaauuucuggcaaucaauu

SEQ ID NO: 518358 - RNA, 19 nt, Human
uuugaaaaggaucucuuuu

SEQ ID NO: 518359 - RNA, 22 nt, Human
aaaaaaaucaacaacauacuca

SEQ ID NO: 518360 - RNA, 27 nt, Human
aaaaacaggaaagggugaccgguaccc

SEQ ID NO: 518361 - RNA, 22 nt, Human
aaacaggaaagggugacauaua

SEQ ID NO: 518362 - RNA, 20 nt, Human
aaaccaacaaaaauuaaaau

SEQ ID NO: 518363 - RNA, 19 nt, Human
acacaaaaaaaucaacaac

SEQ ID NO: 518364 - RNA, 20 nt, Human
acacacaaaaaaaucaacaa

SEQ ID NO: 518365 - RNA, 24 nt, Human
acacacaaaaaaaucaacaacaua

SEQ ID NO: 518366 - RNA, 27 nt, Human
accacacacaaaaaaaucaacaacaua

SEQ ID NO: 518367 - RNA, 18 nt, Human
agauguugaaacugaagc

SEQ ID NO: 518368 - RNA, 20 nt, Human
aggaaagggugacauauauu

SEQ ID NO: 518369 - RNA, 20 nt, Human
auagcuucucuuccuucuuu

SEQ ID NO: 518370 - RNA, 19 nt, Human
auauauaugguuauaccaa

SEQ ID NO: 518371 - RNA, 25 nt, Human
caaaaugguuaaacuggcuuaagua

SEQ ID NO: 518372 - RNA, 22 nt, Human
cacaguaauccuaugagguagg

SEQ ID NO: 518373 - RNA, 20 nt, Human
cccaacacacccauauuuaa

SEQ ID NO: 518374 - RNA, 23 nt, Human
cgccccuuuuuuuuuuuuuuuuu

SEQ ID NO: 518375 - RNA, 21 nt, Human
cucuuccuucuuuuggauuuu

SEQ ID NO: 518376 - RNA, 29 nt, Human
gagcggccgccccuuuuuuuuuuuuuuuu

SEQ ID NO: 518377 - RNA, 19 nt, Human
gccagucauuccuccccaa

SEQ ID NO: 518378 - RNA, 21 nt, Human
gccccuuuuuuuuuuuuuuuu

SEQ ID NO: 518379 - RNA, 21 nt, Human
gcucagaucuuccuaaaucaa

SEQ ID NO: 518380 - RNA, 24 nt, Human
ggaagggauuuucauuuauuugcu

SEQ ID NO: 518381 - RNA, 23 nt, Human
ggccgccccuuuuuuuuuuuuuu

SEQ ID NO: 518382 - RNA, 23 nt, Human
gugggauaguuaaaccaacaaaa

SEQ ID NO: 518383 - RNA, 19 nt, Human
uaaaauuuucaaaugggca

SEQ ID NO: 518384 - RNA, 22 nt, Human
uaaccacacacaaaaaaaucaa

SEQ ID NO: 518385 - RNA, 25 nt, Human
uauauuguucugaucaauaauuuca

SEQ ID NO: 518386 - RNA, 21 nt, Human
uccaaacuugcaucugcagac

SEQ ID NO: 518387 - RNA, 22 nt, Human
uccuaaaucaauacaugucuac

SEQ ID NO: 518388 - RNA, 23 nt, Human
uccuaaugcuaacauuucccaaa

SEQ ID NO: 518389 - RNA, 23 nt, Human
uccuccagcaacagaaaaugugg

SEQ ID NO: 518390 - RNA, 23 nt, Human
ucuaucacaaacagagguauggc

SEQ ID NO: 518391 - RNA, 25 nt, Human
ugagguaggcaauguuaacaugccc

SEQ ID NO: 518392 - RNA, 24 nt, Human
ugccaggcacuuuuuaaaguugcu

SEQ ID NO: 518393 - RNA, 18 nt, Human
uguauuucaaucuucauc

SEQ ID NO: 518394 - RNA, 21 nt, Human
uguuuuguuccuccagcaaca

SEQ ID NO: 518395 - RNA, 24 nt, Human
uugauucuaucaguaaccacacac

SEQ ID NO: 518396 - RNA, 21 nt, Human
uugcauauagcuucucuuccu

SEQ ID NO: 518397 - RNA, 24 nt, Human
uuuaaauaacuuucccaaggcugc

SEQ ID NO: 518398 - RNA, 24 nt, Human
uuuacagauguugaaacugaagcc

SEQ ID NO: 518399 - RNA, 26 nt, Human
uuucauuuauuugcuuuucucuucca

SEQ ID NO: 518400 - RNA, 22 nt, Human
uuuuuuuuuuuuuuuucaucuu

SEQ ID NO: 518401 - RNA, 22 nt, Human
uuuuuuuuuuuuuuuucaucuu

SEQ ID NO: 518402 - RNA, 27 nt, Human
uuuuuuuuuuuuuuuuucaucuugauu

SEQ ID NO: 518403 - RNA, 23 nt, Human
aaaggaggggcuggggggugggg

SEQ ID NO: 518404 - RNA, 21 nt, Human
aacccgcuguuccaggacccu

SEQ ID NO: 518405 - RNA, 19 nt, Human
aaggaggggcuggggggug

SEQ ID NO: 518406 - RNA, 20 nt, Human
aaggcaggagauggaaguca

SEQ ID NO: 518407 - RNA, 24 nt, Human
acaagccuuuucagccugggugac

SEQ ID NO: 518408 - RNA, 21 nt, Human
acagagccacagcugcaauag

SEQ ID NO: 518409 - RNA, 18 nt, Human
acaguguguccugcccaa

SEQ ID NO: 518410 - RNA, 22 nt, Human
agaaaggaggggcuggggggug

SEQ ID NO: 518411 - RNA, 21 nt, Human
agaaggggacaugucuuccag

SEQ ID NO: 518412 - RNA, 25 nt, Human
agagcagggagaaaggaggggcugg

SEQ ID NO: 518413 - RNA, 20 nt, Human
agcagggagaaaggaggggc

SEQ ID NO: 518414 - RNA, 24 nt, Human
agccaagaauaccauaggcuucca

SEQ ID NO: 518415 - RNA, 19 nt, Human
agcccucggaagccucaua

SEQ ID NO: 518416 - RNA, 24 nt, Human
aggaaagaaggggacaugucuucc

SEQ ID NO: 518417 - RNA, 24 nt, Human
aggaggggcugggggguggggggc

SEQ ID NO: 518418 - RNA, 20 nt, Human
aggcaggagauggaagucag

SEQ ID NO: 518419 - RNA, 20 nt, Human
aggcugaggagauggggaca

SEQ ID NO: 518420 - RNA, 24 nt, Human
aggcugaggagauggggacacaug

SEQ ID NO: 518421 - RNA, 19 nt, Human
agggagaaaggaggggcug

SEQ ID NO: 518422 - RNA, 20 nt, Human
agggagaaaggaggggcugg

SEQ ID NO: 518423 - RNA, 19 nt, Human
aggggcugggggguggggg

SEQ ID NO: 518424 - RNA, 20 nt, Human
aggggcuggggggugggggg

SEQ ID NO: 518425 - RNA, 22 nt, Human
caagaauaccauaggcuuccac

SEQ ID NO: 518426 - RNA, 23 nt, Human
caagaauaccauaggcuuccagu

SEQ ID NO: 518427 - RNA, 18 nt, Human
cacagaaagaaagagggg

SEQ ID NO: 518428 - RNA, 18 nt, Human
cacuccaugaggcagaac

SEQ ID NO: 518429 - RNA, 18 nt, Human
cacuguggguccugagag

SEQ ID NO: 518430 - RNA, 22 nt, Human
cauacagagccacagcugcaau

SEQ ID NO: 518431 - RNA, 22 nt, Human
ccacagcugcaauagccaagaa

SEQ ID NO: 518432 - RNA, 20 nt, Human
cccugccucccagccuccuc

SEQ ID NO: 518433 - RNA, 19 nt, Human
ccucagaacccgcuguucc

SEQ ID NO: 518434 - RNA, 23 nt, Human
ccucccagccuccucagaacccg

SEQ ID NO: 518435 - RNA, 21 nt, Human
ccucucacagcccucggaagc

SEQ ID NO: 518436 - RNA, 19 nt, Human
ccucucagcccugccuccc

SEQ ID NO: 518437 - RNA, 21 nt, Human
ccugagagcagggagaaagga

SEQ ID NO: 518438 - RNA, 22 nt, Human
cgggcuggggugcagaggaaag

SEQ ID NO: 518439 - RNA, 19 nt, Human
cuccccacaagccuuuuca

SEQ ID NO: 518440 - RNA, 19 nt, Human
cuggcugcgggcuggggug

SEQ ID NO: 518441 - RNA, 24 nt, Human
cuuccagcuccucgaggcucuggg

SEQ ID NO: 518442 - RNA, 18 nt, Human
gagaaaggaggggcuggg

SEQ ID NO: 518443 - RNA, 18 nt, Human
gagcagggagaaaggagg

SEQ ID NO: 518444 - RNA, 20 nt, Human
gagggugguggccacugggg

SEQ ID NO: 518445 - RNA, 24 nt, Human
gccugggugacugaggcugaggag

SEQ ID NO: 518446 - RNA, 20 nt, Human
gccuuuucagccugggugac

SEQ ID NO: 518447 - RNA, 22 nt, Human
gcugaggagauggggacacaug

SEQ ID NO: 518448 - RNA, 19 nt, Human
ggacaugucuuccagcucc

SEQ ID NO: 518449 - RNA, 26 nt, Human
ggaggggcugggggguggggggcugg

SEQ ID NO: 518450 - RNA, 18 nt, Human
ggcugggggguggggggc

SEQ ID NO: 518451 - RNA, 21 nt, Human
ggcugggggguggggggcugg

SEQ ID NO: 518452 - RNA, 25 nt, Human
ggcugggggguggggggcuggcugc

SEQ ID NO: 518453 - RNA, 21 nt, Human
gggggcuggcugcgggcuggg

SEQ ID NO: 518454 - RNA, 18 nt, Human
ggggguggggggcuggcu

SEQ ID NO: 518455 - RNA, 19 nt, Human
gggugguggccacugggga

SEQ ID NO: 518456 - RNA, 20 nt, Human
gucacuguggguccugagag

SEQ ID NO: 518457 - RNA, 19 nt, Human
gucagccgcuccccacaag

SEQ ID NO: 518458 - RNA, 20 nt, Human
uaacacauacagagccacag

SEQ ID NO: 518459 - RNA, 18 nt, Human
uaccauaggcuuccacaa

SEQ ID NO: 518460 - RNA, 25 nt, Human
ucagcccugccucccagccuccuca

SEQ ID NO: 518461 - RNA, 20 nt, Human
uccugcccaaagcugagggu

SEQ ID NO: 518462 - RNA, 24 nt, Human
ucggaagccucauaggagccuagg

SEQ ID NO: 518463 - RNA, 23 nt, Human
ucggccaccucucagcccugccu

SEQ ID NO: 518464 - RNA, 18 nt, Human
ucucucucggccaccucu

SEQ ID NO: 518465 - RNA, 24 nt, Human
ucuggcggcucugcgacuccucuc

SEQ ID NO: 518466 - RNA, 21 nt, Human
ugagggugguggccacugggg

SEQ ID NO: 518467 - RNA, 25 nt, Human
ugcacagaaagaaagagggggugug

SEQ ID NO: 518468 - RNA, 21 nt, Human
ugcccaaagcugaggguggug

SEQ ID NO: 518469 - RNA, 19 nt, Human
uggcggcucugcgacuccu

SEQ ID NO: 518470 - RNA, 18 nt, Human
ugggggguggggggcugg

SEQ ID NO: 518471 - RNA, 23 nt, Human
ugggggguggggggcuggcugcg

SEQ ID NO: 518472 - RNA, 21 nt, Human
uggguaacacauacagagcca

SEQ ID NO: 518473 - RNA, 21 nt, Human
uguuccaggacccucuugcuu

SEQ ID NO: 518474 - RNA, 21 nt, Human
aaacagcucaaccccacaggc

SEQ ID NO: 518475 - RNA, 18 nt, Human
aaagugcugggauuacaa

SEQ ID NO: 518476 - RNA, 24 nt, Human
aaagugcugggauuacaagcguga

SEQ ID NO: 518477 - RNA, 24 nt, Human
aaagugcugggauuacaggcauga

SEQ ID NO: 518478 - RNA, 21 nt, Human
aagcaauucuccugccucagc

SEQ ID NO: 518479 - RNA, 21 nt, Human
aagcucaugguccaggagccu

SEQ ID NO: 518480 - RNA, 24 nt, Human
aagugaucugccugccuuggccuc

SEQ ID NO: 518481 - RNA, 19 nt, Human
aagugcugggauuacaagc

SEQ ID NO: 518482 - RNA, 19 nt, Human
aagugcugggauuacaagc

SEQ ID NO: 518483 - RNA, 26 nt, Human
aagugcugggauuacaagcgugagcc

SEQ ID NO: 518484 - RNA, 19 nt, Human
aagugcugggauuacaggc

SEQ ID NO: 518485 - RNA, 21 nt, Human
aagugcugggauuacaggcau

SEQ ID NO: 518486 - RNA, 26 nt, Human
aagugcugggauuacaggcaugagcc

SEQ ID NO: 518487 - RNA, 21 nt, Human
acaggcaccugcuaccaugcc

SEQ ID NO: 518488 - RNA, 18 nt, Human
acaggguuucaccauguu

SEQ ID NO: 518489 - RNA, 21 nt, Human
acaggguuucaccauguuggc

SEQ ID NO: 518490 - RNA, 24 nt, Human
acaggguuucaccauguuggccag

SEQ ID NO: 518491 - RNA, 23 nt, Human
accaugccuggcuaauuuuugua

SEQ ID NO: 518492 - RNA, 22 nt, Human
accauguuggccaggcuggucu

SEQ ID NO: 518493 - RNA, 18 nt, Human
acgggguuuugccguguu

SEQ ID NO: 518494 - RNA, 24 nt, Human
acgggguuuugccguguuggccag

SEQ ID NO: 518495 - RNA, 21 nt, Human
acucccugcucuaggcucagg

SEQ ID NO: 518496 - RNA, 19 nt, Human
agaagaaaaacguaacuag

SEQ ID NO: 518497 - RNA, 19 nt, Human
agaagggcugaaguccugg

SEQ ID NO: 518498 - RNA, 18 nt, Human
agaagugauaaagcaaca

SEQ ID NO: 518499 - RNA, 18 nt, Human
agacagagucucgcugug

SEQ ID NO: 518500 - RNA, 22 nt, Human
agacagagucucgcugugucuc

SEQ ID NO: 518501 - RNA, 21 nt, Human
agaggaguggaaggccugggg

SEQ ID NO: 518502 - RNA, 21 nt, Human
agccaccacauccggccuaaa

SEQ ID NO: 518503 - RNA, 25 nt, Human
agcuagucagugagagggguccaac

SEQ ID NO: 518504 - RNA, 18 nt, Human
aggaaagugugcaagagc

SEQ ID NO: 518505 - RNA, 25 nt, Human
aggcuggagugcaguggugccaucu

SEQ ID NO: 518506 - RNA, 20 nt, Human
agggagggaagcacauucug

SEQ ID NO: 518507 - RNA, 24 nt, Human
aggugauccacccaccuuggccuc

SEQ ID NO: 518508 - RNA, 20 nt, Human
aguagaaacgggguuuugcc

SEQ ID NO: 518509 - RNA, 18 nt, Human
aguagcugggauuacagg

SEQ ID NO: 518510 - RNA, 18 nt, Human
aguagcugggauuacagg

SEQ ID NO: 518511 - RNA, 21 nt, Human
agugcaguggugccaucucag

SEQ ID NO: 518512 - RNA, 24 nt, Human
agugcugggauuacaagcgugagc

SEQ ID NO: 518513 - RNA, 18 nt, Human
agugcugggauuacaggc

SEQ ID NO: 518514 - RNA, 19 nt, Human
augccugcugacucaacac

SEQ ID NO: 518515 - RNA, 20 nt, Human
augcuccugccucagccucc

SEQ ID NO: 518516 - RNA, 24 nt, Human
auuaugcuccccacuaaauccaaa

SEQ ID NO: 518517 - RNA, 24 nt, Human
auuuuuguauuuuuaguagagaca

SEQ ID NO: 518518 - RNA, 18 nt, Human
caaacagcucaaccccac

SEQ ID NO: 518519 - RNA, 24 nt, Human
caaagugcugggauuacaagcgug

SEQ ID NO: 518520 - RNA, 24 nt, Human
caaagugcugggauuacaggcaug

SEQ ID NO: 518521 - RNA, 22 nt, Human
caagcaaugcuccugccucagc

SEQ ID NO: 518522 - RNA, 22 nt, Human
caagugaucugccugccuuggc

SEQ ID NO: 518523 - RNA, 24 nt, Human
caccacacccagcuaauuuuugua

SEQ ID NO: 518524 - RNA, 22 nt, Human
caccacugcucccggauggagg

SEQ ID NO: 518525 - RNA, 21 nt, Human
caccauguuggccaggcuggu

SEQ ID NO: 518526 - RNA, 23 nt, Human
caccauguuggccaggcuggucu

SEQ ID NO: 518527 - RNA, 24 nt, Human
caccauguuggccaggcuggucuu

SEQ ID NO: 518528 - RNA, 27 nt, Human
caccauguuggccaggcuggucuugaa

SEQ ID NO: 518529 - RNA, 22 nt, Human
cacccaccuuggccucccaaag

SEQ ID NO: 518530 - RNA, 23 nt, Human
cacccaccuuggccucccaaagu

SEQ ID NO: 518531 - RNA, 22 nt, Human
caccccaagugaccucccucac

SEQ ID NO: 518532 - RNA, 22 nt, Human
caccccaggccaccuguuccac

SEQ ID NO: 518533 - RNA, 23 nt, Human
caccccaggccaccuguuccacc

SEQ ID NO: 518534 - RNA, 19 nt, Human
caccccuaccagacagcua

SEQ ID NO: 518535 - RNA, 22 nt, Human
caccccuaccagacagcuaguc

SEQ ID NO: 518536 - RNA, 18 nt, Human
caccgccaccacugcucc

SEQ ID NO: 518537 - RNA, 18 nt, Human
cacuaaauccaaagaaug

SEQ ID NO: 518538 - RNA, 21 nt, Human
cacugcaaccucugccucccg

SEQ ID NO: 518539 - RNA, 23 nt, Human
cacugcaaccucugccucccggg

SEQ ID NO: 518540 - RNA, 18 nt, Human
cagccccagcagggcuga

SEQ ID NO: 518541 - RNA, 20 nt, Human
cagccuccugaguagcuggg

SEQ ID NO: 518542 - RNA, 20 nt, Human
cagcucaaccccacaggcga

SEQ ID NO: 518543 - RNA, 18 nt, Human
cagcuuuucccuggaagu

SEQ ID NO: 518544 - RNA, 18 nt, Human
caggcugggcugcagggc

SEQ ID NO: 518545 - RNA, 24 nt, Human
caggguuucaccauguuggccagg

SEQ ID NO: 518546 - RNA, 24 nt, Human
caguagcugggauuacaggcaccu

SEQ ID NO: 518547 - RNA, 20 nt, Human
caugccugcugacucaacac

SEQ ID NO: 518548 - RNA, 18 nt, Human
cauggcccaagucaaggc

SEQ ID NO: 518549 - RNA, 24 nt, Human
cauguuggccaggcuggucuugaa

SEQ ID NO: 518550 - RNA, 27 nt, Human
cauuccuguacaugugcgaaccaaggg

SEQ ID NO: 518551 - RNA, 20 nt, Human
ccaaagugcugggauuacaa

SEQ ID NO: 518552 - RNA, 22 nt, Human
ccaaagugcugggauuacaagc

SEQ ID NO: 518553 - RNA, 24 nt, Human
ccaaagugcugggauuacaagcgu

SEQ ID NO: 518554 - RNA, 23 nt, Human
ccaaagugcugggauuacaggca

SEQ ID NO: 518555 - RNA, 24 nt, Human
ccaaagugcugggauuacaggcau

SEQ ID NO: 518556 - RNA, 23 nt, Human
ccaccgccaccacugcucccgga

SEQ ID NO: 518557 - RNA, 22 nt, Human
ccaguagcugggauuacaggca

SEQ ID NO: 518558 - RNA, 24 nt, Human
cccaaagugcugggauuacaggca

SEQ ID NO: 518559 - RNA, 27 nt, Human
cccaagugaccucccucaccugggauc

SEQ ID NO: 518560 - RNA, 22 nt, Human
cccacuguauccuggacaggcu

SEQ ID NO: 518561 - RNA, 21 nt, Human
cccagccccagcagggcugac

SEQ ID NO: 518562 - RNA, 19 nt, Human
cccaggcuggagugcagug

SEQ ID NO: 518563 - RNA, 22 nt, Human
cccaggcuggagugcaguggug

SEQ ID NO: 518564 - RNA, 23 nt, Human
cccaguagcugggauuacaggca

SEQ ID NO: 518565 - RNA, 18 nt, Human
ccccacuguauccuggac

SEQ ID NO: 518566 - RNA, 23 nt, Human
ccccaguagcugggauuacaggc

SEQ ID NO: 518567 - RNA, 18 nt, Human
cccggguucaagcaaugc

SEQ ID NO: 518568 - RNA, 23 nt, Human
cccggguucaagcaaugcuccuc

SEQ ID NO: 518569 - RNA, 23 nt, Human
cccggguucaagcaaugcuccug

SEQ ID NO: 518570 - RNA, 19 nt, Human
ccguguuggccaggcuggu

SEQ ID NO: 518571 - RNA, 22 nt, Human
ccguguuggccaggcuggucuc

SEQ ID NO: 518572 - RNA, 19 nt, Human
ccuaaaaggcacuuuuuuu

SEQ ID NO: 518573 - RNA, 21 nt, Human
ccucuugggucugggcccugg

SEQ ID NO: 518574 - RNA, 21 nt, Human
ccugaccucaagugaucugcc

SEQ ID NO: 518575 - RNA, 23 nt, Human
ccugaccucaagugaucugccug

SEQ ID NO: 518576 - RNA, 24 nt, Human
ccugaccucaggugauccacccac

SEQ ID NO: 518577 - RNA, 23 nt, Human
ccugaguagcugggauuacaggc

SEQ ID NO: 518578 - RNA, 23 nt, Human
ccugaguagcugggauuacaggc

SEQ ID NO: 518579 - RNA, 23 nt, Human
ccugccucagccuccugaguagc

SEQ ID NO: 518580 - RNA, 22 nt, Human
ccugccuuggccucccaaagug

SEQ ID NO: 518581 - RNA, 24 nt, Human
ccugccuuggccucccaaagugcu

SEQ ID NO: 518582 - RNA, 20 nt, Human
ccugcugggccacaccccaa

SEQ ID NO: 518583 - RNA, 20 nt, Human
ccuggagguucaggccagcu

SEQ ID NO: 518584 - RNA, 24 nt, Human
cgcugugucucccaggcuggagug

SEQ ID NO: 518585 - RNA, 24 nt, Human
cgggguuuugccguguuggccagg

SEQ ID NO: 518586 - RNA, 23 nt, Human
cuaauuuuuguauuuuuaguaga

SEQ ID NO: 518587 - RNA, 21 nt, Human
cuaguggucuguucacugccc

SEQ ID NO: 518588 - RNA, 18 nt, Human
cucaaacagcucaacccc

SEQ ID NO: 518589 - RNA, 23 nt, Human
cucaagugaucugccugccuugg

SEQ ID NO: 518590 - RNA, 24 nt, Human
cucacugcaaccucugccucccgg

SEQ ID NO: 518591 - RNA, 24 nt, Human
cucacugcaaccucugccuuccag

SEQ ID NO: 518592 - RNA, 23 nt, Human
cucagccuccugaguagcuggga

SEQ ID NO: 518593 - RNA, 24 nt, Human
cucaggugauccacccaccuuggc

SEQ ID NO: 518594 - RNA, 20 nt, Human
cuccagcaccccaggccacc

SEQ ID NO: 518595 - RNA, 26 nt, Human
cuccugaccucaagugaucugccugc

SEQ ID NO: 518596 - RNA, 18 nt, Human
cucuuguugcccaggcug

SEQ ID NO: 518597 - RNA, 23 nt, Human
cugagccucagugucuucaucug

SEQ ID NO: 518598 - RNA, 22 nt, Human
cugaguagcugggauuacaggc

SEQ ID NO: 518599 - RNA, 19 nt, Human
cugcaaccucugccucccg

SEQ ID NO: 518600 - RNA, 23 nt, Human
cugcaaccucugccucccggguu

SEQ ID NO: 518601 - RNA, 24 nt, Human
cugcaaccucugccucccggguuc

SEQ ID NO: 518602 - RNA, 18 nt, Human
cugcaaccucugccuucc

SEQ ID NO: 518603 - RNA, 23 nt, Human
cugcaaccucugccuuccagauu

SEQ ID NO: 518604 - RNA, 23 nt, Human
cugccucagccuccugaguagcu

SEQ ID NO: 518605 - RNA, 24 nt, Human
cugccucagcuuuccccaguagcu

SEQ ID NO: 518606 - RNA, 18 nt, Human
cugcugggccacacccca

SEQ ID NO: 518607 - RNA, 19 nt, Human
cugcugggccacaccccaa

SEQ ID NO: 518608 - RNA, 21 nt, Human
cugcugggccacaccccaagu

SEQ ID NO: 518609 - RNA, 24 nt, Human
cuggccccacuuugcaccacacau

SEQ ID NO: 518610 - RNA, 22 nt, Human
cugggcccuggccccacuuugc

SEQ ID NO: 518611 - RNA, 23 nt, Human
cugguguggcaaugaucacucuu

SEQ ID NO: 518612 - RNA, 18 nt, Human
cugugaaugcagaaguuc

SEQ ID NO: 518613 - RNA, 25 nt, Human
cuuccuugucucacacccgcgagga

SEQ ID NO: 518614 - RNA, 20 nt, Human
gaagcacauucuguuuaacu

SEQ ID NO: 518615 - RNA, 24 nt, Human
gaccucaagugaucugccugccuu

SEQ ID NO: 518616 - RNA, 23 nt, Human
gaccucaggugauccacccaccu

SEQ ID NO: 518617 - RNA, 20 nt, Human
gagacagagucucgcugugu

SEQ ID NO: 518618 - RNA, 21 nt, Human
gagacggaguuucccucuugu

SEQ ID NO: 518619 - RNA, 18 nt, Human
gagagggggugcauggcc

SEQ ID NO: 518620 - RNA, 21 nt, Human
gagccucagugucuucaucug

SEQ ID NO: 518621 - RNA, 23 nt, Human
gagccucagugucuucaucuggu

SEQ ID NO: 518622 - RNA, 18 nt, Human
gagggaagcacauucugu

SEQ ID NO: 518623 - RNA, 26 nt, Human
gaguagcugggauuacaggcgcacgc

SEQ ID NO: 518624 - RNA, 18 nt, Human
gauuacaagcgugagcca

SEQ ID NO: 518625 - RNA, 24 nt, Human
gauuacaagcgugagccaccaugc

SEQ ID NO: 518626 - RNA, 24 nt, Human
gauuacaggcaccugcuaccaugc

SEQ ID NO: 518627 - RNA, 18 nt, Human
gauuacaggcaugagcca

SEQ ID NO: 518628 - RNA, 21 nt, Human
gauuacaggcaugagccacca

SEQ ID NO: 518629 - RNA, 22 nt, Human
gauuacaggcaugagccaccac

SEQ ID NO: 518630 - RNA, 18 nt, Human
gauuacaggcgcacgcca

SEQ ID NO: 518631 - RNA, 21 nt, Human
gcaaccucugccuuccagauu

SEQ ID NO: 518632 - RNA, 19 nt, Human
gcagagguuacaacacagg

SEQ ID NO: 518633 - RNA, 21 nt, Human
gcaggugccaaacuuccugca

SEQ ID NO: 518634 - RNA, 19 nt, Human
gccacugccuaccucucca

SEQ ID NO: 518635 - RNA, 23 nt, Human
gccccugcacccuguucccagca

SEQ ID NO: 518636 - RNA, 20 nt, Human
gccguguuggccaggcuggu

SEQ ID NO: 518637 - RNA, 25 nt, Human
gccucagcuuuccccaguagcuggg

SEQ ID NO: 518638 - RNA, 20 nt, Human
gccugccugcugggccacac

SEQ ID NO: 518639 - RNA, 22 nt, Human
gccuuggccucccaaagugcug

SEQ ID NO: 518640 - RNA, 20 nt, Human
gcucagccccacuguauccu

SEQ ID NO: 518641 - RNA, 24 nt, Human
gcuccugccucagccuccugagua

SEQ ID NO: 518642 - RNA, 21 nt, Human
gcuggagugcaguggugccag

SEQ ID NO: 518643 - RNA, 23 nt, Human
gcuggucucaaacuccugaccuc

SEQ ID NO: 518644 - RNA, 18 nt, Human
gcuggucuccauggaggc

SEQ ID NO: 518645 - RNA, 23 nt, Human
gcuggucuugaacuccugaccuc

SEQ ID NO: 518646 - RNA, 18 nt, Human
ggagccuucuggugccca

SEQ ID NO: 518647 - RNA, 24 nt, Human
ggauuacaagcgugagccaccaug

SEQ ID NO: 518648 - RNA, 19 nt, Human
ggauuacaggcaugagcca

SEQ ID NO: 518649 - RNA, 21 nt, Human
ggcaggugccaaacuuccugc

SEQ ID NO: 518650 - RNA, 22 nt, Human
ggcaggugccaaacuuccugca

SEQ ID NO: 518651 - RNA, 24 nt, Human
ggcuggucucaaacuccugaccuc

SEQ ID NO: 518652 - RNA, 24 nt, Human
ggcuggucuugaacuccugaccuc

SEQ ID NO: 518653 - RNA, 19 nt, Human
gggaagaagaaucuuccag

SEQ ID NO: 518654 - RNA, 19 nt, Human
ggggcagggucagcaggga

SEQ ID NO: 518655 - RNA, 23 nt, Human
gggguuuugccguguuggccagg

SEQ ID NO: 518656 - RNA, 18 nt, Human
ggguucuacagagaagcc

SEQ ID NO: 518657 - RNA, 22 nt, Human
ggguuucaccauguuggccagg

SEQ ID NO: 518658 - RNA, 19 nt, Human
ggucuugaacuccugaccu

SEQ ID NO: 518659 - RNA, 21 nt, Human
ggucuugaggacgcagagguu

SEQ ID NO: 518660 - RNA, 23 nt, Human
guagaaacgggguuuugccgugu

SEQ ID NO: 518661 - RNA, 18 nt, Human
guagcugggauuacaggc

SEQ ID NO: 518662 - RNA, 24 nt, Human
guccuggcccgcagcagcucgggu

SEQ ID NO: 518663 - RNA, 19 nt, Human
gugaaauaacagaacagga

SEQ ID NO: 518664 - RNA, 24 nt, Human
gugauccacccaccuuggccuccc

SEQ ID NO: 518665 - RNA, 18 nt, Human
guuacaacacaggcuggg

SEQ ID NO: 518666 - RNA, 24 nt, Human
uaauuuuuguauuuuuaguagaga

SEQ ID NO: 518667 - RNA, 24 nt, Human
uacaagcgugagccaccaugccca

SEQ ID NO: 518668 - RNA, 22 nt, Human
uacaggcaccugcuaccaugcc

SEQ ID NO: 518669 - RNA, 23 nt, Human
uacaggcaugagccaccacaucc

SEQ ID NO: 518670 - RNA, 24 nt, Human
uacaggcgcacgccaccacaccca

SEQ ID NO: 518671 - RNA, 22 nt, Human
uagagacaggguuucaccaugu

SEQ ID NO: 518672 - RNA, 23 nt, Human
uagccacugccuaccucuccagg

SEQ ID NO: 518673 - RNA, 19 nt, Human
uaguagaaacgggguuuug

SEQ ID NO: 518674 - RNA, 21 nt, Human
uaguagaaacgggguuuugcc

SEQ ID NO: 518675 - RNA, 24 nt, Human
uaguagaaacgggguuuugccgug

SEQ ID NO: 518676 - RNA, 24 nt, Human
uaguagagacaggguuucaccaug

SEQ ID NO: 518677 - RNA, 26 nt, Human
uaguagagacaggguuucaccauguu

SEQ ID NO: 518678 - RNA, 19 nt, Human
uauccuggacaggcugggc

SEQ ID NO: 518679 - RNA, 21 nt, Human
ucaaccucaacauuuucaaaa

SEQ ID NO: 518680 - RNA, 18 nt, Human
ucacugcaaccucugccu

SEQ ID NO: 518681 - RNA, 24 nt, Human
ucacugcaaccucugccucccggg

SEQ ID NO: 518682 - RNA, 25 nt, Human
ucacugcaaccucugccucccgggu

SEQ ID NO: 518683 - RNA, 19 nt, Human
ucacugcaaccucugccuu

SEQ ID NO: 518684 - RNA, 23 nt, Human
ucacugcaaccucugccuuccag

SEQ ID NO: 518685 - RNA, 24 nt, Human
ucacugcaaccucugccuuccaga

SEQ ID NO: 518686 - RNA, 20 nt, Human
ucagccuccugaguagcugg

SEQ ID NO: 518687 - RNA, 22 nt, Human
ucagggaagggccccagccggg

SEQ ID NO: 518688 - RNA, 22 nt, Human
uccaaagaauguugguucccau

SEQ ID NO: 518689 - RNA, 20 nt, Human
uccaccgccaccacugcucc

SEQ ID NO: 518690 - RNA, 23 nt, Human
uccaccgccaccacugcucccgg

SEQ ID NO: 518691 - RNA, 18 nt, Human
ucccaaagugcugggauu

SEQ ID NO: 518692 - RNA, 24 nt, Human
ucccaaagugcugggauuacaagc

SEQ ID NO: 518693 - RNA, 24 nt, Human
ucccaaagugcugggauuacaggc

SEQ ID NO: 518694 - RNA, 18 nt, Human
ucccagccccagcagggc

SEQ ID NO: 518695 - RNA, 22 nt, Human
ucccaggcuggagugcaguggu

SEQ ID NO: 518696 - RNA, 23 nt, Human
ucccaggcuggagugcaguggug

SEQ ID NO: 518697 - RNA, 24 nt, Human
uccccaguagcugggauuacaggc

SEQ ID NO: 518698 - RNA, 21 nt, Human
ucccggguucaagcaaugcuc

SEQ ID NO: 518699 - RNA, 24 nt, Human
ucccggguucaagcaaugcuccug

SEQ ID NO: 518700 - RNA, 23 nt, Human
ucccucuuguugcccaggcugga

SEQ ID NO: 518701 - RNA, 19 nt, Human
ucccuggaaguggggcagg

SEQ ID NO: 518702 - RNA, 24 nt, Human
uccugaguagcugggauuacaggc

SEQ ID NO: 518703 - RNA, 25 nt, Human
uccugguguggcaaugaucacucuu

SEQ ID NO: 518704 - RNA, 19 nt, Human
ucgcugugucucccaggcu

SEQ ID NO: 518705 - RNA, 21 nt, Human
ucucaccccaugccugcugac

SEQ ID NO: 518706 - RNA, 24 nt, Human
ucucccaggcuggagugcaguggu

SEQ ID NO: 518707 - RNA, 20 nt, Human
ucuccuucaaagggaagaag

SEQ ID NO: 518708 - RNA, 23 nt, Human
ucucgcugugucucccaggcugg

SEQ ID NO: 518709 - RNA, 24 nt, Human
ucucgcugugucucccaggcugga

SEQ ID NO: 518710 - RNA, 22 nt, Human
ucugccuuccagauugaagcaa

SEQ ID NO: 518711 - RNA, 24 nt, Human
ucugcggccguuuacuaagcguga

SEQ ID NO: 518712 - RNA, 23 nt, Human
ucuugaacuccugaccucaggug

SEQ ID NO: 518713 - RNA, 22 nt, Human
ucuuguugcccaggcuggaaug

SEQ ID NO: 518714 - RNA, 18 nt, Human
ugaaauaacagaacagga

SEQ ID NO: 518715 - RNA, 21 nt, Human
ugaaggaggaacgcuuggccc

SEQ ID NO: 518716 - RNA, 18 nt, Human
ugaccucaagugaucugc

SEQ ID NO: 518717 - RNA, 24 nt, Human
ugaccucaagugaucugccugccu

SEQ ID NO: 518718 - RNA, 21 nt, Human
ugaccucaggugauccaccca

SEQ ID NO: 518719 - RNA, 24 nt, Human
ugaccucaggugauccacccaccu

SEQ ID NO: 518720 - RNA, 20 nt, Human
ugacucaacacagcacccgg

SEQ ID NO: 518721 - RNA, 21 nt, Human
ugaggucauaaccagaggacu

SEQ ID NO: 518722 - RNA, 24 nt, Human
ugauccacccaccuuggccuccca

SEQ ID NO: 518723 - RNA, 22 nt, Human
ugcaguggugccaucucagcuc

SEQ ID NO: 518724 - RNA, 21 nt, Human
ugcccagccucuaaaaggcac

SEQ ID NO: 518725 - RNA, 21 nt, Human
ugcccaggcuggaaugcaaug

SEQ ID NO: 518726 - RNA, 19 nt, Human
ugccccaacugggucccau

SEQ ID NO: 518727 - RNA, 24 nt, Human
ugccucagccuccugaguagcugg

SEQ ID NO: 518728 - RNA, 22 nt, Human
ugccucagcuuuccccaguagc

SEQ ID NO: 518729 - RNA, 25 nt, Human
ugccucagcuuuccccaguagcugg

SEQ ID NO: 518730 - RNA, 18 nt, Human
ugccugccuuggccuccc

SEQ ID NO: 518731 - RNA, 26 nt, Human
ugcugggauuacaagcgugagccacc

SEQ ID NO: 518732 - RNA, 23 nt, Human
ugcugggccacaccccaagugac

SEQ ID NO: 518733 - RNA, 22 nt, Human
uggaggcucagaaggaaagugu

SEQ ID NO: 518734 - RNA, 18 nt, Human
uggagugcaguggugcca

SEQ ID NO: 518735 - RNA, 28 nt, Human
uggagugcaguggugccauccuagcacg

SEQ ID NO: 518736 - RNA, 23 nt, Human
uggagugcaguggugccaucuca

SEQ ID NO: 518737 - RNA, 28 nt, Human
uggagugcaguggugccauggcucuagc

SEQ ID NO: 518738 - RNA, 24 nt, Human
uggccaggcuggucucaaacuccu

SEQ ID NO: 518739 - RNA, 24 nt, Human
uggccaggcuggucuugaacuccu

SEQ ID NO: 518740 - RNA, 21 nt, Human
uggccccugcacccuguuccc

SEQ ID NO: 518741 - RNA, 18 nt, Human
ugggauuacaagcgugag

SEQ ID NO: 518742 - RNA, 22 nt, Human
ugggauuacaagcgugagccac

SEQ ID NO: 518743 - RNA, 23 nt, Human
ugggauuacaagcgugagccacc

SEQ ID NO: 518744 - RNA, 24 nt, Human
ugggauuacaagcgugagccacca

SEQ ID NO: 518745 - RNA, 25 nt, Human
ugggauuacaagcgugagccaccau

SEQ ID NO: 518746 - RNA, 22 nt, Human
ugggauuacaggcaccugcuac

SEQ ID NO: 518747 - RNA, 24 nt, Human
ugggauuacaggcaccugcuacca

SEQ ID NO: 518748 - RNA, 25 nt, Human
ugggauuacaggcaccugcuaccau

SEQ ID NO: 518749 - RNA, 18 nt, Human
ugggauuacaggcaugag

SEQ ID NO: 518750 - RNA, 19 nt, Human
ugggauuacaggcaugagc

SEQ ID NO: 518751 - RNA, 22 nt, Human
ugggauuacaggcaugagccac

SEQ ID NO: 518752 - RNA, 23 nt, Human
ugggauuacaggcaugagccacc

SEQ ID NO: 518753 - RNA, 24 nt, Human
ugggauuacaggcaugagccacca

SEQ ID NO: 518754 - RNA, 24 nt, Human
ugggauuacaggcaugagccacca

SEQ ID NO: 518755 - RNA, 22 nt, Human
ugggauuacaggcgcacgccac

SEQ ID NO: 518756 - RNA, 24 nt, Human
ugggauuacaggcgcacgccacca

SEQ ID NO: 518757 - RNA, 20 nt, Human
ugggcugcagggcccaagua

SEQ ID NO: 518758 - RNA, 19 nt, Human
uggugcaaucucacugcaa

SEQ ID NO: 518759 - RNA, 24 nt, Human
uggugccaucucagcucacugcaa

SEQ ID NO: 518760 - RNA, 21 nt, Human
uguauuuuuaguagaaacggg

SEQ ID NO: 518761 - RNA, 21 nt, Human
ugucucccaggcuggagugca

SEQ ID NO: 518762 - RNA, 23 nt, Human
ugucugcggaccacccucuccuc

SEQ ID NO: 518763 - RNA, 19 nt, Human
uuacaggcaccugcuacca

SEQ ID NO: 518764 - RNA, 22 nt, Human
uuaguagaaacgggguuuugcc

SEQ ID NO: 518765 - RNA, 24 nt, Human
uuaguagaaacgggguuuugccgu

SEQ ID NO: 518766 - RNA, 24 nt, Human
uuaguagagacaggguuucaccau

SEQ ID NO: 518767 - RNA, 21 nt, Human
uucaagcaaugcuccugccuc

SEQ ID NO: 518768 - RNA, 19 nt, Human
uucacugcccagcgggcac

SEQ ID NO: 518769 - RNA, 22 nt, Human
uuccaccgccaccacugcuccc

SEQ ID NO: 518770 - RNA, 26 nt, Human
uuccaccgccaccacugcucccggau

SEQ ID NO: 518771 - RNA, 24 nt, Human
uuccagauugaagcaauucuccug

SEQ ID NO: 518772 - RNA, 24 nt, Human
uucccucuuguugcccaggcugga

SEQ ID NO: 518773 - RNA, 24 nt, Human
uucccuggaaguggggcaggguca

SEQ ID NO: 518774 - RNA, 18 nt, Human
uugcccaggcuggaaugc

SEQ ID NO: 518775 - RNA, 19 nt, Human
uugccguguuggccaggcu

SEQ ID NO: 518776 - RNA, 24 nt, Human
uugccguguuggccaggcuggucu

SEQ ID NO: 518777 - RNA, 18 nt, Human
uuggccucccaaagugcu

SEQ ID NO: 518778 - RNA, 18 nt, Human
uuggccucccaaagugcu

SEQ ID NO: 518779 - RNA, 23 nt, Human
uuguugcccaggcuggaaugcaa

SEQ ID NO: 518780 - RNA, 24 nt, Human
uuucaccauguuggccaggcuggu

SEQ ID NO: 518781 - RNA, 24 nt, Human
uuucccucuuguugcccaggcugg

SEQ ID NO: 518782 - RNA, 20 nt, Human
uuugguuauaacaauugugg

SEQ ID NO: 518783 - RNA, 22 nt, Human
uuuguccucaaacagcucaacc

SEQ ID NO: 518784 - RNA, 24 nt, Human
uuuuuaguagaaacgggguuuugc

SEQ ID NO: 518785 - RNA, 24 nt, Human
uuuuuaguagagacaggguuucac

SEQ ID NO: 518786 - RNA, 18 nt, Human
uuuuuguauuuuuaguag

SEQ ID NO: 518787 - RNA, 20 nt, Human
uuuuuguauuuuuaguagag

SEQ ID NO: 518788 - RNA, 19 nt, Human
aaacaaaacaaaacagcaa

SEQ ID NO: 518789 - RNA, 27 nt, Human
aaacaaaacagcaaauagaagggaccc

SEQ ID NO: 518790 - RNA, 19 nt, Human
aaccuggaggaguagggcu

SEQ ID NO: 518791 - RNA, 19 nt, Human
aagcuuccaugauccaagu

SEQ ID NO: 518792 - RNA, 20 nt, Human
aauguacagagacuuuuuuu

SEQ ID NO: 518793 - RNA, 19 nt, Human
acaaaacagcaaauagaag

SEQ ID NO: 518794 - RNA, 20 nt, Human
acaaaacagcaaauagaagu

SEQ ID NO: 518795 - RNA, 21 nt, Human
acagccuuuaggaaaaagggg

SEQ ID NO: 518796 - RNA, 21 nt, Human
acccaguaaaaccugauggac

SEQ ID NO: 518797 - RNA, 24 nt, Human
acuuucuccuuuaaaaucucuuuu

SEQ ID NO: 518798 - RNA, 24 nt, Human
agcuguuuguuugaagacaucaga

SEQ ID NO: 518799 - RNA, 18 nt, Human
aggagacuuugaaaguag

SEQ ID NO: 518800 - RNA, 18 nt, Human
aggagguccuaacgggga

SEQ ID NO: 518801 - RNA, 23 nt, Human
aggaugaaaagggggaagucagg

SEQ ID NO: 518802 - RNA, 24 nt, Human
auaaaaaaacaaaacaaaacagca

SEQ ID NO: 518803 - RNA, 24 nt, Human
caaaacaaaacagcaaauagaagu

SEQ ID NO: 518804 - RNA, 19 nt, Human
caaccuggaggaguagggc

SEQ ID NO: 518805 - RNA, 21 nt, Human
caacucaacuuccagaagaca

SEQ ID NO: 518806 - RNA, 21 nt, Human
caacuggaccccuucgggguu

SEQ ID NO: 518807 - RNA, 20 nt, Human
caagagaaggggacaaacag

SEQ ID NO: 518808 - RNA, 20 nt, Human
cacacacgcucuaguagagc

SEQ ID NO: 518809 - RNA, 22 nt, Human
cacacauaaaaaaacaaaacaa

SEQ ID NO: 518810 - RNA, 21 nt, Human
cacuuugugcucagcaaauuu

SEQ ID NO: 518811 - RNA, 25 nt, Human
cagaagacaucuauagcaauagcag

SEQ ID NO: 518812 - RNA, 20 nt, Human
cagcacuaagaaaugucauu

SEQ ID NO: 518813 - RNA, 22 nt, Human
cagcagcgcgguucacgcagag

SEQ ID NO: 518814 - RNA, 19 nt, Human
cagcagggaacugggccuc

SEQ ID NO: 518815 - RNA, 20 nt, Human
cagcaucaaaaauguauaca

SEQ ID NO: 518816 - RNA, 18 nt, Human
caggaucaggaugaaaag

SEQ ID NO: 518817 - RNA, 20 nt, Human
caggguaugagcccagauuu

SEQ ID NO: 518818 - RNA, 19 nt, Human
caucuggggauuuucucac

SEQ ID NO: 518819 - RNA, 22 nt, Human
cauuuugcuacuuccuguuucc

SEQ ID NO: 518820 - RNA, 23 nt, Human
ccagcaguguuuauaugcuuucu

SEQ ID NO: 518821 - RNA, 23 nt, Human
cccaauauauucagucauucaga

SEQ ID NO: 518822 - RNA, 24 nt, Human
ccccaggcagccacgaacuggcuu

SEQ ID NO: 518823 - RNA, 18 nt, Human
ccccuggggacagguccc

SEQ ID NO: 518824 - RNA, 20 nt, Human
ccccuggggacaggucccag

SEQ ID NO: 518825 - RNA, 24 nt, Human
ccuacaagcuuccaugauccaagu

SEQ ID NO: 518826 - RNA, 23 nt, Human
ccugacccagcccccuuuccagc

SEQ ID NO: 518827 - RNA, 20 nt, Human
cucugcuucagcugaucaga

SEQ ID NO: 518828 - RNA, 24 nt, Human
cuuccuguuucccaagagucucug

SEQ ID NO: 518829 - RNA, 18 nt, Human
gaaaaaggggaggagggu

SEQ ID NO: 518830 - RNA, 20 nt, Human
gaaugagggugggucacagg

SEQ ID NO: 518831 - RNA, 21 nt, Human
gaauguacagagacuuuuuuu

SEQ ID NO: 518832 - RNA, 18 nt, Human
gacuuguugcugcucuuc

SEQ ID NO: 518833 - RNA, 20 nt, Human
gagcagcagcgcgguucacg

SEQ ID NO: 518834 - RNA, 18 nt, Human
gagccugggcaggguggg

SEQ ID NO: 518835 - RNA, 19 nt, Human
gagcugguugcagcaggga

SEQ ID NO: 518836 - RNA, 18 nt, Human
gagguccuaacggggagg

SEQ ID NO: 518837 - RNA, 18 nt, Human
gcauuuugcuacuuccug

SEQ ID NO: 518838 - RNA, 19 nt, Human
gcuugcuccguucagauuu

SEQ ID NO: 518839 - RNA, 24 nt, Human
ggaauuucccccuuuugaccacac

SEQ ID NO: 518840 - RNA, 18 nt, Human
ggacaaacagccuuuagg

SEQ ID NO: 518841 - RNA, 21 nt, Human
ggacuacaugaaggaugaggc

SEQ ID NO: 518842 - RNA, 21 nt, Human
ggcagggugggugucaagugg

SEQ ID NO: 518843 - RNA, 20 nt, Human
guaaaaccugauggacuugu

SEQ ID NO: 518844 - RNA, 21 nt, Human
guggcucuggcaacuggaccc

SEQ ID NO: 518845 - RNA, 23 nt, Human
uaaaaaaggcacacacgcucuag

SEQ ID NO: 518846 - RNA, 22 nt, Human
uaaagaaaucauuacuccuuuu

SEQ ID NO: 518847 - RNA, 23 nt, Human
uaaugggucuuaauuagccaaca

SEQ ID NO: 518848 - RNA, 18 nt, Human
uacagugauguaguggga

SEQ ID NO: 518849 - RNA, 22 nt, Human
uagaauaaauauagaauaggug

SEQ ID NO: 518850 - RNA, 18 nt, Human
uagaauaucuauccucua

SEQ ID NO: 518851 - RNA, 22 nt, Human
uagauuaaaacccaguaaaacc

SEQ ID NO: 518852 - RNA, 19 nt, Human
uagcaauagcagcaucaaa

SEQ ID NO: 518853 - RNA, 23 nt, Human
uagcagcagcucguuucaagagg

SEQ ID NO: 518854 - RNA, 21 nt, Human
uaggcugucaugauggagucu

SEQ ID NO: 518855 - RNA, 23 nt, Human
uaggggccaaaauuccugcuauu

SEQ ID NO: 518856 - RNA, 25 nt, Human
uauagcaagugacugugagggacac

SEQ ID NO: 518857 - RNA, 22 nt, Human
uauagcaauagcagcaucaaaa

SEQ ID NO: 518858 - RNA, 22 nt, Human
uauuuugcguaaguguacagua

SEQ ID NO: 518859 - RNA, 20 nt, Human
ucaagagaaggggacaaaca

SEQ ID NO: 518860 - RNA, 18 nt, Human
ucagucauucagaaucug

SEQ ID NO: 518861 - RNA, 21 nt, Human
uccacauagugaaagacaaau

SEQ ID NO: 518862 - RNA, 20 nt, Human
ucccagaagaaaaauggaaa

SEQ ID NO: 518863 - RNA, 24 nt, Human
ucccuaggggccaaaauuccugcu

SEQ ID NO: 518864 - RNA, 23 nt, Human
ucuauagcaauagcagcaucaaa

SEQ ID NO: 518865 - RNA, 24 nt, Human
ucucuuaaacagcaguuuuccguu

SEQ ID NO: 518866 - RNA, 21 nt, Human
ucugaggcaguauccagggcu

SEQ ID NO: 518867 - RNA, 18 nt, Human
ucugggacuucgccaaug

SEQ ID NO: 518868 - RNA, 18 nt, Human
ucuucaaggugggacuga

SEQ ID NO: 518869 - RNA, 20 nt, Human
ugacccagcccccuuuccag

SEQ ID NO: 518870 - RNA, 24 nt, Human
ugacccagcccccuuuccagcagg

SEQ ID NO: 518871 - RNA, 18 nt, Human
ugcccggagacuuguugc

SEQ ID NO: 518872 - RNA, 20 nt, Human
uggauuccuaaagccuaugc

SEQ ID NO: 518873 - RNA, 22 nt, Human
ugggaauggaaaugauucacgg

SEQ ID NO: 518874 - RNA, 26 nt, Human
ugggcagggugggugucaaguggcuc

SEQ ID NO: 518875 - RNA, 21 nt, Human
ugguugcagcagggaacuggg

SEQ ID NO: 518876 - RNA, 24 nt, Human
ugucuagaauuuucaaguguagga

SEQ ID NO: 518877 - RNA, 21 nt, Human
uucaagaggcuggguguugcg

SEQ ID NO: 518878 - RNA, 24 nt, Human
uucacgcagagagcaccccaggca

SEQ ID NO: 518879 - RNA, 23 nt, Human
uuccauuaguuaucccaacacaa

SEQ ID NO: 518880 - RNA, 23 nt, Human
uuccugagggacuguuuuugagc

SEQ ID NO: 518881 - RNA, 22 nt, Human
uuccuguuucccaagagucucu

SEQ ID NO: 518882 - RNA, 23 nt, Human
uugauuguuggaagcugucauua

SEQ ID NO: 518883 - RNA, 18 nt, Human
uugcuccguucagauuuc

SEQ ID NO: 518884 - RNA, 25 nt, Human
uuggacuacaugaaggaugaggccg

SEQ ID NO: 518885 - RNA, 20 nt, Human
uuuaggaaaaaggggaggag

SEQ ID NO: 518886 - RNA, 23 nt, Human
uuugugcucagcaaauuugacag

SEQ ID NO: 518887 - RNA, 23 nt, Human
uuuguggggaggauuccucccug

SEQ ID NO: 518888 - RNA, 19 nt, Human
uuuguuggacuacaugaag

SEQ ID NO: 518889 - RNA, 26 nt, Human
uuuuaauagaauuuuaaacccagagu

SEQ ID NO: 518890 - RNA, 24 nt, Human
aaaaggcaacaaauauuuaaaaaa

SEQ ID NO: 518891 - RNA, 19 nt, Human
aaauacuugaauacuucuc

SEQ ID NO: 518892 - RNA, 21 nt, Human
aacacaaaagaagaaaacaaa

SEQ ID NO: 518893 - RNA, 18 nt, Human
aagaagaaaacaaagagu

SEQ ID NO: 518894 - RNA, 24 nt, Human
aauguaucaaaacauaauagagaa

SEQ ID NO: 518895 - RNA, 19 nt, Human
acaaaagaagaaaacaaag

SEQ ID NO: 518896 - RNA, 25 nt, Human
acauuaaaguauuuuugaaaaggaa

SEQ ID NO: 518897 - RNA, 21 nt, Human
acuaccauuuacuaaaauguc

SEQ ID NO: 518898 - RNA, 21 nt, Human
agaacacaaaagaagaaaaca

SEQ ID NO: 518899 - RNA, 23 nt, Human
auaaauacuugaauacuucucuu

SEQ ID NO: 518900 - RNA, 18 nt, Human
auaauagagaaccaaaua

SEQ ID NO: 518901 - RNA, 22 nt, Human
auaauagagaaccaaauacauc

SEQ ID NO: 518902 - RNA, 21 nt, Human
caccaugguaacuuacacuca

SEQ ID NO: 518903 - RNA, 19 nt, Human
cacucacuucaggcccagg

SEQ ID NO: 518904 - RNA, 25 nt, Human
cuugaauacuucucuucaugugccu

SEQ ID NO: 518905 - RNA, 20 nt, Human
gaagaaaacaaagaguuuca

SEQ ID NO: 518906 - RNA, 18 nt, Human
uaaaacuaagcugccacc

SEQ ID NO: 518907 - RNA, 19 nt, Human
uaaaacuaagcugccacca

SEQ ID NO: 518908 - RNA, 19 nt, Human
uaagaugggucuucuuuca

SEQ ID NO: 518909 - RNA, 20 nt, Human
uaauauaucaaguagcaagg

SEQ ID NO: 518910 - RNA, 18 nt, Human
uaauuuaacucacuacca

SEQ ID NO: 518911 - RNA, 18 nt, Human
uagaacacaaaagaagaa

SEQ ID NO: 518912 - RNA, 21 nt, Human
uagaacacaaaagaagaaaac

SEQ ID NO: 518913 - RNA, 24 nt, Human
uaguaaaacuaagcugccaccaug

SEQ ID NO: 518914 - RNA, 22 nt, Human
uauuggauaaacuuugaaaagc

SEQ ID NO: 518915 - RNA, 23 nt, Human
ucaaagauuuuaaauauauuuuu

SEQ ID NO: 518916 - RNA, 23 nt, Human
ucugcuugcugaaaguacuuggg

SEQ ID NO: 518917 - RNA, 21 nt, Human
uuagaacacaaaagaagaaaa

SEQ ID NO: 518918 - RNA, 20 nt, Human
uugcuugguuuugaagugau

SEQ ID NO: 518919 - RNA, 23 nt, Human
uuuuaugggcacauauauuuaca

SEQ ID NO: 518920 - RNA, 19 nt, Human
uuuuuuuuuuuuucacuuu

SEQ ID NO: 518921 - RNA, 23 nt, Human
uuuuuuuuuuuuuuuuucacuuu

SEQ ID NO: 518922 - RNA, 25 nt, Human
uuuuuuuuuuuuuuuuucacuuuaa

SEQ ID NO: 518923 - RNA, 26 nt, Human
uuuuuuuuuuuuuuuuucacuuuaau

SEQ ID NO: 518924 - RNA, 20 nt, Human
aaagcagagacaaucaaaga

SEQ ID NO: 518925 - RNA, 20 nt, Human
acaaucaaagaaaagcugga

SEQ ID NO: 518926 - RNA, 25 nt, Human
agacaaucaaagaaaagcuggagaa

SEQ ID NO: 518927 - RNA, 20 nt, Human
agugauggaaagcagcagaa

SEQ ID NO: 518928 - RNA, 20 nt, Human
cagcuuccugauccucaucu

SEQ ID NO: 518929 - RNA, 18 nt, Human
cccaugaucccucugaac

SEQ ID NO: 518930 - RNA, 25 nt, Human
ccucugaacaccagcuuccugaucc

SEQ ID NO: 518931 - RNA, 20 nt, Human
cgcuugaaaauccaguuuaa

SEQ ID NO: 518932 - RNA, 22 nt, Human
gagacaaucaaagaaaagcugg

SEQ ID NO: 518933 - RNA, 20 nt, Human
ggaaagcagcagaaguaaaa

SEQ ID NO: 518934 - RNA, 24 nt, Human
ucaaagaaaagcuggagaaccucu

SEQ ID NO: 518935 - RNA, 22 nt, Human
uccuauaacagacaaaucgcuu

SEQ ID NO: 518936 - RNA, 20 nt, Human
uggcaaaauagugauggaaa

SEQ ID NO: 518937 - RNA, 21 nt, Human
uuaauggcaaaauagugauuu

SEQ ID NO: 518938 - RNA, 20 nt, Human
uuuuuuuuuuuugcaagagu

SEQ ID NO: 518939 - RNA, 18 nt, Human
uuuuuuuuuuuuuuuuug

SEQ ID NO: 518940 - RNA, 20 nt, Human
aaaaccccaaaaccagcccc

SEQ ID NO: 518941 - RNA, 23 nt, Human
aaaaccccaaaaccagccccugc

SEQ ID NO: 518942 - RNA, 19 nt, Human
aaaccccaaaaccagcccc

SEQ ID NO: 518943 - RNA, 24 nt, Human
aaaccucaggcuccccauaacccc

SEQ ID NO: 518944 - RNA, 23 nt, Human
aacccagccccauuacaccccuu

SEQ ID NO: 518945 - RNA, 21 nt, Human
aagcagcaggggagggggccu

SEQ ID NO: 518946 - RNA, 18 nt, Human
aagcaggaaaaccccaaa

SEQ ID NO: 518947 - RNA, 21 nt, Human
aaggccccuccucuggggagc

SEQ ID NO: 518948 - RNA, 20 nt, Human
aaucucaucucuccacccag

SEQ ID NO: 518949 - RNA, 20 nt, Human
acaagcaggaaaaccccaaa

SEQ ID NO: 518950 - RNA, 26 nt, Human
acccagcacccccagccuggcuccag

SEQ ID NO: 518951 - RNA, 21 nt, Human
accccaaaaccagccccugca

SEQ ID NO: 518952 - RNA, 24 nt, Human
accccagacccucagggagggccc

SEQ ID NO: 518953 - RNA, 24 nt, Human
accccaugaggcacccccuaaauc

SEQ ID NO: 518954 - RNA, 23 nt, Human
acccccagccuggcuccagccug

SEQ ID NO: 518955 - RNA, 25 nt, Human
acccccuccuuccccuucccuccag

SEQ ID NO: 518956 - RNA, 21 nt, Human
accccuaacugcggaaggagc

SEQ ID NO: 518957 - RNA, 19 nt, Human
accugcacguucugggccu

SEQ ID NO: 518958 - RNA, 18 nt, Human
acggccugugccaugugg

SEQ ID NO: 518959 - RNA, 21 nt, Human
acucacucccagcauccccca

SEQ ID NO: 518960 - RNA, 18 nt, Human
acucaggacacuuccccu

SEQ ID NO: 518961 - RNA, 18 nt, Human
agaccugugggccaggcg

SEQ ID NO: 518962 - RNA, 22 nt, Human
agcaggggagggggccuggggg

SEQ ID NO: 518963 - RNA, 23 nt, Human
agccccccagcaguguccagccc

SEQ ID NO: 518964 - RNA, 23 nt, Human
aggaacaagaagcugaggaggga

SEQ ID NO: 518965 - RNA, 23 nt, Human
aggaaggauggcagcacccauga

SEQ ID NO: 518966 - RNA, 21 nt, Human
aggccaaagccugaccccaga

SEQ ID NO: 518967 - RNA, 19 nt, Human
aggccacagaaggacagga

SEQ ID NO: 518968 - RNA, 23 nt, Human
aggcuggggccgggagaagggga

SEQ ID NO: 518969 - RNA, 19 nt, Human
agggaagagaugcgccaga

SEQ ID NO: 518970 - RNA, 21 nt, Human
agggaagagaugcgccagaga

SEQ ID NO: 518971 - RNA, 18 nt, Human
agggccaggagggcagca

SEQ ID NO: 518972 - RNA, 18 nt, Human
aggggagggggccugggg

SEQ ID NO: 518973 - RNA, 23 nt, Human
aggggagggggccuggggguccu

SEQ ID NO: 518974 - RNA, 19 nt, Human
auccaaagaagggacugga

SEQ ID NO: 518975 - RNA, 19 nt, Human
aucucacucacucacuccc

SEQ ID NO: 518976 - RNA, 18 nt, Human
aucucaucucuccaccca

SEQ ID NO: 518977 - RNA, 28 nt, Human
aucucaucucuccacccagcacccccag

SEQ ID NO: 518978 - RNA, 22 nt, Human
caagcaggaaaaccccaaaacc

SEQ ID NO: 518979 - RNA, 22 nt, Human
cacaagcaggaaaaccccaaaa

SEQ ID NO: 518980 - RNA, 24 nt, Human
cacaagcaggaaaaccccaaaacc

SEQ ID NO: 518981 - RNA, 24 nt, Human
cacaaggacauccaaagaagggac

SEQ ID NO: 518982 - RNA, 20 nt, Human
cacagaccagggugcccucc

SEQ ID NO: 518983 - RNA, 20 nt, Human
cacagcccugccccgccucc

SEQ ID NO: 518984 - RNA, 20 nt, Human
cacccagcacccccagccug

SEQ ID NO: 518985 - RNA, 23 nt, Human
cacccccagccuggcuccagccu

SEQ ID NO: 518986 - RNA, 19 nt, Human
cacccccuaaaucucaucu

SEQ ID NO: 518987 - RNA, 24 nt, Human
cacccccuaaaucucaucucucca

SEQ ID NO: 518988 - RNA, 21 nt, Human
caccucccucucuccaggaag

SEQ ID NO: 518989 - RNA, 19 nt, Human
cacggaggaugcagggcug

SEQ ID NO: 518990 - RNA, 23 nt, Human
cagaacaguggggaaagcgaggc

SEQ ID NO: 518991 - RNA, 24 nt, Human
cagaacccagccccauuacacccc

SEQ ID NO: 518992 - RNA, 19 nt, Human
cagagaccagggcugcggc

SEQ ID NO: 518993 - RNA, 18 nt, Human
cagagcugagccugccug

SEQ ID NO: 518994 - RNA, 28 nt, Human
cagaggccaaagccugaccccagacccu

SEQ ID NO: 518995 - RNA, 18 nt, Human
cagccccccagcaguguc

SEQ ID NO: 518996 - RNA, 21 nt, Human
caggaagggaggggcuuucca

SEQ ID NO: 518997 - RNA, 21 nt, Human
caggagggcagcagugcuccc

SEQ ID NO: 518998 - RNA, 23 nt, Human
caggagggcagcagugcucccuc

SEQ ID NO: 518999 - RNA, 19 nt, Human
caggcgccaccacacgucc

SEQ ID NO: 519000 - RNA, 19 nt, Human
caggcuccccauaacccuc

SEQ ID NO: 519001 - RNA, 23 nt, Human
cauuucaccccaggccugcccac

SEQ ID NO: 519002 - RNA, 25 nt, Human
ccacaaggcacagaccagggugcca

SEQ ID NO: 519003 - RNA, 21 nt, Human
ccagaacaguggggaaagcga

SEQ ID NO: 519004 - RNA, 21 nt, Human
ccaggcccagagugacucaca

SEQ ID NO: 519005 - RNA, 22 nt, Human
cccacugggcucacaccagcuu

SEQ ID NO: 519006 - RNA, 23 nt, Human
cccauaaaaccucaggcucccca

SEQ ID NO: 519007 - RNA, 18 nt, Human
cccaugaggcacccccua

SEQ ID NO: 519008 - RNA, 19 nt, Human
ccccaaaaccagccccugc

SEQ ID NO: 519009 - RNA, 20 nt, Human
ccccaaaaccagccccugca

SEQ ID NO: 519010 - RNA, 18 nt, Human
ccccagacccucagggag

SEQ ID NO: 519011 - RNA, 20 nt, Human
ccccagcaguguccagcccu

SEQ ID NO: 519012 - RNA, 24 nt, Human
ccccaggcaaccacugaggaccuc

SEQ ID NO: 519013 - RNA, 21 nt, Human
ccccauaacccucacucagcc

SEQ ID NO: 519014 - RNA, 19 nt, Human
ccccccagcaguguccagc

SEQ ID NO: 519015 - RNA, 21 nt, Human
cccccgcucccgccgcucccc

SEQ ID NO: 519016 - RNA, 23 nt, Human
cccccuccuuccccuucccucca

SEQ ID NO: 519017 - RNA, 21 nt, Human
ccccuaaaucucaucucucca

SEQ ID NO: 519018 - RNA, 23 nt, Human
cccggcccgcccugcuucccccg

SEQ ID NO: 519019 - RNA, 18 nt, Human
cccugagugccaggcgcc

SEQ ID NO: 519020 - RNA, 18 nt, Human
cccugcuucccccgcucc

SEQ ID NO: 519021 - RNA, 18 nt, Human
ccgacgccgccgcuguug

SEQ ID NO: 519022 - RNA, 19 nt, Human
ccgacgccgccgcuguugc

SEQ ID NO: 519023 - RNA, 21 nt, Human
ccgacgccgccgcuguugccc

SEQ ID NO: 519024 - RNA, 19 nt, Human
ccgccgcccggcugcggcu

SEQ ID NO: 519025 - RNA, 18 nt, Human
ccgccgcucccgccgccc

SEQ ID NO: 519026 - RNA, 19 nt, Human
ccgccgcuguugcccgcgc

SEQ ID NO: 519027 - RNA, 19 nt, Human
ccgcuggcgccauggagcc

SEQ ID NO: 519028 - RNA, 19 nt, Human
ccgcuguugcccgcgcugc

SEQ ID NO: 519029 - RNA, 21 nt, Human
ccggccgccuuggcccccucc

SEQ ID NO: 519030 - RNA, 20 nt, Human
ccgggagaaggggauacaca

SEQ ID NO: 519031 - RNA, 19 nt, Human
ccuaaaucucaucucucca

SEQ ID NO: 519032 - RNA, 25 nt, Human
ccucaggagccccguccggcucccc

SEQ ID NO: 519033 - RNA, 21 nt, Human
ccucaggcuccccauaacccu

SEQ ID NO: 519034 - RNA, 22 nt, Human
ccucagggagggcccacccaac

SEQ ID NO: 519035 - RNA, 23 nt, Human
ccuccagccggccgccuuggccc

SEQ ID NO: 519036 - RNA, 27 nt, Human
ccugaagacccccuccuuccccuuccc

SEQ ID NO: 519037 - RNA, 22 nt, Human
ccugaccccagacccucaggga

SEQ ID NO: 519038 - RNA, 24 nt, Human
ccugcacguucugggccuuucuca

SEQ ID NO: 519039 - RNA, 19 nt, Human
ccugccccgccuccaccca

SEQ ID NO: 519040 - RNA, 20 nt, Human
ccugccccgccuccacccac

SEQ ID NO: 519041 - RNA, 18 nt, Human
ccuggcccagccagcucc

SEQ ID NO: 519042 - RNA, 20 nt, Human
ccuggggugggggaucccag

SEQ ID NO: 519043 - RNA, 24 nt, Human
cgauccggccgacgccgccgcugu

SEQ ID NO: 519044 - RNA, 22 nt, Human
cgccgcccggcugcggcuuccg

SEQ ID NO: 519045 - RNA, 21 nt, Human
cgccgcuguugcccgcgcugc

SEQ ID NO: 519046 - RNA, 20 nt, Human
cgccuuggcccccucccugc

SEQ ID NO: 519047 - RNA, 23 nt, Human
cgcggcccgauccggccgacgcc

SEQ ID NO: 519048 - RNA, 18 nt, Human
cggaagggaacggccugu

SEQ ID NO: 519049 - RNA, 18 nt, Human
cucacucccagcaucccc

SEQ ID NO: 519050 - RNA, 21 nt, Human
cucacucccagcaucccccag

SEQ ID NO: 519051 - RNA, 25 nt, Human
cucacucccagcaucccccaggaug

SEQ ID NO: 519052 - RNA, 19 nt, Human
cuccagaacaguggggaaa

SEQ ID NO: 519053 - RNA, 22 nt, Human
cuccagccggccgccuuggccc

SEQ ID NO: 519054 - RNA, 21 nt, Human
cuccccauaacccucacucag

SEQ ID NO: 519055 - RNA, 18 nt, Human
cuccugggugagugggcg

SEQ ID NO: 519056 - RNA, 21 nt, Human
gaacccacugggcucacacca

SEQ ID NO: 519057 - RNA, 22 nt, Human
gaagacagaacccagccccauu

SEQ ID NO: 519058 - RNA, 19 nt, Human
gaagagaugcgccagagac

SEQ ID NO: 519059 - RNA, 22 nt, Human
gagaaaacagggagcaagaaag

SEQ ID NO: 519060 - RNA, 21 nt, Human
gagaggcagcagaggccaaag

SEQ ID NO: 519061 - RNA, 19 nt, Human
gaggaccucgggguggccu

SEQ ID NO: 519062 - RNA, 20 nt, Human
gagggggccuggggguccug

SEQ ID NO: 519063 - RNA, 18 nt, Human
gaucccaggccugggccc

SEQ ID NO: 519064 - RNA, 20 nt, Human
gcagcaggggagggggccug

SEQ ID NO: 519065 - RNA, 25 nt, Human
gccuggcuccagccugaagaccccc

SEQ ID NO: 519066 - RNA, 22 nt, Human
gcggcccgauccggccgacgcc

SEQ ID NO: 519067 - RNA, 21 nt, Human
gcuuccgcuccggcuccgcuc

SEQ ID NO: 519068 - RNA, 19 nt, Human
ggaaaaccccaaaaccagc

SEQ ID NO: 519069 - RNA, 25 nt, Human
ggacaggaagggaggggcuuuccag

SEQ ID NO: 519070 - RNA, 23 nt, Human
ggacagggaccagagggagaccu

SEQ ID NO: 519071 - RNA, 21 nt, Human
ggacuggauuuucagagggag

SEQ ID NO: 519072 - RNA, 21 nt, Human
ggaggaugcagggcugggagg

SEQ ID NO: 519073 - RNA, 20 nt, Human
ggagggcccacccaaccugu

SEQ ID NO: 519074 - RNA, 23 nt, Human
ggccacagaaggacaggaaggga

SEQ ID NO: 519075 - RNA, 19 nt, Human
ggcccagccagcuccuggg

SEQ ID NO: 519076 - RNA, 18 nt, Human
ggccuggggguccugggg

SEQ ID NO: 519077 - RNA, 21 nt, Human
ggccuggggguccuggggugg

SEQ ID NO: 519078 - RNA, 19 nt, Human
ggcugggaggggaccccac

SEQ ID NO: 519079 - RNA, 21 nt, Human
gggagcaagaaaguguugacu

SEQ ID NO: 519080 - RNA, 23 nt, Human
gggcaggagggaggcaggcuggg

SEQ ID NO: 519081 - RNA, 20 nt, Human
gggccaggcgggcaggaggg

SEQ ID NO: 519082 - RNA, 19 nt, Human
ggggauggaggccacagaa

SEQ ID NO: 519083 - RNA, 22 nt, Human
ggggauggaggccacagaagga

SEQ ID NO: 519084 - RNA, 20 nt, Human
ggguccccuccuucacucag

SEQ ID NO: 519085 - RNA, 24 nt, Human
ggucgggccccgucccuccagccg

SEQ ID NO: 519086 - RNA, 18 nt, Human
guccauuucugcccugcc

SEQ ID NO: 519087 - RNA, 18 nt, Human
guccugugggucaaggcc

SEQ ID NO: 519088 - RNA, 18 nt, Human
uaacugcggaaggagcag

SEQ ID NO: 519089 - RNA, 25 nt, Human
uacaauaucagggagggaugauggg

SEQ ID NO: 519090 - RNA, 23 nt, Human
uagaggcgcagaucuucgggaca

SEQ ID NO: 519091 - RNA, 22 nt, Human
ucacaccagcuuucaccucccu

SEQ ID NO: 519092 - RNA, 18 nt, Human
ucacucacucacucccag

SEQ ID NO: 519093 - RNA, 19 nt, Human
ucagccaucucacucacuc

SEQ ID NO: 519094 - RNA, 20 nt, Human
ucagggagggcccacccaac

SEQ ID NO: 519095 - RNA, 23 nt, Human
ucaucccacagaagagaaaacag

SEQ ID NO: 519096 - RNA, 18 nt, Human
uccaaagaagggacugga

SEQ ID NO: 519097 - RNA, 23 nt, Human
uccagaacaguggggaaagcgag

SEQ ID NO: 519098 - RNA, 23 nt, Human
uccagccccccagcaguguccag

SEQ ID NO: 519099 - RNA, 18 nt, Human
uccccagagcugagccug

SEQ ID NO: 519100 - RNA, 20 nt, Human
uccccagagcugagccugcc

SEQ ID NO: 519101 - RNA, 23 nt, Human
ucccccgcucccgccgcucccgc

SEQ ID NO: 519102 - RNA, 19 nt, Human
ucccuccagaacagugggg

SEQ ID NO: 519103 - RNA, 18 nt, Human
ucccuccagccggccgcc

SEQ ID NO: 519104 - RNA, 19 nt, Human
uccgcuccggcuccgcucc

SEQ ID NO: 519105 - RNA, 20 nt, Human
ucgggacaagagggaagaga

SEQ ID NO: 519106 - RNA, 24 nt, Human
ugaagacccccuccuuccccuucc

SEQ ID NO: 519107 - RNA, 20 nt, Human
ugacucaggugggcccgcuc

SEQ ID NO: 519108 - RNA, 18 nt, Human
ugagaucaucccacagaa

SEQ ID NO: 519109 - RNA, 19 nt, Human
ugaggaccucgggguggcc

SEQ ID NO: 519110 - RNA, 23 nt, Human
ugaggagggacgacagccaggcc

SEQ ID NO: 519111 - RNA, 21 nt, Human
ugaugggaaccccucaaaagg

SEQ ID NO: 519112 - RNA, 23 nt, Human
ugccaggcgccaccacacguccu

SEQ ID NO: 519113 - RNA, 20 nt, Human
ugccccccgcaaagcagcag

SEQ ID NO: 519114 - RNA, 21 nt, Human
ugcccugccccccgcaaagca

SEQ ID NO: 519115 - RNA, 23 nt, Human
ugcccugccccccgcaaagcagc

SEQ ID NO: 519116 - RNA, 24 nt, Human
ugcucccucucccgguccuggccc

SEQ ID NO: 519117 - RNA, 18 nt, Human
uggcccagccagcuccug

SEQ ID NO: 519118 - RNA, 18 nt, Human
uggcgccauggagcccgg

SEQ ID NO: 519119 - RNA, 24 nt, Human
ugggugagugggcgggaacccacu

SEQ ID NO: 519120 - RNA, 18 nt, Human
uucaccucccucucucca

SEQ ID NO: 519121 - RNA, 21 nt, Human
uucccccgcucccgccgcucc

SEQ ID NO: 519122 - RNA, 22 nt, Human
uugcugccgcuccauccccaac

SEQ ID NO: 519123 - RNA, 23 nt, Human
aaagcccauguguguucucuagg

SEQ ID NO: 519124 - RNA, 25 nt, Human
aagaacacgagccgggauucaagcc

SEQ ID NO: 519125 - RNA, 22 nt, Human
aaugggcugccuccagggccca

SEQ ID NO: 519126 - RNA, 21 nt, Human
acagacaagggcuguugagcg

SEQ ID NO: 519127 - RNA, 23 nt, Human
acaggccuggggccuccuggggu

SEQ ID NO: 519128 - RNA, 22 nt, Human
acucaaauccagggcuaccucc

SEQ ID NO: 519129 - RNA, 24 nt, Human
acucaaauccagggcuaccuccuc

SEQ ID NO: 519130 - RNA, 24 nt, Human
acucccugaggggcccuccugggc

SEQ ID NO: 519131 - RNA, 24 nt, Human
agaacgggaagccuugacagggga

SEQ ID NO: 519132 - RNA, 18 nt, Human
agacaagggcuguugagc

SEQ ID NO: 519133 - RNA, 24 nt, Human
agcagccacagccccagcauccac

SEQ ID NO: 519134 - RNA, 21 nt, Human
agcagcuuggccagcagcccc

SEQ ID NO: 519135 - RNA, 18 nt, Human
agcauccccacaacaacc

SEQ ID NO: 519136 - RNA, 20 nt, Human
agccgggauucaagcccagg

SEQ ID NO: 519137 - RNA, 19 nt, Human
agcuacggcuggagggcug

SEQ ID NO: 519138 - RNA, 20 nt, Human
agcuggaucccgggcugaag

SEQ ID NO: 519139 - RNA, 22 nt, Human
agcuguggaaguugguccuugg

SEQ ID NO: 519140 - RNA, 19 nt, Human
aggaagguucucugccucc

SEQ ID NO: 519141 - RNA, 23 nt, Human
aggcaaaggugccggacggagga

SEQ ID NO: 519142 - RNA, 24 nt, Human
aggcagcauccccacaacaacccu

SEQ ID NO: 519143 - RNA, 18 nt, Human
aggcagggucccccugca

SEQ ID NO: 519144 - RNA, 18 nt, Human
aggcccagaacaaggacg

SEQ ID NO: 519145 - RNA, 18 nt, Human
agggguuuacucccugag

SEQ ID NO: 519146 - RNA, 21 nt, Human
agggguuuacucccugagggg

SEQ ID NO: 519147 - RNA, 20 nt, Human
auaaagacccucacguuaaa

SEQ ID NO: 519148 - RNA, 24 nt, Human
aucaggcagcauccccacaacaac

SEQ ID NO: 519149 - RNA, 23 nt, Human
augggccacagggucagagaugg

SEQ ID NO: 519150 - RNA, 22 nt, Human
auggugacaggguauguaucag

SEQ ID NO: 519151 - RNA, 24 nt, Human
caaagcccauguguguucucuagg

SEQ ID NO: 519152 - RNA, 26 nt, Human
caagaacacgagccgggauucaagcc

SEQ ID NO: 519153 - RNA, 22 nt, Human
cacaacaacccugugagguagg

SEQ ID NO: 519154 - RNA, 20 nt, Human
cacacagcacuggcaaccag

SEQ ID NO: 519155 - RNA, 23 nt, Human
cacacucaaauccagggcuaccu

SEQ ID NO: 519156 - RNA, 23 nt, Human
cagaaauagcaucacacagggac

SEQ ID NO: 519157 - RNA, 23 nt, Human
cagaacaaggacgccagcuccag

SEQ ID NO: 519158 - RNA, 21 nt, Human
cagcacuccacaggcaggugg

SEQ ID NO: 519159 - RNA, 21 nt, Human
cagcagaggugaaguuucuug

SEQ ID NO: 519160 - RNA, 23 nt, Human
cagcagccccugcacacccuggc

SEQ ID NO: 519161 - RNA, 18 nt, Human
cagcaggccuggcugaug

SEQ ID NO: 519162 - RNA, 19 nt, Human
cagcauccccacaacaacc

SEQ ID NO: 519163 - RNA, 26 nt, Human
cagcaugcgugaggugcagccugauc

SEQ ID NO: 519164 - RNA, 22 nt, Human
cagcugggcaggcagaagggaa

SEQ ID NO: 519165 - RNA, 23 nt, Human
caggcagaagggaaggguggaga

SEQ ID NO: 519166 - RNA, 25 nt, Human
caggcagaagggaaggguggagagu

SEQ ID NO: 519167 - RNA, 22 nt, Human
caggcagcauccccacaacaac

SEQ ID NO: 519168 - RNA, 21 nt, Human
caggggagcagccacagcccc

SEQ ID NO: 519169 - RNA, 18 nt, Human
cagggucccccugcagcc

SEQ ID NO: 519170 - RNA, 20 nt, Human
cagguggcucacagcaggcc

SEQ ID NO: 519171 - RNA, 21 nt, Human
caucacacagggacgcaugua

SEQ ID NO: 519172 - RNA, 23 nt, Human
caucccugcaccaguagcgggga

SEQ ID NO: 519173 - RNA, 20 nt, Human
caugguccacagaagcgggu

SEQ ID NO: 519174 - RNA, 20 nt, Human
ccaacccaaccccaaaugcu

SEQ ID NO: 519175 - RNA, 22 nt, Human
ccaacccaaccccaaaugcugg

SEQ ID NO: 519176 - RNA, 18 nt, Human
ccagaacaaggacgccag

SEQ ID NO: 519177 - RNA, 20 nt, Human
ccaggcuggaguagggccaa

SEQ ID NO: 519178 - RNA, 21 nt, Human
cccauguguguucucuaggca

SEQ ID NO: 519179 - RNA, 21 nt, Human
ccccugcagccuuugucccuc

SEQ ID NO: 519180 - RNA, 25 nt, Human
ccccuggggcugaaguagaugcugg

SEQ ID NO: 519181 - RNA, 18 nt, Human
cccugcaccaguagcggg

SEQ ID NO: 519182 - RNA, 18 nt, Human
ccgggauucaagcccagg

SEQ ID NO: 519183 - RNA, 18 nt, Human
ccuccagggcccaucggc

SEQ ID NO: 519184 - RNA, 19 nt, Human
ccuccugggcaggcagggu

SEQ ID NO: 519185 - RNA, 26 nt, Human
ccugcaacuggagcuggagcuggagc

SEQ ID NO: 519186 - RNA, 28 nt, Human
ccugcagcaagaacacgagccggggucc

SEQ ID NO: 519187 - RNA, 19 nt, Human
ccugcagccuuugucccuc

SEQ ID NO: 519188 - RNA, 26 nt, Human
ccuggggcugaaguagaugcuggagc

SEQ ID NO: 519189 - RNA, 22 nt, Human
cucaaauccagggcuaccuccu

SEQ ID NO: 519190 - RNA, 21 nt, Human
cucccgcagugcccgcuccuc

SEQ ID NO: 519191 - RNA, 22 nt, Human
cucccucagggagcuccaggcu

SEQ ID NO: 519192 - RNA, 18 nt, Human
cugaaguagaugcuggag

SEQ ID NO: 519193 - RNA, 24 nt, Human
cugcagcugagacagcagcuuggc

SEQ ID NO: 519194 - RNA, 24 nt, Human
cuggagcaggggcaggggaggcca

SEQ ID NO: 519195 - RNA, 21 nt, Human
cuggaucccgggcugaagcug

SEQ ID NO: 519196 - RNA, 18 nt, Human
cuggggccuccuggggug

SEQ ID NO: 519197 - RNA, 23 nt, Human
cugucccagagaggaagcagaga

SEQ ID NO: 519198 - RNA, 23 nt, Human
cugucgggcuccaaagcccaugu

SEQ ID NO: 519199 - RNA, 24 nt, Human
cuucuaggacugagcugccacuuu

SEQ ID NO: 519200 - RNA, 20 nt, Human
cuugacaggggaggccucug

SEQ ID NO: 519201 - RNA, 22 nt, Human
gaaauagcaucacacagggacg

SEQ ID NO: 519202 - RNA, 19 nt, Human
gaaccccuccaggggagca

SEQ ID NO: 519203 - RNA, 19 nt, Human
gaaggccacagagcugugg

SEQ ID NO: 519204 - RNA, 23 nt, Human
gagccggagcaggggauggagcu

SEQ ID NO: 519205 - RNA, 22 nt, Human
gagcugccacucagccuaccug

SEQ ID NO: 519206 - RNA, 18 nt, Human
gaggaagcagagaccaaa

SEQ ID NO: 519207 - RNA, 21 nt, Human
gaugggcucuggcuuggggag

SEQ ID NO: 519208 - RNA, 19 nt, Human
gcaccagucccugaguccc

SEQ ID NO: 519209 - RNA, 24 nt, Human
gcagcgccaguaacuucagcaugc

SEQ ID NO: 519210 - RNA, 18 nt, Human
gcaggcagaagggaaggg

SEQ ID NO: 519211 - RNA, 21 nt, Human
gcaggcucccucagggagcuc

SEQ ID NO: 519212 - RNA, 19 nt, Human
gcaguccugccacgcagcc

SEQ ID NO: 519213 - RNA, 19 nt, Human
gcaguccugccacgcagcc

SEQ ID NO: 519214 - RNA, 21 nt, Human
gcccugucccagagaggaagc

SEQ ID NO: 519215 - RNA, 24 nt, Human
gccgcagcuccacacgaugcuccu

SEQ ID NO: 519216 - RNA, 21 nt, Human
gccugcaacuggagcuggagc

SEQ ID NO: 519217 - RNA, 21 nt, Human
gcggcagcagcaggcccagaa

SEQ ID NO: 519218 - RNA, 21 nt, Human
gcuggagggcugggcagugcc

SEQ ID NO: 519219 - RNA, 22 nt, Human
ggaccacggcugcaggcaaagg

SEQ ID NO: 519220 - RNA, 18 nt, Human
ggagcugaggugggcgug

SEQ ID NO: 519221 - RNA, 20 nt, Human
ggaggagagugggcgacggg

SEQ ID NO: 519222 - RNA, 20 nt, Human
ggaguccccuggggcugaag

SEQ ID NO: 519223 - RNA, 20 nt, Human
ggcagcagcaggcccagaac

SEQ ID NO: 519224 - RNA, 20 nt, Human
ggcagcauccccacaacaac

SEQ ID NO: 519225 - RNA, 19 nt, Human
ggcagccgagggaagagcc

SEQ ID NO: 519226 - RNA, 18 nt, Human
ggcagcugggcaggcaga

SEQ ID NO: 519227 - RNA, 24 nt, Human
ggcaggcagaagggaaggguggag

SEQ ID NO: 519228 - RNA, 18 nt, Human
ggccccggggcagcuggg

SEQ ID NO: 519229 - RNA, 22 nt, Human
ggccuggggccuccuggggugg

SEQ ID NO: 519230 - RNA, 18 nt, Human
gggauugggagcagggag

SEQ ID NO: 519231 - RNA, 18 nt, Human
gggcaccggugggugcga

SEQ ID NO: 519232 - RNA, 18 nt, Human
gggcacgaagauggcgcc

SEQ ID NO: 519233 - RNA, 18 nt, Human
ggggauugggagcaggga

SEQ ID NO: 519234 - RNA, 19 nt, Human
ggggauugggagcagggag

SEQ ID NO: 519235 - RNA, 23 nt, Human
ggguggcagccgagggaagagcc

SEQ ID NO: 519236 - RNA, 19 nt, Human
ggguggcggcagcagcagg

SEQ ID NO: 519237 - RNA, 24 nt, Human
guggcggcagcagcaggcccagaa

SEQ ID NO: 519238 - RNA, 22 nt, Human
uaagugagccccuuagggguuu

SEQ ID NO: 519239 - RNA, 22 nt, Human
uaaugggcugccuccagggccc

SEQ ID NO: 519240 - RNA, 22 nt, Human
uacacacagcacuggcaaccag

SEQ ID NO: 519241 - RNA, 19 nt, Human
uagcaggguccucaguccu

SEQ ID NO: 519242 - RNA, 20 nt, Human
ucacagcaggccuggcugau

SEQ ID NO: 519243 - RNA, 21 nt, Human
ucagagaccuucuaggacuga

SEQ ID NO: 519244 - RNA, 21 nt, Human
ucagcagaggugaaguuucuu

SEQ ID NO: 519245 - RNA, 21 nt, Human
ucagccuaccugcaccagucc

SEQ ID NO: 519246 - RNA, 20 nt, Human
uccaaagcccauguguguuc

SEQ ID NO: 519247 - RNA, 23 nt, Human
uccacagaacgggaagccuugac

SEQ ID NO: 519248 - RNA, 21 nt, Human
uccacugccuaagguaccacu

SEQ ID NO: 519249 - RNA, 18 nt, Human
uccaggggagcagccaca

SEQ ID NO: 519250 - RNA, 23 nt, Human
ucccagagaggaagcagagaccc

SEQ ID NO: 519251 - RNA, 18 nt, Human
ucccagcagcugcuuagc

SEQ ID NO: 519252 - RNA, 22 nt, Human
uccccacaacaacccugugagg

SEQ ID NO: 519253 - RNA, 20 nt, Human
ucccccugcagccuuugucc

SEQ ID NO: 519254 - RNA, 19 nt, Human
ucccgggcugaagcuggag

SEQ ID NO: 519255 - RNA, 22 nt, Human
ucccugaggggcccuccugggc

SEQ ID NO: 519256 - RNA, 25 nt, Human
ucccugaggggcccuccugggcagg

SEQ ID NO: 519257 - RNA, 22 nt, Human
ucccugcaccaguagcggggau

SEQ ID NO: 519258 - RNA, 24 nt, Human
uccucacacucaaauccagggcua

SEQ ID NO: 519259 - RNA, 25 nt, Human
ucgcaccacaugggggaaggggccg

SEQ ID NO: 519260 - RNA, 20 nt, Human
ucguggccccggggcagcug

SEQ ID NO: 519261 - RNA, 24 nt, Human
ucuacgauagccaaguccuaggac

SEQ ID NO: 519262 - RNA, 23 nt, Human
ucuaggcccugucccagagaggg

SEQ ID NO: 519263 - RNA, 22 nt, Human
ucugcugugggcuuccucacac

SEQ ID NO: 519264 - RNA, 20 nt, Human
ugagcucgagccggagcagg

SEQ ID NO: 519265 - RNA, 23 nt, Human
ugagcucgagccggagcagggga

SEQ ID NO: 519266 - RNA, 22 nt, Human
ugaggcccagagcuugccagaa

SEQ ID NO: 519267 - RNA, 19 nt, Human
ugagucccagcagcugcuu

SEQ ID NO: 519268 - RNA, 18 nt, Human
ugcagccuggcagggcga

SEQ ID NO: 519269 - RNA, 21 nt, Human
ugcccacaucuggcacaucca

SEQ ID NO: 519270 - RNA, 19 nt, Human
ugcccgcuccuccgacagc

SEQ ID NO: 519271 - RNA, 19 nt, Human
ugcuggagcagggccugca

SEQ ID NO: 519272 - RNA, 21 nt, Human
uggcgcagcgccaguaacuuc

SEQ ID NO: 519273 - RNA, 18 nt, Human
uggcucacagcaggccug

SEQ ID NO: 519274 - RNA, 23 nt, Human
uggcugcaguaggcuuggcaugc

SEQ ID NO: 519275 - RNA, 22 nt, Human
uggcuuggggaguagcaggguc

SEQ ID NO: 519276 - RNA, 18 nt, Human
ugggagcagggagugcag

SEQ ID NO: 519277 - RNA, 18 nt, Human
ugggcugccuccagggcc

SEQ ID NO: 519278 - RNA, 24 nt, Human
ugggcugccuccagggcccaucgg

SEQ ID NO: 519279 - RNA, 23 nt, Human
uggggaguagcaggguccucagu

SEQ ID NO: 519280 - RNA, 19 nt, Human
uggggggugacuccugaga

SEQ ID NO: 519281 - RNA, 21 nt, Human
ugggguggcggcagcagcagg

SEQ ID NO: 519282 - RNA, 22 nt, Human
uggugcuucugugucuaucuuu

SEQ ID NO: 519283 - RNA, 19 nt, Human
uuccaaaaacgagccaggg

SEQ ID NO: 519284 - RNA, 19 nt, Human
acagcccagguggccggac

SEQ ID NO: 519285 - RNA, 24 nt, Human
agcacagcugccacucaccugccc

SEQ ID NO: 519286 - RNA, 21 nt, Human
caccaccuggcagggcagggc

SEQ ID NO: 519287 - RNA, 23 nt, Human
caccccaggguugcucuccugga

SEQ ID NO: 519288 - RNA, 19 nt, Human
cacugagcacugagaccag

SEQ ID NO: 519289 - RNA, 19 nt, Human
cagcccguggugggcacug

SEQ ID NO: 519290 - RNA, 21 nt, Human
ccagccccacgcugcggaugc

SEQ ID NO: 519291 - RNA, 23 nt, Human
ccaggagaacacgggcggcggga

SEQ ID NO: 519292 - RNA, 22 nt, Human
cccaggguugcucuccuggaac

SEQ ID NO: 519293 - RNA, 24 nt, Human
cccagugugcccaggggccaccga

SEQ ID NO: 519294 - RNA, 21 nt, Human
ccgcaggagcuggagcacagc

SEQ ID NO: 519295 - RNA, 21 nt, Human
ccuucagggcccagugugccc

SEQ ID NO: 519296 - RNA, 22 nt, Human
cggcgggagaggcccccaggcc

SEQ ID NO: 519297 - RNA, 21 nt, Human
cgggaugaagucagccucguu

SEQ ID NO: 519298 - RNA, 20 nt, Human
cgucacaggggacaccggug

SEQ ID NO: 519299 - RNA, 22 nt, Human
cuccccacaugucacugagcac

SEQ ID NO: 519300 - RNA, 19 nt, Human
gccacucaccugcccacca

SEQ ID NO: 519301 - RNA, 19 nt, Human
gccugagccuucagggccc

SEQ ID NO: 519302 - RNA, 19 nt, Human
gcucugcucauccagcccc

SEQ ID NO: 519303 - RNA, 20 nt, Human
gcuggaggagccgcugccug

SEQ ID NO: 519304 - RNA, 19 nt, Human
ggagcuccgccacagcccu

SEQ ID NO: 519305 - RNA, 19 nt, Human
ggcgcagggggcgggagcu

SEQ ID NO: 519306 - RNA, 21 nt, Human
ggcgggugaagggcguggggc

SEQ ID NO: 519307 - RNA, 18 nt, Human
gggcgcagggggcgggag

SEQ ID NO: 519308 - RNA, 19 nt, Human
gggcguggggccagguggu

SEQ ID NO: 519309 - RNA, 21 nt, Human
ggggacaccggugucauuggu

SEQ ID NO: 519310 - RNA, 21 nt, Human
uaccuuuuuugagggggagga

SEQ ID NO: 519311 - RNA, 18 nt, Human
ucacagugcuccucgucc

SEQ ID NO: 519312 - RNA, 18 nt, Human
uccagggcccauaaugcc

SEQ ID NO: 519313 - RNA, 19 nt, Human
ucguagugcaccccagggu

SEQ ID NO: 519314 - RNA, 18 nt, Human
ucugcacaccucugccgc

SEQ ID NO: 519315 - RNA, 20 nt, Human
ugagggggaggaggucccca

SEQ ID NO: 519316 - RNA, 18 nt, Human
ugaugaggcgggugaagg

SEQ ID NO: 519317 - RNA, 21 nt, Human
ugcacuugguccagggcccau

SEQ ID NO: 519318 - RNA, 20 nt, Human
ugcccaggggccaccgacag

SEQ ID NO: 519319 - RNA, 20 nt, Human
ugccugagccuucagggccc

SEQ ID NO: 519320 - RNA, 22 nt, Human
ugccuggcuugggugaugaggc

SEQ ID NO: 519321 - RNA, 19 nt, Human
uggaugguguacucguagu

SEQ ID NO: 519322 - RNA, 18 nt, Human
uggcagagagcaggugac

SEQ ID NO: 519323 - RNA, 21 nt, Human
uggcagggcagggcugcucgc

SEQ ID NO: 519324 - RNA, 19 nt, Human
uggugcgggaugaagucag

SEQ ID NO: 519325 - RNA, 24 nt, Human
uucagggcccagugugcccagggg

SEQ ID NO: 519326 - RNA, 23 nt, Human
uuuugagggggaggaggucccca

SEQ ID NO: 519327 - RNA, 24 nt, Human
aggagggagucuagcagcuguggg

SEQ ID NO: 519328 - RNA, 21 nt, Human
auuuggaggaggagggagucu

SEQ ID NO: 519329 - RNA, 20 nt, Human
cagcccagggguggggugcc

SEQ ID NO: 519330 - RNA, 21 nt, Human
cccauaccacucugccagacc

SEQ ID NO: 519331 - RNA, 19 nt, Human
ccccgggcccgcagggugc

SEQ ID NO: 519332 - RNA, 26 nt, Human
ccccuauguagccuuggccccagccc

SEQ ID NO: 519333 - RNA, 20 nt, Human
ccugagaugccuccagguga

SEQ ID NO: 519334 - RNA, 18 nt, Human
cgggcccgcagggugcug

SEQ ID NO: 519335 - RNA, 21 nt, Human
cucugguuucugagggccugg

SEQ ID NO: 519336 - RNA, 23 nt, Human
cucugguuucugagggccugggg

SEQ ID NO: 519337 - RNA, 20 nt, Human
cuggugguaugguaggucuc

SEQ ID NO: 519338 - RNA, 20 nt, Human
cugguuucugagggccuggg

SEQ ID NO: 519339 - RNA, 18 nt, Human
cugugggcaguggcugag

SEQ ID NO: 519340 - RNA, 20 nt, Human
gagggguguccuggggcccu

SEQ ID NO: 519341 - RNA, 19 nt, Human
gcaguggcugagccuggca

SEQ ID NO: 519342 - RNA, 19 nt, Human
ggcaguggcugagccuggc

SEQ ID NO: 519343 - RNA, 18 nt, Human
gggaugacacccgucacc

SEQ ID NO: 519344 - RNA, 18 nt, Human
ggggugcccauaccacuc

SEQ ID NO: 519345 - RNA, 21 nt, Human
ucugguuucugagggccuggg

SEQ ID NO: 519346 - RNA, 18 nt, Human
ugagaugccuccagguga

SEQ ID NO: 519347 - RNA, 19 nt, Human
ugagaugccuccaggugaa

SEQ ID NO: 519348 - RNA, 22 nt, Human
ugagggaccuagacccagccca

SEQ ID NO: 519349 - RNA, 20 nt, Human
ugagggccugggguugaagc

SEQ ID NO: 519350 - RNA, 21 nt, Human
ugagggccugggguugaagcu

SEQ ID NO: 519351 - RNA, 24 nt, Human
ugcccauaccacucugccagaccc

SEQ ID NO: 519352 - RNA, 23 nt, Human
uggaggaggagggagucuagcag

SEQ ID NO: 519353 - RNA, 23 nt, Human
uggcauggccuggccugagaugc

SEQ ID NO: 519354 - RNA, 19 nt, Human
uggcucugguuucugaggg

SEQ ID NO: 519355 - RNA, 24 nt, Human
uggcucugguuucugagggccugg

SEQ ID NO: 519356 - RNA, 21 nt, Human
uggcugagccuggcauggccu

SEQ ID NO: 519357 - RNA, 21 nt, Human
ugggcaguggcugagccuggc

SEQ ID NO: 519358 - RNA, 21 nt, Human
ugguaggucucauggcucugg

SEQ ID NO: 519359 - RNA, 22 nt, Human
ugugggcaguggcugagccugg

SEQ ID NO: 519360 - RNA, 18 nt, Human
uuuuuuuuuuuuuuuuug

SEQ ID NO: 519361 - RNA, 24 nt, Human
aaacaaacugaacugcauguucuu

SEQ ID NO: 519362 - RNA, 26 nt, Human
aggaagaagauggaaaggagggaccc

SEQ ID NO: 519363 - RNA, 22 nt, Human
agucacaauaacaaaacuguau

SEQ ID NO: 519364 - RNA, 24 nt, Human
aucuuucuuaaaguccuuccacug

SEQ ID NO: 519365 - RNA, 24 nt, Human
augaauacaguuauuauuugaggu

SEQ ID NO: 519366 - RNA, 19 nt, Human
cuuaggaagaagauggaaa

SEQ ID NO: 519367 - RNA, 26 nt, Human
gaaaaaggugauacucuauucaaugc

SEQ ID NO: 519368 - RNA, 20 nt, Human
gaacugauguguugaccuug

SEQ ID NO: 519369 - RNA, 19 nt, Human
gucacaauaacaaaacugu

SEQ ID NO: 519370 - RNA, 23 nt, Human
uaaaucuuguugaaaaaggugau

SEQ ID NO: 519371 - RNA, 24 nt, Human
uaacucucuugaaaaaaaauuaau

SEQ ID NO: 519372 - RNA, 19 nt, Human
ucuuugggaaauacagguu

SEQ ID NO: 519373 - RNA, 21 nt, Human
ugaacugauguguugaccuug

SEQ ID NO: 519374 - RNA, 19 nt, Human
ugaagaccgcaaagaggga

SEQ ID NO: 519375 - RNA, 23 nt, Human
uggaaaggaagcaggcaaucucg

SEQ ID NO: 519376 - RNA, 20 nt, Human
uuaggaaaugauauguaaua

SEQ ID NO: 519377 - RNA, 22 nt, Human
uuccuugaaucuuuaaaauaac

SEQ ID NO: 519378 - RNA, 22 nt, Human
uuucuuugggaaauacagguuu

SEQ ID NO: 519379 - RNA, 23 nt, Human
uuugaggucuccauucacuuaca

SEQ ID NO: 519380 - RNA, 23 nt, Human
aaaaauccaggguaauuuaagca

SEQ ID NO: 519381 - RNA, 19 nt, Human
aaauaaccuuugagucaga

SEQ ID NO: 519382 - RNA, 19 nt, Human
aagaacuuggcauuauuua

SEQ ID NO: 519383 - RNA, 23 nt, Human
aagaccagaagcucucgaaagcu

SEQ ID NO: 519384 - RNA, 19 nt, Human
aagcaggauauuuaaccug

SEQ ID NO: 519385 - RNA, 21 nt, Human
aagccgcaccccuguuuccuu

SEQ ID NO: 519386 - RNA, 20 nt, Human
aagcucuccaggccgcccuc

SEQ ID NO: 519387 - RNA, 19 nt, Human
aaguguagaggucaaaaac

SEQ ID NO: 519388 - RNA, 20 nt, Human
aaguguagaggucaaaaacc

SEQ ID NO: 519389 - RNA, 19 nt, Human
aauccucccuucccgccgc

SEQ ID NO: 519390 - RNA, 23 nt, Human
acaaagcgcuugcacuuccacca

SEQ ID NO: 519391 - RNA, 18 nt, Human
acauauuacacucccagg

SEQ ID NO: 519392 - RNA, 24 nt, Human
acccccuccuccagguggaaagac

SEQ ID NO: 519393 - RNA, 18 nt, Human
accuuacccccuccucca

SEQ ID NO: 519394 - RNA, 22 nt, Human
acuacugcuucccaaggaggua

SEQ ID NO: 519395 - RNA, 20 nt, Human
acuaggguccagggacagaa

SEQ ID NO: 519396 - RNA, 25 nt, Human
acugcaguuuacaaagcgcuugcac

SEQ ID NO: 519397 - RNA, 21 nt, Human
agaaagaaccauucguaaaag

SEQ ID NO: 519398 - RNA, 20 nt, Human
agaccugaaacaggccaaca

SEQ ID NO: 519399 - RNA, 21 nt, Human
agcgacaaagaaaagcaggga

SEQ ID NO: 519400 - RNA, 20 nt, Human
agcuauaggaacaaccugaa

SEQ ID NO: 519401 - RNA, 19 nt, Human
aggaaaccgcuacagacca

SEQ ID NO: 519402 - RNA, 22 nt, Human
aggaagagggggaaaaacaaaa

SEQ ID NO: 519403 - RNA, 21 nt, Human
aggcggcagcggcgguggcgg

SEQ ID NO: 519404 - RNA, 23 nt, Human
aggcggcagcggcgguggcggcu

SEQ ID NO: 519405 - RNA, 22 nt, Human
agggggaggggaggaauguauu

SEQ ID NO: 519406 - RNA, 19 nt, Human
agguauauguuauacagaa

SEQ ID NO: 519407 - RNA, 22 nt, Human
auaggaacaaccugaacaacau

SEQ ID NO: 519408 - RNA, 18 nt, Human
auccauuacuacugcuuc

SEQ ID NO: 519409 - RNA, 23 nt, Human
caacgcugggucucaccccacgc

SEQ ID NO: 519410 - RNA, 27 nt, Human
caauacaaggaacuaaagagaugcaga

SEQ ID NO: 519411 - RNA, 22 nt, Human
cacaguauuuagauccuuaucu

SEQ ID NO: 519412 - RNA, 20 nt, Human
cacauccuccuuugccccuc

SEQ ID NO: 519413 - RNA, 18 nt, Human
cacguaaagacagaaaaa

SEQ ID NO: 519414 - RNA, 21 nt, Human
cacugaugaaccaagaccaga

SEQ ID NO: 519415 - RNA, 24 nt, Human
cacuuauuuuagaaagaaaauaac

SEQ ID NO: 519416 - RNA, 19 nt, Human
cagaggauggcucccuucc

SEQ ID NO: 519417 - RNA, 20 nt, Human
cauucauucaucaaacauuu

SEQ ID NO: 519418 - RNA, 23 nt, Human
ccaauccucccuucccgccgccc

SEQ ID NO: 519419 - RNA, 24 nt, Human
ccagaagcucucgaaagcuccaag

SEQ ID NO: 519420 - RNA, 18 nt, Human
cccaaaggagcagucccc

SEQ ID NO: 519421 - RNA, 20 nt, Human
ccccucucaccaccuuuccc

SEQ ID NO: 519422 - RNA, 24 nt, Human
ccccucucaccaccuuucccgcag

SEQ ID NO: 519423 - RNA, 18 nt, Human
ccccuuccucucuucagu

SEQ ID NO: 519424 - RNA, 21 nt, Human
cccucucaccaccuuucccgc

SEQ ID NO: 519425 - RNA, 23 nt, Human
ccgcggcccgaggcgcacccacc

SEQ ID NO: 519426 - RNA, 19 nt, Human
ccgcuacagaccaagcucu

SEQ ID NO: 519427 - RNA, 18 nt, Human
ccuaaacuggaaacaacc

SEQ ID NO: 519428 - RNA, 18 nt, Human
ccucccuucccgccgccc

SEQ ID NO: 519429 - RNA, 24 nt, Human
ccuugguuuugccacauccuccuu

SEQ ID NO: 519430 - RNA, 27 nt, Human
ccuuugccccucucaccaccuuucccg

SEQ ID NO: 519431 - RNA, 19 nt, Human
cgaaagcuccaaaccguaa

SEQ ID NO: 519432 - RNA, 20 nt, Human
cgacaaagcgacaaagaaaa

SEQ ID NO: 519433 - RNA, 18 nt, Human
cggcuccuccccuuccuc

SEQ ID NO: 519434 - RNA, 23 nt, Human
cucauacuauucacugaagacag

SEQ ID NO: 519435 - RNA, 23 nt, Human
cuccccuuccucucuucaguucu

SEQ ID NO: 519436 - RNA, 25 nt, Human
cuccuuccucccaaaggagcagucc

SEQ ID NO: 519437 - RNA, 22 nt, Human
cucuguacucaagccgcacccc

SEQ ID NO: 519438 - RNA, 23 nt, Human
cugcugcuuuaaucuuuuucuca

SEQ ID NO: 519439 - RNA, 18 nt, Human
cuggaaauauuccauuuc

SEQ ID NO: 519440 - RNA, 24 nt, Human
cuguuaucaagcugggugcugagg

SEQ ID NO: 519441 - RNA, 21 nt, Human
gaaagcuccaaaccguaagaa

SEQ ID NO: 519442 - RNA, 25 nt, Human
gaaccaagaccagaagcucucgaaa

SEQ ID NO: 519443 - RNA, 23 nt, Human
gaacuucugaguugcuggaaaua

SEQ ID NO: 519444 - RNA, 23 nt, Human
gacaaagcgacaaagaaaagcag

SEQ ID NO: 519445 - RNA, 18 nt, Human
gaccaagcucuccaggcc

SEQ ID NO: 519446 - RNA, 18 nt, Human
gaccaucacuuguugguc

SEQ ID NO: 519447 - RNA, 20 nt, Human
gauaggaagagggggaaaaa

SEQ ID NO: 519448 - RNA, 31 nt, Human
gauccuuaucuuaaauugaugaaccagggag

SEQ ID NO: 519449 - RNA, 20 nt, Human
gcaaaagcagcaagaacaag

SEQ ID NO: 519450 - RNA, 21 nt, Human
gcacugcaguuuacaaagcgc

SEQ ID NO: 519451 - RNA, 23 nt, Human
gcagcggcgguggcggcugcgag

SEQ ID NO: 519452 - RNA, 21 nt, Human
gcgacaaagcgacaaagaaaa

SEQ ID NO: 519453 - RNA, 19 nt, Human
gcggcagcggcgguggcgg

SEQ ID NO: 519454 - RNA, 21 nt, Human
ggagcaguccccaccugcccc

SEQ ID NO: 519455 - RNA, 18 nt, Human
ggcgcucucucccuggag

SEQ ID NO: 519456 - RNA, 18 nt, Human
ggcggcagcggcgguggc

SEQ ID NO: 519457 - RNA, 23 nt, Human
gggaacuucugaguugcuggaaa

SEQ ID NO: 519458 - RNA, 23 nt, Human
gggacagaauuguggaaucugcu

SEQ ID NO: 519459 - RNA, 22 nt, Human
gggauuggucacguaaagacag

SEQ ID NO: 519460 - RNA, 19 nt, Human
ggguggugcgcgcagcugc

SEQ ID NO: 519461 - RNA, 19 nt, Human
guagaguguacuagggucc

SEQ ID NO: 519462 - RNA, 21 nt, Human
gucauggcagggaggggaacu

SEQ ID NO: 519463 - RNA, 19 nt, Human
gucucaccccacgccacgg

SEQ ID NO: 519464 - RNA, 23 nt, Human
gugauggaauacauauaugaaga

SEQ ID NO: 519465 - RNA, 22 nt, Human
uaaacuggaaacaacccagaug

SEQ ID NO: 519466 - RNA, 19 nt, Human
uaaagacagaaaaauccag

SEQ ID NO: 519467 - RNA, 24 nt, Human
uaacccucuagaaaagaacuuggc

SEQ ID NO: 519468 - RNA, 18 nt, Human
uaacuccucgaucagucc

SEQ ID NO: 519469 - RNA, 20 nt, Human
uacaaggaacuaaagagaug

SEQ ID NO: 519470 - RNA, 18 nt, Human
uacccaguuaaaaguuuc

SEQ ID NO: 519471 - RNA, 20 nt, Human
uagaaaagaacuuggcauua

SEQ ID NO: 519472 - RNA, 20 nt, Human
uagaaagaaaauaaccuuug

SEQ ID NO: 519473 - RNA, 22 nt, Human
uaggaaaagcugcauaauagua

SEQ ID NO: 519474 - RNA, 24 nt, Human
uagucugugagucucuccuugguu

SEQ ID NO: 519475 - RNA, 24 nt, Human
uaugaacuuccuucucuccagucu

SEQ ID NO: 519476 - RNA, 21 nt, Human
uauuuggaaggcuguagcagg

SEQ ID NO: 519477 - RNA, 23 nt, Human
ucaaaaaccuuauaagagucucc

SEQ ID NO: 519478 - RNA, 21 nt, Human
ucacauuagcauuuauaacaa

SEQ ID NO: 519479 - RNA, 20 nt, Human
uccagcuguuuccuccuguu

SEQ ID NO: 519480 - RNA, 20 nt, Human
uccagggacagaauugugga

SEQ ID NO: 519481 - RNA, 25 nt, Human
ucccagaggauggcucccuuccaau

SEQ ID NO: 519482 - RNA, 19 nt, Human
uccuccuguuaucaagcug

SEQ ID NO: 519483 - RNA, 21 nt, Human
uccuugguuuugccacaucuu

SEQ ID NO: 519484 - RNA, 22 nt, Human
ucgggucagggguaagaucggg

SEQ ID NO: 519485 - RNA, 19 nt, Human
ucucaccccacgccacggg

SEQ ID NO: 519486 - RNA, 21 nt, Human
ucuccaggccgcccucggguc

SEQ ID NO: 519487 - RNA, 23 nt, Human
ucuccuugguuuugccacauccu

SEQ ID NO: 519488 - RNA, 20 nt, Human
ugaaccaagaccagaagcuc

SEQ ID NO: 519489 - RNA, 18 nt, Human
ugaagacgcggccugggc

SEQ ID NO: 519490 - RNA, 24 nt, Human
ugaauuaaaaacaauguugagcaa

SEQ ID NO: 519491 - RNA, 19 nt, Human
ugacaguaaaagccacuga

SEQ ID NO: 519492 - RNA, 25 nt, Human
ugaccugguugauugguuacauggg

SEQ ID NO: 519493 - RNA, 18 nt, Human
ugacucuguacucaagcc

SEQ ID NO: 519494 - RNA, 18 nt, Human
ugaugaaccaagaccaga

SEQ ID NO: 519495 - RNA, 22 nt, Human
ugaugaaccaagaccagaagcu

SEQ ID NO: 519496 - RNA, 21 nt, Human
ugcgacaaagcgacaaagaaa

SEQ ID NO: 519497 - RNA, 25 nt, Human
ugcuccuaccuuacccccuccucca

SEQ ID NO: 519498 - RNA, 21 nt, Human
uggaaggcuguagcaggggau

SEQ ID NO: 519499 - RNA, 23 nt, Human
uggaauacauauaugaagaaugu

SEQ ID NO: 519500 - RNA, 23 nt, Human
uggcaguagugggagaaacccag

SEQ ID NO: 519501 - RNA, 18 nt, Human
uggcauuauuuauucaaa

SEQ ID NO: 519502 - RNA, 22 nt, Human
ugggagaaacccagagcuuccc

SEQ ID NO: 519503 - RNA, 20 nt, Human
uggggccaaaugccucaccc

SEQ ID NO: 519504 - RNA, 19 nt, Human
uggucugauuaccugugag

SEQ ID NO: 519505 - RNA, 20 nt, Human
ugguuacauggugguuuccu

SEQ ID NO: 519506 - RNA, 19 nt, Human
uguagaggucaaaaaccuu

SEQ ID NO: 519507 - RNA, 21 nt, Human
uguuaucaagcugggugcuga

SEQ ID NO: 519508 - RNA, 19 nt, Human
uguuuucuccucuggauua

SEQ ID NO: 519509 - RNA, 20 nt, Human
uuacagcuauaggaacaacc

SEQ ID NO: 519510 - RNA, 19 nt, Human
uucaaaagaaagagugaga

SEQ ID NO: 519511 - RNA, 20 nt, Human
uuccaggauaacaucuguag

SEQ ID NO: 519512 - RNA, 23 nt, Human
uucccgccgcccuaacaaucugc

SEQ ID NO: 519513 - RNA, 22 nt, Human
uugccagauaauuuagcuuaca

SEQ ID NO: 519514 - RNA, 19 nt, Human
uugccccucucaccaccuu

SEQ ID NO: 519515 - RNA, 22 nt, Human
uuggaacuucaggucaagggca

SEQ ID NO: 519516 - RNA, 23 nt, Human
uuguuuagggaugcaugcuugcg

SEQ ID NO: 519517 - RNA, 20 nt, Human
uuuccuuaguuuacuguuug

SEQ ID NO: 519518 - RNA, 19 nt, Human
uuugccccucucaccaccu

SEQ ID NO: 519519 - RNA, 20 nt, Human
uuugccccucucaccaccuu

SEQ ID NO: 519520 - RNA, 21 nt, Human
uuuggaaggcuguagcagggg

SEQ ID NO: 519521 - RNA, 19 nt, Human
aaacucacagaacugaggc

SEQ ID NO: 519522 - RNA, 23 nt, Human
aaccauuuuccaauaaaucuccu

SEQ ID NO: 519523 - RNA, 25 nt, Human
aagaaugcugucaucuggcugcugu

SEQ ID NO: 519524 - RNA, 23 nt, Human
aauuugugagagguugcaagccu

SEQ ID NO: 519525 - RNA, 25 nt, Human
agaauucucuccuguucuaaggcuu

SEQ ID NO: 519526 - RNA, 20 nt, Human
agccuuaaaauuugugagag

SEQ ID NO: 519527 - RNA, 18 nt, Human
agcugguggaauacugga

SEQ ID NO: 519528 - RNA, 21 nt, Human
aggcuucuauauacuuugagu

SEQ ID NO: 519529 - RNA, 20 nt, Human
aguaguuguuuuauucuaaa

SEQ ID NO: 519530 - RNA, 20 nt, Human
caaguccuuauauuuuugua

SEQ ID NO: 519531 - RNA, 22 nt, Human
caauaaaucuccuuuuagagcc

SEQ ID NO: 519532 - RNA, 23 nt, Human
caccuggaaaauccagaaucaaa

SEQ ID NO: 519533 - RNA, 20 nt, Human
caucugugccucucuaaaua

SEQ ID NO: 519534 - RNA, 21 nt, Human
cauucacaagaaugcugucau

SEQ ID NO: 519535 - RNA, 21 nt, Human
ccaaaaauugucaucugugcc

SEQ ID NO: 519536 - RNA, 21 nt, Human
cccaccuggaaaauccagaau

SEQ ID NO: 519537 - RNA, 23 nt, Human
ccccaaaaauugucaucugugcc

SEQ ID NO: 519538 - RNA, 24 nt, Human
ccuucaaaaaaacaaaucacugga

SEQ ID NO: 519539 - RNA, 26 nt, Human
ccuucaaaaaaacaaaucacuggagc

SEQ ID NO: 519540 - RNA, 21 nt, Human
cgaaaagcaaugauuuuacaa

SEQ ID NO: 519541 - RNA, 18 nt, Human
cucuaaauacauaugguc

SEQ ID NO: 519542 - RNA, 22 nt, Human
cugauacagaccuucaaaaaaa

SEQ ID NO: 519543 - RNA, 25 nt, Human
cuggaauuaauaaagcaguugauaa

SEQ ID NO: 519544 - RNA, 18 nt, Human
cuucuaggacugccaauu

SEQ ID NO: 519545 - RNA, 19 nt, Human
cuugaaccuaucagcagca

SEQ ID NO: 519546 - RNA, 24 nt, Human
gcacugaaguauuugcauauuguu

SEQ ID NO: 519547 - RNA, 18 nt, Human
gucaauuuguaaagcugg

SEQ ID NO: 519548 - RNA, 21 nt, Human
uaaaacacucauaauauuuuc

SEQ ID NO: 519549 - RNA, 22 nt, Human
uauucuugucuucucucuaaaa

SEQ ID NO: 519550 - RNA, 18 nt, Human
ucaauuuguaaagcuggu

SEQ ID NO: 519551 - RNA, 18 nt, Human
ucacuggagcuucucaug

SEQ ID NO: 519552 - RNA, 20 nt, Human
ucucuaaauacauauggucc

SEQ ID NO: 519553 - RNA, 19 nt, Human
ucuuauagucuuguauguc

SEQ ID NO: 519554 - RNA, 24 nt, Human
ugaagagcuagccuuaaaauuugu

SEQ ID NO: 519555 - RNA, 19 nt, Human
ugagaauggcacaaguccu

SEQ ID NO: 519556 - RNA, 19 nt, Human
ugauuccauccuuuccaga

SEQ ID NO: 519557 - RNA, 22 nt, Human
ugccaaaagaguaaaccauuuu

SEQ ID NO: 519558 - RNA, 19 nt, Human
uggcugcugugggcagaca

SEQ ID NO: 519559 - RNA, 21 nt, Human
uuccuugaaccuaucagcagc

SEQ ID NO: 519560 - RNA, 19 nt, Human
uucgucuucuaggacugcc

SEQ ID NO: 519561 - RNA, 22 nt, Human
uucuaaggcuucuauauacuuu

SEQ ID NO: 519562 - RNA, 19 nt, Human
uucuuauagucuuguaugu

SEQ ID NO: 519563 - RNA, 24 nt, Human
uugcauauuguuugauuccauccu

SEQ ID NO: 519564 - RNA, 21 nt, Human
uuuaaagaauuccuugaaccu

SEQ ID NO: 519565 - RNA, 24 nt, Human
aaacacgcgcucugccacguccuc

SEQ ID NO: 519566 - RNA, 21 nt, Human
aagcaggaacaaacagggcug

SEQ ID NO: 519567 - RNA, 18 nt, Human
agccaggcugcgggaaga

SEQ ID NO: 519568 - RNA, 18 nt, Human
aggcauuggcuggauaga

SEQ ID NO: 519569 - RNA, 23 nt, Human
caggagccaggcugcgggaagag

SEQ ID NO: 519570 - RNA, 22 nt, Human
cgaccagaaacacgcgcucugc

SEQ ID NO: 519571 - RNA, 21 nt, Human
cucuggcugaggccccaggag

SEQ ID NO: 519572 - RNA, 20 nt, Human
cuggcagcucuggcugaggc

SEQ ID NO: 519573 - RNA, 21 nt, Human
gcagugguagcgcagcuggau

SEQ ID NO: 519574 - RNA, 23 nt, Human
ggaagagguuuccuuucucuggc

SEQ ID NO: 519575 - RNA, 19 nt, Human
ggaggugggcuggcaguga

SEQ ID NO: 519576 - RNA, 20 nt, Human
ggccggggguuugacucugc

SEQ ID NO: 519577 - RNA, 27 nt, Human
ggcugcgggaagagguuuccuuucucu

SEQ ID NO: 519578 - RNA, 24 nt, Human
gugggcuggcagugaggccaggug

SEQ ID NO: 519579 - RNA, 22 nt, Human
uccgcgggcuucgcuggguugc

SEQ ID NO: 519580 - RNA, 21 nt, Human
ucugccacguccuccuccgcg

SEQ ID NO: 519581 - RNA, 18 nt, Human
uggcagugaggccaggug

SEQ ID NO: 519582 - RNA, 23 nt, Human
uguuuauuuacaggaaaaucaug

SEQ ID NO: 519583 - RNA, 22 nt, Human
aagcgcuucagugucaggacuc

SEQ ID NO: 519584 - RNA, 22 nt, Human
aaggugccuccgggccaggggc

SEQ ID NO: 519585 - RNA, 21 nt, Human
acacaaggcccccaaggcacu

SEQ ID NO: 519586 - RNA, 21 nt, Human
acauuuacacacaaggccccc

SEQ ID NO: 519587 - RNA, 23 nt, Human
agcaagaucagcacuggaggaga

SEQ ID NO: 519588 - RNA, 25 nt, Human
aggcccagcaagaucagcacuggag

SEQ ID NO: 519589 - RNA, 18 nt, Human
cacaaggcccccaaggca

SEQ ID NO: 519590 - RNA, 22 nt, Human
caggagucguccggccgggccu

SEQ ID NO: 519591 - RNA, 23 nt, Human
caggcccucccuuccugcccucc

SEQ ID NO: 519592 - RNA, 23 nt, Human
ccaugggaccagccucccucaca

SEQ ID NO: 519593 - RNA, 26 nt, Human
ccccaaggcacugcuucccacccccc

SEQ ID NO: 519594 - RNA, 22 nt, Human
cccccaggcccucccuuccugc

SEQ ID NO: 519595 - RNA, 26 nt, Human
cccuccccguucagccaccuucuccc

SEQ ID NO: 519596 - RNA, 19 nt, Human
cccucccuuccugcccucc

SEQ ID NO: 519597 - RNA, 22 nt, Human
ccggccgggccuuggccuggga

SEQ ID NO: 519598 - RNA, 21 nt, Human
ccucccuuccugcccuccccg

SEQ ID NO: 519599 - RNA, 21 nt, Human
ccugcccuccccguucagcca

SEQ ID NO: 519600 - RNA, 20 nt, Human
ccuuguggccauggccuagc

SEQ ID NO: 519601 - RNA, 18 nt, Human
cugcccuccccguucagc

SEQ ID NO: 519602 - RNA, 21 nt, Human
cuggaggagaagcagccuuug

SEQ ID NO: 519603 - RNA, 24 nt, Human
gacuucagagccccacuuuugggg

SEQ ID NO: 519604 - RNA, 21 nt, Human
gagccccacuuuuggggacug

SEQ ID NO: 519605 - RNA, 22 nt, Human
gcacugcuucccaccccccagg

SEQ ID NO: 519606 - RNA, 21 nt, Human
gccuagcguucccuggggaca

SEQ ID NO: 519607 - RNA, 19 nt, Human
gccugggagggagccaggc

SEQ ID NO: 519608 - RNA, 21 nt, Human
gccuuggccugggagggagcc

SEQ ID NO: 519609 - RNA, 23 nt, Human
ggacacgaugggggccaccuggg

SEQ ID NO: 519610 - RNA, 23 nt, Human
ggagaagcagccuuugcuuuggg

SEQ ID NO: 519611 - RNA, 19 nt, Human
ggcagccgguggugguggu

SEQ ID NO: 519612 - RNA, 19 nt, Human
ggccauggccuagcguucc

SEQ ID NO: 519613 - RNA, 22 nt, Human
ggccuagcguucccuggggaca

SEQ ID NO: 519614 - RNA, 21 nt, Human
ggccugggagggagccaggcu

SEQ ID NO: 519615 - RNA, 23 nt, Human
ggccuuggccugggagggagcca

SEQ ID NO: 519616 - RNA, 18 nt, Human
uacacacaaggcccccaa

SEQ ID NO: 519617 - RNA, 18 nt, Human
ucagugucaggacucugg

SEQ ID NO: 519618 - RNA, 23 nt, Human
uccaugagccccuuguggccaug

SEQ ID NO: 519619 - RNA, 26 nt, Human
ucccaccccccaggcccucccuuccu

SEQ ID NO: 519620 - RNA, 21 nt, Human
uccccguucagccaccuucuc

SEQ ID NO: 519621 - RNA, 24 nt, Human
ucccuggggacacgaugggggcca

SEQ ID NO: 519622 - RNA, 23 nt, Human
uccgagacuucagagccccacuu

SEQ ID NO: 519623 - RNA, 23 nt, Human
uccggccgggccuuggccuggga

SEQ ID NO: 519624 - RNA, 23 nt, Human
ugcuucccaccccccaggcccuc

SEQ ID NO: 519625 - RNA, 19 nt, Human
uggaagaggaaggccaugg

SEQ ID NO: 519626 - RNA, 22 nt, Human
ugggaccagccucccucacagg

SEQ ID NO: 519627 - RNA, 21 nt, Human
uggguuuacaggagucguccg

SEQ ID NO: 519628 - RNA, 19 nt, Human
uucucccuccccuccuucc

SEQ ID NO: 519629 - RNA, 20 nt, Human
aagaaacuucaaaacaucuu

SEQ ID NO: 519630 - RNA, 19 nt, Human
aagaagacccuucugugac

SEQ ID NO: 519631 - RNA, 25 nt, Human
acuccaagaagugaugacugugaag

SEQ ID NO: 519632 - RNA, 21 nt, Human
agaagcaagguaaccaacucc

SEQ ID NO: 519633 - RNA, 21 nt, Human
agagaacaggguacggaucau

SEQ ID NO: 519634 - RNA, 22 nt, Human
ccagauaacugcuaagucuaaa

SEQ ID NO: 519635 - RNA, 19 nt, Human
cuaaauugguccuucaaug

SEQ ID NO: 519636 - RNA, 18 nt, Human
uaaaugaaaaacuucuuc

SEQ ID NO: 519637 - RNA, 23 nt, Human
uaaccaacuccaagaagugauga

SEQ ID NO: 519638 - RNA, 21 nt, Human
uaauaagccuuucuauuuccc

SEQ ID NO: 519639 - RNA, 18 nt, Human
uaucuaaagagaacaggg

SEQ ID NO: 519640 - RNA, 22 nt, Human
ucuccagauaacugcuaagucu

SEQ ID NO: 519641 - RNA, 20 nt, Human
ugaaaaacuucuucuaggag

SEQ ID NO: 519642 - RNA, 22 nt, Human
ugaaaaacuucuucuaggaggu

SEQ ID NO: 519643 - RNA, 24 nt, Human
ugaaaaacuucuucuaggagguua

SEQ ID NO: 519644 - RNA, 21 nt, Human
ugaugacugugaagauaucua

SEQ ID NO: 519645 - RNA, 20 nt, Human
ugggaaagacuuaacagguu

SEQ ID NO: 519646 - RNA, 23 nt, Human
uuagguaucaaacaaauucugcu

SEQ ID NO: 519647 - RNA, 23 nt, Human
acauugaaaagaaguaaaaggaa

SEQ ID NO: 519648 - RNA, 20 nt, Human
agcgacagaagccuggguac

SEQ ID NO: 519649 - RNA, 25 nt, Human
aggcaccaggucccucucgggcugg

SEQ ID NO: 519650 - RNA, 24 nt, Human
aggcgacagagcgacagaagccug

SEQ ID NO: 519651 - RNA, 23 nt, Human
auagaguuucucccaagugugaa

SEQ ID NO: 519652 - RNA, 23 nt, Human
auaggguuucacuccaguguaac

SEQ ID NO: 519653 - RNA, 25 nt, Human
caccaggucccucucgggcuggucu

SEQ ID NO: 519654 - RNA, 21 nt, Human
cagaagccuggguacaggcac

SEQ ID NO: 519655 - RNA, 22 nt, Human
ccgguuaccaaccgccgcccgc

SEQ ID NO: 519656 - RNA, 23 nt, Human
ccuuucaugacauugaaaagaag

SEQ ID NO: 519657 - RNA, 20 nt, Human
cucgggcuggucugaccggu

SEQ ID NO: 519658 - RNA, 20 nt, Human
gaaagcgacccccuccauuu

SEQ ID NO: 519659 - RNA, 22 nt, Human
gcgcagcgaggaaggugaggaa

SEQ ID NO: 519660 - RNA, 19 nt, Human
uauucaaagaaucuuggca

SEQ ID NO: 519661 - RNA, 22 nt, Human
ucucccaagugugaacccuucc

SEQ ID NO: 519662 - RNA, 19 nt, Human
ugaaaagaaguaaaaggaa

SEQ ID NO: 519663 - RNA, 21 nt, Human
ugaaaagaaguaaaaggaaug

SEQ ID NO: 519664 - RNA, 18 nt, Human
ugaccgguuaccaaccgc

SEQ ID NO: 519665 - RNA, 23 nt, Human
uggguacaggcaccaggucccuc

SEQ ID NO: 519666 - RNA, 24 nt, Human
uucaugauaucaaacggaacuaga

SEQ ID NO: 519667 - RNA, 24 nt, Human
uucaugauaucgaaaagaacugga

SEQ ID NO: 519668 - RNA, 21 nt, Human
uugaaggugcgaggcacaucu

SEQ ID NO: 519669 - RNA, 28 nt, Human
aaaacaaaacaaaacaaaacacaaaccc

SEQ ID NO: 519670 - RNA, 22 nt, Human
aaaacaaaacaaaacacaaacc

SEQ ID NO: 519671 - RNA, 24 nt, Human
aaacaaaacaaaacaaaacacaaa

SEQ ID NO: 519672 - RNA, 19 nt, Human
aaagugcuggaauuacagg

SEQ ID NO: 519673 - RNA, 20 nt, Human
aaagugcuggaauuacaggg

SEQ ID NO: 519674 - RNA, 19 nt, Human
aaauuccuggcaaguuagc

SEQ ID NO: 519675 - RNA, 19 nt, Human
aacuagaccucuaagggca

SEQ ID NO: 519676 - RNA, 26 nt, Human
aagugcuggaauuacagggaugagcc

SEQ ID NO: 519677 - RNA, 21 nt, Human
aauuacagggaugagccacug

SEQ ID NO: 519678 - RNA, 22 nt, Human
acaaaacaaaacaaaacacaaa

SEQ ID NO: 519679 - RNA, 23 nt, Human
accauguuggucaggcuggucuc

SEQ ID NO: 519680 - RNA, 19 nt, Human
accccacgcacacacacaa

SEQ ID NO: 519681 - RNA, 21 nt, Human
acgggguuucaccauguuggu

SEQ ID NO: 519682 - RNA, 23 nt, Human
acgggguuucaccauguugguca

SEQ ID NO: 519683 - RNA, 24 nt, Human
acgggguuucaccauguuggucag

SEQ ID NO: 519684 - RNA, 25 nt, Human
acucugucgcccaggcuggagugca

SEQ ID NO: 519685 - RNA, 24 nt, Human
acuucgugauccgcccgccuuggc

SEQ ID NO: 519686 - RNA, 23 nt, Human
agcugggauuacaggugugugcc

SEQ ID NO: 519687 - RNA, 25 nt, Human
aggcuggagugcaguggcacaaucu

SEQ ID NO: 519688 - RNA, 18 nt, Human
aguagcugggauuacagg

SEQ ID NO: 519689 - RNA, 21 nt, Human
aguagcugggauuacaggugu

SEQ ID NO: 519690 - RNA, 23 nt, Human
aguagcugggauuacaggugugu

SEQ ID NO: 519691 - RNA, 25 nt, Human
aguagcugggauuacaggugugugc

SEQ ID NO: 519692 - RNA, 20 nt, Human
agugcaguggcacaaucuug

SEQ ID NO: 519693 - RNA, 24 nt, Human
agugcaguggcacaaucuuggcuc

SEQ ID NO: 519694 - RNA, 18 nt, Human
auccgcccgccuuggccu

SEQ ID NO: 519695 - RNA, 19 nt, Human
auuacaggugugugccacc

SEQ ID NO: 519696 - RNA, 24 nt, Human
auuuuuguauuuuuaguagagacg

SEQ ID NO: 519697 - RNA, 21 nt, Human
caaaaauguuaaguaugcugu

SEQ ID NO: 519698 - RNA, 25 nt, Human
caaaacaaaacaaaacacaaacccc

SEQ ID NO: 519699 - RNA, 20 nt, Human
caaaacaaaacacaaacccc

SEQ ID NO: 519700 - RNA, 21 nt, Human
caaaacacaaaccccacgcac

SEQ ID NO: 519701 - RNA, 24 nt, Human
caaagugcuggaauuacagggaug

SEQ ID NO: 519702 - RNA, 22 nt, Human
caagcgauuuuccugccucggc

SEQ ID NO: 519703 - RNA, 21 nt, Human
caccaaaggcaaugaucaagu

SEQ ID NO: 519704 - RNA, 24 nt, Human
caccacacccggcuaauuuuugua

SEQ ID NO: 519705 - RNA, 21 nt, Human
caccauguuggucaggcuggu

SEQ ID NO: 519706 - RNA, 24 nt, Human
caccauguuggucaggcuggucuc

SEQ ID NO: 519707 - RNA, 24 nt, Human
cacucugucgcccaggcuggagug

SEQ ID NO: 519708 - RNA, 19 nt, Human
cacugcaaccucugccugc

SEQ ID NO: 519709 - RNA, 22 nt, Human
cacugugccgggccaaagcaga

SEQ ID NO: 519710 - RNA, 24 nt, Human
cacugugccgggccaaagcagaau

SEQ ID NO: 519711 - RNA, 25 nt, Human
cacuugugucuacaaugucccuuuu

SEQ ID NO: 519712 - RNA, 26 nt, Human
cagcaauugggauacaauauuagugc

SEQ ID NO: 519713 - RNA, 22 nt, Human
caguggauuguuuaguaaguuu

SEQ ID NO: 519714 - RNA, 19 nt, Human
ccaaagugcuggaauuaca

SEQ ID NO: 519715 - RNA, 21 nt, Human
ccaaagugcuggaauuacagg

SEQ ID NO: 519716 - RNA, 20 nt, Human
ccaccacacccggcuaauuu

SEQ ID NO: 519717 - RNA, 22 nt, Human
ccagguucaagcgauuuuccug

SEQ ID NO: 519718 - RNA, 22 nt, Human
cccgccuuggccuuccaaagug

SEQ ID NO: 519719 - RNA, 22 nt, Human
ccugaguagcugggauuacagg

SEQ ID NO: 519720 - RNA, 22 nt, Human
ccugaguagcugggauuacagg

SEQ ID NO: 519721 - RNA, 23 nt, Human
ccugaguagcugggauuacaggu

SEQ ID NO: 519722 - RNA, 24 nt, Human
ccugaguagcugggauuacaggug

SEQ ID NO: 519723 - RNA, 24 nt, Human
ccugccagguucaagcgauuuucc

SEQ ID NO: 519724 - RNA, 24 nt, Human
ccugccucggccuccugaguagcu

SEQ ID NO: 519725 - RNA, 18 nt, Human
cgcacacacacaaaaaug

SEQ ID NO: 519726 - RNA, 22 nt, Human
cgcacacacacaaaaauguuaa

SEQ ID NO: 519727 - RNA, 24 nt, Human
cgggguuucaccauguuggucagg

SEQ ID NO: 519728 - RNA, 23 nt, Human
cuaauuuuuguauuuuuaguaga

SEQ ID NO: 519729 - RNA, 24 nt, Human
cucacucugucgcccaggcuggag

SEQ ID NO: 519730 - RNA, 19 nt, Human
cucacugcaaccucugccu

SEQ ID NO: 519731 - RNA, 19 nt, Human
cucccacguagaaacccug

SEQ ID NO: 519732 - RNA, 24 nt, Human
cucccgacuucgugauccgcccgc

SEQ ID NO: 519733 - RNA, 24 nt, Human
cucggccuccugaguagcugggau

SEQ ID NO: 519734 - RNA, 21 nt, Human
cugaguagcugggauuacagg

SEQ ID NO: 519735 - RNA, 24 nt, Human
cugaguagcugggauuacaggugu

SEQ ID NO: 519736 - RNA, 24 nt, Human
cugcaaccucugccugccagguuc

SEQ ID NO: 519737 - RNA, 25 nt, Human
cugccagguucaagcgauuuuccug

SEQ ID NO: 519738 - RNA, 19 nt, Human
cugucgcccaggcuggagu

SEQ ID NO: 519739 - RNA, 21 nt, Human
gacuucgugauccgcccgccu

SEQ ID NO: 519740 - RNA, 24 nt, Human
gacuucgugauccgcccgccuugg

SEQ ID NO: 519741 - RNA, 23 nt, Human
gagacgggguuucaccauguugg

SEQ ID NO: 519742 - RNA, 24 nt, Human
gagacgggguuucaccauguuggu

SEQ ID NO: 519743 - RNA, 19 nt, Human
gaguagcugggauuacagg

SEQ ID NO: 519744 - RNA, 18 nt, Human
gauuacaggugugugcca

SEQ ID NO: 519745 - RNA, 22 nt, Human
gcaaccucugccugccagguuc

SEQ ID NO: 519746 - RNA, 19 nt, Human
gcccaggcuggagugcagu

SEQ ID NO: 519747 - RNA, 23 nt, Human
gcccaggcuggagugcaguggca

SEQ ID NO: 519748 - RNA, 18 nt, Human
gccuccugaguagcuggg

SEQ ID NO: 519749 - RNA, 20 nt, Human
gccucggccuccugaguagc

SEQ ID NO: 519750 - RNA, 21 nt, Human
gccucggccuccugaguagcu

SEQ ID NO: 519751 - RNA, 26 nt, Human
gcuggaauuacagggaugagccaguc

SEQ ID NO: 519752 - RNA, 19 nt, Human
gcuggagugcaguggcaca

SEQ ID NO: 519753 - RNA, 23 nt, Human
gggguuucaccauguuggucagg

SEQ ID NO: 519754 - RNA, 23 nt, Human
guagagacgggguuucaccaugu

SEQ ID NO: 519755 - RNA, 22 nt, Human
uaaaacaaucaacuagaccucu

SEQ ID NO: 519756 - RNA, 23 nt, Human
uaaguauaccacauauguaugga

SEQ ID NO: 519757 - RNA, 24 nt, Human
uaauuuuuguauuuuuaguagaga

SEQ ID NO: 519758 - RNA, 19 nt, Human
uacagggaugagccacugu

SEQ ID NO: 519759 - RNA, 22 nt, Human
uacagggaugagccacugugcc

SEQ ID NO: 519760 - RNA, 23 nt, Human
uacaggugugugccaccacaccc

SEQ ID NO: 519761 - RNA, 18 nt, Human
uacuuugaagagucacag

SEQ ID NO: 519762 - RNA, 22 nt, Human
uagaaaaacaaaacaaaacaaa

SEQ ID NO: 519763 - RNA, 22 nt, Human
uagagacgggguuucaccaugu

SEQ ID NO: 519764 - RNA, 24 nt, Human
uaguagagacgggguuucaccaug

SEQ ID NO: 519765 - RNA, 25 nt, Human
uaguagagacgggguuucaccaugu

SEQ ID NO: 519766 - RNA, 18 nt, Human
ucacugcaaccucugccu

SEQ ID NO: 519767 - RNA, 19 nt, Human
ucacugcaaccucugccug

SEQ ID NO: 519768 - RNA, 24 nt, Human
ucacugcaaccucugccugccagg

SEQ ID NO: 519769 - RNA, 24 nt, Human
uccacuggcucgaaggaauccuga

SEQ ID NO: 519770 - RNA, 24 nt, Human
uccugaacucccacguagaaaccc

SEQ ID NO: 519771 - RNA, 25 nt, Human
uccugaacucccacguagaaacccu

SEQ ID NO: 519772 - RNA, 24 nt, Human
uccugaguagcugggauuacaggu

SEQ ID NO: 519773 - RNA, 22 nt, Human
ucgcccaggcuggagugcagug

SEQ ID NO: 519774 - RNA, 23 nt, Human
ucggccuccugaguagcugggau

SEQ ID NO: 519775 - RNA, 23 nt, Human
ucucacucugucgcccaggcugg

SEQ ID NO: 519776 - RNA, 24 nt, Human
ucucacucugucgcccaggcugga

SEQ ID NO: 519777 - RNA, 26 nt, Human
ucucacucugucgcccaggcuggagu

SEQ ID NO: 519778 - RNA, 27 nt, Human
ucucacucugucgcccaggcuggagug

SEQ ID NO: 519779 - RNA, 24 nt, Human
ucugucgcccaggcuggagugcag

SEQ ID NO: 519780 - RNA, 22 nt, Human
ugcaguggcacaaucuuggcuc

SEQ ID NO: 519781 - RNA, 24 nt, Human
ugccagguucaagcgauuuuccug

SEQ ID NO: 519782 - RNA, 20 nt, Human
ugccucggccuccugaguaa

SEQ ID NO: 519783 - RNA, 24 nt, Human
ugccucggccuccugaguagcugg

SEQ ID NO: 519784 - RNA, 22 nt, Human
uggaauuacagggaugagccac

SEQ ID NO: 519785 - RNA, 22 nt, Human
uggaauuacagggaugagccac

SEQ ID NO: 519786 - RNA, 24 nt, Human
uggaauuacagggaugagccacug

SEQ ID NO: 519787 - RNA, 26 nt, Human
uggaauuacagggaugagccacugug

SEQ ID NO: 519788 - RNA, 24 nt, Human
uggagucucacucugucgcccagg

SEQ ID NO: 519789 - RNA, 23 nt, Human
uggagugcaguggcacaaucuug

SEQ ID NO: 519790 - RNA, 24 nt, Human
uggagugcaguggcacaaucuugg

SEQ ID NO: 519791 - RNA, 24 nt, Human
uggcacaaucuuggcucacugcaa

SEQ ID NO: 519792 - RNA, 21 nt, Human
uggcucacugcaaccucugcc

SEQ ID NO: 519793 - RNA, 18 nt, Human
ugggauuacaggugugug

SEQ ID NO: 519794 - RNA, 19 nt, Human
ugggauuacaggugugugc

SEQ ID NO: 519795 - RNA, 21 nt, Human
ugggauuacaggugugugcca

SEQ ID NO: 519796 - RNA, 22 nt, Human
ugggauuacaggugugugccac

SEQ ID NO: 519797 - RNA, 24 nt, Human
ugggauuacaggugugugccacca

SEQ ID NO: 519798 - RNA, 21 nt, Human
uggucaggcuggucucaaacu

SEQ ID NO: 519799 - RNA, 21 nt, Human
ugucccuuuugucaccaaagg

SEQ ID NO: 519800 - RNA, 18 nt, Human
uuaguagagacgggguuu

SEQ ID NO: 519801 - RNA, 22 nt, Human
uuaguagagacgggguuucacc

SEQ ID NO: 519802 - RNA, 24 nt, Human
uuaguagagacgggguuucaccau

SEQ ID NO: 519803 - RNA, 21 nt, Human
uucaagcgauuuuccugccuc

SEQ ID NO: 519804 - RNA, 23 nt, Human
uucaagcgauuuuccugccucgg

SEQ ID NO: 519805 - RNA, 24 nt, Human
uucaagcgauuuuccugccucggc

SEQ ID NO: 519806 - RNA, 23 nt, Human
uuguauuuuuaguagagacgggg

SEQ ID NO: 519807 - RNA, 24 nt, Human
uuucaccauguuggucaggcuggu

SEQ ID NO: 519808 - RNA, 24 nt, Human
uuuuuaguagagacgggguuucac

SEQ ID NO: 519809 - RNA, 20 nt, Human
uuuuuguauuuuuaguagag

SEQ ID NO: 519810 - RNA, 26 nt, Human
aaaaggagaacaaauaaacaacaaaa

SEQ ID NO: 519811 - RNA, 22 nt, Human
aaacaacaaaaacaacaacaac

SEQ ID NO: 519812 - RNA, 24 nt, Human
aacaacaaaaacaacaacaacaac

SEQ ID NO: 519813 - RNA, 20 nt, Human
acaaaaacaacaacaacaaa

SEQ ID NO: 519814 - RNA, 24 nt, Human
acaaaaacaacaacaacaacaaaa

SEQ ID NO: 519815 - RNA, 20 nt, Human
acaacaacaacaacaaaaag

SEQ ID NO: 519816 - RNA, 24 nt, Human
acaacaacaacaacaaaaaggcaa

SEQ ID NO: 519817 - RNA, 19 nt, Human
caaaaacaacaacaacaac

SEQ ID NO: 519818 - RNA, 27 nt, Human
caaaaacaacaacaacaacaaaaaggc

SEQ ID NO: 519819 - RNA, 20 nt, Human
caacaaaaacaacaacaaca

SEQ ID NO: 519820 - RNA, 26 nt, Human
caacaaaaacaacaacaacaacaaaa

SEQ ID NO: 519821 - RNA, 23 nt, Human
caacaaaaaggcaaauucaacug

SEQ ID NO: 519822 - RNA, 22 nt, Human
caacaacaacaacaaaaaggca

SEQ ID NO: 519823 - RNA, 24 nt, Human
caacaacaacaacaaaaaggcaaa

SEQ ID NO: 519824 - RNA, 27 nt, Human
caacaacaacaacaaaaaggcaaauuc

SEQ ID NO: 519825 - RNA, 20 nt, Human
cacacacccacacuugcgug

SEQ ID NO: 519826 - RNA, 25 nt, Human
cacacacccacacuugcguggcccc

SEQ ID NO: 519827 - RNA, 22 nt, Human
cacauacgcacacucacacacc

SEQ ID NO: 519828 - RNA, 18 nt, Human
caccaacccccaaaacac

SEQ ID NO: 519829 - RNA, 23 nt, Human
caccaacccccaaaacacaaaac

SEQ ID NO: 519830 - RNA, 22 nt, Human
caccaugcccuggggggucccc

SEQ ID NO: 519831 - RNA, 22 nt, Human
cagucccgggcugggaccuccu

SEQ ID NO: 519832 - RNA, 21 nt, Human
cauacgcacacucacacaccc

SEQ ID NO: 519833 - RNA, 24 nt, Human
cauacgcacacucacacacccaca

SEQ ID NO: 519834 - RNA, 21 nt, Human
cccaccaugcccugggggguc

SEQ ID NO: 519835 - RNA, 25 nt, Human
ccccacauacgcacacucacacacc

SEQ ID NO: 519836 - RNA, 18 nt, Human
ccccuuggacugguuccc

SEQ ID NO: 519837 - RNA, 20 nt, Human
cccuuggacugguucccagg

SEQ ID NO: 519838 - RNA, 21 nt, Human
ccucagaccccaccaugcccu

SEQ ID NO: 519839 - RNA, 22 nt, Human
cgccucagaccccaccaugccc

SEQ ID NO: 519840 - RNA, 19 nt, Human
cuaggcacagcaacagagc

SEQ ID NO: 519841 - RNA, 20 nt, Human
cuuggacugguucccagggc

SEQ ID NO: 519842 - RNA, 18 nt, Human
cuuuguccaccaaccccc

SEQ ID NO: 519843 - RNA, 25 nt, Human
guccccacauacgcacacucacaca

SEQ ID NO: 519844 - RNA, 21 nt, Human
uaaaaggagaacaaauaaaca

SEQ ID NO: 519845 - RNA, 19 nt, Human
uccaccaacccccaaaaca

SEQ ID NO: 519846 - RNA, 22 nt, Human
uccaccaacccccaaaacacaa

SEQ ID NO: 519847 - RNA, 24 nt, Human
uucccagggcagaggggcgggcaa

SEQ ID NO: 519848 - RNA, 21 nt, Human
uuuguccaccaacccccaaaa

SEQ ID NO: 519849 - RNA, 19 nt, Human
uuuuuuuuuuuuuuuuuaa

SEQ ID NO: 519850 - RNA, 20 nt, Human
aaaccaaaccccacaacuga

SEQ ID NO: 519851 - RNA, 20 nt, Human
aaacgcccuggagaggccga

SEQ ID NO: 519852 - RNA, 19 nt, Human
aacacaugaaaccaaaccc

SEQ ID NO: 519853 - RNA, 20 nt, Human
aaguggaagggaaagaaggg

SEQ ID NO: 519854 - RNA, 22 nt, Human
acaaaaaacaccgaacaaugca

SEQ ID NO: 519855 - RNA, 21 nt, Human
acacaugaaaccaaaccccac

SEQ ID NO: 519856 - RNA, 22 nt, Human
acacaugaaaccaaaccccaca

SEQ ID NO: 519857 - RNA, 22 nt, Human
acgaguugacauguacaaaaaa

SEQ ID NO: 519858 - RNA, 18 nt, Human
agaggccgaagggaggag

SEQ ID NO: 519859 - RNA, 20 nt, Human
agcguguuggagaucucaag

SEQ ID NO: 519860 - RNA, 22 nt, Human
agcuaaauuuuccccuccccaa

SEQ ID NO: 519861 - RNA, 24 nt, Human
agggaggguggggggaggcagaga

SEQ ID NO: 519862 - RNA, 21 nt, Human
aggggacagggaggguggggg

SEQ ID NO: 519863 - RNA, 23 nt, Human
caacugagcuccuccugccuauc

SEQ ID NO: 519864 - RNA, 18 nt, Human
cagcguguuggagaucuc

SEQ ID NO: 519865 - RNA, 19 nt, Human
cagcguguuggagaucuca

SEQ ID NO: 519866 - RNA, 19 nt, Human
ccaaaccccacaacugagg

SEQ ID NO: 519867 - RNA, 28 nt, Human
cccacaacugaggcuaagauuuaagagc

SEQ ID NO: 519868 - RNA, 19 nt, Human
cccuccauguuugcaggca

SEQ ID NO: 519869 - RNA, 23 nt, Human
ccgacaacugagcuccuccugcc

SEQ ID NO: 519870 - RNA, 27 nt, Human
ccuccagcaccaccggacagggacugg

SEQ ID NO: 519871 - RNA, 21 nt, Human
ccucccugcucuagaagugga

SEQ ID NO: 519872 - RNA, 19 nt, Human
cgcccuggagaggccgaag

SEQ ID NO: 519873 - RNA, 22 nt, Human
gagccuccagcaccaccggaca

SEQ ID NO: 519874 - RNA, 23 nt, Human
gagcuaaauuuuccccuccccaa

SEQ ID NO: 519875 - RNA, 23 nt, Human
gaggguggggggaggcagagggg

SEQ ID NO: 519876 - RNA, 20 nt, Human
gcuaaauuuuccccucccca

SEQ ID NO: 519877 - RNA, 20 nt, Human
ggccaacaggggacagggag

SEQ ID NO: 519878 - RNA, 21 nt, Human
gggaggaggggcagcacugga

SEQ ID NO: 519879 - RNA, 23 nt, Human
ggggacagggaggguggggggag

SEQ ID NO: 519880 - RNA, 21 nt, Human
ggguggggggaggcagagggg

SEQ ID NO: 519881 - RNA, 18 nt, Human
gguggggggaggcagagg

SEQ ID NO: 519882 - RNA, 20 nt, Human
uaaauuuuccccuccccaag

SEQ ID NO: 519883 - RNA, 21 nt, Human
uaacacaugaaaccaaacccc

SEQ ID NO: 519884 - RNA, 22 nt, Human
uagaaguggaagggaaagaagg

SEQ ID NO: 519885 - RNA, 23 nt, Human
uaucuaacacaugaaaccaaacc

SEQ ID NO: 519886 - RNA, 23 nt, Human
uccccaagccucccugcucuaga

SEQ ID NO: 519887 - RNA, 22 nt, Human
ucuaacacaugaaaccaaaccc

SEQ ID NO: 519888 - RNA, 22 nt, Human
ugcagaauucaucgcaagacua

SEQ ID NO: 519889 - RNA, 19 nt, Human
uggagaggccgaagggagg

SEQ ID NO: 519890 - RNA, 21 nt, Human
uguccgacaacugagcuccuc

SEQ ID NO: 519891 - RNA, 22 nt, Human
uguccgacaacugagcuccucc

SEQ ID NO: 519892 - RNA, 21 nt, Human
uguggccaaaugcccuccaug

SEQ ID NO: 519893 - RNA, 26 nt, Human
uguggccaaaugcccuccauguuugc

SEQ ID NO: 519894 - RNA, 21 nt, Human
uuaagagcuacccagagcuaa

SEQ ID NO: 519895 - RNA, 19 nt, Human
uucaagaacccaauuuaau

SEQ ID NO: 519896 - RNA, 23 nt, Human
uuccccuccccaagccucccugc

SEQ ID NO: 519897 - RNA, 24 nt, Human
uuuuuuuuuuuuuuuuuuuucaag

SEQ ID NO: 519898 - RNA, 22 nt, Human
aaagcaccucccaggguccccc

SEQ ID NO: 519899 - RNA, 21 nt, Human
aacaccacccccccggccacc

SEQ ID NO: 519900 - RNA, 26 nt, Human
aagcaccucccagggucccccgaccc

SEQ ID NO: 519901 - RNA, 21 nt, Human
acccuggagaggagccguggu

SEQ ID NO: 519902 - RNA, 20 nt, Human
agaggacccuggcucccaac

SEQ ID NO: 519903 - RNA, 21 nt, Human
agagguccccucucuccaccc

SEQ ID NO: 519904 - RNA, 21 nt, Human
agcaccucccagggucccccg

SEQ ID NO: 519905 - RNA, 20 nt, Human
agccuugagaggucaguagc

SEQ ID NO: 519906 - RNA, 25 nt, Human
aggacccuggcucccaaccccagcc

SEQ ID NO: 519907 - RNA, 18 nt, Human
aggcccgagggccagcgg

SEQ ID NO: 519908 - RNA, 22 nt, Human
aguagggggaagagguccccuc

SEQ ID NO: 519909 - RNA, 20 nt, Human
caccagggacauggcagggc

SEQ ID NO: 519910 - RNA, 18 nt, Human
caccuccuucccccaacc

SEQ ID NO: 519911 - RNA, 21 nt, Human
caccuccuucccccaacccaa

SEQ ID NO: 519912 - RNA, 23 nt, Human
cacucgggaggcccgagggccag

SEQ ID NO: 519913 - RNA, 20 nt, Human
cagcauaggggcugggaugg

SEQ ID NO: 519914 - RNA, 18 nt, Human
cagggcccgagggcgcga

SEQ ID NO: 519915 - RNA, 20 nt, Human
ccaccuccuucccccaaccc

SEQ ID NO: 519916 - RNA, 23 nt, Human
ccagcgcaagggugugcaggaag

SEQ ID NO: 519917 - RNA, 27 nt, Human
cccaaccccagccaucagccccagagc

SEQ ID NO: 519918 - RNA, 18 nt, Human
cccagauuggaggaagcc

SEQ ID NO: 519919 - RNA, 18 nt, Human
ccccacaagcccuccugc

SEQ ID NO: 519920 - RNA, 19 nt, Human
ccccagagcccugucucca

SEQ ID NO: 519921 - RNA, 22 nt, Human
ccccagccaucagccccagagc

SEQ ID NO: 519922 - RNA, 24 nt, Human
cccccaacccaacagacuaguuca

SEQ ID NO: 519923 - RNA, 22 nt, Human
ccccgggguugucagcacuggg

SEQ ID NO: 519924 - RNA, 19 nt, Human
ccccucucuccacccccuc

SEQ ID NO: 519925 - RNA, 24 nt, Human
ccccucucuccacccccucagucc

SEQ ID NO: 519926 - RNA, 19 nt, Human
ccuccccacaagcccuccu

SEQ ID NO: 519927 - RNA, 20 nt, Human
ccuccuccagcgcaaggguu

SEQ ID NO: 519928 - RNA, 25 nt, Human
ccuccucccagcguagcuggggcag

SEQ ID NO: 519929 - RNA, 18 nt, Human
ccuccugcccucaguggg

SEQ ID NO: 519930 - RNA, 26 nt, Human
ccuggcucccaaccccagccaucagc

SEQ ID NO: 519931 - RNA, 21 nt, Human
ccugguccccuugaaacccug

SEQ ID NO: 519932 - RNA, 21 nt, Human
ccugucuccacgggggugggg

SEQ ID NO: 519933 - RNA, 20 nt, Human
ccuguuggugucccucccca

SEQ ID NO: 519934 - RNA, 22 nt, Human
cggccaccaucggggucagcau

SEQ ID NO: 519935 - RNA, 21 nt, Human
cgugaaggggcagggaggccg

SEQ ID NO: 519936 - RNA, 23 nt, Human
cucccaaccccagccaucagccc

SEQ ID NO: 519937 - RNA, 23 nt, Human
cucccagcguagcuggggcagcc

SEQ ID NO: 519938 - RNA, 24 nt, Human
cuccccacaagcccuccugcccuc

SEQ ID NO: 519939 - RNA, 18 nt, Human
cuccccuccuccagcgca

SEQ ID NO: 519940 - RNA, 20 nt, Human
cuccccuccuccagcgcaag

SEQ ID NO: 519941 - RNA, 30 nt, Human
cugagacaaugacugcgucggccuccuccu

SEQ ID NO: 519942 - RNA, 21 nt, Human
cugguccccuugaaacccugu

SEQ ID NO: 519943 - RNA, 22 nt, Human
gaacaccacccccccggccacc

SEQ ID NO: 519944 - RNA, 21 nt, Human
gaagagguccccucucuccac

SEQ ID NO: 519945 - RNA, 19 nt, Human
gacaaugacugcgucggcc

SEQ ID NO: 519946 - RNA, 21 nt, Human
gccaccuccuucccccaaccc

SEQ ID NO: 519947 - RNA, 21 nt, Human
gccccagagcccugucuccac

SEQ ID NO: 519948 - RNA, 18 nt, Human
ggagcccugggggauggc

SEQ ID NO: 519949 - RNA, 25 nt, Human
ggaggcccgagggccagcggggguu

SEQ ID NO: 519950 - RNA, 20 nt, Human
ggcagaguagggggaagagg

SEQ ID NO: 519951 - RNA, 18 nt, Human
ggccucuucccuuucggg

SEQ ID NO: 519952 - RNA, 24 nt, Human
gggaacaccacccccccggccacc

SEQ ID NO: 519953 - RNA, 19 nt, Human
gggcagggaggcaggcggg

SEQ ID NO: 519954 - RNA, 21 nt, Human
gggcagggaggcaggcgggcc

SEQ ID NO: 519955 - RNA, 20 nt, Human
ggggagggggagggucccgg

SEQ ID NO: 519956 - RNA, 18 nt, Human
ggggguggggagggggag

SEQ ID NO: 519957 - RNA, 19 nt, Human
gggguggggguggggaggg

SEQ ID NO: 519958 - RNA, 19 nt, Human
ggguggggguggggagggg

SEQ ID NO: 519959 - RNA, 21 nt, Human
gggugugcaggaagggggcag

SEQ ID NO: 519960 - RNA, 22 nt, Human
ggugauggggagcccuggggga

SEQ ID NO: 519961 - RNA, 22 nt, Human
ggugugcaggaagggggcagag

SEQ ID NO: 519962 - RNA, 18 nt, Human
guaaagcaccucccaggg

SEQ ID NO: 519963 - RNA, 18 nt, Human
uccacccccucagucccc

SEQ ID NO: 519964 - RNA, 23 nt, Human
uccccacaagcccuccugcccuc

SEQ ID NO: 519965 - RNA, 27 nt, Human
uccccacauucugacuccugguccccu

SEQ ID NO: 519966 - RNA, 18 nt, Human
uccccuugaaacccuguu

SEQ ID NO: 519967 - RNA, 23 nt, Human
uccgggcaagaggacccuggcuc

SEQ ID NO: 519968 - RNA, 19 nt, Human
uccugggguuguccgggca

SEQ ID NO: 519969 - RNA, 18 nt, Human
ucuccacggggguggggg

SEQ ID NO: 519970 - RNA, 22 nt, Human
ucuccacggggguggggguggg

SEQ ID NO: 519971 - RNA, 20 nt, Human
ucucuccacccccucagucc

SEQ ID NO: 519972 - RNA, 24 nt, Human
ugacuccugguccccuugaaaccc

SEQ ID NO: 519973 - RNA, 25 nt, Human
ugacuccugguccccuugaaacccu

SEQ ID NO: 519974 - RNA, 23 nt, Human
ugcagccggccacucgggaggcc

SEQ ID NO: 519975 - RNA, 22 nt, Human
ugcccucagugggugggaggcg

SEQ ID NO: 519976 - RNA, 23 nt, Human
uggagaggaggaagaguccgggg

SEQ ID NO: 519977 - RNA, 19 nt, Human
uggcucaggacuugggcag

SEQ ID NO: 519978 - RNA, 19 nt, Human
uggcucaggacuugggcag

SEQ ID NO: 519979 - RNA, 21 nt, Human
ugggaaggcuuggggguagca

SEQ ID NO: 519980 - RNA, 23 nt, Human
uggggagcccugggggauggcag

SEQ ID NO: 519981 - RNA, 21 nt, Human
uggggagggggagggucccgg

SEQ ID NO: 519982 - RNA, 25 nt, Human
uggggcagccgcuggagcguguucu

SEQ ID NO: 519983 - RNA, 19 nt, Human
ugggggauggcagcauagg

SEQ ID NO: 519984 - RNA, 22 nt, Human
ugucccuccccacaagcccucc

SEQ ID NO: 519985 - RNA, 21 nt, Human
ugucuccacgggggugggggu

SEQ ID NO: 519986 - RNA, 24 nt, Human
ugucuccacggggguggggguggg

SEQ ID NO: 519987 - RNA, 23 nt, Human
uuagcggucuguaaagcaccucc

SEQ ID NO: 519988 - RNA, 23 nt, Human
uuggggcguccucuccucucggg

SEQ ID NO: 519989 - RNA, 18 nt, Human
uuuuuuuuuuuuuuuuug

SEQ ID NO: 519990 - RNA, 22 nt, Human
uuuuuuuuuuuuuuuuuuuggc

SEQ ID NO: 519991 - RNA, 28 nt, Human
uuuuuuuuuuuuuuuuuuuuuuuggggg

SEQ ID NO: 519992 - RNA, 21 nt, Human
aaaauaacgaaacugccccag

SEQ ID NO: 519993 - RNA, 18 nt, Human
aaaggccuaacaaccagu

SEQ ID NO: 519994 - RNA, 24 nt, Human
aaccaguaagauaauuuuagacaa

SEQ ID NO: 519995 - RNA, 23 nt, Human
acagcauggaaacacccaauguc

SEQ ID NO: 519996 - RNA, 18 nt, Human
accgcgcugaagacaguc

SEQ ID NO: 519997 - RNA, 21 nt, Human
agccuacagcauggaaacacc

SEQ ID NO: 519998 - RNA, 19 nt, Human
aggcauuggggaucagcuu

SEQ ID NO: 519999 - RNA, 24 nt, Human
aucacacaucaaagaccuagacuc

SEQ ID NO: 520000 - RNA, 24 nt, Human
caaaauaacgaaacugccccagua

SEQ ID NO: 520001 - RNA, 24 nt, Human
caaccagacuucccuagagaggcc

SEQ ID NO: 520002 - RNA, 25 nt, Human
caaccagacuucccuagagaggccc

SEQ ID NO: 520003 - RNA, 22 nt, Human
caaugcaggcgaagggcauggg

SEQ ID NO: 520004 - RNA, 24 nt, Human
cacccaaugucugcucuagccuau

SEQ ID NO: 520005 - RNA, 21 nt, Human
caccuguguucuuccugaggg

SEQ ID NO: 520006 - RNA, 19 nt, Human
cagcauggaaacacccaau

SEQ ID NO: 520007 - RNA, 24 nt, Human
cagccacacccuggucacagcaga

SEQ ID NO: 520008 - RNA, 20 nt, Human
caggagaaggggucaugggg

SEQ ID NO: 520009 - RNA, 21 nt, Human
caggagccuauucaggcucua

SEQ ID NO: 520010 - RNA, 21 nt, Human
ccacacacaucagaaagggua

SEQ ID NO: 520011 - RNA, 21 nt, Human
ccaggaaaggcaagcaugagg

SEQ ID NO: 520012 - RNA, 23 nt, Human
cgggagagggcugggucucagug

SEQ ID NO: 520013 - RNA, 21 nt, Human
cuauucaggcucuacaaccag

SEQ ID NO: 520014 - RNA, 20 nt, Human
cuccucaccgaggagccuuc

SEQ ID NO: 520015 - RNA, 22 nt, Human
cucugagacaccaaaggccuaa

SEQ ID NO: 520016 - RNA, 20 nt, Human
cuuugagccucacccuccuc

SEQ ID NO: 520017 - RNA, 24 nt, Human
gagaggccccgugccaguuagucc

SEQ ID NO: 520018 - RNA, 20 nt, Human
gagcuggggacaggagaagg

SEQ ID NO: 520019 - RNA, 18 nt, Human
ggaaaggcaagcaugagg

SEQ ID NO: 520020 - RNA, 20 nt, Human
ggaucuacugcucguccagu

SEQ ID NO: 520021 - RNA, 19 nt, Human
gggagagggcugggucuca

SEQ ID NO: 520022 - RNA, 21 nt, Human
gggaugggagcuggggacagg

SEQ ID NO: 520023 - RNA, 19 nt, Human
gggcaaugcaggcgaaggg

SEQ ID NO: 520024 - RNA, 21 nt, Human
gggcgcuccaggaacucugcu

SEQ ID NO: 520025 - RNA, 23 nt, Human
ggggccaggaaaggcaagcauga

SEQ ID NO: 520026 - RNA, 21 nt, Human
ggggcugggccugggggccag

SEQ ID NO: 520027 - RNA, 19 nt, Human
ggucauggggccaggagcc

SEQ ID NO: 520028 - RNA, 23 nt, Human
guucuuccugaggggugggggca

SEQ ID NO: 520029 - RNA, 18 nt, Human
guugcacauguagguugg

SEQ ID NO: 520030 - RNA, 18 nt, Human
uaaaaaggggcugggccu

SEQ ID NO: 520031 - RNA, 19 nt, Human
uagagguggaccugucccu

SEQ ID NO: 520032 - RNA, 25 nt, Human
uauaaacaaauaaaagauuaaauca

SEQ ID NO: 520033 - RNA, 18 nt, Human
ucaaagaccuagacuccu

SEQ ID NO: 520034 - RNA, 19 nt, Human
ucacacaucaaagaccuag

SEQ ID NO: 520035 - RNA, 21 nt, Human
uccucaccgaggagccuucuu

SEQ ID NO: 520036 - RNA, 20 nt, Human
ugcacauguagguuggaggu

SEQ ID NO: 520037 - RNA, 24 nt, Human
ugccagucuuagugccagggcaca

SEQ ID NO: 520038 - RNA, 18 nt, Human
ugggaugggagcugggga

SEQ ID NO: 520039 - RNA, 20 nt, Human
ugggccugggggccaggaaa

SEQ ID NO: 520040 - RNA, 21 nt, Human
uggggccaggagccuauucag

SEQ ID NO: 520041 - RNA, 20 nt, Human
ugggggccaggaaaggcaag

SEQ ID NO: 520042 - RNA, 23 nt, Human
uuaacccacaacugggaugggag

SEQ ID NO: 520043 - RNA, 21 nt, Human
uuccuuggagcugcaggcugc

SEQ ID NO: 520044 - RNA, 22 nt, Human
uuggagguagcccaggugucag

SEQ ID NO: 520045 - RNA, 25 nt, Human
cacucugucagucacaaaacauccu

SEQ ID NO: 520046 - RNA, 21 nt, Human
uacugggccuucaggaaguuc

SEQ ID NO: 520047 - RNA, 20 nt, Human
uccacaggccuggacacaca

SEQ ID NO: 520048 - RNA, 24 nt, Human
uggggagaauccacauugaccauc

SEQ ID NO: 520049 - RNA, 18 nt, Human
uguugccugcuuuggagg

SEQ ID NO: 520050 - RNA, 24 nt, Human
uuuuuuuuuuuuuuaaagccugga

SEQ ID NO: 520051 - RNA, 19 nt, Human
uuuuuuuuuuuuuuuuuaa

SEQ ID NO: 520052 - RNA, 19 nt, Human
aagcggccaagacagccag

SEQ ID NO: 520053 - RNA, 22 nt, Human
aagcggccaagacagccagaac

SEQ ID NO: 520054 - RNA, 23 nt, Human
aagcggccaagacagccagaaca

SEQ ID NO: 520055 - RNA, 24 nt, Human
accugccucucuccugcucuccua

SEQ ID NO: 520056 - RNA, 21 nt, Human
acugugcgacucaggcaccug

SEQ ID NO: 520057 - RNA, 24 nt, Human
aggcagggcuggcagaucuuggcu

SEQ ID NO: 520058 - RNA, 23 nt, Human
aggugggaguggagcuggcggga

SEQ ID NO: 520059 - RNA, 26 nt, Human
augggguggggcccaggaugggugcc

SEQ ID NO: 520060 - RNA, 22 nt, Human
caaacagaaagcggccaagaca

SEQ ID NO: 520061 - RNA, 25 nt, Human
cacaaacagaaagcggccaagacag

SEQ ID NO: 520062 - RNA, 22 nt, Human
cagggacucuccccaggucgaa

SEQ ID NO: 520063 - RNA, 20 nt, Human
cauuggccuccaugccuugu

SEQ ID NO: 520064 - RNA, 18 nt, Human
ccaugcagcgcugcugug

SEQ ID NO: 520065 - RNA, 21 nt, Human
cccaggucgaaggcccaaggc

SEQ ID NO: 520066 - RNA, 21 nt, Human
ccucugggggcucuucaacuc

SEQ ID NO: 520067 - RNA, 20 nt, Human
ccugggagguggccggugac

SEQ ID NO: 520068 - RNA, 23 nt, Human
ccugucuucuccauuggccucca

SEQ ID NO: 520069 - RNA, 18 nt, Human
cgaaggcccaaggccugg

SEQ ID NO: 520070 - RNA, 19 nt, Human
cggggcggggucugagcug

SEQ ID NO: 520071 - RNA, 25 nt, Human
cucacacuccucugggggcucuuca

SEQ ID NO: 520072 - RNA, 19 nt, Human
cucauggaggagacaggga

SEQ ID NO: 520073 - RNA, 21 nt, Human
cuggaaucuucuugaacacca

SEQ ID NO: 520074 - RNA, 22 nt, Human
cuucaacuccuucucuguuuca

SEQ ID NO: 520075 - RNA, 18 nt, Human
cuuccagcaccaucuccc

SEQ ID NO: 520076 - RNA, 19 nt, Human
cuuggaagcccacaugucc

SEQ ID NO: 520077 - RNA, 21 nt, Human
gaaggugggaguggagcuggc

SEQ ID NO: 520078 - RNA, 19 nt, Human
gacgugcucagcccguguc

SEQ ID NO: 520079 - RNA, 25 nt, Human
gagcaaggccacucggcgcacgcgg

SEQ ID NO: 520080 - RNA, 18 nt, Human
gagcuggugaucagccga

SEQ ID NO: 520081 - RNA, 25 nt, Human
gaucauuucaugggguggugggggg

SEQ ID NO: 520082 - RNA, 22 nt, Human
gaugugcaucuuccguggggcc

SEQ ID NO: 520083 - RNA, 18 nt, Human
gcagaucuuggcuucuuc

SEQ ID NO: 520084 - RNA, 22 nt, Human
gcugggagaccugccucucucc

SEQ ID NO: 520085 - RNA, 20 nt, Human
gcuuugugucagacacuggu

SEQ ID NO: 520086 - RNA, 23 nt, Human
ggaccccugggacucacacuccu

SEQ ID NO: 520087 - RNA, 20 nt, Human
ggaggacaugaguggaugaa

SEQ ID NO: 520088 - RNA, 19 nt, Human
ggcagaucuuggcuucuuc

SEQ ID NO: 520089 - RNA, 19 nt, Human
gggaguggaggcagggaga

SEQ ID NO: 520090 - RNA, 19 nt, Human
gggcggggucugagcuggg

SEQ ID NO: 520091 - RNA, 18 nt, Human
ggggcggggucugagcug

SEQ ID NO: 520092 - RNA, 24 nt, Human
gggugagagaacaggcagggcugg

SEQ ID NO: 520093 - RNA, 22 nt, Human
gguccacuuggaagcccacaug

SEQ ID NO: 520094 - RNA, 19 nt, Human
ggugagagaacaggcaggg

SEQ ID NO: 520095 - RNA, 20 nt, Human
ggugguggggggaguggagg

SEQ ID NO: 520096 - RNA, 25 nt, Human
guggagcuggcgggaccccugggaa

SEQ ID NO: 520097 - RNA, 18 nt, Human
guggggggaguggaggca

SEQ ID NO: 520098 - RNA, 21 nt, Human
ucaggcccuggacggcucaug

SEQ ID NO: 520099 - RNA, 19 nt, Human
ucccugucuucuccauugg

SEQ ID NO: 520100 - RNA, 18 nt, Human
uccguggggccgucccgg

SEQ ID NO: 520101 - RNA, 21 nt, Human
ucuccugcucuccuagaguca

SEQ ID NO: 520102 - RNA, 24 nt, Human
ucuccugcucuccuagagucacuu

SEQ ID NO: 520103 - RNA, 23 nt, Human
ucuggcccuccugcagagacagg

SEQ ID NO: 520104 - RNA, 21 nt, Human
ucuguuucauuaauggucauu

SEQ ID NO: 520105 - RNA, 23 nt, Human
ucuucaacuccuucucuggggcc

SEQ ID NO: 520106 - RNA, 23 nt, Human
ucuucaacuccuucucuguuuca

SEQ ID NO: 520107 - RNA, 22 nt, Human
ucuucuggaaucuucuugaaca

SEQ ID NO: 520108 - RNA, 25 nt, Human
ucuucuggaaucuucuugaacacca

SEQ ID NO: 520109 - RNA, 20 nt, Human
ugaaggcccugggcuucagc

SEQ ID NO: 520110 - RNA, 20 nt, Human
ugagaggaucccugggaggu

SEQ ID NO: 520111 - RNA, 19 nt, Human
ugagcaaggccacucggcg

SEQ ID NO: 520112 - RNA, 18 nt, Human
ugcaucuuccguggggcc

SEQ ID NO: 520113 - RNA, 20 nt, Human
ugccaggggucuggaggacc

SEQ ID NO: 520114 - RNA, 20 nt, Human
ugcgacucaggcaccugacu

SEQ ID NO: 520115 - RNA, 19 nt, Human
ugcucuggggcggcugcag

SEQ ID NO: 520116 - RNA, 18 nt, Human
uggaagcccacauguccc

SEQ ID NO: 520117 - RNA, 24 nt, Human
uggaggagacagggacucucccca

SEQ ID NO: 520118 - RNA, 24 nt, Human
ugggagagacugugcgacucaggc

SEQ ID NO: 520119 - RNA, 21 nt, Human
ugggagguggccggugacuug

SEQ ID NO: 520120 - RNA, 24 nt, Human
ugggagguggccggugacuuggua

SEQ ID NO: 520121 - RNA, 20 nt, Human
ugggguggggcccaggaugg

SEQ ID NO: 520122 - RNA, 18 nt, Human
ugugcaucuuccgugggg

SEQ ID NO: 520123 - RNA, 18 nt, Human
uguuucauuaauggucau

SEQ ID NO: 520124 - RNA, 19 nt, Human
uucaugggguggugggggg

SEQ ID NO: 520125 - RNA, 23 nt, Human
uugcuuggauccaggaagcgggg

SEQ ID NO: 520126 - RNA, 21 nt, Human
uuuauccaggagagguccacu

SEQ ID NO: 520127 - RNA, 22 nt, Human
uuuauucuuacuacauaagauc

SEQ ID NO: 520128 - RNA, 19 nt, Human
aacaggcaauguggacucu

SEQ ID NO: 520129 - RNA, 20 nt, Human
aaggaaggguuagguggggc

SEQ ID NO: 520130 - RNA, 19 nt, Human
aaggcaccauguguacaga

SEQ ID NO: 520131 - RNA, 24 nt, Human
aaucgcuugaacccgggaggcgga

SEQ ID NO: 520132 - RNA, 24 nt, Human
accaacauggagaaacccugucuc

SEQ ID NO: 520133 - RNA, 24 nt, Human
acccugucucuacuaaaaauacaa

SEQ ID NO: 520134 - RNA, 21 nt, Human
agaaccauugaagaaacagag

SEQ ID NO: 520135 - RNA, 22 nt, Human
agaaucgcuugaacccgggagg

SEQ ID NO: 520136 - RNA, 24 nt, Human
agcacuuugggaggccgagguggg

SEQ ID NO: 520137 - RNA, 20 nt, Human
agccacagcaguaccagagc

SEQ ID NO: 520138 - RNA, 21 nt, Human
aggauggaaaagggaagagaa

SEQ ID NO: 520139 - RNA, 19 nt, Human
aggcagaaguucugaguca

SEQ ID NO: 520140 - RNA, 24 nt, Human
aggcaggagaaucgcuugaacccg

SEQ ID NO: 520141 - RNA, 21 nt, Human
aggccgagguggguggaucac

SEQ ID NO: 520142 - RNA, 20 nt, Human
aggcggagguugaggugagc

SEQ ID NO: 520143 - RNA, 20 nt, Human
aggcugaggcaggagaaucg

SEQ ID NO: 520144 - RNA, 24 nt, Human
aggcugaggcaggagaaucgcuug

SEQ ID NO: 520145 - RNA, 25 nt, Human
aggcugggccccuugagaugaaguc

SEQ ID NO: 520146 - RNA, 24 nt, Human
agggaagagaaccauugaagaaac

SEQ ID NO: 520147 - RNA, 19 nt, Human
agggcggcaggggaaucag

SEQ ID NO: 520148 - RNA, 24 nt, Human
agggcugaagacagacacugaacc

SEQ ID NO: 520149 - RNA, 19 nt, Human
agguggggcgcgguggcuc

SEQ ID NO: 520150 - RNA, 19 nt, Human
aggugggggagaaggcauc

SEQ ID NO: 520151 - RNA, 22 nt, Human
agguggguggaucaccugaggu

SEQ ID NO: 520152 - RNA, 23 nt, Human
agguugaggugagcugagaucgc

SEQ ID NO: 520153 - RNA, 20 nt, Human
aucaccugaggucgggaguu

SEQ ID NO: 520154 - RNA, 22 nt, Human
augcagguccugggaggugggg

SEQ ID NO: 520155 - RNA, 24 nt, Human
augggcccugggagaguucucuuu

SEQ ID NO: 520156 - RNA, 24 nt, Human
auugcacucuagccugggcaccaa

SEQ ID NO: 520157 - RNA, 24 nt, Human
caacauggagaaacccugucucua

SEQ ID NO: 520158 - RNA, 22 nt, Human
caacuucaggaggcucaggccu

SEQ ID NO: 520159 - RNA, 24 nt, Human
cacaaagccaagaacauaaaaaua

SEQ ID NO: 520160 - RNA, 24 nt, Human
cacgccuguaaucccagcacuuug

SEQ ID NO: 520161 - RNA, 21 nt, Human
cagaguauucaugggaugcag

SEQ ID NO: 520162 - RNA, 27 nt, Human
cagcaacuucaggaggcucaggccagg

SEQ ID NO: 520163 - RNA, 24 nt, Human
cagcacuuugggaggccgaggugg

SEQ ID NO: 520164 - RNA, 22 nt, Human
cagcagggcugaagacagacac

SEQ ID NO: 520165 - RNA, 24 nt, Human
cagccugaccaacauggagaaacc

SEQ ID NO: 520166 - RNA, 24 nt, Human
caggaugccucaugcacauuaggg

SEQ ID NO: 520167 - RNA, 21 nt, Human
cagguccugggagguggggga

SEQ ID NO: 520168 - RNA, 21 nt, Human
caucuccccucggggugcaac

SEQ ID NO: 520169 - RNA, 20 nt, Human
caugcacauuaggggugcca

SEQ ID NO: 520170 - RNA, 26 nt, Human
cauguacacaagaaacaggcaaugug

SEQ ID NO: 520171 - RNA, 18 nt, Human
cauugcacucuagccugg

SEQ ID NO: 520172 - RNA, 19 nt, Human
cauugcacucuagccuggg

SEQ ID NO: 520173 - RNA, 20 nt, Human
cauugcacucuagccugggc

SEQ ID NO: 520174 - RNA, 21 nt, Human
cauugcacucuagccugggca

SEQ ID NO: 520175 - RNA, 24 nt, Human
cauugcacucuagccugggcacca

SEQ ID NO: 520176 - RNA, 24 nt, Human
ccaagguggaguccagaggaggcu

SEQ ID NO: 520177 - RNA, 21 nt, Human
ccaccauccaguucugguggu

SEQ ID NO: 520178 - RNA, 20 nt, Human
ccauugcacucuagccuggg

SEQ ID NO: 520179 - RNA, 21 nt, Human
ccauugcacucuagccugggc

SEQ ID NO: 520180 - RNA, 23 nt, Human
ccauugcacucuagccugggcac

SEQ ID NO: 520181 - RNA, 23 nt, Human
cccauguacacaagaaacaggca

SEQ ID NO: 520182 - RNA, 21 nt, Human
ccccauguacacaagaaacag

SEQ ID NO: 520183 - RNA, 19 nt, Human
cccgcaccaggacggggag

SEQ ID NO: 520184 - RNA, 20 nt, Human
cccgcaccaggacggggagc

SEQ ID NO: 520185 - RNA, 21 nt, Human
cccugggagaguucucuuucc

SEQ ID NO: 520186 - RNA, 20 nt, Human
ccucggggugcaaccagcug

SEQ ID NO: 520187 - RNA, 25 nt, Human
ccucucagccuucugagcugggaug

SEQ ID NO: 520188 - RNA, 19 nt, Human
ccucucuuuaguauccucu

SEQ ID NO: 520189 - RNA, 22 nt, Human
ccugaccaacauggagaaaccc

SEQ ID NO: 520190 - RNA, 24 nt, Human
ccugaccaacauggagaaacccug

SEQ ID NO: 520191 - RNA, 23 nt, Human
ccugaccgggcuggggcaaugcc

SEQ ID NO: 520192 - RNA, 22 nt, Human
ccugaggucgggaguuugagac

SEQ ID NO: 520193 - RNA, 22 nt, Human
ccuguaaucccagcacuuuggg

SEQ ID NO: 520194 - RNA, 22 nt, Human
ccuguaaucccagcuacuaggg

SEQ ID NO: 520195 - RNA, 24 nt, Human
cgagguggguggaucaccugaggu

SEQ ID NO: 520196 - RNA, 24 nt, Human
cgccauugcacucuagccugggca

SEQ ID NO: 520197 - RNA, 23 nt, Human
cgccuguaaucccagcacuuugg

SEQ ID NO: 520198 - RNA, 23 nt, Human
cgccuguaaucccagcuacuagg

SEQ ID NO: 520199 - RNA, 22 nt, Human
cucacgccuguaaucccagcac

SEQ ID NO: 520200 - RNA, 24 nt, Human
cucacgccuguaaucccagcacuu

SEQ ID NO: 520201 - RNA, 20 nt, Human
cucagccuucugagcuggga

SEQ ID NO: 520202 - RNA, 21 nt, Human
cuccacugcaaacccucucag

SEQ ID NO: 520203 - RNA, 22 nt, Human
cugaagacagacacugaacccu

SEQ ID NO: 520204 - RNA, 21 nt, Human
cugcucagggcuccacugcaa

SEQ ID NO: 520205 - RNA, 20 nt, Human
cuggugguugguaggaacgg

SEQ ID NO: 520206 - RNA, 21 nt, Human
gaagagaaccauugaagaaac

SEQ ID NO: 520207 - RNA, 19 nt, Human
gaccauucccaggaugccu

SEQ ID NO: 520208 - RNA, 21 nt, Human
gagaaacccugucucuacuaa

SEQ ID NO: 520209 - RNA, 18 nt, Human
gagcaggaggugagcaag

SEQ ID NO: 520210 - RNA, 21 nt, Human
gaggauggaaaagggaagaga

SEQ ID NO: 520211 - RNA, 20 nt, Human
gagguggaaauaguugcaaa

SEQ ID NO: 520212 - RNA, 19 nt, Human
gaguccagaggaggcuggg

SEQ ID NO: 520213 - RNA, 23 nt, Human
gagugugggggguugugggagga

SEQ ID NO: 520214 - RNA, 24 nt, Human
gaucaccugaggucgggaguuuga

SEQ ID NO: 520215 - RNA, 21 nt, Human
gaugcagguccugggaggugg

SEQ ID NO: 520216 - RNA, 20 nt, Human
gcaacuucaggaggcucagg

SEQ ID NO: 520217 - RNA, 20 nt, Human
gcagggcugaagacagacac

SEQ ID NO: 520218 - RNA, 22 nt, Human
gccaagaacauaaaaauaaaua

SEQ ID NO: 520219 - RNA, 20 nt, Human
gccauugcacucuagccugg

SEQ ID NO: 520220 - RNA, 23 nt, Human
gcgagcaggaggugagcaagggc

SEQ ID NO: 520221 - RNA, 20 nt, Human
gcgggcgccuguaaucccag

SEQ ID NO: 520222 - RNA, 25 nt, Human
gcugaagcgcggggcacaggucccg

SEQ ID NO: 520223 - RNA, 21 nt, Human
gcugcaucugagagccugacc

SEQ ID NO: 520224 - RNA, 21 nt, Human
ggaaucaguaggcugugcggg

SEQ ID NO: 520225 - RNA, 19 nt, Human
ggaggagguggaaauaggg

SEQ ID NO: 520226 - RNA, 22 nt, Human
ggagguugaggugagcugagau

SEQ ID NO: 520227 - RNA, 24 nt, Human
ggagguugaggugagcugagaucg

SEQ ID NO: 520228 - RNA, 18 nt, Human
ggaguggagugugggggg

SEQ ID NO: 520229 - RNA, 19 nt, Human
ggaguuugagaccagccug

SEQ ID NO: 520230 - RNA, 23 nt, Human
ggcugggccccuugagaugaagu

SEQ ID NO: 520231 - RNA, 21 nt, Human
gggaaugaguagggaaggagc

SEQ ID NO: 520232 - RNA, 23 nt, Human
gggaggagguggaaauaggggac

SEQ ID NO: 520233 - RNA, 22 nt, Human
gggaggcugaggcaggagaauc

SEQ ID NO: 520234 - RNA, 19 nt, Human
gggaggugggggagaaggc

SEQ ID NO: 520235 - RNA, 24 nt, Human
gggcaugguggcgggcgccuguaa

SEQ ID NO: 520236 - RNA, 24 nt, Human
gggcgcgguggcucacgccuguaa

SEQ ID NO: 520237 - RNA, 22 nt, Human
ggggagggcugaagcgcggggc

SEQ ID NO: 520238 - RNA, 19 nt, Human
ggucgggaguuugagacca

SEQ ID NO: 520239 - RNA, 24 nt, Human
gguggcgggcgccuguaaucccag

SEQ ID NO: 520240 - RNA, 23 nt, Human
gguggcucacgccuguaauccca

SEQ ID NO: 520241 - RNA, 24 nt, Human
gguggcucacgccuguaaucccag

SEQ ID NO: 520242 - RNA, 21 nt, Human
guccaagguggaguccagagg

SEQ ID NO: 520243 - RNA, 20 nt, Human
gugguugguaggaacgggaa

SEQ ID NO: 520244 - RNA, 22 nt, Human
uaaaaauacaaaauuagccggg

SEQ ID NO: 520245 - RNA, 23 nt, Human
uaaaaauacaaaauuagccgggc

SEQ ID NO: 520246 - RNA, 19 nt, Human
uaaaacacaaagccaagaa

SEQ ID NO: 520247 - RNA, 23 nt, Human
uaaaacacaaagccaagaacaua

SEQ ID NO: 520248 - RNA, 21 nt, Human
uaaauauggacauucuagagu

SEQ ID NO: 520249 - RNA, 18 nt, Human
uacuagggaggcugaggc

SEQ ID NO: 520250 - RNA, 19 nt, Human
uacuagggaggcugaggca

SEQ ID NO: 520251 - RNA, 19 nt, Human
ucacugagguccaaggugg

SEQ ID NO: 520252 - RNA, 21 nt, Human
ucaggccagguuuggaggaug

SEQ ID NO: 520253 - RNA, 21 nt, Human
ucaguaggcugugcggggagg

SEQ ID NO: 520254 - RNA, 20 nt, Human
uccacacagcaggcggaggc

SEQ ID NO: 520255 - RNA, 22 nt, Human
uccauagucuggacuuuagagc

SEQ ID NO: 520256 - RNA, 24 nt, Human
uccuaaaacacaaagccaagaaca

SEQ ID NO: 520257 - RNA, 24 nt, Human
ucgcuugaacccgggaggcggagg

SEQ ID NO: 520258 - RNA, 20 nt, Human
ucucuacuaaaaauacaaaa

SEQ ID NO: 520259 - RNA, 19 nt, Human
ugaaaacagcaagauucac

SEQ ID NO: 520260 - RNA, 24 nt, Human
ugaccaacauggagaaacccuguc

SEQ ID NO: 520261 - RNA, 21 nt, Human
ugaccgggcuggggcaaugcc

SEQ ID NO: 520262 - RNA, 24 nt, Human
ugagaccagccugaccaacaugga

SEQ ID NO: 520263 - RNA, 22 nt, Human
ugagcugagaucgcgccauugc

SEQ ID NO: 520264 - RNA, 20 nt, Human
ugaggcaggagaaucgcuug

SEQ ID NO: 520265 - RNA, 24 nt, Human
ugaggcaggagaaucgcuugaacc

SEQ ID NO: 520266 - RNA, 25 nt, Human
ugaggcaggagaaucgcuugaaccc

SEQ ID NO: 520267 - RNA, 18 nt, Human
ugaggucgggaguuugag

SEQ ID NO: 520268 - RNA, 23 nt, Human
ugaggugagcugagaucgcgcca

SEQ ID NO: 520269 - RNA, 20 nt, Human
ugcggggagggcugaagcgc

SEQ ID NO: 520270 - RNA, 23 nt, Human
ugcucagggcuccacugcaaacc

SEQ ID NO: 520271 - RNA, 23 nt, Human
uggaucaccugaggucgggaguu

SEQ ID NO: 520272 - RNA, 24 nt, Human
uggaucaccugaggucgggaguuu

SEQ ID NO: 520273 - RNA, 22 nt, Human
uggcgggcgccuguaaucccag

SEQ ID NO: 520274 - RNA, 22 nt, Human
uggcucacgccuguaaucccag

SEQ ID NO: 520275 - RNA, 24 nt, Human
uggcucacgccuguaaucccagca

SEQ ID NO: 520276 - RNA, 23 nt, Human
ugggaggccgagguggguggauc

SEQ ID NO: 520277 - RNA, 24 nt, Human
ugggaggccgagguggguggauca

SEQ ID NO: 520278 - RNA, 21 nt, Human
ugggaggugggggagaaggca

SEQ ID NO: 520279 - RNA, 24 nt, Human
uggguggaucaccugaggucggga

SEQ ID NO: 520280 - RNA, 24 nt, Human
ugguggcgggcgccuguaauccca

SEQ ID NO: 520281 - RNA, 19 nt, Human
uguacagaguauucauggg

SEQ ID NO: 520282 - RNA, 20 nt, Human
uguccuuagaaggcaccaug

SEQ ID NO: 520283 - RNA, 27 nt, Human
ugugcggggagggcugaagcgcggggc

SEQ ID NO: 520284 - RNA, 18 nt, Human
ugugggggguugugggag

SEQ ID NO: 520285 - RNA, 19 nt, Human
uguguacagaguauucaug

SEQ ID NO: 520286 - RNA, 18 nt, Human
uuagccgggcaugguggc

SEQ ID NO: 520287 - RNA, 24 nt, Human
uuagguggggcgcgguggcucacg

SEQ ID NO: 520288 - RNA, 21 nt, Human
uucguucagcagggcugaaga

SEQ ID NO: 520289 - RNA, 21 nt, Human
uugaagaaacagagauugugu

SEQ ID NO: 520290 - RNA, 22 nt, Human
uugaagaaacagagauuguguu

SEQ ID NO: 520291 - RNA, 20 nt, Human
uugccuacuucccauaucca

SEQ ID NO: 520292 - RNA, 23 nt, Human
uugccuacuucccauauccagcc

SEQ ID NO: 520293 - RNA, 25 nt, Human
uugggaggccgagguggguggauca

SEQ ID NO: 520294 - RNA, 19 nt, Human
uuuggaggauggaaaaggg

SEQ ID NO: 520295 - RNA, 22 nt, Human
uuuuuuuccaaucaccuuucug

SEQ ID NO: 520296 - RNA, 18 nt, Human
aagcagcagggcugcggu

SEQ ID NO: 520297 - RNA, 22 nt, Human
aaguagcaauccagguccuggg

SEQ ID NO: 520298 - RNA, 22 nt, Human
aagugcugcuucaugcaguugg

SEQ ID NO: 520299 - RNA, 23 nt, Human
aggccaagccaucugccacauca

SEQ ID NO: 520300 - RNA, 24 nt, Human
caucaucguccccuagcagccgcu

SEQ ID NO: 520301 - RNA, 23 nt, Human
caucuuggcaaugcacucgcccg

SEQ ID NO: 520302 - RNA, 23 nt, Human
ccaggauggucuugaggggcucu

SEQ ID NO: 520303 - RNA, 22 nt, Human
ccaucugccacaucaucguccc

SEQ ID NO: 520304 - RNA, 18 nt, Human
ccuagcagccgcuuugcc

SEQ ID NO: 520305 - RNA, 23 nt, Human
cuagcagccgcuuugcccacagu

SEQ ID NO: 520306 - RNA, 22 nt, Human
cuccagaucauccucuguuugc

SEQ ID NO: 520307 - RNA, 18 nt, Human
gaacacgcagcugucucc

SEQ ID NO: 520308 - RNA, 19 nt, Human
gccacuccgcuucuuguca

SEQ ID NO: 520309 - RNA, 28 nt, Human
ggccacuccgcuucuugucccguccccg

SEQ ID NO: 520310 - RNA, 22 nt, Human
gggcauccaggauggucuugag

SEQ ID NO: 520311 - RNA, 20 nt, Human
gguagcugcgcuuggcgugg

SEQ ID NO: 520312 - RNA, 19 nt, Human
gugugcugcugcugcugcc

SEQ ID NO: 520313 - RNA, 20 nt, Human
uaaaguagcaauccaggucu

SEQ ID NO: 520314 - RNA, 19 nt, Human
uaccuaaguccucagaagc

SEQ ID NO: 520315 - RNA, 21 nt, Human
uagguguggacacauacguau

SEQ ID NO: 520316 - RNA, 24 nt, Human
ucaucguccccuagcagccgcuuu

SEQ ID NO: 520317 - RNA, 27 nt, Human
ucuccgggcccaggugccagaugaaca

SEQ ID NO: 520318 - RNA, 21 nt, Human
ugaucuccgggcccaggugcc

SEQ ID NO: 520319 - RNA, 26 nt, Human
ugcccagcggccguggggcuggggcc

SEQ ID NO: 520320 - RNA, 23 nt, Human
uggcagcuugccguugguuagca

SEQ ID NO: 520321 - RNA, 19 nt, Human
uggccggcccgcucugccc

SEQ ID NO: 520322 - RNA, 21 nt, Human
uuuauucgcuuaaaauaccua

SEQ ID NO: 520323 - RNA, 18 nt, Human
aaacaguccacacauccc

SEQ ID NO: 520324 - RNA, 18 nt, Human
aaagaggauggggagggg

SEQ ID NO: 520325 - RNA, 18 nt, Human
aagcuccucucggaucuc

SEQ ID NO: 520326 - RNA, 24 nt, Human
acaaaggggaacacacuaaacagu

SEQ ID NO: 520327 - RNA, 19 nt, Human
acacaucccauagcacuac

SEQ ID NO: 520328 - RNA, 18 nt, Human
agaagggagagggggggc

SEQ ID NO: 520329 - RNA, 19 nt, Human
aggagaagggagagggggg

SEQ ID NO: 520330 - RNA, 20 nt, Human
aggcaggcgagcgcugggga

SEQ ID NO: 520331 - RNA, 20 nt, Human
agggagagggggggcaccca

SEQ ID NO: 520332 - RNA, 22 nt, Human
agguuguggccacagggcacca

SEQ ID NO: 520333 - RNA, 23 nt, Human
aguguugguggggccgggaagga

SEQ ID NO: 520334 - RNA, 26 nt, Human
auggggagggguucccccuuccccca

SEQ ID NO: 520335 - RNA, 21 nt, Human
auuguuuccguugugcgcaaa

SEQ ID NO: 520336 - RNA, 21 nt, Human
cacccacaaaggggaacacac

SEQ ID NO: 520337 - RNA, 21 nt, Human
cacuaaacaguccacacaucc

SEQ ID NO: 520338 - RNA, 18 nt, Human
cagaccgggcacucgggc

SEQ ID NO: 520339 - RNA, 21 nt, Human
ccacaaaggggaacacacuaa

SEQ ID NO: 520340 - RNA, 18 nt, Human
cccauagcacuacuauca

SEQ ID NO: 520341 - RNA, 23 nt, Human
cccauagcacuacuaucaucuuc

SEQ ID NO: 520342 - RNA, 18 nt, Human
ccuuccacgaacauucaa

SEQ ID NO: 520343 - RNA, 21 nt, Human
ccuuccacgaacauucaaaaa

SEQ ID NO: 520344 - RNA, 19 nt, Human
cuuuccaagcuccucucgg

SEQ ID NO: 520345 - RNA, 19 nt, Human
gaacuccuggcccuuccac

SEQ ID NO: 520346 - RNA, 24 nt, Human
gagcggauacuacagcuuuccaag

SEQ ID NO: 520347 - RNA, 21 nt, Human
gcagaagagguuguggccaca

SEQ ID NO: 520348 - RNA, 22 nt, Human
gccgcugcgcugcugcuggucc

SEQ ID NO: 520349 - RNA, 26 nt, Human
gccgggaaggagaagggagagggggg

SEQ ID NO: 520350 - RNA, 21 nt, Human
gcggauacuacagcuuuccaa

SEQ ID NO: 520351 - RNA, 19 nt, Human
gcggauggccugagugacc

SEQ ID NO: 520352 - RNA, 20 nt, Human
gcugcgcugcugcugguccc

SEQ ID NO: 520353 - RNA, 18 nt, Human
ggaaagaggauggggagg

SEQ ID NO: 520354 - RNA, 18 nt, Human
ggaaggagaagggagagg

SEQ ID NO: 520355 - RNA, 19 nt, Human
ggauggggagggguucccc

SEQ ID NO: 520356 - RNA, 19 nt, Human
ggcggggcuaggggggcug

SEQ ID NO: 520357 - RNA, 19 nt, Human
gggaaagaggauggggagg

SEQ ID NO: 520358 - RNA, 19 nt, Human
gggaaggagaagggagagg

SEQ ID NO: 520359 - RNA, 20 nt, Human
gggaaggagaagggagaggg

SEQ ID NO: 520360 - RNA, 22 nt, Human
gggaaggagaagggagaggggg

SEQ ID NO: 520361 - RNA, 18 nt, Human
ggggccgggaaggagaag

SEQ ID NO: 520362 - RNA, 18 nt, Human
uagcagcgcccgcugccu

SEQ ID NO: 520363 - RNA, 19 nt, Human
uagccgcugcgcugcugcu

SEQ ID NO: 520364 - RNA, 20 nt, Human
uagccgcugcgcugcugcug

SEQ ID NO: 520365 - RNA, 19 nt, Human
ucagggcggggcuaggggg

SEQ ID NO: 520366 - RNA, 19 nt, Human
uccaugcagaagagguugu

SEQ ID NO: 520367 - RNA, 24 nt, Human
ugcagaagagguuguggccacagg

SEQ ID NO: 520368 - RNA, 18 nt, Human
uggcagaccgggcacucg

SEQ ID NO: 520369 - RNA, 22 nt, Human
uggggaaagaggauggggaggg

SEQ ID NO: 520370 - RNA, 19 nt, Human
uguucagguuucccaggcu

SEQ ID NO: 520371 - RNA, 24 nt, Human
uuuuuuuuuuuuuuuaacuuuuaa

SEQ ID NO: 520372 - RNA, 22 nt, Human
aacugcugcagcucacaacccc

SEQ ID NO: 520373 - RNA, 24 nt, Human
aagagucaggucaagcaggaagug

SEQ ID NO: 520374 - RNA, 21 nt, Human
aagcagcuggggggagagggg

SEQ ID NO: 520375 - RNA, 22 nt, Human
aaggagcuuuucagguggaggc

SEQ ID NO: 520376 - RNA, 24 nt, Human
aaggagcuuuucagguggaggcgg

SEQ ID NO: 520377 - RNA, 25 nt, Human
aaggagcuuuucagguggaggcggg

SEQ ID NO: 520378 - RNA, 20 nt, Human
acaaccccugccccagacga

SEQ ID NO: 520379 - RNA, 21 nt, Human
acgccuccagcgcccaugaac

SEQ ID NO: 520380 - RNA, 19 nt, Human
acuccagggauauuccagg

SEQ ID NO: 520381 - RNA, 18 nt, Human
agcucacaaccccugccc

SEQ ID NO: 520382 - RNA, 25 nt, Human
caaccccugccccagacgacuuggu

SEQ ID NO: 520383 - RNA, 19 nt, Human
caaggcaccagcaacugcu

SEQ ID NO: 520384 - RNA, 22 nt, Human
caccagcaacugcugcagcuca

SEQ ID NO: 520385 - RNA, 23 nt, Human
caccuucccacaaggcaccagca

SEQ ID NO: 520386 - RNA, 19 nt, Human
cagaccccucaaagggcag

SEQ ID NO: 520387 - RNA, 22 nt, Human
cagcuccaccucuuccuccuuu

SEQ ID NO: 520388 - RNA, 21 nt, Human
cagguggaggcgggugggggg

SEQ ID NO: 520389 - RNA, 22 nt, Human
cagguggaggcggguggggggu

SEQ ID NO: 520390 - RNA, 22 nt, Human
caugugaagagucaggucaagc

SEQ ID NO: 520391 - RNA, 19 nt, Human
ccagcgcccaugaacccgg

SEQ ID NO: 520392 - RNA, 19 nt, Human
cccagccccagcaauggca

SEQ ID NO: 520393 - RNA, 21 nt, Human
cccugccccaccuucccacaa

SEQ ID NO: 520394 - RNA, 19 nt, Human
ccuccagcgcccaugaacc

SEQ ID NO: 520395 - RNA, 18 nt, Human
ccucccggccaggcagcc

SEQ ID NO: 520396 - RNA, 19 nt, Human
cgugugcuguuucagcccc

SEQ ID NO: 520397 - RNA, 24 nt, Human
cuccagcgcccaugaacccggguc

SEQ ID NO: 520398 - RNA, 19 nt, Human
cugccccaccuucccacaa

SEQ ID NO: 520399 - RNA, 18 nt, Human
gaauccggaagaugauga

SEQ ID NO: 520400 - RNA, 24 nt, Human
gaugaugaugaugguggaagccuu

SEQ ID NO: 520401 - RNA, 19 nt, Human
gcugcagcucacaaccccu

SEQ ID NO: 520402 - RNA, 19 nt, Human
gcuggggggagaggggcag

SEQ ID NO: 520403 - RNA, 24 nt, Human
ggagaagcagcuggggggagaggg

SEQ ID NO: 520404 - RNA, 24 nt, Human
gguggaagccuuuuacuccaggga

SEQ ID NO: 520405 - RNA, 26 nt, Human
guuugcuuccuccccgaauuucuccu

SEQ ID NO: 520406 - RNA, 21 nt, Human
ucacaaccccugccccagacg

SEQ ID NO: 520407 - RNA, 23 nt, Human
ucaccaggaucgaagauuuucca

SEQ ID NO: 520408 - RNA, 26 nt, Human
ucagggaauccggaagaugaugauga

SEQ ID NO: 520409 - RNA, 18 nt, Human
ucccugccccaccuuccc

SEQ ID NO: 520410 - RNA, 21 nt, Human
ucccugccccaccuucccaca

SEQ ID NO: 520411 - RNA, 22 nt, Human
uggaggcggguggggggucccc

SEQ ID NO: 520412 - RNA, 18 nt, Human
ugggggcagagguggcgg

SEQ ID NO: 520413 - RNA, 26 nt, Human
ugggggcagagguggcgggcagccuc

SEQ ID NO: 520414 - RNA, 23 nt, Human
ugguggaagccuuuuacuccaga

SEQ ID NO: 520415 - RNA, 23 nt, Human
uguguaaaauguagcaggugugu

SEQ ID NO: 520416 - RNA, 23 nt, Human
uucccugguggguguccaguccu

SEQ ID NO: 520417 - RNA, 24 nt, Human
uucccugguggguguccaguccuc

SEQ ID NO: 520418 - RNA, 21 nt, Human
uugcuuccuccccgaauuucu

SEQ ID NO: 520419 - RNA, 19 nt, Human
uuucccggagggaaaaccu

SEQ ID NO: 520420 - RNA, 21 nt, Human
uuuuccacgugugucucacca

SEQ ID NO: 520421 - RNA, 22 nt, Human
aaaaagcuaaaauucauaagca

SEQ ID NO: 520422 - RNA, 19 nt, Human
aaaacaaacaaacaaaaag

SEQ ID NO: 520423 - RNA, 20 nt, Human
aaaagccacugaagugaaaa

SEQ ID NO: 520424 - RNA, 25 nt, Human
aaacaaaaagcuaaaauucauaagc

SEQ ID NO: 520425 - RNA, 25 nt, Human
aaacaagaucagaaacaaaagucca

SEQ ID NO: 520426 - RNA, 18 nt, Human
aacaaaaagcuaaaauuc

SEQ ID NO: 520427 - RNA, 23 nt, Human
aacaaaaagcuaaaauucauaag

SEQ ID NO: 520428 - RNA, 25 nt, Human
aaccucgcuguccuccaauauccac

SEQ ID NO: 520429 - RNA, 20 nt, Human
aagagaaaacaaacaaacaa

SEQ ID NO: 520430 - RNA, 22 nt, Human
aagagaaaacaaacaaacaaaa

SEQ ID NO: 520431 - RNA, 24 nt, Human
aagaucagaaacaaaaguccacca

SEQ ID NO: 520432 - RNA, 22 nt, Human
aaugauguauuuccucagcguu

SEQ ID NO: 520433 - RNA, 20 nt, Human
acacgaaagacaaagguucc

SEQ ID NO: 520434 - RNA, 23 nt, Human
accacuacaaucuuuuuuuuuuu

SEQ ID NO: 520435 - RNA, 18 nt, Human
accauggaagaaauccca

SEQ ID NO: 520436 - RNA, 20 nt, Human
accauggaagaaaucccaga

SEQ ID NO: 520437 - RNA, 18 nt, Human
agaagaacagaucauuua

SEQ ID NO: 520438 - RNA, 23 nt, Human
agagaaaacaaacaaacaaaaag

SEQ ID NO: 520439 - RNA, 25 nt, Human
agggaaaacaagaucagaaacaaaa

SEQ ID NO: 520440 - RNA, 21 nt, Human
aguccaccauggaagaaaucc

SEQ ID NO: 520441 - RNA, 21 nt, Human
auauccacagggaaaacaaga

SEQ ID NO: 520442 - RNA, 22 nt, Human
caaacaaaaagcuaaaauucau

SEQ ID NO: 520443 - RNA, 19 nt, Human
caaccgccgccucaucccg

SEQ ID NO: 520444 - RNA, 23 nt, Human
caagaucagaaacaaaaguccac

SEQ ID NO: 520445 - RNA, 22 nt, Human
caagcagacccacugugcgcga

SEQ ID NO: 520446 - RNA, 19 nt, Human
caccauggaagaaauccca

SEQ ID NO: 520447 - RNA, 21 nt, Human
cacguucaugcaugcaaagcg

SEQ ID NO: 520448 - RNA, 20 nt, Human
cagccccugggccugucacu

SEQ ID NO: 520449 - RNA, 23 nt, Human
caggucaaaguucauagcagcaa

SEQ ID NO: 520450 - RNA, 20 nt, Human
caugcaaagcgaggagguuu

SEQ ID NO: 520451 - RNA, 20 nt, Human
ccacagggaaaacaagauca

SEQ ID NO: 520452 - RNA, 20 nt, Human
cgcgcggcgagugggcccgg

SEQ ID NO: 520453 - RNA, 18 nt, Human
cuuggcacguucaugcau

SEQ ID NO: 520454 - RNA, 20 nt, Human
cuuugcuccagcgaguccag

SEQ ID NO: 520455 - RNA, 24 nt, Human
gaacagaucauuuaauuauacaaa

SEQ ID NO: 520456 - RNA, 23 nt, Human
gcacaaaguccucugugaagcca

SEQ ID NO: 520457 - RNA, 19 nt, Human
gccauccucucccccgacu

SEQ ID NO: 520458 - RNA, 19 nt, Human
gcccuagggagaucggacu

SEQ ID NO: 520459 - RNA, 23 nt, Human
gcccuagggagaucggacuucug

SEQ ID NO: 520460 - RNA, 19 nt, Human
gcgcgcgcgcgagggcggg

SEQ ID NO: 520461 - RNA, 21 nt, Human
gcuguccuccaauauccacag

SEQ ID NO: 520462 - RNA, 18 nt, Human
ggcgcgcggcgagugggc

SEQ ID NO: 520463 - RNA, 21 nt, Human
ggcuuggcacguucaugcaug

SEQ ID NO: 520464 - RNA, 19 nt, Human
gucagaggucacaggucaa

SEQ ID NO: 520465 - RNA, 24 nt, Human
gucucugccauccucucccccgac

SEQ ID NO: 520466 - RNA, 23 nt, Human
uaaaacggagggaaaauggucca

SEQ ID NO: 520467 - RNA, 19 nt, Human
uagcagcaaugcacaaagg

SEQ ID NO: 520468 - RNA, 21 nt, Human
uagcuccccuaugcuggcuug

SEQ ID NO: 520469 - RNA, 20 nt, Human
uaugaaaaaacccaacggca

SEQ ID NO: 520470 - RNA, 21 nt, Human
uaugaaaaaacccaacggcag

SEQ ID NO: 520471 - RNA, 18 nt, Human
ucaucccguccccgcucu

SEQ ID NO: 520472 - RNA, 19 nt, Human
uccacagggaaaacaagau

SEQ ID NO: 520473 - RNA, 26 nt, Human
uccaccauggaagaaaucccagagcu

SEQ ID NO: 520474 - RNA, 18 nt, Human
ucgccgccucggucgccg

SEQ ID NO: 520475 - RNA, 26 nt, Human
ugaaaaaacccaacggcagcgucgac

SEQ ID NO: 520476 - RNA, 20 nt, Human
ugaaagaaagguuuuuagua

SEQ ID NO: 520477 - RNA, 19 nt, Human
ugaaguagaagaacagauc

SEQ ID NO: 520478 - RNA, 21 nt, Human
ugcacaaaguccucugugaag

SEQ ID NO: 520479 - RNA, 20 nt, Human
ugcaugcaaagcgaggaggu

SEQ ID NO: 520480 - RNA, 24 nt, Human
uggcaaaaagagaaaacaaacaaa

SEQ ID NO: 520481 - RNA, 25 nt, Human
uggcaaaaagagaaaacaaacaaac

SEQ ID NO: 520482 - RNA, 18 nt, Human
ugggaucaaccgccgccu

SEQ ID NO: 520483 - RNA, 19 nt, Human
ugggaucaaccgccgccuc

SEQ ID NO: 520484 - RNA, 21 nt, Human
uguacagauaugaaaaaaccc

SEQ ID NO: 520485 - RNA, 22 nt, Human
uuuggcaaaaagagaaaacaaa

SEQ ID NO: 520486 - RNA, 19 nt, Human
uuuuuuuuuuuuuuuuuaa

SEQ ID NO: 520487 - RNA, 19 nt, Human
aaaaggcagcccucugaca

SEQ ID NO: 520488 - RNA, 19 nt, Human
aaacgugaagggaaagugg

SEQ ID NO: 520489 - RNA, 23 nt, Human
aaagaaaaacccaauguaaauaa

SEQ ID NO: 520490 - RNA, 21 nt, Human
aacaacacagaaacuagaaga

SEQ ID NO: 520491 - RNA, 22 nt, Human
aacacagaaacuagaagauccc

SEQ ID NO: 520492 - RNA, 21 nt, Human
aaccuguaaaguaauuuuucc

SEQ ID NO: 520493 - RNA, 21 nt, Human
aaccuguaaaguaauuuuucc

SEQ ID NO: 520494 - RNA, 18 nt, Human
aacgugaagggaaagugg

SEQ ID NO: 520495 - RNA, 20 nt, Human
aagcaccgcgugcaggagag

SEQ ID NO: 520496 - RNA, 18 nt, Human
aauguucauucauuccca

SEQ ID NO: 520497 - RNA, 23 nt, Human
accaaaacuacgaaagaaaaacc

SEQ ID NO: 520498 - RNA, 19 nt, Human
accgguagguuccucacgc

SEQ ID NO: 520499 - RNA, 18 nt, Human
acgaaauauaaauauaug

SEQ ID NO: 520500 - RNA, 21 nt, Human
acucccccauccucaaacccu

SEQ ID NO: 520501 - RNA, 21 nt, Human
agaaaaacccaauguaaauaa

SEQ ID NO: 520502 - RNA, 24 nt, Human
agaaaacaaugaagaaucuccuca

SEQ ID NO: 520503 - RNA, 20 nt, Human
agaaacuagaagaucccuuu

SEQ ID NO: 520504 - RNA, 21 nt, Human
agcaaauaacaaagaauacau

SEQ ID NO: 520505 - RNA, 25 nt, Human
agccacaccggcgacuaccagcgcg

SEQ ID NO: 520506 - RNA, 22 nt, Human
aggaaagaaaacaaugaagaau

SEQ ID NO: 520507 - RNA, 23 nt, Human
aggaaagaaaacaaugaagaauc

SEQ ID NO: 520508 - RNA, 19 nt, Human
aggcguggaggacgcugcc

SEQ ID NO: 520509 - RNA, 21 nt, Human
aguacaacugcaagucuaaga

SEQ ID NO: 520510 - RNA, 20 nt, Human
auaaaaauaacuucaguuau

SEQ ID NO: 520511 - RNA, 24 nt, Human
auuccacaaaaauauaccuugcca

SEQ ID NO: 520512 - RNA, 21 nt, Human
caaaacaaaguucagaaggca

SEQ ID NO: 520513 - RNA, 22 nt, Human
caaccuuugagaaggaaagaaa

SEQ ID NO: 520514 - RNA, 21 nt, Human
caacugcaagucuaagauaau

SEQ ID NO: 520515 - RNA, 22 nt, Human
cagccacaccggcgacuaccag

SEQ ID NO: 520516 - RNA, 25 nt, Human
cagccaccugaaacauuauaagucc

SEQ ID NO: 520517 - RNA, 21 nt, Human
cagcgcgcggccgguaccggu

SEQ ID NO: 520518 - RNA, 20 nt, Human
caggucagccaaaaaacgug

SEQ ID NO: 520519 - RNA, 18 nt, Human
cauggacugaauccagcc

SEQ ID NO: 520520 - RNA, 25 nt, Human
ccaaaacuacgaaagaaaaaccccu

SEQ ID NO: 520521 - RNA, 19 nt, Human
ccagccuacuuuuguaugg

SEQ ID NO: 520522 - RNA, 19 nt, Human
cccaauguaaauaaaggau

SEQ ID NO: 520523 - RNA, 19 nt, Human
cccagccgcggcgcacggg

SEQ ID NO: 520524 - RNA, 22 nt, Human
cccggagcugagggaacugccc

SEQ ID NO: 520525 - RNA, 24 nt, Human
ccucaaacccuggcggcggacccc

SEQ ID NO: 520526 - RNA, 26 nt, Human
ccucugacaguaaacuaguaacuggg

SEQ ID NO: 520527 - RNA, 25 nt, Human
cgagggggacagcaaucuauggucc

SEQ ID NO: 520528 - RNA, 23 nt, Human
cggcaaacuacagaauuugugca

SEQ ID NO: 520529 - RNA, 23 nt, Human
cggcuccggcuccggcuccaacc

SEQ ID NO: 520530 - RNA, 21 nt, Human
cugcacuguuucucggcugug

SEQ ID NO: 520531 - RNA, 19 nt, Human
cuuccuguagcuacucccc

SEQ ID NO: 520532 - RNA, 23 nt, Human
gaaaaacccaauguaaauaaagg

SEQ ID NO: 520533 - RNA, 27 nt, Human
gaaaacaaugaagaaucuccgguaccc

SEQ ID NO: 520534 - RNA, 18 nt, Human
gacgcugccuggggagac

SEQ ID NO: 520535 - RNA, 24 nt, Human
gcaaauaacaaagaauacaugaug

SEQ ID NO: 520536 - RNA, 22 nt, Human
gccacaccggcgacuaccagcg

SEQ ID NO: 520537 - RNA, 24 nt, Human
gccgguaccgguagguuccucacg

SEQ ID NO: 520538 - RNA, 18 nt, Human
ggagagggcgguguaggu

SEQ ID NO: 520539 - RNA, 25 nt, Human
ggcggugggguggagagggcggugu

SEQ ID NO: 520540 - RNA, 18 nt, Human
ggcguggaggacgcugcc

SEQ ID NO: 520541 - RNA, 20 nt, Human
gggcggggccuggcgcggag

SEQ ID NO: 520542 - RNA, 18 nt, Human
gugcuguagauaauucug

SEQ ID NO: 520543 - RNA, 22 nt, Human
gugggaaaauuucuaugaaagc

SEQ ID NO: 520544 - RNA, 24 nt, Human
uaaaacgaaauauaaauauauggu

SEQ ID NO: 520545 - RNA, 19 nt, Human
uaaaagcaaauaacaaaga

SEQ ID NO: 520546 - RNA, 19 nt, Human
uaaaagcauuuuuucaacc

SEQ ID NO: 520547 - RNA, 20 nt, Human
uaaaagcauuuuuucaaccu

SEQ ID NO: 520548 - RNA, 21 nt, Human
uaaaagcauuuuuucaaccuu

SEQ ID NO: 520549 - RNA, 21 nt, Human
uaaacaacacagaaacuagaa

SEQ ID NO: 520550 - RNA, 23 nt, Human
uaaacaacuacauguuacugaca

SEQ ID NO: 520551 - RNA, 24 nt, Human
uaaauaaaggauacaggucaaaac

SEQ ID NO: 520552 - RNA, 19 nt, Human
uaacaaagaauacaugaug

SEQ ID NO: 520553 - RNA, 24 nt, Human
uaacuucaguuauuaugucaauau

SEQ ID NO: 520554 - RNA, 19 nt, Human
uaagcuacaguaaaacaaa

SEQ ID NO: 520555 - RNA, 21 nt, Human
uaauacagcauaacaggguuu

SEQ ID NO: 520556 - RNA, 28 nt, Human
uaauugcuauaauuuuuuucccucaggu

SEQ ID NO: 520557 - RNA, 23 nt, Human
uacagaauuugugcacuuacugu

SEQ ID NO: 520558 - RNA, 21 nt, Human
uacugugugcacauauacugc

SEQ ID NO: 520559 - RNA, 26 nt, Human
uacuuacugugugcacauauacugcu

SEQ ID NO: 520560 - RNA, 23 nt, Human
uacuuccuuuucauuccacaaaa

SEQ ID NO: 520561 - RNA, 18 nt, Human
uagcacagcagacucaug

SEQ ID NO: 520562 - RNA, 23 nt, Human
uagcuacucccccauccucaaac

SEQ ID NO: 520563 - RNA, 21 nt, Human
uaggagaacaagugaccaaaa

SEQ ID NO: 520564 - RNA, 22 nt, Human
uaggagaacaagugaccaaaaa

SEQ ID NO: 520565 - RNA, 19 nt, Human
uaguaacuggaauaacuac

SEQ ID NO: 520566 - RNA, 23 nt, Human
ucaaaacaaaguucagaaggcaa

SEQ ID NO: 520567 - RNA, 23 nt, Human
ucagcucauuucuaauacuuccu

SEQ ID NO: 520568 - RNA, 23 nt, Human
uccuagauuuauauacuugauuu

SEQ ID NO: 520569 - RNA, 19 nt, Human
ucuaaauacuugauaacau

SEQ ID NO: 520570 - RNA, 21 nt, Human
ucuccgacggcccagccgcgg

SEQ ID NO: 520571 - RNA, 24 nt, Human
ucuucagcucauuucuaauacuuc

SEQ ID NO: 520572 - RNA, 19 nt, Human
ugaaaaaccaaaacuacga

SEQ ID NO: 520573 - RNA, 22 nt, Human
ugaaagcaauuucagaaaauac

SEQ ID NO: 520574 - RNA, 24 nt, Human
ugacaguaaacuaguaacuggaau

SEQ ID NO: 520575 - RNA, 25 nt, Human
ugagucuaaacaacacagaaacuag

SEQ ID NO: 520576 - RNA, 21 nt, Human
ugauacggcaaacuacagaau

SEQ ID NO: 520577 - RNA, 19 nt, Human
ugcacauauacugcugcac

SEQ ID NO: 520578 - RNA, 20 nt, Human
ugccuggggagacccgcugc

SEQ ID NO: 520579 - RNA, 20 nt, Human
ugccuggggagacccgcugc

SEQ ID NO: 520580 - RNA, 23 nt, Human
ugccuggggagacccgcugcggg

SEQ ID NO: 520581 - RNA, 23 nt, Human
uggacaggagugaaaaaccaaaa

SEQ ID NO: 520582 - RNA, 22 nt, Human
uggacuuuauacaacuuagaca

SEQ ID NO: 520583 - RNA, 21 nt, Human
ugggaaaauuucuaugaaagc

SEQ ID NO: 520584 - RNA, 21 nt, Human
uguguacuuacugugugcaca

SEQ ID NO: 520585 - RNA, 24 nt, Human
uuaaaagcaaauaacaaagaauac

SEQ ID NO: 520586 - RNA, 20 nt, Human
uucaaccuuugagaaggaaa

SEQ ID NO: 520587 - RNA, 23 nt, Human
uucacugcugguuccaguugaug

SEQ ID NO: 520588 - RNA, 19 nt, Human
uugaccucuuuugacugau

SEQ ID NO: 520589 - RNA, 24 nt, Human
uuuaggagaacaagugaccaaaaa

SEQ ID NO: 520590 - RNA, 24 nt, Human
uuuucaggucagccaaaaaacgug

SEQ ID NO: 520591 - RNA, 23 nt, Human
uuuucauuccacaaaaauauuau

SEQ ID NO: 520592 - RNA, 22 nt, Human
aacacaauacaguggagauaag

SEQ ID NO: 520593 - RNA, 23 nt, Human
aacauuuucuuuucugguuuugg

SEQ ID NO: 520594 - RNA, 20 nt, Human
aacccaaagaucccaagcaa

SEQ ID NO: 520595 - RNA, 21 nt, Human
aacuacgugacccugcucccu

SEQ ID NO: 520596 - RNA, 25 nt, Human
aacuacgugacccugcucccuacca

SEQ ID NO: 520597 - RNA, 20 nt, Human
acacuaagggcaagcagaac

SEQ ID NO: 520598 - RNA, 19 nt, Human
agauuuguggucacuuucu

SEQ ID NO: 520599 - RNA, 21 nt, Human
aggagagugguggagaagggg

SEQ ID NO: 520600 - RNA, 18 nt, Human
aggcaugagaaucaacuu

SEQ ID NO: 520601 - RNA, 21 nt, Human
agggcuggagcugccaggcuu

SEQ ID NO: 520602 - RNA, 21 nt, Human
agguacucugaccuccaacua

SEQ ID NO: 520603 - RNA, 21 nt, Human
agugguggggguggccugggg

SEQ ID NO: 520604 - RNA, 21 nt, Human
auggaaaugaaaauacugguc

SEQ ID NO: 520605 - RNA, 18 nt, Human
caaaagcaccuccucaag

SEQ ID NO: 520606 - RNA, 20 nt, Human
caaagaucccaagcaagcac

SEQ ID NO: 520607 - RNA, 18 nt, Human
caagagacuucugugugg

SEQ ID NO: 520608 - RNA, 18 nt, Human
caagcaagcacugaugua

SEQ ID NO: 520609 - RNA, 19 nt, Human
cacaauacaguggagauaa

SEQ ID NO: 520610 - RNA, 19 nt, Human
cacagguacucugaccucc

SEQ ID NO: 520611 - RNA, 26 nt, Human
cacccugucggcuucucugucuuacu

SEQ ID NO: 520612 - RNA, 22 nt, Human
cagaggugaacccaaagauccc

SEQ ID NO: 520613 - RNA, 20 nt, Human
cagcaggauuacagcaggcu

SEQ ID NO: 520614 - RNA, 19 nt, Human
cagcaggcuccaagaugga

SEQ ID NO: 520615 - RNA, 21 nt, Human
cagccucccucuuggacuuca

SEQ ID NO: 520616 - RNA, 18 nt, Human
caggaagagugucuggug

SEQ ID NO: 520617 - RNA, 20 nt, Human
cagggagaagucagaggaga

SEQ ID NO: 520618 - RNA, 19 nt, Human
cagugaucccucccaaagc

SEQ ID NO: 520619 - RNA, 19 nt, Human
caguggcagagaacaugga

SEQ ID NO: 520620 - RNA, 20 nt, Human
cagugguggggguggccugg

SEQ ID NO: 520621 - RNA, 25 nt, Human
cauggcaaggagagugguggagaag

SEQ ID NO: 520622 - RNA, 24 nt, Human
ccaccagcauauuuauggaaauga

SEQ ID NO: 520623 - RNA, 20 nt, Human
ccacucaaggacagugacga

SEQ ID NO: 520624 - RNA, 25 nt, Human
cccaccagcauauuuauggaaauga

SEQ ID NO: 520625 - RNA, 20 nt, Human
ccccuucuggauuaggggcu

SEQ ID NO: 520626 - RNA, 24 nt, Human
cccugggccugugggacaggcccu

SEQ ID NO: 520627 - RNA, 20 nt, Human
cccugguuggggggcacaag

SEQ ID NO: 520628 - RNA, 22 nt, Human
cccuucaucacacuaagggcaa

SEQ ID NO: 520629 - RNA, 24 nt, Human
cccuuugccuuuugucuugggguu

SEQ ID NO: 520630 - RNA, 23 nt, Human
ccucaaggagggaauacuguggc

SEQ ID NO: 520631 - RNA, 20 nt, Human
ccuccuggcucuaggcucau

SEQ ID NO: 520632 - RNA, 23 nt, Human
ccugcucccuaccaaucccuggg

SEQ ID NO: 520633 - RNA, 21 nt, Human
ccuggguacaagcugcuggca

SEQ ID NO: 520634 - RNA, 26 nt, Human
ccugugggacaggcccuucugucggg

SEQ ID NO: 520635 - RNA, 20 nt, Human
ccuucuggauuaggggcagg

SEQ ID NO: 520636 - RNA, 21 nt, Human
cuaggaccuuuuuucucaggu

SEQ ID NO: 520637 - RNA, 21 nt, Human
cucagugaucccucccaaagc

SEQ ID NO: 520638 - RNA, 20 nt, Human
cuccaacuacgugacccugc

SEQ ID NO: 520639 - RNA, 25 nt, Human
cuccaagauggauuuucuagaaaga

SEQ ID NO: 520640 - RNA, 19 nt, Human
cucccuaccaaucccuggg

SEQ ID NO: 520641 - RNA, 26 nt, Human
cucccucacaccuucccuuaacacaa

SEQ ID NO: 520642 - RNA, 20 nt, Human
cuccuggcucuaggcucauu

SEQ ID NO: 520643 - RNA, 21 nt, Human
cucucuucaccauuucuuagc

SEQ ID NO: 520644 - RNA, 20 nt, Human
cugcucccuaccaaucccug

SEQ ID NO: 520645 - RNA, 20 nt, Human
cuggaucugacaucugucuu

SEQ ID NO: 520646 - RNA, 21 nt, Human
cuggugggaugggcaguuccu

SEQ ID NO: 520647 - RNA, 19 nt, Human
cugucuuuucucuauucuc

SEQ ID NO: 520648 - RNA, 22 nt, Human
cuugccucucuucaccauuucu

SEQ ID NO: 520649 - RNA, 27 nt, Human
cuugggccuuggguuugccuccuggcu

SEQ ID NO: 520650 - RNA, 21 nt, Human
cuuugcaacauuuucuuuucu

SEQ ID NO: 520651 - RNA, 19 nt, Human
cuuuugguucugcugcacu

SEQ ID NO: 520652 - RNA, 22 nt, Human
cuuuugguucugcugcacugcc

SEQ ID NO: 520653 - RNA, 18 nt, Human
gacacuuuccaaaagccu

SEQ ID NO: 520654 - RNA, 23 nt, Human
gagaagggcuccaggcacaggug

SEQ ID NO: 520655 - RNA, 21 nt, Human
gcaagcagaacuaagcucagu

SEQ ID NO: 520656 - RNA, 20 nt, Human
gcacgaugagauugggccuu

SEQ ID NO: 520657 - RNA, 19 nt, Human
gcagcugaucucauuguua

SEQ ID NO: 520658 - RNA, 22 nt, Human
gcaguuccuggagcaaugucuc

SEQ ID NO: 520659 - RNA, 20 nt, Human
gcauuaaauuguagauuugu

SEQ ID NO: 520660 - RNA, 18 nt, Human
gccaccuucacaguggca

SEQ ID NO: 520661 - RNA, 21 nt, Human
gcccuuugccuuuugucuugg

SEQ ID NO: 520662 - RNA, 18 nt, Human
gcucuuugcaacauuuuc

SEQ ID NO: 520663 - RNA, 22 nt, Human
gcugcagcaguuggggagccua

SEQ ID NO: 520664 - RNA, 27 nt, Human
ggacagugguggggguggccugggguu

SEQ ID NO: 520665 - RNA, 21 nt, Human
ggcuggcaucaccagcccaug

SEQ ID NO: 520666 - RNA, 19 nt, Human
gggaauuccccauuguauc

SEQ ID NO: 520667 - RNA, 22 nt, Human
gggguggccugggguugaggca

SEQ ID NO: 520668 - RNA, 22 nt, Human
gggugggugcccugguuggggg

SEQ ID NO: 520669 - RNA, 23 nt, Human
ggguugaggcagagccagguugu

SEQ ID NO: 520670 - RNA, 21 nt, Human
ggugggaugggcaguuccugg

SEQ ID NO: 520671 - RNA, 22 nt, Human
guauuccuagcaucuaccccca

SEQ ID NO: 520672 - RNA, 25 nt, Human
gucuuacuucuccccacagggcucu

SEQ ID NO: 520673 - RNA, 24 nt, Human
uaaacagggagaagucagaggaga

SEQ ID NO: 520674 - RNA, 22 nt, Human
uacaguggagauaaggagcaga

SEQ ID NO: 520675 - RNA, 23 nt, Human
uaccugagugugccagaggugaa

SEQ ID NO: 520676 - RNA, 24 nt, Human
uaggaccuuuuuucucagguggaa

SEQ ID NO: 520677 - RNA, 18 nt, Human
uaggagcuagggugggug

SEQ ID NO: 520678 - RNA, 18 nt, Human
uauacccuucaugugacu

SEQ ID NO: 520679 - RNA, 21 nt, Human
uauagaaacaguaggccuggg

SEQ ID NO: 520680 - RNA, 23 nt, Human
uaucugaacugaggguuaggagc

SEQ ID NO: 520681 - RNA, 19 nt, Human
uaugagcagcugaucucau

SEQ ID NO: 520682 - RNA, 22 nt, Human
ucaaggacagugacgaggacag

SEQ ID NO: 520683 - RNA, 23 nt, Human
ucaucacacuaagggcaagcaga

SEQ ID NO: 520684 - RNA, 19 nt, Human
uccaaaagccuugucuucu

SEQ ID NO: 520685 - RNA, 18 nt, Human
ucccaguauaaacaggga

SEQ ID NO: 520686 - RNA, 19 nt, Human
ucccaguauaaacagggag

SEQ ID NO: 520687 - RNA, 19 nt, Human
ucccuggacuuccuugccc

SEQ ID NO: 520688 - RNA, 19 nt, Human
uccucuggagggcugcagc

SEQ ID NO: 520689 - RNA, 19 nt, Human
uccuugagcagaccaaugu

SEQ ID NO: 520690 - RNA, 20 nt, Human
ucuaaaaugaaccaucugaa

SEQ ID NO: 520691 - RNA, 21 nt, Human
ucucagguggaaguuuaguuu

SEQ ID NO: 520692 - RNA, 22 nt, Human
ucuguggugccguccuuggcag

SEQ ID NO: 520693 - RNA, 19 nt, Human
ugaaacauauagagugcau

SEQ ID NO: 520694 - RNA, 20 nt, Human
ugaagauaaauuuaaggagu

SEQ ID NO: 520695 - RNA, 24 nt, Human
ugaagcuagacucuguaaggcugg

SEQ ID NO: 520696 - RNA, 18 nt, Human
ugacagccaaggugauug

SEQ ID NO: 520697 - RNA, 23 nt, Human
ugaccuccaacuacgugacccuu

SEQ ID NO: 520698 - RNA, 18 nt, Human
ugagaggcaguggaggca

SEQ ID NO: 520699 - RNA, 20 nt, Human
ugaggaaaaggcaccaggua

SEQ ID NO: 520700 - RNA, 21 nt, Human
ugaggaaaaggcaccagguag

SEQ ID NO: 520701 - RNA, 19 nt, Human
ugaggcagagccagguugu

SEQ ID NO: 520702 - RNA, 22 nt, Human
ugaggcagagccagguugucug

SEQ ID NO: 520703 - RNA, 25 nt, Human
ugcccuucaucacacuaagggcaag

SEQ ID NO: 520704 - RNA, 21 nt, Human
uggcaaggagagugguggaga

SEQ ID NO: 520705 - RNA, 19 nt, Human
uggccaccuucacaguggc

SEQ ID NO: 520706 - RNA, 20 nt, Human
uggcucuguguguucuccuu

SEQ ID NO: 520707 - RNA, 21 nt, Human
ugggacaggcccuucuccauu

SEQ ID NO: 520708 - RNA, 19 nt, Human
ugggaggggauucagcuga

SEQ ID NO: 520709 - RNA, 19 nt, Human
ugggcagaacccuggggua

SEQ ID NO: 520710 - RNA, 22 nt, Human
uggggggcacaagccacucaag

SEQ ID NO: 520711 - RNA, 20 nt, Human
uggggguggccugggguuga

SEQ ID NO: 520712 - RNA, 18 nt, Human
ugggguacugcuuuggaa

SEQ ID NO: 520713 - RNA, 21 nt, Human
ugguauagaaacaguaggccu

SEQ ID NO: 520714 - RNA, 18 nt, Human
uggugccguccuuggcag

SEQ ID NO: 520715 - RNA, 22 nt, Human
uggugggaugggcaguuccugg

SEQ ID NO: 520716 - RNA, 18 nt, Human
ugguggggguggccuggg

SEQ ID NO: 520717 - RNA, 21 nt, Human
ugguggggguggccugggguu

SEQ ID NO: 520718 - RNA, 20 nt, Human
uguaaggcugggcuucuuuu

SEQ ID NO: 520719 - RNA, 20 nt, Human
uguccuggucaggcaugaga

SEQ ID NO: 520720 - RNA, 21 nt, Human
ugucuggaguguaaccgaagc

SEQ ID NO: 520721 - RNA, 24 nt, Human
ugucuggugggaugggcaguuccu

SEQ ID NO: 520722 - RNA, 19 nt, Human
ugugggacaggcccuucuc

SEQ ID NO: 520723 - RNA, 19 nt, Human
uguggugccguccuuggca

SEQ ID NO: 520724 - RNA, 24 nt, Human
uuagccucccucacaccuucccuu

SEQ ID NO: 520725 - RNA, 18 nt, Human
uuuguggucacuuucugu

SEQ ID NO: 520726 - RNA, 24 nt, Human
uuugugguucuuucccagaaacuu

SEQ ID NO: 520727 - RNA, 20 nt, Human
aaaaaagcauuuucuagcac

SEQ ID NO: 520728 - RNA, 19 nt, Human
aaaaaggaacaagucucau

SEQ ID NO: 520729 - RNA, 20 nt, Human
aaaagcauuuucuagcacuu

SEQ ID NO: 520730 - RNA, 22 nt, Human
aaacagacugauucacugagac

SEQ ID NO: 520731 - RNA, 20 nt, Human
aacacaguaauaaccuuauc

SEQ ID NO: 520732 - RNA, 23 nt, Human
aacccucaagacugccuuuaacc

SEQ ID NO: 520733 - RNA, 21 nt, Human
aauuagcugcccaacuccuuc

SEQ ID NO: 520734 - RNA, 19 nt, Human
aauuccguucucuugguga

SEQ ID NO: 520735 - RNA, 23 nt, Human
acaagcuaggucuggaacccgaa

SEQ ID NO: 520736 - RNA, 24 nt, Human
acccagucccacccauucaaaacc

SEQ ID NO: 520737 - RNA, 19 nt, Human
acccucaagacugccuuua

SEQ ID NO: 520738 - RNA, 18 nt, Human
agaauccucacauugcuc

SEQ ID NO: 520739 - RNA, 25 nt, Human
agauacaucuugcuuaaacaacaca

SEQ ID NO: 520740 - RNA, 18 nt, Human
agcuggaccacuggcaca

SEQ ID NO: 520741 - RNA, 23 nt, Human
aguuccaguaaguuuuaucaaac

SEQ ID NO: 520742 - RNA, 21 nt, Human
auauaaccacaaacauuaccu

SEQ ID NO: 520743 - RNA, 21 nt, Human
augaacuuauacuauaccaaa

SEQ ID NO: 520744 - RNA, 23 nt, Human
augccaauggcagcaaacaacag

SEQ ID NO: 520745 - RNA, 22 nt, Human
caaaaccugcuacaaaugcugg

SEQ ID NO: 520746 - RNA, 23 nt, Human
caaaaccugcuacaaaugcuggu

SEQ ID NO: 520747 - RNA, 19 nt, Human
caaagcagguguaggagug

SEQ ID NO: 520748 - RNA, 21 nt, Human
cacaagcuaggucuggaaccc

SEQ ID NO: 520749 - RNA, 20 nt, Human
cacauugcucacagccucca

SEQ ID NO: 520750 - RNA, 21 nt, Human
cagcaaauacuuuugcuaaua

SEQ ID NO: 520751 - RNA, 20 nt, Human
cagcauauucaccaaacguu

SEQ ID NO: 520752 - RNA, 22 nt, Human
cccaacuccuucaaauuggaaa

SEQ ID NO: 520753 - RNA, 23 nt, Human
cccucaagacugccuuuaaccaa

SEQ ID NO: 520754 - RNA, 19 nt, Human
cucucugaacugaggaaac

SEQ ID NO: 520755 - RNA, 22 nt, Human
cuuagggagaaaaaaaggaaca

SEQ ID NO: 520756 - RNA, 18 nt, Human
gaacccgaaaaggaagua

SEQ ID NO: 520757 - RNA, 18 nt, Human
gagaaaaaaaggaacaag

SEQ ID NO: 520758 - RNA, 21 nt, Human
gcaaaacacaguaauaaccuu

SEQ ID NO: 520759 - RNA, 20 nt, Human
gccagggaacccagcuguau

SEQ ID NO: 520760 - RNA, 22 nt, Human
gcuaggucuggaacccgaaaag

SEQ ID NO: 520761 - RNA, 20 nt, Human
gcucacagccuccauuccau

SEQ ID NO: 520762 - RNA, 21 nt, Human
ggagugggacugccaucuacc

SEQ ID NO: 520763 - RNA, 23 nt, Human
guugugcuccagcuggaccacug

SEQ ID NO: 520764 - RNA, 18 nt, Human
uaaauagaauccucacau

SEQ ID NO: 520765 - RNA, 24 nt, Human
uaacaacacaaaaaucacauuuca

SEQ ID NO: 520766 - RNA, 26 nt, Human
uaauuccagcaaauacuuuugcuaau

SEQ ID NO: 520767 - RNA, 20 nt, Human
uaccaggagagcuugguaac

SEQ ID NO: 520768 - RNA, 19 nt, Human
uagaacucugaauucuggg

SEQ ID NO: 520769 - RNA, 20 nt, Human
uagcugcccaacuccuucaa

SEQ ID NO: 520770 - RNA, 20 nt, Human
uagucuuuuccacacugagu

SEQ ID NO: 520771 - RNA, 24 nt, Human
ucacugguuuacaaguuauaauug

SEQ ID NO: 520772 - RNA, 19 nt, Human
ucaguacagauacaucuuc

SEQ ID NO: 520773 - RNA, 23 nt, Human
uccagcaaauacuuuugcuaaua

SEQ ID NO: 520774 - RNA, 25 nt, Human
ucuaacccucaagacugccuuuaac

SEQ ID NO: 520775 - RNA, 21 nt, Human
ucuaccaggcccaagccacau

SEQ ID NO: 520776 - RNA, 20 nt, Human
ucucauaaaaccaaauaagc

SEQ ID NO: 520777 - RNA, 18 nt, Human
ucugaacugaggaaacag

SEQ ID NO: 520778 - RNA, 20 nt, Human
ucugaacugaggaaacagca

SEQ ID NO: 520779 - RNA, 20 nt, Human
ucuggaacccgaaaaggaag

SEQ ID NO: 520780 - RNA, 23 nt, Human
ucuggggcaaacucugcagaagu

SEQ ID NO: 520781 - RNA, 25 nt, Human
ugaaaagaguguguaaucuguaguc

SEQ ID NO: 520782 - RNA, 18 nt, Human
ugaaagaauuccauggcg

SEQ ID NO: 520783 - RNA, 24 nt, Human
ugaaugaaagaacuguaacagccc

SEQ ID NO: 520784 - RNA, 19 nt, Human
ugacaaagcagguguagga

SEQ ID NO: 520785 - RNA, 23 nt, Human
ugaggaaacagcauauucaccaa

SEQ ID NO: 520786 - RNA, 23 nt, Human
ugaggaaacagcauauucacccc

SEQ ID NO: 520787 - RNA, 24 nt, Human
ugcuaauauacuuugugcaaaaca

SEQ ID NO: 520788 - RNA, 24 nt, Human
uggaauggaugauaaugaaagaga

SEQ ID NO: 520789 - RNA, 24 nt, Human
uggauugaguucauaucaaauaau

SEQ ID NO: 520790 - RNA, 22 nt, Human
uguaaauccagguauuugcuuu

SEQ ID NO: 520791 - RNA, 23 nt, Human
uguagucuuuuccacacugagua

SEQ ID NO: 520792 - RNA, 18 nt, Human
ugugaacaacuacuuuca

SEQ ID NO: 520793 - RNA, 20 nt, Human
uuagugaaaaguuuugcugg

SEQ ID NO: 520794 - RNA, 20 nt, Human
aaagauccguggguaugugg

SEQ ID NO: 520795 - RNA, 22 nt, Human
accccuuccaacuucaaggcua

SEQ ID NO: 520796 - RNA, 19 nt, Human
accucuuuccuccagucca

SEQ ID NO: 520797 - RNA, 20 nt, Human
accuggcacuuuaccuccuc

SEQ ID NO: 520798 - RNA, 21 nt, Human
agacaggaggggguggcagag

SEQ ID NO: 520799 - RNA, 23 nt, Human
agccaccuuccugccccagccuc

SEQ ID NO: 520800 - RNA, 18 nt, Human
aggacagagggcaggccu

SEQ ID NO: 520801 - RNA, 19 nt, Human
aggccaggagagucccacg

SEQ ID NO: 520802 - RNA, 22 nt, Human
aggggagauggcagggccugag

SEQ ID NO: 520803 - RNA, 18 nt, Human
aggggguggcagagaaga

SEQ ID NO: 520804 - RNA, 20 nt, Human
auggaguuggcagauggcag

SEQ ID NO: 520805 - RNA, 23 nt, Human
auuucagccaccucuuuccucca

SEQ ID NO: 520806 - RNA, 20 nt, Human
caauguguagcucaacggau

SEQ ID NO: 520807 - RNA, 19 nt, Human
caccccuuccaacuucaag

SEQ ID NO: 520808 - RNA, 18 nt, Human
cacuguucccuggaugga

SEQ ID NO: 520809 - RNA, 18 nt, Human
cagagaugaaaaucccug

SEQ ID NO: 520810 - RNA, 18 nt, Human
cagcagagcaggggguug

SEQ ID NO: 520811 - RNA, 24 nt, Human
cagcaucccucuccccagugcugc

SEQ ID NO: 520812 - RNA, 18 nt, Human
cagcccuugcugaccagg

SEQ ID NO: 520813 - RNA, 22 nt, Human
cagccucugccccagcgcugcu

SEQ ID NO: 520814 - RNA, 21 nt, Human
caggaggcuccauuccacccc

SEQ ID NO: 520815 - RNA, 23 nt, Human
caguggggcccgccccaccuccc

SEQ ID NO: 520816 - RNA, 21 nt, Human
ccagagaugaaaaucccuggg

SEQ ID NO: 520817 - RNA, 22 nt, Human
cccacgguggggaggacagggc

SEQ ID NO: 520818 - RNA, 19 nt, Human
ccccagccucugccccagc

SEQ ID NO: 520819 - RNA, 22 nt, Human
ccccagccucugccccagcgcu

SEQ ID NO: 520820 - RNA, 24 nt, Human
ccccugggcuacuuucaccggccc

SEQ ID NO: 520821 - RNA, 25 nt, Human
cccuagagauugaauaaucuauacu

SEQ ID NO: 520822 - RNA, 19 nt, Human
cccuggggacaguugcucc

SEQ ID NO: 520823 - RNA, 23 nt, Human
ccuccacuguaaggcagggauug

SEQ ID NO: 520824 - RNA, 18 nt, Human
ccuccuggcccugcuccc

SEQ ID NO: 520825 - RNA, 23 nt, Human
ccugccccagccucugccccagc

SEQ ID NO: 520826 - RNA, 21 nt, Human
ccugggcuggccucuacgccc

SEQ ID NO: 520827 - RNA, 21 nt, Human
ccuuccugccccagccucugc

SEQ ID NO: 520828 - RNA, 18 nt, Human
cgcccauuacccauuaac

SEQ ID NO: 520829 - RNA, 19 nt, Human
cgcccauuacccauuaacc

SEQ ID NO: 520830 - RNA, 21 nt, Human
cgguggggaggacagggcugu

SEQ ID NO: 520831 - RNA, 20 nt, Human
cuccuggcccugcucccacu

SEQ ID NO: 520832 - RNA, 19 nt, Human
cuggcugccucgaaugucu

SEQ ID NO: 520833 - RNA, 18 nt, Human
cuugcggaguccugcccc

SEQ ID NO: 520834 - RNA, 21 nt, Human
cuuugagcccuccucuuccuc

SEQ ID NO: 520835 - RNA, 20 nt, Human
gaacuggagagggcaccauu

SEQ ID NO: 520836 - RNA, 19 nt, Human
gacaggaggggguggcaga

SEQ ID NO: 520837 - RNA, 20 nt, Human
gagaacuuagaugaugguca

SEQ ID NO: 520838 - RNA, 18 nt, Human
gagaagccaggggcacag

SEQ ID NO: 520839 - RNA, 19 nt, Human
gagagucccacggugggga

SEQ ID NO: 520840 - RNA, 18 nt, Human
gagauggcagggccugag

SEQ ID NO: 520841 - RNA, 19 nt, Human
gagggcaccauuuacugau

SEQ ID NO: 520842 - RNA, 24 nt, Human
gcagagaagaaccucagcucugaa

SEQ ID NO: 520843 - RNA, 20 nt, Human
gccuuggggacuagguggag

SEQ ID NO: 520844 - RNA, 24 nt, Human
gcguggccugguccuggucccugg

SEQ ID NO: 520845 - RNA, 20 nt, Human
gcuccauuccaccccuucca

SEQ ID NO: 520846 - RNA, 20 nt, Human
gcucuggcccagcguggccu

SEQ ID NO: 520847 - RNA, 21 nt, Human
gcuggcugccucgaaugucuu

SEQ ID NO: 520848 - RNA, 23 nt, Human
ggaggccaggagagucccacggu

SEQ ID NO: 520849 - RNA, 19 nt, Human
ggccugguccuggucccug

SEQ ID NO: 520850 - RNA, 21 nt, Human
gggacagugaugggugcugag

SEQ ID NO: 520851 - RNA, 23 nt, Human
gggccgggggccgggggggccuc

SEQ ID NO: 520852 - RNA, 20 nt, Human
gggggggccucugccacugu

SEQ ID NO: 520853 - RNA, 21 nt, Human
ggguggaggaggggcagggug

SEQ ID NO: 520854 - RNA, 18 nt, Human
gguggaggaggggcaggg

SEQ ID NO: 520855 - RNA, 24 nt, Human
guguaacaggggagauggcagggc

SEQ ID NO: 520856 - RNA, 20 nt, Human
uacgcccauuacccauuaac

SEQ ID NO: 520857 - RNA, 18 nt, Human
uauauuguauagagcugu

SEQ ID NO: 520858 - RNA, 22 nt, Human
ucaccggcccagccaccuuccu

SEQ ID NO: 520859 - RNA, 18 nt, Human
ucccuggggacaguugcu

SEQ ID NO: 520860 - RNA, 20 nt, Human
uccgcaggcaggccugaccc

SEQ ID NO: 520861 - RNA, 21 nt, Human
uccgcaggcaggccugacccc

SEQ ID NO: 520862 - RNA, 23 nt, Human
uccuccaguccagagaugaaaau

SEQ ID NO: 520863 - RNA, 19 nt, Human
uccuuguaugcaagucccc

SEQ ID NO: 520864 - RNA, 18 nt, Human
ucuccugggcuggccucu

SEQ ID NO: 520865 - RNA, 18 nt, Human
ugaccaggacagggacaa

SEQ ID NO: 520866 - RNA, 22 nt, Human
ugaccccggguggaggaggggc

SEQ ID NO: 520867 - RNA, 23 nt, Human
ugagcccuccucuuccucugcga

SEQ ID NO: 520868 - RNA, 20 nt, Human
ugaggacagagggcaggccu

SEQ ID NO: 520869 - RNA, 23 nt, Human
ugaggccucugaggacagagggc

SEQ ID NO: 520870 - RNA, 22 nt, Human
ugaugggccccccuagguccuu

SEQ ID NO: 520871 - RNA, 23 nt, Human
ugcaagacaggaggggguggcag

SEQ ID NO: 520872 - RNA, 22 nt, Human
ugccagcaucccucuccccagu

SEQ ID NO: 520873 - RNA, 20 nt, Human
ugccccagccucugccccag

SEQ ID NO: 520874 - RNA, 21 nt, Human
ugccccagccucugccccagc

SEQ ID NO: 520875 - RNA, 21 nt, Human
ugcugagagcugauuggaacu

SEQ ID NO: 520876 - RNA, 22 nt, Human
ugcuguguggguccacaggagg

SEQ ID NO: 520877 - RNA, 20 nt, Human
uggaacuggagagggcacca

SEQ ID NO: 520878 - RNA, 23 nt, Human
uggcagccucaacucuuggcuga

SEQ ID NO: 520879 - RNA, 20 nt, Human
uggcagggccugagcucccu

SEQ ID NO: 520880 - RNA, 18 nt, Human
uggcauggggccgggggc

SEQ ID NO: 520881 - RNA, 18 nt, Human
uggcauggggccgggggc

SEQ ID NO: 520882 - RNA, 24 nt, Human
uggcauggggccgggggccggggg

SEQ ID NO: 520883 - RNA, 21 nt, Human
uggccucuacgcccauuaccc

SEQ ID NO: 520884 - RNA, 22 nt, Human
uggccugguccuggucccuggc

SEQ ID NO: 520885 - RNA, 22 nt, Human
uggcugccucgaaugucuuugc

SEQ ID NO: 520886 - RNA, 27 nt, Human
uggggacaguugcuccuuucccccugg

SEQ ID NO: 520887 - RNA, 18 nt, Human
uggggcccgccccaccuc

SEQ ID NO: 520888 - RNA, 24 nt, Human
uggugagaacuuagaugaugguca

SEQ ID NO: 520889 - RNA, 24 nt, Human
uguaggcgggugucuacuuugucc

SEQ ID NO: 520890 - RNA, 21 nt, Human
uuccaccccuuccaacuucaa

SEQ ID NO: 520891 - RNA, 19 nt, Human
uucccuucuaccuccagcc

SEQ ID NO: 520892 - RNA, 18 nt, Human
uugaguugcagggaggga

SEQ ID NO: 520893 - RNA, 22 nt, Human
uugcagcagagcaggggguugg

SEQ ID NO: 520894 - RNA, 18 nt, Human
uuggaacuggagagggca

SEQ ID NO: 520895 - RNA, 19 nt, Human
uuggagacaccuguccagc

SEQ ID NO: 520896 - RNA, 21 nt, Human
aaaaccuccuccacuacuugg

SEQ ID NO: 520897 - RNA, 18 nt, Human
aaaagacccuguacuccu

SEQ ID NO: 520898 - RNA, 21 nt, Human
aaagcagcacgaauacucuuc

SEQ ID NO: 520899 - RNA, 21 nt, Human
aaagucaaacuacugauuuaa

SEQ ID NO: 520900 - RNA, 24 nt, Human
aaccacagcagaugaaucagaacc

SEQ ID NO: 520901 - RNA, 21 nt, Human
acaagaaaggcuaaacuagga

SEQ ID NO: 520902 - RNA, 18 nt, Human
agacaagaaaggcuaaac

SEQ ID NO: 520903 - RNA, 21 nt, Human
agaugaaucagaaccgcacaa

SEQ ID NO: 520904 - RNA, 24 nt, Human
agcagaugaaucagaaccgcacaa

SEQ ID NO: 520905 - RNA, 21 nt, Human
auucugguuuugacacaaauu

SEQ ID NO: 520906 - RNA, 24 nt, Human
caagaaaggcuaaacuagagcucu

SEQ ID NO: 520907 - RNA, 22 nt, Human
caagaguaaauuuaaaaacuug

SEQ ID NO: 520908 - RNA, 19 nt, Human
cacuacuuggaccaccacu

SEQ ID NO: 520909 - RNA, 18 nt, Human
cagcacaucugugagaca

SEQ ID NO: 520910 - RNA, 20 nt, Human
ccuccuccacuacuuggacc

SEQ ID NO: 520911 - RNA, 26 nt, Human
gaaccgcacaaacacugguuaaagag

SEQ ID NO: 520912 - RNA, 19 nt, Human
gcucugcuucuucuaaucc

SEQ ID NO: 520913 - RNA, 21 nt, Human
ggauacagcacaucugugaga

SEQ ID NO: 520914 - RNA, 18 nt, Human
uaagaguuuugaaaaaga

SEQ ID NO: 520915 - RNA, 22 nt, Human
uacagcacaucugugagacaag

SEQ ID NO: 520916 - RNA, 18 nt, Human
uacccuggcaaaagucaa

SEQ ID NO: 520917 - RNA, 24 nt, Human
uaguaugccugggauacagcacau

SEQ ID NO: 520918 - RNA, 23 nt, Human
uccacuacuuggaccaccacuug

SEQ ID NO: 520919 - RNA, 20 nt, Human
ucuacaaaaccuccuccacu

SEQ ID NO: 520920 - RNA, 18 nt, Human
ugaaaaagagccauaagu

SEQ ID NO: 520921 - RNA, 23 nt, Human
ugggauacagcacaucugugaga

SEQ ID NO: 520922 - RNA, 24 nt, Human
ugguaaaucacuggaaccauacuc

SEQ ID NO: 520923 - RNA, 20 nt, Human
ugguuuuaaaauuauucacu

SEQ ID NO: 520924 - RNA, 22 nt, Human
uuaucgguaauagaucuuccuu

SEQ ID NO: 520925 - RNA, 20 nt, Human
uugucguguauuuucuuccu

SEQ ID NO: 520926 - RNA, 21 nt, Human
uuuaagaguuuugaaaaagag

SEQ ID NO: 520927 - RNA, 21 nt, Human
uuuuuugugccugucuucuug

SEQ ID NO: 520928 - RNA, 18 nt, Human
agacucaaaauacacuaa

SEQ ID NO: 520929 - RNA, 20 nt, Human
agacucaaaauacacuaaua

SEQ ID NO: 520930 - RNA, 20 nt, Human
agccagcauggcucggcggg

SEQ ID NO: 520931 - RNA, 24 nt, Human
caucauuaacccgguuuuccagga

SEQ ID NO: 520932 - RNA, 21 nt, Human
cauggcucggcggguguacca

SEQ ID NO: 520933 - RNA, 20 nt, Human
ccucaaagucuggagaggag

SEQ ID NO: 520934 - RNA, 24 nt, Human
ccugcaaugcaugcuggugucaug

SEQ ID NO: 520935 - RNA, 18 nt, Human
uacagacucaaaauacac

SEQ ID NO: 520936 - RNA, 24 nt, Human
uauuuuuacagacucaaaauacac

SEQ ID NO: 520937 - RNA, 20 nt, Human
uccugcaaugcaugcuggug

SEQ ID NO: 520938 - RNA, 19 nt, Human
ugcaucaucaccagcucug

SEQ ID NO: 520939 - RNA, 21 nt, Human
uggcagccagcauggcucggc

SEQ ID NO: 520940 - RNA, 23 nt, Human
uucauugcaucauuaacccgguu

SEQ ID NO: 520941 - RNA, 19 nt, Human
uuccaggaagcgccaagug

SEQ ID NO: 520942 - RNA, 18 nt, Human
aaccagagcugcugaacc

SEQ ID NO: 520943 - RNA, 22 nt, Human
aagcucucucagccagcaauuu

SEQ ID NO: 520944 - RNA, 21 nt, Human
aaguacagaugcaggaugcag

SEQ ID NO: 520945 - RNA, 21 nt, Human
accuccccguccucuccgcug

SEQ ID NO: 520946 - RNA, 28 nt, Human
aggaaagagguaccuuuuaugaaaagga

SEQ ID NO: 520947 - RNA, 18 nt, Human
aggacccggaaagaccaa

SEQ ID NO: 520948 - RNA, 19 nt, Human
aggcaccgaggacucaaac

SEQ ID NO: 520949 - RNA, 19 nt, Human
aggcagggaggguuaacua

SEQ ID NO: 520950 - RNA, 24 nt, Human
agguaccuuuuaugaaaaggacuu

SEQ ID NO: 520951 - RNA, 22 nt, Human
aguccuuuuuguuaagaaaagg

SEQ ID NO: 520952 - RNA, 18 nt, Human
auccaucuuuccuuccaa

SEQ ID NO: 520953 - RNA, 19 nt, Human
auggcucugggcugugccc

SEQ ID NO: 520954 - RNA, 20 nt, Human
auuguuugguagaaaaacag

SEQ ID NO: 520955 - RNA, 23 nt, Human
cacugggcuucuucaaugggcuc

SEQ ID NO: 520956 - RNA, 24 nt, Human
cacuucucuccuagcagccagagg

SEQ ID NO: 520957 - RNA, 26 nt, Human
cccuugaaucugacauucaagucacc

SEQ ID NO: 520958 - RNA, 22 nt, Human
ccggaaagaccaagguguagcg

SEQ ID NO: 520959 - RNA, 20 nt, Human
ccuuugacgccgggcccuug

SEQ ID NO: 520960 - RNA, 20 nt, Human
cggaacauucagcacuucuc

SEQ ID NO: 520961 - RNA, 25 nt, Human
cgugcaaggacccggaaagaccaag

SEQ ID NO: 520962 - RNA, 28 nt, Human
cucaaauaacuuuccugagcaucuccac

SEQ ID NO: 520963 - RNA, 20 nt, Human
cuccacacggaacauucagc

SEQ ID NO: 520964 - RNA, 26 nt, Human
cuccggcucagcucugcaggaguugg

SEQ ID NO: 520965 - RNA, 18 nt, Human
cucugcaggaguuggagc

SEQ ID NO: 520966 - RNA, 23 nt, Human
cucuugguuuuauuguuugguag

SEQ ID NO: 520967 - RNA, 19 nt, Human
cugaauaaacaucucacga

SEQ ID NO: 520968 - RNA, 18 nt, Human
cuguucagcgugucccuu

SEQ ID NO: 520969 - RNA, 22 nt, Human
gacucaaaccaucucaccgucu

SEQ ID NO: 520970 - RNA, 22 nt, Human
gcucuuggaggaagaagcuuuu

SEQ ID NO: 520971 - RNA, 21 nt, Human
uaauagaaaccagagcugcug

SEQ ID NO: 520972 - RNA, 24 nt, Human
uagauuacaaaaagucaaaaccaa

SEQ ID NO: 520973 - RNA, 21 nt, Human
ucaaugggcucuuggaggaag

SEQ ID NO: 520974 - RNA, 19 nt, Human
uccacacggaacauucagc

SEQ ID NO: 520975 - RNA, 21 nt, Human
uccggcucagcucugcaggag

SEQ ID NO: 520976 - RNA, 20 nt, Human
uccuagauuacaaaaaguca

SEQ ID NO: 520977 - RNA, 18 nt, Human
uccugcuacccaggcacc

SEQ ID NO: 520978 - RNA, 26 nt, Human
ucuucaguccuuagaaaaguccuuuu

SEQ ID NO: 520979 - RNA, 19 nt, Human
ucuugguuuuauuguuugg

SEQ ID NO: 520980 - RNA, 25 nt, Human
ugaaaaggacuuccaagcucucuca

SEQ ID NO: 520981 - RNA, 19 nt, Human
uggcucugggcugugcccu

SEQ ID NO: 520982 - RNA, 19 nt, Human
uuccccaaguacagaugca

SEQ ID NO: 520983 - RNA, 23 nt, Human
uuuccuuugacgccgggcccuug

SEQ ID NO: 520984 - RNA, 18 nt, Human
uuuguuaagaaaaggcag

SEQ ID NO: 520985 - RNA, 25 nt, Human
acccaggggagucuggaccacaggg

SEQ ID NO: 520986 - RNA, 22 nt, Human
accuugccucaggacuuuauug

SEQ ID NO: 520987 - RNA, 18 nt, Human
agauggccaagaagggga

SEQ ID NO: 520988 - RNA, 22 nt, Human
augacaggacccuuggccaggu

SEQ ID NO: 520989 - RNA, 19 nt, Human
caacaaugcuggcagugac

SEQ ID NO: 520990 - RNA, 23 nt, Human
caggacccuuggccagguccagg

SEQ ID NO: 520991 - RNA, 21 nt, Human
caggauggagauggccaagaa

SEQ ID NO: 520992 - RNA, 19 nt, Human
ccacugggguaaguccugu

SEQ ID NO: 520993 - RNA, 20 nt, Human
ccauugucaugucagauccc

SEQ ID NO: 520994 - RNA, 23 nt, Human
cuuucaguccugacucacaggau

SEQ ID NO: 520995 - RNA, 20 nt, Human
gcagugaccugucugugccc

SEQ ID NO: 520996 - RNA, 24 nt, Human
gcuggcagugaccugucugugccc

SEQ ID NO: 520997 - RNA, 22 nt, Human
ggggagucuggaccacagggcc

SEQ ID NO: 520998 - RNA, 22 nt, Human
ggucagaccugcuuagcugcuu

SEQ ID NO: 520999 - RNA, 18 nt, Human
gugaccugucugugcccu

SEQ ID NO: 521000 - RNA, 22 nt, Human
uaaguugguuuuccaaaccuug

SEQ ID NO: 521001 - RNA, 18 nt, Human
ucccaacccaggggaguc

SEQ ID NO: 521002 - RNA, 24 nt, Human
ucccaacccaggggagucuggacc

SEQ ID NO: 521003 - RNA, 19 nt, Human
ucuccagcacaugggcuca

SEQ ID NO: 521004 - RNA, 22 nt, Human
ugaguguguauuuucuccagca

SEQ ID NO: 521005 - RNA, 27 nt, Human
uucuccagcacaugggcucacccuggg

SEQ ID NO: 521006 - RNA, 19 nt, Human
aaaaaaaaaaccccaucac

SEQ ID NO: 521007 - RNA, 22 nt, Human
aaaaaaccccaucaccaaagac

SEQ ID NO: 521008 - RNA, 23 nt, Human
aaaaccuaguaagaacaaagcaa

SEQ ID NO: 521009 - RNA, 24 nt, Human
aaacaccaagggccaaaacgccag

SEQ ID NO: 521010 - RNA, 27 nt, Human
aaacaccaucagcagcugccagcucuu

SEQ ID NO: 521011 - RNA, 21 nt, Human
aaacagaaauggggaaauccc

SEQ ID NO: 521012 - RNA, 18 nt, Human
aaccaacacgacaggcac

SEQ ID NO: 521013 - RNA, 20 nt, Human
aacguggccauggcucaaaa

SEQ ID NO: 521014 - RNA, 21 nt, Human
aacugcuuugaaaaccagucc

SEQ ID NO: 521015 - RNA, 18 nt, Human
aaggacucuccuuggccu

SEQ ID NO: 521016 - RNA, 23 nt, Human
aaugguccuuuugcuuugcaccu

SEQ ID NO: 521017 - RNA, 22 nt, Human
acaaagcaaaaccaccgugguu

SEQ ID NO: 521018 - RNA, 23 nt, Human
acauuuuuuuuuuuuuuuacuaa

SEQ ID NO: 521019 - RNA, 18 nt, Human
accaagagacagaauucc

SEQ ID NO: 521020 - RNA, 23 nt, Human
accaagggccaaaacgccagcag

SEQ ID NO: 521021 - RNA, 29 nt, Human
accccgagaacagagcacgugugaagaac

SEQ ID NO: 521022 - RNA, 21 nt, Human
acccuacugccaggucuacag

SEQ ID NO: 521023 - RNA, 22 nt, Human
acccucacccuccaagaaggca

SEQ ID NO: 521024 - RNA, 18 nt, Human
accuacggcaccuuccuu

SEQ ID NO: 521025 - RNA, 18 nt, Human
acgcagcccaggcucccc

SEQ ID NO: 521026 - RNA, 20 nt, Human
agaagccugcacaaagagaa

SEQ ID NO: 521027 - RNA, 18 nt, Human
agacggcagugaaaacuc

SEQ ID NO: 521028 - RNA, 24 nt, Human
agcagccacuaacccaaacccacg

SEQ ID NO: 521029 - RNA, 20 nt, Human
agcccugcgccaccucaggc

SEQ ID NO: 521030 - RNA, 20 nt, Human
agcugaggaaaaaggcgcca

SEQ ID NO: 521031 - RNA, 21 nt, Human
aggagggagauacaaagaaga

SEQ ID NO: 521032 - RNA, 19 nt, Human
aggcacgggauggcagcac

SEQ ID NO: 521033 - RNA, 19 nt, Human
aggcagcaaacagaaaugg

SEQ ID NO: 521034 - RNA, 21 nt, Human
agggagaggggaaggggaggc

SEQ ID NO: 521035 - RNA, 23 nt, Human
caaaacgccagcagccacuaacc

SEQ ID NO: 521036 - RNA, 20 nt, Human
caaaguguccugcauuaaaa

SEQ ID NO: 521037 - RNA, 19 nt, Human
caagaaauauucugaaaaa

SEQ ID NO: 521038 - RNA, 24 nt, Human
caagggccaaaacgccagcagcca

SEQ ID NO: 521039 - RNA, 18 nt, Human
cagaaacaccaagggcca

SEQ ID NO: 521040 - RNA, 22 nt, Human
cagcaaaucagucuccacaacc

SEQ ID NO: 521041 - RNA, 23 nt, Human
cagcaaaucagucuccacaacca

SEQ ID NO: 521042 - RNA, 20 nt, Human
cagccacuaacccaaaccca

SEQ ID NO: 521043 - RNA, 24 nt, Human
caggcuccccuagaucccuggagg

SEQ ID NO: 521044 - RNA, 23 nt, Human
caugaggaccugaagcugggggu

SEQ ID NO: 521045 - RNA, 21 nt, Human
ccagcagccacuaacccaaac

SEQ ID NO: 521046 - RNA, 23 nt, Human
ccaugaggaccugaagcuggggg

SEQ ID NO: 521047 - RNA, 22 nt, Human
cccaaacccacgucuuccuccu

SEQ ID NO: 521048 - RNA, 26 nt, Human
cccaagccacccucacccuccaagaa

SEQ ID NO: 521049 - RNA, 20 nt, Human
cccagacucugaauaugauu

SEQ ID NO: 521050 - RNA, 22 nt, Human
cccagcaaaucagucuccacaa

SEQ ID NO: 521051 - RNA, 19 nt, Human
ccccaucaccaaagacacc

SEQ ID NO: 521052 - RNA, 20 nt, Human
cccuagaucccuggaggcuc

SEQ ID NO: 521053 - RNA, 20 nt, Human
cccuuuauuccucucuuucc

SEQ ID NO: 521054 - RNA, 18 nt, Human
cgcagcccaggcuccccu

SEQ ID NO: 521055 - RNA, 21 nt, Human
cgcagcccaggcuccccuaga

SEQ ID NO: 521056 - RNA, 18 nt, Human
cgugcccuccccucccca

SEQ ID NO: 521057 - RNA, 22 nt, Human
cucacaaugacaacguggccau

SEQ ID NO: 521058 - RNA, 20 nt, Human
cucucucccuuuauuccucu

SEQ ID NO: 521059 - RNA, 19 nt, Human
cugcacaaagagaaaaauc

SEQ ID NO: 521060 - RNA, 19 nt, Human
cugcugcccgggugggcug

SEQ ID NO: 521061 - RNA, 24 nt, Human
cuuuuuuuuuuuuuuuuugccccu

SEQ ID NO: 521062 - RNA, 20 nt, Human
cuuuuuuuuuuuuuuuuugg

SEQ ID NO: 521063 - RNA, 21 nt, Human
gaacgugcccuccccucccca

SEQ ID NO: 521064 - RNA, 19 nt, Human
gaauaaacaguuucccaag

SEQ ID NO: 521065 - RNA, 21 nt, Human
gacaaacucacagaugggauu

SEQ ID NO: 521066 - RNA, 19 nt, Human
gagggagaggggaagggga

SEQ ID NO: 521067 - RNA, 21 nt, Human
gcacaaagagaaaaauccgua

SEQ ID NO: 521068 - RNA, 24 nt, Human
gcccuccccuccccaugaggaccc

SEQ ID NO: 521069 - RNA, 21 nt, Human
ggaggagagggggcacaagcg

SEQ ID NO: 521070 - RNA, 23 nt, Human
ggcaccaaaaccuaguaagaaca

SEQ ID NO: 521071 - RNA, 26 nt, Human
gggaaggagggagauacaaagaagaa

SEQ ID NO: 521072 - RNA, 19 nt, Human
gggccaaaacgccagcagc

SEQ ID NO: 521073 - RNA, 20 nt, Human
gggcugggaaggagggagau

SEQ ID NO: 521074 - RNA, 22 nt, Human
ggggaaggggaggcccuccuga

SEQ ID NO: 521075 - RNA, 20 nt, Human
gguggaagggaggcaaggag

SEQ ID NO: 521076 - RNA, 20 nt, Human
gguugucuugggaagugagg

SEQ ID NO: 521077 - RNA, 23 nt, Human
uaaaaaaaaaaaccccaucacca

SEQ ID NO: 521078 - RNA, 23 nt, Human
uaaaaaaaaaaaccccaucacca

SEQ ID NO: 521079 - RNA, 25 nt, Human
uaaaaaaaaaaaccccaucaccaaa

SEQ ID NO: 521080 - RNA, 22 nt, Human
uaaaugguccuuuugcuuugca

SEQ ID NO: 521081 - RNA, 22 nt, Human
uaacugcuuugaaaaccagucc

SEQ ID NO: 521082 - RNA, 19 nt, Human
uaagaacaaagcaaaacca

SEQ ID NO: 521083 - RNA, 23 nt, Human
uaaggcugcucaacacacagccc

SEQ ID NO: 521084 - RNA, 24 nt, Human
uacaaagaagaaaguaggcaugau

SEQ ID NO: 521085 - RNA, 23 nt, Human
uaugauuccaagaaauauucuga

SEQ ID NO: 521086 - RNA, 19 nt, Human
uauuccucucuuuccugcc

SEQ ID NO: 521087 - RNA, 24 nt, Human
uauuguugcuguaaaaacauuaca

SEQ ID NO: 521088 - RNA, 20 nt, Human
ucaaacagcuuucuaaagac

SEQ ID NO: 521089 - RNA, 23 nt, Human
ucaagaacgugcccuccccuccc

SEQ ID NO: 521090 - RNA, 23 nt, Human
ucacaaugacaacguggccaugg

SEQ ID NO: 521091 - RNA, 19 nt, Human
ucaccaaagacaccugugc

SEQ ID NO: 521092 - RNA, 18 nt, Human
ucacgggugcaaggacuc

SEQ ID NO: 521093 - RNA, 24 nt, Human
ucacugggucgguucccaagccac

SEQ ID NO: 521094 - RNA, 26 nt, Human
uccagaaacaccaagggccaaaacgc

SEQ ID NO: 521095 - RNA, 18 nt, Human
ucccaagccacccucacc

SEQ ID NO: 521096 - RNA, 22 nt, Human
uccccuagaucccuggaggcuc

SEQ ID NO: 521097 - RNA, 19 nt, Human
uccuuuugcuuugcaccug

SEQ ID NO: 521098 - RNA, 18 nt, Human
ucugucaccaaccuaggg

SEQ ID NO: 521099 - RNA, 22 nt, Human
ugaaauuacaaaauugcuuucu

SEQ ID NO: 521100 - RNA, 25 nt, Human
ugaauggaacaaccccgagaacaga

SEQ ID NO: 521101 - RNA, 21 nt, Human
ugaggaccugaagcugggggu

SEQ ID NO: 521102 - RNA, 18 nt, Human
ugagugucuagcauccuu

SEQ ID NO: 521103 - RNA, 24 nt, Human
ugcacaaagagaaaaauccguaua

SEQ ID NO: 521104 - RNA, 22 nt, Human
uggaagacagcugaggaaaaag

SEQ ID NO: 521105 - RNA, 21 nt, Human
uggaagggaggcaaggaggcc

SEQ ID NO: 521106 - RNA, 20 nt, Human
uggcuuugagcuuuaccaag

SEQ ID NO: 521107 - RNA, 23 nt, Human
ugggaaggagggagauacaaaga

SEQ ID NO: 521108 - RNA, 18 nt, Human
ugucuugggaagugaggg

SEQ ID NO: 521109 - RNA, 23 nt, Human
ugucuugggaagugagggggguu

SEQ ID NO: 521110 - RNA, 22 nt, Human
uuauaaaaaaaaaaaccccauc

SEQ ID NO: 521111 - RNA, 24 nt, Human
uucaaacagcuuucuaaagacgag

SEQ ID NO: 521112 - RNA, 19 nt, Human
uucacauuuuuaaaaaauu

SEQ ID NO: 521113 - RNA, 18 nt, Human
uucgcuggacucccuggg

SEQ ID NO: 521114 - RNA, 18 nt, Human
uugcaccugagaccucgc

SEQ ID NO: 521115 - RNA, 26 nt, Human
uuucugagccaauuuaaaagucacau

SEQ ID NO: 521116 - RNA, 24 nt, Human
uuuuacuaaguuauaaaaaaaaaa

SEQ ID NO: 521117 - RNA, 19 nt, Human
uuuuuuuucagacaaggua

SEQ ID NO: 521118 - RNA, 25 nt, Human
uuuuuuuuuuuuuuuuugccccugg

SEQ ID NO: 521119 - RNA, 26 nt, Human
aaauucagccaaacauccacauccaa

SEQ ID NO: 521120 - RNA, 24 nt, Human
aacauccaagcuguaagacugacu

SEQ ID NO: 521121 - RNA, 18 nt, Human
acauccacauccaaacau

SEQ ID NO: 521122 - RNA, 24 nt, Human
agcaaauuuuccucauuauguacc

SEQ ID NO: 521123 - RNA, 22 nt, Human
aggcucaagugaucuucuugcc

SEQ ID NO: 521124 - RNA, 21 nt, Human
agguuccaggaauuacaguuu

SEQ ID NO: 521125 - RNA, 20 nt, Human
agguuggagugcaguggcau

SEQ ID NO: 521126 - RNA, 22 nt, Human
agugcaguggcaugaucauacc

SEQ ID NO: 521127 - RNA, 22 nt, Human
agugcaguggcaugaucauacc

SEQ ID NO: 521128 - RNA, 22 nt, Human
auaaauucagccaaacauccac

SEQ ID NO: 521129 - RNA, 18 nt, Human
auucuguugcccagguug

SEQ ID NO: 521130 - RNA, 19 nt, Human
auucuguugcccagguugg

SEQ ID NO: 521131 - RNA, 23 nt, Human
caaaauguugguauuacaggcac

SEQ ID NO: 521132 - RNA, 19 nt, Human
caaacauccacauccaaac

SEQ ID NO: 521133 - RNA, 24 nt, Human
caaauguauaagcauaucauuuua

SEQ ID NO: 521134 - RNA, 21 nt, Human
caacaaaacauuauuagaaga

SEQ ID NO: 521135 - RNA, 22 nt, Human
caagugaucuucuugccucagc

SEQ ID NO: 521136 - RNA, 22 nt, Human
cagcugggacuacaggcaugga

SEQ ID NO: 521137 - RNA, 22 nt, Human
cagggaauuagcacacucuuaa

SEQ ID NO: 521138 - RNA, 24 nt, Human
cagggucucauucuguugcccagg

SEQ ID NO: 521139 - RNA, 22 nt, Human
cauuuuauuuucauuuaagcca

SEQ ID NO: 521140 - RNA, 26 nt, Human
ccaaacauccaagcuguaagacugac

SEQ ID NO: 521141 - RNA, 26 nt, Human
ccaaacauccacauccaaacauccaa

SEQ ID NO: 521142 - RNA, 20 nt, Human
ccuaggcucaagugaucuuc

SEQ ID NO: 521143 - RNA, 22 nt, Human
ccuaggcucaagugaucuucuu

SEQ ID NO: 521144 - RNA, 20 nt, Human
cucaagugaucuucuugccu

SEQ ID NO: 521145 - RNA, 21 nt, Human
cucacuguaacaucaaauucc

SEQ ID NO: 521146 - RNA, 24 nt, Human
cucgaacagcugggacuacaggca

SEQ ID NO: 521147 - RNA, 18 nt, Human
cugccuuggccucccaaa

SEQ ID NO: 521148 - RNA, 24 nt, Human
cuugccucagccucucgaacagcu

SEQ ID NO: 521149 - RNA, 27 nt, Human
gaacagcugggacuacaggcauggacu

SEQ ID NO: 521150 - RNA, 24 nt, Human
gacuacaggcauggacuaccaugc

SEQ ID NO: 521151 - RNA, 24 nt, Human
gaucauaccucacuguaacaucaa

SEQ ID NO: 521152 - RNA, 24 nt, Human
ggacuacaggcauggacuaccaug

SEQ ID NO: 521153 - RNA, 24 nt, Human
gugaucuucuugccucagccucuc

SEQ ID NO: 521154 - RNA, 21 nt, Human
uaaaaaugcccuccaaacuac

SEQ ID NO: 521155 - RNA, 22 nt, Human
uaccaugcuaggcuuuuuguuu

SEQ ID NO: 521156 - RNA, 24 nt, Human
uaccucacuguaacaucaaauucc

SEQ ID NO: 521157 - RNA, 19 nt, Human
uaggcucaagugaucuucu

SEQ ID NO: 521158 - RNA, 18 nt, Human
uauccugccuaggcuggu

SEQ ID NO: 521159 - RNA, 24 nt, Human
uauuauccugccuaggcuggucuu

SEQ ID NO: 521160 - RNA, 24 nt, Human
ucccaaaauguugguauuacaggc

SEQ ID NO: 521161 - RNA, 20 nt, Human
uccuaggcucaagugaucuu

SEQ ID NO: 521162 - RNA, 23 nt, Human
uccuaggcucaagugaucuucuu

SEQ ID NO: 521163 - RNA, 19 nt, Human
ucucauucuguugcccagg

SEQ ID NO: 521164 - RNA, 23 nt, Human
ucucauucuguugcccagguugg

SEQ ID NO: 521165 - RNA, 24 nt, Human
ucucauucuguugcccagguugga

SEQ ID NO: 521166 - RNA, 23 nt, Human
ucucgaacagcugggacuacagg

SEQ ID NO: 521167 - RNA, 24 nt, Human
ucucgaacagcugggacuacaggc

SEQ ID NO: 521168 - RNA, 25 nt, Human
ucugaaauacauuuccugcaacaaa

SEQ ID NO: 521169 - RNA, 24 nt, Human
ucuguugcccagguuggagugcag

SEQ ID NO: 521170 - RNA, 23 nt, Human
ugaaauacauuuccugcaacaaa

SEQ ID NO: 521171 - RNA, 18 nt, Human
ugcccagguuggagugca

SEQ ID NO: 521172 - RNA, 21 nt, Human
ugcccagguuggagugcagug

SEQ ID NO: 521173 - RNA, 22 nt, Human
ugcccagguuggagugcagugg

SEQ ID NO: 521174 - RNA, 24 nt, Human
ugccuaggcuggucuugaaugccu

SEQ ID NO: 521175 - RNA, 24 nt, Human
ugccucagccucucgaacagcugg

SEQ ID NO: 521176 - RNA, 20 nt, Human
ugcuguaagcuauuuagaca

SEQ ID NO: 521177 - RNA, 19 nt, Human
uggagcaaauuuuccucau

SEQ ID NO: 521178 - RNA, 19 nt, Human
uggagugcaguggcaugau

SEQ ID NO: 521179 - RNA, 19 nt, Human
uggagugcaguggcaugau

SEQ ID NO: 521180 - RNA, 21 nt, Human
uggagugcaguggcaugauca

SEQ ID NO: 521181 - RNA, 24 nt, Human
uggcaugaucauaccucacuguaa

SEQ ID NO: 521182 - RNA, 21 nt, Human
ugggacuacaggcauggacua

SEQ ID NO: 521183 - RNA, 24 nt, Human
ugggacuacaggcauggacuacca

SEQ ID NO: 521184 - RNA, 21 nt, Human
ugguauuacaggcacgagcua

SEQ ID NO: 521185 - RNA, 22 nt, Human
ugguauuacaggcacgagcuac

SEQ ID NO: 521186 - RNA, 24 nt, Human
ugguauuacaggcacgagcuaccg

SEQ ID NO: 521187 - RNA, 23 nt, Human
uguuuuuuaaauagagacaaggu

SEQ ID NO: 521188 - RNA, 24 nt, Human
uucagccaaacauccacauccaaa

SEQ ID NO: 521189 - RNA, 24 nt, Human
uugcccagguuggagugcaguggc

SEQ ID NO: 521190 - RNA, 24 nt, Human
uugcucccguguccgcugaacgug

SEQ ID NO: 521191 - RNA, 24 nt, Human
aaacuggaguugguggggagacca

SEQ ID NO: 521192 - RNA, 25 nt, Human
aaacuggaguugguggggagaccac

SEQ ID NO: 521193 - RNA, 23 nt, Human
aaccugccggcuucucuggcccc

SEQ ID NO: 521194 - RNA, 19 nt, Human
aagacugggugauguuggg

SEQ ID NO: 521195 - RNA, 25 nt, Human
aagcacaccugaggcauaugugcac

SEQ ID NO: 521196 - RNA, 18 nt, Human
acaggcuggguggugggg

SEQ ID NO: 521197 - RNA, 22 nt, Human
acaggcugggugguggggccuu

SEQ ID NO: 521198 - RNA, 19 nt, Human
acugcagacuugcuuuccu

SEQ ID NO: 521199 - RNA, 18 nt, Human
agacugggugauguuggg

SEQ ID NO: 521200 - RNA, 20 nt, Human
aggacccagggggauccaca

SEQ ID NO: 521201 - RNA, 23 nt, Human
aggacgccugccagagccaagga

SEQ ID NO: 521202 - RNA, 18 nt, Human
aggagagccaacuuccca

SEQ ID NO: 521203 - RNA, 22 nt, Human
aggcaaaugagaaggggucaga

SEQ ID NO: 521204 - RNA, 20 nt, Human
aggcagggaguggggcuagg

SEQ ID NO: 521205 - RNA, 21 nt, Human
aggcagggaguggggcuaggg

SEQ ID NO: 521206 - RNA, 21 nt, Human
aggcaggggcagagauacuag

SEQ ID NO: 521207 - RNA, 23 nt, Human
aggccggagcugggcaaucugga

SEQ ID NO: 521208 - RNA, 22 nt, Human
agggaguggggcuaggggcugg

SEQ ID NO: 521209 - RNA, 25 nt, Human
aggggcugggcgggguggugggggg

SEQ ID NO: 521210 - RNA, 22 nt, Human
aggggucagagacacagggcgg

SEQ ID NO: 521211 - RNA, 19 nt, Human
aucaccauuguucccaaca

SEQ ID NO: 521212 - RNA, 21 nt, Human
aucacccccacagacuccacg

SEQ ID NO: 521213 - RNA, 20 nt, Human
auccaugcagucccaaaagc

SEQ ID NO: 521214 - RNA, 24 nt, Human
caaaugagaaggggucagagacac

SEQ ID NO: 521215 - RNA, 19 nt, Human
caagaucuucugauagccc

SEQ ID NO: 521216 - RNA, 23 nt, Human
cacacacccaucacaccaccaca

SEQ ID NO: 521217 - RNA, 21 nt, Human
cacacauauccaugcaguccc

SEQ ID NO: 521218 - RNA, 22 nt, Human
cacccccacagacuccacagcc

SEQ ID NO: 521219 - RNA, 21 nt, Human
caccgaggagccacccccccc

SEQ ID NO: 521220 - RNA, 22 nt, Human
caccuugccacccucugucacc

SEQ ID NO: 521221 - RNA, 22 nt, Human
cagacucuccccuuugcccucc

SEQ ID NO: 521222 - RNA, 21 nt, Human
cagccggggcucagacagcgu

SEQ ID NO: 521223 - RNA, 21 nt, Human
caggacgccugccagagccaa

SEQ ID NO: 521224 - RNA, 23 nt, Human
caggggaggcugggggccuggca

SEQ ID NO: 521225 - RNA, 24 nt, Human
caguauggggggcauggggugccg

SEQ ID NO: 521226 - RNA, 18 nt, Human
caguggcugaccccagcc

SEQ ID NO: 521227 - RNA, 21 nt, Human
caucacaccaccacaugggcc

SEQ ID NO: 521228 - RNA, 20 nt, Human
ccaaaagcacaccugaggcu

SEQ ID NO: 521229 - RNA, 22 nt, Human
ccacaagaucuucugauagccc

SEQ ID NO: 521230 - RNA, 21 nt, Human
cccacagacuccacagccauc

SEQ ID NO: 521231 - RNA, 18 nt, Human
cccccaaauuccugccgg

SEQ ID NO: 521232 - RNA, 21 nt, Human
cccccacagacuccacagcca

SEQ ID NO: 521233 - RNA, 22 nt, Human
ccccuuugcccuccucccuggg

SEQ ID NO: 521234 - RNA, 18 nt, Human
cccgaaacaaggcgacag

SEQ ID NO: 521235 - RNA, 21 nt, Human
ccucagaaucuccggcugaag

SEQ ID NO: 521236 - RNA, 20 nt, Human
ccugcugagacugggacagg

SEQ ID NO: 521237 - RNA, 22 nt, Human
ccuuugcccuccucccugggag

SEQ ID NO: 521238 - RNA, 21 nt, Human
cgcagcuggcaagacugggug

SEQ ID NO: 521239 - RNA, 23 nt, Human
cgccuggguuuuccuccugaaag

SEQ ID NO: 521240 - RNA, 22 nt, Human
cggcuuagaagaugugaggucu

SEQ ID NO: 521241 - RNA, 22 nt, Human
cgggcugggcggggugccggag

SEQ ID NO: 521242 - RNA, 21 nt, Human
cgggggcaccgaggagccacc

SEQ ID NO: 521243 - RNA, 20 nt, Human
cgggggcaccgaggagccag

SEQ ID NO: 521244 - RNA, 22 nt, Human
cggggggccugacgcacacucc

SEQ ID NO: 521245 - RNA, 23 nt, Human
cuccacagccaucaggacgccug

SEQ ID NO: 521246 - RNA, 25 nt, Human
cuccacagccaucaggacgccugcc

SEQ ID NO: 521247 - RNA, 19 nt, Human
cucuuuuucacccucugcc

SEQ ID NO: 521248 - RNA, 20 nt, Human
cugcccagcugggccuugcu

SEQ ID NO: 521249 - RNA, 20 nt, Human
cugggccuugcucuggagag

SEQ ID NO: 521250 - RNA, 22 nt, Human
cugggcgggguggugggggagc

SEQ ID NO: 521251 - RNA, 24 nt, Human
cuguguaaccucuuuuugaaaagu

SEQ ID NO: 521252 - RNA, 19 nt, Human
gaaccugccggcuucucug

SEQ ID NO: 521253 - RNA, 19 nt, Human
gaagaugugaggucugaac

SEQ ID NO: 521254 - RNA, 20 nt, Human
gacagacucuccccuuugcc

SEQ ID NO: 521255 - RNA, 20 nt, Human
gacucuccccuuugcccucc

SEQ ID NO: 521256 - RNA, 19 nt, Human
gcagcuggagaccccaggg

SEQ ID NO: 521257 - RNA, 20 nt, Human
gcagcuggcggugcugggug

SEQ ID NO: 521258 - RNA, 19 nt, Human
gccaacuucccaauggcca

SEQ ID NO: 521259 - RNA, 19 nt, Human
gccagagccaaggauccca

SEQ ID NO: 521260 - RNA, 23 nt, Human
gccaggggguucagagugggccg

SEQ ID NO: 521261 - RNA, 22 nt, Human
gccggcuucucuggccccggcc

SEQ ID NO: 521262 - RNA, 18 nt, Human
gccugggguccgggcugg

SEQ ID NO: 521263 - RNA, 18 nt, Human
ggagaugcagaggaaaau

SEQ ID NO: 521264 - RNA, 19 nt, Human
ggaguggggcuaggggcug

SEQ ID NO: 521265 - RNA, 24 nt, Human
ggccugacgcacacuccugcucgc

SEQ ID NO: 521266 - RNA, 20 nt, Human
ggccuggcacccgcggcaca

SEQ ID NO: 521267 - RNA, 18 nt, Human
ggccuucagccgacagac

SEQ ID NO: 521268 - RNA, 18 nt, Human
ggcgggguggugggggag

SEQ ID NO: 521269 - RNA, 18 nt, Human
ggcuaggggcugggcggg

SEQ ID NO: 521270 - RNA, 23 nt, Human
ggcugggggccuggcacccgcgg

SEQ ID NO: 521271 - RNA, 19 nt, Human
gggacagggggcucugggg

SEQ ID NO: 521272 - RNA, 19 nt, Human
gggcaccgaggagccaccc

SEQ ID NO: 521273 - RNA, 20 nt, Human
gggcgggguggugggggagc

SEQ ID NO: 521274 - RNA, 23 nt, Human
gggcuaggggcugggcggggugg

SEQ ID NO: 521275 - RNA, 21 nt, Human
gggcugggcgggguggugggg

SEQ ID NO: 521276 - RNA, 24 nt, Human
ggggacagggggcucugggguggg

SEQ ID NO: 521277 - RNA, 22 nt, Human
ggggcugggcgggguggugggg

SEQ ID NO: 521278 - RNA, 20 nt, Human
gggguccgggcugggcgggg

SEQ ID NO: 521279 - RNA, 19 nt, Human
ggugaagagaugacauacu

SEQ ID NO: 521280 - RNA, 23 nt, Human
ggugccugggguccgggcugggc

SEQ ID NO: 521281 - RNA, 24 nt, Human
gucacaggccucucugcugggggg

SEQ ID NO: 521282 - RNA, 20 nt, Human
gugccugggguccgggcugg

SEQ ID NO: 521283 - RNA, 20 nt, Human
uaggacccagggggauccac

SEQ ID NO: 521284 - RNA, 21 nt, Human
uaugugcacacacccaucaca

SEQ ID NO: 521285 - RNA, 24 nt, Human
ucacaccaccacaugggccugacc

SEQ ID NO: 521286 - RNA, 26 nt, Human
ucaccuggaggacaucccugcugaga

SEQ ID NO: 521287 - RNA, 24 nt, Human
ucaucacccccacagacuccacag

SEQ ID NO: 521288 - RNA, 24 nt, Human
uccacaagaucuucugauagccca

SEQ ID NO: 521289 - RNA, 19 nt, Human
ucccaguauggggggcaug

SEQ ID NO: 521290 - RNA, 18 nt, Human
ucucaaggaaacaggucu

SEQ ID NO: 521291 - RNA, 20 nt, Human
ucucaaggauuggaggaggu

SEQ ID NO: 521292 - RNA, 19 nt, Human
ucuccggcugaagcugggg

SEQ ID NO: 521293 - RNA, 22 nt, Human
ucucugcuggggggcugcgggg

SEQ ID NO: 521294 - RNA, 20 nt, Human
ucucuggccccggccgcacc

SEQ ID NO: 521295 - RNA, 19 nt, Human
ucugauagcccagggggcc

SEQ ID NO: 521296 - RNA, 22 nt, Human
ugagaaggggucagagacacag

SEQ ID NO: 521297 - RNA, 18 nt, Human
ugagacugggacaggcug

SEQ ID NO: 521298 - RNA, 22 nt, Human
ugagcacacacauauccaugca

SEQ ID NO: 521299 - RNA, 19 nt, Human
ugaugauggaccggccccc

SEQ ID NO: 521300 - RNA, 22 nt, Human
ugcacacacccaucacaccacc

SEQ ID NO: 521301 - RNA, 20 nt, Human
ugcagaggaaaauggggcgc

SEQ ID NO: 521302 - RNA, 27 nt, Human
ugccggcuucucuggccccggccgcac

SEQ ID NO: 521303 - RNA, 21 nt, Human
ugccguggcaggguucagggg

SEQ ID NO: 521304 - RNA, 19 nt, Human
ugcggggggccugacgcac

SEQ ID NO: 521305 - RNA, 21 nt, Human
ugcucgcucacuucaucacca

SEQ ID NO: 521306 - RNA, 22 nt, Human
ugcuggggggcugcggggggcc

SEQ ID NO: 521307 - RNA, 21 nt, Human
uggagcuaggccggagcuggg

SEQ ID NO: 521308 - RNA, 18 nt, Human
uggaggacaucccugcug

SEQ ID NO: 521309 - RNA, 21 nt, Human
uggaggacaucccugcugaga

SEQ ID NO: 521310 - RNA, 19 nt, Human
uggaguugguggggagacc

SEQ ID NO: 521311 - RNA, 23 nt, Human
uggcaggguucaggggaggcugg

SEQ ID NO: 521312 - RNA, 23 nt, Human
uggcuccaaggagagccaacuuc

SEQ ID NO: 521313 - RNA, 22 nt, Human
ugggcaaucuggagccgcaagg

SEQ ID NO: 521314 - RNA, 19 nt, Human
uggggcuaggggcugggcg

SEQ ID NO: 521315 - RNA, 26 nt, Human
ugggggacagggggcucugggguggg

SEQ ID NO: 521316 - RNA, 24 nt, Human
ugggggagcggaugcucacauuuc

SEQ ID NO: 521317 - RNA, 20 nt, Human
uggggugggguucucaagga

SEQ ID NO: 521318 - RNA, 20 nt, Human
ugggugauguugggccgggg

SEQ ID NO: 521319 - RNA, 21 nt, Human
ugggugccggggccacaggag

SEQ ID NO: 521320 - RNA, 18 nt, Human
ugucaggggcuccaggcu

SEQ ID NO: 521321 - RNA, 19 nt, Human
ugucaggggcuccaggcug

SEQ ID NO: 521322 - RNA, 21 nt, Human
uuggcaguggcugaccccagc

SEQ ID NO: 521323 - RNA, 23 nt, Human
uuggcaguggcugaccccagccc

SEQ ID NO: 521324 - RNA, 27 nt, Human
uuggcaguggcugaccccagcccuagc

SEQ ID NO: 521325 - RNA, 20 nt, Human
uuugcccuccucccugggag

SEQ ID NO: 521326 - RNA, 24 nt, Human
aaaaauauucacugaaagaccccc

SEQ ID NO: 521327 - RNA, 24 nt, Human
aagacccccccccacccccaucgg

SEQ ID NO: 521328 - RNA, 20 nt, Human
acccccccccacccccaucg

SEQ ID NO: 521329 - RNA, 22 nt, Human
agacccccccccacccccaucg

SEQ ID NO: 521330 - RNA, 21 nt, Human
agcccggcacuggcguccgcg

SEQ ID NO: 521331 - RNA, 23 nt, Human
cacugaaagacccccccccaccc

SEQ ID NO: 521332 - RNA, 22 nt, Human
cccacccccaucggcccaaagc

SEQ ID NO: 521333 - RNA, 27 nt, Human
ccccacccccaucggcccaaagcugaa

SEQ ID NO: 521334 - RNA, 19 nt, Human
ccccaucggcccaaagcug

SEQ ID NO: 521335 - RNA, 22 nt, Human
cccccccacccccaucggccca

SEQ ID NO: 521336 - RNA, 23 nt, Human
ccccccccacccccaucggccca

SEQ ID NO: 521337 - RNA, 23 nt, Human
cccccccccacccccaucggccc

SEQ ID NO: 521338 - RNA, 22 nt, Human
cccgcgcugacccagucggcca

SEQ ID NO: 521339 - RNA, 21 nt, Human
ccuggagcccggcacuggcgu

SEQ ID NO: 521340 - RNA, 22 nt, Human
cgcgcugacccagucggccacc

SEQ ID NO: 521341 - RNA, 20 nt, Human
cugacccagucggccacccc

SEQ ID NO: 521342 - RNA, 20 nt, Human
gaaagacccccccccacccc

SEQ ID NO: 521343 - RNA, 20 nt, Human
ggcgcagcccgcgcugaccc

SEQ ID NO: 521344 - RNA, 19 nt, Human
ucacugaaagacccccccc

SEQ ID NO: 521345 - RNA, 18 nt, Human
uccacaguagaguuuaau

SEQ ID NO: 521346 - RNA, 23 nt, Human
uccacaguagaguuuaauaaaaa

SEQ ID NO: 521347 - RNA, 18 nt, Human
ugaaagacccccccccac

SEQ ID NO: 521348 - RNA, 23 nt, Human
ugaaagacccccccccaccccca

SEQ ID NO: 521349 - RNA, 22 nt, Human
uucacugaaagaccccccccca

SEQ ID NO: 521350 - RNA, 26 nt, Human
aaaaaaaaaaaguugggggcaaaggg

SEQ ID NO: 521351 - RNA, 21 nt, Human
aaaaaaaaaaucaaauccagc

SEQ ID NO: 521352 - RNA, 22 nt, Human
aaaacaguuccacgggagcuaa

SEQ ID NO: 521353 - RNA, 20 nt, Human
aacagguagcccacuuggug

SEQ ID NO: 521354 - RNA, 18 nt, Human
acacauccccacacacac

SEQ ID NO: 521355 - RNA, 27 nt, Human
acccaaaacccuuugggaaaaguucca

SEQ ID NO: 521356 - RNA, 22 nt, Human
acggcgcggggcacaggcccgc

SEQ ID NO: 521357 - RNA, 20 nt, Human
acuaugguacacaagaagcu

SEQ ID NO: 521358 - RNA, 23 nt, Human
agagaggcccagugaggcuugaa

SEQ ID NO: 521359 - RNA, 18 nt, Human
agaugaucaaucccaaag

SEQ ID NO: 521360 - RNA, 24 nt, Human
agcacaucaaagcauauuucuuuu

SEQ ID NO: 521361 - RNA, 23 nt, Human
aggcagauacaaaacaguuccac

SEQ ID NO: 521362 - RNA, 25 nt, Human
aggggaagacaaguuuuacacaaaa

SEQ ID NO: 521363 - RNA, 22 nt, Human
augguacacaagaagcuagagc

SEQ ID NO: 521364 - RNA, 23 nt, Human
caaaacaguuccacgggagcuaa

SEQ ID NO: 521365 - RNA, 24 nt, Human
caaaacccuuugggaaaaguucca

SEQ ID NO: 521366 - RNA, 23 nt, Human
caagaugaucaaucccaaagcca

SEQ ID NO: 521367 - RNA, 22 nt, Human
cacacacauccccacacacacc

SEQ ID NO: 521368 - RNA, 22 nt, Human
cacaguacuaugguacacaagg

SEQ ID NO: 521369 - RNA, 18 nt, Human
cacauccccacacacacc

SEQ ID NO: 521370 - RNA, 21 nt, Human
cagggaugcacuacaaaaccc

SEQ ID NO: 521371 - RNA, 25 nt, Human
caggucccagauaaaaccuaauggg

SEQ ID NO: 521372 - RNA, 23 nt, Human
ccaaagccaaacugcagguccca

SEQ ID NO: 521373 - RNA, 23 nt, Human
ccacacacacauccccacacaca

SEQ ID NO: 521374 - RNA, 26 nt, Human
ccacacacacauccccacacacaccc

SEQ ID NO: 521375 - RNA, 22 nt, Human
ccaccaggcucccgcccggccc

SEQ ID NO: 521376 - RNA, 18 nt, Human
ccagccacacacagguca

SEQ ID NO: 521377 - RNA, 22 nt, Human
ccaggcucccgcccggcccccg

SEQ ID NO: 521378 - RNA, 23 nt, Human
cccacacacacauccccacacac

SEQ ID NO: 521379 - RNA, 24 nt, Human
cccacacacacauccccacacaca

SEQ ID NO: 521380 - RNA, 28 nt, Human
cccacacacacauccccacacacacccc

SEQ ID NO: 521381 - RNA, 19 nt, Human
cccagugaggcuugaaagg

SEQ ID NO: 521382 - RNA, 19 nt, Human
ccccacacacaccccaagu

SEQ ID NO: 521383 - RNA, 18 nt, Human
cccgagaacggcgcgggg

SEQ ID NO: 521384 - RNA, 20 nt, Human
ccggcccccggcccagcgug

SEQ ID NO: 521385 - RNA, 22 nt, Human
ccggcccccggcccagcgugcu

SEQ ID NO: 521386 - RNA, 21 nt, Human
cgagaacggcgcggggcacag

SEQ ID NO: 521387 - RNA, 19 nt, Human
cgccgaagcggacugccag

SEQ ID NO: 521388 - RNA, 18 nt, Human
cggcgcggggcacaggcc

SEQ ID NO: 521389 - RNA, 21 nt, Human
cucccgcccggcccccggccc

SEQ ID NO: 521390 - RNA, 25 nt, Human
cucgagugaccagaaaaaaaaaauc

SEQ ID NO: 521391 - RNA, 24 nt, Human
gagugaccagaaaaaaaaaaucaa

SEQ ID NO: 521392 - RNA, 20 nt, Human
gcugcaccagccacacacag

SEQ ID NO: 521393 - RNA, 23 nt, Human
ggagaggagcagugaccaugaua

SEQ ID NO: 521394 - RNA, 19 nt, Human
gggcaaaggggaagacaag

SEQ ID NO: 521395 - RNA, 20 nt, Human
gggcacaggcccgccgaagc

SEQ ID NO: 521396 - RNA, 21 nt, Human
gggggcaaaggggaagacaag

SEQ ID NO: 521397 - RNA, 22 nt, Human
ggucagguggccaugucccaga

SEQ ID NO: 521398 - RNA, 20 nt, Human
gugaccagaaaaaaaaaauc

SEQ ID NO: 521399 - RNA, 23 nt, Human
gugccaggcugcaccagccacac

SEQ ID NO: 521400 - RNA, 22 nt, Human
guuacccgccaccaggcucccg

SEQ ID NO: 521401 - RNA, 18 nt, Human
uacaaaaaaaaaaaaaaa

SEQ ID NO: 521402 - RNA, 18 nt, Human
uacacaagaagcuagagc

SEQ ID NO: 521403 - RNA, 25 nt, Human
uauguacaaaaaaacaaguuaaaau

SEQ ID NO: 521404 - RNA, 24 nt, Human
ucaccgcaaagcugcuucggccgc

SEQ ID NO: 521405 - RNA, 21 nt, Human
ucaggaauaaaauccacaaga

SEQ ID NO: 521406 - RNA, 19 nt, Human
ucaugcucagggaugcacu

SEQ ID NO: 521407 - RNA, 20 nt, Human
ucccgcccggcccccggccc

SEQ ID NO: 521408 - RNA, 25 nt, Human
ugagugcauaggcccacacacacag

SEQ ID NO: 521409 - RNA, 27 nt, Human
ugcuugcauggacuuccuuccccucca

SEQ ID NO: 521410 - RNA, 20 nt, Human
uggggaggggagaggagcag

SEQ ID NO: 521411 - RNA, 22 nt, Human
ugggggcaaaggggaagacaag

SEQ ID NO: 521412 - RNA, 22 nt, Human
ugggggcaaaggggaagacaag

SEQ ID NO: 521413 - RNA, 20 nt, Human
ugggugaucuuagaugugcu

SEQ ID NO: 521414 - RNA, 19 nt, Human
uguaagguauucauguucc

SEQ ID NO: 521415 - RNA, 23 nt, Human
uguacaaaaaaacaaguuaaaau

SEQ ID NO: 521416 - RNA, 23 nt, Human
ugucagagaguaaagcuggugga

SEQ ID NO: 521417 - RNA, 18 nt, Human
ugucccagagaggcccag

SEQ ID NO: 521418 - RNA, 18 nt, Human
ugucuuguacaucuguuc

SEQ ID NO: 521419 - RNA, 21 nt, Human
ugugugcaagcaaacugcaug

SEQ ID NO: 521420 - RNA, 26 nt, Human
ugugugcgugugugugucagagagua

SEQ ID NO: 521421 - RNA, 20 nt, Human
ugugugugugugcgugugug

SEQ ID NO: 521422 - RNA, 22 nt, Human
ugugugugugugcgugugugug

SEQ ID NO: 521423 - RNA, 18 nt, Human
ugugugugugugugcgug

SEQ ID NO: 521424 - RNA, 21 nt, Human
ugugugugugugugcgugugu

SEQ ID NO: 521425 - RNA, 21 nt, Human
uugagguugagaaccagagga

SEQ ID NO: 521426 - RNA, 22 nt, Human
uugugugugugugugcgugugu

SEQ ID NO: 521427 - RNA, 22 nt, Human
uuuuguaaaugcaucuccaucc

SEQ ID NO: 521428 - RNA, 23 nt, Human
uuuuuccuuuuguggggagggga

SEQ ID NO: 521429 - RNA, 18 nt, Human
aaaaagcauguugagcac

SEQ ID NO: 521430 - RNA, 19 nt, Human
aaaacgcccaugugaaaua

SEQ ID NO: 521431 - RNA, 26 nt, Human
aaacaaaaacaaaaaacacauacgca

SEQ ID NO: 521432 - RNA, 27 nt, Human
aaacaaaaacaaaaaacacauacgcaa

SEQ ID NO: 521433 - RNA, 19 nt, Human
aaacacauacgcaaaacaa

SEQ ID NO: 521434 - RNA, 19 nt, Human
aaacauaauuagguaucau

SEQ ID NO: 521435 - RNA, 20 nt, Human
aaagucacauuucacgagua

SEQ ID NO: 521436 - RNA, 19 nt, Human
aacuucaguuccuugguug

SEQ ID NO: 521437 - RNA, 18 nt, Human
aagaaaccaagagauacu

SEQ ID NO: 521438 - RNA, 20 nt, Human
aaggcaccacuaugguugaa

SEQ ID NO: 521439 - RNA, 23 nt, Human
aagguuccgcugcaugauuuuuu

SEQ ID NO: 521440 - RNA, 23 nt, Human
acagccaauaaaaauuaaaaggu

SEQ ID NO: 521441 - RNA, 21 nt, Human
agaaaaagcauguugagcacc

SEQ ID NO: 521442 - RNA, 23 nt, Human
agacagccaauaaaaauuaaaag

SEQ ID NO: 521443 - RNA, 21 nt, Human
auagaaaacaaugaauccuag

SEQ ID NO: 521444 - RNA, 26 nt, Human
caaaaaacacauacgcaaaacaagac

SEQ ID NO: 521445 - RNA, 22 nt, Human
caaauucuuucaugcacggcuu

SEQ ID NO: 521446 - RNA, 28 nt, Human
caauaaaaauuaaaaggugaucaccaug

SEQ ID NO: 521447 - RNA, 18 nt, Human
ccagagccauauuugcag

SEQ ID NO: 521448 - RNA, 20 nt, Human
ccuuuguucccaaaggugaa

SEQ ID NO: 521449 - RNA, 25 nt, Human
cgaguagugacccauguuguaauga

SEQ ID NO: 521450 - RNA, 23 nt, Human
cucucauaugaugaaaacuucag

SEQ ID NO: 521451 - RNA, 24 nt, Human
cuggugggagaaagucacauuuca

SEQ ID NO: 521452 - RNA, 24 nt, Human
ggauuuuuaaucaaguagcaauuu

SEQ ID NO: 521453 - RNA, 20 nt, Human
gggagaaagucacauuucac

SEQ ID NO: 521454 - RNA, 23 nt, Human
gggcgcggggcgacugcacacgg

SEQ ID NO: 521455 - RNA, 26 nt, Human
gugaagggcaggauuuuuaaucaagu

SEQ ID NO: 521456 - RNA, 21 nt, Human
guuagguaacuguuccacacu

SEQ ID NO: 521457 - RNA, 21 nt, Human
guucccaaaggugaagggcag

SEQ ID NO: 521458 - RNA, 25 nt, Human
uaaagucaguaauagcuugugcaau

SEQ ID NO: 521459 - RNA, 23 nt, Human
uaagaaaccaagagauacuuccu

SEQ ID NO: 521460 - RNA, 23 nt, Human
uacaaaaggaaagacuaaauuuu

SEQ ID NO: 521461 - RNA, 24 nt, Human
uacauauacaaaaggaaagacuaa

SEQ ID NO: 521462 - RNA, 21 nt, Human
uacccgaagggucgcgcgggg

SEQ ID NO: 521463 - RNA, 22 nt, Human
uacgcaaaacaagacauuaaac

SEQ ID NO: 521464 - RNA, 24 nt, Human
uagaaaacaaugaauccuagaaaa

SEQ ID NO: 521465 - RNA, 20 nt, Human
ucagaacucccaguucguag

SEQ ID NO: 521466 - RNA, 21 nt, Human
ucaugcacggcuucucuaccu

SEQ ID NO: 521467 - RNA, 19 nt, Human
uccaguugucaaagucacc

SEQ ID NO: 521468 - RNA, 23 nt, Human
uccuugguugucugggacuuugu

SEQ ID NO: 521469 - RNA, 21 nt, Human
ugaaaagcaaucucuagagga

SEQ ID NO: 521470 - RNA, 22 nt, Human
ugcaauugugaaaagcaaucuc

SEQ ID NO: 521471 - RNA, 24 nt, Human
uggaucuccuauuacugaauuuug

SEQ ID NO: 521472 - RNA, 21 nt, Human
uguauacaaaacgcccaugug

SEQ ID NO: 521473 - RNA, 22 nt, Human
ugugaaaagcaaucucuagagg

SEQ ID NO: 521474 - RNA, 26 nt, Human
uguucccaaaggugaagggcaggauu

SEQ ID NO: 521475 - RNA, 21 nt, Human
uucccaaaggugaagggcagg

SEQ ID NO: 521476 - RNA, 25 nt, Human
uuuaauuaggaaaacauaauuaggu

SEQ ID NO: 521477 - RNA, 18 nt, Human
uuugaggaguucccuugc

SEQ ID NO: 521478 - RNA, 25 nt, Human
uuuuaaaguuacacucaagguugcu

SEQ ID NO: 521479 - RNA, 23 nt, Human
aaacaaauggacauaacaaagau

SEQ ID NO: 521480 - RNA, 19 nt, Human
aaacguaauccaacaugcc

SEQ ID NO: 521481 - RNA, 21 nt, Human
aacaggacaaacguaauccaa

SEQ ID NO: 521482 - RNA, 18 nt, Human
aaccaacacauuacccug

SEQ ID NO: 521483 - RNA, 19 nt, Human
aagaaagguggacagccug

SEQ ID NO: 521484 - RNA, 20 nt, Human
aaggggacuaccuggaaggc

SEQ ID NO: 521485 - RNA, 22 nt, Human
acaagagcccugaggaagaagc

SEQ ID NO: 521486 - RNA, 18 nt, Human
acaggcuguagcccuggg

SEQ ID NO: 521487 - RNA, 24 nt, Human
accacccccaacacaagagaggca

SEQ ID NO: 521488 - RNA, 21 nt, Human
acccccaacacaagagaggcc

SEQ ID NO: 521489 - RNA, 18 nt, Human
acccugaggcuucuggga

SEQ ID NO: 521490 - RNA, 23 nt, Human
agaaaacccagaaagccagcuca

SEQ ID NO: 521491 - RNA, 21 nt, Human
agaagaaagguggacagccug

SEQ ID NO: 521492 - RNA, 19 nt, Human
agaaggcuggcacaugggg

SEQ ID NO: 521493 - RNA, 18 nt, Human
agcagacaagagaauguc

SEQ ID NO: 521494 - RNA, 22 nt, Human
agccagcucaguucccaagaag

SEQ ID NO: 521495 - RNA, 21 nt, Human
aggacaaacguaauccaacau

SEQ ID NO: 521496 - RNA, 19 nt, Human
aggccagagcaggaaaggg

SEQ ID NO: 521497 - RNA, 21 nt, Human
aucacaguuauuuaagccaaa

SEQ ID NO: 521498 - RNA, 21 nt, Human
aucuguuguaccugccaaaag

SEQ ID NO: 521499 - RNA, 18 nt, Human
auggccaggacccuaggg

SEQ ID NO: 521500 - RNA, 21 nt, Human
caagagcccugaggaagaagc

SEQ ID NO: 521501 - RNA, 18 nt, Human
caaggugugaagugggaa

SEQ ID NO: 521502 - RNA, 21 nt, Human
cacaguucccuaaucagcccu

SEQ ID NO: 521503 - RNA, 23 nt, Human
cacauggccaggacccuagggac

SEQ ID NO: 521504 - RNA, 18 nt, Human
caccacccccaacacaag

SEQ ID NO: 521505 - RNA, 26 nt, Human
cacuaaacacauggccaggacccuag

SEQ ID NO: 521506 - RNA, 23 nt, Human
cagaaagccagcucaguucccaa

SEQ ID NO: 521507 - RNA, 21 nt, Human
caguucccuaaucagcccuug

SEQ ID NO: 521508 - RNA, 22 nt, Human
caugagaaaacccagaaagcca

SEQ ID NO: 521509 - RNA, 19 nt, Human
ccaacacaagagaggcaca

SEQ ID NO: 521510 - RNA, 20 nt, Human
ccacagagaagaguuugcac

SEQ ID NO: 521511 - RNA, 21 nt, Human
ccaccacccccaacacaagag

SEQ ID NO: 521512 - RNA, 22 nt, Human
ccagagcaggaaagggaaagga

SEQ ID NO: 521513 - RNA, 26 nt, Human
ccaggccccucugaugagcucucucc

SEQ ID NO: 521514 - RNA, 22 nt, Human
cccaaggcuagaaccacagaga

SEQ ID NO: 521515 - RNA, 22 nt, Human
cccucugagaccucucugggaa

SEQ ID NO: 521516 - RNA, 21 nt, Human
ccucugagaccucucuggggg

SEQ ID NO: 521517 - RNA, 21 nt, Human
cggcgaaaucccucacucggg

SEQ ID NO: 521518 - RNA, 21 nt, Human
cgucugcggugagcggugguu

SEQ ID NO: 521519 - RNA, 20 nt, Human
cucagcagcccagcuccucc

SEQ ID NO: 521520 - RNA, 20 nt, Human
cucccugggggaauccccca

SEQ ID NO: 521521 - RNA, 24 nt, Human
cugcggugagcggugguucccucc

SEQ ID NO: 521522 - RNA, 19 nt, Human
gaagaagcaguaagaccag

SEQ ID NO: 521523 - RNA, 21 nt, Human
gaauaacccccaccaccccca

SEQ ID NO: 521524 - RNA, 23 nt, Human
gagaacaaaggagaaaguuuagc

SEQ ID NO: 521525 - RNA, 24 nt, Human
gagaacaagagcccugaggaagaa

SEQ ID NO: 521526 - RNA, 20 nt, Human
gcacaggcuguagcccuggg

SEQ ID NO: 521527 - RNA, 24 nt, Human
gccuagggcugggaacaguuuggc

SEQ ID NO: 521528 - RNA, 18 nt, Human
ggaauagcagacaagaga

SEQ ID NO: 521529 - RNA, 19 nt, Human
ggagaaaguuuagcacacu

SEQ ID NO: 521530 - RNA, 20 nt, Human
ggagaacaagagcccugagg

SEQ ID NO: 521531 - RNA, 20 nt, Human
ggcgaaaucccucacucggg

SEQ ID NO: 521532 - RNA, 18 nt, Human
ggcucuccccuccccucu

SEQ ID NO: 521533 - RNA, 21 nt, Human
ggcugacuuguacuggguacu

SEQ ID NO: 521534 - RNA, 22 nt, Human
gggcugggaacaguuugugagg

SEQ ID NO: 521535 - RNA, 19 nt, Human
ggugaggggguaagcagcu

SEQ ID NO: 521536 - RNA, 20 nt, Human
guccaggaaggggacuaccu

SEQ ID NO: 521537 - RNA, 19 nt, Human
uaagcagcuugacaguugc

SEQ ID NO: 521538 - RNA, 28 nt, Human
uacuggguacucugaacuuucaaggagg

SEQ ID NO: 521539 - RNA, 22 nt, Human
uaggcucucagcagcccagcuc

SEQ ID NO: 521540 - RNA, 22 nt, Human
uauaaacuuuaugaggaaaaau

SEQ ID NO: 521541 - RNA, 23 nt, Human
ucacugguacuugcucagccuuu

SEQ ID NO: 521542 - RNA, 21 nt, Human
ucccuaaucagcccuuggccc

SEQ ID NO: 521543 - RNA, 21 nt, Human
ucucuaaucagcaggaccaag

SEQ ID NO: 521544 - RNA, 23 nt, Human
ucuguuguaccugccaaaaguua

SEQ ID NO: 521545 - RNA, 24 nt, Human
ugaagugggaaugaacauggaucc

SEQ ID NO: 521546 - RNA, 20 nt, Human
ugacugcagccacuacgucc

SEQ ID NO: 521547 - RNA, 21 nt, Human
ugacuuguacuggguacucug

SEQ ID NO: 521548 - RNA, 19 nt, Human
ugagaaaacccagaaagcc

SEQ ID NO: 521549 - RNA, 20 nt, Human
ugagaaaacccagaaagccg

SEQ ID NO: 521550 - RNA, 27 nt, Human
ugagaacaaaggagaaaguuuagcaca

SEQ ID NO: 521551 - RNA, 30 nt, Human
ugcaggcucuccccuccccucugagaccuu

SEQ ID NO: 521552 - RNA, 20 nt, Human
ugcggugagcggugguuccc

SEQ ID NO: 521553 - RNA, 21 nt, Human
uggaaggccugagaacaaagg

SEQ ID NO: 521554 - RNA, 24 nt, Human
uggcccccagaugcaggcucuccc

SEQ ID NO: 521555 - RNA, 24 nt, Human
uggcuauaaucccuagggccccaa

SEQ ID NO: 521556 - RNA, 22 nt, Human
ugguucccucccucagcuccuc

SEQ ID NO: 521557 - RNA, 18 nt, Human
uuaaauggccauugucac

SEQ ID NO: 521558 - RNA, 23 nt, Human
uuaaauggccauugucacuggua

SEQ ID NO: 521559 - RNA, 23 nt, Human
uuccaggccccucugaugagcuc

SEQ ID NO: 521560 - RNA, 23 nt, Human
uuuccaggccccucugaugagcu

SEQ ID NO: 521561 - RNA, 20 nt, Human
aaacggacucaggacaaacc

SEQ ID NO: 521562 - RNA, 21 nt, Human
aacaaaaagggauguuucuag

SEQ ID NO: 521563 - RNA, 18 nt, Human
aagaaucauaaaguuuac

SEQ ID NO: 521564 - RNA, 22 nt, Human
aauaaauggcaauaaauucuaa

SEQ ID NO: 521565 - RNA, 21 nt, Human
aauaacaguauaaucuauaga

SEQ ID NO: 521566 - RNA, 23 nt, Human
acccucauacuuaaaaagaagca

SEQ ID NO: 521567 - RNA, 20 nt, Human
agaaauacugcuacaggugc

SEQ ID NO: 521568 - RNA, 21 nt, Human
agggagguucucaacaaaaag

SEQ ID NO: 521569 - RNA, 21 nt, Human
auaaauggcaauaaauucuaa

SEQ ID NO: 521570 - RNA, 26 nt, Human
augacauuucagccuggccucuacag

SEQ ID NO: 521571 - RNA, 18 nt, Human
auuacuuacuucucucca

SEQ ID NO: 521572 - RNA, 25 nt, Human
caaacccucauacuuaaaaagaagc

SEQ ID NO: 521573 - RNA, 23 nt, Human
caacaaaaagggauguuucuaga

SEQ ID NO: 521574 - RNA, 20 nt, Human
caccucuggcuuaaggaucu

SEQ ID NO: 521575 - RNA, 23 nt, Human
cccauccugggcgacggcggcac

SEQ ID NO: 521576 - RNA, 23 nt, Human
ccuaucacaaggucauuugaaaa

SEQ ID NO: 521577 - RNA, 19 nt, Human
cgaugcccaccacccucgc

SEQ ID NO: 521578 - RNA, 22 nt, Human
cuagcaguggguucaacaacuc

SEQ ID NO: 521579 - RNA, 18 nt, Human
cucguccgcugcugggac

SEQ ID NO: 521580 - RNA, 19 nt, Human
cucuccagcuuaauccuag

SEQ ID NO: 521581 - RNA, 24 nt, Human
cugggcgacggcggcaccucccuc

SEQ ID NO: 521582 - RNA, 24 nt, Human
gaaaaauaaucccucccuuccuuc

SEQ ID NO: 521583 - RNA, 23 nt, Human
gaaaccucucccacugugaccaa

SEQ ID NO: 521584 - RNA, 23 nt, Human
gaagaggagagagaugguggugg

SEQ ID NO: 521585 - RNA, 21 nt, Human
gcccaccacccucgcgcggcg

SEQ ID NO: 521586 - RNA, 24 nt, Human
gcggcaccucccucguccgcugcu

SEQ ID NO: 521587 - RNA, 22 nt, Human
gcugcugggaccucgaugccca

SEQ ID NO: 521588 - RNA, 22 nt, Human
ggugcugaagacuucucaagcc

SEQ ID NO: 521589 - RNA, 22 nt, Human
guagaaaaauaaucccucccuu

SEQ ID NO: 521590 - RNA, 22 nt, Human
guggaggaauucuagcuguggu

SEQ ID NO: 521591 - RNA, 21 nt, Human
guugcauucuuuccugccaca

SEQ ID NO: 521592 - RNA, 22 nt, Human
uaaaaaggaauaaauggcaaua

SEQ ID NO: 521593 - RNA, 21 nt, Human
uacacaggucagagagguuua

SEQ ID NO: 521594 - RNA, 21 nt, Human
uacaguaccaugaaaccuaaa

SEQ ID NO: 521595 - RNA, 22 nt, Human
uacaucgcuucauucccagccc

SEQ ID NO: 521596 - RNA, 19 nt, Human
uaccaugaaaccuaaauua

SEQ ID NO: 521597 - RNA, 27 nt, Human
uaccaugaaaccuaaauuacuuacuuc

SEQ ID NO: 521598 - RNA, 21 nt, Human
uagaaggaaaaugauaaccac

SEQ ID NO: 521599 - RNA, 22 nt, Human
uagcaccuuuugggaggaggag

SEQ ID NO: 521600 - RNA, 22 nt, Human
uagguggaggaauucuagcugu

SEQ ID NO: 521601 - RNA, 21 nt, Human
uaugacauuucagccuggccu

SEQ ID NO: 521602 - RNA, 21 nt, Human
uaugacauuucagccuggccu

SEQ ID NO: 521603 - RNA, 21 nt, Human
uccaagaacauggacaaaacc

SEQ ID NO: 521604 - RNA, 22 nt, Human
uccaagaacauggacaaaacca

SEQ ID NO: 521605 - RNA, 27 nt, Human
ucccucguccgcugcugggaccucgau

SEQ ID NO: 521606 - RNA, 21 nt, Human
ucuuuugguucgaguguugcu

SEQ ID NO: 521607 - RNA, 19 nt, Human
ugaaaacggacucaggaca

SEQ ID NO: 521608 - RNA, 18 nt, Human
ugaaaccuaaauuacuua

SEQ ID NO: 521609 - RNA, 24 nt, Human
ugaagaggagagagaugguggugg

SEQ ID NO: 521610 - RNA, 21 nt, Human
ugaccaacaaacccucauacu

SEQ ID NO: 521611 - RNA, 22 nt, Human
uggacaaaaccauuucccuauc

SEQ ID NO: 521612 - RNA, 20 nt, Human
ugggaggaggaggucagaau

SEQ ID NO: 521613 - RNA, 27 nt, Human
ugggaggaggaggucagaaugcggugg

SEQ ID NO: 521614 - RNA, 22 nt, Human
uguugcauccuugcuuccuagc

SEQ ID NO: 521615 - RNA, 19 nt, Human
uucccagcccauccugggc

SEQ ID NO: 521616 - RNA, 23 nt, Human
uugaagaggagagagaugguggu

SEQ ID NO: 521617 - RNA, 27 nt, Human
uugaagaggagagagaugguggugguu

SEQ ID NO: 521618 - RNA, 19 nt, Human
uuguugcauccuugcuucc

SEQ ID NO: 521619 - RNA, 20 nt, Human
uuuuuguugcauucuuuccu

SEQ ID NO: 521620 - RNA, 21 nt, Human
uuuuuguugcauucuuuccug

SEQ ID NO: 521621 - RNA, 19 nt, Human
uuuuuuuuuuuuuuuuuaa

SEQ ID NO: 521622 - RNA, 18 nt, Human
aaaccauauccuuccuca

SEQ ID NO: 521623 - RNA, 18 nt, Human
acacaauccuugagaaac

SEQ ID NO: 521624 - RNA, 21 nt, Human
accccgcgaccaacucacaga

SEQ ID NO: 521625 - RNA, 22 nt, Human
accccgcgaccaacucacagac

SEQ ID NO: 521626 - RNA, 18 nt, Human
acccugggcaugagaacc

SEQ ID NO: 521627 - RNA, 18 nt, Human
acuugcuggcuggucacu

SEQ ID NO: 521628 - RNA, 19 nt, Human
acuugcuggcuggucacug

SEQ ID NO: 521629 - RNA, 19 nt, Human
agcagagcugcaccccgaa

SEQ ID NO: 521630 - RNA, 22 nt, Human
agcuacagaaacaaauugaaga

SEQ ID NO: 521631 - RNA, 19 nt, Human
agggaugucccaauaccug

SEQ ID NO: 521632 - RNA, 22 nt, Human
augcuacuaugguaacucagga

SEQ ID NO: 521633 - RNA, 18 nt, Human
auuuaggaaaaaacaaua

SEQ ID NO: 521634 - RNA, 19 nt, Human
caccuuggugcacuccggg

SEQ ID NO: 521635 - RNA, 19 nt, Human
cagagugucgauauaaaca

SEQ ID NO: 521636 - RNA, 23 nt, Human
cagucaggcuggaaagaaaggaa

SEQ ID NO: 521637 - RNA, 19 nt, Human
ccaacucacagaccccgcc

SEQ ID NO: 521638 - RNA, 22 nt, Human
ccagagugucgauauaaacacc

SEQ ID NO: 521639 - RNA, 21 nt, Human
ccccgcgaccaacucacagac

SEQ ID NO: 521640 - RNA, 24 nt, Human
ccccgcgaccaacucacagacccc

SEQ ID NO: 521641 - RNA, 21 nt, Human
cccgccaagaccccgcgacca

SEQ ID NO: 521642 - RNA, 23 nt, Human
cccgccaagaccccgcgaccaac

SEQ ID NO: 521643 - RNA, 21 nt, Human
cuccgggucccacguuuauuc

SEQ ID NO: 521644 - RNA, 18 nt, Human
cugcaccccgaaagcaac

SEQ ID NO: 521645 - RNA, 23 nt, Human
gaccccgcgaccaacucacagac

SEQ ID NO: 521646 - RNA, 20 nt, Human
gcugcaccccgaaagcaacg

SEQ ID NO: 521647 - RNA, 19 nt, Human
gucacuguggacccugggc

SEQ ID NO: 521648 - RNA, 21 nt, Human
uaaauucauccugcuaagugu

SEQ ID NO: 521649 - RNA, 19 nt, Human
uccccgccaagaccccgcg

SEQ ID NO: 521650 - RNA, 21 nt, Human
ugaagauaaauguggcucuuc

SEQ ID NO: 521651 - RNA, 19 nt, Human
ugcaccccgaaagcaacgg

SEQ ID NO: 521652 - RNA, 22 nt, Human
uggacccugggcaugagaaccu

SEQ ID NO: 521653 - RNA, 18 nt, Human
uuaguaauuuuuuuuuuc

SEQ ID NO: 521654 - RNA, 23 nt, Human
uugagaaaccauauccuuccuca

SEQ ID NO: 521655 - RNA, 19 nt, Human
uuuuuuuuucucaccuugg

SEQ ID NO: 521656 - RNA, 19 nt, Human
uuuuuuuuuucucaccuug

SEQ ID NO: 521657 - RNA, 21 nt, Human
aacaucuuuuacaaaauguau

SEQ ID NO: 521658 - RNA, 22 nt, Human
acuuuguuauagcaaccugaag

SEQ ID NO: 521659 - RNA, 22 nt, Human
agaagauggcagucugcaacca

SEQ ID NO: 521660 - RNA, 18 nt, Human
aggaauggacgcacucgu

SEQ ID NO: 521661 - RNA, 23 nt, Human
cacaugcaccagaguuauaagca

SEQ ID NO: 521662 - RNA, 18 nt, Human
cagaacccaaccaugcug

SEQ ID NO: 521663 - RNA, 25 nt, Human
cagaacccaaccaugcugguaaucu

SEQ ID NO: 521664 - RNA, 21 nt, Human
ccaaccaugcugguaaucuga

SEQ ID NO: 521665 - RNA, 21 nt, Human
ccaagacggcucucaccagaa

SEQ ID NO: 521666 - RNA, 19 nt, Human
ccucugcagcagucugugc

SEQ ID NO: 521667 - RNA, 24 nt, Human
cggucuccgggauggaaaucuggu

SEQ ID NO: 521668 - RNA, 21 nt, Human
cugcagcagucugugcaucag

SEQ ID NO: 521669 - RNA, 24 nt, Human
cuuaaaaaggucagaguccauaaa

SEQ ID NO: 521670 - RNA, 19 nt, Human
gcaaagccgucucuagaag

SEQ ID NO: 521671 - RNA, 19 nt, Human
gccaugugaggauacaaga

SEQ ID NO: 521672 - RNA, 20 nt, Human
gguacuuuguuauagcaacu

SEQ ID NO: 521673 - RNA, 20 nt, Human
gugaggauacaagaagaugg

SEQ ID NO: 521674 - RNA, 22 nt, Human
uaaucugaucucagacuuccag

SEQ ID NO: 521675 - RNA, 23 nt, Human
ucaaacagacuccagagaguucu

SEQ ID NO: 521676 - RNA, 23 nt, Human
ucucuuguccucuuuuggccaug

SEQ ID NO: 521677 - RNA, 30 nt, Human
ucugcaaccaagacggcucucaccagaacc

SEQ ID NO: 521678 - RNA, 22 nt, Human
ugaaauauuuugggacacacaa

SEQ ID NO: 521679 - RNA, 21 nt, Human
ugcaagcagaaaauuauauuu

SEQ ID NO: 521680 - RNA, 18 nt, Human
uggaaaucuggugcgagg

SEQ ID NO: 521681 - RNA, 21 nt, Human
ugggaaggaugccugguaaug

SEQ ID NO: 521682 - RNA, 20 nt, Human
ugggaggagccaugugaaga

SEQ ID NO: 521683 - RNA, 25 nt, Human
uguaagaaauaaauuucugucguuu

SEQ ID NO: 521684 - RNA, 20 nt, Human
uuuccaucacuuuuccaugg

SEQ ID NO: 521685 - RNA, 21 nt, Human
uuuguuauagcaaccugaagu

SEQ ID NO: 521686 - RNA, 19 nt, Human
uuuuugaugcauaaacauc

SEQ ID NO: 521687 - RNA, 24 nt, Human
aaaacacucucgaucccaguccag

SEQ ID NO: 521688 - RNA, 22 nt, Human
aaaagaagcgagaggcaaauga

SEQ ID NO: 521689 - RNA, 19 nt, Human
aaagcacaugaccaguuga

SEQ ID NO: 521690 - RNA, 23 nt, Human
aacuccuuaggccuccaggccuu

SEQ ID NO: 521691 - RNA, 22 nt, Human
aagagccagcaaagagucccgc

SEQ ID NO: 521692 - RNA, 22 nt, Human
aagagccagcaaggagucccgc

SEQ ID NO: 521693 - RNA, 20 nt, Human
aaggacaccacagucacugc

SEQ ID NO: 521694 - RNA, 18 nt, Human
acagacagcaccauggag

SEQ ID NO: 521695 - RNA, 20 nt, Human
acagcaccauggagccacgg

SEQ ID NO: 521696 - RNA, 21 nt, Human
acccgcagcgucucccacuuc

SEQ ID NO: 521697 - RNA, 23 nt, Human
acccuggaacguggcccuggagc

SEQ ID NO: 521698 - RNA, 21 nt, Human
agaaacggagugaaaccuggg

SEQ ID NO: 521699 - RNA, 18 nt, Human
agacaggucugagaggga

SEQ ID NO: 521700 - RNA, 22 nt, Human
agccacugaggagccaacaucc

SEQ ID NO: 521701 - RNA, 25 nt, Human
agccagucuguguccucauuuacac

SEQ ID NO: 521702 - RNA, 20 nt, Human
aggaggccaaaagacacggg

SEQ ID NO: 521703 - RNA, 19 nt, Human
aggaggccccgccgcuauc

SEQ ID NO: 521704 - RNA, 18 nt, Human
aggcgauggaccacauag

SEQ ID NO: 521705 - RNA, 18 nt, Human
agggcgccccgcggcggc

SEQ ID NO: 521706 - RNA, 24 nt, Human
augaggcaucaggaguguuuggaa

SEQ ID NO: 521707 - RNA, 21 nt, Human
auggaccacauagucucugac

SEQ ID NO: 521708 - RNA, 19 nt, Human
caaacccgacccuggaacg

SEQ ID NO: 521709 - RNA, 18 nt, Human
caaggacaccacagucac

SEQ ID NO: 521710 - RNA, 21 nt, Human
caaggacaccacagucacugc

SEQ ID NO: 521711 - RNA, 24 nt, Human
cacaaaagcuuuucagucacagcc

SEQ ID NO: 521712 - RNA, 18 nt, Human
cacagucacugcgaccaa

SEQ ID NO: 521713 - RNA, 19 nt, Human
caccacagucacugcgacc

SEQ ID NO: 521714 - RNA, 19 nt, Human
caccauggagccacggaua

SEQ ID NO: 521715 - RNA, 18 nt, Human
caccuuucgccuccuucc

SEQ ID NO: 521716 - RNA, 22 nt, Human
cacucucgaucccaguccaggg

SEQ ID NO: 521717 - RNA, 24 nt, Human
cacugccacaccucccuaaggaag

SEQ ID NO: 521718 - RNA, 20 nt, Human
cagcaccauggagccacgga

SEQ ID NO: 521719 - RNA, 25 nt, Human
cagcccccaaaaugguggucgaaaa

SEQ ID NO: 521720 - RNA, 20 nt, Human
cagcgccauggagccacgga

SEQ ID NO: 521721 - RNA, 21 nt, Human
caguccagggaggcacccaga

SEQ ID NO: 521722 - RNA, 23 nt, Human
ccaaaagacacggggguggggca

SEQ ID NO: 521723 - RNA, 21 nt, Human
ccaacauccaugguaaaacac

SEQ ID NO: 521724 - RNA, 21 nt, Human
ccacagccacaucuccaggca

SEQ ID NO: 521725 - RNA, 20 nt, Human
cccacagcccggcgcggcca

SEQ ID NO: 521726 - RNA, 28 nt, Human
cccacugcacccugacagcugacaaauc

SEQ ID NO: 521727 - RNA, 20 nt, Human
cccagggcgccccgcggcgg

SEQ ID NO: 521728 - RNA, 21 nt, Human
ccccaaaaugguggucgaaaa

SEQ ID NO: 521729 - RNA, 23 nt, Human
ccccaaaaugguggucgaaaaga

SEQ ID NO: 521730 - RNA, 20 nt, Human
ccccacgcauccggugccag

SEQ ID NO: 521731 - RNA, 20 nt, Human
ccccgugagugccucagccc

SEQ ID NO: 521732 - RNA, 22 nt, Human
ccccuuguuccaucuuuccugu

SEQ ID NO: 521733 - RNA, 30 nt, Human
ccccuuguuccaucuuuccugucucuaauu

SEQ ID NO: 521734 - RNA, 23 nt, Human
cccgcccaucccaaggccugggc

SEQ ID NO: 521735 - RNA, 22 nt, Human
cccuuguuccaucuuuccuguc

SEQ ID NO: 521736 - RNA, 22 nt, Human
ccgcccaucccaaggccugggc

SEQ ID NO: 521737 - RNA, 22 nt, Human
ccgggagaugggagauccaugg

SEQ ID NO: 521738 - RNA, 20 nt, Human
ccucaaagacaggucugaga

SEQ ID NO: 521739 - RNA, 22 nt, Human
ccugcagugcccacagcccggc

SEQ ID NO: 521740 - RNA, 24 nt, Human
ccugcuaucucagccuccagagua

SEQ ID NO: 521741 - RNA, 20 nt, Human
ccuguauggccaccgugagu

SEQ ID NO: 521742 - RNA, 18 nt, Human
ccuuaggccuccaggccu

SEQ ID NO: 521743 - RNA, 19 nt, Human
cgcaggcgcuucuguuugg

SEQ ID NO: 521744 - RNA, 19 nt, Human
cgccauggagccacggaua

SEQ ID NO: 521745 - RNA, 24 nt, Human
cgccuuguagagccgcacaaaagc

SEQ ID NO: 521746 - RNA, 21 nt, Human
cgcggccaagccuucccgccc

SEQ ID NO: 521747 - RNA, 18 nt, Human
cgcggccaggccuucccg

SEQ ID NO: 521748 - RNA, 21 nt, Human
cuccaccucaauguccgagau

SEQ ID NO: 521749 - RNA, 21 nt, Human
cuccagaguagccugcuucuc

SEQ ID NO: 521750 - RNA, 18 nt, Human
cuccuuaggccuccaggc

SEQ ID NO: 521751 - RNA, 21 nt, Human
cucguacccaccacggguacc

SEQ ID NO: 521752 - RNA, 21 nt, Human
cucucguacccaccacgggua

SEQ ID NO: 521753 - RNA, 22 nt, Human
cugacacaugagagauagggcu

SEQ ID NO: 521754 - RNA, 25 nt, Human
cuuccacaguuguuucuccaccaca

SEQ ID NO: 521755 - RNA, 21 nt, Human
cuuccacugccacaccucccu

SEQ ID NO: 521756 - RNA, 18 nt, Human
gaaaagaagcgagaggca

SEQ ID NO: 521757 - RNA, 20 nt, Human
gaagcccucucguacccacc

SEQ ID NO: 521758 - RNA, 23 nt, Human
gacaccacagucacugcgaccaa

SEQ ID NO: 521759 - RNA, 19 nt, Human
gaccaagccagucuguguc

SEQ ID NO: 521760 - RNA, 19 nt, Human
gacuugcucuccccugcua

SEQ ID NO: 521761 - RNA, 18 nt, Human
gagcaucucaaggacacc

SEQ ID NO: 521762 - RNA, 19 nt, Human
gagggaggaaaacugaugg

SEQ ID NO: 521763 - RNA, 18 nt, Human
gauauggggguggagaag

SEQ ID NO: 521764 - RNA, 21 nt, Human
gcaacagaaaauaggaggcca

SEQ ID NO: 521765 - RNA, 21 nt, Human
gcaggaggcaggggcccagag

SEQ ID NO: 521766 - RNA, 19 nt, Human
gcccaggacccgcagcguc

SEQ ID NO: 521767 - RNA, 21 nt, Human
gcgaccaagccagucuguguc

SEQ ID NO: 521768 - RNA, 22 nt, Human
ggaaggcaacagaaaauaggag

SEQ ID NO: 521769 - RNA, 18 nt, Human
ggaggugggauacacaug

SEQ ID NO: 521770 - RNA, 22 nt, Human
ggaguguuuggaaaggggccga

SEQ ID NO: 521771 - RNA, 22 nt, Human
gggcuccgacuguguagaaacg

SEQ ID NO: 521772 - RNA, 24 nt, Human
gguggucgaaaagaagcgagaggc

SEQ ID NO: 521773 - RNA, 24 nt, Human
gucacagccacugaggagccaaca

SEQ ID NO: 521774 - RNA, 18 nt, Human
gucucccacuucccggag

SEQ ID NO: 521775 - RNA, 23 nt, Human
guggggcagccaggcagucgaag

SEQ ID NO: 521776 - RNA, 23 nt, Human
uaucccagggcgccccgcggcgg

SEQ ID NO: 521777 - RNA, 24 nt, Human
uaucucaaucuccucauucccaga

SEQ ID NO: 521778 - RNA, 19 nt, Human
uauggggguggagaagggu

SEQ ID NO: 521779 - RNA, 19 nt, Human
ucacagaucucuccaccuu

SEQ ID NO: 521780 - RNA, 27 nt, Human
ucagccuccagaguagccugcuucucu

SEQ ID NO: 521781 - RNA, 23 nt, Human
ucagcucaugucuccucacuccc

SEQ ID NO: 521782 - RNA, 22 nt, Human
ucagggagaugaugggcaucag

SEQ ID NO: 521783 - RNA, 22 nt, Human
uccaccaaacccgacccuggaa

SEQ ID NO: 521784 - RNA, 20 nt, Human
uccccacgcauccggugcca

SEQ ID NO: 521785 - RNA, 18 nt, Human
ucccuaaggaaggccucc

SEQ ID NO: 521786 - RNA, 24 nt, Human
ucccuaaggaaggccucccggcuc

SEQ ID NO: 521787 - RNA, 18 nt, Human
uccucauucccagacuuc

SEQ ID NO: 521788 - RNA, 23 nt, Human
uccugcagugcccacagcccggc

SEQ ID NO: 521789 - RNA, 20 nt, Human
ucgaaaagaagcgagaggca

SEQ ID NO: 521790 - RNA, 22 nt, Human
ucgaaaagaagcgagaggcaaa

SEQ ID NO: 521791 - RNA, 18 nt, Human
ucgaagcuguguguggcc

SEQ ID NO: 521792 - RNA, 21 nt, Human
ucucaaggacaccacagucac

SEQ ID NO: 521793 - RNA, 23 nt, Human
ucuccaggcagcgucucuggccu

SEQ ID NO: 521794 - RNA, 24 nt, Human
ucucucgcaggcgcuucuguuugg

SEQ ID NO: 521795 - RNA, 23 nt, Human
ugaaccagggacccacagcacuu

SEQ ID NO: 521796 - RNA, 24 nt, Human
ugaagaagcccucucguacccacc

SEQ ID NO: 521797 - RNA, 21 nt, Human
ugagagggaggaaaacugaug

SEQ ID NO: 521798 - RNA, 18 nt, Human
ugaggaauccaccaaacc

SEQ ID NO: 521799 - RNA, 21 nt, Human
ugcaggaggcaggggcccaga

SEQ ID NO: 521800 - RNA, 23 nt, Human
ugccucagcccccaaaauggugg

SEQ ID NO: 521801 - RNA, 20 nt, Human
uggaaaggggccgagaucug

SEQ ID NO: 521802 - RNA, 19 nt, Human
uggcccuggagccgcgcgg

SEQ ID NO: 521803 - RNA, 23 nt, Human
ugggcccaggacccgcagcgucu

SEQ ID NO: 521804 - RNA, 23 nt, Human
uggggguggagaagggucacucc

SEQ ID NO: 521805 - RNA, 18 nt, Human
uuccaucuuuccugucuc

SEQ ID NO: 521806 - RNA, 21 nt, Human
uucugguuugaagaagcccuc

SEQ ID NO: 521807 - RNA, 21 nt, Human
uucugguuugaagaagcccuc

SEQ ID NO: 521808 - RNA, 18 nt, Human
uuuaucucaaucuccuca

SEQ ID NO: 521809 - RNA, 23 nt, Human
uuugaagaagcccucucguaccc

SEQ ID NO: 521810 - RNA, 18 nt, Human
aaacauuaucuguaaaac

SEQ ID NO: 521811 - RNA, 19 nt, Human
aaauggcauuauacaaaag

SEQ ID NO: 521812 - RNA, 22 nt, Human
acaaaagcucaaacauccuuca

SEQ ID NO: 521813 - RNA, 23 nt, Human
acaaacugguuuggccacaagga

SEQ ID NO: 521814 - RNA, 20 nt, Human
acugguuuggccacaaggaa

SEQ ID NO: 521815 - RNA, 26 nt, Human
agagaugaaggcaaacuuuggaggaa

SEQ ID NO: 521816 - RNA, 24 nt, Human
agaugaaggcaaacuuuggaggaa

SEQ ID NO: 521817 - RNA, 18 nt, Human
aggaaaagaaaaaacauu

SEQ ID NO: 521818 - RNA, 19 nt, Human
agugugcaaacuagaacca

SEQ ID NO: 521819 - RNA, 19 nt, Human
agugugcaaacuagaaccg

SEQ ID NO: 521820 - RNA, 19 nt, Human
auacucauuuaagauacag

SEQ ID NO: 521821 - RNA, 25 nt, Human
caaacuagaaccaguuauacuuuca

SEQ ID NO: 521822 - RNA, 24 nt, Human
cacaaggaaaagaaaaaacauuuc

SEQ ID NO: 521823 - RNA, 24 nt, Human
cuuucaucacuucacagaacacaa

SEQ ID NO: 521824 - RNA, 25 nt, Human
ggugcaucaagagaugucggggccc

SEQ ID NO: 521825 - RNA, 22 nt, Human
guaacauuuauacauagauuaa

SEQ ID NO: 521826 - RNA, 24 nt, Human
guacaacuguauagguauaaauaa

SEQ ID NO: 521827 - RNA, 18 nt, Human
uaaaacugcagguauaaa

SEQ ID NO: 521828 - RNA, 23 nt, Human
uaaaacugcagguauaaauggca

SEQ ID NO: 521829 - RNA, 22 nt, Human
uaaaagaaacaguacaacugua

SEQ ID NO: 521830 - RNA, 23 nt, Human
uaaaauccacauuaauaacucag

SEQ ID NO: 521831 - RNA, 23 nt, Human
uacaguuaccucuacuuuaaucc

SEQ ID NO: 521832 - RNA, 19 nt, Human
uacauagauuaacagaaag

SEQ ID NO: 521833 - RNA, 24 nt, Human
uaccucuacuuuaauccccagcuc

SEQ ID NO: 521834 - RNA, 21 nt, Human
uagcagaugaauauaaucaga

SEQ ID NO: 521835 - RNA, 24 nt, Human
uccaaacuguagaggagagaugaa

SEQ ID NO: 521836 - RNA, 23 nt, Human
uccuucaaaacuuggacuauuga

SEQ ID NO: 521837 - RNA, 20 nt, Human
ugaauauaaucagauuaaca

SEQ ID NO: 521838 - RNA, 19 nt, Human
ugcaccaucaccuccaaac

SEQ ID NO: 521839 - RNA, 18 nt, Human
ugcaccaucaccuccaac

SEQ ID NO: 521840 - RNA, 21 nt, Human
ugcugcaccaucaccuccaaa

SEQ ID NO: 521841 - RNA, 24 nt, Human
ugcuuuaaaagaaacaguacaacu

SEQ ID NO: 521842 - RNA, 23 nt, Human
uguggugcaucaagagauguucc

SEQ ID NO: 521843 - RNA, 18 nt, Human
uuaaaagaaacaguacaa

SEQ ID NO: 521844 - RNA, 18 nt, Human
uuaacagaaagguaaacu

SEQ ID NO: 521845 - RNA, 21 nt, Human
uuaccucuacuuuaaucccca

SEQ ID NO: 521846 - RNA, 19 nt, Human
uuggccacaaggaaaagaa

SEQ ID NO: 521847 - RNA, 24 nt, Human
uuuuaaaauccacauuaauaacuc

SEQ ID NO: 521848 - RNA, 18 nt, Human
uuuuuuuuuuuuuuucug

SEQ ID NO: 521849 - RNA, 26 nt, Human
uuuuuuuuuuuuuuuuucugauuuuu

SEQ ID NO: 521850 - RNA, 23 nt, Human
aaaaaagagccacaugcaaagaa

SEQ ID NO: 521851 - RNA, 19 nt, Human
aaaagagaaccccagagac

SEQ ID NO: 521852 - RNA, 23 nt, Human
aaaggccuucagagaaaacagac

SEQ ID NO: 521853 - RNA, 22 nt, Human
aagagaagguaaguuuugacaa

SEQ ID NO: 521854 - RNA, 19 nt, Human
aagagggaauucugccucc

SEQ ID NO: 521855 - RNA, 21 nt, Human
acagacacuucuccauaagca

SEQ ID NO: 521856 - RNA, 20 nt, Human
acauugcuuccugucagccu

SEQ ID NO: 521857 - RNA, 18 nt, Human
acuuucaguagggcagau

SEQ ID NO: 521858 - RNA, 18 nt, Human
agaaaagagaaccccaga

SEQ ID NO: 521859 - RNA, 20 nt, Human
agcaccuccccugaccaucu

SEQ ID NO: 521860 - RNA, 21 nt, Human
agcccagacugagggaugggc

SEQ ID NO: 521861 - RNA, 23 nt, Human
aggacaacuguagaacuaugauc

SEQ ID NO: 521862 - RNA, 24 nt, Human
aggcauuuguucacauugcuuccu

SEQ ID NO: 521863 - RNA, 23 nt, Human
agucugagcuggggguguugguu

SEQ ID NO: 521864 - RNA, 23 nt, Human
augcagcuaaaaaagagccacau

SEQ ID NO: 521865 - RNA, 19 nt, Human
caaaaggaacuucaggauc

SEQ ID NO: 521866 - RNA, 18 nt, Human
caauccucaaccagccuc

SEQ ID NO: 521867 - RNA, 21 nt, Human
cacauugcuuccugucagccu

SEQ ID NO: 521868 - RNA, 21 nt, Human
caccaaaauaucuuuuucuuc

SEQ ID NO: 521869 - RNA, 18 nt, Human
cagcccagacugagggau

SEQ ID NO: 521870 - RNA, 24 nt, Human
cagccuccagccuucucuccuucu

SEQ ID NO: 521871 - RNA, 25 nt, Human
cauccacaguuauugcuuugcuacu

SEQ ID NO: 521872 - RNA, 18 nt, Human
caucucauuagcacccuc

SEQ ID NO: 521873 - RNA, 20 nt, Human
ccacaugcaaagaaagagug

SEQ ID NO: 521874 - RNA, 19 nt, Human
ccaggacaacuguagaacu

SEQ ID NO: 521875 - RNA, 20 nt, Human
cccugggaaagagggaauuc

SEQ ID NO: 521876 - RNA, 18 nt, Human
ccuccaaccacaguauuu

SEQ ID NO: 521877 - RNA, 24 nt, Human
ccuucagagaaaacagacuggaau

SEQ ID NO: 521878 - RNA, 20 nt, Human
cuagugccaggacaacugua

SEQ ID NO: 521879 - RNA, 19 nt, Human
cucuuuccggggugcccag

SEQ ID NO: 521880 - RNA, 21 nt, Human
cuuauggaagccccauuggcc

SEQ ID NO: 521881 - RNA, 19 nt, Human
cuugauacccucaguagca

SEQ ID NO: 521882 - RNA, 19 nt, Human
gaaaucuccuccaaccaca

SEQ ID NO: 521883 - RNA, 19 nt, Human
gaccugguuucuccaaacu

SEQ ID NO: 521884 - RNA, 24 nt, Human
gaggcuuuuuuacuuaacaaguua

SEQ ID NO: 521885 - RNA, 21 nt, Human
gcaaaaggaacuucaggauca

SEQ ID NO: 521886 - RNA, 19 nt, Human
gcaucuuuggcaaaaggaa

SEQ ID NO: 521887 - RNA, 26 nt, Human
gccacaugcaaagaaagagugggauu

SEQ ID NO: 521888 - RNA, 21 nt, Human
gcuugagaccccugauugcca

SEQ ID NO: 521889 - RNA, 22 nt, Human
ggagaauccagcccagacugag

SEQ ID NO: 521890 - RNA, 18 nt, Human
ggcagagucugagcuggg

SEQ ID NO: 521891 - RNA, 19 nt, Human
ggcaucuuguauuugugga

SEQ ID NO: 521892 - RNA, 18 nt, Human
uaaaaaagagccacaugc

SEQ ID NO: 521893 - RNA, 19 nt, Human
uaaaaaagagccacaugca

SEQ ID NO: 521894 - RNA, 22 nt, Human
uaaaccucuaagucaggacccu

SEQ ID NO: 521895 - RNA, 24 nt, Human
uaaauguaaauguaaacaagguca

SEQ ID NO: 521896 - RNA, 19 nt, Human
uacccucaguagcagauuu

SEQ ID NO: 521897 - RNA, 20 nt, Human
uacuugauacccucaguagc

SEQ ID NO: 521898 - RNA, 22 nt, Human
uagcagauuuaauugcccauau

SEQ ID NO: 521899 - RNA, 18 nt, Human
uauaaaagaaugaugaaa

SEQ ID NO: 521900 - RNA, 20 nt, Human
uauggaagccccauuggcca

SEQ ID NO: 521901 - RNA, 25 nt, Human
uccaaccacaguauuuccacgauga

SEQ ID NO: 521902 - RNA, 19 nt, Human
uccagcccagacugaggga

SEQ ID NO: 521903 - RNA, 21 nt, Human
uccccugaccaucuguugccc

SEQ ID NO: 521904 - RNA, 20 nt, Human
uccucaaccagccuccccgc

SEQ ID NO: 521905 - RNA, 18 nt, Human
uccugucagccuccagcc

SEQ ID NO: 521906 - RNA, 23 nt, Human
ucugcagccauaaaauggccauc

SEQ ID NO: 521907 - RNA, 19 nt, Human
ucugucuccugcucuucuc

SEQ ID NO: 521908 - RNA, 18 nt, Human
ugaaacaucacagcauuc

SEQ ID NO: 521909 - RNA, 19 nt, Human
ugaaaugcacauuuucaug

SEQ ID NO: 521910 - RNA, 22 nt, Human
ugaaaugcacauuuucaugaaa

SEQ ID NO: 521911 - RNA, 23 nt, Human
ugacaauaaauguaaauguaaac

SEQ ID NO: 521912 - RNA, 19 nt, Human
ugagaccccugauugccac

SEQ ID NO: 521913 - RNA, 20 nt, Human
ugcccugcagauuuuggacu

SEQ ID NO: 521914 - RNA, 22 nt, Human
uggaauugguuugaaaagagcc

SEQ ID NO: 521915 - RNA, 21 nt, Human
uggcaaaaggaacuucaggau

SEQ ID NO: 521916 - RNA, 19 nt, Human
ugucagauuggcuaggcca

SEQ ID NO: 521917 - RNA, 23 nt, Human
ugucaugaguucuagugccagga

SEQ ID NO: 521918 - RNA, 19 nt, Human
uugccacucuuauggaagc

SEQ ID NO: 521919 - RNA, 21 nt, Human
uugugaauagaaaagagaacc

SEQ ID NO: 521920 - RNA, 22 nt, Human
uuguggaccacaggguauagag

SEQ ID NO: 521921 - RNA, 22 nt, Human
uuuacauacuuauuauuccaaa

SEQ ID NO: 521922 - RNA, 24 nt, Human
uuuccaugugugugggggccucau

SEQ ID NO: 521923 - RNA, 22 nt, Human
uuuugcaaguuaagucaccuac

SEQ ID NO: 521924 - RNA, 18 nt, Human
aaacucccccacauuccc

SEQ ID NO: 521925 - RNA, 20 nt, Human
aaccuucuggccuuccaaga

SEQ ID NO: 521926 - RNA, 21 nt, Human
acaacagagagcauagcaagc

SEQ ID NO: 521927 - RNA, 23 nt, Human
acagagagcauagcaagcaacaa

SEQ ID NO: 521928 - RNA, 23 nt, Human
acagggagaaugcuuccccgccu

SEQ ID NO: 521929 - RNA, 24 nt, Human
accucaucuccaccugucucccca

SEQ ID NO: 521930 - RNA, 24 nt, Human
accuguggguaauuaacucccccu

SEQ ID NO: 521931 - RNA, 21 nt, Human
acugcugcagaugacccaggu

SEQ ID NO: 521932 - RNA, 21 nt, Human
acuggggggcgggggccccug

SEQ ID NO: 521933 - RNA, 19 nt, Human
agaaugcuuccccgccucu

SEQ ID NO: 521934 - RNA, 20 nt, Human
agagagggaggcagggugcu

SEQ ID NO: 521935 - RNA, 22 nt, Human
agcaggguucugggcagcugcc

SEQ ID NO: 521936 - RNA, 22 nt, Human
agccugggugcuccuggagguu

SEQ ID NO: 521937 - RNA, 23 nt, Human
agcuaugcaaaccuucuggccuu

SEQ ID NO: 521938 - RNA, 22 nt, Human
aggaccacaugaguaaacaagc

SEQ ID NO: 521939 - RNA, 24 nt, Human
aggcagggugcugugggagcccuc

SEQ ID NO: 521940 - RNA, 21 nt, Human
aggcugcugguucugcuggcu

SEQ ID NO: 521941 - RNA, 19 nt, Human
agggagaggcggggauggg

SEQ ID NO: 521942 - RNA, 21 nt, Human
agggagaggcggggauggggg

SEQ ID NO: 521943 - RNA, 18 nt, Human
aucuucaccucaucucca

SEQ ID NO: 521944 - RNA, 18 nt, Human
caauguacaacagagagc

SEQ ID NO: 521945 - RNA, 22 nt, Human
caccucauuguucucaucaguc

SEQ ID NO: 521946 - RNA, 23 nt, Human
cagccaaauccuuuacugaagcu

SEQ ID NO: 521947 - RNA, 19 nt, Human
cagcuccaccuguggguaa

SEQ ID NO: 521948 - RNA, 19 nt, Human
cccgcaacucuuggcagcc

SEQ ID NO: 521949 - RNA, 24 nt, Human
ccuaccacacagcugugugacuga

SEQ ID NO: 521950 - RNA, 21 nt, Human
ccuccgauaucacagggcagg

SEQ ID NO: 521951 - RNA, 18 nt, Human
ccugaggcugcugguucu

SEQ ID NO: 521952 - RNA, 18 nt, Human
cgauaucacagggcaggg

SEQ ID NO: 521953 - RNA, 20 nt, Human
cgggggccccuggagugggc

SEQ ID NO: 521954 - RNA, 21 nt, Human
cgggggccccuggagugggcu

SEQ ID NO: 521955 - RNA, 23 nt, Human
cguccgaggacacugcauuaucc

SEQ ID NO: 521956 - RNA, 22 nt, Human
cucaucuccaccugucucccca

SEQ ID NO: 521957 - RNA, 19 nt, Human
cucccuuagggcucccugc

SEQ ID NO: 521958 - RNA, 23 nt, Human
cuccgauaucacagggcagggag

SEQ ID NO: 521959 - RNA, 22 nt, Human
cuccugggucucccgcaacucu

SEQ ID NO: 521960 - RNA, 18 nt, Human
cucuuauuccggcuuugc

SEQ ID NO: 521961 - RNA, 21 nt, Human
cucuuggcagcccaucuuggc

SEQ ID NO: 521962 - RNA, 19 nt, Human
cuggagguucugcaucuca

SEQ ID NO: 521963 - RNA, 20 nt, Human
cuggcucuucagcuccaccu

SEQ ID NO: 521964 - RNA, 18 nt, Human
cuuucuuuuccuuuuucu

SEQ ID NO: 521965 - RNA, 19 nt, Human
gaccuguaacugcucccuu

SEQ ID NO: 521966 - RNA, 20 nt, Human
gagagcauagcaagcaacaa

SEQ ID NO: 521967 - RNA, 24 nt, Human
gagccuccagccccacuuccccag

SEQ ID NO: 521968 - RNA, 22 nt, Human
gcaaaccuucuggccuuccaag

SEQ ID NO: 521969 - RNA, 19 nt, Human
gcaagggcugcugcccaag

SEQ ID NO: 521970 - RNA, 23 nt, Human
gcacucuuucuuuuccuuuuucu

SEQ ID NO: 521971 - RNA, 24 nt, Human
gcgggggccccuggagugggcuca

SEQ ID NO: 521972 - RNA, 23 nt, Human
gcuggaauccaaagaggaccugg

SEQ ID NO: 521973 - RNA, 24 nt, Human
ggaggcagggugcugugggagccc

SEQ ID NO: 521974 - RNA, 24 nt, Human
ggcacucuuucuuuuccuuuuucu

SEQ ID NO: 521975 - RNA, 24 nt, Human
gggaaggggugguagggacauggu

SEQ ID NO: 521976 - RNA, 21 nt, Human
gguaggggcagagccuccagc

SEQ ID NO: 521977 - RNA, 18 nt, Human
guugccguccgaggacac

SEQ ID NO: 521978 - RNA, 21 nt, Human
uaaacucccccacauucccau

SEQ ID NO: 521979 - RNA, 21 nt, Human
uaacuucaucuuacaauuuuc

SEQ ID NO: 521980 - RNA, 20 nt, Human
uacaaaaaaggaaugcaagg

SEQ ID NO: 521981 - RNA, 25 nt, Human
uacaacagagagcauagcaagcaac

SEQ ID NO: 521982 - RNA, 26 nt, Human
uaccacacagcugugugacugagcca

SEQ ID NO: 521983 - RNA, 20 nt, Human
uacccuggcuugucaguagc

SEQ ID NO: 521984 - RNA, 24 nt, Human
uacugguccugcugcugcugccgu

SEQ ID NO: 521985 - RNA, 22 nt, Human
uacugugaggguaaaggguuga

SEQ ID NO: 521986 - RNA, 18 nt, Human
uagcuuccaggugcuccu

SEQ ID NO: 521987 - RNA, 20 nt, Human
ucagcaggguucugggcagc

SEQ ID NO: 521988 - RNA, 21 nt, Human
ucagcaggguucugggcagcu

SEQ ID NO: 521989 - RNA, 21 nt, Human
ucauucagccuccucaguugc

SEQ ID NO: 521990 - RNA, 22 nt, Human
uccaggugcuccugggucuccc

SEQ ID NO: 521991 - RNA, 20 nt, Human
uccccacauuagacaggggu

SEQ ID NO: 521992 - RNA, 25 nt, Human
uccccacauuagacaggggucuuau

SEQ ID NO: 521993 - RNA, 26 nt, Human
uccccgccucuccuugugcagacucc

SEQ ID NO: 521994 - RNA, 20 nt, Human
uccugggucucccgcaacuc

SEQ ID NO: 521995 - RNA, 22 nt, Human
uccugggucucccgcaacucuu

SEQ ID NO: 521996 - RNA, 20 nt, Human
ucuccaccugucuccccaca

SEQ ID NO: 521997 - RNA, 22 nt, Human
ucuggagugaauggugucugug

SEQ ID NO: 521998 - RNA, 19 nt, Human
ucuggccuuccaagaaggu

SEQ ID NO: 521999 - RNA, 20 nt, Human
ucugucagguuuccuccgaa

SEQ ID NO: 522000 - RNA, 20 nt, Human
ucuuucuuuuccuuuuucuu

SEQ ID NO: 522001 - RNA, 21 nt, Human
ucuuuggagagagggaggcaa

SEQ ID NO: 522002 - RNA, 25 nt, Human
ugacccagguacugguccugcugcu

SEQ ID NO: 522003 - RNA, 23 nt, Human
ugagccuccuggcucuucagcuc

SEQ ID NO: 522004 - RNA, 21 nt, Human
ugauagguggccacauacugc

SEQ ID NO: 522005 - RNA, 20 nt, Human
ugauggugaucuucaccuca

SEQ ID NO: 522006 - RNA, 20 nt, Human
ugcagcuccuccuccucaga

SEQ ID NO: 522007 - RNA, 18 nt, Human
ugccugaggacucuacuc

SEQ ID NO: 522008 - RNA, 19 nt, Human
ugcuugcuacugugagggu

SEQ ID NO: 522009 - RNA, 18 nt, Human
uggaauccaaagaggacc

SEQ ID NO: 522010 - RNA, 18 nt, Human
uggcuugucaguagcccc

SEQ ID NO: 522011 - RNA, 21 nt, Human
ugggaaggggugguagggaca

SEQ ID NO: 522012 - RNA, 24 nt, Human
ugggaaggggugguagggacaugg

SEQ ID NO: 522013 - RNA, 27 nt, Human
ugggaaggggugguagggacaugguag

SEQ ID NO: 522014 - RNA, 18 nt, Human
uggggccacaucagcaug

SEQ ID NO: 522015 - RNA, 22 nt, Human
uggggggcgggggccccuggag

SEQ ID NO: 522016 - RNA, 26 nt, Human
ugguacaaaaaaggaaugcaagggcu

SEQ ID NO: 522017 - RNA, 19 nt, Human
uguaaacaaggucgcacua

SEQ ID NO: 522018 - RNA, 21 nt, Human
ugugacugagccaggggaggu

SEQ ID NO: 522019 - RNA, 20 nt, Human
ugugcagacuccccacugcu

SEQ ID NO: 522020 - RNA, 24 nt, Human
ugugcagcuccuccuccucagagg

SEQ ID NO: 522021 - RNA, 19 nt, Human
uuagaugauggugaucuuc

SEQ ID NO: 522022 - RNA, 24 nt, Human
uuagggcucccugcuuuugguggc

SEQ ID NO: 522023 - RNA, 19 nt, Human
uucauuggagaguacaggu

SEQ ID NO: 522024 - RNA, 21 nt, Human
uucccauguuauuugcucuau

SEQ ID NO: 522025 - RNA, 21 nt, Human
uucugcugcugcagccggucc

SEQ ID NO: 522026 - RNA, 22 nt, Human
uucuuggccauggccaauuugc

SEQ ID NO: 522027 - RNA, 21 nt, Human
uugcaugaucugcugcucagu

SEQ ID NO: 522028 - RNA, 22 nt, Human
uugcugacaguggccggcuuuu

SEQ ID NO: 522029 - RNA, 25 nt, Human
uuucuagguuggguccuagucacgu

SEQ ID NO: 522030 - RNA, 25 nt, Human
aggcuaaaaaggaauuugugacuga

SEQ ID NO: 522031 - RNA, 19 nt, Human
augucgcaggccccauugc

SEQ ID NO: 522032 - RNA, 18 nt, Human
cgccuggagccuugaaac

SEQ ID NO: 522033 - RNA, 22 nt, Human
cugaccaaauuagauaccuccc

SEQ ID NO: 522034 - RNA, 18 nt, Human
gagcaagaguuggggaug

SEQ ID NO: 522035 - RNA, 21 nt, Human
gagugaauuuuuucuugguga

SEQ ID NO: 522036 - RNA, 21 nt, Human
ggggagcaagaguuggggaug

SEQ ID NO: 522037 - RNA, 20 nt, Human
ggucaguggugaugguggcc

SEQ ID NO: 522038 - RNA, 21 nt, Human
ggugacuuguuuuucucuagg

SEQ ID NO: 522039 - RNA, 18 nt, Human
ucaguggugaugguggcu

SEQ ID NO: 522040 - RNA, 24 nt, Human
ucaguggugaugguggcuggaggc

SEQ ID NO: 522041 - RNA, 28 nt, Human
ucauuguugcaccggacacuuuucaacu

SEQ ID NO: 522042 - RNA, 19 nt, Human
ucccugaaaaagacagugc

SEQ ID NO: 522043 - RNA, 22 nt, Human
ucccugaaaaagacagugccuu

SEQ ID NO: 522044 - RNA, 18 nt, Human
ucgcaggccccauugcuc

SEQ ID NO: 522045 - RNA, 20 nt, Human
ucgcaggccccauugcucau

SEQ ID NO: 522046 - RNA, 24 nt, Human
ugagagaaaauacuuuuccucuac

SEQ ID NO: 522047 - RNA, 21 nt, Human
ugagggggacugacuggggau

SEQ ID NO: 522048 - RNA, 20 nt, Human
ugcugagggggacugacugg

SEQ ID NO: 522049 - RNA, 22 nt, Human
uuguugcaccggacacuuuuca

SEQ ID NO: 522050 - RNA, 20 nt, Human
uuucuuggggagcaagaguu

SEQ ID NO: 522051 - RNA, 23 nt, Human
aaacacccccucggacaggagcc

SEQ ID NO: 522052 - RNA, 18 nt, Human
aagcagcagcaaagccaa

SEQ ID NO: 522053 - RNA, 21 nt, Human
aagcagcagcaaagccaagcc

SEQ ID NO: 522054 - RNA, 22 nt, Human
aaggagcagaagggagcggggg

SEQ ID NO: 522055 - RNA, 19 nt, Human
agcgguccuggcccgacac

SEQ ID NO: 522056 - RNA, 24 nt, Human
agcuggggccccugugcggcugcc

SEQ ID NO: 522057 - RNA, 24 nt, Human
aggagcagaagggagcggggggug

SEQ ID NO: 522058 - RNA, 25 nt, Human
aggagcagaagggagcggggggugg

SEQ ID NO: 522059 - RNA, 19 nt, Human
agggagcgggggguggggg

SEQ ID NO: 522060 - RNA, 24 nt, Human
agggagcggggggugggggggugg

SEQ ID NO: 522061 - RNA, 20 nt, Human
caagccaaggaggacagagg

SEQ ID NO: 522062 - RNA, 18 nt, Human
caagcuuucuccccccac

SEQ ID NO: 522063 - RNA, 20 nt, Human
cacccacaaugcaucuaccc

SEQ ID NO: 522064 - RNA, 19 nt, Human
caccucucccccaacuaca

SEQ ID NO: 522065 - RNA, 18 nt, Human
cagcagcaaagccaagcc

SEQ ID NO: 522066 - RNA, 22 nt, Human
ccaacuacaagcagcagcaaag

SEQ ID NO: 522067 - RNA, 19 nt, Human
ccagggcgggcgagggcag

SEQ ID NO: 522068 - RNA, 24 nt, Human
cccaaacacccccucggacaggag

SEQ ID NO: 522069 - RNA, 20 nt, Human
cccaacuacaagcagcagca

SEQ ID NO: 522070 - RNA, 23 nt, Human
cccacccacaaugcaucuacccc

SEQ ID NO: 522071 - RNA, 28 nt, Human
cccacccacaaugcaucuaccccagggg

SEQ ID NO: 522072 - RNA, 23 nt, Human
ccccaacuacaagcagcagcaaa

SEQ ID NO: 522073 - RNA, 22 nt, Human
ccccccacccacaaugcaucua

SEQ ID NO: 522074 - RNA, 24 nt, Human
cccccucggacaggagccacaagc

SEQ ID NO: 522075 - RNA, 18 nt, Human
cccgacacgccgccgccg

SEQ ID NO: 522076 - RNA, 19 nt, Human
ccucagccacggccuccuc

SEQ ID NO: 522077 - RNA, 23 nt, Human
ccucagccacggccuccucacgg

SEQ ID NO: 522078 - RNA, 21 nt, Human
cggcagcgguggguggcaaag

SEQ ID NO: 522079 - RNA, 18 nt, Human
cgggggcggcagcugggg

SEQ ID NO: 522080 - RNA, 23 nt, Human
cucagccacggccuccucacggc

SEQ ID NO: 522081 - RNA, 22 nt, Human
cuggggcugggccugcgggggc

SEQ ID NO: 522082 - RNA, 21 nt, Human
cugggucggggagggaauaau

SEQ ID NO: 522083 - RNA, 26 nt, Human
cuucucaaggaggaggggggcaccuc

SEQ ID NO: 522084 - RNA, 18 nt, Human
gagcagaagggagcgggg

SEQ ID NO: 522085 - RNA, 21 nt, Human
gagcgaguuuucaggaggucc

SEQ ID NO: 522086 - RNA, 19 nt, Human
gagcggggggugggggggu

SEQ ID NO: 522087 - RNA, 26 nt, Human
gaggacagagggaaacuggaggggcc

SEQ ID NO: 522088 - RNA, 20 nt, Human
gagggcagggggaggcggcc

SEQ ID NO: 522089 - RNA, 22 nt, Human
gaggucccuucucaaggaggag

SEQ ID NO: 522090 - RNA, 19 nt, Human
gcacugggcugggucgggg

SEQ ID NO: 522091 - RNA, 23 nt, Human
gccacaagcuuucuccccccacc

SEQ ID NO: 522092 - RNA, 24 nt, Human
ggagcgggggguggggggguggga

SEQ ID NO: 522093 - RNA, 22 nt, Human
ggcgagggcagggggaggcggc

SEQ ID NO: 522094 - RNA, 21 nt, Human
gggccaagggaccccaaacac

SEQ ID NO: 522095 - RNA, 23 nt, Human
gggcgagggcagggggaggcggc

SEQ ID NO: 522096 - RNA, 20 nt, Human
ggggcugggccugcgggggc

SEQ ID NO: 522097 - RNA, 19 nt, Human
gggggugggggggugggaa

SEQ ID NO: 522098 - RNA, 21 nt, Human
gguggcaaaggggcagagggc

SEQ ID NO: 522099 - RNA, 23 nt, Human
gguggguggcaaaggggcagagg

SEQ ID NO: 522100 - RNA, 19 nt, Human
guuuauugaaggagcagaa

SEQ ID NO: 522101 - RNA, 18 nt, Human
uccuugguggccgggugc

SEQ ID NO: 522102 - RNA, 23 nt, Human
ugcgggggcggcagcuggggccc

SEQ ID NO: 522103 - RNA, 18 nt, Human
uggcaaaggggcagaggg

SEQ ID NO: 522104 - RNA, 20 nt, Human
uggggcugggccugcggggg

SEQ ID NO: 522105 - RNA, 23 nt, Human
uggguggcaaaggggcagagggc

SEQ ID NO: 522106 - RNA, 23 nt, Human
uucuccccccacccacaaugcau

SEQ ID NO: 522107 - RNA, 19 nt, Human
aaccagcacucugcccuuc

SEQ ID NO: 522108 - RNA, 18 nt, Human
aaccuggagaaaccagca

SEQ ID NO: 522109 - RNA, 22 nt, Human
acccuggccaugcagccccaac

SEQ ID NO: 522110 - RNA, 20 nt, Human
acucugcccuuccuuuuccg

SEQ ID NO: 522111 - RNA, 19 nt, Human
acuggcgcgacagcuggau

SEQ ID NO: 522112 - RNA, 19 nt, Human
agaaaccagcacucugccc

SEQ ID NO: 522113 - RNA, 19 nt, Human
agagggaagcuggggccuu

SEQ ID NO: 522114 - RNA, 19 nt, Human
agagggaagcuggggccuu

SEQ ID NO: 522115 - RNA, 23 nt, Human
agcacggguacaguggcuggauc

SEQ ID NO: 522116 - RNA, 22 nt, Human
agcacuccggggaguggcagcc

SEQ ID NO: 522117 - RNA, 21 nt, Human
aggaaugggggugugaauggg

SEQ ID NO: 522118 - RNA, 20 nt, Human
aggcaucuggggaugggcug

SEQ ID NO: 522119 - RNA, 22 nt, Human
aggcaucuggggaugggcuggg

SEQ ID NO: 522120 - RNA, 22 nt, Human
aggucuugcaagaugcccccug

SEQ ID NO: 522121 - RNA, 25 nt, Human
agguggcggagacugcugcuggagu

SEQ ID NO: 522122 - RNA, 24 nt, Human
agugaccucacuuuggacaaaggc

SEQ ID NO: 522123 - RNA, 21 nt, Human
aguggcuggauccuagggggu

SEQ ID NO: 522124 - RNA, 18 nt, Human
agugggcugggauggagg

SEQ ID NO: 522125 - RNA, 23 nt, Human
augcagccccaaccccgcaagga

SEQ ID NO: 522126 - RNA, 23 nt, Human
caaggagcuugaugaagccaacg

SEQ ID NO: 522127 - RNA, 19 nt, Human
cagccccaaccccgcaagg

SEQ ID NO: 522128 - RNA, 20 nt, Human
cagccccaaccccgcaagga

SEQ ID NO: 522129 - RNA, 18 nt, Human
cagcuggauccccgggag

SEQ ID NO: 522130 - RNA, 25 nt, Human
caugcagccccaaccccgcaaggag

SEQ ID NO: 522131 - RNA, 20 nt, Human
ccaaagucagaaguuggggc

SEQ ID NO: 522132 - RNA, 20 nt, Human
ccagugggcugggauggagg

SEQ ID NO: 522133 - RNA, 20 nt, Human
ccaguuccugaccugaccuu

SEQ ID NO: 522134 - RNA, 27 nt, Human
cccagagcacuccggggaguggcagcc

SEQ ID NO: 522135 - RNA, 19 nt, Human
ccccaaccccgcaaggagc

SEQ ID NO: 522136 - RNA, 18 nt, Human
ccccgggaugcagccgcc

SEQ ID NO: 522137 - RNA, 18 nt, Human
cccuggccaugcagcccc

SEQ ID NO: 522138 - RNA, 19 nt, Human
cccuuccuuuuccuuucuu

SEQ ID NO: 522139 - RNA, 22 nt, Human
ccgggcgcccguuccucuaggg

SEQ ID NO: 522140 - RNA, 22 nt, Human
ccuccgcgccucugcgccgccc

SEQ ID NO: 522141 - RNA, 24 nt, Human
ccugagagacacaagaguuggcuu

SEQ ID NO: 522142 - RNA, 24 nt, Human
ccugcaaggccucugggauaggcu

SEQ ID NO: 522143 - RNA, 20 nt, Human
ccugcucucuuccucuccca

SEQ ID NO: 522144 - RNA, 19 nt, Human
ccuggccaugcagccccaa

SEQ ID NO: 522145 - RNA, 24 nt, Human
ccuggccaugcagccccaaccccg

SEQ ID NO: 522146 - RNA, 23 nt, Human
ccuuucuuccugucuugcaaccc

SEQ ID NO: 522147 - RNA, 20 nt, Human
ccuuuuccuuucuuccuguc

SEQ ID NO: 522148 - RNA, 22 nt, Human
cgcaaagcugaccugacugccc

SEQ ID NO: 522149 - RNA, 24 nt, Human
cgcggguacuggcgcgacagcugg

SEQ ID NO: 522150 - RNA, 21 nt, Human
cgcugcuagagucccggaggc

SEQ ID NO: 522151 - RNA, 18 nt, Human
cggggaguggcagccggu

SEQ ID NO: 522152 - RNA, 25 nt, Human
cggguacaguggcuggauccuaggg

SEQ ID NO: 522153 - RNA, 19 nt, Human
cuccacgccgaggcccggc

SEQ ID NO: 522154 - RNA, 28 nt, Human
cuccacgccgaggcccggccgggcuccu

SEQ ID NO: 522155 - RNA, 24 nt, Human
cucuguauauaaauacaaugacac

SEQ ID NO: 522156 - RNA, 22 nt, Human
cugacugccccgucacaccaug

SEQ ID NO: 522157 - RNA, 22 nt, Human
cugccuuguccugcucucuucc

SEQ ID NO: 522158 - RNA, 22 nt, Human
cugggauaggcugggggugcag

SEQ ID NO: 522159 - RNA, 22 nt, Human
gacugccccgucacaccaugcc

SEQ ID NO: 522160 - RNA, 23 nt, Human
gagccaggaggaaugggggugug

SEQ ID NO: 522161 - RNA, 19 nt, Human
gagcccggagguggcggag

SEQ ID NO: 522162 - RNA, 20 nt, Human
gauaggcugggggugcagag

SEQ ID NO: 522163 - RNA, 21 nt, Human
gccuggguuuggggagcacgg

SEQ ID NO: 522164 - RNA, 21 nt, Human
gcggagggcgcucuaguccca

SEQ ID NO: 522165 - RNA, 19 nt, Human
gcuggagcccggagguggc

SEQ ID NO: 522166 - RNA, 20 nt, Human
ggaagcuggggccuuggggu

SEQ ID NO: 522167 - RNA, 22 nt, Human
ggacugggaccaggggcugggc

SEQ ID NO: 522168 - RNA, 23 nt, Human
ggagacgacggcuggagccuggg

SEQ ID NO: 522169 - RNA, 18 nt, Human
ggauaaggagccaggagg

SEQ ID NO: 522170 - RNA, 21 nt, Human
ggauaggcugggggugcagag

SEQ ID NO: 522171 - RNA, 19 nt, Human
ggauggaggggggaugucu

SEQ ID NO: 522172 - RNA, 22 nt, Human
ggcugggcaguggugggaggcc

SEQ ID NO: 522173 - RNA, 24 nt, Human
gggcaguggugggaggcccucagg

SEQ ID NO: 522174 - RNA, 20 nt, Human
gguacaguggcuggauccua

SEQ ID NO: 522175 - RNA, 21 nt, Human
gugaccucacuuuggacaaag

SEQ ID NO: 522176 - RNA, 21 nt, Human
gugcagagggaagcuggggcc

SEQ ID NO: 522177 - RNA, 23 nt, Human
guguccaugaauucucgagugac

SEQ ID NO: 522178 - RNA, 18 nt, Human
uccuagcuggagggggga

SEQ ID NO: 522179 - RNA, 21 nt, Human
uccuagggggucgcggagacc

SEQ ID NO: 522180 - RNA, 22 nt, Human
uccugccacccuggccaugcag

SEQ ID NO: 522181 - RNA, 23 nt, Human
uccuuuuccuuucuuccugucuu

SEQ ID NO: 522182 - RNA, 20 nt, Human
ucucccaguucugguccagu

SEQ ID NO: 522183 - RNA, 22 nt, Human
ucucccaguucugguccagugg

SEQ ID NO: 522184 - RNA, 24 nt, Human
ucucccaguucugguccagugggc

SEQ ID NO: 522185 - RNA, 25 nt, Human
ucugcccuuccuuuuccuuucuucc

SEQ ID NO: 522186 - RNA, 23 nt, Human
ucugccuuguccugcucucuucc

SEQ ID NO: 522187 - RNA, 23 nt, Human
ucugggauaggcugggggugcag

SEQ ID NO: 522188 - RNA, 23 nt, Human
ucuguauauaaauacaaugacac

SEQ ID NO: 522189 - RNA, 21 nt, Human
ucuugcaacccacuuguccug

SEQ ID NO: 522190 - RNA, 20 nt, Human
ugaaaaauuaaagucauaag

SEQ ID NO: 522191 - RNA, 19 nt, Human
ugacacugcuggucaccug

SEQ ID NO: 522192 - RNA, 23 nt, Human
ugaccugacugccccgucacacc

SEQ ID NO: 522193 - RNA, 21 nt, Human
ugacugggggccguguccaug

SEQ ID NO: 522194 - RNA, 19 nt, Human
ugagagacacaagaguugg

SEQ ID NO: 522195 - RNA, 27 nt, Human
ugcccggggcucccccagccgggcgcc

SEQ ID NO: 522196 - RNA, 18 nt, Human
ugccgcuguccucgcggg

SEQ ID NO: 522197 - RNA, 19 nt, Human
uggagaaaccagcacucug

SEQ ID NO: 522198 - RNA, 18 nt, Human
uggauccuagggggucgc

SEQ ID NO: 522199 - RNA, 19 nt, Human
uggauccuagggggucgcg

SEQ ID NO: 522200 - RNA, 23 nt, Human
uggcggagacugcugcuggaguc

SEQ ID NO: 522201 - RNA, 21 nt, Human
uggcuggaguuugggggcgcc

SEQ ID NO: 522202 - RNA, 20 nt, Human
ugggaccaggggcugggcag

SEQ ID NO: 522203 - RNA, 20 nt, Human
ugggcugggauggagggggg

SEQ ID NO: 522204 - RNA, 21 nt, Human
ugggcugggauggagggggga

SEQ ID NO: 522205 - RNA, 20 nt, Human
uggggaggugcucgaugcuu

SEQ ID NO: 522206 - RNA, 19 nt, Human
uggggccuuggggucccca

SEQ ID NO: 522207 - RNA, 22 nt, Human
ugggggugcagagggaagcugg

SEQ ID NO: 522208 - RNA, 28 nt, Human
ugggggugcagagggaagcuggggccuu

SEQ ID NO: 522209 - RNA, 19 nt, Human
ugggggugugaauggggag

SEQ ID NO: 522210 - RNA, 24 nt, Human
ugggggugugaauggggaggugcu

SEQ ID NO: 522211 - RNA, 23 nt, Human
ugggguccccaggggcaugggga

SEQ ID NO: 522212 - RNA, 24 nt, Human
uguccugcucucuuccucucccaa

SEQ ID NO: 522213 - RNA, 26 nt, Human
uuccugccacccuggccaugcagccc

SEQ ID NO: 522214 - RNA, 20 nt, Human
acagcaccguccagagcagc

SEQ ID NO: 522215 - RNA, 18 nt, Human
acuucaauagaugcagaa

SEQ ID NO: 522216 - RNA, 20 nt, Human
agaagagcuaggggcggggc

SEQ ID NO: 522217 - RNA, 21 nt, Human
agccacaaaaaaaggaaacaa

SEQ ID NO: 522218 - RNA, 22 nt, Human
agcccgaggguagcccgacaca

SEQ ID NO: 522219 - RNA, 21 nt, Human
aggagaaaaaauuuaaaccca

SEQ ID NO: 522220 - RNA, 19 nt, Human
agggagcgccuagcgggcu

SEQ ID NO: 522221 - RNA, 19 nt, Human
cacaaaaaaaggaaacaau

SEQ ID NO: 522222 - RNA, 20 nt, Human
caccagaaauaaagccggug

SEQ ID NO: 522223 - RNA, 19 nt, Human
caccuccccuugcagaagc

SEQ ID NO: 522224 - RNA, 21 nt, Human
caccuggagccaggcgcgggg

SEQ ID NO: 522225 - RNA, 21 nt, Human
cacucucaggagaggagugca

SEQ ID NO: 522226 - RNA, 22 nt, Human
cacuucaauagaugcagaaaac

SEQ ID NO: 522227 - RNA, 21 nt, Human
cagcaccguccagagcagcga

SEQ ID NO: 522228 - RNA, 21 nt, Human
cagcagcuccugcgucgcggc

SEQ ID NO: 522229 - RNA, 20 nt, Human
cagcgacagccccaggaaga

SEQ ID NO: 522230 - RNA, 20 nt, Human
ccagaaauaaagccggugcc

SEQ ID NO: 522231 - RNA, 21 nt, Human
ccccaggaagaggagcggcag

SEQ ID NO: 522232 - RNA, 22 nt, Human
ccgcagcagccuccgcucccgc

SEQ ID NO: 522233 - RNA, 27 nt, Human
ccgccgaacagccgcgucucucggucc

SEQ ID NO: 522234 - RNA, 26 nt, Human
ccgcugcgcgcgcucccgcgccgccu

SEQ ID NO: 522235 - RNA, 18 nt, Human
ccucgcgcaccuccccuu

SEQ ID NO: 522236 - RNA, 22 nt, Human
ccucgcgcaccuccccuugcag

SEQ ID NO: 522237 - RNA, 18 nt, Human
ccugcugcagcuucuccu

SEQ ID NO: 522238 - RNA, 20 nt, Human
cgaggugaggcuccagagcc

SEQ ID NO: 522239 - RNA, 22 nt, Human
cgcacccgcugcgcgcgcuccc

SEQ ID NO: 522240 - RNA, 24 nt, Human
cgccgggguccaacagcaccgucc

SEQ ID NO: 522241 - RNA, 19 nt, Human
cgcgcucccgcgccgccuc

SEQ ID NO: 522242 - RNA, 18 nt, Human
cggcagggagcgccuagc

SEQ ID NO: 522243 - RNA, 21 nt, Human
cggccggaggcgggucaggcc

SEQ ID NO: 522244 - RNA, 18 nt, Human
cggugcuguacugcacuc

SEQ ID NO: 522245 - RNA, 23 nt, Human
cguccugcugcagcuucuccucc

SEQ ID NO: 522246 - RNA, 18 nt, Human
cgucgcggccauggcugu

SEQ ID NO: 522247 - RNA, 22 nt, Human
cgucucucgguccgcccuggcc

SEQ ID NO: 522248 - RNA, 19 nt, Human
cgugcucuucuggcucugc

SEQ ID NO: 522249 - RNA, 21 nt, Human
cuacggucugcuccuggaaua

SEQ ID NO: 522250 - RNA, 19 nt, Human
cuccagucuucugcgcacc

SEQ ID NO: 522251 - RNA, 25 nt, Human
cucggccucgagcccgcgcaucagc

SEQ ID NO: 522252 - RNA, 21 nt, Human
cucuucuggcucugcaguucc

SEQ ID NO: 522253 - RNA, 22 nt, Human
cugcagcgucaccaauugggcu

SEQ ID NO: 522254 - RNA, 19 nt, Human
cugcugcagcuucuccucc

SEQ ID NO: 522255 - RNA, 24 nt, Human
cuucucuagcuccugcuuccgcug

SEQ ID NO: 522256 - RNA, 20 nt, Human
gaguccaccuggagccaggc

SEQ ID NO: 522257 - RNA, 20 nt, Human
gccacaaaaaaaggaaacaa

SEQ ID NO: 522258 - RNA, 21 nt, Human
gccccaggaagaggagcggca

SEQ ID NO: 522259 - RNA, 18 nt, Human
gcccuggccaucuccucc

SEQ ID NO: 522260 - RNA, 22 nt, Human
gccucgcgcaccuccccuugca

SEQ ID NO: 522261 - RNA, 23 nt, Human
gcggcagggagcgccuagcgggc

SEQ ID NO: 522262 - RNA, 19 nt, Human
gcugcagcuucuccuccug

SEQ ID NO: 522263 - RNA, 20 nt, Human
gcugcgaguugcugcuccgu

SEQ ID NO: 522264 - RNA, 22 nt, Human
ggcggcaggggaagcccgaggg

SEQ ID NO: 522265 - RNA, 20 nt, Human
ggcugcgaguugcugcuccg

SEQ ID NO: 522266 - RNA, 22 nt, Human
ggcuucgccuccgcagcagccu

SEQ ID NO: 522267 - RNA, 22 nt, Human
gggaagcccgaggguagcccga

SEQ ID NO: 522268 - RNA, 23 nt, Human
guccagagcagcgacagccccag

SEQ ID NO: 522269 - RNA, 26 nt, Human
uacaguagccacaaaaaaaggaaaca

SEQ ID NO: 522270 - RNA, 23 nt, Human
uagccacaaaaaaaggaaacaau

SEQ ID NO: 522271 - RNA, 21 nt, Human
ucaaugaaagguuaaugaaau

SEQ ID NO: 522272 - RNA, 21 nt, Human
ucccccacagugcagauggcu

SEQ ID NO: 522273 - RNA, 20 nt, Human
uccgccuccuccagucuucu

SEQ ID NO: 522274 - RNA, 23 nt, Human
uccguaguagaagagcuaggggc

SEQ ID NO: 522275 - RNA, 21 nt, Human
uccugcgucgcggccauggcu

SEQ ID NO: 522276 - RNA, 21 nt, Human
ucucuuguggaaaagaaccca

SEQ ID NO: 522277 - RNA, 24 nt, Human
ucucuuguggaaaagaacccauaa

SEQ ID NO: 522278 - RNA, 24 nt, Human
ugcaccagaaauaaagccggugcc

SEQ ID NO: 522279 - RNA, 19 nt, Human
ugcagcuucuccuccugca

SEQ ID NO: 522280 - RNA, 21 nt, Human
ugcccuggaguccaccuggag

SEQ ID NO: 522281 - RNA, 19 nt, Human
ugcgcacccgcugcgcgcg

SEQ ID NO: 522282 - RNA, 22 nt, Human
ugcugcuccgugcucuucuggc

SEQ ID NO: 522283 - RNA, 24 nt, Human
uggaauauggcccaggccuccgcu

SEQ ID NO: 522284 - RNA, 24 nt, Human
uggcaggcgucacaaugggcggca

SEQ ID NO: 522285 - RNA, 20 nt, Human
ugucaaagagccguaauuag

SEQ ID NO: 522286 - RNA, 20 nt, Human
uguggcgcuccgccuccucc

SEQ ID NO: 522287 - RNA, 25 nt, Human
uuacaguagccacaaaaaaaggaaa

SEQ ID NO: 522288 - RNA, 22 nt, Human
uuaggcgaccuuggucuacacu

SEQ ID NO: 522289 - RNA, 22 nt, Human
uugcugcuccgugcucuucugg

SEQ ID NO: 522290 - RNA, 23 nt, Human
uuuuuuuuuuuuuuuuuaucccu

SEQ ID NO: 522291 - RNA, 21 nt, Human
aagcaaacggaugauuuuaau

SEQ ID NO: 522292 - RNA, 20 nt, Human
aaggcggcgggcgcggggcc

SEQ ID NO: 522293 - RNA, 20 nt, Human
aggcaaggcggcgggcgcgg

SEQ ID NO: 522294 - RNA, 23 nt, Human
cacagcccggggaggugucgucc

SEQ ID NO: 522295 - RNA, 18 nt, Human
cacuccgcaggugcgggc

SEQ ID NO: 522296 - RNA, 22 nt, Human
cagugagucuugcaaggggcuc

SEQ ID NO: 522297 - RNA, 24 nt, Human
cccggguuggaacaaaccgggguc

SEQ ID NO: 522298 - RNA, 21 nt, Human
cccuuuccccuccggggggac

SEQ ID NO: 522299 - RNA, 23 nt, Human
ccggugggagcggggccuucucu

SEQ ID NO: 522300 - RNA, 23 nt, Human
ccuugaagggugccugggagggg

SEQ ID NO: 522301 - RNA, 26 nt, Human
cgcaggugcgggcagcggcgggcugc

SEQ ID NO: 522302 - RNA, 22 nt, Human
cgcggccccggguuggaacaaa

SEQ ID NO: 522303 - RNA, 22 nt, Human
cggggcccagcaccggugggag

SEQ ID NO: 522304 - RNA, 22 nt, Human
cucccugggcuccagcaggguc

SEQ ID NO: 522305 - RNA, 19 nt, Human
cuccgcaggugcgggcagc

SEQ ID NO: 522306 - RNA, 21 nt, Human
cugcggucggggcccagcacc

SEQ ID NO: 522307 - RNA, 24 nt, Human
gaaggccuugaagggugccuggga

SEQ ID NO: 522308 - RNA, 25 nt, Human
gcagcggcgggcugcggucggggcc

SEQ ID NO: 522309 - RNA, 21 nt, Human
gcaggcaaggcggcgggcgcg

SEQ ID NO: 522310 - RNA, 25 nt, Human
gcaggugcgggcagcggcgggcugc

SEQ ID NO: 522311 - RNA, 18 nt, Human
gggcagcggcgggcugcg

SEQ ID NO: 522312 - RNA, 21 nt, Human
gggcaugugagcacagcaggu

SEQ ID NO: 522313 - RNA, 18 nt, Human
gggcccagcaccgguggg

SEQ ID NO: 522314 - RNA, 20 nt, Human
gggcucaggagcggggacag

SEQ ID NO: 522315 - RNA, 21 nt, Human
ggggcccagcaccggugggag

SEQ ID NO: 522316 - RNA, 19 nt, Human
ggugcgggcagcggcgggc

SEQ ID NO: 522317 - RNA, 22 nt, Human
ucccugggcuccagcagggucu

SEQ ID NO: 522318 - RNA, 21 nt, Human
uccucgcuggacaggggggca

SEQ ID NO: 522319 - RNA, 19 nt, Human
ucgugaaccuuccgaaauc

SEQ ID NO: 522320 - RNA, 20 nt, Human
ucugcaguugggagggcgug

SEQ ID NO: 522321 - RNA, 22 nt, Human
ugaagggugccugggagggggc

SEQ ID NO: 522322 - RNA, 24 nt, Human
ugagcacagcagguccuccaggga

SEQ ID NO: 522323 - RNA, 20 nt, Human
ugaggaaggccuugaagggu

SEQ ID NO: 522324 - RNA, 20 nt, Human
ugcggucggggcccagcacc

SEQ ID NO: 522325 - RNA, 23 nt, Human
uggcucugggggacugaggaagg

SEQ ID NO: 522326 - RNA, 19 nt, Human
ugggagggggcugcacagc

SEQ ID NO: 522327 - RNA, 20 nt, Human
aaaucagcuuugaaauccga

SEQ ID NO: 522328 - RNA, 22 nt, Human
aagggcggguaaaagcugugug

SEQ ID NO: 522329 - RNA, 20 nt, Human
acacugugccagggcacagg

SEQ ID NO: 522330 - RNA, 20 nt, Human
accacaguucuuucagccug

SEQ ID NO: 522331 - RNA, 19 nt, Human
agaagcaggcagaggaggc

SEQ ID NO: 522332 - RNA, 23 nt, Human
agcaggcagaggaggcagcucug

SEQ ID NO: 522333 - RNA, 19 nt, Human
agccaagguccaugacgug

SEQ ID NO: 522334 - RNA, 21 nt, Human
agccugagcaucaugggguca

SEQ ID NO: 522335 - RNA, 19 nt, Human
agcugggcgcaggugggga

SEQ ID NO: 522336 - RNA, 19 nt, Human
aggggcuccaggaagggac

SEQ ID NO: 522337 - RNA, 24 nt, Human
agggugcagccaagguccaugacg

SEQ ID NO: 522338 - RNA, 23 nt, Human
aucacaucccaaaauuccugagg

SEQ ID NO: 522339 - RNA, 20 nt, Human
auccagugcuccuuccguga

SEQ ID NO: 522340 - RNA, 22 nt, Human
augcuguucuuugaagggugca

SEQ ID NO: 522341 - RNA, 18 nt, Human
auuucacucccuuccucc

SEQ ID NO: 522342 - RNA, 20 nt, Human
auuucacucccuuccuccuc

SEQ ID NO: 522343 - RNA, 24 nt, Human
caaaaugaauccagugcuccuucc

SEQ ID NO: 522344 - RNA, 18 nt, Human
caaaauuccugaggcugc

SEQ ID NO: 522345 - RNA, 24 nt, Human
cacccuccucaggggcaaucaugg

SEQ ID NO: 522346 - RNA, 24 nt, Human
cagaagcaggcagaggaggcagcc

SEQ ID NO: 522347 - RNA, 18 nt, Human
cagccccugaccgguccu

SEQ ID NO: 522348 - RNA, 19 nt, Human
cagccccugaccgguccug

SEQ ID NO: 522349 - RNA, 22 nt, Human
cagcguguuagaaaucagcuuu

SEQ ID NO: 522350 - RNA, 23 nt, Human
ccugucccuagggacacugaugg

SEQ ID NO: 522351 - RNA, 24 nt, Human
cgaaccaucacuucacccuccuca

SEQ ID NO: 522352 - RNA, 24 nt, Human
cuggguccacgguggugaugcugu

SEQ ID NO: 522353 - RNA, 24 nt, Human
cuucacccuccucaggggcaauca

SEQ ID NO: 522354 - RNA, 22 nt, Human
gaaccaucacuucacccuccuc

SEQ ID NO: 522355 - RNA, 23 nt, Human
gaaccaucacuucacccuccuca

SEQ ID NO: 522356 - RNA, 18 nt, Human
gaggaaacaagcggggga

SEQ ID NO: 522357 - RNA, 19 nt, Human
gaggcgcccuguagcuccc

SEQ ID NO: 522358 - RNA, 19 nt, Human
gaucacaucccaaaauucc

SEQ ID NO: 522359 - RNA, 20 nt, Human
gaucugcauuucacucccuu

SEQ ID NO: 522360 - RNA, 23 nt, Human
gcaaaauauuccucaauguuucg

SEQ ID NO: 522361 - RNA, 24 nt, Human
gccagggcacaggggcccggauca

SEQ ID NO: 522362 - RNA, 19 nt, Human
gcuccucguuccacuucuu

SEQ ID NO: 522363 - RNA, 23 nt, Human
gcugcuguucuggacucauuggu

SEQ ID NO: 522364 - RNA, 19 nt, Human
gcuucagguccugggccau

SEQ ID NO: 522365 - RNA, 21 nt, Human
ggagcaaaaugaauccagugc

SEQ ID NO: 522366 - RNA, 19 nt, Human
ggagucacuuuuggcgauc

SEQ ID NO: 522367 - RNA, 18 nt, Human
ggauggggaggggcggcc

SEQ ID NO: 522368 - RNA, 18 nt, Human
gggcgcagguggggaucc

SEQ ID NO: 522369 - RNA, 20 nt, Human
uaacaugacaucgagcugcu

SEQ ID NO: 522370 - RNA, 24 nt, Human
uaauaguaucucuccagguccgau

SEQ ID NO: 522371 - RNA, 26 nt, Human
uagaccuucagcagaucuuucagcuu

SEQ ID NO: 522372 - RNA, 25 nt, Human
uauuccucaauguuucgacuugagu

SEQ ID NO: 522373 - RNA, 18 nt, Human
ucacuggguccacggugg

SEQ ID NO: 522374 - RNA, 25 nt, Human
ucacuucacccuccucaggggcaau

SEQ ID NO: 522375 - RNA, 21 nt, Human
ucagcagcguguuagaaauca

SEQ ID NO: 522376 - RNA, 23 nt, Human
uccaggaagggacucgucagcag

SEQ ID NO: 522377 - RNA, 22 nt, Human
uccuugggucucccuggcuuuu

SEQ ID NO: 522378 - RNA, 25 nt, Human
ucuccagguccgauucagauggcuu

SEQ ID NO: 522379 - RNA, 23 nt, Human
ucuuucagcuucagguccugggc

SEQ ID NO: 522380 - RNA, 21 nt, Human
ugaaucugcaaaccacaguuc

SEQ ID NO: 522381 - RNA, 19 nt, Human
ugacaugacagucugauag

SEQ ID NO: 522382 - RNA, 23 nt, Human
ugagguaaaaagcugggcgcagg

SEQ ID NO: 522383 - RNA, 19 nt, Human
ugaugccacagaagcaaaa

SEQ ID NO: 522384 - RNA, 18 nt, Human
ugcagaugcuccucguuc

SEQ ID NO: 522385 - RNA, 20 nt, Human
ugggaguggcucaugugaug

SEQ ID NO: 522386 - RNA, 26 nt, Human
uggggaggggcggccagugugagcuc

SEQ ID NO: 522387 - RNA, 21 nt, Human
ugucuuugcgaauuccauugg

SEQ ID NO: 522388 - RNA, 19 nt, Human
ugugcagaugcuccucguu

SEQ ID NO: 522389 - RNA, 24 nt, Human
aaacgacugugaaguauacauuuu

SEQ ID NO: 522390 - RNA, 23 nt, Human
aacacuuauuuauugaugagugu

SEQ ID NO: 522391 - RNA, 22 nt, Human
aacauaguaacagccaaaaaca

SEQ ID NO: 522392 - RNA, 22 nt, Human
aagauggcaaaaugacaugccc

SEQ ID NO: 522393 - RNA, 24 nt, Human
acauaguaacagccaaaaacaaaa

SEQ ID NO: 522394 - RNA, 20 nt, Human
accggucaaucuaaccugga

SEQ ID NO: 522395 - RNA, 21 nt, Human
acggaggggggaaaaaaagua

SEQ ID NO: 522396 - RNA, 23 nt, Human
agcaagcuccuucacagcaauau

SEQ ID NO: 522397 - RNA, 20 nt, Human
aggccgcacucgcacugcuu

SEQ ID NO: 522398 - RNA, 24 nt, Human
auacaagaugcacucaauauccau

SEQ ID NO: 522399 - RNA, 18 nt, Human
auccaagacacaaacgac

SEQ ID NO: 522400 - RNA, 19 nt, Human
aucuacucacucucuccca

SEQ ID NO: 522401 - RNA, 21 nt, Human
augacaagcagcuuaaauaca

SEQ ID NO: 522402 - RNA, 24 nt, Human
caaagauggcaaaaugacaugccc

SEQ ID NO: 522403 - RNA, 25 nt, Human
caauagcaagcuccuucacagcaau

SEQ ID NO: 522404 - RNA, 21 nt, Human
cacacaguuguacuguagaga

SEQ ID NO: 522405 - RNA, 19 nt, Human
cacacugucaacacuuugc

SEQ ID NO: 522406 - RNA, 25 nt, Human
cacuaaccugacuaaaaggccgcac

SEQ ID NO: 522407 - RNA, 19 nt, Human
cauaguaacagccaaaaac

SEQ ID NO: 522408 - RNA, 24 nt, Human
cauccccauuuuaagacuggucua

SEQ ID NO: 522409 - RNA, 18 nt, Human
ccaccgcucgcccccucg

SEQ ID NO: 522410 - RNA, 18 nt, Human
ccccauuuuaagacuggu

SEQ ID NO: 522411 - RNA, 22 nt, Human
cccgccaccgccaccgcucgcc

SEQ ID NO: 522412 - RNA, 21 nt, Human
ccgccaccgccaccgcucgcc

SEQ ID NO: 522413 - RNA, 19 nt, Human
ccgccaccgcucgcccccu

SEQ ID NO: 522414 - RNA, 19 nt, Human
ccgccgccaugugccgccg

SEQ ID NO: 522415 - RNA, 27 nt, Human
ccgcuccgccgccaugugccgccgcuc

SEQ ID NO: 522416 - RNA, 23 nt, Human
ccugccguacccgccaccgccac

SEQ ID NO: 522417 - RNA, 23 nt, Human
cuagauauuuaauaauccacacu

SEQ ID NO: 522418 - RNA, 25 nt, Human
cuaguauuuuaauuauagagaaaaa

SEQ ID NO: 522419 - RNA, 18 nt, Human
cucaauauccauaaacag

SEQ ID NO: 522420 - RNA, 26 nt, Human
cucccaaccucaauaaucugugccug

SEQ ID NO: 522421 - RNA, 18 nt, Human
cuuccacagcgccgcucc

SEQ ID NO: 522422 - RNA, 20 nt, Human
gaaccggucaaucuaaccug

SEQ ID NO: 522423 - RNA, 25 nt, Human
gagaauuugccaguuuuaaaaccug

SEQ ID NO: 522424 - RNA, 21 nt, Human
gagccugccguacccgccacc

SEQ ID NO: 522425 - RNA, 21 nt, Human
gauuuauuuuacauuucccuu

SEQ ID NO: 522426 - RNA, 22 nt, Human
gcgcccgcgagccugccguacc

SEQ ID NO: 522427 - RNA, 18 nt, Human
ggaaaaaaaguacacuua

SEQ ID NO: 522428 - RNA, 22 nt, Human
guuagagccuacaucaaguacc

SEQ ID NO: 522429 - RNA, 24 nt, Human
uaaaauauuaaaagcccacgaaag

SEQ ID NO: 522430 - RNA, 18 nt, Human
uaaaguucauuuagaaca

SEQ ID NO: 522431 - RNA, 18 nt, Human
uaaaugcagaaagcacac

SEQ ID NO: 522432 - RNA, 18 nt, Human
uaacauaguaacagccaa

SEQ ID NO: 522433 - RNA, 27 nt, Human
uacauacauucauuuaaaauauaugua

SEQ ID NO: 522434 - RNA, 24 nt, Human
uaccacacaucuauauucaccaaa

SEQ ID NO: 522435 - RNA, 18 nt, Human
uacuguagagaacagggc

SEQ ID NO: 522436 - RNA, 23 nt, Human
uagaaaaauaaaugcagaaagca

SEQ ID NO: 522437 - RNA, 21 nt, Human
ucaauauuccauaaaugacaa

SEQ ID NO: 522438 - RNA, 22 nt, Human
ucagacaucucauccuaucaau

SEQ ID NO: 522439 - RNA, 23 nt, Human
uccaaacuagauauuuaauaauc

SEQ ID NO: 522440 - RNA, 24 nt, Human
uccaaacuagauauuuaauaaucu

SEQ ID NO: 522441 - RNA, 20 nt, Human
uccacagcgccgcuccgccg

SEQ ID NO: 522442 - RNA, 25 nt, Human
uccacagcgccgcuccgccgccaug

SEQ ID NO: 522443 - RNA, 19 nt, Human
uccauaaaugacaagcagc

SEQ ID NO: 522444 - RNA, 22 nt, Human
ucuacucacucucucccaaccu

SEQ ID NO: 522445 - RNA, 18 nt, Human
ugaaacuacaaagauggc

SEQ ID NO: 522446 - RNA, 19 nt, Human
ugaaacuacaaagauggca

SEQ ID NO: 522447 - RNA, 18 nt, Human
ugcaagugagcagugaac

SEQ ID NO: 522448 - RNA, 22 nt, Human
ugccgaauaagagaugccaaca

SEQ ID NO: 522449 - RNA, 22 nt, Human
ugccgccgcuccuccgguccga

SEQ ID NO: 522450 - RNA, 18 nt, Human
ugcguugguuuaaaaaag

SEQ ID NO: 522451 - RNA, 20 nt, Human
ugcuuaugaucuacauucac

SEQ ID NO: 522452 - RNA, 18 nt, Human
uguaugaagucuuaauau

SEQ ID NO: 522453 - RNA, 19 nt, Human
ugugaaacuacaaagaugg

SEQ ID NO: 522454 - RNA, 19 nt, Human
uuagaacaggcaauuuguu

SEQ ID NO: 522455 - RNA, 24 nt, Human
uuauugaagaccuucuguuuacau

SEQ ID NO: 522456 - RNA, 23 nt, Human
uuccacagcgccgcuccgccgcc

SEQ ID NO: 522457 - RNA, 18 nt, Human
uucuacaucuacucacuc

SEQ ID NO: 522458 - RNA, 23 nt, Human
uugcuuaauugcacacaguugua

SEQ ID NO: 522459 - RNA, 18 nt, Human
uuuagaacaggcaauuug

SEQ ID NO: 522460 - RNA, 21 nt, Human
uuugugaaacuacaaagaugg

SEQ ID NO: 522461 - RNA, 24 nt, Human
uuuuaacauaguaacagccaaaaa

SEQ ID NO: 522462 - RNA, 21 nt, Human
aaaauacagacaauaacacua

SEQ ID NO: 522463 - RNA, 20 nt, Human
aaagcuuauuucugccuaca

SEQ ID NO: 522464 - RNA, 26 nt, Human
acagacaauaacacuaucaaaaugua

SEQ ID NO: 522465 - RNA, 26 nt, Human
aguaauaacaacugucuuagaagaga

SEQ ID NO: 522466 - RNA, 24 nt, Human
aguacgggagcuacgaugaaggga

SEQ ID NO: 522467 - RNA, 26 nt, Human
caucuauugauaagcuuuuaagaaau

SEQ ID NO: 522468 - RNA, 22 nt, Human
ccacauuuaucugauuuuuagu

SEQ ID NO: 522469 - RNA, 20 nt, Human
cgggagcuacgaugaaggga

SEQ ID NO: 522470 - RNA, 23 nt, Human
gcagaacuagcacuuuaacaaaa

SEQ ID NO: 522471 - RNA, 24 nt, Human
gcagcaguggcuaaaaaugaguac

SEQ ID NO: 522472 - RNA, 22 nt, Human
ggcagcaguggcuaaaaaugag

SEQ ID NO: 522473 - RNA, 23 nt, Human
uaaacaucagcagauaagccauu

SEQ ID NO: 522474 - RNA, 18 nt, Human
uaacaguuaagcuuccuu

SEQ ID NO: 522475 - RNA, 20 nt, Human
uaagaaauaugucauaccau

SEQ ID NO: 522476 - RNA, 20 nt, Human
uaccauaugacuucaaaaga

SEQ ID NO: 522477 - RNA, 21 nt, Human
uauauucacacuagcaagauu

SEQ ID NO: 522478 - RNA, 18 nt, Human
ucaacaaaauauacaaac

SEQ ID NO: 522479 - RNA, 25 nt, Human
uccaguuucaguuuuauaaugucac

SEQ ID NO: 522480 - RNA, 23 nt, Human
ucugccuacacauaugaugacau

SEQ ID NO: 522481 - RNA, 22 nt, Human
ugcagaacuagcacuuuaacaa

SEQ ID NO: 522482 - RNA, 20 nt, Human
uuauuucugccuacacauau

SEQ ID NO: 522483 - RNA, 20 nt, Human
cccggcccagacugcagccg

SEQ ID NO: 522484 - RNA, 22 nt, Human
ggccccggcccagacugcagcc

SEQ ID NO: 522485 - RNA, 21 nt, Human
gggccccggcccagacugcag

SEQ ID NO: 522486 - RNA, 26 nt, Human
uuaccaaccuguccucccccuaggcc

SEQ ID NO: 522487 - RNA, 21 nt, Human
uuuuuuuuuucaaacaaguaa

SEQ ID NO: 522488 - RNA, 18 nt, Human
agacaccgaggcugcgcc

SEQ ID NO: 522489 - RNA, 21 nt, Human
cagagacaccgaggcugcgcc

SEQ ID NO: 522490 - RNA, 22 nt, Human
cagagacaccgaggcugcgccg

SEQ ID NO: 522491 - RNA, 19 nt, Human
ccagaagguugcuugggcc

SEQ ID NO: 522492 - RNA, 22 nt, Human
cccacugccgccggcccagaga

SEQ ID NO: 522493 - RNA, 18 nt, Human
cccagagacaccgaggcu

SEQ ID NO: 522494 - RNA, 23 nt, Human
ccggcccagagacaccgaggcug

SEQ ID NO: 522495 - RNA, 23 nt, Human
cggcccagagacaccgaggcugc

SEQ ID NO: 522496 - RNA, 21 nt, Human
uucuuuauugauuuauuuauu

SEQ ID NO: 522497 - RNA, 24 nt, Human
aaagugcugggauuacaggcauga

SEQ ID NO: 522498 - RNA, 20 nt, Human
aaccgccccucacgcccccg

SEQ ID NO: 522499 - RNA, 19 nt, Human
aagugcugggauuacaggc

SEQ ID NO: 522500 - RNA, 21 nt, Human
aagugcugggauuacaggcau

SEQ ID NO: 522501 - RNA, 26 nt, Human
aagugcugggauuacaggcaugagcc

SEQ ID NO: 522502 - RNA, 20 nt, Human
acaccgcaaagccccaaagu

SEQ ID NO: 522503 - RNA, 21 nt, Human
acagccccggccugccccgcg

SEQ ID NO: 522504 - RNA, 21 nt, Human
acaggcgcccaccaccaugcc

SEQ ID NO: 522505 - RNA, 18 nt, Human
acgggguuucaccacguu

SEQ ID NO: 522506 - RNA, 20 nt, Human
acgggguuucaccacguuag

SEQ ID NO: 522507 - RNA, 20 nt, Human
acugcaagcucugccuccag

SEQ ID NO: 522508 - RNA, 18 nt, Human
acuuuauugccuccucuu

SEQ ID NO: 522509 - RNA, 18 nt, Human
agaagccgagggcgagug

SEQ ID NO: 522510 - RNA, 19 nt, Human
aggaauucuuuuuuuuuuu

SEQ ID NO: 522511 - RNA, 22 nt, Human
aggcagccaggcccaagcguga

SEQ ID NO: 522512 - RNA, 24 nt, Human
aggcucccagcaacucaugcacuu

SEQ ID NO: 522513 - RNA, 18 nt, Human
aggcuggagugcaguggc

SEQ ID NO: 522514 - RNA, 18 nt, Human
agggagaagccgagggcg

SEQ ID NO: 522515 - RNA, 18 nt, Human
agggagcugaccuugggg

SEQ ID NO: 522516 - RNA, 20 nt, Human
agggagcugaccuugggggc

SEQ ID NO: 522517 - RNA, 25 nt, Human
agggagcugaccuugggggccagug

SEQ ID NO: 522518 - RNA, 24 nt, Human
aguaagagacgggguuucaccacg

SEQ ID NO: 522519 - RNA, 18 nt, Human
aguagcugggacuacagg

SEQ ID NO: 522520 - RNA, 19 nt, Human
aguagcugggacuacaggc

SEQ ID NO: 522521 - RNA, 24 nt, Human
agugcaguggcgcauauucggcuc

SEQ ID NO: 522522 - RNA, 24 nt, Human
augauccucccgccucggccuccc

SEQ ID NO: 522523 - RNA, 23 nt, Human
caaacccccggccuaguccgcag

SEQ ID NO: 522524 - RNA, 28 nt, Human
caaagccccaaaguggaggguccgggag

SEQ ID NO: 522525 - RNA, 24 nt, Human
caaagugcugggauuacaggcaug

SEQ ID NO: 522526 - RNA, 18 nt, Human
caaccggcccccaggaau

SEQ ID NO: 522527 - RNA, 22 nt, Human
cacagcauucuccugccucagc

SEQ ID NO: 522528 - RNA, 18 nt, Human
caccacguuagccaggau

SEQ ID NO: 522529 - RNA, 22 nt, Human
caccacguuagccaggaugguc

SEQ ID NO: 522530 - RNA, 24 nt, Human
caccacguuagccaggauggucuc

SEQ ID NO: 522531 - RNA, 23 nt, Human
caccucaaucugggccugucugc

SEQ ID NO: 522532 - RNA, 20 nt, Human
cacgcaaccugccccgcgcg

SEQ ID NO: 522533 - RNA, 20 nt, Human
cagaaggcaccaccucaauc

SEQ ID NO: 522534 - RNA, 20 nt, Human
cagccuccugaguagcuggg

SEQ ID NO: 522535 - RNA, 23 nt, Human
ccaaagugcugggauuacaggca

SEQ ID NO: 522536 - RNA, 24 nt, Human
ccaaagugcugggauuacaggcau

SEQ ID NO: 522537 - RNA, 20 nt, Human
ccaaaguggaggguccggga

SEQ ID NO: 522538 - RNA, 21 nt, Human
ccaccgcaaccggcccccagg

SEQ ID NO: 522539 - RNA, 18 nt, Human
ccaggcccaagcgugacc

SEQ ID NO: 522540 - RNA, 24 nt, Human
cccaaagugcugggauuacaggca

SEQ ID NO: 522541 - RNA, 18 nt, Human
ccccaaaguggagggucc

SEQ ID NO: 522542 - RNA, 21 nt, Human
ccccgcacgcguccucagggc

SEQ ID NO: 522543 - RNA, 21 nt, Human
ccccgcgcgccccgaacccgg

SEQ ID NO: 522544 - RNA, 22 nt, Human
cccgcacgcguccucagggccg

SEQ ID NO: 522545 - RNA, 19 nt, Human
cccggcagaaccgccccuc

SEQ ID NO: 522546 - RNA, 21 nt, Human
ccgcaggcgggcugcccccuu

SEQ ID NO: 522547 - RNA, 22 nt, Human
ccgcuacaccgcaaagccccaa

SEQ ID NO: 522548 - RNA, 19 nt, Human
ccggcagagccgccuccuc

SEQ ID NO: 522549 - RNA, 23 nt, Human
ccgggcacggggcgguuuuuccu

SEQ ID NO: 522550 - RNA, 22 nt, Human
ccgugcaggguggcuccugagg

SEQ ID NO: 522551 - RNA, 24 nt, Human
ccuccaggguucacagcauucucc

SEQ ID NO: 522552 - RNA, 26 nt, Human
ccucccgccucggccucccaaagugc

SEQ ID NO: 522553 - RNA, 23 nt, Human
ccugaguagcugggacuacaggc

SEQ ID NO: 522554 - RNA, 23 nt, Human
ccugaguagcugggacuacaggc

SEQ ID NO: 522555 - RNA, 23 nt, Human
ccugccucagccuccugaguagc

SEQ ID NO: 522556 - RNA, 23 nt, Human
ccuugggggccagugcagaugug

SEQ ID NO: 522557 - RNA, 18 nt, Human
cgaucagggcagaggcag

SEQ ID NO: 522558 - RNA, 24 nt, Human
cgccucggccucccaaagugcugg

SEQ ID NO: 522559 - RNA, 24 nt, Human
cgcgcgccccgaacccggcagaac

SEQ ID NO: 522560 - RNA, 19 nt, Human
cggccuaguccgcaggcgg

SEQ ID NO: 522561 - RNA, 19 nt, Human
cgggacaccggcggccggg

SEQ ID NO: 522562 - RNA, 25 nt, Human
cgggaugagcacggaggggccuggg

SEQ ID NO: 522563 - RNA, 23 nt, Human
cuagcugggcauuccacagcuuc

SEQ ID NO: 522564 - RNA, 24 nt, Human
cucagccuccugaguagcugggac

SEQ ID NO: 522565 - RNA, 18 nt, Human
cucagggacggagcgguc

SEQ ID NO: 522566 - RNA, 19 nt, Human
cucagggacggagcggucc

SEQ ID NO: 522567 - RNA, 27 nt, Human
cucaugauccucccgccucggccuccc

SEQ ID NO: 522568 - RNA, 24 nt, Human
cuccugaccucaugauccucccgc

SEQ ID NO: 522569 - RNA, 22 nt, Human
cuccugccucagccuccugagu

SEQ ID NO: 522570 - RNA, 23 nt, Human
cugaccucaugauccucccgccu

SEQ ID NO: 522571 - RNA, 24 nt, Human
cugcaagcucugccuccaggguuc

SEQ ID NO: 522572 - RNA, 23 nt, Human
cugccucagccuccugaguagcu

SEQ ID NO: 522573 - RNA, 19 nt, Human
cuguugcccaggcuggagu

SEQ ID NO: 522574 - RNA, 21 nt, Human
cuuuuuuuuuuuuuuuuuuuu

SEQ ID NO: 522575 - RNA, 20 nt, Human
gaauucuuuuuuuuuuuuuu

SEQ ID NO: 522576 - RNA, 18 nt, Human
gacaccggcggccgggca

SEQ ID NO: 522577 - RNA, 22 nt, Human
gaccucaugauccucccgccuc

SEQ ID NO: 522578 - RNA, 24 nt, Human
gacuacaggcgcccaccaccaugc

SEQ ID NO: 522579 - RNA, 25 nt, Human
gacuuuccgccucuucacgcaaccu

SEQ ID NO: 522580 - RNA, 20 nt, Human
gagacgggguuucaccacgu

SEQ ID NO: 522581 - RNA, 22 nt, Human
gagcugcagcggcccguacgug

SEQ ID NO: 522582 - RNA, 25 nt, Human
gaguagcugggacuacaggcgccca

SEQ ID NO: 522583 - RNA, 21 nt, Human
gauacuaucaacauggcagcu

SEQ ID NO: 522584 - RNA, 18 nt, Human
gauccucccgccucggcc

SEQ ID NO: 522585 - RNA, 18 nt, Human
gauuacaggcaugagcca

SEQ ID NO: 522586 - RNA, 22 nt, Human
gauuacaggcaugagccaccgc

SEQ ID NO: 522587 - RNA, 23 nt, Human
gauuacaggcaugagccaccgca

SEQ ID NO: 522588 - RNA, 19 nt, Human
gcccaggcuggagugcagu

SEQ ID NO: 522589 - RNA, 20 nt, Human
gcccaggcuggagugcagug

SEQ ID NO: 522590 - RNA, 19 nt, Human
gccccgaacccggcagaac

SEQ ID NO: 522591 - RNA, 20 nt, Human
gccccgaacccggcagaacc

SEQ ID NO: 522592 - RNA, 20 nt, Human
gccgggcagggagaagccga

SEQ ID NO: 522593 - RNA, 24 nt, Human
gccuggcuaauuuuuuuguauuuu

SEQ ID NO: 522594 - RNA, 22 nt, Human
gcgcgccccgaacccggcagaa

SEQ ID NO: 522595 - RNA, 24 nt, Human
gcuacaccgcaaagccccaaagug

SEQ ID NO: 522596 - RNA, 25 nt, Human
gcucuguugcccaggcuggagugca

SEQ ID NO: 522597 - RNA, 19 nt, Human
gcugcugcaucuguuaggc

SEQ ID NO: 522598 - RNA, 19 nt, Human
gcuggagugcaguggcgca

SEQ ID NO: 522599 - RNA, 23 nt, Human
ggaauucuuuuuuuuuuuuuuuu

SEQ ID NO: 522600 - RNA, 18 nt, Human
ggagaagccgagggcgag

SEQ ID NO: 522601 - RNA, 22 nt, Human
ggagacggagucuugcucuguu

SEQ ID NO: 522602 - RNA, 21 nt, Human
ggagcgguccgggaugagcac

SEQ ID NO: 522603 - RNA, 22 nt, Human
ggagcugaccuugggggccagu

SEQ ID NO: 522604 - RNA, 23 nt, Human
ggagucuugcucuguugcccagg

SEQ ID NO: 522605 - RNA, 19 nt, Human
ggaugagcacggaggggcc

SEQ ID NO: 522606 - RNA, 22 nt, Human
ggauuacaggcaugagccaccg

SEQ ID NO: 522607 - RNA, 21 nt, Human
gggcagaggcagaaggcacca

SEQ ID NO: 522608 - RNA, 20 nt, Human
gggccgggcugcgcggggag

SEQ ID NO: 522609 - RNA, 21 nt, Human
gggcugcccccucacagcccc

SEQ ID NO: 522610 - RNA, 22 nt, Human
ggguuucaccacguuagccagg

SEQ ID NO: 522611 - RNA, 20 nt, Human
ggucucgaucuccugaccuc

SEQ ID NO: 522612 - RNA, 23 nt, Human
uacaggcaugagccaccgcaacc

SEQ ID NO: 522613 - RNA, 23 nt, Human
uaccacuguguuucauguuuuug

SEQ ID NO: 522614 - RNA, 23 nt, Human
ucaaacccccggccuaguccgca

SEQ ID NO: 522615 - RNA, 24 nt, Human
ucaccacguuagccaggauggucu

SEQ ID NO: 522616 - RNA, 18 nt, Human
ucacugcaagcucugccu

SEQ ID NO: 522617 - RNA, 23 nt, Human
ucacugcaagcucugccuccagg

SEQ ID NO: 522618 - RNA, 24 nt, Human
ucacugcaagcucugccuccaggg

SEQ ID NO: 522619 - RNA, 19 nt, Human
ucagaaguggugcuaccac

SEQ ID NO: 522620 - RNA, 23 nt, Human
ucagccuccugaguagcugggac

SEQ ID NO: 522621 - RNA, 21 nt, Human
ucaggcucccagcaacucaug

SEQ ID NO: 522622 - RNA, 24 nt, Human
ucagggacggagcgguccgggaug

SEQ ID NO: 522623 - RNA, 24 nt, Human
uccaggguucacagcauucuccug

SEQ ID NO: 522624 - RNA, 24 nt, Human
ucccaaagugcugggauuacaggc

SEQ ID NO: 522625 - RNA, 22 nt, Human
uccccggcagagccgccuccuc

SEQ ID NO: 522626 - RNA, 18 nt, Human
uccucagggccgccccag

SEQ ID NO: 522627 - RNA, 24 nt, Human
uccugaguagcugggacuacaggc

SEQ ID NO: 522628 - RNA, 21 nt, Human
uccuggagcugcagcggcccg

SEQ ID NO: 522629 - RNA, 18 nt, Human
ucggccucccaaagugcu

SEQ ID NO: 522630 - RNA, 18 nt, Human
ucgggccgggcugcgcgg

SEQ ID NO: 522631 - RNA, 22 nt, Human
ucucaucagaaguggugcuacc

SEQ ID NO: 522632 - RNA, 22 nt, Human
ucuggcuaaagacugcugcugc

SEQ ID NO: 522633 - RNA, 18 nt, Human
ucuguugcccaggcugga

SEQ ID NO: 522634 - RNA, 24 nt, Human
ucuguugcccaggcuggagugcag

SEQ ID NO: 522635 - RNA, 23 nt, Human
ucuugcucuguugcccaggcugg

SEQ ID NO: 522636 - RNA, 24 nt, Human
ucuugcucuguugcccaggcugga

SEQ ID NO: 522637 - RNA, 28 nt, Human
ucuuuuuuuuuuuuuuuuuuuuuggggg

SEQ ID NO: 522638 - RNA, 22 nt, Human
ugaccucaugauccucccgccu

SEQ ID NO: 522639 - RNA, 21 nt, Human
ugaggcagccaggcccaagcg

SEQ ID NO: 522640 - RNA, 18 nt, Human
ugcccaggcuggagugca

SEQ ID NO: 522641 - RNA, 21 nt, Human
ugcccaggcuggagugcagug

SEQ ID NO: 522642 - RNA, 22 nt, Human
ugcccaggcuggagugcagugg

SEQ ID NO: 522643 - RNA, 24 nt, Human
ugcccaggcuggagugcaguggcg

SEQ ID NO: 522644 - RNA, 24 nt, Human
ugccucagccuccugaguagcugg

SEQ ID NO: 522645 - RNA, 19 nt, Human
ugcgcggggaggcggcggg

SEQ ID NO: 522646 - RNA, 19 nt, Human
ugcucaggcucccagcaac

SEQ ID NO: 522647 - RNA, 24 nt, Human
ugcucuguugcccaggcuggagug

SEQ ID NO: 522648 - RNA, 24 nt, Human
uggagugcaguggcgcauauucgg

SEQ ID NO: 522649 - RNA, 20 nt, Human
uggcuuagaugaaaugucuu

SEQ ID NO: 522650 - RNA, 21 nt, Human
ugggacuacaggcgcccacca

SEQ ID NO: 522651 - RNA, 24 nt, Human
ugggacuacaggcgcccaccacca

SEQ ID NO: 522652 - RNA, 25 nt, Human
ugggacuacaggcgcccaccaccau

SEQ ID NO: 522653 - RNA, 22 nt, Human
ugggagaagccgcgguuccggg

SEQ ID NO: 522654 - RNA, 18 nt, Human
ugggauuacaggcaugag

SEQ ID NO: 522655 - RNA, 19 nt, Human
ugggauuacaggcaugagc

SEQ ID NO: 522656 - RNA, 21 nt, Human
ugggauuacaggcaugagcca

SEQ ID NO: 522657 - RNA, 22 nt, Human
ugggauuacaggcaugagccac

SEQ ID NO: 522658 - RNA, 23 nt, Human
ugggauuacaggcaugagccacc

SEQ ID NO: 522659 - RNA, 24 nt, Human
ugggauuacaggcaugagccaccg

SEQ ID NO: 522660 - RNA, 24 nt, Human
ugggauuacaggcaugagccaccg

SEQ ID NO: 522661 - RNA, 22 nt, Human
uguauuuuuaguaagagacggg

SEQ ID NO: 522662 - RNA, 19 nt, Human
ugucugcuguggcugguca

SEQ ID NO: 522663 - RNA, 18 nt, Human
ugucuuuuuuuuuuuugg

SEQ ID NO: 522664 - RNA, 23 nt, Human
uuaaugguuccagagaguucucu

SEQ ID NO: 522665 - RNA, 24 nt, Human
uucaccacugguacaccucagaua

SEQ ID NO: 522666 - RNA, 25 nt, Human
uuuguccccggcagagccgccuccc

SEQ ID NO: 522667 - RNA, 25 nt, Human
uuuuuaguaagagacgggguuucac

SEQ ID NO: 522668 - RNA, 25 nt, Human
uuuuuuguauuuuuaguaagagacg

SEQ ID NO: 522669 - RNA, 25 nt, Human
uuuuuuuuuuuuggagacggagucu

SEQ ID NO: 522670 - RNA, 23 nt, Human
uuuuuuuuuuuuuuggagacgga

SEQ ID NO: 522671 - RNA, 18 nt, Human
aaacaacccucccgucac

SEQ ID NO: 522672 - RNA, 19 nt, Human
aaacaacccucccgucacc

SEQ ID NO: 522673 - RNA, 19 nt, Human
aaagugcugggauuacaga

SEQ ID NO: 522674 - RNA, 24 nt, Human
aaagugcugggauuacagacguga

SEQ ID NO: 522675 - RNA, 21 nt, Human
aaauccuaagauucccacccc

SEQ ID NO: 522676 - RNA, 21 nt, Human
aaaucuggcaacaaauccuaa

SEQ ID NO: 522677 - RNA, 19 nt, Human
aaccagaagaaaauucccc

SEQ ID NO: 522678 - RNA, 25 nt, Human
aacuugcugaucuccuccugaaucu

SEQ ID NO: 522679 - RNA, 20 nt, Human
aagcucuugccuugcccucc

SEQ ID NO: 522680 - RNA, 19 nt, Human
aagugcugggauuacagac

SEQ ID NO: 522681 - RNA, 19 nt, Human
aagugcugggauuacagac

SEQ ID NO: 522682 - RNA, 20 nt, Human
acuuggagcuggaguccugu

SEQ ID NO: 522683 - RNA, 21 nt, Human
agggaggagacggggacaagg

SEQ ID NO: 522684 - RNA, 24 nt, Human
agugcugggauuacagacgugagu

SEQ ID NO: 522685 - RNA, 24 nt, Human
augggucuugcuguguugcccagg

SEQ ID NO: 522686 - RNA, 21 nt, Human
auuguucucaauguucuucau

SEQ ID NO: 522687 - RNA, 28 nt, Human
caaaaauacaauauuuuuuuccucuccc

SEQ ID NO: 522688 - RNA, 24 nt, Human
caaagugcugggauuacagacgug

SEQ ID NO: 522689 - RNA, 23 nt, Human
caacacuauucuauaucagacaa

SEQ ID NO: 522690 - RNA, 22 nt, Human
caagaaaacccacuuggagcug

SEQ ID NO: 522691 - RNA, 24 nt, Human
cacccccuccugcaacaaugauuc

SEQ ID NO: 522692 - RNA, 25 nt, Human
cacccccuccugcaacaaugauuca

SEQ ID NO: 522693 - RNA, 19 nt, Human
caggggagccaagaaaacc

SEQ ID NO: 522694 - RNA, 23 nt, Human
caggggagccaagaaaacccacu

SEQ ID NO: 522695 - RNA, 18 nt, Human
cauaaaacccacacccca

SEQ ID NO: 522696 - RNA, 18 nt, Human
cauaaaacccacacccca

SEQ ID NO: 522697 - RNA, 22 nt, Human
ccaaagugcugggauuacagac

SEQ ID NO: 522698 - RNA, 24 nt, Human
ccaaagugcugggauuacagacgu

SEQ ID NO: 522699 - RNA, 24 nt, Human
ccacaccccagcaucagcccuggc

SEQ ID NO: 522700 - RNA, 18 nt, Human
ccacccccuccugcaaca

SEQ ID NO: 522701 - RNA, 21 nt, Human
cccagcaucagcccuggcgcc

SEQ ID NO: 522702 - RNA, 24 nt, Human
cccagcaucagcccuggcgccaau

SEQ ID NO: 522703 - RNA, 22 nt, Human
ccccagcaucagcccuggcgcc

SEQ ID NO: 522704 - RNA, 21 nt, Human
ccuuggggagugugagugggg

SEQ ID NO: 522705 - RNA, 19 nt, Human
cgguuugcucccggucugg

SEQ ID NO: 522706 - RNA, 21 nt, Human
cugauggugaaauguacccuc

SEQ ID NO: 522707 - RNA, 19 nt, Human
cuugcugaucuccuccuga

SEQ ID NO: 522708 - RNA, 22 nt, Human
cuugcuguguugcccaggcugg

SEQ ID NO: 522709 - RNA, 18 nt, Human
gauuacagacgugaguca

SEQ ID NO: 522710 - RNA, 19 nt, Human
gauuacagacgugagucac

SEQ ID NO: 522711 - RNA, 21 nt, Human
gauuacagacgugagucacca

SEQ ID NO: 522712 - RNA, 20 nt, Human
gggaacagggaggagacggg

SEQ ID NO: 522713 - RNA, 22 nt, Human
gggucuugcuguguugcccagg

SEQ ID NO: 522714 - RNA, 19 nt, Human
gugacaaggacagaaucug

SEQ ID NO: 522715 - RNA, 22 nt, Human
uaaaacccacaccccagcauca

SEQ ID NO: 522716 - RNA, 23 nt, Human
uaaaaugaaaauaugcaaguucc

SEQ ID NO: 522717 - RNA, 22 nt, Human
uaagucacagagccuguccuga

SEQ ID NO: 522718 - RNA, 25 nt, Human
uaauuaccagcugauuguucucaau

SEQ ID NO: 522719 - RNA, 19 nt, Human
uacccucaacuugcugauc

SEQ ID NO: 522720 - RNA, 23 nt, Human
uccauaauuaccagcugauuguu

SEQ ID NO: 522721 - RNA, 18 nt, Human
ucccaaagugcugggauu

SEQ ID NO: 522722 - RNA, 24 nt, Human
ucccaaagugcugggauuacagac

SEQ ID NO: 522723 - RNA, 21 nt, Human
ucccuucaucugaaugagggu

SEQ ID NO: 522724 - RNA, 23 nt, Human
uccuaagauucccacccccuccu

SEQ ID NO: 522725 - RNA, 19 nt, Human
uccucucccucuuccucca

SEQ ID NO: 522726 - RNA, 20 nt, Human
uccugaaucucaaacaaccc

SEQ ID NO: 522727 - RNA, 19 nt, Human
ucucccucuuccuccaucc

SEQ ID NO: 522728 - RNA, 21 nt, Human
ucuccuccugaaucucaaaca

SEQ ID NO: 522729 - RNA, 22 nt, Human
ucugucuugugaaacaaccaga

SEQ ID NO: 522730 - RNA, 18 nt, Human
ucuugcuguguugcccag

SEQ ID NO: 522731 - RNA, 19 nt, Human
ucuugcuguguugcccagg

SEQ ID NO: 522732 - RNA, 23 nt, Human
ucuugcuguguugcccaggcugg

SEQ ID NO: 522733 - RNA, 24 nt, Human
ucuugcuguguugcccaggcuggu

SEQ ID NO: 522734 - RNA, 19 nt, Human
ugaucuccuccugaaucuc

SEQ ID NO: 522735 - RNA, 19 nt, Human
ugcaaguuccagugacuuu

SEQ ID NO: 522736 - RNA, 24 nt, Human
ugccuugcccucccaaagugcugg

SEQ ID NO: 522737 - RNA, 24 nt, Human
ugcugggauuacagacgugaguca

SEQ ID NO: 522738 - RNA, 24 nt, Human
ugcuguguugcccaggcuggucuu

SEQ ID NO: 522739 - RNA, 18 nt, Human
uggcugguccccgccucc

SEQ ID NO: 522740 - RNA, 18 nt, Human
ugggauuacagacgugag

SEQ ID NO: 522741 - RNA, 18 nt, Human
ugggauuacagacgugag

SEQ ID NO: 522742 - RNA, 22 nt, Human
ugggauuacagacgugagucac

SEQ ID NO: 522743 - RNA, 24 nt, Human
ugggauuacagacgugagucacca

SEQ ID NO: 522744 - RNA, 18 nt, Human
uggggagugugagugggg

SEQ ID NO: 522745 - RNA, 19 nt, Human
uguccugagucccuucauc

SEQ ID NO: 522746 - RNA, 19 nt, Human
ugugaaacaaccagaagaa

SEQ ID NO: 522747 - RNA, 20 nt, Human
ugugaaacaaccagaagaaa

SEQ ID NO: 522748 - RNA, 19 nt, Human
uguguugcccaggcugguc

SEQ ID NO: 522749 - RNA, 21 nt, Human
uuaaaugugggggaugaaggg

SEQ ID NO: 522750 - RNA, 21 nt, Human
uucccacccccuccugcaaca

SEQ ID NO: 522751 - RNA, 19 nt, Human
uugagccgugggccuuggg

SEQ ID NO: 522752 - RNA, 24 nt, Human
uugccuugcccucccaaagugcug

SEQ ID NO: 522753 - RNA, 21 nt, Human
uuuuuuuccucucccucuucc

SEQ ID NO: 522754 - RNA, 23 nt, Human
aaacacaaccggcgccagccccg

SEQ ID NO: 522755 - RNA, 18 nt, Human
aaacauagaucauuuguc

SEQ ID NO: 522756 - RNA, 18 nt, Human
aacacaacuucugcuggu

SEQ ID NO: 522757 - RNA, 21 nt, Human
aacaccuucccuagaaaacca

SEQ ID NO: 522758 - RNA, 24 nt, Human
aaccuuuacaaaacccuacccccc

SEQ ID NO: 522759 - RNA, 24 nt, Human
aagaaggcaagguggacacaaaca

SEQ ID NO: 522760 - RNA, 24 nt, Human
aagcgccucccaaggcccccccac

SEQ ID NO: 522761 - RNA, 26 nt, Human
aagcgccucccaaggcccccccaccc

SEQ ID NO: 522762 - RNA, 19 nt, Human
aaggcccccccacccugcc

SEQ ID NO: 522763 - RNA, 21 nt, Human
aaggcccccccacccugccca

SEQ ID NO: 522764 - RNA, 21 nt, Human
aagguggacacaaacacaacc

SEQ ID NO: 522765 - RNA, 25 nt, Human
aaguccaaaucaaggucaaaggcac

SEQ ID NO: 522766 - RNA, 18 nt, Human
aagucccacuccacaaaa

SEQ ID NO: 522767 - RNA, 28 nt, Human
accauuguaaaagaaaagucauccugaa

SEQ ID NO: 522768 - RNA, 21 nt, Human
acccacacagaucccccacaa

SEQ ID NO: 522769 - RNA, 20 nt, Human
accccuccgcauccuccccc

SEQ ID NO: 522770 - RNA, 22 nt, Human
accccuccgcauccuccccccg

SEQ ID NO: 522771 - RNA, 19 nt, Human
agaggcaaggaucccggag

SEQ ID NO: 522772 - RNA, 25 nt, Human
agcugcccucgggacagagcagguu

SEQ ID NO: 522773 - RNA, 23 nt, Human
aggcccccccacccugcccaggg

SEQ ID NO: 522774 - RNA, 18 nt, Human
agguguguggcgcagacg

SEQ ID NO: 522775 - RNA, 21 nt, Human
auccugaauccugaaagaccc

SEQ ID NO: 522776 - RNA, 20 nt, Human
augcaucuuuaauucacaaa

SEQ ID NO: 522777 - RNA, 19 nt, Human
caagaagcgccucccaagg

SEQ ID NO: 522778 - RNA, 22 nt, Human
caagaagcgccucccaaggccc

SEQ ID NO: 522779 - RNA, 22 nt, Human
cacaaccggcgccagccccggc

SEQ ID NO: 522780 - RNA, 23 nt, Human
caccaaaugcaaaagggagaaaa

SEQ ID NO: 522781 - RNA, 19 nt, Human
cacuccgucuccucucuga

SEQ ID NO: 522782 - RNA, 20 nt, Human
cagagcagguucucgggaag

SEQ ID NO: 522783 - RNA, 24 nt, Human
cagcccgcugcacgcccccuccuc

SEQ ID NO: 522784 - RNA, 21 nt, Human
caggcgcagcggggccgggcu

SEQ ID NO: 522785 - RNA, 27 nt, Human
ccacacuccgucuccucucugagacuc

SEQ ID NO: 522786 - RNA, 19 nt, Human
ccacuccacaaaaacugcu

SEQ ID NO: 522787 - RNA, 18 nt, Human
ccagccgccuccgccggc

SEQ ID NO: 522788 - RNA, 23 nt, Human
ccaggauggaucugcguugagaa

SEQ ID NO: 522789 - RNA, 19 nt, Human
cccagaacaccuucccuag

SEQ ID NO: 522790 - RNA, 23 nt, Human
ccccacaacccgggcucugccga

SEQ ID NO: 522791 - RNA, 25 nt, Human
ccccacccugcccagggugcccccc

SEQ ID NO: 522792 - RNA, 19 nt, Human
cccccacacuccgucuccu

SEQ ID NO: 522793 - RNA, 18 nt, Human
cccccaccacauccucgc

SEQ ID NO: 522794 - RNA, 19 nt, Human
ccccccacccugcccaggg

SEQ ID NO: 522795 - RNA, 22 nt, Human
cccgcagcccccaccacauccu

SEQ ID NO: 522796 - RNA, 23 nt, Human
cccguccuccagcccgcugcacc

SEQ ID NO: 522797 - RNA, 21 nt, Human
cccuaccccccaucuuuguug

SEQ ID NO: 522798 - RNA, 19 nt, Human
cccuccgcauccucccccc

SEQ ID NO: 522799 - RNA, 20 nt, Human
cccugcucugggccggcccc

SEQ ID NO: 522800 - RNA, 22 nt, Human
cccugcucugggccggccccgg

SEQ ID NO: 522801 - RNA, 22 nt, Human
ccgaguggcccugcucugggcc

SEQ ID NO: 522802 - RNA, 25 nt, Human
ccgcagcccccaccacauccucgcu

SEQ ID NO: 522803 - RNA, 21 nt, Human
ccucccaaggcccccccaccc

SEQ ID NO: 522804 - RNA, 24 nt, Human
ccucccaaggcccccccacccugc

SEQ ID NO: 522805 - RNA, 25 nt, Human
ccucccaaggcccccccacccugcc

SEQ ID NO: 522806 - RNA, 22 nt, Human
ccucccacagcuggagagagcc

SEQ ID NO: 522807 - RNA, 20 nt, Human
ccuccgcauccuccccccgc

SEQ ID NO: 522808 - RNA, 21 nt, Human
ccugaaagaccccuggggcgg

SEQ ID NO: 522809 - RNA, 22 nt, Human
ccuuuacaaaacccuacccccc

SEQ ID NO: 522810 - RNA, 24 nt, Human
cgacaggcuggcagggccccaggu

SEQ ID NO: 522811 - RNA, 22 nt, Human
cgcauccuccccccgcagcccc

SEQ ID NO: 522812 - RNA, 23 nt, Human
cgcuccgucccacgucccguccu

SEQ ID NO: 522813 - RNA, 22 nt, Human
cggcaccagccgccuccgccgg

SEQ ID NO: 522814 - RNA, 21 nt, Human
cggcccggacaggcgcagcgg

SEQ ID NO: 522815 - RNA, 23 nt, Human
cggcccucccucccccacacucc

SEQ ID NO: 522816 - RNA, 21 nt, Human
cucgaggucagccaucccugc

SEQ ID NO: 522817 - RNA, 21 nt, Human
cuggagagagcccggccccca

SEQ ID NO: 522818 - RNA, 18 nt, Human
cugucggguggugacggu

SEQ ID NO: 522819 - RNA, 21 nt, Human
cuguuuuguuuuuugcuugug

SEQ ID NO: 522820 - RNA, 22 nt, Human
gaaaaguccaaaucaaggucaa

SEQ ID NO: 522821 - RNA, 23 nt, Human
gaaaccccuccgcauccuccccc

SEQ ID NO: 522822 - RNA, 22 nt, Human
gacaggcuggcagggccccagg

SEQ ID NO: 522823 - RNA, 21 nt, Human
gagcugcugcagguguguggc

SEQ ID NO: 522824 - RNA, 19 nt, Human
gcacagaaaccccuccgca

SEQ ID NO: 522825 - RNA, 25 nt, Human
gccggcccucccucccccacacucc

SEQ ID NO: 522826 - RNA, 20 nt, Human
ggagcagggcggcugccgca

SEQ ID NO: 522827 - RNA, 21 nt, Human
ggcaagaagcgccucccaagg

SEQ ID NO: 522828 - RNA, 20 nt, Human
ggcaguggcggcaccagccc

SEQ ID NO: 522829 - RNA, 20 nt, Human
ggcccccccacccugcccag

SEQ ID NO: 522830 - RNA, 23 nt, Human
ggcgccagccccggcccggacag

SEQ ID NO: 522831 - RNA, 21 nt, Human
gguaaaaauuccugccgugga

SEQ ID NO: 522832 - RNA, 21 nt, Human
gucccgggcccgcugaccagc

SEQ ID NO: 522833 - RNA, 26 nt, Human
uaaaagaaaagucauccugaauccug

SEQ ID NO: 522834 - RNA, 18 nt, Human
uacaaaacccuacccccc

SEQ ID NO: 522835 - RNA, 23 nt, Human
uagcuugucgagaagcagggcag

SEQ ID NO: 522836 - RNA, 19 nt, Human
ucacaaauaaaagcuguag

SEQ ID NO: 522837 - RNA, 18 nt, Human
ucagaaaguaugagccug

SEQ ID NO: 522838 - RNA, 21 nt, Human
ucccacagcuggagagagccc

SEQ ID NO: 522839 - RNA, 20 nt, Human
ucccacgucccguccuccag

SEQ ID NO: 522840 - RNA, 21 nt, Human
ucccccacacuccgucuccuc

SEQ ID NO: 522841 - RNA, 23 nt, Human
ucccccacacuccgucuccucuc

SEQ ID NO: 522842 - RNA, 21 nt, Human
ucccgugugagcugcugcagg

SEQ ID NO: 522843 - RNA, 20 nt, Human
ucccuagaaaaccauaaaaa

SEQ ID NO: 522844 - RNA, 20 nt, Human
uccuaugcuaugcacgaucc

SEQ ID NO: 522845 - RNA, 20 nt, Human
ucggccucugggcgacaggc

SEQ ID NO: 522846 - RNA, 20 nt, Human
ucgggacagagcagguucuc

SEQ ID NO: 522847 - RNA, 21 nt, Human
ucguguggcaguggcggcacc

SEQ ID NO: 522848 - RNA, 19 nt, Human
ucugcuggugucucaaguc

SEQ ID NO: 522849 - RNA, 22 nt, Human
ucuguuuuguuuuuugcuugug

SEQ ID NO: 522850 - RNA, 23 nt, Human
ugaacacaacuucugcugguguc

SEQ ID NO: 522851 - RNA, 19 nt, Human
ugaauccugaaagaccccu

SEQ ID NO: 522852 - RNA, 18 nt, Human
ugagaacccacacagauc

SEQ ID NO: 522853 - RNA, 20 nt, Human
ugauauaaaaauaugaaccu

SEQ ID NO: 522854 - RNA, 23 nt, Human
ugcacagaaaccccuccgcaucc

SEQ ID NO: 522855 - RNA, 22 nt, Human
uggaucugcguugagaacccac

SEQ ID NO: 522856 - RNA, 18 nt, Human
uggcaagaagcgccuccc

SEQ ID NO: 522857 - RNA, 24 nt, Human
uggcaagaagcgccucccaaggcc

SEQ ID NO: 522858 - RNA, 18 nt, Human
uggcagggccccaggugc

SEQ ID NO: 522859 - RNA, 20 nt, Human
uggcagggccccaggugcug

SEQ ID NO: 522860 - RNA, 21 nt, Human
uggcagggccccaggugcugg

SEQ ID NO: 522861 - RNA, 18 nt, Human
uggcgcagacgucacagc

SEQ ID NO: 522862 - RNA, 22 nt, Human
uguagcaagaugucaucuacac

SEQ ID NO: 522863 - RNA, 18 nt, Human
uuuacaaaacccuacccc

SEQ ID NO: 522864 - RNA, 21 nt, Human
uuuacaaaacccuacccccca

SEQ ID NO: 522865 - RNA, 19 nt, Human
aaccugcaagaauaaaaag

SEQ ID NO: 522866 - RNA, 21 nt, Human
acugacuuaaaaggacacagu

SEQ ID NO: 522867 - RNA, 19 nt, Human
caacguguacaucuuagcc

SEQ ID NO: 522868 - RNA, 18 nt, Human
cagagccucaccccaaug

SEQ ID NO: 522869 - RNA, 21 nt, Human
cagcaccccgggccggggccu

SEQ ID NO: 522870 - RNA, 22 nt, Human
cagcagcacuggacgugguggu

SEQ ID NO: 522871 - RNA, 22 nt, Human
cagggcugggcuggcaagaagc

SEQ ID NO: 522872 - RNA, 21 nt, Human
ccccgggccggggccuggcuc

SEQ ID NO: 522873 - RNA, 19 nt, Human
cggggaggcagggcugggc

SEQ ID NO: 522874 - RNA, 31 nt, Human
cugguggugguggagguaguggcuucuucuu

SEQ ID NO: 522875 - RNA, 18 nt, Human
gaagcuuggaggacaggg

SEQ ID NO: 522876 - RNA, 19 nt, Human
gacuuaaaaggacacagua

SEQ ID NO: 522877 - RNA, 20 nt, Human
gacuuaguucaauuuacuga

SEQ ID NO: 522878 - RNA, 21 nt, Human
gccggggccuggcucacuugg

SEQ ID NO: 522879 - RNA, 24 nt, Human
ggagaccggggaggcagggcuggg

SEQ ID NO: 522880 - RNA, 20 nt, Human
ggcaagaagccccagcaccc

SEQ ID NO: 522881 - RNA, 24 nt, Human
ggcagggcugggcuggcaagaagc

SEQ ID NO: 522882 - RNA, 19 nt, Human
ggccuggcucacuuggcug

SEQ ID NO: 522883 - RNA, 19 nt, Human
gggaggcagggcugggcug

SEQ ID NO: 522884 - RNA, 19 nt, Human
gggcuggcaagaagcccca

SEQ ID NO: 522885 - RNA, 21 nt, Human
ggggaggcagggcugggcugg

SEQ ID NO: 522886 - RNA, 19 nt, Human
ggugggagagaggguggag

SEQ ID NO: 522887 - RNA, 20 nt, Human
guggagcgcuuggcugcccc

SEQ ID NO: 522888 - RNA, 25 nt, Human
guggggaccuuuuguagcuagagau

SEQ ID NO: 522889 - RNA, 21 nt, Human
gugguggugcuggugguggug

SEQ ID NO: 522890 - RNA, 21 nt, Human
guggugguggagguaguggcu

SEQ ID NO: 522891 - RNA, 21 nt, Human
uauggcaugggcuacuccagg

SEQ ID NO: 522892 - RNA, 23 nt, Human
uauggcaugggcuacuccagguu

SEQ ID NO: 522893 - RNA, 25 nt, Human
uauuauagaagcuuggaggacaggg

SEQ ID NO: 522894 - RNA, 21 nt, Human
ugcaagaauaaaaagauguuu

SEQ ID NO: 522895 - RNA, 19 nt, Human
ugccaagaugggcauggaa

SEQ ID NO: 522896 - RNA, 20 nt, Human
uggaggacagggugggagac

SEQ ID NO: 522897 - RNA, 23 nt, Human
uggcaagaagccccagcaccccg

SEQ ID NO: 522898 - RNA, 24 nt, Human
ugggagaccggggaggcagggcug

SEQ ID NO: 522899 - RNA, 26 nt, Human
ugggagaccggggaggcagggcuggg

SEQ ID NO: 522900 - RNA, 19 nt, Human
ugguggugcuggugguggu

SEQ ID NO: 522901 - RNA, 20 nt, Human
ugguggugguggagguagug

SEQ ID NO: 522902 - RNA, 21 nt, Human
uuaaaaggacacaguauggca

SEQ ID NO: 522903 - RNA, 24 nt, Human
aaaaguacaagaaccuggagcuca

SEQ ID NO: 522904 - RNA, 24 nt, Human
aacuaagaaaaguacaagaaccug

SEQ ID NO: 522905 - RNA, 19 nt, Human
aacucccaccccagaccuc

SEQ ID NO: 522906 - RNA, 18 nt, Human
aagaaaaguacaagaacc

SEQ ID NO: 522907 - RNA, 24 nt, Human
acucccaccccagaccuccccagg

SEQ ID NO: 522908 - RNA, 29 nt, Human
agaaaaguacaagaaccuggagcucaggg

SEQ ID NO: 522909 - RNA, 21 nt, Human
caaauucccucccucacaacu

SEQ ID NO: 522910 - RNA, 26 nt, Human
ccaccccagaccuccccagggaaacc

SEQ ID NO: 522911 - RNA, 25 nt, Human
cggggaggagcccacgcgggccgcc

SEQ ID NO: 522912 - RNA, 22 nt, Human
cucccaccccagaccuccccag

SEQ ID NO: 522913 - RNA, 26 nt, Human
cucccucacaacuaagaaaaguacaa

SEQ ID NO: 522914 - RNA, 19 nt, Human
gaaccuggagcucagggcg

SEQ ID NO: 522915 - RNA, 20 nt, Human
gaggagcccacgcgggccgc

SEQ ID NO: 522916 - RNA, 19 nt, Human
gcccagccgcccucgccgg

SEQ ID NO: 522917 - RNA, 21 nt, Human
gccggguucgcacugagccag

SEQ ID NO: 522918 - RNA, 21 nt, Human
ggaaaccuacagagguuccug

SEQ ID NO: 522919 - RNA, 21 nt, Human
ucccaccccagaccuccccag

SEQ ID NO: 522920 - RNA, 24 nt, Human
ucgcaaauucccucccucacaacu

SEQ ID NO: 522921 - RNA, 19 nt, Human
uggccugcagggcaguucu

SEQ ID NO: 522922 - RNA, 19 nt, Human
uuccuggccugcagggcag

SEQ ID NO: 522923 - RNA, 25 nt, Human
uucgcaaauucccucccucacaacu

SEQ ID NO: 522924 - RNA, 21 nt, Human
uuucgcaaauucccucccuca

SEQ ID NO: 522925 - RNA, 22 nt, Human
aaaaagcagcacaaaacccaca

SEQ ID NO: 522926 - RNA, 24 nt, Human
aaaaagcagcacaaaacccacaag

SEQ ID NO: 522927 - RNA, 19 nt, Human
aagaaaaagcagcacaaaa

SEQ ID NO: 522928 - RNA, 21 nt, Human
aagaaagaaaaagcagcacaa

SEQ ID NO: 522929 - RNA, 26 nt, Human
aagaaagaaagaaaaagcagcacaaa

SEQ ID NO: 522930 - RNA, 24 nt, Human
aagcagcacaaaacccacaagucc

SEQ ID NO: 522931 - RNA, 21 nt, Human
acaaaacccacaagucccacg

SEQ ID NO: 522932 - RNA, 19 nt, Human
accaccccacaguaauaag

SEQ ID NO: 522933 - RNA, 27 nt, Human
agaaacgacucccaaggaguccaaguc

SEQ ID NO: 522934 - RNA, 22 nt, Human
agaaagaaaaagcagcacaaaa

SEQ ID NO: 522935 - RNA, 24 nt, Human
agcacaaaacccacaagucccacg

SEQ ID NO: 522936 - RNA, 21 nt, Human
agcgaagggacugcaaagcug

SEQ ID NO: 522937 - RNA, 20 nt, Human
agcuauauagagaaguccca

SEQ ID NO: 522938 - RNA, 22 nt, Human
aguggguagaucacauucaugg

SEQ ID NO: 522939 - RNA, 19 nt, Human
augcugccguucuuccucu

SEQ ID NO: 522940 - RNA, 21 nt, Human
cacagcagagucugcgccccu

SEQ ID NO: 522941 - RNA, 23 nt, Human
cagcaaggauacgcugaaccccg

SEQ ID NO: 522942 - RNA, 21 nt, Human
cagcugcugcaggccaugcug

SEQ ID NO: 522943 - RNA, 23 nt, Human
ccagcagugcuggucucuaagac

SEQ ID NO: 522944 - RNA, 23 nt, Human
cccagaccaaggcuggccucggc

SEQ ID NO: 522945 - RNA, 22 nt, Human
cgcugcugcagcugcugcaggc

SEQ ID NO: 522946 - RNA, 19 nt, Human
cggcccagaccaaggcugg

SEQ ID NO: 522947 - RNA, 20 nt, Human
cucacagcagagucugcgcc

SEQ ID NO: 522948 - RNA, 26 nt, Human
cugcagcugcugcaggccaugcugcc

SEQ ID NO: 522949 - RNA, 19 nt, Human
cugccgcugcugcagcugc

SEQ ID NO: 522950 - RNA, 22 nt, Human
gaaaaagcagcacaaaacccac

SEQ ID NO: 522951 - RNA, 23 nt, Human
gaagugcgcaguggaaucaagag

SEQ ID NO: 522952 - RNA, 21 nt, Human
ggcuggggcuucgcacaccuc

SEQ ID NO: 522953 - RNA, 21 nt, Human
guaagcaggcacaagcucuac

SEQ ID NO: 522954 - RNA, 19 nt, Human
uaagacgguugcccagcaa

SEQ ID NO: 522955 - RNA, 18 nt, Human
uaagugacugugcaggcc

SEQ ID NO: 522956 - RNA, 22 nt, Human
uacagcuucacacggaagcgaa

SEQ ID NO: 522957 - RNA, 21 nt, Human
uacuucugccgcugcugcagc

SEQ ID NO: 522958 - RNA, 22 nt, Human
uauugcugaaguuggaaaaggg

SEQ ID NO: 522959 - RNA, 19 nt, Human
uccacugggcuuggaauag

SEQ ID NO: 522960 - RNA, 21 nt, Human
ucccaaggaguccaaguccag

SEQ ID NO: 522961 - RNA, 24 nt, Human
ucggcccagaccaaggcuggccuc

SEQ ID NO: 522962 - RNA, 18 nt, Human
ugagaggacuugauagug

SEQ ID NO: 522963 - RNA, 20 nt, Human
ugcugccguucuuccucuga

SEQ ID NO: 522964 - RNA, 25 nt, Human
uggaaaaggggaagaaagaaagaaa

SEQ ID NO: 522965 - RNA, 19 nt, Human
uggaugugagccugugaga

SEQ ID NO: 522966 - RNA, 19 nt, Human
uggccgagaaacgacuccc

SEQ ID NO: 522967 - RNA, 19 nt, Human
uggccucggccaacagcag

SEQ ID NO: 522968 - RNA, 24 nt, Human
uggggacugccaguggguagauca

SEQ ID NO: 522969 - RNA, 22 nt, Human
uguaccaccccacaguaauaag

SEQ ID NO: 522970 - RNA, 23 nt, Human
uguaccaccccacaguaauaagu

SEQ ID NO: 522971 - RNA, 22 nt, Human
uguauugcugaaguuggaaaag

SEQ ID NO: 522972 - RNA, 18 nt, Human
ugucccagucagccuucu

SEQ ID NO: 522973 - RNA, 19 nt, Human
uguuggaugugagccugug

SEQ ID NO: 522974 - RNA, 19 nt, Human
uucacacggaagcgaaggg

SEQ ID NO: 522975 - RNA, 24 nt, Human
uuugcccaguaaauccauuuguug

SEQ ID NO: 522976 - RNA, 21 nt, Human
aaccaggcaccagcuuggcuu

SEQ ID NO: 522977 - RNA, 24 nt, Human
aagagcaaugaucuggacucagag

SEQ ID NO: 522978 - RNA, 19 nt, Human
aaggaauccaggcaccgaa

SEQ ID NO: 522979 - RNA, 20 nt, Human
acaggcugcuucagccaaga

SEQ ID NO: 522980 - RNA, 18 nt, Human
accaggcaccagcuuggc

SEQ ID NO: 522981 - RNA, 21 nt, Human
accagggccuggaaugcacug

SEQ ID NO: 522982 - RNA, 22 nt, Human
accgcaguccacaggaccacga

SEQ ID NO: 522983 - RNA, 24 nt, Human
accgcaguccacaggaccacgagu

SEQ ID NO: 522984 - RNA, 31 nt, Human
agcuuggcuucggggccuggagagaaguccc

SEQ ID NO: 522985 - RNA, 24 nt, Human
aggaaccaggcaccagcuuggcuc

SEQ ID NO: 522986 - RNA, 20 nt, Human
aggaugcagaugucuuggau

SEQ ID NO: 522987 - RNA, 21 nt, Human
auagcaaugagagcagcaguc

SEQ ID NO: 522988 - RNA, 23 nt, Human
augcccugugugacacccuuuaa

SEQ ID NO: 522989 - RNA, 22 nt, Human
caaccuucacuccaccugccac

SEQ ID NO: 522990 - RNA, 23 nt, Human
cacaaccaggugcacaggucucc

SEQ ID NO: 522991 - RNA, 21 nt, Human
caccagcuuggcuucggggcc

SEQ ID NO: 522992 - RNA, 18 nt, Human
cacccuuuaaaaugcuca

SEQ ID NO: 522993 - RNA, 18 nt, Human
caccgaaggguaugcccu

SEQ ID NO: 522994 - RNA, 19 nt, Human
caccugccaccuuaauccc

SEQ ID NO: 522995 - RNA, 22 nt, Human
cagaaucccaagcuuucccucc

SEQ ID NO: 522996 - RNA, 21 nt, Human
cagagacuaccacguuccuug

SEQ ID NO: 522997 - RNA, 20 nt, Human
cagccccucucccaacccag

SEQ ID NO: 522998 - RNA, 22 nt, Human
caguucuggaggucagaagucc

SEQ ID NO: 522999 - RNA, 21 nt, Human
cauggcaccuaguggaauccc

SEQ ID NO: 523000 - RNA, 18 nt, Human
ccaccugccaccuuaauc

SEQ ID NO: 523001 - RNA, 20 nt, Human
ccaccugccaccuuaauccc

SEQ ID NO: 523002 - RNA, 19 nt, Human
ccagccccucucccaaccc

SEQ ID NO: 523003 - RNA, 19 nt, Human
cccaggagggccaggccgc

SEQ ID NO: 523004 - RNA, 24 nt, Human
ccccaacgcagcgucuauuccuug

SEQ ID NO: 523005 - RNA, 20 nt, Human
cccucucccaacccagagga

SEQ ID NO: 523006 - RNA, 22 nt, Human
ccuaguggaaucccagguucca

SEQ ID NO: 523007 - RNA, 24 nt, Human
ccuccuccuguccaugcccagccc

SEQ ID NO: 523008 - RNA, 20 nt, Human
ccucguggcagggaccaugc

SEQ ID NO: 523009 - RNA, 21 nt, Human
ccugugacuugcuggguucac

SEQ ID NO: 523010 - RNA, 18 nt, Human
ccuugagugauggcaaug

SEQ ID NO: 523011 - RNA, 23 nt, Human
cgucuugaguuucccuccagccu

SEQ ID NO: 523012 - RNA, 18 nt, Human
cugugugccaggcucugg

SEQ ID NO: 523013 - RNA, 19 nt, Human
gacucagagcucagggcca

SEQ ID NO: 523014 - RNA, 18 nt, Human
gagaccagggccuggaau

SEQ ID NO: 523015 - RNA, 20 nt, Human
gagcagcagucacaaugacc

SEQ ID NO: 523016 - RNA, 19 nt, Human
gcugguuccuucugguggc

SEQ ID NO: 523017 - RNA, 19 nt, Human
gucccuuuucccuccuccu

SEQ ID NO: 523018 - RNA, 24 nt, Human
guucucucuuuugucuccgggccc

SEQ ID NO: 523019 - RNA, 23 nt, Human
uaaaaugcucacaaccaggugcc

SEQ ID NO: 523020 - RNA, 20 nt, Human
ucaaagucagcaguugcauu

SEQ ID NO: 523021 - RNA, 23 nt, Human
ucaccugcuagcacaggucccuu

SEQ ID NO: 523022 - RNA, 21 nt, Human
ucagggccaacuccugcugga

SEQ ID NO: 523023 - RNA, 20 nt, Human
uccacaccgcaguccacagg

SEQ ID NO: 523024 - RNA, 20 nt, Human
uccagagacuaccacguucc

SEQ ID NO: 523025 - RNA, 26 nt, Human
ucccaacccagaggaaccaggcacca

SEQ ID NO: 523026 - RNA, 20 nt, Human
ucccacuuccgccacccagg

SEQ ID NO: 523027 - RNA, 22 nt, Human
ucccacuuccgccacccaggag

SEQ ID NO: 523028 - RNA, 18 nt, Human
ucccagguuccagggauu

SEQ ID NO: 523029 - RNA, 20 nt, Human
ucccggauccgccagggcuc

SEQ ID NO: 523030 - RNA, 22 nt, Human
ucucauucaggaucaucucccu

SEQ ID NO: 523031 - RNA, 19 nt, Human
ugacagggcugguuccuuc

SEQ ID NO: 523032 - RNA, 20 nt, Human
ugagaggggaggaagcuucc

SEQ ID NO: 523033 - RNA, 21 nt, Human
ugagaggggaggaagcuuccg

SEQ ID NO: 523034 - RNA, 22 nt, Human
ugcugagaggggaggaagcuuc

SEQ ID NO: 523035 - RNA, 24 nt, Human
uggccuagggacgacucuucuuca

SEQ ID NO: 523036 - RNA, 18 nt, Human
uggccucccggauccgcc

SEQ ID NO: 523037 - RNA, 25 nt, Human
uguccaugcccagccccucucccaa

SEQ ID NO: 523038 - RNA, 21 nt, Human
uucccuccuccuguccaugcc

SEQ ID NO: 523039 - RNA, 18 nt, Human
uucugguggccccaacgc

SEQ ID NO: 523040 - RNA, 22 nt, Human
uucugugaguguuucuuucuuu

SEQ ID NO: 523041 - RNA, 19 nt, Human
uuuacaguucuggagguca

SEQ ID NO: 523042 - RNA, 20 nt, Human
uuuugaguccuucucaugaa

SEQ ID NO: 523043 - RNA, 25 nt, Human
aaaggcucccaacaagccugcagga

SEQ ID NO: 523044 - RNA, 21 nt, Human
aaccugggaggugcucagucc

SEQ ID NO: 523045 - RNA, 19 nt, Human
aacuuugugagccacugcc

SEQ ID NO: 523046 - RNA, 20 nt, Human
aagaagagacuuccucagga

SEQ ID NO: 523047 - RNA, 21 nt, Human
aagccugcaggagugccucuc

SEQ ID NO: 523048 - RNA, 19 nt, Human
aaggaggaacaaggcagcg

SEQ ID NO: 523049 - RNA, 22 nt, Human
aagggcagcuggagccugagca

SEQ ID NO: 523050 - RNA, 18 nt, Human
accauguggccuuggccc

SEQ ID NO: 523051 - RNA, 18 nt, Human
accccaccauguggccuu

SEQ ID NO: 523052 - RNA, 24 nt, Human
acuuugugagccacugcccaacug

SEQ ID NO: 523053 - RNA, 23 nt, Human
agacacccacuccugugaauaug

SEQ ID NO: 523054 - RNA, 18 nt, Human
agcaaaaugcaccuagga

SEQ ID NO: 523055 - RNA, 23 nt, Human
agccagagucaccguggaaguaa

SEQ ID NO: 523056 - RNA, 19 nt, Human
agccccaggaggaggggcu

SEQ ID NO: 523057 - RNA, 18 nt, Human
agcugcaccagugcccag

SEQ ID NO: 523058 - RNA, 21 nt, Human
agggcagaggugacugggaag

SEQ ID NO: 523059 - RNA, 22 nt, Human
agggcagaggugacugggaagg

SEQ ID NO: 523060 - RNA, 20 nt, Human
auacggccugggaaccucac

SEQ ID NO: 523061 - RNA, 23 nt, Human
auguggccuuggcccuggggagg

SEQ ID NO: 523062 - RNA, 20 nt, Human
auugggucuggcuucuuucc

SEQ ID NO: 523063 - RNA, 22 nt, Human
caaaguggcuaugccaugucac

SEQ ID NO: 523064 - RNA, 18 nt, Human
caccauguggccuuggcc

SEQ ID NO: 523065 - RNA, 18 nt, Human
caccauguggccuuggcc

SEQ ID NO: 523066 - RNA, 22 nt, Human
cacccucccaucuggugacccc

SEQ ID NO: 523067 - RNA, 22 nt, Human
caccuaggauccacccacguuc

SEQ ID NO: 523068 - RNA, 23 nt, Human
caccuaggauccacccacguuca

SEQ ID NO: 523069 - RNA, 29 nt, Human
cagagccccccagaccccgaggccucccc

SEQ ID NO: 523070 - RNA, 18 nt, Human
cagcugcagagcccccca

SEQ ID NO: 523071 - RNA, 25 nt, Human
caguuuccaggucccugaaucuccc

SEQ ID NO: 523072 - RNA, 24 nt, Human
caugaaaucagagccuucccccaa

SEQ ID NO: 523073 - RNA, 20 nt, Human
caugacaagagccauaucca

SEQ ID NO: 523074 - RNA, 21 nt, Human
ccaccaccugcaacagccaga

SEQ ID NO: 523075 - RNA, 22 nt, Human
ccaccauguggccuuggcccug

SEQ ID NO: 523076 - RNA, 24 nt, Human
ccacccagacugcuucucaguccc

SEQ ID NO: 523077 - RNA, 22 nt, Human
ccacccucccaucuggugaccc

SEQ ID NO: 523078 - RNA, 20 nt, Human
ccaccugcaacagccagagu

SEQ ID NO: 523079 - RNA, 23 nt, Human
ccagugcccagaauguguccucc

SEQ ID NO: 523080 - RNA, 19 nt, Human
cccagccucuccccgaucc

SEQ ID NO: 523081 - RNA, 18 nt, Human
cccaggaggaggggcuug

SEQ ID NO: 523082 - RNA, 18 nt, Human
ccccagaccccgaggccu

SEQ ID NO: 523083 - RNA, 21 nt, Human
cccccagaccccgaggccucc

SEQ ID NO: 523084 - RNA, 23 nt, Human
cccccuugcuggagguuuaugcc

SEQ ID NO: 523085 - RNA, 19 nt, Human
ccccuccuggagcgacucc

SEQ ID NO: 523086 - RNA, 21 nt, Human
ccccuggaggccuccugggcc

SEQ ID NO: 523087 - RNA, 21 nt, Human
cccuccaaccugccacccucc

SEQ ID NO: 523088 - RNA, 21 nt, Human
ccuaaaggcucccaacaagcc

SEQ ID NO: 523089 - RNA, 19 nt, Human
ccuccaaccugccacccuc

SEQ ID NO: 523090 - RNA, 22 nt, Human
ccuccaagucuccaggguggcc

SEQ ID NO: 523091 - RNA, 23 nt, Human
ccucccacccucccaucugguga

SEQ ID NO: 523092 - RNA, 21 nt, Human
ccucugugucucagcuugacc

SEQ ID NO: 523093 - RNA, 22 nt, Human
ccuuuucacucugaaugaucuu

SEQ ID NO: 523094 - RNA, 21 nt, Human
cgacacucccaccagacaccc

SEQ ID NO: 523095 - RNA, 20 nt, Human
cgacagggggcggccagaac

SEQ ID NO: 523096 - RNA, 18 nt, Human
cucagcuugaccccuuga

SEQ ID NO: 523097 - RNA, 25 nt, Human
cucccacccucccaucuggugaccc

SEQ ID NO: 523098 - RNA, 20 nt, Human
cucucacuggccagcagcug

SEQ ID NO: 523099 - RNA, 18 nt, Human
cucuuggguucuggcccc

SEQ ID NO: 523100 - RNA, 25 nt, Human
cugaagggcaggaggacucucaggu

SEQ ID NO: 523101 - RNA, 22 nt, Human
cuggagccugagcaacugaagg

SEQ ID NO: 523102 - RNA, 20 nt, Human
cuggccacccagacugcuuc

SEQ ID NO: 523103 - RNA, 22 nt, Human
cuuacgggcccuccaaccugcc

SEQ ID NO: 523104 - RNA, 18 nt, Human
gacgcgugguucaagucc

SEQ ID NO: 523105 - RNA, 19 nt, Human
gacugcuucucagucccua

SEQ ID NO: 523106 - RNA, 18 nt, Human
gagaugccuucugcugau

SEQ ID NO: 523107 - RNA, 22 nt, Human
gaggauguagaauaguuccugc

SEQ ID NO: 523108 - RNA, 20 nt, Human
gaggccucccacccucccau

SEQ ID NO: 523109 - RNA, 18 nt, Human
gagggcguggcuccagga

SEQ ID NO: 523110 - RNA, 21 nt, Human
gaggguccuaccauggguccc

SEQ ID NO: 523111 - RNA, 18 nt, Human
gaggugacugggaaggcu

SEQ ID NO: 523112 - RNA, 19 nt, Human
gcagcugcagagcccccca

SEQ ID NO: 523113 - RNA, 21 nt, Human
gccacugcccaacuggcugcc

SEQ ID NO: 523114 - RNA, 20 nt, Human
gccccaggaggaggggcuug

SEQ ID NO: 523115 - RNA, 21 nt, Human
gccggagggcguggcuccagg

SEQ ID NO: 523116 - RNA, 19 nt, Human
gccucucacuggccagcag

SEQ ID NO: 523117 - RNA, 20 nt, Human
gccugggaaacagagaaagg

SEQ ID NO: 523118 - RNA, 20 nt, Human
gccuuggcccuggggaggag

SEQ ID NO: 523119 - RNA, 23 nt, Human
gcguggcuccaggacacagaggg

SEQ ID NO: 523120 - RNA, 24 nt, Human
gcuaccacuccagccccuccugga

SEQ ID NO: 523121 - RNA, 19 nt, Human
gcuuuguggucgucuccug

SEQ ID NO: 523122 - RNA, 22 nt, Human
ggaggugccccuggaggccucc

SEQ ID NO: 523123 - RNA, 18 nt, Human
ggcccuggggaggagggg

SEQ ID NO: 523124 - RNA, 21 nt, Human
gggcagccccaggaggagggg

SEQ ID NO: 523125 - RNA, 24 nt, Human
gggcaggaggacucucagguugcg

SEQ ID NO: 523126 - RNA, 19 nt, Human
gggcggccagaacagggug

SEQ ID NO: 523127 - RNA, 23 nt, Human
gggcggccagaacagggugggug

SEQ ID NO: 523128 - RNA, 24 nt, Human
ggggggucaguuccggguuccuuu

SEQ ID NO: 523129 - RNA, 19 nt, Human
gguaccaagggcagcugga

SEQ ID NO: 523130 - RNA, 25 nt, Human
gucuacaaacccuaacaacaaaucc

SEQ ID NO: 523131 - RNA, 21 nt, Human
guggccccuaugcacccagcc

SEQ ID NO: 523132 - RNA, 18 nt, Human
guggguaccacaugcucc

SEQ ID NO: 523133 - RNA, 24 nt, Human
uaaaagaagcaacgacacucccac

SEQ ID NO: 523134 - RNA, 22 nt, Human
uaaaauccacaucugugacaug

SEQ ID NO: 523135 - RNA, 19 nt, Human
uaccaagggcagcuggagc

SEQ ID NO: 523136 - RNA, 20 nt, Human
uaccaagggcagcuggagcc

SEQ ID NO: 523137 - RNA, 21 nt, Human
uaccauggguccccauggguc

SEQ ID NO: 523138 - RNA, 24 nt, Human
uacuaacuuuaaaagaagcaacga

SEQ ID NO: 523139 - RNA, 18 nt, Human
ucaagcagugaaccuggc

SEQ ID NO: 523140 - RNA, 23 nt, Human
ucacugggucuuccguuugaagg

SEQ ID NO: 523141 - RNA, 21 nt, Human
ucacuugggagggcugagguc

SEQ ID NO: 523142 - RNA, 20 nt, Human
ucagguucagaugauucacc

SEQ ID NO: 523143 - RNA, 18 nt, Human
ucaguccauggugccgcc

SEQ ID NO: 523144 - RNA, 18 nt, Human
ucagucccuaugguuugg

SEQ ID NO: 523145 - RNA, 23 nt, Human
ucagucuuuggguguacaggucc

SEQ ID NO: 523146 - RNA, 22 nt, Human
uccaaaaugucuccugauagca

SEQ ID NO: 523147 - RNA, 22 nt, Human
uccaagucuccaggguggcccc

SEQ ID NO: 523148 - RNA, 24 nt, Human
uccccagcuuuugguacuaucagu

SEQ ID NO: 523149 - RNA, 22 nt, Human
ucccggcuaccacuccagcccc

SEQ ID NO: 523150 - RNA, 19 nt, Human
ucccgggcuuuggggcagc

SEQ ID NO: 523151 - RNA, 22 nt, Human
ucccuuagcaaaaugcaccuag

SEQ ID NO: 523152 - RNA, 20 nt, Human
uccuggaaguggggcugggc

SEQ ID NO: 523153 - RNA, 31 nt, Human
ucuccaggguggccccuaugcacccagccuu

SEQ ID NO: 523154 - RNA, 20 nt, Human
ucucccggcuaccacuccag

SEQ ID NO: 523155 - RNA, 18 nt, Human
ugaaaggcgucugacuug

SEQ ID NO: 523156 - RNA, 21 nt, Human
ugaagggcaggaggacucuca

SEQ ID NO: 523157 - RNA, 19 nt, Human
ugaauauggaaauacggcc

SEQ ID NO: 523158 - RNA, 21 nt, Human
ugaccccuugagaccaccccc

SEQ ID NO: 523159 - RNA, 19 nt, Human
ugagaccacccccuugcug

SEQ ID NO: 523160 - RNA, 18 nt, Human
ugagaugccuucugcuga

SEQ ID NO: 523161 - RNA, 19 nt, Human
ugaucuuuuuuuuuuucag

SEQ ID NO: 523162 - RNA, 19 nt, Human
ugcagagccccccagaccc

SEQ ID NO: 523163 - RNA, 24 nt, Human
ugcagagucucccggcuaccacuc

SEQ ID NO: 523164 - RNA, 25 nt, Human
ugcagagucucccggcuaccacucc

SEQ ID NO: 523165 - RNA, 19 nt, Human
ugccaaaguggcuaugcca

SEQ ID NO: 523166 - RNA, 26 nt, Human
ugccaagcucccgggcuuuggggcag

SEQ ID NO: 523167 - RNA, 18 nt, Human
ugccagcggugagcugga

SEQ ID NO: 523168 - RNA, 18 nt, Human
ugccaggaggauguagaa

SEQ ID NO: 523169 - RNA, 23 nt, Human
ugcccagaauguguccuccucag

SEQ ID NO: 523170 - RNA, 18 nt, Human
uggaaccugggaggugcu

SEQ ID NO: 523171 - RNA, 24 nt, Human
uggaaguaagucacuugggaggga

SEQ ID NO: 523172 - RNA, 18 nt, Human
uggaauccugagaagccc

SEQ ID NO: 523173 - RNA, 19 nt, Human
uggaauccugagaagcccc

SEQ ID NO: 523174 - RNA, 21 nt, Human
uggaggccuccugggccaggg

SEQ ID NO: 523175 - RNA, 22 nt, Human
uggaggccuccugggccagggu

SEQ ID NO: 523176 - RNA, 20 nt, Human
uggccuuggcccuggggagg

SEQ ID NO: 523177 - RNA, 18 nt, Human
uggcucaggucccugcag

SEQ ID NO: 523178 - RNA, 22 nt, Human
uggcucaggucccugcaguagc

SEQ ID NO: 523179 - RNA, 23 nt, Human
uggcucaggucccugcaguagcc

SEQ ID NO: 523180 - RNA, 22 nt, Human
ugggaggugcucaguccauggu

SEQ ID NO: 523181 - RNA, 18 nt, Human
ugggcagcugcagagccc

SEQ ID NO: 523182 - RNA, 23 nt, Human
ugggcagcugcagagccccccag

SEQ ID NO: 523183 - RNA, 22 nt, Human
ugggcucuggggggucaguucc

SEQ ID NO: 523184 - RNA, 21 nt, Human
uggguaccaagggcagcugga

SEQ ID NO: 523185 - RNA, 20 nt, Human
ugucacguucccagcagacc

SEQ ID NO: 523186 - RNA, 23 nt, Human
ugugagccacugcccaacuggcu

SEQ ID NO: 523187 - RNA, 21 nt, Human
uucauccuccaagucuccagg

SEQ ID NO: 523188 - RNA, 18 nt, Human
uuccagucuggcccaggg

SEQ ID NO: 523189 - RNA, 18 nt, Human
uugggucuggcuucuuuc

SEQ ID NO: 523190 - RNA, 25 nt, Human
uugugagccacugcccaacuggcug

SEQ ID NO: 523191 - RNA, 24 nt, Human
uuucaugacaagagccauauccau

SEQ ID NO: 523192 - RNA, 24 nt, Human
aagagaaaugugucaugaaaagaa

SEQ ID NO: 523193 - RNA, 18 nt, Human
acaaacaagggacaccuc

SEQ ID NO: 523194 - RNA, 21 nt, Human
acaagaucuuccucaucgcca

SEQ ID NO: 523195 - RNA, 25 nt, Human
accaaaaucuucuguuaauuggcau

SEQ ID NO: 523196 - RNA, 20 nt, Human
accacacaaacaagggacaa

SEQ ID NO: 523197 - RNA, 20 nt, Human
accaugaaaccccuccgucu

SEQ ID NO: 523198 - RNA, 19 nt, Human
agcaagguguuaacaugua

SEQ ID NO: 523199 - RNA, 27 nt, Human
aggaagggcaacuuuuuuuuuucuuuu

SEQ ID NO: 523200 - RNA, 18 nt, Human
agguagucuaaggugaca

SEQ ID NO: 523201 - RNA, 23 nt, Human
auggaagaaaguuuaaauccaca

SEQ ID NO: 523202 - RNA, 22 nt, Human
auucaucuggcuuuaccacaca

SEQ ID NO: 523203 - RNA, 20 nt, Human
caaagccaagucuauccuuc

SEQ ID NO: 523204 - RNA, 19 nt, Human
caaaguaaaauuuugagga

SEQ ID NO: 523205 - RNA, 18 nt, Human
caacugcugagacaaauc

SEQ ID NO: 523206 - RNA, 29 nt, Human
caacuuuuuuuuuucuuuuuaauagagaa

SEQ ID NO: 523207 - RNA, 22 nt, Human
caagagugcugcaauuugcuga

SEQ ID NO: 523208 - RNA, 20 nt, Human
caauucugaagaauuacaaa

SEQ ID NO: 523209 - RNA, 18 nt, Human
cacauacacugcaaacca

SEQ ID NO: 523210 - RNA, 24 nt, Human
cacuucucacuuggaaugcugagu

SEQ ID NO: 523211 - RNA, 20 nt, Human
ccaagucuauccuucuccuu

SEQ ID NO: 523212 - RNA, 23 nt, Human
ccaaugccccacugggcucuuag

SEQ ID NO: 523213 - RNA, 23 nt, Human
ccacacaaacaagggacaccuca

SEQ ID NO: 523214 - RNA, 18 nt, Human
ccacugggcucuuaguug

SEQ ID NO: 523215 - RNA, 20 nt, Human
ccucagcuggaacaacauuc

SEQ ID NO: 523216 - RNA, 19 nt, Human
ccuuucuuucucuugcuga

SEQ ID NO: 523217 - RNA, 19 nt, Human
cgauaacaaacaucacuaa

SEQ ID NO: 523218 - RNA, 18 nt, Human
cucaucgccagcauucaa

SEQ ID NO: 523219 - RNA, 19 nt, Human
cucccaccaaaaucuucug

SEQ ID NO: 523220 - RNA, 22 nt, Human
cucuagccuuacacuucucacu

SEQ ID NO: 523221 - RNA, 19 nt, Human
cugaagaauuacaaaguaa

SEQ ID NO: 523222 - RNA, 24 nt, Human
cuguugaaucucuucuaacugugu

SEQ ID NO: 523223 - RNA, 21 nt, Human
gaaaccccuccgucugagcca

SEQ ID NO: 523224 - RNA, 21 nt, Human
gccaagucuauccuucuccuu

SEQ ID NO: 523225 - RNA, 23 nt, Human
ggaagaaaguuuaaauccacaga

SEQ ID NO: 523226 - RNA, 24 nt, Human
ggaucaaccgauggaagaaaguuu

SEQ ID NO: 523227 - RNA, 18 nt, Human
gugcuggcucucaaucuc

SEQ ID NO: 523228 - RNA, 22 nt, Human
uaaaauaaccucaaagccaagu

SEQ ID NO: 523229 - RNA, 23 nt, Human
uaaacuucucaaaaaccagccuc

SEQ ID NO: 523230 - RNA, 25 nt, Human
uaaagcuuuaaagcaaguuuucagu

SEQ ID NO: 523231 - RNA, 24 nt, Human
uaacaaacaucacuaaguuguugc

SEQ ID NO: 523232 - RNA, 18 nt, Human
uaaggugacacucagcuc

SEQ ID NO: 523233 - RNA, 19 nt, Human
uaauaagccauccaacugc

SEQ ID NO: 523234 - RNA, 23 nt, Human
uaccacacaaacaagggacaccu

SEQ ID NO: 523235 - RNA, 24 nt, Human
uaccacacaaacaagggacaccuc

SEQ ID NO: 523236 - RNA, 19 nt, Human
uaucaaagaucugaaaggc

SEQ ID NO: 523237 - RNA, 21 nt, Human
uaucaaagaucugaaaggcuu

SEQ ID NO: 523238 - RNA, 22 nt, Human
ucaucuggcuuuaccacacaaa

SEQ ID NO: 523239 - RNA, 18 nt, Human
uccaaaaacaaaaaugcg

SEQ ID NO: 523240 - RNA, 19 nt, Human
uccacaagaucuuccucau

SEQ ID NO: 523241 - RNA, 21 nt, Human
uccacaagaucuuccucaucg

SEQ ID NO: 523242 - RNA, 19 nt, Human
uccacaaucacgguaaauc

SEQ ID NO: 523243 - RNA, 23 nt, Human
ucccaccaaaaucuucuguuaau

SEQ ID NO: 523244 - RNA, 21 nt, Human
ucuauccuucuccuuccaaaa

SEQ ID NO: 523245 - RNA, 22 nt, Human
ucugaagaacuguuucaggauc

SEQ ID NO: 523246 - RNA, 23 nt, Human
ucuucuaacugugugcgcuugcu

SEQ ID NO: 523247 - RNA, 18 nt, Human
ugaaaagaaaugagacuu

SEQ ID NO: 523248 - RNA, 22 nt, Human
ugaaaagaaaugagacuuauuu

SEQ ID NO: 523249 - RNA, 19 nt, Human
ugaaaugcaucuuaaggug

SEQ ID NO: 523250 - RNA, 18 nt, Human
ugaagaacuguuucagga

SEQ ID NO: 523251 - RNA, 22 nt, Human
ugcaauguuuauaguuccuucu

SEQ ID NO: 523252 - RNA, 19 nt, Human
uggaacaacauucuguagc

SEQ ID NO: 523253 - RNA, 20 nt, Human
uggaggaagggcaacuuuuu

SEQ ID NO: 523254 - RNA, 22 nt, Human
uggaggaagggcaacuuuuuuu

SEQ ID NO: 523255 - RNA, 21 nt, Human
ugucaugaaaagaaaugagac

SEQ ID NO: 523256 - RNA, 22 nt, Human
ugucugaagaacuguuucagga

SEQ ID NO: 523257 - RNA, 20 nt, Human
uuccacauacacugcaaacc

SEQ ID NO: 523258 - RNA, 22 nt, Human
uuggcggacacuaaaauaaccu

SEQ ID NO: 523259 - RNA, 23 nt, Human
uugggcaacaccaugaaauucaa

SEQ ID NO: 523260 - RNA, 21 nt, Human
uugguaguagcaagguguuuu

SEQ ID NO: 523261 - RNA, 23 nt, Human
uuuguaaacuucucaaaaaccag

SEQ ID NO: 523262 - RNA, 22 nt, Human
aaaaaccucagacuaaacagac

SEQ ID NO: 523263 - RNA, 19 nt, Human
aaaaagcaaaacaacuuuc

SEQ ID NO: 523264 - RNA, 19 nt, Human
aaaacagaaaaucucaaac

SEQ ID NO: 523265 - RNA, 26 nt, Human
aaacaaaaagcaaaacaacuuucaga

SEQ ID NO: 523266 - RNA, 22 nt, Human
aaacaagauacagacuaguccc

SEQ ID NO: 523267 - RNA, 24 nt, Human
aaacaagauacagacuagucccaa

SEQ ID NO: 523268 - RNA, 26 nt, Human
aaacaagauacagacuagucccaaag

SEQ ID NO: 523269 - RNA, 21 nt, Human
aaacagaaaaucucaaacaau

SEQ ID NO: 523270 - RNA, 20 nt, Human
aaagcaaaacaacuuucaga

SEQ ID NO: 523271 - RNA, 25 nt, Human
aaaugauagaaguucugugagaacu

SEQ ID NO: 523272 - RNA, 21 nt, Human
aacagaaaaucucaaacaauc

SEQ ID NO: 523273 - RNA, 24 nt, Human
aacuucccacacgggggacacacc

SEQ ID NO: 523274 - RNA, 21 nt, Human
aagaaaaauagggauuagccg

SEQ ID NO: 523275 - RNA, 19 nt, Human
aagaagccagagacaggag

SEQ ID NO: 523276 - RNA, 20 nt, Human
aagccuacaaucuaacuaag

SEQ ID NO: 523277 - RNA, 23 nt, Human
aaggagcccuaccucucaagagu

SEQ ID NO: 523278 - RNA, 18 nt, Human
aaggggaaaacaaaaagc

SEQ ID NO: 523279 - RNA, 21 nt, Human
acacacacacagacacacaca

SEQ ID NO: 523280 - RNA, 27 nt, Human
acacgcagacaagaucucucucucaca

SEQ ID NO: 523281 - RNA, 19 nt, Human
acaucacagucagcugccu

SEQ ID NO: 523282 - RNA, 22 nt, Human
acuaaaacacaagagccucaca

SEQ ID NO: 523283 - RNA, 25 nt, Human
acuuaaaaaacaagauacagacuag

SEQ ID NO: 523284 - RNA, 21 nt, Human
acuugcugucucuccucucca

SEQ ID NO: 523285 - RNA, 21 nt, Human
acuugcugucucuccucucca

SEQ ID NO: 523286 - RNA, 19 nt, Human
agaaagucugagagcaacc

SEQ ID NO: 523287 - RNA, 20 nt, Human
agacacacacagcucccaaa

SEQ ID NO: 523288 - RNA, 19 nt, Human
agacuuaaaaaacaagaua

SEQ ID NO: 523289 - RNA, 20 nt, Human
agagagaagcuaggaugggg

SEQ ID NO: 523290 - RNA, 20 nt, Human
agauaaacccccugcucacc

SEQ ID NO: 523291 - RNA, 22 nt, Human
agauacagacuagucccaaagc

SEQ ID NO: 523292 - RNA, 23 nt, Human
agaugugagggugggaaggggaa

SEQ ID NO: 523293 - RNA, 23 nt, Human
agcuggacucugugaauaaaguu

SEQ ID NO: 523294 - RNA, 22 nt, Human
aggaaaaaaaaaaucaaaagaa

SEQ ID NO: 523295 - RNA, 18 nt, Human
agggguguggcuacuggc

SEQ ID NO: 523296 - RNA, 24 nt, Human
aggugggaagacagguagggcugg

SEQ ID NO: 523297 - RNA, 19 nt, Human
aguguuguuagacuuaaaa

SEQ ID NO: 523298 - RNA, 19 nt, Human
auaaaggagcccuaccucu

SEQ ID NO: 523299 - RNA, 18 nt, Human
auaguacaaaacauccua

SEQ ID NO: 523300 - RNA, 18 nt, Human
aucacagucagcugccug

SEQ ID NO: 523301 - RNA, 24 nt, Human
aucucucucucacacacacacaga

SEQ ID NO: 523302 - RNA, 24 nt, Human
augaagccuuuuguagccucugga

SEQ ID NO: 523303 - RNA, 20 nt, Human
auggcagagaggauucuccu

SEQ ID NO: 523304 - RNA, 23 nt, Human
cacacacacacacgcagacaaga

SEQ ID NO: 523305 - RNA, 18 nt, Human
cacacagacacacacagc

SEQ ID NO: 523306 - RNA, 21 nt, Human
cacacagacacacacagcucc

SEQ ID NO: 523307 - RNA, 22 nt, Human
cacacagcucccaaacuuucac

SEQ ID NO: 523308 - RNA, 22 nt, Human
cacacaguaccuacaggcacac

SEQ ID NO: 523309 - RNA, 22 nt, Human
cacacaguaccuacaggcacac

SEQ ID NO: 523310 - RNA, 23 nt, Human
cacacaugaagcacucacuacac

SEQ ID NO: 523311 - RNA, 26 nt, Human
cacagauaaacccccugcucaccccc

SEQ ID NO: 523312 - RNA, 27 nt, Human
cacagauaaacccccugcucacccccc

SEQ ID NO: 523313 - RNA, 23 nt, Human
cacaguaccuacaggcacacaag

SEQ ID NO: 523314 - RNA, 27 nt, Human
cacuacacacagauaaacccccugcuc

SEQ ID NO: 523315 - RNA, 22 nt, Human
cagaaagucugagagcaaccau

SEQ ID NO: 523316 - RNA, 22 nt, Human
cagacacacacagcucccaaac

SEQ ID NO: 523317 - RNA, 23 nt, Human
cagcuccucagucaccuuccccu

SEQ ID NO: 523318 - RNA, 19 nt, Human
caggcacacaagaucacac

SEQ ID NO: 523319 - RNA, 18 nt, Human
caggccccuuaaaaccag

SEQ ID NO: 523320 - RNA, 18 nt, Human
caggccccuuaaaaccag

SEQ ID NO: 523321 - RNA, 20 nt, Human
caggucuugaggggaaggag

SEQ ID NO: 523322 - RNA, 22 nt, Human
caucucagggcuaagccaacag

SEQ ID NO: 523323 - RNA, 18 nt, Human
caugauguguaaaaauca

SEQ ID NO: 523324 - RNA, 20 nt, Human
cauuucagccugaagaagcc

SEQ ID NO: 523325 - RNA, 21 nt, Human
ccaccuucuuagacuuaaccc

SEQ ID NO: 523326 - RNA, 22 nt, Human
ccccaagucccacugcaguaag

SEQ ID NO: 523327 - RNA, 18 nt, Human
ccuaaacuauaggcaaac

SEQ ID NO: 523328 - RNA, 21 nt, Human
ccucuggagcugcaccuggau

SEQ ID NO: 523329 - RNA, 26 nt, Human
ccuguaguuuaauaauagaaaaaaaa

SEQ ID NO: 523330 - RNA, 19 nt, Human
cgaaaugcuucagccccuc

SEQ ID NO: 523331 - RNA, 23 nt, Human
cuacaggcacacaagaucacaca

SEQ ID NO: 523332 - RNA, 23 nt, Human
cucacacacacacagacacacac

SEQ ID NO: 523333 - RNA, 25 nt, Human
cugccugcaaguuuaaaaaccucag

SEQ ID NO: 523334 - RNA, 24 nt, Human
cuggauggugagucugauguuuua

SEQ ID NO: 523335 - RNA, 25 nt, Human
cuuagacuuaacccaauuuagaaaa

SEQ ID NO: 523336 - RNA, 22 nt, Human
cuucaccauucccuuuagauuc

SEQ ID NO: 523337 - RNA, 21 nt, Human
cuugagacucccagcuccagg

SEQ ID NO: 523338 - RNA, 21 nt, Human
gaaaauaauagcaaaacccac

SEQ ID NO: 523339 - RNA, 24 nt, Human
gaagacagguagggcuggaucacu

SEQ ID NO: 523340 - RNA, 18 nt, Human
gacuugcugucucuccuc

SEQ ID NO: 523341 - RNA, 21 nt, Human
gacuugcugucucuccucucc

SEQ ID NO: 523342 - RNA, 19 nt, Human
gauguuuuagggguguggc

SEQ ID NO: 523343 - RNA, 19 nt, Human
gcagacuugagacucccag

SEQ ID NO: 523344 - RNA, 19 nt, Human
gcucacccccaccuucuua

SEQ ID NO: 523345 - RNA, 24 nt, Human
ggcaaacuuugguguucccacuaa

SEQ ID NO: 523346 - RNA, 23 nt, Human
gggaagacagguagggcuggauc

SEQ ID NO: 523347 - RNA, 23 nt, Human
gggaaggagagagaagcuaggau

SEQ ID NO: 523348 - RNA, 24 nt, Human
gggacacacaggugggaagacagg

SEQ ID NO: 523349 - RNA, 22 nt, Human
guccuggcaugggaggccccag

SEQ ID NO: 523350 - RNA, 23 nt, Human
uaaaaacagaaaaucucaaacaa

SEQ ID NO: 523351 - RNA, 22 nt, Human
uaaaaaccucagacuaaacaga

SEQ ID NO: 523352 - RNA, 21 nt, Human
uaaaagaucuauagcauccag

SEQ ID NO: 523353 - RNA, 21 nt, Human
uaacuaaaaagauuuucccag

SEQ ID NO: 523354 - RNA, 18 nt, Human
uaagaaaucuacagccug

SEQ ID NO: 523355 - RNA, 22 nt, Human
uaauuucagugacacacaguac

SEQ ID NO: 523356 - RNA, 19 nt, Human
uacaaaacauccuacugaa

SEQ ID NO: 523357 - RNA, 31 nt, Human
uacaggcacacaagaucacacacacacacgg

SEQ ID NO: 523358 - RNA, 20 nt, Human
uagccucuggagcugcaccu

SEQ ID NO: 523359 - RNA, 22 nt, Human
uaggguggacuugcugucucuc

SEQ ID NO: 523360 - RNA, 23 nt, Human
ucaaacaaucaaacgcauuaccc

SEQ ID NO: 523361 - RNA, 18 nt, Human
ucaaccccaagucccacu

SEQ ID NO: 523362 - RNA, 21 nt, Human
ucaagggaggaacagacaaau

SEQ ID NO: 523363 - RNA, 25 nt, Human
ucacacaauuaggaaaaaaaaaauc

SEQ ID NO: 523364 - RNA, 24 nt, Human
ucacccccaccuucuuagacuuaa

SEQ ID NO: 523365 - RNA, 20 nt, Human
ucagccccucagucaguuuc

SEQ ID NO: 523366 - RNA, 21 nt, Human
ucagggcuaagccaacagagu

SEQ ID NO: 523367 - RNA, 24 nt, Human
ucaguuucagcuccucagucaccu

SEQ ID NO: 523368 - RNA, 21 nt, Human
uccaauuucccuucuuacacc

SEQ ID NO: 523369 - RNA, 19 nt, Human
uccacacaugaagcacuca

SEQ ID NO: 523370 - RNA, 21 nt, Human
ucccaaacuuucacagaaagu

SEQ ID NO: 523371 - RNA, 18 nt, Human
ucugagagcaaccaugua

SEQ ID NO: 523372 - RNA, 26 nt, Human
ucugucuccuccugauccuuucuccu

SEQ ID NO: 523373 - RNA, 18 nt, Human
ugagaauuccagaaccug

SEQ ID NO: 523374 - RNA, 19 nt, Human
ugagggugggaaggggaag

SEQ ID NO: 523375 - RNA, 21 nt, Human
ugccuaaacuauaggcaaacu

SEQ ID NO: 523376 - RNA, 23 nt, Human
ugcuucagccccucagucaguuu

SEQ ID NO: 523377 - RNA, 25 nt, Human
ugcuucagccccucagucaguuuca

SEQ ID NO: 523378 - RNA, 18 nt, Human
uggauggugagucugaug

SEQ ID NO: 523379 - RNA, 20 nt, Human
uggcagagaggauucuccuc

SEQ ID NO: 523380 - RNA, 19 nt, Human
uggcuaagcagaugugagg

SEQ ID NO: 523381 - RNA, 24 nt, Human
ugggagaacaaguuaaaaaacugg

SEQ ID NO: 523382 - RNA, 23 nt, Human
ugggauguugacagaaaagcaga

SEQ ID NO: 523383 - RNA, 23 nt, Human
ugggugggaacagcuguuaucuu

SEQ ID NO: 523384 - RNA, 20 nt, Human
ugucucuccucuccaguagc

SEQ ID NO: 523385 - RNA, 25 nt, Human
ugucucuccucuccaguagcccccc

SEQ ID NO: 523386 - RNA, 20 nt, Human
uguguaaaaaucagggaaca

SEQ ID NO: 523387 - RNA, 22 nt, Human
uguguaaaaaucagggaacaag

SEQ ID NO: 523388 - RNA, 21 nt, Human
ugugucacuuaaagaaaaaua

SEQ ID NO: 523389 - RNA, 22 nt, Human
uucacagaaagucugagagcaa

SEQ ID NO: 523390 - RNA, 22 nt, Human
uugagacucccagcuccaggcc

SEQ ID NO: 523391 - RNA, 22 nt, Human
uugauuaccaaaggggaaaaca

SEQ ID NO: 523392 - RNA, 23 nt, Human
uuuagaaaauaauagcaaaaccc

SEQ ID NO: 523393 - RNA, 20 nt, Human
uuuguagccucuggagcugc

SEQ ID NO: 523394 - RNA, 21 nt, Human
aaaaggcacaaugauggggca

SEQ ID NO: 523395 - RNA, 18 nt, Human
aaagaugcccccugcucc

SEQ ID NO: 523396 - RNA, 18 nt, Human
aacccaaaaggcacaaug

SEQ ID NO: 523397 - RNA, 18 nt, Human
aagagaccccaggccagc

SEQ ID NO: 523398 - RNA, 19 nt, Human
aagggccucugcccugcug

SEQ ID NO: 523399 - RNA, 25 nt, Human
acaaugauggggcaagugaugcugu

SEQ ID NO: 523400 - RNA, 18 nt, Human
acaccccauacaccaaau

SEQ ID NO: 523401 - RNA, 18 nt, Human
acagccucucuccagcca

SEQ ID NO: 523402 - RNA, 18 nt, Human
acauuccuuuuguggugg

SEQ ID NO: 523403 - RNA, 28 nt, Human
acccuccugccuccccuugccaggcccu

SEQ ID NO: 523404 - RNA, 21 nt, Human
agagggagaagcccccaguca

SEQ ID NO: 523405 - RNA, 24 nt, Human
agagggcccuggagcacacagacc

SEQ ID NO: 523406 - RNA, 24 nt, Human
agagggccuggaugugguggcggg

SEQ ID NO: 523407 - RNA, 18 nt, Human
agcaacccaaaaggcaca

SEQ ID NO: 523408 - RNA, 20 nt, Human
agcagcagaagcuccuugga

SEQ ID NO: 523409 - RNA, 20 nt, Human
agccgguuccccccggcugu

SEQ ID NO: 523410 - RNA, 19 nt, Human
agcuccuuggaagggcagc

SEQ ID NO: 523411 - RNA, 21 nt, Human
aggcaauaccgguuccugggc

SEQ ID NO: 523412 - RNA, 24 nt, Human
aggcacucaguuggguaggaggca

SEQ ID NO: 523413 - RNA, 24 nt, Human
aggcaggugggcauggggccacug

SEQ ID NO: 523414 - RNA, 19 nt, Human
aggcccuggggcuugggga

SEQ ID NO: 523415 - RNA, 22 nt, Human
agggccuggaugugguggcggg

SEQ ID NO: 523416 - RNA, 25 nt, Human
agggccuggaugugguggcgggggg

SEQ ID NO: 523417 - RNA, 21 nt, Human
aggggcugcaggggcuggggg

SEQ ID NO: 523418 - RNA, 19 nt, Human
agguaguggggagguccag

SEQ ID NO: 523419 - RNA, 23 nt, Human
agguggggggaggggggcaaugg

SEQ ID NO: 523420 - RNA, 20 nt, Human
aggugugggcugaggcagga

SEQ ID NO: 523421 - RNA, 20 nt, Human
aguagguggggggagggggg

SEQ ID NO: 523422 - RNA, 23 nt, Human
aguagguugguggcagggaccca

SEQ ID NO: 523423 - RNA, 21 nt, Human
aguggagggucaggcaggugg

SEQ ID NO: 523424 - RNA, 22 nt, Human
aucccagaggcagaagccgguu

SEQ ID NO: 523425 - RNA, 21 nt, Human
auggaaccuucuccacaugcu

SEQ ID NO: 523426 - RNA, 20 nt, Human
auuuccccuuuauuccuagc

SEQ ID NO: 523427 - RNA, 20 nt, Human
cacaauuucucaccugcggu

SEQ ID NO: 523428 - RNA, 22 nt, Human
cacacccccucccccccgaccg

SEQ ID NO: 523429 - RNA, 18 nt, Human
caccacaccccuggcagg

SEQ ID NO: 523430 - RNA, 18 nt, Human
cacccccucccccccgac

SEQ ID NO: 523431 - RNA, 19 nt, Human
cacccccucccccccgacc

SEQ ID NO: 523432 - RNA, 25 nt, Human
cacuuugcuuccaggggcaguggag

SEQ ID NO: 523433 - RNA, 21 nt, Human
cacuuuguguuacccagcaag

SEQ ID NO: 523434 - RNA, 18 nt, Human
cagaguggugaugacccc

SEQ ID NO: 523435 - RNA, 24 nt, Human
cagcaaagaagagaccccaggcca

SEQ ID NO: 523436 - RNA, 18 nt, Human
caggcuccuucagcacug

SEQ ID NO: 523437 - RNA, 21 nt, Human
cagggacccagaccuuugggg

SEQ ID NO: 523438 - RNA, 18 nt, Human
caugcucaccaccuucuc

SEQ ID NO: 523439 - RNA, 23 nt, Human
ccaaaaggcacaaugauggggca

SEQ ID NO: 523440 - RNA, 24 nt, Human
ccacuggcccuucucauguccucc

SEQ ID NO: 523441 - RNA, 18 nt, Human
ccagccaacccaagcucu

SEQ ID NO: 523442 - RNA, 21 nt, Human
ccagcuucuggugugaccccc

SEQ ID NO: 523443 - RNA, 22 nt, Human
ccaggacuuuucccauaugugg

SEQ ID NO: 523444 - RNA, 23 nt, Human
ccaggcccacacuggaggccgcu

SEQ ID NO: 523445 - RNA, 21 nt, Human
ccaguggaggccucagguccc

SEQ ID NO: 523446 - RNA, 20 nt, Human
ccaugaauucggcuucuguc

SEQ ID NO: 523447 - RNA, 23 nt, Human
ccaugcagggaacccugugauga

SEQ ID NO: 523448 - RNA, 20 nt, Human
cccauauguggcuuccacag

SEQ ID NO: 523449 - RNA, 24 nt, Human
cccaugcagggaacccugugauga

SEQ ID NO: 523450 - RNA, 19 nt, Human
cccauucagcuuggcuugu

SEQ ID NO: 523451 - RNA, 18 nt, Human
ccccacaccccauacacc

SEQ ID NO: 523452 - RNA, 20 nt, Human
ccccacaccccauacaccaa

SEQ ID NO: 523453 - RNA, 24 nt, Human
ccccacaccccauacaccaaauac

SEQ ID NO: 523454 - RNA, 19 nt, Human
cccccacaccccauacacc

SEQ ID NO: 523455 - RNA, 21 nt, Human
cccccacaccccauacaccaa

SEQ ID NO: 523456 - RNA, 22 nt, Human
ccccccacaccccauacaccaa

SEQ ID NO: 523457 - RNA, 19 nt, Human
ccccccgaccgggggcccc

SEQ ID NO: 523458 - RNA, 20 nt, Human
ccccuugccaggcccucccc

SEQ ID NO: 523459 - RNA, 21 nt, Human
cccugugaugaggugguccuc

SEQ ID NO: 523460 - RNA, 20 nt, Human
cccuucccaggcuccuucag

SEQ ID NO: 523461 - RNA, 26 nt, Human
ccggcuguggcaaaggugcugagugu

SEQ ID NO: 523462 - RNA, 19 nt, Human
ccggggcuccagccaccuc

SEQ ID NO: 523463 - RNA, 18 nt, Human
ccucccccccgaccgggg

SEQ ID NO: 523464 - RNA, 20 nt, Human
ccuccuggaggcucuaggca

SEQ ID NO: 523465 - RNA, 19 nt, Human
ccugcggugaagcuuggag

SEQ ID NO: 523466 - RNA, 21 nt, Human
ccuggagcuggccaccucccc

SEQ ID NO: 523467 - RNA, 19 nt, Human
ccuucagcacugccgagca

SEQ ID NO: 523468 - RNA, 23 nt, Human
ccuuguugguuggugaaauucca

SEQ ID NO: 523469 - RNA, 21 nt, Human
cgaccgggggccccagaggac

SEQ ID NO: 523470 - RNA, 21 nt, Human
cgccaguggaggccucagguc

SEQ ID NO: 523471 - RNA, 21 nt, Human
cggcagccuccuucugucucc

SEQ ID NO: 523472 - RNA, 21 nt, Human
cggcuucugucgucucacccc

SEQ ID NO: 523473 - RNA, 21 nt, Human
cgggggccggccuucaguagg

SEQ ID NO: 523474 - RNA, 22 nt, Human
cgguuccugggcggcagcuccu

SEQ ID NO: 523475 - RNA, 20 nt, Human
cguggccuuccccuccacca

SEQ ID NO: 523476 - RNA, 21 nt, Human
cugccgagcacccccaguucc

SEQ ID NO: 523477 - RNA, 18 nt, Human
cugccuccccuugccagg

SEQ ID NO: 523478 - RNA, 21 nt, Human
cuggaaagacacccucaugcc

SEQ ID NO: 523479 - RNA, 18 nt, Human
cugucgucucaccccacu

SEQ ID NO: 523480 - RNA, 19 nt, Human
gaaagacagccucucucca

SEQ ID NO: 523481 - RNA, 21 nt, Human
gaaccuucuccacaugcucac

SEQ ID NO: 523482 - RNA, 19 nt, Human
gacugcaggggaggaaugg

SEQ ID NO: 523483 - RNA, 20 nt, Human
gagcagcagcagaagcuccu

SEQ ID NO: 523484 - RNA, 24 nt, Human
gagcuggccaccuccccaucaugu

SEQ ID NO: 523485 - RNA, 25 nt, Human
gagcuucuggggcuaggauggggca

SEQ ID NO: 523486 - RNA, 24 nt, Human
gaggcuaaaagaugcccccugcuc

SEQ ID NO: 523487 - RNA, 18 nt, Human
gcagaggagugggauggc

SEQ ID NO: 523488 - RNA, 25 nt, Human
gccaccuccccaucaugugccaagc

SEQ ID NO: 523489 - RNA, 22 nt, Human
gcccugggaggacagccuugcu

SEQ ID NO: 523490 - RNA, 22 nt, Human
gccuggggccuggugcaggugc

SEQ ID NO: 523491 - RNA, 23 nt, Human
gcuaugcuguaacagcguacuuu

SEQ ID NO: 523492 - RNA, 19 nt, Human
gcucaccaccuucucucag

SEQ ID NO: 523493 - RNA, 23 nt, Human
ggagaagaccccccuuccaugaa

SEQ ID NO: 523494 - RNA, 21 nt, Human
ggaggaaggguccuacuuggg

SEQ ID NO: 523495 - RNA, 18 nt, Human
ggaggacagccuugcuuc

SEQ ID NO: 523496 - RNA, 21 nt, Human
ggagguaguggggagguccag

SEQ ID NO: 523497 - RNA, 18 nt, Human
ggauggaguggggugggg

SEQ ID NO: 523498 - RNA, 21 nt, Human
ggcaaaggugcugagugucac

SEQ ID NO: 523499 - RNA, 20 nt, Human
ggcagggacaaggucuaggu

SEQ ID NO: 523500 - RNA, 18 nt, Human
ggcaguagguggggggag

SEQ ID NO: 523501 - RNA, 20 nt, Human
ggccacuggaggccugagga

SEQ ID NO: 523502 - RNA, 22 nt, Human
ggcuaggauggggcaaaggugg

SEQ ID NO: 523503 - RNA, 19 nt, Human
ggcuccuucagcacugccg

SEQ ID NO: 523504 - RNA, 21 nt, Human
ggcugggggcaggggccaggg

SEQ ID NO: 523505 - RNA, 18 nt, Human
gggaacccugugaugagg

SEQ ID NO: 523506 - RNA, 20 nt, Human
gggaccuggguguguagggg

SEQ ID NO: 523507 - RNA, 22 nt, Human
gggaggaaggguccuacuuggg

SEQ ID NO: 523508 - RNA, 19 nt, Human
gggcagggccuggagcugg

SEQ ID NO: 523509 - RNA, 19 nt, Human
gggcauggggccacuggag

SEQ ID NO: 523510 - RNA, 21 nt, Human
gggccggggcugggaggagga

SEQ ID NO: 523511 - RNA, 23 nt, Human
gggccggggcugggaggaggagc

SEQ ID NO: 523512 - RNA, 18 nt, Human
gggccugugggaccuggg

SEQ ID NO: 523513 - RNA, 19 nt, Human
ggggagggggcugaagagg

SEQ ID NO: 523514 - RNA, 21 nt, Human
gggggcaggggccagggagcu

SEQ ID NO: 523515 - RNA, 20 nt, Human
gggguggggcggcugggaag

SEQ ID NO: 523516 - RNA, 24 nt, Human
ggucaggcaggugggcauggggcc

SEQ ID NO: 523517 - RNA, 18 nt, Human
ggugaggcaggugugggc

SEQ ID NO: 523518 - RNA, 23 nt, Human
ggugauuugguggauggaguggg

SEQ ID NO: 523519 - RNA, 19 nt, Human
gguggauggaguggggugg

SEQ ID NO: 523520 - RNA, 19 nt, Human
guaacagcguacuuucccc

SEQ ID NO: 523521 - RNA, 22 nt, Human
guggccaagguuagcccacacc

SEQ ID NO: 523522 - RNA, 18 nt, Human
guggggggaggggggcaa

SEQ ID NO: 523523 - RNA, 21 nt, Human
gugggguggggcggcugggaa

SEQ ID NO: 523524 - RNA, 22 nt, Human
uaaaagaugcccccugcuccac

SEQ ID NO: 523525 - RNA, 18 nt, Human
uaccgguuccugggcggc

SEQ ID NO: 523526 - RNA, 18 nt, Human
uauccucccaucccuucc

SEQ ID NO: 523527 - RNA, 20 nt, Human
ucaaggcagggugcaggggc

SEQ ID NO: 523528 - RNA, 24 nt, Human
uccaucuuggucccaggaagggac

SEQ ID NO: 523529 - RNA, 23 nt, Human
ucccagaggcagaagccgguucc

SEQ ID NO: 523530 - RNA, 22 nt, Human
ucccagaggcagaagccgguuu

SEQ ID NO: 523531 - RNA, 21 nt, Human
ucccuucccaggcuccuucag

SEQ ID NO: 523532 - RNA, 21 nt, Human
uccucccaucccuucccaggc

SEQ ID NO: 523533 - RNA, 22 nt, Human
uccucccaucccuucccaggcu

SEQ ID NO: 523534 - RNA, 24 nt, Human
uccuucagcacugccgagcacccc

SEQ ID NO: 523535 - RNA, 23 nt, Human
ucggaauucagcucccccagguc

SEQ ID NO: 523536 - RNA, 23 nt, Human
ucggcagccuccuucugucuccu

SEQ ID NO: 523537 - RNA, 23 nt, Human
ucuccagaaagggcuucucccug

SEQ ID NO: 523538 - RNA, 19 nt, Human
ucugccaggacuuuuccca

SEQ ID NO: 523539 - RNA, 18 nt, Human
ucuggaaagacacccuca

SEQ ID NO: 523540 - RNA, 21 nt, Human
ucugugccggggcuccagcca

SEQ ID NO: 523541 - RNA, 19 nt, Human
ucuuuaggcccuggggcuu

SEQ ID NO: 523542 - RNA, 25 nt, Human
ugaccccacagagccuucggcagcc

SEQ ID NO: 523543 - RNA, 23 nt, Human
ugaccccccacaccccauacacc

SEQ ID NO: 523544 - RNA, 19 nt, Human
ugagagcccaucccagagg

SEQ ID NO: 523545 - RNA, 21 nt, Human
ugagagggccuggauguggug

SEQ ID NO: 523546 - RNA, 18 nt, Human
ugaggagggccccuccug

SEQ ID NO: 523547 - RNA, 18 nt, Human
ugaggcaggaggugccug

SEQ ID NO: 523548 - RNA, 19 nt, Human
ugaggcaggugugggcuga

SEQ ID NO: 523549 - RNA, 19 nt, Human
ugagggcagaggagcagga

SEQ ID NO: 523550 - RNA, 21 nt, Human
ugauaggcacuuugcuuccag

SEQ ID NO: 523551 - RNA, 21 nt, Human
ugauuugguggauggaguggg

SEQ ID NO: 523552 - RNA, 18 nt, Human
ugcaggggcugggggcag

SEQ ID NO: 523553 - RNA, 22 nt, Human
ugccaggcccuccccugacccc

SEQ ID NO: 523554 - RNA, 19 nt, Human
ugcccugcugcuccugggg

SEQ ID NO: 523555 - RNA, 21 nt, Human
ugccgagcacccccaguucca

SEQ ID NO: 523556 - RNA, 18 nt, Human
ugccuggggccuggugca

SEQ ID NO: 523557 - RNA, 19 nt, Human
ugccuggggccuggugcag

SEQ ID NO: 523558 - RNA, 25 nt, Human
ugccuguauccucccaucccuuccc

SEQ ID NO: 523559 - RNA, 19 nt, Human
ugcugagugucaccaucac

SEQ ID NO: 523560 - RNA, 24 nt, Human
uggagcuucuggggcuaggauggg

SEQ ID NO: 523561 - RNA, 28 nt, Human
uggaggccgcuuggguggucgguagacc

SEQ ID NO: 523562 - RNA, 22 nt, Human
uggagugggguggggcggcugg

SEQ ID NO: 523563 - RNA, 23 nt, Human
uggaugucuccacugugggcuuc

SEQ ID NO: 523564 - RNA, 20 nt, Human
uggcaaaggugcugaguguc

SEQ ID NO: 523565 - RNA, 19 nt, Human
uggcagcccugggaggaca

SEQ ID NO: 523566 - RNA, 20 nt, Human
uggcagggacccagaccuuu

SEQ ID NO: 523567 - RNA, 21 nt, Human
uggcagggacccagaccuuug

SEQ ID NO: 523568 - RNA, 21 nt, Human
uggcuggggugguggaugucu

SEQ ID NO: 523569 - RNA, 21 nt, Human
uggcuuccacaguccggcagg

SEQ ID NO: 523570 - RNA, 18 nt, Human
ugggaggaggagcagcag

SEQ ID NO: 523571 - RNA, 18 nt, Human
ugggauggcaguaggugg

SEQ ID NO: 523572 - RNA, 24 nt, Human
ugggcggcagcuccuuccagaaag

SEQ ID NO: 523573 - RNA, 20 nt, Human
ugggcugaggcaggaggugg

SEQ ID NO: 523574 - RNA, 19 nt, Human
uggggagggggccuguggg

SEQ ID NO: 523575 - RNA, 22 nt, Human
uggggagggggccugugggacc

SEQ ID NO: 523576 - RNA, 23 nt, Human
uggggagggggccugugggaccu

SEQ ID NO: 523577 - RNA, 24 nt, Human
ugggggagggggcugaagagggcc

SEQ ID NO: 523578 - RNA, 22 nt, Human
ugggggcccaggcacucaguug

SEQ ID NO: 523579 - RNA, 25 nt, Human
uggguaggaggcaggagacgcuuuu

SEQ ID NO: 523580 - RNA, 22 nt, Human
uggguggucuucaaggcagggu

SEQ ID NO: 523581 - RNA, 19 nt, Human
uggucccaggaagggaccc

SEQ ID NO: 523582 - RNA, 27 nt, Human
ugguggcagggacccagaccuuugggg

SEQ ID NO: 523583 - RNA, 20 nt, Human
uggugguggccaagguuagc

SEQ ID NO: 523584 - RNA, 24 nt, Human
uguaggggccaggcuaggaccauu

SEQ ID NO: 523585 - RNA, 22 nt, Human
ugugaugaggugguccuccgug

SEQ ID NO: 523586 - RNA, 24 nt, Human
uguggcuuccacaguccggcaggg

SEQ ID NO: 523587 - RNA, 20 nt, Human
uucagcucccccaggucucu

SEQ ID NO: 523588 - RNA, 23 nt, Human
uucauugaggcccccacuggccc

SEQ ID NO: 523589 - RNA, 19 nt, Human
uuccccuuguugguuggug

SEQ ID NO: 523590 - RNA, 18 nt, Human
uuccugggcggcagcucc

SEQ ID NO: 523591 - RNA, 18 nt, Human
uucuccacaugcucacca

SEQ ID NO: 523592 - RNA, 22 nt, Human
uugguggauggagugggguggg

SEQ ID NO: 523593 - RNA, 19 nt, Human
uuguugguuggugaaauuc

SEQ ID NO: 523594 - RNA, 24 nt, Human
uuucccauauguggcuuccacagu

SEQ ID NO: 523595 - RNA, 20 nt, Human
uuuuguggugguggccaagg

SEQ ID NO: 523596 - RNA, 20 nt, Human
aacgcccgcacgcccaccuc

SEQ ID NO: 523597 - RNA, 20 nt, Human
acccuaucgaacgcccgcac

SEQ ID NO: 523598 - RNA, 24 nt, Human
accgcggcccccgcgugggcuccu

SEQ ID NO: 523599 - RNA, 20 nt, Human
cacccuaucgaacgcccgca

SEQ ID NO: 523600 - RNA, 23 nt, Human
ccaguccgcacccuaucgaacgc

SEQ ID NO: 523601 - RNA, 23 nt, Human
cccaggaggcauguccacgugcc

SEQ ID NO: 523602 - RNA, 24 nt, Human
ccccaggaggcauguccacgugcc

SEQ ID NO: 523603 - RNA, 23 nt, Human
ccgcacgcccaccuccugcuccu

SEQ ID NO: 523604 - RNA, 25 nt, Human
cgcuggccugggagaagugcugcac

SEQ ID NO: 523605 - RNA, 22 nt, Human
cuccagcccccuguuugccacc

SEQ ID NO: 523606 - RNA, 19 nt, Human
cucccaguccgcacccuau

SEQ ID NO: 523607 - RNA, 19 nt, Human
cuccugcuccuccggccac

SEQ ID NO: 523608 - RNA, 19 nt, Human
cucuccagcccccuguuug

SEQ ID NO: 523609 - RNA, 20 nt, Human
gagcggugcuggaccgcggc

SEQ ID NO: 523610 - RNA, 19 nt, Human
gaggcggagcugggcgggu

SEQ ID NO: 523611 - RNA, 22 nt, Human
ggccaggucaagcccgcuggcc

SEQ ID NO: 523612 - RNA, 20 nt, Human
gugcugcacgugcguggcga

SEQ ID NO: 523613 - RNA, 19 nt, Human
uacucccaguccgcacccu

SEQ ID NO: 523614 - RNA, 19 nt, Human
ucagguccuccaccuggcc

SEQ ID NO: 523615 - RNA, 22 nt, Human
uccugcuccuccggccacucua

SEQ ID NO: 523616 - RNA, 21 nt, Human
ucgaacgcccgcacgcccacc

SEQ ID NO: 523617 - RNA, 21 nt, Human
uggccugggagaagugcugca

SEQ ID NO: 523618 - RNA, 24 nt, Human
ugggcuccucgagccccuccccag

SEQ ID NO: 523619 - RNA, 21 nt, Human
uguuugccaccgaggcggagc

SEQ ID NO: 523620 - RNA, 24 nt, Human
uuuuuuuuuuuuuuuuccuccuga

SEQ ID NO: 523621 - RNA, 24 nt, Human
aaaaaaacaaaaaagaacaaaaaa

SEQ ID NO: 523622 - RNA, 20 nt, Human
aaaaaaaccaaaaaaaaaac

SEQ ID NO: 523623 - RNA, 24 nt, Human
aaaaaaccaaaaaaaaaacagugc

SEQ ID NO: 523624 - RNA, 25 nt, Human
aaaaacagugcaaaaacccauuuuc

SEQ ID NO: 523625 - RNA, 24 nt, Human
aaaaaccaaaaaaaaaacagugca

SEQ ID NO: 523626 - RNA, 23 nt, Human
aaaagaacaaaaaaaccaaaaaa

SEQ ID NO: 523627 - RNA, 26 nt, Human
aaagaacaaaaaaaccaaaaaaaaaa

SEQ ID NO: 523628 - RNA, 21 nt, Human
aaaggaaaaaaacaaaaaaga

SEQ ID NO: 523629 - RNA, 19 nt, Human
aacucccucugcaccccuc

SEQ ID NO: 523630 - RNA, 24 nt, Human
aacugugggguggaaaaaacggag

SEQ ID NO: 523631 - RNA, 21 nt, Human
aaggaaaaaaacaaaaaagaa

SEQ ID NO: 523632 - RNA, 24 nt, Human
aaggccagccgcccauagucccag

SEQ ID NO: 523633 - RNA, 21 nt, Human
aaugaaagcaggggcugggga

SEQ ID NO: 523634 - RNA, 21 nt, Human
accaggugcaccagguacucc

SEQ ID NO: 523635 - RNA, 22 nt, Human
acccccacccccaggccacccc

SEQ ID NO: 523636 - RNA, 21 nt, Human
acucagcacccccuccccccu

SEQ ID NO: 523637 - RNA, 22 nt, Human
agccuugcccacccccaccccc

SEQ ID NO: 523638 - RNA, 20 nt, Human
aggaaaaaaacaaaaaagaa

SEQ ID NO: 523639 - RNA, 23 nt, Human
aggaaaaaaacaaaaaagaacaa

SEQ ID NO: 523640 - RNA, 24 nt, Human
aggaaaaaaacaaaaaagaacaaa

SEQ ID NO: 523641 - RNA, 25 nt, Human
aggaaaaaaacaaaaaagaacaaaa

SEQ ID NO: 523642 - RNA, 18 nt, Human
aggaggaacuguggggug

SEQ ID NO: 523643 - RNA, 19 nt, Human
aggggcuggggaggaaggg

SEQ ID NO: 523644 - RNA, 24 nt, Human
caaaaaagaacaaaaaaaccaaaa

SEQ ID NO: 523645 - RNA, 18 nt, Human
cacccccacccccaggcc

SEQ ID NO: 523646 - RNA, 18 nt, Human
cagccaccggcaccaggu

SEQ ID NO: 523647 - RNA, 22 nt, Human
cagccccagauccaccugcccc

SEQ ID NO: 523648 - RNA, 20 nt, Human
caggaggaacuguggggugg

SEQ ID NO: 523649 - RNA, 23 nt, Human
cagugaaacccccaaguuuaaau

SEQ ID NO: 523650 - RNA, 18 nt, Human
cagugcaaaaacccauuu

SEQ ID NO: 523651 - RNA, 18 nt, Human
ccacacugucugcaucug

SEQ ID NO: 523652 - RNA, 24 nt, Human
ccagguacuccucuuggcucucau

SEQ ID NO: 523653 - RNA, 22 nt, Human
cccacccccaggccaccccagc

SEQ ID NO: 523654 - RNA, 23 nt, Human
ccccacccccaggccaccccagc

SEQ ID NO: 523655 - RNA, 20 nt, Human
cccccacccccaggccaccc

SEQ ID NO: 523656 - RNA, 18 nt, Human
ccccggggccggcucggg

SEQ ID NO: 523657 - RNA, 20 nt, Human
ccccggggccggcucggggc

SEQ ID NO: 523658 - RNA, 22 nt, Human
ccccggggccggcucggggcuc

SEQ ID NO: 523659 - RNA, 23 nt, Human
ccccucaugcauccccuaggggc

SEQ ID NO: 523660 - RNA, 18 nt, Human
ccuccagggccccucccu

SEQ ID NO: 523661 - RNA, 22 nt, Human
ccucccacucagcacccccucc

SEQ ID NO: 523662 - RNA, 18 nt, Human
cggcucggggcucuccuc

SEQ ID NO: 523663 - RNA, 18 nt, Human
cuacuagcuggggagggg

SEQ ID NO: 523664 - RNA, 21 nt, Human
cuccuggucaugcuacuagcu

SEQ ID NO: 523665 - RNA, 24 nt, Human
cugaagccacacugucugcaucug

SEQ ID NO: 523666 - RNA, 18 nt, Human
cugaucugggggaacucc

SEQ ID NO: 523667 - RNA, 18 nt, Human
cugcaccccucuuugccc

SEQ ID NO: 523668 - RNA, 19 nt, Human
cugcaccccucuuugcccc

SEQ ID NO: 523669 - RNA, 21 nt, Human
cugcaccccucuuugccccgg

SEQ ID NO: 523670 - RNA, 18 nt, Human
cugccccccaggucucca

SEQ ID NO: 523671 - RNA, 18 nt, Human
cuggggaggggugggggg

SEQ ID NO: 523672 - RNA, 23 nt, Human
cugucugcaucugucaccaaggc

SEQ ID NO: 523673 - RNA, 23 nt, Human
gaaaaaaacaaaaaagaacaaaa

SEQ ID NO: 523674 - RNA, 18 nt, Human
gagcuuuucuuuguuuuu

SEQ ID NO: 523675 - RNA, 25 nt, Human
gaggauagagaauaagaacagcagu

SEQ ID NO: 523676 - RNA, 21 nt, Human
gaggggggggaacagccccag

SEQ ID NO: 523677 - RNA, 20 nt, Human
gagugggggugggguggggc

SEQ ID NO: 523678 - RNA, 24 nt, Human
gcaccagguacuccucuuggcucu

SEQ ID NO: 523679 - RNA, 19 nt, Human
gcaggauguggccuccagg

SEQ ID NO: 523680 - RNA, 21 nt, Human
gccugacucuuccucccacuc

SEQ ID NO: 523681 - RNA, 22 nt, Human
gccuugcccacccccaccccca

SEQ ID NO: 523682 - RNA, 19 nt, Human
gcuggggaggaaggggcuu

SEQ ID NO: 523683 - RNA, 23 nt, Human
ggaaaaaaacaaaaaagaacaaa

SEQ ID NO: 523684 - RNA, 26 nt, Human
ggaaaaaacggaggggggggaacagc

SEQ ID NO: 523685 - RNA, 18 nt, Human
ggcuggggaggaaggggc

SEQ ID NO: 523686 - RNA, 22 nt, Human
gggagugggggugggguggggc

SEQ ID NO: 523687 - RNA, 19 nt, Human
gggcuggaggcuccacuuc

SEQ ID NO: 523688 - RNA, 18 nt, Human
gguggaaaaaacggaggg

SEQ ID NO: 523689 - RNA, 20 nt, Human
uaaaggaaaaaaacaaaaaa

SEQ ID NO: 523690 - RNA, 24 nt, Human
ucccacucagcacccccucccccc

SEQ ID NO: 523691 - RNA, 18 nt, Human
ucucauuaacccucuccu

SEQ ID NO: 523692 - RNA, 25 nt, Human
ugcccacccccacccccaggccacc

SEQ ID NO: 523693 - RNA, 20 nt, Human
uggaaaaaacggaggggggg

SEQ ID NO: 523694 - RNA, 22 nt, Human
uggccuccagggccccucccuc

SEQ ID NO: 523695 - RNA, 21 nt, Human
ugggggugggguggggcaggg

SEQ ID NO: 523696 - RNA, 27 nt, Human
ugggguggaaaaaacggagggggggga

SEQ ID NO: 523697 - RNA, 20 nt, Human
ugugggguggaaaaaacgga

SEQ ID NO: 523698 - RNA, 23 nt, Human
ugugggguggaaaaaacggaggg

SEQ ID NO: 523699 - RNA, 18 nt, Human
agaaugagggagacguga

SEQ ID NO: 523700 - RNA, 30 nt, Human
cuaaaaccaguucuugaaaaacuuuccacc

SEQ ID NO: 523701 - RNA, 23 nt, Human
uaaaaaauacuucagcuacucac

SEQ ID NO: 523702 - RNA, 21 nt, Human
ucuuaagaaugagggagacgu

SEQ ID NO: 523703 - RNA, 23 nt, Human
uucuacuguuaaucugcaucaug

SEQ ID NO: 523704 - RNA, 23 nt, Human
uuuuccauaauaccuaacaagaa

SEQ ID NO: 523705 - RNA, 19 nt, Human
uuuuuuuuuuuuuuuuuaa

SEQ ID NO: 523706 - RNA, 21 nt, Human
aaaaaacgaaaacaaccuccc

SEQ ID NO: 523707 - RNA, 26 nt, Human
aaaaagaaaaaacuuauugaauagaa

SEQ ID NO: 523708 - RNA, 22 nt, Human
aaaaagguagauggaaagagaa

SEQ ID NO: 523709 - RNA, 21 nt, Human
aaacaaagagagaguuuauga

SEQ ID NO: 523710 - RNA, 26 nt, Human
aaacaaccuccccaucccccaccaaa

SEQ ID NO: 523711 - RNA, 19 nt, Human
aaacaauguugggaacuga

SEQ ID NO: 523712 - RNA, 22 nt, Human
aaagcaauuuggggaaucuguc

SEQ ID NO: 523713 - RNA, 21 nt, Human
aaagugccugauaacuuaaaa

SEQ ID NO: 523714 - RNA, 21 nt, Human
aacaaccuccccaucccccac

SEQ ID NO: 523715 - RNA, 23 nt, Human
aacaaccuccccaucccccacca

SEQ ID NO: 523716 - RNA, 20 nt, Human
aagaagcauaaaucuaugcu

SEQ ID NO: 523717 - RNA, 31 nt, Human
aagacaaaaaaauccaaaaaacgaaaacaaa

SEQ ID NO: 523718 - RNA, 19 nt, Human
aagcaacaugauaccaaga

SEQ ID NO: 523719 - RNA, 18 nt, Human
aaggcacugcuaauacac

SEQ ID NO: 523720 - RNA, 26 nt, Human
aaggcauuauuauuuguucacugaca

SEQ ID NO: 523721 - RNA, 24 nt, Human
aagugauccgccugccuuagccuc

SEQ ID NO: 523722 - RNA, 18 nt, Human
aagugcugggauuugagc

SEQ ID NO: 523723 - RNA, 19 nt, Human
aaugcugguucuugaguaa

SEQ ID NO: 523724 - RNA, 24 nt, Human
aauguaaagauauuuaaaaucaaa

SEQ ID NO: 523725 - RNA, 21 nt, Human
acacccccugguauuccccca

SEQ ID NO: 523726 - RNA, 19 nt, Human
acacuuuuguuuaaaugaa

SEQ ID NO: 523727 - RNA, 24 nt, Human
acagauaguugacauuuuggacua

SEQ ID NO: 523728 - RNA, 18 nt, Human
acagcaggucuaaagacc

SEQ ID NO: 523729 - RNA, 19 nt, Human
acagggcuucaucauguug

SEQ ID NO: 523730 - RNA, 24 nt, Human
acagggcuucaucauguuggccag

SEQ ID NO: 523731 - RNA, 22 nt, Human
accaagguucaguagaggugac

SEQ ID NO: 523732 - RNA, 22 nt, Human
accacaaaaauacauucggagu

SEQ ID NO: 523733 - RNA, 22 nt, Human
accuccccaucccccaccaaac

SEQ ID NO: 523734 - RNA, 24 nt, Human
acgaaaacaaccuccccauccccc

SEQ ID NO: 523735 - RNA, 26 nt, Human
acgaaaacaaccuccccaucccccac

SEQ ID NO: 523736 - RNA, 22 nt, Human
acuguuuuucuucuuccaucug

SEQ ID NO: 523737 - RNA, 24 nt, Human
acuuaaguugcucaaaaaagaaaa

SEQ ID NO: 523738 - RNA, 23 nt, Human
agaaaccuauuuggccuggacaa

SEQ ID NO: 523739 - RNA, 23 nt, Human
agaagcgugacagaacuaacuug

SEQ ID NO: 523740 - RNA, 28 nt, Human
agacaaaaaaauccaaaaaacgaaaaca

SEQ ID NO: 523741 - RNA, 23 nt, Human
agacaaccacuauaaaaggucac

SEQ ID NO: 523742 - RNA, 23 nt, Human
agacaaccacuauaaacaguuau

SEQ ID NO: 523743 - RNA, 25 nt, Human
agacaggaaaggugcauaaugauaa

SEQ ID NO: 523744 - RNA, 18 nt, Human
agaccaaaaaguuugaaa

SEQ ID NO: 523745 - RNA, 26 nt, Human
agagagaacuuaaagcuaacuaugga

SEQ ID NO: 523746 - RNA, 22 nt, Human
agcacagcaucuauuacucaca

SEQ ID NO: 523747 - RNA, 18 nt, Human
agcagcuacagauaguug

SEQ ID NO: 523748 - RNA, 24 nt, Human
agccaaaagacaaaaaaagggacc

SEQ ID NO: 523749 - RNA, 21 nt, Human
agccaaaagacaaaaaaaucc

SEQ ID NO: 523750 - RNA, 25 nt, Human
agccaaaagacaaaaaaauccaaaa

SEQ ID NO: 523751 - RNA, 22 nt, Human
aggaagagagaacuuaaagcua

SEQ ID NO: 523752 - RNA, 24 nt, Human
aggcaaaagaaaauaugauacuua

SEQ ID NO: 523753 - RNA, 22 nt, Human
aggcauuauuauuuguucacug

SEQ ID NO: 523754 - RNA, 18 nt, Human
agguagauggaaagagaa

SEQ ID NO: 523755 - RNA, 21 nt, Human
aguaaauaauguaugucacaa

SEQ ID NO: 523756 - RNA, 18 nt, Human
aguagagacagggcuuca

SEQ ID NO: 523757 - RNA, 23 nt, Human
aguccucagaagauucaaguuga

SEQ ID NO: 523758 - RNA, 19 nt, Human
agugcaguugguguacggc

SEQ ID NO: 523759 - RNA, 21 nt, Human
agugcaguugguguacggcug

SEQ ID NO: 523760 - RNA, 22 nt, Human
aguuuuaaacaaguggcaucuu

SEQ ID NO: 523761 - RNA, 18 nt, Human
auaaugauaaggauaaua

SEQ ID NO: 523762 - RNA, 20 nt, Human
auaccuauaaaacaaaacug

SEQ ID NO: 523763 - RNA, 21 nt, Human
auauauauauauauauaaaca

SEQ ID NO: 523764 - RNA, 19 nt, Human
aucauguuggccaggcuug

SEQ ID NO: 523765 - RNA, 30 nt, Human
aucauguuggccaggcuugucuggaacucc

SEQ ID NO: 523766 - RNA, 21 nt, Human
auccaaaaaacgaaaacaacc

SEQ ID NO: 523767 - RNA, 23 nt, Human
augaaaaucagauauaacaagcu

SEQ ID NO: 523768 - RNA, 19 nt, Human
auuagagugguacauuuua

SEQ ID NO: 523769 - RNA, 21 nt, Human
auuuuugcuggcugcuggaag

SEQ ID NO: 523770 - RNA, 21 nt, Human
caaaaauuacaaaaugagcac

SEQ ID NO: 523771 - RNA, 18 nt, Human
caaaaugagcacauaaaa

SEQ ID NO: 523772 - RNA, 21 nt, Human
caaacacaguaaauauggaua

SEQ ID NO: 523773 - RNA, 21 nt, Human
caaauuacuaaaacagcuaca

SEQ ID NO: 523774 - RNA, 20 nt, Human
caacauggggcagaaauggc

SEQ ID NO: 523775 - RNA, 23 nt, Human
caacauggggcagaaauggccuc

SEQ ID NO: 523776 - RNA, 21 nt, Human
caacugcugaaacaaccaagu

SEQ ID NO: 523777 - RNA, 24 nt, Human
caagaagcacuacauaccgaccaa

SEQ ID NO: 523778 - RNA, 22 nt, Human
caagugauccgccugccuuagc

SEQ ID NO: 523779 - RNA, 19 nt, Human
caaugauaguguaaaaaau

SEQ ID NO: 523780 - RNA, 20 nt, Human
cacaaaaacuaaagaauaaa

SEQ ID NO: 523781 - RNA, 24 nt, Human
cacacacacaaaagcagcuacaga

SEQ ID NO: 523782 - RNA, 18 nt, Human
caccacaacaaaugugau

SEQ ID NO: 523783 - RNA, 20 nt, Human
caccuuggaacuuaaacaac

SEQ ID NO: 523784 - RNA, 23 nt, Human
cagaagguuuagaaacaccaaaa

SEQ ID NO: 523785 - RNA, 25 nt, Human
cagcaccacaacaaaugugauccuu

SEQ ID NO: 523786 - RNA, 21 nt, Human
cagcaugaaaagugccugaua

SEQ ID NO: 523787 - RNA, 19 nt, Human
caggcaaaagaaaauauga

SEQ ID NO: 523788 - RNA, 24 nt, Human
cagggcuucaucauguuggccagg

SEQ ID NO: 523789 - RNA, 24 nt, Human
caguaaaaacaaaauuuggaagca

SEQ ID NO: 523790 - RNA, 18 nt, Human
caguagaggugacuuuaa

SEQ ID NO: 523791 - RNA, 21 nt, Human
cagucuaaaaugaaagcaggu

SEQ ID NO: 523792 - RNA, 21 nt, Human
cagucuuuuaaacagcaugaa

SEQ ID NO: 523793 - RNA, 24 nt, Human
cauaaagcuaaaaauauagaauca

SEQ ID NO: 523794 - RNA, 19 nt, Human
caucauguuggccaggcuu

SEQ ID NO: 523795 - RNA, 18 nt, Human
caucauuaaaaagagaaa

SEQ ID NO: 523796 - RNA, 21 nt, Human
caugaaaagugccugauaacu

SEQ ID NO: 523797 - RNA, 22 nt, Human
cauuuuaaaaaacaaguaagac

SEQ ID NO: 523798 - RNA, 19 nt, Human
ccaaaagacaaaaaaaucc

SEQ ID NO: 523799 - RNA, 25 nt, Human
ccaaaagacaaaaaaauccaaaaaa

SEQ ID NO: 523800 - RNA, 19 nt, Human
ccaacugcuuuucagauau

SEQ ID NO: 523801 - RNA, 19 nt, Human
ccccaucccccaccaaacc

SEQ ID NO: 523802 - RNA, 22 nt, Human
cccuaaacaguccaccauuuuc

SEQ ID NO: 523803 - RNA, 20 nt, Human
cccuuugaaaagcaagaaaa

SEQ ID NO: 523804 - RNA, 25 nt, Human
ccgccugccuuagccucccgaagug

SEQ ID NO: 523805 - RNA, 23 nt, Human
ccggaccucaagugauccgccug

SEQ ID NO: 523806 - RNA, 18 nt, Human
ccucccucucucugccuc

SEQ ID NO: 523807 - RNA, 19 nt, Human
ccucccucucucugccucc

SEQ ID NO: 523808 - RNA, 18 nt, Human
ccucucucugccuccucu

SEQ ID NO: 523809 - RNA, 24 nt, Human
ccugccuuagccucccgaagugcu

SEQ ID NO: 523810 - RNA, 23 nt, Human
ccugcuaacauuuaaacucugaa

SEQ ID NO: 523811 - RNA, 26 nt, Human
ccuuuaaaaacaaagagagaguuuau

SEQ ID NO: 523812 - RNA, 20 nt, Human
cgaaaacaaccuccccaucc

SEQ ID NO: 523813 - RNA, 19 nt, Human
cuaaaaauauagaaucaga

SEQ ID NO: 523814 - RNA, 24 nt, Human
cuaaaacagcuacagaaaccuauu

SEQ ID NO: 523815 - RNA, 19 nt, Human
cuaacacaaauagaacaca

SEQ ID NO: 523816 - RNA, 21 nt, Human
cucaagucuuuaauuaaaauc

SEQ ID NO: 523817 - RNA, 20 nt, Human
cucaagugauccgccugccu

SEQ ID NO: 523818 - RNA, 24 nt, Human
cugacacacacacaaaagcagcua

SEQ ID NO: 523819 - RNA, 19 nt, Human
cugaccacuauccagccau

SEQ ID NO: 523820 - RNA, 20 nt, Human
cugauaaacaucugaacuua

SEQ ID NO: 523821 - RNA, 23 nt, Human
cugauacugugauauuauuuuaa

SEQ ID NO: 523822 - RNA, 22 nt, Human
cugccauguuucuggagacuug

SEQ ID NO: 523823 - RNA, 24 nt, Human
cugccuuagccucccgaagugcug

SEQ ID NO: 523824 - RNA, 25 nt, Human
cugcuaacauuuaaacucugaaauc

SEQ ID NO: 523825 - RNA, 19 nt, Human
cugcucugccauguuuccu

SEQ ID NO: 523826 - RNA, 25 nt, Human
cuuaaagccaaaagacaaaaaaauc

SEQ ID NO: 523827 - RNA, 24 nt, Human
cuuauacgacuaugauaaaugaca

SEQ ID NO: 523828 - RNA, 24 nt, Human
cuucaucauguuggccaggcuugu

SEQ ID NO: 523829 - RNA, 23 nt, Human
cuugccaggauaccugcugccca

SEQ ID NO: 523830 - RNA, 20 nt, Human
cuugugcuagaaagauacgg

SEQ ID NO: 523831 - RNA, 23 nt, Human
gaaaacaaccuccccauccccca

SEQ ID NO: 523832 - RNA, 18 nt, Human
gaaaggaagcuccugcaa

SEQ ID NO: 523833 - RNA, 19 nt, Human
gaacagauguuuaaacucu

SEQ ID NO: 523834 - RNA, 18 nt, Human
gaaguccaacugcuuuuc

SEQ ID NO: 523835 - RNA, 23 nt, Human
gaccucaagugauccgccugccu

SEQ ID NO: 523836 - RNA, 25 nt, Human
gaggcaacaaagcauaaguuaaaac

SEQ ID NO: 523837 - RNA, 20 nt, Human
gaggcaguuucaacuugaaa

SEQ ID NO: 523838 - RNA, 22 nt, Human
gauacuuaaagccaaaagacaa

SEQ ID NO: 523839 - RNA, 21 nt, Human
gaugguuucacugacaaagcu

SEQ ID NO: 523840 - RNA, 21 nt, Human
gauuguuuccucaacaugggg

SEQ ID NO: 523841 - RNA, 22 nt, Human
gcaggaaaaugugaaaaggaac

SEQ ID NO: 523842 - RNA, 20 nt, Human
gcaguugguguacggcugga

SEQ ID NO: 523843 - RNA, 20 nt, Human
gccaaaagacaaaaaaaucc

SEQ ID NO: 523844 - RNA, 19 nt, Human
gccuccucucauuaaaacc

SEQ ID NO: 523845 - RNA, 21 nt, Human
gcuauuuauaguucuaagcag

SEQ ID NO: 523846 - RNA, 18 nt, Human
gcuccauauaaagauugu

SEQ ID NO: 523847 - RNA, 23 nt, Human
ggaaaaaaacccuucaaucuuua

SEQ ID NO: 523848 - RNA, 22 nt, Human
ggaagagagaacuuaaagcuaa

SEQ ID NO: 523849 - RNA, 18 nt, Human
ggaccucaagugauccgc

SEQ ID NO: 523850 - RNA, 24 nt, Human
ggagcucucuccuaucuuaaucuc

SEQ ID NO: 523851 - RNA, 18 nt, Human
ggaggcccaaauuucaug

SEQ ID NO: 523852 - RNA, 19 nt, Human
ggaguaaugagugaggcaa

SEQ ID NO: 523853 - RNA, 22 nt, Human
gggcuucaucauguuggccagg

SEQ ID NO: 523854 - RNA, 21 nt, Human
guauauacugagcacugccag

SEQ ID NO: 523855 - RNA, 20 nt, Human
gucuuauuuaacuguuuuuc

SEQ ID NO: 523856 - RNA, 18 nt, Human
gugagauauacuauggcc

SEQ ID NO: 523857 - RNA, 21 nt, Human
gugaggcaaauucucaaugcu

SEQ ID NO: 523858 - RNA, 24 nt, Human
gugauccgccugccuuagccuccc

SEQ ID NO: 523859 - RNA, 20 nt, Human
uaaaaaaaaaguaaggauaa

SEQ ID NO: 523860 - RNA, 22 nt, Human
uaaaaaacaaguaagacuacuu

SEQ ID NO: 523861 - RNA, 23 nt, Human
uaaaaaacaaguaagacuacuuu

SEQ ID NO: 523862 - RNA, 22 nt, Human
uaaaaagagaaauaaaauccac

SEQ ID NO: 523863 - RNA, 18 nt, Human
uaaaacagcuacagaaac

SEQ ID NO: 523864 - RNA, 21 nt, Human
uaaaacagcuacagaaaccua

SEQ ID NO: 523865 - RNA, 24 nt, Human
uaaaauccauagagcauuuaacau

SEQ ID NO: 523866 - RNA, 21 nt, Human
uaaaaugaaagcagguaccug

SEQ ID NO: 523867 - RNA, 23 nt, Human
uaaagaaacaauguugggaacug

SEQ ID NO: 523868 - RNA, 24 nt, Human
uaacaccacaaaaauacauucgga

SEQ ID NO: 523869 - RNA, 21 nt, Human
uaagaaaaauaggccccauuu

SEQ ID NO: 523870 - RNA, 24 nt, Human
uaagcaaauaaaaagcuauacaaa

SEQ ID NO: 523871 - RNA, 18 nt, Human
uaauaguauaccaacugc

SEQ ID NO: 523872 - RNA, 22 nt, Human
uaauuuguaaucauuguacccu

SEQ ID NO: 523873 - RNA, 22 nt, Human
uacaguuuaucuauuuccuugu

SEQ ID NO: 523874 - RNA, 23 nt, Human
uaccaagaaauacagcaagcuca

SEQ ID NO: 523875 - RNA, 23 nt, Human
uagaaagaaacaauaaaaaaacu

SEQ ID NO: 523876 - RNA, 24 nt, Human
uagaaauuacuaaugcugguucuu

SEQ ID NO: 523877 - RNA, 26 nt, Human
uagaacacauaaauaaaaagugagua

SEQ ID NO: 523878 - RNA, 19 nt, Human
uagaacugucagcuugcug

SEQ ID NO: 523879 - RNA, 23 nt, Human
uagaaugggucuacagggggaaa

SEQ ID NO: 523880 - RNA, 22 nt, Human
uagagacagggcuucaucaugu

SEQ ID NO: 523881 - RNA, 24 nt, Human
uaggccaagaucccuggcucuauu

SEQ ID NO: 523882 - RNA, 24 nt, Human
uaguagagacagggcuucaucaug

SEQ ID NO: 523883 - RNA, 22 nt, Human
uaguauaccaacugcugaaacu

SEQ ID NO: 523884 - RNA, 28 nt, Human
uauaaacauaggcccugcugagaaaucg

SEQ ID NO: 523885 - RNA, 22 nt, Human
uauuauuuuaaugcaagguuua

SEQ ID NO: 523886 - RNA, 19 nt, Human
uauuguagcacaccuugga

SEQ ID NO: 523887 - RNA, 20 nt, Human
ucaaaauucacuuaaguugc

SEQ ID NO: 523888 - RNA, 24 nt, Human
ucaaugauaguguaaaaaaugcuu

SEQ ID NO: 523889 - RNA, 22 nt, Human
ucacauuaaacuagaugaaaau

SEQ ID NO: 523890 - RNA, 18 nt, Human
ucagauauaacaagcugc

SEQ ID NO: 523891 - RNA, 18 nt, Human
ucagugacucucauauuu

SEQ ID NO: 523892 - RNA, 23 nt, Human
ucauaaaguuaagaaaaauaggc

SEQ ID NO: 523893 - RNA, 18 nt, Human
ucauuaaaaccaagaauc

SEQ ID NO: 523894 - RNA, 20 nt, Human
uccaaaaaacgaaaacaacc

SEQ ID NO: 523895 - RNA, 24 nt, Human
uccaaaaaacgaaaacaaccuccc

SEQ ID NO: 523896 - RNA, 28 nt, Human
uccaaaaaacgaaaacaaccuccccauc

SEQ ID NO: 523897 - RNA, 21 nt, Human
uccaccaaucgggaaaaaaac

SEQ ID NO: 523898 - RNA, 19 nt, Human
uccaccccaucucaaagag

SEQ ID NO: 523899 - RNA, 22 nt, Human
ucccccaccaaacccuuaacug

SEQ ID NO: 523900 - RNA, 18 nt, Human
ucccgaagugcugggauu

SEQ ID NO: 523901 - RNA, 18 nt, Human
ucccgaagugcugggauu

SEQ ID NO: 523902 - RNA, 20 nt, Human
ucccuuuggaguuuucagaa

SEQ ID NO: 523903 - RNA, 21 nt, Human
uccuaugcccuaaacaguccc

SEQ ID NO: 523904 - RNA, 21 nt, Human
uccucaaugauaguguaaaaa

SEQ ID NO: 523905 - RNA, 27 nt, Human
ucuacaguaaaaacaaaauuuggaagc

SEQ ID NO: 523906 - RNA, 20 nt, Human
ucuacugaaauuucccuuug

SEQ ID NO: 523907 - RNA, 23 nt, Human
ucucccauugaccucaggcccac

SEQ ID NO: 523908 - RNA, 21 nt, Human
ucugaacuuaugaaaauaaca

SEQ ID NO: 523909 - RNA, 20 nt, Human
ucugccauguuucuggagac

SEQ ID NO: 523910 - RNA, 24 nt, Human
ucugccucccucucucugccuccu

SEQ ID NO: 523911 - RNA, 23 nt, Human
ucugccuccucucauuaaaacca

SEQ ID NO: 523912 - RNA, 22 nt, Human
ucugcucugccauguuucugga

SEQ ID NO: 523913 - RNA, 19 nt, Human
ucuugacuaggaaaggaag

SEQ ID NO: 523914 - RNA, 23 nt, Human
ucuuuaauuaaaauccauagagc

SEQ ID NO: 523915 - RNA, 22 nt, Human
ucuuugggguccuccaaaaaaa

SEQ ID NO: 523916 - RNA, 23 nt, Human
ugaaaagaagaugcagguugagc

SEQ ID NO: 523917 - RNA, 18 nt, Human
ugaaaagcaagaaaaauc

SEQ ID NO: 523918 - RNA, 21 nt, Human
ugaaaauacucaaagaagcag

SEQ ID NO: 523919 - RNA, 22 nt, Human
ugaaauaggcaguaaauaaugu

SEQ ID NO: 523920 - RNA, 18 nt, Human
ugaauaaagucaguccga

SEQ ID NO: 523921 - RNA, 20 nt, Human
ugaaugcauugauugagcaa

SEQ ID NO: 523922 - RNA, 19 nt, Human
ugacaauguuggaagaauc

SEQ ID NO: 523923 - RNA, 23 nt, Human
ugacacacacacaaaagcagcua

SEQ ID NO: 523924 - RNA, 21 nt, Human
ugacauacaacaaacugcaca

SEQ ID NO: 523925 - RNA, 23 nt, Human
ugagaaaucgucauaaauucuaa

SEQ ID NO: 523926 - RNA, 19 nt, Human
ugagaacucugggcuuccu

SEQ ID NO: 523927 - RNA, 21 nt, Human
ugagaacucugggcuuccuua

SEQ ID NO: 523928 - RNA, 21 nt, Human
ugaggugaaacauuucacacu

SEQ ID NO: 523929 - RNA, 23 nt, Human
ugauaaggauaauaccuauaaaa

SEQ ID NO: 523930 - RNA, 22 nt, Human
ugauuauucuaaaguugcuuug

SEQ ID NO: 523931 - RNA, 18 nt, Human
ugauugugcacacccccu

SEQ ID NO: 523932 - RNA, 21 nt, Human
ugcaauugauuuuuaaagaca

SEQ ID NO: 523933 - RNA, 21 nt, Human
ugcauaaugauaaggauaaua

SEQ ID NO: 523934 - RNA, 24 nt, Human
ugccuuagccucccgaagugcugg

SEQ ID NO: 523935 - RNA, 23 nt, Human
uggaaagagaagaaauuaacuua

SEQ ID NO: 523936 - RNA, 26 nt, Human
uggaaauaugaauaaagucaguccga

SEQ ID NO: 523937 - RNA, 19 nt, Human
uggauauaaguaaacaaaa

SEQ ID NO: 523938 - RNA, 19 nt, Human
ugggaagaagcgugacaga

SEQ ID NO: 523939 - RNA, 23 nt, Human
uggggcagaaauggccucugcuu

SEQ ID NO: 523940 - RNA, 18 nt, Human
ugguacauuuuaauguuu

SEQ ID NO: 523941 - RNA, 20 nt, Human
uguaaaaaaugcuuauuauu

SEQ ID NO: 523942 - RNA, 20 nt, Human
uguaaagcaaaaagugcagg

SEQ ID NO: 523943 - RNA, 18 nt, Human
uguacagcugaggugaaa

SEQ ID NO: 523944 - RNA, 23 nt, Human
uguauaaauauuagagcuagggu

SEQ ID NO: 523945 - RNA, 24 nt, Human
uguauaucagacaggaaaggugca

SEQ ID NO: 523946 - RNA, 23 nt, Human
uguauuggagaaguuugauggaa

SEQ ID NO: 523947 - RNA, 22 nt, Human
ugucugcucugccauguuucug

SEQ ID NO: 523948 - RNA, 20 nt, Human
ugugaaaaggaacgagacug

SEQ ID NO: 523949 - RNA, 18 nt, Human
uuaaaaaaaaaguaagga

SEQ ID NO: 523950 - RNA, 18 nt, Human
uuaaaacacacauaaauu

SEQ ID NO: 523951 - RNA, 19 nt, Human
uuaaacaaguggcaucuuu

SEQ ID NO: 523952 - RNA, 25 nt, Human
uuaaagccaaaagacaaaaaaaucc

SEQ ID NO: 523953 - RNA, 23 nt, Human
uuacaucauuaaaaagagaaaua

SEQ ID NO: 523954 - RNA, 21 nt, Human
uuaccccuuugaaaagcaaga

SEQ ID NO: 523955 - RNA, 24 nt, Human
uuagauguuuaagacuuuagucua

SEQ ID NO: 523956 - RNA, 24 nt, Human
uuaguagagacagggcuucaucau

SEQ ID NO: 523957 - RNA, 18 nt, Human
uuauacuggaggcccaaa

SEQ ID NO: 523958 - RNA, 23 nt, Human
uucaaaauggauuuugaguguac

SEQ ID NO: 523959 - RNA, 27 nt, Human
uucaaacacaguaaauauggauauaag

SEQ ID NO: 523960 - RNA, 21 nt, Human
uucacaaaaaguccucagaag

SEQ ID NO: 523961 - RNA, 22 nt, Human
uucagaagauggcaggugccgc

SEQ ID NO: 523962 - RNA, 23 nt, Human
uucugagaccaaaaaguuugaaa

SEQ ID NO: 523963 - RNA, 18 nt, Human
uugaagaagagauuggug

SEQ ID NO: 523964 - RNA, 19 nt, Human
uugaagaagagauuggugu

SEQ ID NO: 523965 - RNA, 18 nt, Human
uugacauacaacaaacug

SEQ ID NO: 523966 - RNA, 24 nt, Human
uugaccucaggcccacauuuagaa

SEQ ID NO: 523967 - RNA, 20 nt, Human
uuuaaacucugaaaucagca

SEQ ID NO: 523968 - RNA, 21 nt, Human
uuuaagcuuuaucuugacuag

SEQ ID NO: 523969 - RNA, 18 nt, Human
uuuaauaguauaccaacu

SEQ ID NO: 523970 - RNA, 19 nt, Human
uuuacucaaauuuagaaug

SEQ ID NO: 523971 - RNA, 22 nt, Human
uuuagaaugggucuacaggggg

SEQ ID NO: 523972 - RNA, 21 nt, Human
uuucuggagacuugaugcugg

SEQ ID NO: 523973 - RNA, 18 nt, Human
uuucuucuuuaagaaaag

SEQ ID NO: 523974 - RNA, 19 nt, Human
uuuuaaacuuugggggugg

SEQ ID NO: 523975 - RNA, 21 nt, Human
uuuuggacuacuaaaacuauu

SEQ ID NO: 523976 - RNA, 21 nt, Human
uuuuuguauuuuuaguagaga

SEQ ID NO: 523977 - RNA, 21 nt, Human
uuuuuuguauuuuuaguagag

SEQ ID NO: 523978 - RNA, 24 nt, Human
uuuuuuguauuuuuaguagagaca

SEQ ID NO: 523979 - RNA, 26 nt, Human
acccagagcccggagcccggaacccc

SEQ ID NO: 523980 - RNA, 21 nt, Human
agggcaguucuucaccguugg

SEQ ID NO: 523981 - RNA, 24 nt, Human
caccugcccuccacuuucagcugc

SEQ ID NO: 523982 - RNA, 22 nt, Human
cagagcccggagcccggaaccc

SEQ ID NO: 523983 - RNA, 18 nt, Human
ccacccagagcccggagc

SEQ ID NO: 523984 - RNA, 22 nt, Human
cccagagcccggagcccggaac

SEQ ID NO: 523985 - RNA, 23 nt, Human
cccgcggccgacagggccggggc

SEQ ID NO: 523986 - RNA, 20 nt, Human
cccuccacuuucagcugccu

SEQ ID NO: 523987 - RNA, 27 nt, Human
ccugcgccgcagugccgccgcucacag

SEQ ID NO: 523988 - RNA, 18 nt, Human
cgcucacagccgccgcca

SEQ ID NO: 523989 - RNA, 24 nt, Human
cgcuggccugcgccgcagugccgc

SEQ ID NO: 523990 - RNA, 22 nt, Human
cugcgccgcagugccgccgcuc

SEQ ID NO: 523991 - RNA, 22 nt, Human
cugcugcucuucgaugaccgug

SEQ ID NO: 523992 - RNA, 20 nt, Human
gccgccgcucacagccgccg

SEQ ID NO: 523993 - RNA, 18 nt, Human
gcucacagccgccgccac

SEQ ID NO: 523994 - RNA, 22 nt, Human
ggaauucaccugcccuccacuu

SEQ ID NO: 523995 - RNA, 20 nt, Human
ggcgagggcugggaauucac

SEQ ID NO: 523996 - RNA, 19 nt, Human
uaucuagaguuacagacuu

SEQ ID NO: 523997 - RNA, 19 nt, Human
ugcaguuagcacaugguau

SEQ ID NO: 523998 - RNA, 20 nt, Human
uuaguuuuaguuuugucugc

SEQ ID NO: 523999 - RNA, 19 nt, Human
uuugucugcugcucuucga

SEQ ID NO: 524000 - RNA, 22 nt, Human
aaccaagccacuuuccccagca

SEQ ID NO: 524001 - RNA, 24 nt, Human
aagcgcugcauggggugggggcag

SEQ ID NO: 524002 - RNA, 24 nt, Human
aaggugcuaggggguggcaccuug

SEQ ID NO: 524003 - RNA, 21 nt, Human
accaagccacuuuccccagca

SEQ ID NO: 524004 - RNA, 19 nt, Human
acccagagggaacuggggc

SEQ ID NO: 524005 - RNA, 18 nt, Human
acccuuacccagauaggg

SEQ ID NO: 524006 - RNA, 22 nt, Human
acuggggcaggagcgacagaga

SEQ ID NO: 524007 - RNA, 18 nt, Human
agaaccaaaggacagaag

SEQ ID NO: 524008 - RNA, 18 nt, Human
agaaucugaaacugcuga

SEQ ID NO: 524009 - RNA, 18 nt, Human
agacaaaagcaggggggc

SEQ ID NO: 524010 - RNA, 21 nt, Human
agacaaaagcaggggggccug

SEQ ID NO: 524011 - RNA, 19 nt, Human
agacagggagggcugaaga

SEQ ID NO: 524012 - RNA, 21 nt, Human
agcccuggccaggaagugggg

SEQ ID NO: 524013 - RNA, 23 nt, Human
agcgagcacccccaccccaggcc

SEQ ID NO: 524014 - RNA, 21 nt, Human
aggaagugggggagacaggga

SEQ ID NO: 524015 - RNA, 23 nt, Human
agggugcaggaagggagaugggg

SEQ ID NO: 524016 - RNA, 24 nt, Human
agucccagaggggccugugccagg

SEQ ID NO: 524017 - RNA, 21 nt, Human
agugcauguccccuuaaauaa

SEQ ID NO: 524018 - RNA, 22 nt, Human
auggaguguaagaaucugaaac

SEQ ID NO: 524019 - RNA, 22 nt, Human
caaggugaaagguauggguccu

SEQ ID NO: 524020 - RNA, 19 nt, Human
caccccaggccaacgccau

SEQ ID NO: 524021 - RNA, 18 nt, Human
cacccccaccccaggcca

SEQ ID NO: 524022 - RNA, 21 nt, Human
caccccugggaugacaacggg

SEQ ID NO: 524023 - RNA, 18 nt, Human
cagaagacaaagcgagca

SEQ ID NO: 524024 - RNA, 20 nt, Human
cagaagacaaagcgagcacc

SEQ ID NO: 524025 - RNA, 18 nt, Human
cagacucauuugcagcug

SEQ ID NO: 524026 - RNA, 22 nt, Human
cagagaccccagcugagccuca

SEQ ID NO: 524027 - RNA, 20 nt, Human
cagcaccuaggaggggaccc

SEQ ID NO: 524028 - RNA, 22 nt, Human
cagcagguucuuuuccaauucc

SEQ ID NO: 524029 - RNA, 24 nt, Human
cagcguguccggggccugcccucg

SEQ ID NO: 524030 - RNA, 24 nt, Human
caggggggccugagaacacagagc

SEQ ID NO: 524031 - RNA, 20 nt, Human
caguccagccccagggcaga

SEQ ID NO: 524032 - RNA, 24 nt, Human
caucaccaggagucaccccuggga

SEQ ID NO: 524033 - RNA, 23 nt, Human
caugcaguccagccccagggcag

SEQ ID NO: 524034 - RNA, 21 nt, Human
cauguccccuuaaauaaacug

SEQ ID NO: 524035 - RNA, 18 nt, Human
cccaggcuggacguggag

SEQ ID NO: 524036 - RNA, 19 nt, Human
ccccugggaugacaacggg

SEQ ID NO: 524037 - RNA, 19 nt, Human
ccggagccucacaaguccc

SEQ ID NO: 524038 - RNA, 19 nt, Human
ccugacaaggugcuagggg

SEQ ID NO: 524039 - RNA, 21 nt, Human
ccugcccucgaggcccagaga

SEQ ID NO: 524040 - RNA, 21 nt, Human
ccugugccagggccugagggg

SEQ ID NO: 524041 - RNA, 19 nt, Human
ccuugggccaggccuguuc

SEQ ID NO: 524042 - RNA, 21 nt, Human
ccuugggccaggccuguucuu

SEQ ID NO: 524043 - RNA, 20 nt, Human
cucaagggaagacccuuacc

SEQ ID NO: 524044 - RNA, 18 nt, Human
cugaaacugcugacuccc

SEQ ID NO: 524045 - RNA, 22 nt, Human
cugaaacugcugacucccauca

SEQ ID NO: 524046 - RNA, 20 nt, Human
cugugccagggccugagggg

SEQ ID NO: 524047 - RNA, 22 nt, Human
gacaaaagcaggggggccugag

SEQ ID NO: 524048 - RNA, 20 nt, Human
gagacaaaagcaggggggcc

SEQ ID NO: 524049 - RNA, 24 nt, Human
gaggcccagagaugccagguccca

SEQ ID NO: 524050 - RNA, 18 nt, Human
gagggagcacagcagggu

SEQ ID NO: 524051 - RNA, 18 nt, Human
gagggguccucaggagcc

SEQ ID NO: 524052 - RNA, 20 nt, Human
gagggguccucaggagccug

SEQ ID NO: 524053 - RNA, 18 nt, Human
gcaguccagccccagggc

SEQ ID NO: 524054 - RNA, 21 nt, Human
gccuguucuuggcugagggaa

SEQ ID NO: 524055 - RNA, 18 nt, Human
ggacuaacuggaggggug

SEQ ID NO: 524056 - RNA, 23 nt, Human
ggagacagggagggcugaagaca

SEQ ID NO: 524057 - RNA, 18 nt, Human
ggcaccuugggccaggcc

SEQ ID NO: 524058 - RNA, 22 nt, Human
ggccugagggguccucaggagc

SEQ ID NO: 524059 - RNA, 23 nt, Human
gggcaggagcgacagagacccca

SEQ ID NO: 524060 - RNA, 23 nt, Human
gguacaggagcauuauggaagga

SEQ ID NO: 524061 - RNA, 19 nt, Human
guccccuuaaauaaacugg

SEQ ID NO: 524062 - RNA, 23 nt, Human
guggaagggaacaaggugaaagg

SEQ ID NO: 524063 - RNA, 21 nt, Human
uaaacauuggguuccaccccc

SEQ ID NO: 524064 - RNA, 24 nt, Human
uaggaggggacccagagggaacuu

SEQ ID NO: 524065 - RNA, 22 nt, Human
ucagcaggcuccggagcugggg

SEQ ID NO: 524066 - RNA, 21 nt, Human
ucaggacagcaccuaggaggg

SEQ ID NO: 524067 - RNA, 18 nt, Human
uccugcugaugcugaugu

SEQ ID NO: 524068 - RNA, 21 nt, Human
ucuuggcugagggaaagaggg

SEQ ID NO: 524069 - RNA, 18 nt, Human
ugacaaggugcuaggggg

SEQ ID NO: 524070 - RNA, 27 nt, Human
ugacucccaucaccaggagucaccccc

SEQ ID NO: 524071 - RNA, 18 nt, Human
ugagagcccuggccagga

SEQ ID NO: 524072 - RNA, 22 nt, Human
ugagagcccuggccaggaagug

SEQ ID NO: 524073 - RNA, 22 nt, Human
ugagggaaagaggggggccaug

SEQ ID NO: 524074 - RNA, 18 nt, Human
ugcauggggugggggcag

SEQ ID NO: 524075 - RNA, 20 nt, Human
ugccagggccugaggggucc

SEQ ID NO: 524076 - RNA, 18 nt, Human
ugcuaggggguggcaccu

SEQ ID NO: 524077 - RNA, 22 nt, Human
uggccaggaagugggggagaca

SEQ ID NO: 524078 - RNA, 24 nt, Human
ugggagaugagaggcuccagacuc

SEQ ID NO: 524079 - RNA, 18 nt, Human
uggggcaggagcgacaga

SEQ ID NO: 524080 - RNA, 19 nt, Human
uguaagaaucugaaacugc

SEQ ID NO: 524081 - RNA, 25 nt, Human
uucuuggcugagggaaagagggggg

SEQ ID NO: 524082 - RNA, 25 nt, Human
aaaucacauccuacucaucagcaag

SEQ ID NO: 524083 - RNA, 20 nt, Human
aaauugaaggcaggauccca

SEQ ID NO: 524084 - RNA, 20 nt, Human
aaccucaaaaagcaggggac

SEQ ID NO: 524085 - RNA, 19 nt, Human
aagcaugguuucaaacaug

SEQ ID NO: 524086 - RNA, 23 nt, Human
aaggacaugucggugaugaugag

SEQ ID NO: 524087 - RNA, 20 nt, Human
aaggaggccgcugcauuucc

SEQ ID NO: 524088 - RNA, 22 nt, Human
aaucucugcucacugcaaccuc

SEQ ID NO: 524089 - RNA, 22 nt, Human
acaccgggucugaccucccagc

SEQ ID NO: 524090 - RNA, 20 nt, Human
acaggcugcuaaccccaggc

SEQ ID NO: 524091 - RNA, 20 nt, Human
acaugccgugaagacagagc

SEQ ID NO: 524092 - RNA, 20 nt, Human
acgagccccucagucuuggg

SEQ ID NO: 524093 - RNA, 25 nt, Human
acucugucgaccaggcuggagugua

SEQ ID NO: 524094 - RNA, 18 nt, Human
agaacucaaguuaaggcc

SEQ ID NO: 524095 - RNA, 21 nt, Human
agaaggcucugugugcagccc

SEQ ID NO: 524096 - RNA, 18 nt, Human
agagagguccaaggugcc

SEQ ID NO: 524097 - RNA, 19 nt, Human
agagggcaucggugagcau

SEQ ID NO: 524098 - RNA, 25 nt, Human
agagggcuccccaucccuauuccuc

SEQ ID NO: 524099 - RNA, 21 nt, Human
agcacucugggagggcugugg

SEQ ID NO: 524100 - RNA, 22 nt, Human
agcacucugggagggcuguggg

SEQ ID NO: 524101 - RNA, 23 nt, Human
agcacucugggagggcugugggc

SEQ ID NO: 524102 - RNA, 18 nt, Human
agcagcugcucuagcggc

SEQ ID NO: 524103 - RNA, 19 nt, Human
agcugcccugggcuggaga

SEQ ID NO: 524104 - RNA, 23 nt, Human
aggaaggaaggcagggcuugcag

SEQ ID NO: 524105 - RNA, 18 nt, Human
aggaaggcagggcuugca

SEQ ID NO: 524106 - RNA, 19 nt, Human
aggcauggaggaggugggc

SEQ ID NO: 524107 - RNA, 23 nt, Human
agggcuaaacacuggugcccagg

SEQ ID NO: 524108 - RNA, 22 nt, Human
agggcugugggcaugagcagcg

SEQ ID NO: 524109 - RNA, 20 nt, Human
agggggugguggcaggaguu

SEQ ID NO: 524110 - RNA, 19 nt, Human
aggucugccucccgggccc

SEQ ID NO: 524111 - RNA, 19 nt, Human
agugcuccauggcccaggc

SEQ ID NO: 524112 - RNA, 19 nt, Human
augagcagcgaggacucca

SEQ ID NO: 524113 - RNA, 22 nt, Human
caaccucaaaaagcaggggacc

SEQ ID NO: 524114 - RNA, 22 nt, Human
cacagcacguggguggcaggac

SEQ ID NO: 524115 - RNA, 27 nt, Human
cacagcacguggguggcaggaccaaca

SEQ ID NO: 524116 - RNA, 19 nt, Human
cacagccccucugccucuc

SEQ ID NO: 524117 - RNA, 21 nt, Human
cacaugccgugaagacagagc

SEQ ID NO: 524118 - RNA, 19 nt, Human
caccacgccccacccccaa

SEQ ID NO: 524119 - RNA, 28 nt, Human
cacccccaacugcacggcagccacucgc

SEQ ID NO: 524120 - RNA, 20 nt, Human
cacccucugcuuccguccuc

SEQ ID NO: 524121 - RNA, 23 nt, Human
caccuguggccucugcaucaccc

SEQ ID NO: 524122 - RNA, 18 nt, Human
cacggcagccacucgcau

SEQ ID NO: 524123 - RNA, 19 nt, Human
cacguguccggccggugug

SEQ ID NO: 524124 - RNA, 22 nt, Human
cacucugucgaccaggcuggag

SEQ ID NO: 524125 - RNA, 19 nt, Human
cagaaccgagccuguccug

SEQ ID NO: 524126 - RNA, 21 nt, Human
cagaggagaaaagcacuuagc

SEQ ID NO: 524127 - RNA, 19 nt, Human
cagaguucacucugucgac

SEQ ID NO: 524128 - RNA, 20 nt, Human
cagugcguggaggagaucgg

SEQ ID NO: 524129 - RNA, 24 nt, Human
caucagcaaggcagguagacauca

SEQ ID NO: 524130 - RNA, 19 nt, Human
ccaagugggugaaaugguc

SEQ ID NO: 524131 - RNA, 24 nt, Human
ccaccgcucuggcacgagccccuc

SEQ ID NO: 524132 - RNA, 23 nt, Human
ccaggugcucuugccaugggucc

SEQ ID NO: 524133 - RNA, 19 nt, Human
ccagucaaucagaagcaaa

SEQ ID NO: 524134 - RNA, 22 nt, Human
ccaugcugagccuccccugccu

SEQ ID NO: 524135 - RNA, 18 nt, Human
cccaggauggaaucuggc

SEQ ID NO: 524136 - RNA, 20 nt, Human
cccagggcaggggucaggga

SEQ ID NO: 524137 - RNA, 18 nt, Human
ccccaauacuuucauuuu

SEQ ID NO: 524138 - RNA, 21 nt, Human
ccccucuuccgcuuuuguucc

SEQ ID NO: 524139 - RNA, 21 nt, Human
cccugggcuggagaugggcau

SEQ ID NO: 524140 - RNA, 21 nt, Human
ccucaaaaagcaggggaccag

SEQ ID NO: 524141 - RNA, 18 nt, Human
ccucccacuucccaccuc

SEQ ID NO: 524142 - RNA, 19 nt, Human
ccuccugcugcuguucacc

SEQ ID NO: 524143 - RNA, 25 nt, Human
ccugcagaccagggcuaaacacugg

SEQ ID NO: 524144 - RNA, 24 nt, Human
ccugcugaguccagccuuucuacc

SEQ ID NO: 524145 - RNA, 24 nt, Human
ccuggcagcauuuggucuuccucu

SEQ ID NO: 524146 - RNA, 20 nt, Human
ccuuccugcagaccagggcu

SEQ ID NO: 524147 - RNA, 19 nt, Human
ccuugcucauccccagagg

SEQ ID NO: 524148 - RNA, 20 nt, Human
ccuugggcucccuggggagg

SEQ ID NO: 524149 - RNA, 20 nt, Human
ccuugugucccucacucccc

SEQ ID NO: 524150 - RNA, 22 nt, Human
cggcagccacucgcauagcacu

SEQ ID NO: 524151 - RNA, 19 nt, Human
cuaaacaccacgccccacc

SEQ ID NO: 524152 - RNA, 23 nt, Human
cuaaacaccacgccccaccccca

SEQ ID NO: 524153 - RNA, 22 nt, Human
cucacugcaaccuccaccccaa

SEQ ID NO: 524154 - RNA, 22 nt, Human
cuccagaacaacaacaaaaaaa

SEQ ID NO: 524155 - RNA, 19 nt, Human
cuccccaucccuauuccuc

SEQ ID NO: 524156 - RNA, 19 nt, Human
cuccccugccuugggcucc

SEQ ID NO: 524157 - RNA, 24 nt, Human
cucuaucugggcccggugggcucc

SEQ ID NO: 524158 - RNA, 18 nt, Human
cugagccccucuucacug

SEQ ID NO: 524159 - RNA, 24 nt, Human
cugcaaccuccaccccaauacuuu

SEQ ID NO: 524160 - RNA, 19 nt, Human
cugcuguccuccuuccugc

SEQ ID NO: 524161 - RNA, 22 nt, Human
cuggaaggccuugcucaucccc

SEQ ID NO: 524162 - RNA, 23 nt, Human
cuggaggacgcccuggaacucgg

SEQ ID NO: 524163 - RNA, 20 nt, Human
cugggccucugaccuugcug

SEQ ID NO: 524164 - RNA, 22 nt, Human
cuggugguggcguugaaacagc

SEQ ID NO: 524165 - RNA, 19 nt, Human
cuucuuagaguugucuuga

SEQ ID NO: 524166 - RNA, 19 nt, Human
cuugguggggcugggaccc

SEQ ID NO: 524167 - RNA, 21 nt, Human
cuuucugccucccugcucccc

SEQ ID NO: 524168 - RNA, 19 nt, Human
gaacaucccugauuaagaa

SEQ ID NO: 524169 - RNA, 19 nt, Human
gaacucggagcacacagca

SEQ ID NO: 524170 - RNA, 24 nt, Human
gaaggacaugucggugaugaugag

SEQ ID NO: 524171 - RNA, 20 nt, Human
gaaggcagccuucgauguca

SEQ ID NO: 524172 - RNA, 21 nt, Human
gacacugagaacauucccccc

SEQ ID NO: 524173 - RNA, 18 nt, Human
gacgggauggaggugugg

SEQ ID NO: 524174 - RNA, 20 nt, Human
gagcgugcagcaccuguggc

SEQ ID NO: 524175 - RNA, 24 nt, Human
gaggacucuagcacggcacagccc

SEQ ID NO: 524176 - RNA, 19 nt, Human
gagggggugguggcaggag

SEQ ID NO: 524177 - RNA, 19 nt, Human
gagggggugguggcaggag

SEQ ID NO: 524178 - RNA, 23 nt, Human
gaguccagccuuucuaccaccuc

SEQ ID NO: 524179 - RNA, 27 nt, Human
gcaaaacagaacucaaguuaaggccuc

SEQ ID NO: 524180 - RNA, 19 nt, Human
gcacagccagggucgaggu

SEQ ID NO: 524181 - RNA, 21 nt, Human
gcacaggcugcuaaccccagg

SEQ ID NO: 524182 - RNA, 21 nt, Human
gcaggucugccucccgggccc

SEQ ID NO: 524183 - RNA, 21 nt, Human
gcccuggaacucggagcacac

SEQ ID NO: 524184 - RNA, 20 nt, Human
gccuccccugccuugggcuc

SEQ ID NO: 524185 - RNA, 19 nt, Human
gcgccagugcguggaggag

SEQ ID NO: 524186 - RNA, 22 nt, Human
gcuugcaggaucauggaaaacc

SEQ ID NO: 524187 - RNA, 21 nt, Human
ggacaggcaugcagaaggcuc

SEQ ID NO: 524188 - RNA, 21 nt, Human
ggacccucccacuucccaccu

SEQ ID NO: 524189 - RNA, 20 nt, Human
ggacugggucaauggccaug

SEQ ID NO: 524190 - RNA, 24 nt, Human
ggaggacaggcaugcagaaggcuc

SEQ ID NO: 524191 - RNA, 22 nt, Human
ggaggacgcccuggaacucgga

SEQ ID NO: 524192 - RNA, 20 nt, Human
ggaggccuuggccucguggg

SEQ ID NO: 524193 - RNA, 21 nt, Human
ggaugggaccuggaagucuuu

SEQ ID NO: 524194 - RNA, 22 nt, Human
ggcaacccuucauucauucguc

SEQ ID NO: 524195 - RNA, 23 nt, Human
ggcacaggcugcuaaccccaggc

SEQ ID NO: 524196 - RNA, 21 nt, Human
ggcugugggcaugagcagcga

SEQ ID NO: 524197 - RNA, 19 nt, Human
ggcuucuucuuucuuuucu

SEQ ID NO: 524198 - RNA, 19 nt, Human
gggcagugguguccgcgau

SEQ ID NO: 524199 - RNA, 18 nt, Human
ggugcugcugagcccaag

SEQ ID NO: 524200 - RNA, 18 nt, Human
gucgaccaggcuggagug

SEQ ID NO: 524201 - RNA, 21 nt, Human
gugaaauggucagcacugcca

SEQ ID NO: 524202 - RNA, 25 nt, Human
gugcagccccagaccuggguaccuu

SEQ ID NO: 524203 - RNA, 24 nt, Human
guggcaggaguugcccaagggcug

SEQ ID NO: 524204 - RNA, 19 nt, Human
gugguggcguugaaacagc

SEQ ID NO: 524205 - RNA, 24 nt, Human
guucacucugucgaccaggcugga

SEQ ID NO: 524206 - RNA, 23 nt, Human
uaaaauaaacaauuuacuuuucc

SEQ ID NO: 524207 - RNA, 22 nt, Human
uaaacaccacgccccaccccca

SEQ ID NO: 524208 - RNA, 20 nt, Human
uaagcgccuggcuccgcugu

SEQ ID NO: 524209 - RNA, 20 nt, Human
uaaguucugcaaauucaguu

SEQ ID NO: 524210 - RNA, 24 nt, Human
uagacaucauuuucacaaugacuu

SEQ ID NO: 524211 - RNA, 23 nt, Human
uagcacggcacagccccucugcc

SEQ ID NO: 524212 - RNA, 27 nt, Human
uagcacggcacagccccucugccucuc

SEQ ID NO: 524213 - RNA, 19 nt, Human
uagcacucugggagggcug

SEQ ID NO: 524214 - RNA, 24 nt, Human
uagcacucugggagggcugugggc

SEQ ID NO: 524215 - RNA, 25 nt, Human
ucaaaaagcaggggaccagaaccga

SEQ ID NO: 524216 - RNA, 20 nt, Human
ucacucugucgaccaggcug

SEQ ID NO: 524217 - RNA, 22 nt, Human
ucacucugucgaccaggcugga

SEQ ID NO: 524218 - RNA, 23 nt, Human
ucacucugucgaccaggcuggag

SEQ ID NO: 524219 - RNA, 18 nt, Human
ucacugcaaccuccaccc

SEQ ID NO: 524220 - RNA, 21 nt, Human
ucacugcaaccuccaccccaa

SEQ ID NO: 524221 - RNA, 20 nt, Human
ucagaugcccuucccgugcu

SEQ ID NO: 524222 - RNA, 19 nt, Human
ucagugcaguggcugagcu

SEQ ID NO: 524223 - RNA, 23 nt, Human
ucauggaaaaccuucuuagaguu

SEQ ID NO: 524224 - RNA, 21 nt, Human
ucauucauucgucggaugugu

SEQ ID NO: 524225 - RNA, 23 nt, Human
uccagaacaacaacaaaaaaauc

SEQ ID NO: 524226 - RNA, 23 nt, Human
uccagcauuuuaaugaacauccc

SEQ ID NO: 524227 - RNA, 26 nt, Human
uccagccaagcaugguuucaaacaug

SEQ ID NO: 524228 - RNA, 21 nt, Human
uccaucagcagcucccccaga

SEQ ID NO: 524229 - RNA, 22 nt, Human
uccaucagcagcucccccagau

SEQ ID NO: 524230 - RNA, 24 nt, Human
uccaucagcagcucccccagauaa

SEQ ID NO: 524231 - RNA, 18 nt, Human
uccaugcugagccucccc

SEQ ID NO: 524232 - RNA, 19 nt, Human
uccaugugcacugcugccc

SEQ ID NO: 524233 - RNA, 21 nt, Human
uccaugugcacugcugcccuu

SEQ ID NO: 524234 - RNA, 18 nt, Human
ucccaccuccuugugucc

SEQ ID NO: 524235 - RNA, 19 nt, Human
ucccagccgggggcacagg

SEQ ID NO: 524236 - RNA, 19 nt, Human
ucccccagauaagcccugc

SEQ ID NO: 524237 - RNA, 24 nt, Human
ucccucacuccccuguuucauucc

SEQ ID NO: 524238 - RNA, 21 nt, Human
ucccuggacaauccguguccu

SEQ ID NO: 524239 - RNA, 21 nt, Human
ucccuggggaggggguggugg

SEQ ID NO: 524240 - RNA, 26 nt, Human
uccgcuguucucaggaguggguucug

SEQ ID NO: 524241 - RNA, 23 nt, Human
uccgggauuugguguuccugcug

SEQ ID NO: 524242 - RNA, 20 nt, Human
uccucuaagcgccuggcucc

SEQ ID NO: 524243 - RNA, 18 nt, Human
uccugcugcuguucaccg

SEQ ID NO: 524244 - RNA, 18 nt, Human
ucgaccaggcuggagugu

SEQ ID NO: 524245 - RNA, 22 nt, Human
ucucccagccugcaggugcccc

SEQ ID NO: 524246 - RNA, 24 nt, Human
ucucccagccugcaggugccccug

SEQ ID NO: 524247 - RNA, 28 nt, Human
ucugccucccugcuccccuuuuuuuuuu

SEQ ID NO: 524248 - RNA, 19 nt, Human
ucugucgaccaggcuggag

SEQ ID NO: 524249 - RNA, 24 nt, Human
ucugucgaccaggcuggaguguag

SEQ ID NO: 524250 - RNA, 24 nt, Human
ucuugggugguuucugccuggucc

SEQ ID NO: 524251 - RNA, 20 nt, Human
ugaagguuucuuacucuagu

SEQ ID NO: 524252 - RNA, 21 nt, Human
ugaccugacccuuagucaacc

SEQ ID NO: 524253 - RNA, 20 nt, Human
ugacgaguucuaccccagcu

SEQ ID NO: 524254 - RNA, 25 nt, Human
ugagaaagcacaugccgugaagaca

SEQ ID NO: 524255 - RNA, 18 nt, Human
ugagaacauuccccccuc

SEQ ID NO: 524256 - RNA, 21 nt, Human
ugagaacauuccccccuccca

SEQ ID NO: 524257 - RNA, 18 nt, Human
ugagacagaguucacucu

SEQ ID NO: 524258 - RNA, 21 nt, Human
ugaugaugagcgagacggaca

SEQ ID NO: 524259 - RNA, 22 nt, Human
ugcaaaacagaacucaaguuaa

SEQ ID NO: 524260 - RNA, 21 nt, Human
ugccaugggucccgguccagc

SEQ ID NO: 524261 - RNA, 19 nt, Human
ugcugagccuccccugccu

SEQ ID NO: 524262 - RNA, 18 nt, Human
ugcugcugagcccaaggc

SEQ ID NO: 524263 - RNA, 22 nt, Human
uggaggugugggcagugguguc

SEQ ID NO: 524264 - RNA, 19 nt, Human
uggcagcauuuggucuucc

SEQ ID NO: 524265 - RNA, 23 nt, Human
uggcaggaccaacaccgggucug

SEQ ID NO: 524266 - RNA, 19 nt, Human
uggcaggaguugcccaagg

SEQ ID NO: 524267 - RNA, 20 nt, Human
uggcagugggaugaggcugg

SEQ ID NO: 524268 - RNA, 22 nt, Human
uggcagugggaugaggcuggga

SEQ ID NO: 524269 - RNA, 27 nt, Human
uggcauccagauuugcauaagauggac

SEQ ID NO: 524270 - RNA, 21 nt, Human
uggccaggccacuagccaguc

SEQ ID NO: 524271 - RNA, 21 nt, Human
uggccgcagacauccaggcac

SEQ ID NO: 524272 - RNA, 18 nt, Human
uggccucugcaucacccu

SEQ ID NO: 524273 - RNA, 19 nt, Human
uggcuuccaucucugucuc

SEQ ID NO: 524274 - RNA, 22 nt, Human
ugggaaccugagcugugacccc

SEQ ID NO: 524275 - RNA, 20 nt, Human
ugggcagugguguccgcgau

SEQ ID NO: 524276 - RNA, 22 nt, Human
ugggcaugagcagcgaggacuc

SEQ ID NO: 524277 - RNA, 19 nt, Human
uggggagggggugguggca

SEQ ID NO: 524278 - RNA, 24 nt, Human
ugggguccuaaagucugcuguccu

SEQ ID NO: 524279 - RNA, 22 nt, Human
ugguggcaggaguugcccaagg

SEQ ID NO: 524280 - RNA, 23 nt, Human
uucacucugucgaccaggcugga

SEQ ID NO: 524281 - RNA, 21 nt, Human
uuccaggacuuucugccuccc

SEQ ID NO: 524282 - RNA, 18 nt, Human
uugcagagggaggacagg

SEQ ID NO: 524283 - RNA, 25 nt, Human
uugggcucccuggggaggggguggu

SEQ ID NO: 524284 - RNA, 20 nt, Human
uugguuugagagcaguucau

SEQ ID NO: 524285 - RNA, 24 nt, Human
uuuaacccaaccucaaaaagcagg

SEQ ID NO: 524286 - RNA, 21 nt, Human
uuugcauaagauggacugggu

SEQ ID NO: 524287 - RNA, 22 nt, Human
uuuguugguuugagagcaguuc

SEQ ID NO: 524288 - RNA, 20 nt, Human
uuuuuuuuuuugagacagag

SEQ ID NO: 524289 - RNA, 22 nt, Human
aauuauccagccaugagcccug

SEQ ID NO: 524290 - RNA, 22 nt, Human
acagagcugcucacagauacca

SEQ ID NO: 524291 - RNA, 23 nt, Human
aggggcugggcaugguuggcuuu

SEQ ID NO: 524292 - RNA, 24 nt, Human
cacagagcugcucacagauaccac

SEQ ID NO: 524293 - RNA, 19 nt, Human
ccucucagggagaaaaccu

SEQ ID NO: 524294 - RNA, 21 nt, Human
cgucagaauucagaacgaugg

SEQ ID NO: 524295 - RNA, 22 nt, Human
gaaaaccuuugaguccacagag

SEQ ID NO: 524296 - RNA, 24 nt, Human
gagcugcucacagauaccacugcc

SEQ ID NO: 524297 - RNA, 20 nt, Human
ggagaaaaccuuugagucca

SEQ ID NO: 524298 - RNA, 24 nt, Human
ggagaaaaccuuugaguccacaga

SEQ ID NO: 524299 - RNA, 22 nt, Human
ggcugggggugcugggaggggc

SEQ ID NO: 524300 - RNA, 20 nt, Human
ggggcugggggugcugggag

SEQ ID NO: 524301 - RNA, 26 nt, Human
ggggugcugggaggggcugggcaugg

SEQ ID NO: 524302 - RNA, 18 nt, Human
gugcugggaggggcuggg

SEQ ID NO: 524303 - RNA, 19 nt, Human
uaaaacgaggaugcgaagc

SEQ ID NO: 524304 - RNA, 18 nt, Human
uaaccaaaaauaaaacga

SEQ ID NO: 524305 - RNA, 21 nt, Human
uaaccaaaaauaaaacgagga

SEQ ID NO: 524306 - RNA, 24 nt, Human
uauccagccaugagcccuggccca

SEQ ID NO: 524307 - RNA, 20 nt, Human
ucacagauaccacugccugu

SEQ ID NO: 524308 - RNA, 23 nt, Human
ucucucgagcugcacucuuucuu

SEQ ID NO: 524309 - RNA, 26 nt, Human
ugaaucagcuggccugggucggaucc

SEQ ID NO: 524310 - RNA, 23 nt, Human
uggcuuugugaucuggggucugg

SEQ ID NO: 524311 - RNA, 18 nt, Human
ugggaggggcugggcaug

SEQ ID NO: 524312 - RNA, 18 nt, Human
ugggaggggcugggcaug

SEQ ID NO: 524313 - RNA, 20 nt, Human
ugggaggggcugggcauggu

SEQ ID NO: 524314 - RNA, 18 nt, Human
uggggcugggggugcugg

SEQ ID NO: 524315 - RNA, 18 nt, Human
uggggcugggggugcugg

SEQ ID NO: 524316 - RNA, 22 nt, Human
ugggggugcugggaggggcugg

SEQ ID NO: 524317 - RNA, 23 nt, Human
aaaaagaugugagccauaaaaau

SEQ ID NO: 524318 - RNA, 22 nt, Human
aaaaggaaauagacuuaaauua

SEQ ID NO: 524319 - RNA, 24 nt, Human
aaagugauaagauuacaggcauga

SEQ ID NO: 524320 - RNA, 18 nt, Human
aagcagauggagcugaac

SEQ ID NO: 524321 - RNA, 24 nt, Human
aaucauauaaccacugugucugag

SEQ ID NO: 524322 - RNA, 19 nt, Human
acacugggguuaguuuagc

SEQ ID NO: 524323 - RNA, 24 nt, Human
acagaaugaguaaccauuuccuau

SEQ ID NO: 524324 - RNA, 21 nt, Human
acaguuggaaaguuuggaggc

SEQ ID NO: 524325 - RNA, 24 nt, Human
acccaccuuuagaaggauucccau

SEQ ID NO: 524326 - RNA, 24 nt, Human
acuauguugaugaggcuggucuug

SEQ ID NO: 524327 - RNA, 18 nt, Human
agagauccucccaucuca

SEQ ID NO: 524328 - RNA, 22 nt, Human
agauuacaggcaugagccacug

SEQ ID NO: 524329 - RNA, 22 nt, Human
agauuacaggcaugagccacug

SEQ ID NO: 524330 - RNA, 24 nt, Human
agauuacaggcaugagccacugug

SEQ ID NO: 524331 - RNA, 18 nt, Human
agcaggaggucagggcug

SEQ ID NO: 524332 - RNA, 19 nt, Human
agcauuuuuauuuuucaug

SEQ ID NO: 524333 - RNA, 19 nt, Human
agcuguuuuacaucgcuug

SEQ ID NO: 524334 - RNA, 23 nt, Human
aggcaugagccacugugccuggc

SEQ ID NO: 524335 - RNA, 23 nt, Human
auagucuuauuuggcagaggggg

SEQ ID NO: 524336 - RNA, 23 nt, Human
aucagaaguuccuuacacaacag

SEQ ID NO: 524337 - RNA, 19 nt, Human
auggggucucacuauguug

SEQ ID NO: 524338 - RNA, 21 nt, Human
caaaaguacaagaaaaucagc

SEQ ID NO: 524339 - RNA, 24 nt, Human
caaagugauaagauuacaggcaug

SEQ ID NO: 524340 - RNA, 26 nt, Human
cacaaaaucauauaaccacugugucu

SEQ ID NO: 524341 - RNA, 24 nt, Human
cacuauguugaugaggcuggucuu

SEQ ID NO: 524342 - RNA, 27 nt, Human
cagcaaucagaaucagaaguuccuuac

SEQ ID NO: 524343 - RNA, 20 nt, Human
cagcaccccaacugcuuagu

SEQ ID NO: 524344 - RNA, 19 nt, Human
caggaggguuucucaaggg

SEQ ID NO: 524345 - RNA, 23 nt, Human
cauuaaaagaggauuaaaagcag

SEQ ID NO: 524346 - RNA, 24 nt, Human
ccaaagugauaagauuacaggcau

SEQ ID NO: 524347 - RNA, 19 nt, Human
cccacugcucccagcuguu

SEQ ID NO: 524348 - RNA, 20 nt, Human
cccauccacagcggcugagg

SEQ ID NO: 524349 - RNA, 24 nt, Human
cccccucagccgcccggcgggggc

SEQ ID NO: 524350 - RNA, 25 nt, Human
ccccuccgccuccacuccccaucca

SEQ ID NO: 524351 - RNA, 19 nt, Human
cccuccgccuccacucccc

SEQ ID NO: 524352 - RNA, 22 nt, Human
cccuccgccuccacuccccauc

SEQ ID NO: 524353 - RNA, 24 nt, Human
ccgcuccccuccgccuccacuccc

SEQ ID NO: 524354 - RNA, 23 nt, Human
ccucccaucucagccucccaaag

SEQ ID NO: 524355 - RNA, 18 nt, Human
ccuguauggacacaaaau

SEQ ID NO: 524356 - RNA, 18 nt, Human
cgccuccacuccccaucc

SEQ ID NO: 524357 - RNA, 22 nt, Human
cgccuccacuccccauccacag

SEQ ID NO: 524358 - RNA, 23 nt, Human
cgggcuccgcuccccuccgccuc

SEQ ID NO: 524359 - RNA, 19 nt, Human
cucaagagauccucccauc

SEQ ID NO: 524360 - RNA, 22 nt, Human
cugugccuggccagcucugccu

SEQ ID NO: 524361 - RNA, 25 nt, Human
cuuucuggcuucaguaaaaagaugu

SEQ ID NO: 524362 - RNA, 18 nt, Human
gauuacaggcaugagcca

SEQ ID NO: 524363 - RNA, 19 nt, Human
gauuacaggcaugagccac

SEQ ID NO: 524364 - RNA, 20 nt, Human
gcuccgcuccccuccgccuc

SEQ ID NO: 524365 - RNA, 22 nt, Human
gcuggucuugaacaccuggucu

SEQ ID NO: 524366 - RNA, 22 nt, Human
ggcuccgcuccccuccgccucc

SEQ ID NO: 524367 - RNA, 18 nt, Human
ggcugcuggauagauguu

SEQ ID NO: 524368 - RNA, 19 nt, Human
gugccuggccagcucugcc

SEQ ID NO: 524369 - RNA, 21 nt, Human
guguguguauguuaaacaugu

SEQ ID NO: 524370 - RNA, 19 nt, Human
uaaaagcaguguugguuuu

SEQ ID NO: 524371 - RNA, 19 nt, Human
uaaaaugccauuagcaugg

SEQ ID NO: 524372 - RNA, 22 nt, Human
uaaaaugccauuagcauggugg

SEQ ID NO: 524373 - RNA, 21 nt, Human
uaagauuacaggcaugagcca

SEQ ID NO: 524374 - RNA, 23 nt, Human
uaagauuacaggcaugagccacu

SEQ ID NO: 524375 - RNA, 24 nt, Human
uaagauuacaggcaugagccacug

SEQ ID NO: 524376 - RNA, 24 nt, Human
uaauagagauggggucucacuaug

SEQ ID NO: 524377 - RNA, 18 nt, Human
uaaucugacucagaaguc

SEQ ID NO: 524378 - RNA, 22 nt, Human
uacaggcaugagccacugugcc

SEQ ID NO: 524379 - RNA, 23 nt, Human
uagaaugaaagagguugcaacuu

SEQ ID NO: 524380 - RNA, 22 nt, Human
uagagauggggucucacuaugu

SEQ ID NO: 524381 - RNA, 25 nt, Human
uagcaaaucaccaccuggugauucg

SEQ ID NO: 524382 - RNA, 18 nt, Human
uauacagauauauguaua

SEQ ID NO: 524383 - RNA, 22 nt, Human
uauauuuaaaaugccauuagca

SEQ ID NO: 524384 - RNA, 23 nt, Human
uaugcagccuuguuucagaacac

SEQ ID NO: 524385 - RNA, 20 nt, Human
uauguguuuaagugugugua

SEQ ID NO: 524386 - RNA, 22 nt, Human
uauguguuuaaguguguguaug

SEQ ID NO: 524387 - RNA, 24 nt, Human
uauguugaugaggcuggucuugaa

SEQ ID NO: 524388 - RNA, 24 nt, Human
uauuuuguguuuuuugcugcagaa

SEQ ID NO: 524389 - RNA, 21 nt, Human
ucaaguaacagcaaucagaau

SEQ ID NO: 524390 - RNA, 22 nt, Human
ucaccugccuuuuuacuaucaa

SEQ ID NO: 524391 - RNA, 18 nt, Human
ucagggcugcuggauaga

SEQ ID NO: 524392 - RNA, 18 nt, Human
ucauuuggaauuuccuca

SEQ ID NO: 524393 - RNA, 24 nt, Human
ucccaaagugauaagauuacaggc

SEQ ID NO: 524394 - RNA, 18 nt, Human
uccccauccacagcggcu

SEQ ID NO: 524395 - RNA, 25 nt, Human
uccgggcuccgcuccccuccgccuc

SEQ ID NO: 524396 - RNA, 20 nt, Human
uccucccaucucagccuccc

SEQ ID NO: 524397 - RNA, 24 nt, Human
uccuguggacaaaauuccuccuuu

SEQ ID NO: 524398 - RNA, 24 nt, Human
ucucacuauguugaugaggcuggu

SEQ ID NO: 524399 - RNA, 24 nt, Human
ugaacagaugcccuuuuuaaaugc

SEQ ID NO: 524400 - RNA, 23 nt, Human
ugaagacaccaaggccucuccug

SEQ ID NO: 524401 - RNA, 23 nt, Human
ugaggcuggucuugaacaccugg

SEQ ID NO: 524402 - RNA, 20 nt, Human
ugauacugaagaucuaggcu

SEQ ID NO: 524403 - RNA, 20 nt, Human
ugcaugaaccacuucugcau

SEQ ID NO: 524404 - RNA, 21 nt, Human
uggacacaaaaucauauaacc

SEQ ID NO: 524405 - RNA, 19 nt, Human
uggcagagggggauagcca

SEQ ID NO: 524406 - RNA, 24 nt, Human
ugggcacuuuaguuugccacagcu

SEQ ID NO: 524407 - RNA, 24 nt, Human
uggggucucacuauguugaugagg

SEQ ID NO: 524408 - RNA, 23 nt, Human
uggguuguggauagucuuauuug

SEQ ID NO: 524409 - RNA, 21 nt, Human
ugucugagcuggguuguggau

SEQ ID NO: 524410 - RNA, 21 nt, Human
ugugagccauaaaaauccaaa

SEQ ID NO: 524411 - RNA, 19 nt, Human
uguguuuaaguguguguau

SEQ ID NO: 524412 - RNA, 21 nt, Human
uguguuuuuugcugcagaauc

SEQ ID NO: 524413 - RNA, 24 nt, Human
uuaauagagauggggucucacuau

SEQ ID NO: 524414 - RNA, 21 nt, Human
uucaucuggaauaaaaaucug

SEQ ID NO: 524415 - RNA, 18 nt, Human
uuuauguguuuaagugug

SEQ ID NO: 524416 - RNA, 18 nt, Human
uuugaggugccuuucugg

SEQ ID NO: 524417 - RNA, 23 nt, Human
uuuggaauuuccucaccuuccug

SEQ ID NO: 524418 - RNA, 19 nt, Human
uuuuuaauagagauggggu

SEQ ID NO: 524419 - RNA, 19 nt, Human
aaaaacagcuccuaccuaa

SEQ ID NO: 524420 - RNA, 23 nt, Human
aaaaagucuaaaaaaauagaaaa

SEQ ID NO: 524421 - RNA, 19 nt, Human
aaaaauagaaaacucucuc

SEQ ID NO: 524422 - RNA, 20 nt, Human
aaaacucucuccauaccugg

SEQ ID NO: 524423 - RNA, 24 nt, Human
aaagugcugggauuacagguguga

SEQ ID NO: 524424 - RNA, 20 nt, Human
aacagcuccuaccuaaaguu

SEQ ID NO: 524425 - RNA, 18 nt, Human
aacaguggucucugggga

SEQ ID NO: 524426 - RNA, 18 nt, Human
aacuggacucuggcggcg

SEQ ID NO: 524427 - RNA, 20 nt, Human
aacuggggugaggggaaguu

SEQ ID NO: 524428 - RNA, 18 nt, Human
aacuuacuucuuccacug

SEQ ID NO: 524429 - RNA, 19 nt, Human
aagcaaauaugcuuggauc

SEQ ID NO: 524430 - RNA, 21 nt, Human
aagcaagugguuacacaaaca

SEQ ID NO: 524431 - RNA, 20 nt, Human
aagcagagaucuaacaagac

SEQ ID NO: 524432 - RNA, 25 nt, Human
aagcagagaucuaacaagacaauga

SEQ ID NO: 524433 - RNA, 20 nt, Human
aagccaaugaaguuauggga

SEQ ID NO: 524434 - RNA, 18 nt, Human
aagugcugggauuacagg

SEQ ID NO: 524435 - RNA, 19 nt, Human
aagugcugggauuacaggu

SEQ ID NO: 524436 - RNA, 26 nt, Human
aagugcugggauuacaggugugagcc

SEQ ID NO: 524437 - RNA, 24 nt, Human
acaauugcaacuggggugagggga

SEQ ID NO: 524438 - RNA, 26 nt, Human
acacaaacaucuaauaauacuaaaau

SEQ ID NO: 524439 - RNA, 21 nt, Human
accaagagaugaaaacacugu

SEQ ID NO: 524440 - RNA, 24 nt, Human
accauguuggccaggauggucucg

SEQ ID NO: 524441 - RNA, 18 nt, Human
acgggguuucaccauguu

SEQ ID NO: 524442 - RNA, 23 nt, Human
acgggguuucaccauguuggcca

SEQ ID NO: 524443 - RNA, 24 nt, Human
acgggguuucaccauguuggccag

SEQ ID NO: 524444 - RNA, 21 nt, Human
acuauucaacagacuacaauc

SEQ ID NO: 524445 - RNA, 18 nt, Human
agcugcgaccuaagcaga

SEQ ID NO: 524446 - RNA, 24 nt, Human
aggaacaguuuggcuuaucaugug

SEQ ID NO: 524447 - RNA, 18 nt, Human
aggcaguacucaaaauuc

SEQ ID NO: 524448 - RNA, 22 nt, Human
aggcagugaaaaaccuuuugca

SEQ ID NO: 524449 - RNA, 25 nt, Human
aggcuggagugcagugguaugaucu

SEQ ID NO: 524450 - RNA, 24 nt, Human
agguugcucucuugaaacacauuu

SEQ ID NO: 524451 - RNA, 22 nt, Human
aguagagacgggguuucaccau

SEQ ID NO: 524452 - RNA, 18 nt, Human
aguagcugggauuacagg

SEQ ID NO: 524453 - RNA, 20 nt, Human
agugcagugguaugaucucg

SEQ ID NO: 524454 - RNA, 23 nt, Human
agugcagugguaugaucucggcu

SEQ ID NO: 524455 - RNA, 24 nt, Human
agugcagugguaugaucucggcuc

SEQ ID NO: 524456 - RNA, 24 nt, Human
agugguaugaucucggcucacugu

SEQ ID NO: 524457 - RNA, 18 nt, Human
auagaaaacaaacuaguc

SEQ ID NO: 524458 - RNA, 21 nt, Human
augaagcauagcuauguuugc

SEQ ID NO: 524459 - RNA, 33 nt, Human; identical to SEQ ID NO: 258803

SEQ ID NO: 524460 - RNA, 24 nt, Human
caaaauacagcuagagaaauacaa

SEQ ID NO: 524461 - RNA, 18 nt, Human
caaacaaaaacagcuccu

SEQ ID NO: 524462 - RNA, 24 nt, Human
caaagugcugggauuacaggugug

SEQ ID NO: 524463 - RNA, 21 nt, Human
caagaaauaucgcagagugac

SEQ ID NO: 524464 - RNA, 20 nt, Human
caagcgauucuccugccuca

SEQ ID NO: 524465 - RNA, 22 nt, Human
caagcgauucuccugccucagc

SEQ ID NO: 524466 - RNA, 18 nt, Human
caccauguuggccaggau

SEQ ID NO: 524467 - RNA, 22 nt, Human
caccauguuggccaggaugguc

SEQ ID NO: 524468 - RNA, 24 nt, Human
caccauguuggccaggauggucuc

SEQ ID NO: 524469 - RNA, 21 nt, Human
cacuguaaccuccaccucccg

SEQ ID NO: 524470 - RNA, 23 nt, Human
cacuguaaccuccaccucccggg

SEQ ID NO: 524471 - RNA, 22 nt, Human
cagaaugagauucagcuaaacc

SEQ ID NO: 524472 - RNA, 24 nt, Human
cagaaugagguccaagcaugaacc

SEQ ID NO: 524473 - RNA, 21 nt, Human
caggcacccaccaccacgccc

SEQ ID NO: 524474 - RNA, 21 nt, Human
ccaaagugcugggauuacagg

SEQ ID NO: 524475 - RNA, 21 nt, Human
ccaaagugcugggauuacagg

SEQ ID NO: 524476 - RNA, 24 nt, Human
ccaaagugcugggauuacaggugu

SEQ ID NO: 524477 - RNA, 19 nt, Human
ccaagagaugaaaacacug

SEQ ID NO: 524478 - RNA, 24 nt, Human
ccaccucccggguucaagcgauuc

SEQ ID NO: 524479 - RNA, 21 nt, Human
cccaccaccacgcccagcuaa

SEQ ID NO: 524480 - RNA, 23 nt, Human
ccccaaagugcugggauuacagg

SEQ ID NO: 524481 - RNA, 26 nt, Human
ccccaggcgcuccggcuacgcgcucc

SEQ ID NO: 524482 - RNA, 23 nt, Human
cccgaguagcugggauuacaggc

SEQ ID NO: 524483 - RNA, 24 nt, Human
cccgaguagcugggauuacaggca

SEQ ID NO: 524484 - RNA, 23 nt, Human
cccggguucaagcgauucuccug

SEQ ID NO: 524485 - RNA, 23 nt, Human
ccgaguagcugggauuacaggca

SEQ ID NO: 524486 - RNA, 24 nt, Human
ccggcgcgcggcggcguggucuuc

SEQ ID NO: 524487 - RNA, 23 nt, Human
ccucagcuccccaaagugcuggg

SEQ ID NO: 524488 - RNA, 24 nt, Human
ccucccggguucaagcgauucucc

SEQ ID NO: 524489 - RNA, 23 nt, Human
ccugccucagccucccgaguagc

SEQ ID NO: 524490 - RNA, 24 nt, Human
cgccaggcuggagugcagugguau

SEQ ID NO: 524491 - RNA, 22 nt, Human
cuagcagcaguagucaugaaaa

SEQ ID NO: 524492 - RNA, 25 nt, Human
cucaaguaauugcuuccaaauuugc

SEQ ID NO: 524493 - RNA, 24 nt, Human
cucacuguaaccuccaccucccgg

SEQ ID NO: 524494 - RNA, 24 nt, Human
cucagccucccgaguagcugggau

SEQ ID NO: 524495 - RNA, 24 nt, Human
cucuugaccucgugauccgcccgc

SEQ ID NO: 524496 - RNA, 23 nt, Human
cugccucagccucccgaguagcu

SEQ ID NO: 524497 - RNA, 24 nt, Human
cuggagugcagugguaugaucucg

SEQ ID NO: 524498 - RNA, 21 nt, Human
cuguaaccuccaccucccggg

SEQ ID NO: 524499 - RNA, 24 nt, Human
cuguaaccuccaccucccggguuc

SEQ ID NO: 524500 - RNA, 33 nt, Human
cuguacuauuuuauuuauuuauuuauuuauuuu

SEQ ID NO: 524501 - RNA, 19 nt, Human
cuuguaagccucaugaagc

SEQ ID NO: 524502 - RNA, 22 nt, Human
gaauuaugaccaagagaugaaa

SEQ ID NO: 524503 - RNA, 22 nt, Human
gaccucgugauccgcccgccuc

SEQ ID NO: 524504 - RNA, 24 nt, Human
gaccucgugauccgcccgccucag

SEQ ID NO: 524505 - RNA, 19 nt, Human
gacuuagcuuagguugcuc

SEQ ID NO: 524506 - RNA, 24 nt, Human
gagacgggguuucaccauguuggc

SEQ ID NO: 524507 - RNA, 25 nt, Human
gaguagcugggauuacaggcaccca

SEQ ID NO: 524508 - RNA, 20 nt, Human
gagucuugcucugucgccag

SEQ ID NO: 524509 - RNA, 18 nt, Human
gauuacaggugugagcca

SEQ ID NO: 524510 - RNA, 22 nt, Human
gauuacaggugugagccacugc

SEQ ID NO: 524511 - RNA, 22 nt, Human
gauuacaggugugagccacugc

SEQ ID NO: 524512 - RNA, 21 nt, Human
gauucuccugccucagccucc

SEQ ID NO: 524513 - RNA, 20 nt, Human
gccacaauaugagcagucac

SEQ ID NO: 524514 - RNA, 23 nt, Human
gccacaauaugagcagucacugg

SEQ ID NO: 524515 - RNA, 23 nt, Human
gccucagcuccccaaagugcugg

SEQ ID NO: 524516 - RNA, 24 nt, Human
gcgauucuccugccucagccuccc

SEQ ID NO: 524517 - RNA, 25 nt, Human
ggcaugcauacaaucacugugugca

SEQ ID NO: 524518 - RNA, 23 nt, Human
gggguuucaccauguuggccagg

SEQ ID NO: 524519 - RNA, 22 nt, Human
ggguuucaccauguuggccagg

SEQ ID NO: 524520 - RNA, 21 nt, Human
gguauaaaauaccauggguau

SEQ ID NO: 524521 - RNA, 24 nt, Human
gguuucaccauguuggccaggaug

SEQ ID NO: 524522 - RNA, 23 nt, Human
guagagacgggguuucaccaugu

SEQ ID NO: 524523 - RNA, 18 nt, Human
guagcugggauuacaggc

SEQ ID NO: 524524 - RNA, 24 nt, Human
gucuugcucugucgccaggcugga

SEQ ID NO: 524525 - RNA, 23 nt, Human
gugauccgcccgccucagcuccc

SEQ ID NO: 524526 - RNA, 19 nt, Human
guggucucuggggaucucg

SEQ ID NO: 524527 - RNA, 19 nt, Human
uaaaauaccauggguauga

SEQ ID NO: 524528 - RNA, 20 nt, Human
uaaaauaccauggguaugaa

SEQ ID NO: 524529 - RNA, 23 nt, Human
uaaauaagcaagugguuacacaa

SEQ ID NO: 524530 - RNA, 21 nt, Human
uaacccaguuccgcaagaggc

SEQ ID NO: 524531 - RNA, 19 nt, Human
uaagugucaacuggacucu

SEQ ID NO: 524532 - RNA, 20 nt, Human
uaauauugccccuugacaua

SEQ ID NO: 524533 - RNA, 25 nt, Human
uaauuuuuguuauuuuuaguagaga

SEQ ID NO: 524534 - RNA, 19 nt, Human
uacaggugugagccacugc

SEQ ID NO: 524535 - RNA, 23 nt, Human
uacaggugugagccacugcgccc

SEQ ID NO: 524536 - RNA, 18 nt, Human
uacaguagaaugacaugu

SEQ ID NO: 524537 - RNA, 21 nt, Human
uaccauggguaugaaaugcca

SEQ ID NO: 524538 - RNA, 23 nt, Human
uagaaaacaaacuagucagcacu

SEQ ID NO: 524539 - RNA, 22 nt, Human
uagagacgggguuucaccaugu

SEQ ID NO: 524540 - RNA, 24 nt, Human
uaguagagacgggguuucaccaug

SEQ ID NO: 524541 - RNA, 25 nt, Human
uaguagagacgggguuucaccaugu

SEQ ID NO: 524542 - RNA, 18 nt, Human
uaucaaggcaagauguaa

SEQ ID NO: 524543 - RNA, 19 nt, Human
uaucaaggcaagauguaac

SEQ ID NO: 524544 - RNA, 23 nt, Human
uauuuauuuuugagauggagucu

SEQ ID NO: 524545 - RNA, 27 nt, Human
ucaaaguaagugucaacuggacuccug

SEQ ID NO: 524546 - RNA, 19 nt, Human
ucaauaaauuaaaaggcuu

SEQ ID NO: 524547 - RNA, 24 nt, Human
ucaccauguuggccaggauggucu

SEQ ID NO: 524548 - RNA, 23 nt, Human
ucacuguaaccuccaccucccgg

SEQ ID NO: 524549 - RNA, 24 nt, Human
ucacuguaaccuccaccucccggg

SEQ ID NO: 524550 - RNA, 25 nt, Human
ucacuguaaccuccaccucccgggu

SEQ ID NO: 524551 - RNA, 20 nt, Human
ucagccucccgaguagcugg

SEQ ID NO: 524552 - RNA, 20 nt, Human
uccccaaagugcugggauua

SEQ ID NO: 524553 - RNA, 24 nt, Human
uccccaaagugcugggauuacagg

SEQ ID NO: 524554 - RNA, 23 nt, Human
uccccaagcaaauaugcuuggau

SEQ ID NO: 524555 - RNA, 19 nt, Human
uccccaggcgcuccggcua

SEQ ID NO: 524556 - RNA, 24 nt, Human
ucccgaguagcugggauuacaggc

SEQ ID NO: 524557 - RNA, 21 nt, Human
ucccggguucaagcgauucuc

SEQ ID NO: 524558 - RNA, 24 nt, Human
ucccggguucaagcgauucuccug

SEQ ID NO: 524559 - RNA, 18 nt, Human
uccgcccgccucagcucc

SEQ ID NO: 524560 - RNA, 21 nt, Human
uccgcccgccucagcucccca

SEQ ID NO: 524561 - RNA, 24 nt, Human
ucuccugccucagccucccgagua

SEQ ID NO: 524562 - RNA, 18 nt, Human
ucugucgccaggcuggag

SEQ ID NO: 524563 - RNA, 21 nt, Human
ucugucgccaggcuggagugc

SEQ ID NO: 524564 - RNA, 23 nt, Human
ucugucgccaggcuggagugcag

SEQ ID NO: 524565 - RNA, 18 nt, Human
ucuuccacugauacaaga

SEQ ID NO: 524566 - RNA, 21 nt, Human
ucuugcucugucgccaggcug

SEQ ID NO: 524567 - RNA, 21 nt, Human
ucuugcucugucgccaggcug

SEQ ID NO: 524568 - RNA, 22 nt, Human
ucuugcucugucgccaggcugg

SEQ ID NO: 524569 - RNA, 23 nt, Human
ucuugcucugucgccaggcugga

SEQ ID NO: 524570 - RNA, 23 nt, Human
ugaaaugccaugguaaauacuau

SEQ ID NO: 524571 - RNA, 22 nt, Human
ugaaccuggcuugaagagcuag

SEQ ID NO: 524572 - RNA, 23 nt, Human
ugaacuguccucaaguaauugcu

SEQ ID NO: 524573 - RNA, 20 nt, Human
ugacauguaauuuauucaua

SEQ ID NO: 524574 - RNA, 22 nt, Human
ugagauggagucuugcucuguc

SEQ ID NO: 524575 - RNA, 23 nt, Human
ugagcugcgaccuaagcagagau

SEQ ID NO: 524576 - RNA, 22 nt, Human
ugcaguacuucaaacaaaaaca

SEQ ID NO: 524577 - RNA, 23 nt, Human
ugccaugguaaauacuauucaac

SEQ ID NO: 524578 - RNA, 24 nt, Human
ugccucagccucccgaguagcugg

SEQ ID NO: 524579 - RNA, 23 nt, Human
ugcucugucgccaggcuggagug

SEQ ID NO: 524580 - RNA, 24 nt, Human
ugcugggauuacaggugugagcca

SEQ ID NO: 524581 - RNA, 18 nt, Human
uggagucuugcucugucg

SEQ ID NO: 524582 - RNA, 19 nt, Human
uggagugcagugguaugau

SEQ ID NO: 524583 - RNA, 24 nt, Human
uggagugcagugguaugaucucgg

SEQ ID NO: 524584 - RNA, 24 nt, Human
uggccaggauggucucgaucucuu

SEQ ID NO: 524585 - RNA, 19 nt, Human
ugggauuacaggcacccac

SEQ ID NO: 524586 - RNA, 21 nt, Human
ugggauuacaggcacccacca

SEQ ID NO: 524587 - RNA, 24 nt, Human
ugggauuacaggcacccaccacca

SEQ ID NO: 524588 - RNA, 18 nt, Human
ugggauuacaggugugag

SEQ ID NO: 524589 - RNA, 19 nt, Human
ugggauuacaggugugagc

SEQ ID NO: 524590 - RNA, 21 nt, Human
ugggauuacaggugugagcca

SEQ ID NO: 524591 - RNA, 22 nt, Human
ugggauuacaggugugagccac

SEQ ID NO: 524592 - RNA, 22 nt, Human
ugggauuacaggugugagccac

SEQ ID NO: 524593 - RNA, 24 nt, Human
ugggauuacaggugugagccacug

SEQ ID NO: 524594 - RNA, 24 nt, Human
ugguaugaucucggcucacuguaa

SEQ ID NO: 524595 - RNA, 20 nt, Human
ugugugcauucaaugcgugg

SEQ ID NO: 524596 - RNA, 18 nt, Human
uuaguagagacgggguuu

SEQ ID NO: 524597 - RNA, 22 nt, Human
uuaguagagacgggguuucacc

SEQ ID NO: 524598 - RNA, 24 nt, Human
uuaguagagacgggguuucaccau

SEQ ID NO: 524599 - RNA, 18 nt, Human
uuauuuauuuauuuauuu

SEQ ID NO: 524600 - RNA, 18 nt, Human
uuauuuauuuauuuauuu

SEQ ID NO: 524601 - RNA, 19 nt, Human
uuauuuauuuauuuauuua

SEQ ID NO: 524602 - RNA, 19 nt, Human
uuauuuauuuauuuauuua

SEQ ID NO: 524603 - RNA, 19 nt, Human
uuauuuauuuauuuauuua

SEQ ID NO: 524604 - RNA, 19 nt, Human
uuauuuauuuauuuauuua

SEQ ID NO: 524605 - RNA, 19 nt, Human
uuauuuauuuauuuauuua

SEQ ID NO: 524606 - RNA, 25 nt, Human
uuauuuauuuauuuauuuauuuauu

SEQ ID NO: 524607 - RNA, 25 nt, Human
uuauuuauuuauuuauuuauuuauu

SEQ ID NO: 524608 - RNA, 25 nt, Human
uuauuuauuuauuuauuuauuuauu

SEQ ID NO: 524609 - RNA, 25 nt, Human
uuauuuauuuauuuauuuauuuauu

SEQ ID NO: 524610 - RNA, 25 nt, Human
uuauuuauuuauuuauuuauuuauu

SEQ ID NO: 524611 - RNA, 25 nt, Human
uuauuuauuuauuuauuuauuuauu

SEQ ID NO: 524612 - RNA, 25 nt, Human
uuauuuauuuauuuauuuauuuauu

SEQ ID NO: 524613 - RNA, 25 nt, Human
uuauuuauuuauuuauuuauuuauu

SEQ ID NO: 524614 - RNA, 21 nt, Human
uucaagcgauucuccugccuc

SEQ ID NO: 524615 - RNA, 23 nt, Human
uucaagcgauucuccugccucag

SEQ ID NO: 524616 - RNA, 24 nt, Human
uucaagcgauucuccugccucagc

SEQ ID NO: 524617 - RNA, 22 nt, Human
uucaucuccgccuuccccaggc

SEQ ID NO: 524618 - RNA, 22 nt, Human
uuccaaacuaaaucaugguuuu

SEQ ID NO: 524619 - RNA, 23 nt, Human
uuccccaggcgcuccggcuacgc

SEQ ID NO: 524620 - RNA, 24 nt, Human
uucuuuaaugcugaauuaugaggg

SEQ ID NO: 524621 - RNA, 19 nt, Human
uuucaccauguuggccagg

SEQ ID NO: 524622 - RNA, 20 nt, Human
uuucaccauguuggccagga

SEQ ID NO: 524623 - RNA, 24 nt, Human
uuuuuaguagagacgggguuucac

SEQ ID NO: 524624 - RNA, 24 nt, Human
uuuuugagauggagucuugcucug

SEQ ID NO: 524625 - RNA, 21 nt, Human
uuuuuguuauuuuuaguagag

SEQ ID NO: 524626 - RNA, 24 nt, Human
uuuuuguuauuuuuaguagagacg

SEQ ID NO: 524627 - RNA, 19 nt, Human
aaacaugcacacagcagcc

SEQ ID NO: 524628 - RNA, 21 nt, Human
aaacaugcacacagcagccuu

SEQ ID NO: 524629 - RNA, 22 nt, Human
aaacaugcacacagcagccuuc

SEQ ID NO: 524630 - RNA, 19 nt, Human
aaacggacagagaagacac

SEQ ID NO: 524631 - RNA, 18 nt, Human
aaacuggggccaauggga

SEQ ID NO: 524632 - RNA, 18 nt, Human
aagcagaacccacuaaaa

SEQ ID NO: 524633 - RNA, 20 nt, Human
aagcuaacauauacagccuc

SEQ ID NO: 524634 - RNA, 24 nt, Human
acaauuucaacccaaauacaccac

SEQ ID NO: 524635 - RNA, 24 nt, Human
acacaauuucaacccaaauacacc

SEQ ID NO: 524636 - RNA, 22 nt, Human
acacacacuguuuugaaaacac

SEQ ID NO: 524637 - RNA, 24 nt, Human
acacagcagccuucaaaugucucu

SEQ ID NO: 524638 - RNA, 19 nt, Human
acacauucuuacacaagcu

SEQ ID NO: 524639 - RNA, 18 nt, Human
acagcagccuucaaaugu

SEQ ID NO: 524640 - RNA, 23 nt, Human
acgcucaccucaccuggugcacg

SEQ ID NO: 524641 - RNA, 19 nt, Human
acugccccauuuguaugug

SEQ ID NO: 524642 - RNA, 24 nt, Human
agagcguggggugacaggaguggg

SEQ ID NO: 524643 - RNA, 23 nt, Human
agccccuugacugagcaagcugg

SEQ ID NO: 524644 - RNA, 22 nt, Human
aggacgggguggggagaggggu

SEQ ID NO: 524645 - RNA, 18 nt, Human
aggcaggagccccccaag

SEQ ID NO: 524646 - RNA, 22 nt, Human
aggggacauuuggugggaggca

SEQ ID NO: 524647 - RNA, 23 nt, Human
agguggccaacugugaccagugg

SEQ ID NO: 524648 - RNA, 20 nt, Human
aucugggcugcaauacuucu

SEQ ID NO: 524649 - RNA, 25 nt, Human
aucuuacccacguucuuucucccca

SEQ ID NO: 524650 - RNA, 23 nt, Human
augggauccugggcccuucccug

SEQ ID NO: 524651 - RNA, 20 nt, Human
augggggcagcuuggccaca

SEQ ID NO: 524652 - RNA, 22 nt, Human
cacacauccaugcacacaacug

SEQ ID NO: 524653 - RNA, 18 nt, Human
caccggggucucaccagg

SEQ ID NO: 524654 - RNA, 27 nt, Human
cacuguacucuagccacaaggcugugg

SEQ ID NO: 524655 - RNA, 21 nt, Human
cagacccccaaacaugcacac

SEQ ID NO: 524656 - RNA, 30 nt, Human
cagagcaacucucacguauucugugcacuu

SEQ ID NO: 524657 - RNA, 19 nt, Human
cagcaggggugggcaaccc

SEQ ID NO: 524658 - RNA, 23 nt, Human
cagcaggggugggcaacccugcc

SEQ ID NO: 524659 - RNA, 20 nt, Human
cagcccagggcgauccacag

SEQ ID NO: 524660 - RNA, 20 nt, Human
caggcaggagccccccaagg

SEQ ID NO: 524661 - RNA, 19 nt, Human
caggggggcugagggggug

SEQ ID NO: 524662 - RNA, 24 nt, Human
caugcacacugccccauuuguaug

SEQ ID NO: 524663 - RNA, 18 nt, Human
caugucugucucugaaau

SEQ ID NO: 524664 - RNA, 24 nt, Human
ccaauacacacacuguuuugaaaa

SEQ ID NO: 524665 - RNA, 21 nt, Human
ccacuguacucuagccacaag

SEQ ID NO: 524666 - RNA, 23 nt, Human
ccacuguacucuagccacaaggc

SEQ ID NO: 524667 - RNA, 21 nt, Human
ccagcccagggcgauccacag

SEQ ID NO: 524668 - RNA, 21 nt, Human
cccaaacaugcacacagcagc

SEQ ID NO: 524669 - RNA, 24 nt, Human
cccacgcacacauccaugcacaca

SEQ ID NO: 524670 - RNA, 23 nt, Human
cccacuguacucuagccacaagg

SEQ ID NO: 524671 - RNA, 22 nt, Human
ccccacuguacucuagccacaa

SEQ ID NO: 524672 - RNA, 23 nt, Human
cccccaaacaugcacacagcagc

SEQ ID NO: 524673 - RNA, 21 nt, Human
cccccugauaggggaucuggg

SEQ ID NO: 524674 - RNA, 23 nt, Human
ccgccuuuuugcuucucucuggc

SEQ ID NO: 524675 - RNA, 22 nt, Human
ccucccaggcaugggauccugg

SEQ ID NO: 524676 - RNA, 22 nt, Human
ccugccagcuggguacuagggc

SEQ ID NO: 524677 - RNA, 18 nt, Human
ccuggggcgcugccuggg

SEQ ID NO: 524678 - RNA, 19 nt, Human
cgacuuccugauuccaucu

SEQ ID NO: 524679 - RNA, 20 nt, Human
cgcugccuggguccauugca

SEQ ID NO: 524680 - RNA, 21 nt, Human
cuacaacccaucacauaccua

SEQ ID NO: 524681 - RNA, 23 nt, Human
cucaccaggacuccccgcuccca

SEQ ID NO: 524682 - RNA, 23 nt, Human
cugaaauaaaagcagaacccacu

SEQ ID NO: 524683 - RNA, 19 nt, Human
cugcaauacuucuguaucc

SEQ ID NO: 524684 - RNA, 21 nt, Human
cugccagagcaacucucacgu

SEQ ID NO: 524685 - RNA, 26 nt, Human
cuggccccugcuuuugggaggucgac

SEQ ID NO: 524686 - RNA, 20 nt, Human
cugggcugcaauacuucugu

SEQ ID NO: 524687 - RNA, 23 nt, Human
cuggugcacgcucccuugaaccu

SEQ ID NO: 524688 - RNA, 20 nt, Human
gaaauaaaagcagaacccac

SEQ ID NO: 524689 - RNA, 27 nt, Human
gacaggacgggguggggagaggggugg

SEQ ID NO: 524690 - RNA, 22 nt, Human
gacgggguggggagaggggugg

SEQ ID NO: 524691 - RNA, 18 nt, Human
gagaagacacaugucugu

SEQ ID NO: 524692 - RNA, 24 nt, Human
gagaccaggcuggccccagccucc

SEQ ID NO: 524693 - RNA, 18 nt, Human
gagcguggggugacagga

SEQ ID NO: 524694 - RNA, 20 nt, Human
gaggacucuaggccaaggac

SEQ ID NO: 524695 - RNA, 22 nt, Human
gauaggcccuggcgggggccca

SEQ ID NO: 524696 - RNA, 21 nt, Human
gcaacaaugacacagcacgga

SEQ ID NO: 524697 - RNA, 19 nt, Human
gccuggcagccccuugacu

SEQ ID NO: 524698 - RNA, 18 nt, Human
ggacagcaggggugggca

SEQ ID NO: 524699 - RNA, 25 nt, Human
ggagaccaggcuggccccagccucc

SEQ ID NO: 524700 - RNA, 23 nt, Human
ggcaugggauccugggcccuucc

SEQ ID NO: 524701 - RNA, 23 nt, Human
ggcgcugccuggguccauugcag

SEQ ID NO: 524702 - RNA, 18 nt, Human
ggcugggaagggacaucu

SEQ ID NO: 524703 - RNA, 24 nt, Human
gggaaaggggaucccccacggggg

SEQ ID NO: 524704 - RNA, 21 nt, Human
ggggagagggguggauaggga

SEQ ID NO: 524705 - RNA, 19 nt, Human
gggguggggagaggggugg

SEQ ID NO: 524706 - RNA, 18 nt, Human
gguggggagaggggugga

SEQ ID NO: 524707 - RNA, 19 nt, Human
guggaacccuagaggaugg

SEQ ID NO: 524708 - RNA, 23 nt, Human
guggggugacaggagugggacug

SEQ ID NO: 524709 - RNA, 27 nt, Human
uaaaauggaaaaccugcagaaugcaaa

SEQ ID NO: 524710 - RNA, 22 nt, Human
uacacaagcuaacauauacagc

SEQ ID NO: 524711 - RNA, 19 nt, Human
uacucuagccacaaggcug

SEQ ID NO: 524712 - RNA, 22 nt, Human
uacucuagccacaaggcugugg

SEQ ID NO: 524713 - RNA, 20 nt, Human
uacuucuguauccucccugu

SEQ ID NO: 524714 - RNA, 18 nt, Human
uauuggggcuggaggguc

SEQ ID NO: 524715 - RNA, 21 nt, Human
ucaacccaaauacaccaccuc

SEQ ID NO: 524716 - RNA, 23 nt, Human
ucacacacaccucaccucccagg

SEQ ID NO: 524717 - RNA, 21 nt, Human
ucacauaccuaacacauaccc

SEQ ID NO: 524718 - RNA, 24 nt, Human
ucacauaccuaacacauacccauc

SEQ ID NO: 524719 - RNA, 19 nt, Human
ucccaauacacacacuguu

SEQ ID NO: 524720 - RNA, 27 nt, Human
uccccauggcauagaccaucgcuaccc

SEQ ID NO: 524721 - RNA, 18 nt, Human
ucccuaaacauauggauu

SEQ ID NO: 524722 - RNA, 22 nt, Human
uccugggcccuucccugagagc

SEQ ID NO: 524723 - RNA, 23 nt, Human
ucgcuacccgauggcuccaagug

SEQ ID NO: 524724 - RNA, 20 nt, Human
ucuguauccucccuguucuc

SEQ ID NO: 524725 - RNA, 21 nt, Human
ucuguauccucccuguucucu

SEQ ID NO: 524726 - RNA, 26 nt, Human
ugaaaacacauucuuacacaagcuaa

SEQ ID NO: 524727 - RNA, 19 nt, Human
ugaaauaaaagcagaaccc

SEQ ID NO: 524728 - RNA, 20 nt, Human
ugaauucuggggccacuccu

SEQ ID NO: 524729 - RNA, 21 nt, Human
ugacugagcaagcugggccca

SEQ ID NO: 524730 - RNA, 18 nt, Human
ugauugcuccuuccuauu

SEQ ID NO: 524731 - RNA, 20 nt, Human
ugcaauacuucuguauccuc

SEQ ID NO: 524732 - RNA, 25 nt, Human
ugcacagcuuugcaguuaaggacac

SEQ ID NO: 524733 - RNA, 28 nt, Human
ugcaugcacacugccccauuuguaugug

SEQ ID NO: 524734 - RNA, 18 nt, Human
ugccuggguccauugcag

SEQ ID NO: 524735 - RNA, 19 nt, Human
ugcggucaggggccugugg

SEQ ID NO: 524736 - RNA, 20 nt, Human
ugcggucaggggccugugga

SEQ ID NO: 524737 - RNA, 23 nt, Human
ugcggucaggggccuguggaacc

SEQ ID NO: 524738 - RNA, 25 nt, Human
uggacagcaggggugggcaacccug

SEQ ID NO: 524739 - RNA, 24 nt, Human
ugggaggacucuaggccaaggaca

SEQ ID NO: 524740 - RNA, 18 nt, Human
ugggauccugggcccuuc

SEQ ID NO: 524741 - RNA, 22 nt, Human
ugggauccugggcccuucccug

SEQ ID NO: 524742 - RNA, 18 nt, Human
ugggauccugggcccuuu

SEQ ID NO: 524743 - RNA, 25 nt, Human
ugggauggugucucgacuuccugau

SEQ ID NO: 524744 - RNA, 21 nt, Human
uggggccaaugggaacaaggg

SEQ ID NO: 524745 - RNA, 24 nt, Human
ugggggccuggcagccccuugacu

SEQ ID NO: 524746 - RNA, 19 nt, Human
uguacauuucagcauuugc

SEQ ID NO: 524747 - RNA, 22 nt, Human
ugugaccaguggucucagggcu

SEQ ID NO: 524748 - RNA, 21 nt, Human
ugugcgugcugaauucugggg

SEQ ID NO: 524749 - RNA, 21 nt, Human
uucaggggcaggcaagucgcc

SEQ ID NO: 524750 - RNA, 21 nt, Human
uuccuauuuucucaucugggg

SEQ ID NO: 524751 - RNA, 22 nt, Human
uuccuauuuucucaucuggggg

SEQ ID NO: 524752 - RNA, 19 nt, Human
uugacugagcaagcugggc

SEQ ID NO: 524753 - RNA, 20 nt, Human
uugcaugcacacugccccau

SEQ ID NO: 524754 - RNA, 21 nt, Human
uuggaggggaggacguccaug

SEQ ID NO: 524755 - RNA, 24 nt, Human
uuguaugugcacacucauugcccu

SEQ ID NO: 524756 - RNA, 23 nt, Human
uuugaaaacacauucuuacacaa

SEQ ID NO: 524757 - RNA, 20 nt, Human
uuuggucagguucagggggg

SEQ ID NO: 524758 - RNA, 23 nt, Human
uuuugcuucucucuggcagcucc

SEQ ID NO: 524759 - RNA, 25 nt, Human
aaacacauuuaaagcuucuagacuc

SEQ ID NO: 524760 - RNA, 19 nt, Human
aaacagagcaaggaaguac

SEQ ID NO: 524761 - RNA, 20 nt, Human
aaaugccuucgcucuacucu

SEQ ID NO: 524762 - RNA, 18 nt, Human
aacacacacacauaaaca

SEQ ID NO: 524763 - RNA, 18 nt, Human
aacauacuuucugcaaga

SEQ ID NO: 524764 - RNA, 21 nt, Human
aacuaaaaugaccuuucucac

SEQ ID NO: 524765 - RNA, 24 nt, Human
aagccgcugucuccucauuucuuc

SEQ ID NO: 524766 - RNA, 21 nt, Human
aagcugccacugggaaggggc

SEQ ID NO: 524767 - RNA, 19 nt, Human
acaagcaccaggaaaugcc

SEQ ID NO: 524768 - RNA, 23 nt, Human
accaaaugccuucgcucuacucu

SEQ ID NO: 524769 - RNA, 19 nt, Human
agaggcacuuuuaugagga

SEQ ID NO: 524770 - RNA, 24 nt, Human
agcugugcacaguuaauaauaggg

SEQ ID NO: 524771 - RNA, 22 nt, Human
aggaggccaaagagcucccaag

SEQ ID NO: 524772 - RNA, 20 nt, Human
aggcuccagugguuuucuua

SEQ ID NO: 524773 - RNA, 23 nt, Human
aggugaugugagcgaucuggagc

SEQ ID NO: 524774 - RNA, 23 nt, Human
auaucucuguugacaguaagaca

SEQ ID NO: 524775 - RNA, 18 nt, Human
aucaaaaaaggaagaucu

SEQ ID NO: 524776 - RNA, 24 nt, Human
augaaacaaagaaguuacuucuaa

SEQ ID NO: 524777 - RNA, 24 nt, Human
caaagagcucccaaggcuccagug

SEQ ID NO: 524778 - RNA, 19 nt, Human
caaagauaaccccugcuaa

SEQ ID NO: 524779 - RNA, 21 nt, Human
caaagauaaccccugcuaaga

SEQ ID NO: 524780 - RNA, 21 nt, Human
caagaugccaccucacuggcu

SEQ ID NO: 524781 - RNA, 20 nt, Human
caagauguguuauagcagaa

SEQ ID NO: 524782 - RNA, 19 nt, Human
caggaggccaaagagcucc

SEQ ID NO: 524783 - RNA, 21 nt, Human
caggaggccaaagagcuccca

SEQ ID NO: 524784 - RNA, 22 nt, Human
caggaggccaaagagcucccaa

SEQ ID NO: 524785 - RNA, 25 nt, Human
cagguacaauuuauauuauaaagaa

SEQ ID NO: 524786 - RNA, 19 nt, Human
caggugaugugagcgaucu

SEQ ID NO: 524787 - RNA, 20 nt, Human
cauuacagagucauucacaa

SEQ ID NO: 524788 - RNA, 23 nt, Human
ccaaagauaaccccugcuaagau

SEQ ID NO: 524789 - RNA, 19 nt, Human
ccaaaugccuucgcucuac

SEQ ID NO: 524790 - RNA, 20 nt, Human
ccaaggcuccagugguuuuc

SEQ ID NO: 524791 - RNA, 18 nt, Human
ccaggaggccaaagagcu

SEQ ID NO: 524792 - RNA, 25 nt, Human
ccagugguuuucuuagcucauuucc

SEQ ID NO: 524793 - RNA, 20 nt, Human
cccauguacuccacucccaa

SEQ ID NO: 524794 - RNA, 24 nt, Human
cguggcggggcccaagggcguguu

SEQ ID NO: 524795 - RNA, 19 nt, Human
cuggaaggcauaucuauua

SEQ ID NO: 524796 - RNA, 24 nt, Human
cuuuaaaauuguguauguauuuau

SEQ ID NO: 524797 - RNA, 22 nt, Human
gaagaucuuuuccugcuucucu

SEQ ID NO: 524798 - RNA, 19 nt, Human
gcaucugcugcuacuuugc

SEQ ID NO: 524799 - RNA, 18 nt, Human
gcccacuccccgcaagcu

SEQ ID NO: 524800 - RNA, 18 nt, Human
gcuaagauuuggguauau

SEQ ID NO: 524801 - RNA, 22 nt, Human
ggaaaaacauacuuucugcaag

SEQ ID NO: 524802 - RNA, 22 nt, Human
ggaaagauaacuaagacucagg

SEQ ID NO: 524803 - RNA, 23 nt, Human
gggcaagauguguuauagcagaa

SEQ ID NO: 524804 - RNA, 19 nt, Human
gggguuggaaaggggagac

SEQ ID NO: 524805 - RNA, 22 nt, Human
guagaaggcacaccuuugugua

SEQ ID NO: 524806 - RNA, 28 nt, Human
uaaaugauguccuaucuccccugaaagg

SEQ ID NO: 524807 - RNA, 24 nt, Human
uacaauuuauauuauaaagaagau

SEQ ID NO: 524808 - RNA, 18 nt, Human
uacaggugacuuuaaaau

SEQ ID NO: 524809 - RNA, 20 nt, Human
uagcagaauuaccaaaugcu

SEQ ID NO: 524810 - RNA, 22 nt, Human
uagugagccccuaucgugagcc

SEQ ID NO: 524811 - RNA, 22 nt, Human
uccacuccaucaacagccaugc

SEQ ID NO: 524812 - RNA, 23 nt, Human
uccacuccaucaacagccaugcg

SEQ ID NO: 524813 - RNA, 22 nt, Human
uccauggucaaugugcuccaaa

SEQ ID NO: 524814 - RNA, 24 nt, Human
ucccaaggcuccagugguuuucuu

SEQ ID NO: 524815 - RNA, 19 nt, Human
ucccauguacuccacuccc

SEQ ID NO: 524816 - RNA, 24 nt, Human
uccccaccuuaggucuuucuuaca

SEQ ID NO: 524817 - RNA, 23 nt, Human
uccucggucccagaggcuggcuc

SEQ ID NO: 524818 - RNA, 20 nt, Human
ugaagaaagcaaaaucccau

SEQ ID NO: 524819 - RNA, 25 nt, Human
ugaccgauccaccaaaugccuucgc

SEQ ID NO: 524820 - RNA, 18 nt, Human
ugaguugacucauagggg

SEQ ID NO: 524821 - RNA, 21 nt, Human
ugaucuucugacuuuguccuu

SEQ ID NO: 524822 - RNA, 18 nt, Human
ugaugugagcgaucugga

SEQ ID NO: 524823 - RNA, 23 nt, Human
ugcguaucacaauuuuaccaccc

SEQ ID NO: 524824 - RNA, 24 nt, Human
ugggaaccuacauugcugguguca

SEQ ID NO: 524825 - RNA, 23 nt, Human
ugggaaggggcugggaaccuaca

SEQ ID NO: 524826 - RNA, 21 nt, Human
ugggagagagcaguaacauuu

SEQ ID NO: 524827 - RNA, 23 nt, Human
uguaacguggcggggcccaaggg

SEQ ID NO: 524828 - RNA, 19 nt, Human
ugucccaggugaugugagc

SEQ ID NO: 524829 - RNA, 20 nt, Human
uguugugcuaaaguaauugg

SEQ ID NO: 524830 - RNA, 23 nt, Human
uuccauauacagugacuggacuc

SEQ ID NO: 524831 - RNA, 28 nt, Human
uucucacaucacuaagauguuccacucc

SEQ ID NO: 524832 - RNA, 22 nt, Human
uuggacauuuggcuaggacaag

SEQ ID NO: 524833 - RNA, 23 nt, Human
uuguagaucaaaaaaggaagauc

SEQ ID NO: 524834 - RNA, 20 nt, Human
uuuaaaauaucucuguugac

SEQ ID NO: 524835 - RNA, 19 nt, Human
uuuaaagcuucuagacuca

SEQ ID NO: 524836 - RNA, 27 nt, Human
aaaaaaaaaaaaaaagagacaguuaca

SEQ ID NO: 524837 - RNA, 25 nt, Human
aaaaaaggaaacacaauggguagaa

SEQ ID NO: 524838 - RNA, 24 nt, Human
aaaaaggaaacacaauggguagaa

SEQ ID NO: 524839 - RNA, 23 nt, Human
aaaaggaaacacaauggguagaa

SEQ ID NO: 524840 - RNA, 18 nt, Human
aaacaagggcaaaacaaa

SEQ ID NO: 524841 - RNA, 25 nt, Human
aacagaacccuauuucagaaaccua

SEQ ID NO: 524842 - RNA, 20 nt, Human
aaccagaaauacaagauucc

SEQ ID NO: 524843 - RNA, 23 nt, Human
aaccagaaauacaagauuccacu

SEQ ID NO: 524844 - RNA, 20 nt, Human
aaggggaaaaaaaaaaaaaa

SEQ ID NO: 524845 - RNA, 23 nt, Human
aaggggaaaaaaaaaaaaaaaga

SEQ ID NO: 524846 - RNA, 28 nt, Human
acaaagcuaaugaguggaaaaguccaag

SEQ ID NO: 524847 - RNA, 18 nt, Human
accacauguaagcaaccu

SEQ ID NO: 524848 - RNA, 19 nt, Human
accccgaccuggcccaaag

SEQ ID NO: 524849 - RNA, 20 nt, Human
agaaauacaagauuccacug

SEQ ID NO: 524850 - RNA, 23 nt, Human
agaacgcauuuuugagcuccaga

SEQ ID NO: 524851 - RNA, 18 nt, Human
agaauaugguugaacuua

SEQ ID NO: 524852 - RNA, 24 nt, Human
agaggagaaaucuggaaaaaaagg

SEQ ID NO: 524853 - RNA, 23 nt, Human
aggggaaaaaaaaaaaaaaagag

SEQ ID NO: 524854 - RNA, 23 nt, Human
aggugguaacaagagcacagagc

SEQ ID NO: 524855 - RNA, 23 nt, Human
agugcaauucaacccaacacgcu

SEQ ID NO: 524856 - RNA, 18 nt, Human
auauugcaguauaaacca

SEQ ID NO: 524857 - RNA, 19 nt, Human
augagcuagcugaccucau

SEQ ID NO: 524858 - RNA, 24 nt, Human
caaacccagaaggaaagucuguaa

SEQ ID NO: 524859 - RNA, 21 nt, Human
caaaucaaauggcuucugauc

SEQ ID NO: 524860 - RNA, 22 nt, Human
caccuaccaaaucaaauggcuu

SEQ ID NO: 524861 - RNA, 25 nt, Human
cagaaggaaagucuguaaaucucau

SEQ ID NO: 524862 - RNA, 24 nt, Human
cagauaaccccauuugguaagaua

SEQ ID NO: 524863 - RNA, 21 nt, Human
cagggcaaagaggagaaaucu

SEQ ID NO: 524864 - RNA, 20 nt, Human
cauggaaagcacacauaaug

SEQ ID NO: 524865 - RNA, 20 nt, Human
ccaaaggggaaaaaaaaaaa

SEQ ID NO: 524866 - RNA, 21 nt, Human
ccaacccuauaguaccccucu

SEQ ID NO: 524867 - RNA, 18 nt, Human
ccacauguaagcaaccuc

SEQ ID NO: 524868 - RNA, 28 nt, Human
ccacggccucggccucggccuccaaagc

SEQ ID NO: 524869 - RNA, 25 nt, Human
ccagaaggaaagucuguaaaucuca

SEQ ID NO: 524870 - RNA, 21 nt, Human
cccuucugacacaccuaccaa

SEQ ID NO: 524871 - RNA, 22 nt, Human
ccuaagauaaaauuaccuaaca

SEQ ID NO: 524872 - RNA, 24 nt, Human
ccuaccaaaucaaauggcuucuga

SEQ ID NO: 524873 - RNA, 19 nt, Human
ccuccaaagcccccucuuc

SEQ ID NO: 524874 - RNA, 21 nt, Human
ccucuaucacaugaucaucuc

SEQ ID NO: 524875 - RNA, 24 nt, Human
cggccuccaaagcccccucuuccc

SEQ ID NO: 524876 - RNA, 24 nt, Human
cucguccacggccucggccucggc

SEQ ID NO: 524877 - RNA, 20 nt, Human
cuucugaccucuuccagcag

SEQ ID NO: 524878 - RNA, 25 nt, Human
cuuuuguuuucgacauauaugcauc

SEQ ID NO: 524879 - RNA, 19 nt, Human
gaaaaaaaaaaaaaaagag

SEQ ID NO: 524880 - RNA, 21 nt, Human
gaccucaugugucaggagacu

SEQ ID NO: 524881 - RNA, 20 nt, Human
gcaaagaggagaaaucugga

SEQ ID NO: 524882 - RNA, 21 nt, Human
gcaguggggccuagcugagaa

SEQ ID NO: 524883 - RNA, 22 nt, Human
gcauuuuugagcuccagaccuu

SEQ ID NO: 524884 - RNA, 23 nt, Human
gccuccaaagcccccucuucccu

SEQ ID NO: 524885 - RNA, 21 nt, Human
gcugaccucaugugucaggag

SEQ ID NO: 524886 - RNA, 19 nt, Human
ggaaaaaaaggaaacacaa

SEQ ID NO: 524887 - RNA, 20 nt, Human
ggcaacagggaugaacaaaa

SEQ ID NO: 524888 - RNA, 24 nt, Human
ggcaacagggaugaacaaaagaaa

SEQ ID NO: 524889 - RNA, 24 nt, Human
ggccuagcugagaaaagcugaagg

SEQ ID NO: 524890 - RNA, 25 nt, Human
gggcaacagggaugaacaaaagaaa

SEQ ID NO: 524891 - RNA, 22 nt, Human
ggggcaacagggaugaacaaaa

SEQ ID NO: 524892 - RNA, 23 nt, Human
gggggcaacagggaugaacaaaa

SEQ ID NO: 524893 - RNA, 27 nt, Human
gguaacaagagcacagaagggagggcc

SEQ ID NO: 524894 - RNA, 19 nt, Human
gguuaugguauaugugcug

SEQ ID NO: 524895 - RNA, 20 nt, Human
guggggccuagcugagaaaa

SEQ ID NO: 524896 - RNA, 24 nt, Human
uaacagaacccuauuucagaaacc

SEQ ID NO: 524897 - RNA, 19 nt, Human
uaaguuuaauaggugcugu

SEQ ID NO: 524898 - RNA, 18 nt, Human
uacaagauuccacugaaa

SEQ ID NO: 524899 - RNA, 23 nt, Human
uagcugaccucaugugucaggag

SEQ ID NO: 524900 - RNA, 21 nt, Human
uaugugcugucaauguacaug

SEQ ID NO: 524901 - RNA, 18 nt, Human
uauuggagacccuucugg

SEQ ID NO: 524902 - RNA, 22 nt, Human
ucaaaccagagcugcuaccaca

SEQ ID NO: 524903 - RNA, 19 nt, Human
ucaugggaggaugggcaag

SEQ ID NO: 524904 - RNA, 20 nt, Human
uccaaagcccccucuucccc

SEQ ID NO: 524905 - RNA, 24 nt, Human
uccaaagcccccucuuccccgacc

SEQ ID NO: 524906 - RNA, 18 nt, Human
uccccgaccuaucauacc

SEQ ID NO: 524907 - RNA, 18 nt, Human
uccuaagauaaaauuacc

SEQ ID NO: 524908 - RNA, 18 nt, Human
ucuauauugcaguauaaa

SEQ ID NO: 524909 - RNA, 20 nt, Human
ucucucaugggaggaugggc

SEQ ID NO: 524910 - RNA, 18 nt, Human
ucugccaucauucucccu

SEQ ID NO: 524911 - RNA, 19 nt, Human
ugagaaaagcugaagggca

SEQ ID NO: 524912 - RNA, 21 nt, Human
uggaaaaaaaggaaacacaau

SEQ ID NO: 524913 - RNA, 19 nt, Human
ugggauguuucuguggggg

SEQ ID NO: 524914 - RNA, 19 nt, Human
uggggccuagcugagaaaa

SEQ ID NO: 524915 - RNA, 24 nt, Human
ugggggcaacagggaugaacaaaa

SEQ ID NO: 524916 - RNA, 22 nt, Human
ugucaauguacaugguagcaac

SEQ ID NO: 524917 - RNA, 18 nt, Human
uguccagcugcuccuugg

SEQ ID NO: 524918 - RNA, 21 nt, Human
uucaagggaaacaagggcaaa

SEQ ID NO: 524919 - RNA, 21 nt, Human
uuccccgaccuaucauacccc

SEQ ID NO: 524920 - RNA, 28 nt, Human
uucgucugccaucauucucccuucugac

SEQ ID NO: 524921 - RNA, 19 nt, Human
uugcaguauaaaccaaccc

SEQ ID NO: 524922 - RNA, 23 nt, Human
uuuuuuuaagcgaacaguuuguu

SEQ ID NO: 524923 - RNA, 24 nt, Human
aaacaaaccaaaugcuguccaaca

SEQ ID NO: 524924 - RNA, 20 nt, Human
aaagugcaguauaaaaguuu

SEQ ID NO: 524925 - RNA, 21 nt, Human
aaauucaaaguuuaacaucug

SEQ ID NO: 524926 - RNA, 22 nt, Human
aacuuuguucuuucaaaggcca

SEQ ID NO: 524927 - RNA, 18 nt, Human
aaggacaugccaaaaaag

SEQ ID NO: 524928 - RNA, 18 nt, Human
aauugcaauuagacaaau

SEQ ID NO: 524929 - RNA, 24 nt, Human
acucuguuauaagaacaaaaacca

SEQ ID NO: 524930 - RNA, 23 nt, Human
auugcaauuagacaaaugagauu

SEQ ID NO: 524931 - RNA, 26 nt, Human
caagaauaaugaaaauauucuaccuc

SEQ ID NO: 524932 - RNA, 23 nt, Human
cacugcauaaccugcaucauaug

SEQ ID NO: 524933 - RNA, 19 nt, Human
cauguuuagacaaaugccc

SEQ ID NO: 524934 - RNA, 22 nt, Human
ccaaagacugucugggaggcca

SEQ ID NO: 524935 - RNA, 28 nt, Human
ccaaaugcuguccaacaucucaugaacu

SEQ ID NO: 524936 - RNA, 19 nt, Human
cgggaacaggacccacuaa

SEQ ID NO: 524937 - RNA, 20 nt, Human
cuauaauaguagccauaaga

SEQ ID NO: 524938 - RNA, 18 nt, Human
cuuaaacacagggaguuu

SEQ ID NO: 524939 - RNA, 23 nt, Human
gaacaaaaaccauagccagggga

SEQ ID NO: 524940 - RNA, 25 nt, Human
gagaaaaaaauuacuuaaaaauagu

SEQ ID NO: 524941 - RNA, 19 nt, Human
gaggaaauggggaagagua

SEQ ID NO: 524942 - RNA, 21 nt, Human
gauugcuuuucaaagauuugu

SEQ ID NO: 524943 - RNA, 19 nt, Human
ggaaaagcuaucuagagua

SEQ ID NO: 524944 - RNA, 18 nt, Human
ggaagaguacuacaggug

SEQ ID NO: 524945 - RNA, 18 nt, Human
ggagcauaagaaaauuuu

SEQ ID NO: 524946 - RNA, 21 nt, Human
guaaaauagugguccaaagac

SEQ ID NO: 524947 - RNA, 20 nt, Human
guaauccccuauucuuaaac

SEQ ID NO: 524948 - RNA, 19 nt, Human
guccaaagacugucuggga

SEQ ID NO: 524949 - RNA, 24 nt, Human
uaaaauagugguccaaagacuguc

SEQ ID NO: 524950 - RNA, 18 nt, Human
uaaacucuguuauaagaa

SEQ ID NO: 524951 - RNA, 20 nt, Human
uaagaacaaaaaccauagcc

SEQ ID NO: 524952 - RNA, 23 nt, Human
uaauuuguacuaaagggauggua

SEQ ID NO: 524953 - RNA, 24 nt, Human
uagauaugaaggcacugcauaacc

SEQ ID NO: 524954 - RNA, 22 nt, Human
uagcugcaagaauaaugaaaau

SEQ ID NO: 524955 - RNA, 25 nt, Human
uauaaaaguuuuagauaugaaggca

SEQ ID NO: 524956 - RNA, 19 nt, Human
uauaaaggagaagaaaaua

SEQ ID NO: 524957 - RNA, 25 nt, Human
uauacaacucagaauccauguuuag

SEQ ID NO: 524958 - RNA, 20 nt, Human
uauggagcauaagaaaauuu

SEQ ID NO: 524959 - RNA, 21 nt, Human
ucagaacaaauaaaauaacac

SEQ ID NO: 524960 - RNA, 23 nt, Human
uccacaauuuguucaaauacugg

SEQ ID NO: 524961 - RNA, 24 nt, Human
uccuuuccaagauugcuuuucaaa

SEQ ID NO: 524962 - RNA, 21 nt, Human
ucguauucuucacuuucugca

SEQ ID NO: 524963 - RNA, 20 nt, Human
ucuguuauaagaacaaaaac

SEQ ID NO: 524964 - RNA, 22 nt, Human
ugaacuaguuaauggacaauau

SEQ ID NO: 524965 - RNA, 19 nt, Human
uggcaaaacuuugcuucac

SEQ ID NO: 524966 - RNA, 18 nt, Human
ugucagaggaaaugggga

SEQ ID NO: 524967 - RNA, 24 nt, Human
uuagagaaaaaaauuacuuaaaaa

SEQ ID NO: 524968 - RNA, 22 nt, Human
uuccucaacauaaaagcuuuaa

SEQ ID NO: 524969 - RNA, 21 nt, Human
uuggauccuaaaguucuuggu

SEQ ID NO: 524970 - RNA, 21 nt, Human
uuguacuaaagggaugguagg

SEQ ID NO: 524971 - RNA, 22 nt, Human
uuucaaaggccaguaaaauagu

SEQ ID NO: 524972 - RNA, 19 nt, Human
aaaaggccuaacucaaagg

SEQ ID NO: 524973 - RNA, 24 nt, Human
aaaggccuaacucaaagguagagc

SEQ ID NO: 524974 - RNA, 22 nt, Human
aaagguagagcccaguugugcc

SEQ ID NO: 524975 - RNA, 19 nt, Human
aaugccugaaggagggguc

SEQ ID NO: 524976 - RNA, 19 nt, Human
acugguugagguggggagg

SEQ ID NO: 524977 - RNA, 21 nt, Human
agcagguggcugcgcuccugg

SEQ ID NO: 524978 - RNA, 19 nt, Human
agcuggagucaaaaggccu

SEQ ID NO: 524979 - RNA, 23 nt, Human
agcuggcaccuucuucuccagcc

SEQ ID NO: 524980 - RNA, 18 nt, Human
agguagagcccaguugug

SEQ ID NO: 524981 - RNA, 20 nt, Human
caaccaccccacccccgccc

SEQ ID NO: 524982 - RNA, 18 nt, Human
caagccgguuggaccccu

SEQ ID NO: 524983 - RNA, 22 nt, Human
cacaccucccagcagguggcug

SEQ ID NO: 524984 - RNA, 21 nt, Human
cacccaagccgguuggacccc

SEQ ID NO: 524985 - RNA, 21 nt, Human
cagcagggacugguugaggug

SEQ ID NO: 524986 - RNA, 18 nt, Human
cagccauggcucugcccc

SEQ ID NO: 524987 - RNA, 21 nt, Human
ccacccgagggcccccgcacc

SEQ ID NO: 524988 - RNA, 22 nt, Human
ccccacccccgcccauggaacc

SEQ ID NO: 524989 - RNA, 20 nt, Human
ccccgcaccucgggcccuac

SEQ ID NO: 524990 - RNA, 22 nt, Human
cccucagcuggagucaaaaggc

SEQ ID NO: 524991 - RNA, 26 nt, Human
cccuggaucugucccccucagcugga

SEQ ID NO: 524992 - RNA, 20 nt, Human
ccggccccgcgcagcguccc

SEQ ID NO: 524993 - RNA, 21 nt, Human
ccucccagcagguggcugcgc

SEQ ID NO: 524994 - RNA, 19 nt, Human
ccugugugggggcccagga

SEQ ID NO: 524995 - RNA, 18 nt, Human
cugccccuggcuggacau

SEQ ID NO: 524996 - RNA, 22 nt, Human
gcccccgcaccucgggcccuac

SEQ ID NO: 524997 - RNA, 20 nt, Human
gccccuggcuggacauggcc

SEQ ID NO: 524998 - RNA, 22 nt, Human
gcuacagcuggcaccuucuucu

SEQ ID NO: 524999 - RNA, 21 nt, Human
gcuggacauggcagaugugug

SEQ ID NO: 525000 - RNA, 19 nt, Human
gcuggagucaaaaggccua

SEQ ID NO: 525001 - RNA, 19 nt, Human
gggggcccaggagcccugg

SEQ ID NO: 525002 - RNA, 20 nt, Human
gugggggucggggaggggug

SEQ ID NO: 525003 - RNA, 23 nt, Human
uagaaucaguacaaaauaggugc

SEQ ID NO: 525004 - RNA, 19 nt, Human
ucccugaucuaggggccua

SEQ ID NO: 525005 - RNA, 24 nt, Human
ucgggcccuacuuguagaaucagu

SEQ ID NO: 525006 - RNA, 21 nt, Human
ucuccagccauggcucugccc

SEQ ID NO: 525007 - RNA, 27 nt, Human
ucugcaucugccguucuucccuggccc

SEQ ID NO: 525008 - RNA, 23 nt, Human
ugaaggaggggucuugggggcaa

SEQ ID NO: 525009 - RNA, 23 nt, Human
ugccugaaggaggggucuugggg

SEQ ID NO: 525010 - RNA, 25 nt, Human
ugccugaaggaggggucuugggggc

SEQ ID NO: 525011 - RNA, 18 nt, Human
uggccuggcacauaguag

SEQ ID NO: 525012 - RNA, 23 nt, Human
uggcuggacauggcagaugugug

SEQ ID NO: 525013 - RNA, 19 nt, Human
ugugugggggcccaggagc

SEQ ID NO: 525014 - RNA, 26 nt, Human
aaagcaugcauucccaaggauguaag

SEQ ID NO: 525015 - RNA, 24 nt, Human
aaagugcuagaauuacaggcguga

SEQ ID NO: 525016 - RNA, 22 nt, Human
aaaucauuuaucacagaaacug

SEQ ID NO: 525017 - RNA, 19 nt, Human
aacucaucaacccacccac

SEQ ID NO: 525018 - RNA, 22 nt, Human
aacuccuacuugugugaucuug

SEQ ID NO: 525019 - RNA, 26 nt, Human
aagugcuagaauuacaggcgugagcc

SEQ ID NO: 525020 - RNA, 19 nt, Human
aauaaaggguuguccugaa

SEQ ID NO: 525021 - RNA, 18 nt, Human
aauuacaggcgugagcca

SEQ ID NO: 525022 - RNA, 22 nt, Human
aauuacaggcgugagccaccgc

SEQ ID NO: 525023 - RNA, 18 nt, Human
acagcugggauuacaggc

SEQ ID NO: 525024 - RNA, 24 nt, Human
acaggcuccugcuaccaugccugg

SEQ ID NO: 525025 - RNA, 23 nt, Human
accaugccuggcuaauuuuugua

SEQ ID NO: 525026 - RNA, 18 nt, Human
acucaguugccccaucuc

SEQ ID NO: 525027 - RNA, 22 nt, Human
agaggcuuaucuguguuccacc

SEQ ID NO: 525028 - RNA, 20 nt, Human
agagguagaaugaaauauag

SEQ ID NO: 525029 - RNA, 24 nt, Human
aggaagaggaauacuuauuuuggc

SEQ ID NO: 525030 - RNA, 24 nt, Human
aggugauccgcucaccuuggccuc

SEQ ID NO: 525031 - RNA, 21 nt, Human
agguucaagugauucuccugc

SEQ ID NO: 525032 - RNA, 22 nt, Human
agguucaagugauucuccugcc

SEQ ID NO: 525033 - RNA, 23 nt, Human
agguucaagugauucuccugccu

SEQ ID NO: 525034 - RNA, 20 nt, Human
agucccuaccuuccagaagc

SEQ ID NO: 525035 - RNA, 24 nt, Human
agugauucuccugccucagccucc

SEQ ID NO: 525036 - RNA, 18 nt, Human
aguuggguauuauuugca

SEQ ID NO: 525037 - RNA, 18 nt, Human
augggguuucgccauguu

SEQ ID NO: 525038 - RNA, 24 nt, Human
augggguuucgccauguuggccag

SEQ ID NO: 525039 - RNA, 23 nt, Human
auguguguauccuuuaaggauuu

SEQ ID NO: 525040 - RNA, 24 nt, Human
auuuuuguauuuuuaguagagaug

SEQ ID NO: 525041 - RNA, 23 nt, Human
caaagacaauuuacuguaccuca

SEQ ID NO: 525042 - RNA, 24 nt, Human
caaagugcuagaauuacaggcgug

SEQ ID NO: 525043 - RNA, 21 nt, Human
caaaucccugacuucagguga

SEQ ID NO: 525044 - RNA, 19 nt, Human
caacccacccacacaacag

SEQ ID NO: 525045 - RNA, 20 nt, Human
caagugauucuccugccuca

SEQ ID NO: 525046 - RNA, 22 nt, Human
caagugauucuccugccucagc

SEQ ID NO: 525047 - RNA, 21 nt, Human
cacugcaaccuccgccuccca

SEQ ID NO: 525048 - RNA, 23 nt, Human
cagcugggauuacaggcuccugc

SEQ ID NO: 525049 - RNA, 24 nt, Human
cauguuggccaggcuggucucaaa

SEQ ID NO: 525050 - RNA, 22 nt, Human
ccaaagugcuagaauuacaggc

SEQ ID NO: 525051 - RNA, 24 nt, Human
ccaaagugcuagaauuacaggcgu

SEQ ID NO: 525052 - RNA, 18 nt, Human
ccacacaacaguuacuaa

SEQ ID NO: 525053 - RNA, 19 nt, Human
ccauguuggccaggcuggu

SEQ ID NO: 525054 - RNA, 22 nt, Human
ccauguuggccaggcuggucuc

SEQ ID NO: 525055 - RNA, 21 nt, Human
cccacacaacaguuacuaagc

SEQ ID NO: 525056 - RNA, 21 nt, Human
cccagguucaagugauucucc

SEQ ID NO: 525057 - RNA, 23 nt, Human
cccagguucaagugauucuccug

SEQ ID NO: 525058 - RNA, 24 nt, Human
cccgaacagcugggauuacaggcu

SEQ ID NO: 525059 - RNA, 19 nt, Human
ccgccacaaauugcuuaaa

SEQ ID NO: 525060 - RNA, 24 nt, Human
ccgccucccagguucaagugauuc

SEQ ID NO: 525061 - RNA, 23 nt, Human
ccucagcugccccaugucuuguu

SEQ ID NO: 525062 - RNA, 24 nt, Human
ccucccagguucaagugauucucc

SEQ ID NO: 525063 - RNA, 24 nt, Human
ccugacuucaggugauccgcucac

SEQ ID NO: 525064 - RNA, 24 nt, Human
ccugccucagccucccgaacagcu

SEQ ID NO: 525065 - RNA, 24 nt, Human
cgccauguuggccaggcuggucuc

SEQ ID NO: 525066 - RNA, 22 nt, Human
cgccucccagguucaagugauu

SEQ ID NO: 525067 - RNA, 21 nt, Human
cgcgcaugacucaguugcccc

SEQ ID NO: 525068 - RNA, 18 nt, Human
cgguaggaucagaagaau

SEQ ID NO: 525069 - RNA, 24 nt, Human
cucacugcaaccuccgccucccag

SEQ ID NO: 525070 - RNA, 19 nt, Human
cucccagguucaagugauu

SEQ ID NO: 525071 - RNA, 20 nt, Human
cucccgucucuauuuguccc

SEQ ID NO: 525072 - RNA, 23 nt, Human
cugcaaccuccgccucccagguu

SEQ ID NO: 525073 - RNA, 24 nt, Human
cugcaaccuccgccucccagguuc

SEQ ID NO: 525074 - RNA, 24 nt, Human
gacuucaggugauccgcucaccuu

SEQ ID NO: 525075 - RNA, 18 nt, Human
gagaugggguuucgccau

SEQ ID NO: 525076 - RNA, 24 nt, Human
gagaugggguuucgccauguuggc

SEQ ID NO: 525077 - RNA, 24 nt, Human
gauuacaggcuccugcuaccaugc

SEQ ID NO: 525078 - RNA, 21 nt, Human
gcaguauauccucaggcaauu

SEQ ID NO: 525079 - RNA, 18 nt, Human
gccauguuggccaggcug

SEQ ID NO: 525080 - RNA, 21 nt, Human
gccucccgaacagcugggauu

SEQ ID NO: 525081 - RNA, 22 nt, Human
gcgcgaucucaacucacugcaa

SEQ ID NO: 525082 - RNA, 20 nt, Human
gcucuugucgcccaggcugg

SEQ ID NO: 525083 - RNA, 21 nt, Human
gcucuugucgcccaggcugga

SEQ ID NO: 525084 - RNA, 24 nt, Human
gcucuugucgcccaggcuggagcg

SEQ ID NO: 525085 - RNA, 18 nt, Human
ggauuuggagucaggaga

SEQ ID NO: 525086 - RNA, 22 nt, Human
gggguuucgccauguuggccag

SEQ ID NO: 525087 - RNA, 18 nt, Human
ggguuucgccauguuggc

SEQ ID NO: 525088 - RNA, 19 nt, Human
gguuguccugaauucuguu

SEQ ID NO: 525089 - RNA, 26 nt, Human
gguuguccugaauucuguuuggccuc

SEQ ID NO: 525090 - RNA, 20 nt, Human
guagaaugaaauauagcccc

SEQ ID NO: 525091 - RNA, 23 nt, Human
guagagaugggguuucgccaugu

SEQ ID NO: 525092 - RNA, 24 nt, Human
gugauucuccugccucagccuccc

SEQ ID NO: 525093 - RNA, 21 nt, Human
guucaccugccugacaguuaa

SEQ ID NO: 525094 - RNA, 24 nt, Human
uaaaggguuguccugaauucuguu

SEQ ID NO: 525095 - RNA, 20 nt, Human
uaacaaauguaaaagaauaa

SEQ ID NO: 525096 - RNA, 24 nt, Human
uaauuuuuguauuuuuaguagaga

SEQ ID NO: 525097 - RNA, 23 nt, Human
uacaaaaggccucagcugcccca

SEQ ID NO: 525098 - RNA, 22 nt, Human
uacaaaaggugauggaagucaa

SEQ ID NO: 525099 - RNA, 18 nt, Human
uacaggcuccugcuacca

SEQ ID NO: 525100 - RNA, 24 nt, Human
uaccuguuucuguuuccucuucua

SEQ ID NO: 525101 - RNA, 21 nt, Human
uagaaugaaauauagcccccc

SEQ ID NO: 525102 - RNA, 21 nt, Human
uagaauuacaggcgugagcca

SEQ ID NO: 525103 - RNA, 24 nt, Human
uagaauuacaggcgugagccaccg

SEQ ID NO: 525104 - RNA, 25 nt, Human
uagaauuacaggcgugagccaccgc

SEQ ID NO: 525105 - RNA, 22 nt, Human
uagagaugggguuucgccaugu

SEQ ID NO: 525106 - RNA, 24 nt, Human
uaguagagaugggguuucgccaug

SEQ ID NO: 525107 - RNA, 19 nt, Human
uauagccccccacccuccg

SEQ ID NO: 525108 - RNA, 19 nt, Human
ucaagugauucuccugccu

SEQ ID NO: 525109 - RNA, 21 nt, Human
ucacgugcugucucauuuccu

SEQ ID NO: 525110 - RNA, 19 nt, Human
ucacugcaaccuccgccuc

SEQ ID NO: 525111 - RNA, 24 nt, Human
ucacugcaaccuccgccucccagg

SEQ ID NO: 525112 - RNA, 25 nt, Human
ucacugcaaccuccgccucccaggu

SEQ ID NO: 525113 - RNA, 27 nt, Human
ucacugcaaccuccgccucccagguuc

SEQ ID NO: 525114 - RNA, 18 nt, Human
ucagccucccgaacagcu

SEQ ID NO: 525115 - RNA, 23 nt, Human
ucaguagauggcaauuguaauau

SEQ ID NO: 525116 - RNA, 24 nt, Human
ucccaaagugcuagaauuacaggc

SEQ ID NO: 525117 - RNA, 18 nt, Human
ucccaaauucacuuccaa

SEQ ID NO: 525118 - RNA, 21 nt, Human
ucccagguucaagugauucuc

SEQ ID NO: 525119 - RNA, 24 nt, Human
ucccagguucaagugauucuccug

SEQ ID NO: 525120 - RNA, 23 nt, Human
ucccgaacagcugggauuacagg

SEQ ID NO: 525121 - RNA, 24 nt, Human
ucccgaacagcugggauuacaggc

SEQ ID NO: 525122 - RNA, 22 nt, Human
ucgccauguuggccaggcuggu

SEQ ID NO: 525123 - RNA, 24 nt, Human
ucgccauguuggccaggcuggucu

SEQ ID NO: 525124 - RNA, 21 nt, Human
ucucccgucucuauuuguccc

SEQ ID NO: 525125 - RNA, 22 nt, Human
ucucggauuuggagucaggaga

SEQ ID NO: 525126 - RNA, 21 nt, Human
ucucucucuguaaaaaggaag

SEQ ID NO: 525127 - RNA, 18 nt, Human
ugaaaggauucucggauu

SEQ ID NO: 525128 - RNA, 23 nt, Human
ugaaauauagccccccacccucc

SEQ ID NO: 525129 - RNA, 26 nt, Human
ugaaauauagccccccacccuccgga

SEQ ID NO: 525130 - RNA, 18 nt, Human
ugaaauauucuagacauc

SEQ ID NO: 525131 - RNA, 23 nt, Human
ugacuaaugaccuguguuuuuuu

SEQ ID NO: 525132 - RNA, 19 nt, Human
ugacuucaggugauccgcu

SEQ ID NO: 525133 - RNA, 25 nt, Human
ugacuucaggugauccgcucaccuu

SEQ ID NO: 525134 - RNA, 24 nt, Human
ugauaagcaauugcuacaaaagca

SEQ ID NO: 525135 - RNA, 24 nt, Human
ugauccgcucaccuuggccuccca

SEQ ID NO: 525136 - RNA, 20 nt, Human
ugauucuccugccucagccu

SEQ ID NO: 525137 - RNA, 23 nt, Human
ugcagaaaaauucaagaccuauu

SEQ ID NO: 525138 - RNA, 26 nt, Human
ugccucagccucccgaacagcuggga

SEQ ID NO: 525139 - RNA, 19 nt, Human
ugcuacaaaagcaugcauu

SEQ ID NO: 525140 - RNA, 24 nt, Human
ugcuagaauuacaggcgugagcca

SEQ ID NO: 525141 - RNA, 24 nt, Human
uggaguuuugcucuugucgcccag

SEQ ID NO: 525142 - RNA, 24 nt, Human
uggccaggcuggucucaaaucccu

SEQ ID NO: 525143 - RNA, 22 nt, Human
ugggauuacaggcuccugcuac

SEQ ID NO: 525144 - RNA, 24 nt, Human
ugggauuacaggcuccugcuacca

SEQ ID NO: 525145 - RNA, 25 nt, Human
ugggauuacaggcuccugcuaccau

SEQ ID NO: 525146 - RNA, 24 nt, Human
ugggguuucgccauguuggccagg

SEQ ID NO: 525147 - RNA, 20 nt, Human
ugguguaacaaauguaaaag

SEQ ID NO: 525148 - RNA, 20 nt, Human
uguaaguggcuauaaacacu

SEQ ID NO: 525149 - RNA, 20 nt, Human
ugucuuguuuuguuuuuucu

SEQ ID NO: 525150 - RNA, 23 nt, Human
ugucuuguuuuguuuuuucuuug

SEQ ID NO: 525151 - RNA, 18 nt, Human
uuaguagagaugggguuu

SEQ ID NO: 525152 - RNA, 22 nt, Human
uuaguagagaugggguuucgcc

SEQ ID NO: 525153 - RNA, 24 nt, Human
uuaguagagaugggguuucgccau

SEQ ID NO: 525154 - RNA, 21 nt, Human
uucaagugauucuccugccuc

SEQ ID NO: 525155 - RNA, 23 nt, Human
uucaagugauucuccugccucag

SEQ ID NO: 525156 - RNA, 24 nt, Human
uucaagugauucuccugccucagc

SEQ ID NO: 525157 - RNA, 24 nt, Human
uucaggugauccgcucaccuuggc

SEQ ID NO: 525158 - RNA, 19 nt, Human
uuccagaagcucagggucc

SEQ ID NO: 525159 - RNA, 23 nt, Human
uugcucuugucgcccaggcugga

SEQ ID NO: 525160 - RNA, 18 nt, Human
uuggccucccaaagugcu

SEQ ID NO: 525161 - RNA, 22 nt, Human
uuggccucccaaagugcuagaa

SEQ ID NO: 525162 - RNA, 23 nt, Human
uuguauuuuuaguagagaugggg

SEQ ID NO: 525163 - RNA, 19 nt, Human
uuguucuugcuucugcaag

SEQ ID NO: 525164 - RNA, 25 nt, Human
uuguuuuuucuuugagguggaguuu

SEQ ID NO: 525165 - RNA, 18 nt, Human
uuuacaacuuaccugcug

SEQ ID NO: 525166 - RNA, 24 nt, Human
uuucgccauguuggccaggcuggu

SEQ ID NO: 525167 - RNA, 24 nt, Human
uuugcucuugucgcccaggcugga

SEQ ID NO: 525168 - RNA, 24 nt, Human
uuuugcucuugucgcccaggcugg

SEQ ID NO: 525169 - RNA, 23 nt, Human
uuuuuaguagagaugggguuucg

SEQ ID NO: 525170 - RNA, 24 nt, Human
uuuuuaguagagaugggguuucgc

SEQ ID NO: 525171 - RNA, 20 nt, Human
uuuuuguauuuuuaguagag

SEQ ID NO: 525172 - RNA, 24 nt, Human
uuuuuuuuguuaccuguuucuguu

SEQ ID NO: 525173 - RNA, 22 nt, Human
uuuuuuuuuguuaccuguuucu

SEQ ID NO: 525174 - RNA, 21 nt, Human
aaaagcauuaacaauuuuuag

SEQ ID NO: 525175 - RNA, 19 nt, Human
aacauggugaaaccucauc

SEQ ID NO: 525176 - RNA, 20 nt, Human
aacauggugaaaccucaucu

SEQ ID NO: 525177 - RNA, 21 nt, Human
aacauggugaaaccucaucuc

SEQ ID NO: 525178 - RNA, 23 nt, Human
aagaaucacuugaacccaggagg

SEQ ID NO: 525179 - RNA, 18 nt, Human
aauaaagaaacuccuaga

SEQ ID NO: 525180 - RNA, 24 nt, Human
aaucacuugaacccaggaggugga

SEQ ID NO: 525181 - RNA, 25 nt, Human
aaugauguuuuaugacgcagacuau

SEQ ID NO: 525182 - RNA, 24 nt, Human
aauggagcgagacucugucucaaa

SEQ ID NO: 525183 - RNA, 24 nt, Human
accucaucucuacuaaaaauauaa

SEQ ID NO: 525184 - RNA, 24 nt, Human
acgcugcugcaguccagccugggc

SEQ ID NO: 525185 - RNA, 24 nt, Human
agcacuuugggaggcugaggcggg

SEQ ID NO: 525186 - RNA, 23 nt, Human
agccuggccaacauggugaaacc

SEQ ID NO: 525187 - RNA, 25 nt, Human
agccuggccaacauggugaaaccuc

SEQ ID NO: 525188 - RNA, 24 nt, Human
agccugggcaauggagcgagacuc

SEQ ID NO: 525189 - RNA, 26 nt, Human
aggcggguggaucacuugaagucaag

SEQ ID NO: 525190 - RNA, 21 nt, Human
aggcugaggcggguggaucac

SEQ ID NO: 525191 - RNA, 24 nt, Human
aggcugaggcggguggaucacuug

SEQ ID NO: 525192 - RNA, 24 nt, Human
agguggagguugcagugagcugag

SEQ ID NO: 525193 - RNA, 24 nt, Human
aucacgcugcugcaguccagccug

SEQ ID NO: 525194 - RNA, 24 nt, Human
auggagcgagacucugucucaaaa

SEQ ID NO: 525195 - RNA, 20 nt, Human
auugcuauuugcuuuucugu

SEQ ID NO: 525196 - RNA, 23 nt, Human
auuucacuuucacauuuccccaa

SEQ ID NO: 525197 - RNA, 24 nt, Human
caacauggugaaaccucaucucua

SEQ ID NO: 525198 - RNA, 19 nt, Human
cacaccauaaguucagcca

SEQ ID NO: 525199 - RNA, 24 nt, Human
cacaccuguaaucccagcacuuug

SEQ ID NO: 525200 - RNA, 20 nt, Human
caccacaccauaaguucagc

SEQ ID NO: 525201 - RNA, 19 nt, Human
caccuguaaucccagcacu

SEQ ID NO: 525202 - RNA, 24 nt, Human
caccuguaaucccagcacuuuggg

SEQ ID NO: 525203 - RNA, 21 nt, Human
cacuugaagucaagaguuuga

SEQ ID NO: 525204 - RNA, 24 nt, Human
cagaauuaaugccaucagguugua

SEQ ID NO: 525205 - RNA, 24 nt, Human
cagcacuuugggaggcugaggcgg

SEQ ID NO: 525206 - RNA, 29 nt, Human
caggagguggagguugcagugacaacggu

SEQ ID NO: 525207 - RNA, 23 nt, Human
caguccagccugggcaauggagc

SEQ ID NO: 525208 - RNA, 19 nt, Human
cauaagccuaaggggccuu

SEQ ID NO: 525209 - RNA, 21 nt, Human
ccaccccccaccacaccauaa

SEQ ID NO: 525210 - RNA, 22 nt, Human
ccaggagguggagguugcagug

SEQ ID NO: 525211 - RNA, 21 nt, Human
cccaggagguggagguugcag

SEQ ID NO: 525212 - RNA, 28 nt, Human
ccccccaccacaccauaaguucagccaa

SEQ ID NO: 525213 - RNA, 19 nt, Human
ccccugaaaccaucuagag

SEQ ID NO: 525214 - RNA, 23 nt, Human
ccuggccaacauggugaaaccuc

SEQ ID NO: 525215 - RNA, 24 nt, Human
ccuggccaacauggugaaaccuca

SEQ ID NO: 525216 - RNA, 22 nt, Human
ccugggcaauggagcgagacuc

SEQ ID NO: 525217 - RNA, 19 nt, Human
ccuuuaaucccagcuacuu

SEQ ID NO: 525218 - RNA, 22 nt, Human
ccuuuaaucccagcuacuuggg

SEQ ID NO: 525219 - RNA, 24 nt, Human
cggguggaucacuugaagucaaga

SEQ ID NO: 525220 - RNA, 22 nt, Human
cucacaccuguaaucccagcac

SEQ ID NO: 525221 - RNA, 24 nt, Human
cucacaccuguaaucccagcacuu

SEQ ID NO: 525222 - RNA, 18 nt, Human
cugcaguccagccugggc

SEQ ID NO: 525223 - RNA, 20 nt, Human
cugcaguccagccugggcaa

SEQ ID NO: 525224 - RNA, 21 nt, Human
cugcaguccagccugggcaau

SEQ ID NO: 525225 - RNA, 25 nt, Human
cugcaguccagccugggcaauggag

SEQ ID NO: 525226 - RNA, 24 nt, Human
cugcugcaguccagccugggcaau

SEQ ID NO: 525227 - RNA, 23 nt, Human
cuggccaacauggugaaaccuca

SEQ ID NO: 525228 - RNA, 24 nt, Human
cugugauuggaguauuguuaaggc

SEQ ID NO: 525229 - RNA, 21 nt, Human
cuugaacccaggagguggagg

SEQ ID NO: 525230 - RNA, 20 nt, Human
cuuuuuuuuuuuuuuuuugc

SEQ ID NO: 525231 - RNA, 20 nt, Human
cuuuuuuuuuuuuuuuuugg

SEQ ID NO: 525232 - RNA, 21 nt, Human
gagguggagguugcagugagc

SEQ ID NO: 525233 - RNA, 22 nt, Human
gagguugcagugagcugagauc

SEQ ID NO: 525234 - RNA, 24 nt, Human
gaucacuugaagucaagaguuuga

SEQ ID NO: 525235 - RNA, 24 nt, Human
gcaauggagcgagacucugucuca

SEQ ID NO: 525236 - RNA, 22 nt, Human
gcacaagaaucacuugaaccca

SEQ ID NO: 525237 - RNA, 21 nt, Human
gcaggugauuacauuugcuuu

SEQ ID NO: 525238 - RNA, 24 nt, Human
gccaacauggugaaaccucaucuc

SEQ ID NO: 525239 - RNA, 22 nt, Human
gccagucaugguggcacgugcc

SEQ ID NO: 525240 - RNA, 24 nt, Human
gcugcugcaguccagccugggcaa

SEQ ID NO: 525241 - RNA, 18 nt, Human
ggagguugcagugagcug

SEQ ID NO: 525242 - RNA, 22 nt, Human
ggagguugcagugagcugagau

SEQ ID NO: 525243 - RNA, 23 nt, Human
ggagguugcagugagcugagauc

SEQ ID NO: 525244 - RNA, 24 nt, Human
ggagguugcagugagcugagauca

SEQ ID NO: 525245 - RNA, 24 nt, Human
gggccugguggcucacaccuguaa

SEQ ID NO: 525246 - RNA, 19 nt, Human
gguggagguugcagugagc

SEQ ID NO: 525247 - RNA, 24 nt, Human
gguggcacgugccuuuaaucccag

SEQ ID NO: 525248 - RNA, 24 nt, Human
gguggcucacaccuguaaucccag

SEQ ID NO: 525249 - RNA, 20 nt, Human
gucaugguggcacgugccuu

SEQ ID NO: 525250 - RNA, 20 nt, Human
guggagguugcagugagcug

SEQ ID NO: 525251 - RNA, 19 nt, Human
guugcagugagcugagauc

SEQ ID NO: 525252 - RNA, 18 nt, Human
uaaaaggacacacacaug

SEQ ID NO: 525253 - RNA, 21 nt, Human
uaaaauaaagaaacuccuaga

SEQ ID NO: 525254 - RNA, 21 nt, Human
uaacaaacugugauuuauguu

SEQ ID NO: 525255 - RNA, 22 nt, Human
uacaaagaacuaauucaaacaa

SEQ ID NO: 525256 - RNA, 22 nt, Human
uaccaccccccaccacaccaua

SEQ ID NO: 525257 - RNA, 18 nt, Human
uaguuccccugaaaccau

SEQ ID NO: 525258 - RNA, 25 nt, Human
ucacgcugcugcaguccagccuggg

SEQ ID NO: 525259 - RNA, 30 nt, Human
ucagaaacacaccuauuuucaaaaugcagg

SEQ ID NO: 525260 - RNA, 23 nt, Human
uccagccugggcaauggagcgag

SEQ ID NO: 525261 - RNA, 24 nt, Human
uccagccugggcaauggagcgaga

SEQ ID NO: 525262 - RNA, 21 nt, Human
uccuuuugccaggcgagugag

SEQ ID NO: 525263 - RNA, 20 nt, Human
ucuaaucuguguccuuuugc

SEQ ID NO: 525264 - RNA, 21 nt, Human
ucucuacuaaaaauauaaaaa

SEQ ID NO: 525265 - RNA, 20 nt, Human
ucuuugggaugggaugcauu

SEQ ID NO: 525266 - RNA, 19 nt, Human
ugaaaccucaucucuacua

SEQ ID NO: 525267 - RNA, 18 nt, Human
ugaaaggcaaaugauguu

SEQ ID NO: 525268 - RNA, 23 nt, Human
ugagaccagccuggccaacaugg

SEQ ID NO: 525269 - RNA, 24 nt, Human
ugagaccagccuggccaacauggu

SEQ ID NO: 525270 - RNA, 21 nt, Human
ugagaucacgcugcugcaguc

SEQ ID NO: 525271 - RNA, 24 nt, Human
ugagaucacgcugcugcaguccag

SEQ ID NO: 525272 - RNA, 21 nt, Human
ugagcugagaucacgcugcug

SEQ ID NO: 525273 - RNA, 22 nt, Human
ugagcugagaucacgcugcugc

SEQ ID NO: 525274 - RNA, 20 nt, Human
ugaggcacaagaaucacuug

SEQ ID NO: 525275 - RNA, 24 nt, Human
ugaggcacaagaaucacuugaacc

SEQ ID NO: 525276 - RNA, 24 nt, Human
ugaggcggguggaucacuugaagu

SEQ ID NO: 525277 - RNA, 26 nt, Human
ugaggcggguggaucacuugaaguca

SEQ ID NO: 525278 - RNA, 22 nt, Human
ugccaugguaucccugucagag

SEQ ID NO: 525279 - RNA, 23 nt, Human
ugccuuuaaucccagcuacuugg

SEQ ID NO: 525280 - RNA, 24 nt, Human
ugccuuuaaucccagcuacuuggg

SEQ ID NO: 525281 - RNA, 19 nt, Human
ugcuauuugcuuuucuguc

SEQ ID NO: 525282 - RNA, 20 nt, Human
ugcugcaguccagccugggc

SEQ ID NO: 525283 - RNA, 21 nt, Human
ugcugcaguccagccugggca

SEQ ID NO: 525284 - RNA, 20 nt, Human
uggaagguauaaauugaaag

SEQ ID NO: 525285 - RNA, 21 nt, Human
uggaucacuugaagucaagag

SEQ ID NO: 525286 - RNA, 23 nt, Human
uggaucacuugaagucaagaguu

SEQ ID NO: 525287 - RNA, 24 nt, Human
uggaucacuugaagucaagaguuu

SEQ ID NO: 525288 - RNA, 27 nt, Human
uggaucacuugaagucaagaguuugag

SEQ ID NO: 525289 - RNA, 24 nt, Human
uggccaacauggugaaaccucauc

SEQ ID NO: 525290 - RNA, 21 nt, Human
uggcucacaccuguaauccca

SEQ ID NO: 525291 - RNA, 22 nt, Human
uggcucacaccuguaaucccag

SEQ ID NO: 525292 - RNA, 24 nt, Human
uggcucacaccuguaaucccagca

SEQ ID NO: 525293 - RNA, 27 nt, Human
ugggaggcugaggcacaagaaucacuu

SEQ ID NO: 525294 - RNA, 20 nt, Human
ugggaggcugaggcgggugg

SEQ ID NO: 525295 - RNA, 23 nt, Human
ugggaggcugaggcggguggauc

SEQ ID NO: 525296 - RNA, 24 nt, Human
ugggaggcugaggcggguggauca

SEQ ID NO: 525297 - RNA, 24 nt, Human
ugguggcacgugccuuuaauccca

SEQ ID NO: 525298 - RNA, 24 nt, Human
ugguggcucacaccuguaauccca

SEQ ID NO: 525299 - RNA, 19 nt, Human
ugugauuuauguuuuuguu

SEQ ID NO: 525300 - RNA, 21 nt, Human
uguuuuuguucauuucuucua

SEQ ID NO: 525301 - RNA, 20 nt, Human
uucacauuuccccaaccaca

SEQ ID NO: 525302 - RNA, 19 nt, Human
uucacuuucacauuucccc

SEQ ID NO: 525303 - RNA, 24 nt, Human
uugaacccaggagguggagguugc

SEQ ID NO: 525304 - RNA, 22 nt, Human
uugaagucaagaguuugagacc

SEQ ID NO: 525305 - RNA, 18 nt, Human
uugcagugagcugagauc

SEQ ID NO: 525306 - RNA, 20 nt, Human
uugcagugagcugagaucac

SEQ ID NO: 525307 - RNA, 24 nt, Human
uugcagugagcugagaucacgcug

SEQ ID NO: 525308 - RNA, 25 nt, Human
uugggaggcugaggcacaagaauca

SEQ ID NO: 525309 - RNA, 25 nt, Human
uugggaggcugaggcggguggauca

SEQ ID NO: 525310 - RNA, 20 nt, Human
uuguuaaggcuuaugguuuc

SEQ ID NO: 525311 - RNA, 21 nt, Human
uuuaacugugauuggaguauu

SEQ ID NO: 525312 - RNA, 24 nt, Human
uuugcauucaaaauccuguuuuau

SEQ ID NO: 525313 - RNA, 18 nt, Human
uuuuuugaauucauaagc

SEQ ID NO: 525314 - RNA, 19 nt, Human
uuuuuuuuuuuuuuuugca

SEQ ID NO: 525315 - RNA, 20 nt, Human
aaaaaaagaagaaauuagag

SEQ ID NO: 525316 - RNA, 22 nt, Human
aaaaaaagaagaaauuagagaa

SEQ ID NO: 525317 - RNA, 19 nt, Human
aaaaagaagaaauuagaga

SEQ ID NO: 525318 - RNA, 20 nt, Human
agaagggagguaggggggac

SEQ ID NO: 525319 - RNA, 22 nt, Human
agaagggagguaggggggacag

SEQ ID NO: 525320 - RNA, 22 nt, Human
agcagggcccuagggagguagg

SEQ ID NO: 525321 - RNA, 20 nt, Human
agccuggccgcgggggaggg

SEQ ID NO: 525322 - RNA, 23 nt, Human
agcggcaggcgccgggcccccaa

SEQ ID NO: 525323 - RNA, 21 nt, Human
aggcagaaguggggcucaggg

SEQ ID NO: 525324 - RNA, 21 nt, Human
aggcaggugugaggcuggggg

SEQ ID NO: 525325 - RNA, 20 nt, Human
aggcccccaugucccagcag

SEQ ID NO: 525326 - RNA, 24 nt, Human
aggcgggaaccagaggcaggugug

SEQ ID NO: 525327 - RNA, 18 nt, Human
agggcccugguacugcgg

SEQ ID NO: 525328 - RNA, 24 nt, Human
caagccugggggcaggggcugggg

SEQ ID NO: 525329 - RNA, 20 nt, Human
cacucaggcccccauguccc

SEQ ID NO: 525330 - RNA, 19 nt, Human
cagcccggggccgcagccc

SEQ ID NO: 525331 - RNA, 18 nt, Human
cagcggcaggcgccgggc

SEQ ID NO: 525332 - RNA, 21 nt, Human
cagcuccugggucccuccaga

SEQ ID NO: 525333 - RNA, 25 nt, Human
caggagcccagcucgggucccaggc

SEQ ID NO: 525334 - RNA, 18 nt, Human
cauugagcagaggggccu

SEQ ID NO: 525335 - RNA, 19 nt, Human
ccaagccugggggcagggg

SEQ ID NO: 525336 - RNA, 23 nt, Human
ccaagccugggggcaggggcugg

SEQ ID NO: 525337 - RNA, 23 nt, Human
ccaggcgcgcgcccccccacccc

SEQ ID NO: 525338 - RNA, 18 nt, Human
cccaugucccagcagggc

SEQ ID NO: 525339 - RNA, 18 nt, Human
ccccaugucccagcaggg

SEQ ID NO: 525340 - RNA, 21 nt, Human
ccccaugucccagcagggccc

SEQ ID NO: 525341 - RNA, 18 nt, Human
cccccccacccccgccgc

SEQ ID NO: 525342 - RNA, 19 nt, Human
cccccccacccccgccgcc

SEQ ID NO: 525343 - RNA, 20 nt, Human
cccgucccuucucuguccug

SEQ ID NO: 525344 - RNA, 18 nt, Human
cccuccagagccuggccg

SEQ ID NO: 525345 - RNA, 20 nt, Human
cccucuucaggccgucgcug

SEQ ID NO: 525346 - RNA, 19 nt, Human
ccgccgccgucagcggcag

SEQ ID NO: 525347 - RNA, 20 nt, Human
ccgccgucagcggcaggcgc

SEQ ID NO: 525348 - RNA, 19 nt, Human
ccggaggcugggucucucc

SEQ ID NO: 525349 - RNA, 19 nt, Human
ccgucccuucucuguccug

SEQ ID NO: 525350 - RNA, 19 nt, Human
ccuucucccucuucaggcc

SEQ ID NO: 525351 - RNA, 23 nt, Human
ccuugccgguguccuugagagcc

SEQ ID NO: 525352 - RNA, 20 nt, Human
cgcgcauggaccccggcccc

SEQ ID NO: 525353 - RNA, 21 nt, Human
cgcgcgcccccccacccccgc

SEQ ID NO: 525354 - RNA, 24 nt, Human
cuccgcgcauggaccccggccccc

SEQ ID NO: 525355 - RNA, 21 nt, Human
cuccugggucccuccagagcc

SEQ ID NO: 525356 - RNA, 23 nt, Human
cugaggccggcggcagcuccugg

SEQ ID NO: 525357 - RNA, 21 nt, Human
cuucuggggaccaaggcccag

SEQ ID NO: 525358 - RNA, 21 nt, Human
gaggaccaggcgggaaccaga

SEQ ID NO: 525359 - RNA, 19 nt, Human
gauccgggcgacccuccuu

SEQ ID NO: 525360 - RNA, 19 nt, Human
gcagaaguggggcucaggg

SEQ ID NO: 525361 - RNA, 18 nt, Human
gccggcggcagcuccugg

SEQ ID NO: 525362 - RNA, 21 nt, Human
gcgcgcccccccacccccgcc

SEQ ID NO: 525363 - RNA, 27 nt, Human
gcucgggucccaggcagaggugaaggc

SEQ ID NO: 525364 - RNA, 18 nt, Human
ggcagaaguggggcucag

SEQ ID NO: 525365 - RNA, 23 nt, Human
ggcaggggcuggggaggccggug

SEQ ID NO: 525366 - RNA, 22 nt, Human
ggccgcgggggagggcgcagcc

SEQ ID NO: 525367 - RNA, 19 nt, Human
ggcgcgcgcccccccaccc

SEQ ID NO: 525368 - RNA, 25 nt, Human
gggagguaggggggacaggagagug

SEQ ID NO: 525369 - RNA, 18 nt, Human
gggccuuuggaggugggg

SEQ ID NO: 525370 - RNA, 23 nt, Human
gggcgcagcccggggccgcagcc

SEQ ID NO: 525371 - RNA, 20 nt, Human
ggggacaggagagugaagga

SEQ ID NO: 525372 - RNA, 25 nt, Human
uaaaaaaaagaagaaauuagagaag

SEQ ID NO: 525373 - RNA, 19 nt, Human
ucauuaaaaaaaagaagaa

SEQ ID NO: 525374 - RNA, 21 nt, Human
uccgcgcauggaccccggccc

SEQ ID NO: 525375 - RNA, 21 nt, Human
uccuggcggcgaggcccuagc

SEQ ID NO: 525376 - RNA, 19 nt, Human
ugagcagaggggccuuugg

SEQ ID NO: 525377 - RNA, 18 nt, Human
ugaggcugggggucacag

SEQ ID NO: 525378 - RNA, 18 nt, Human
uggaugggcacucaggcc

SEQ ID NO: 525379 - RNA, 22 nt, Human
uggggaccaaggcccaggagcc

SEQ ID NO: 525380 - RNA, 23 nt, Human
aaaauaauaaguaggauaagaua

SEQ ID NO: 525381 - RNA, 19 nt, Human
aaagaaacuagauccuggu

SEQ ID NO: 525382 - RNA, 21 nt, Human
aagcagcaucuuuccuuuuca

SEQ ID NO: 525383 - RNA, 22 nt, Human
aauuccugcccccccauccagu

SEQ ID NO: 525384 - RNA, 19 nt, Human
acaagaaaaagaggugaga

SEQ ID NO: 525385 - RNA, 20 nt, Human
acaccauuuaaguccaggag

SEQ ID NO: 525386 - RNA, 22 nt, Human
acaccgaaggaaggggacugga

SEQ ID NO: 525387 - RNA, 19 nt, Human
acaguaauaaucucucuca

SEQ ID NO: 525388 - RNA, 18 nt, Human
accacaugcaaagaacaa

SEQ ID NO: 525389 - RNA, 18 nt, Human
acucugcaucagucacaa

SEQ ID NO: 525390 - RNA, 24 nt, Human
acuggccuaaagacucaaaugaaa

SEQ ID NO: 525391 - RNA, 23 nt, Human
agaaaguaagacucaagaucaaa

SEQ ID NO: 525392 - RNA, 19 nt, Human
agaguagagagaaagaaac

SEQ ID NO: 525393 - RNA, 23 nt, Human
agaguagagagaaagaaacuaga

SEQ ID NO: 525394 - RNA, 22 nt, Human
agauuaaaauacaaaucacuuu

SEQ ID NO: 525395 - RNA, 22 nt, Human
agcacaagccagggucaugauc

SEQ ID NO: 525396 - RNA, 19 nt, Human
aggaaguaaaauaauaagu

SEQ ID NO: 525397 - RNA, 22 nt, Human
agggcaucaccuggccuguugg

SEQ ID NO: 525398 - RNA, 20 nt, Human
aguccaagggggccagggac

SEQ ID NO: 525399 - RNA, 20 nt, Human
aguuugcaaacaaaaugguc

SEQ ID NO: 525400 - RNA, 21 nt, Human
auaaucaggagccaguggaac

SEQ ID NO: 525401 - RNA, 25 nt, Human
aucaacaccacucaagagacaaauu

SEQ ID NO: 525402 - RNA, 24 nt, Human
aucuccuucauuaccuuccuccaa

SEQ ID NO: 525403 - RNA, 24 nt, Human
caaacaccgaaggaaggggacugg

SEQ ID NO: 525404 - RNA, 26 nt, Human
caaagcaucauaaucaggagccagug

SEQ ID NO: 525405 - RNA, 24 nt, Human
caccacucaagagacaaauuaucc

SEQ ID NO: 525406 - RNA, 24 nt, Human
caccagcgggagaagcacaugauc

SEQ ID NO: 525407 - RNA, 20 nt, Human
caccauuuaaguccaggagu

SEQ ID NO: 525408 - RNA, 21 nt, Human
caggagccaguggaacauaug

SEQ ID NO: 525409 - RNA, 20 nt, Human
caggaugcauuccugagaaa

SEQ ID NO: 525410 - RNA, 20 nt, Human
cagggaccuggggcaaccau

SEQ ID NO: 525411 - RNA, 21 nt, Human
caguaagcccuugggcaagcu

SEQ ID NO: 525412 - RNA, 21 nt, Human
caugcaaagaacaaggaacug

SEQ ID NO: 525413 - RNA, 23 nt, Human
ccaauuuuguuggcaacauccaa

SEQ ID NO: 525414 - RNA, 18 nt, Human
ccacaugcaaagaacaag

SEQ ID NO: 525415 - RNA, 19 nt, Human
ccagaguagagagaaagaa

SEQ ID NO: 525416 - RNA, 18 nt, Human
ccaguaucauuuaaccug

SEQ ID NO: 525417 - RNA, 20 nt, Human
ccauucuccucuuccucuuu

SEQ ID NO: 525418 - RNA, 23 nt, Human
cccuugggcaagcuucuuaaucu

SEQ ID NO: 525419 - RNA, 23 nt, Human
ccgggccaugguaagcagaaaag

SEQ ID NO: 525420 - RNA, 22 nt, Human
ccugcuugugaacagagccugc

SEQ ID NO: 525421 - RNA, 21 nt, Human
ccuggaaucagaaaguaagac

SEQ ID NO: 525422 - RNA, 21 nt, Human
cgccagugagacugauauauc

SEQ ID NO: 525423 - RNA, 22 nt, Human
cuagcacaagccagggucauga

SEQ ID NO: 525424 - RNA, 23 nt, Human
cucaagagauucuucugucccac

SEQ ID NO: 525425 - RNA, 27 nt, Human
cucacuagcaaugcucucugccaauga

SEQ ID NO: 525426 - RNA, 19 nt, Human
cuccaacaccagcgggaga

SEQ ID NO: 525427 - RNA, 23 nt, Human
cuggaggcucuccucucaaacug

SEQ ID NO: 525428 - RNA, 27 nt, Human
cuuuccuuuucaauauuuugcccuggu

SEQ ID NO: 525429 - RNA, 19 nt, Human
gauacuaaggacagcugga

SEQ ID NO: 525430 - RNA, 23 nt, Human
uaacaagcccucuacuuuucaaa

SEQ ID NO: 525431 - RNA, 23 nt, Human
uaaguaggauaagauaaucuccu

SEQ ID NO: 525432 - RNA, 18 nt, Human
uacaguuacugagggacc

SEQ ID NO: 525433 - RNA, 19 nt, Human
uacugaauuguucuguaac

SEQ ID NO: 525434 - RNA, 22 nt, Human
uacugaauuguucuguaacucc

SEQ ID NO: 525435 - RNA, 23 nt, Human
uaggaaagaccacaugcaaagaa

SEQ ID NO: 525436 - RNA, 19 nt, Human
uaugccggcauuucccaca

SEQ ID NO: 525437 - RNA, 22 nt, Human
uauuccagacacuacugaauug

SEQ ID NO: 525438 - RNA, 22 nt, Human
ucaacaccacucaagagacaaa

SEQ ID NO: 525439 - RNA, 19 nt, Human
ucagucacaaaaugugauc

SEQ ID NO: 525440 - RNA, 24 nt, Human
uccaaagcaucauaaucaggagcc

SEQ ID NO: 525441 - RNA, 21 nt, Human
uccauucuccucuuccucuuu

SEQ ID NO: 525442 - RNA, 20 nt, Human
uccccaagccagggcaucac

SEQ ID NO: 525443 - RNA, 27 nt, Human
uccccaagccagggcaucaccuggccu

SEQ ID NO: 525444 - RNA, 21 nt, Human
ucccgugcuuuaacaagcccu

SEQ ID NO: 525445 - RNA, 21 nt, Human
uccuagacuuuagcucggucc

SEQ ID NO: 525446 - RNA, 24 nt, Human
uccuccaacagauggguuuccugg

SEQ ID NO: 525447 - RNA, 21 nt, Human
ucuacuggguuugaaacuuua

SEQ ID NO: 525448 - RNA, 22 nt, Human
ucuuguaaauucacugaaugca

SEQ ID NO: 525449 - RNA, 22 nt, Human
ugaaacuuuauuucuuccuaga

SEQ ID NO: 525450 - RNA, 22 nt, Human
ugaacagagccugcacuagaaa

SEQ ID NO: 525451 - RNA, 22 nt, Human
ugaauaguuuuucuguaguaca

SEQ ID NO: 525452 - RNA, 23 nt, Human
ugagggaccuagguaaacauccu

SEQ ID NO: 525453 - RNA, 19 nt, Human
ugaucaaucacgccaguga

SEQ ID NO: 525454 - RNA, 23 nt, Human
ugcacuagaaaauaaagccagag

SEQ ID NO: 525455 - RNA, 21 nt, Human
ugccuucagccacuuagcagc

SEQ ID NO: 525456 - RNA, 19 nt, Human
ugguaagcagaaaagcauc

SEQ ID NO: 525457 - RNA, 21 nt, Human
uuaugggauuaacuguuaaua

SEQ ID NO: 525458 - RNA, 25 nt, Human
uuuacuuuacugaauacugaaaaag

SEQ ID NO: 525459 - RNA, 18 nt, Human
uuucccacagugccuggc

SEQ ID NO: 525460 - RNA, 29 nt, Human
uuuggaugaucccaauuuuguuggcaacc

SEQ ID NO: 525461 - RNA, 18 nt, Human
uuuuuuuuuuuuuuuuug

SEQ ID NO: 525462 - RNA, 25 nt, Human
uuuuuuuuuuuuuuuuuuuuugggg

SEQ ID NO: 525463 - RNA, 24 nt, Human
aaagugcugggauuacagguguga

SEQ ID NO: 525464 - RNA, 20 nt, Human
aaauaaaaauacaggacgcc

SEQ ID NO: 525465 - RNA, 19 nt, Human
aaccaggagagaggaacug

SEQ ID NO: 525466 - RNA, 19 nt, Human
aacccugcccugcccucca

SEQ ID NO: 525467 - RNA, 23 nt, Human
aagaaggcagggcaacaggggug

SEQ ID NO: 525468 - RNA, 22 nt, Human
aagaugcugcguuugguuuugg

SEQ ID NO: 525469 - RNA, 25 nt, Human
aagcaauccuccugccucagccucu

SEQ ID NO: 525470 - RNA, 19 nt, Human
aagccaauucccgccaccg

SEQ ID NO: 525471 - RNA, 21 nt, Human
aagccaauucccgccaccgac

SEQ ID NO: 525472 - RNA, 25 nt, Human
aagcgauccucccaccucggccucc

SEQ ID NO: 525473 - RNA, 19 nt, Human
aaggagcaggggcugcaga

SEQ ID NO: 525474 - RNA, 23 nt, Human
aaggggcucaugggcucggggca

SEQ ID NO: 525475 - RNA, 18 nt, Human
aagugcugggauuacagg

SEQ ID NO: 525476 - RNA, 19 nt, Human
aagugcugggauuacaggu

SEQ ID NO: 525477 - RNA, 26 nt, Human
aagugcugggauuacaggugugagcc

SEQ ID NO: 525478 - RNA, 18 nt, Human
aauucccgccaccgacuc

SEQ ID NO: 525479 - RNA, 23 nt, Human
acagggacccuaaaggaagccau

SEQ ID NO: 525480 - RNA, 22 nt, Human
acagugguaagagcacugugga

SEQ ID NO: 525481 - RNA, 22 nt, Human
accacaaucaaguuuuucugcc

SEQ ID NO: 525482 - RNA, 25 nt, Human
accauguugcccaggcugguuucaa

SEQ ID NO: 525483 - RNA, 18 nt, Human
accuggagccccugcccu

SEQ ID NO: 525484 - RNA, 19 nt, Human
acuacaggugugcgcuacc

SEQ ID NO: 525485 - RNA, 25 nt, Human
acucugccgcccaggcuggagugca

SEQ ID NO: 525486 - RNA, 26 nt, Human
agacagcuucagagaggagggaacgc

SEQ ID NO: 525487 - RNA, 19 nt, Human
agagaggaacuggacugug

SEQ ID NO: 525488 - RNA, 21 nt, Human
agccaccacgcccagcuuaaa

SEQ ID NO: 525489 - RNA, 23 nt, Human
agccuggggcuggagucccggcu

SEQ ID NO: 525490 - RNA, 19 nt, Human
aggaagcacaggucuggga

SEQ ID NO: 525491 - RNA, 23 nt, Human
aggaagcuggcuggguuugggag

SEQ ID NO: 525492 - RNA, 19 nt, Human
aggacaaaaggggcucaug

SEQ ID NO: 525493 - RNA, 19 nt, Human
aggagcaggggcugcagag

SEQ ID NO: 525494 - RNA, 21 nt, Human
aggaggagccaggaucggggg

SEQ ID NO: 525495 - RNA, 23 nt, Human
aggaugacuuaaacacaucccug

SEQ ID NO: 525496 - RNA, 19 nt, Human
aggcagaggaugacacaua

SEQ ID NO: 525497 - RNA, 21 nt, Human
aggcagcaccccagcgcuggu

SEQ ID NO: 525498 - RNA, 24 nt, Human
aggcaggaaggcagcagugccuga

SEQ ID NO: 525499 - RNA, 21 nt, Human
aggcccgggaggcuggaggug

SEQ ID NO: 525500 - RNA, 18 nt, Human
agggaagggggaugaggg

SEQ ID NO: 525501 - RNA, 18 nt, Human
agggacccuaaaggaagc

SEQ ID NO: 525502 - RNA, 19 nt, Human
agggcugaaccauuucaaa

SEQ ID NO: 525503 - RNA, 20 nt, Human
aggggaaugggaaauggcag

SEQ ID NO: 525504 - RNA, 22 nt, Human
auaaucaagcagccaccaggcc

SEQ ID NO: 525505 - RNA, 18 nt, Human
augagguuucaccauguu

SEQ ID NO: 525506 - RNA, 19 nt, Human
augagguuucaccauguug

SEQ ID NO: 525507 - RNA, 24 nt, Human
augagguuucaccauguugcccag

SEQ ID NO: 525508 - RNA, 25 nt, Human
caaacuccugggcucaagcgauccu

SEQ ID NO: 525509 - RNA, 24 nt, Human
caaagugcugggauuacaggugug

SEQ ID NO: 525510 - RNA, 20 nt, Human
caagagacucacucaccucc

SEQ ID NO: 525511 - RNA, 21 nt, Human
caagagacucacucaccuccu

SEQ ID NO: 525512 - RNA, 22 nt, Human
caagcaauccuccugccucagc

SEQ ID NO: 525513 - RNA, 27 nt, Human
caagcgauccucccaccucggccuccc

SEQ ID NO: 525514 - RNA, 28 nt, Human
caagcgauccucccaccucggccuccca

SEQ ID NO: 525515 - RNA, 23 nt, Human
cacaugagugcaaguaaagagga

SEQ ID NO: 525516 - RNA, 21 nt, Human
caccauguugcccaggcuggu

SEQ ID NO: 525517 - RNA, 24 nt, Human
caccauguugcccaggcugguuuc

SEQ ID NO: 525518 - RNA, 31 nt, Human
caccauguugcccaggcugguuucaaacucc

SEQ ID NO: 525519 - RNA, 25 nt, Human
cacccuuagcuccuacugccagaga

SEQ ID NO: 525520 - RNA, 24 nt, Human
caccucggccucccaaagugcugg

SEQ ID NO: 525521 - RNA, 18 nt, Human
caccugacuaauuuuugu

SEQ ID NO: 525522 - RNA, 23 nt, Human
cacgccugccuaagagucagaga

SEQ ID NO: 525523 - RNA, 24 nt, Human
cacucugccgcccaggcuggagug

SEQ ID NO: 525524 - RNA, 19 nt, Human
cacuguccacccacaugcc

SEQ ID NO: 525525 - RNA, 21 nt, Human
cagagacagcuucagagagga

SEQ ID NO: 525526 - RNA, 23 nt, Human
cagcaaggagacucaagaagcuu

SEQ ID NO: 525527 - RNA, 21 nt, Human
cagcaccccagcgcuggugcc

SEQ ID NO: 525528 - RNA, 20 nt, Human
caggaucgggggcugaggag

SEQ ID NO: 525529 - RNA, 21 nt, Human
caggcagauggggaggaacca

SEQ ID NO: 525530 - RNA, 21 nt, Human
caggcaugggggccaaggugg

SEQ ID NO: 525531 - RNA, 23 nt, Human
caguaaaggcagaggaugacaca

SEQ ID NO: 525532 - RNA, 21 nt, Human
caucccugcccuucuugggag

SEQ ID NO: 525533 - RNA, 23 nt, Human
cauguugcccaggcugguuucaa

SEQ ID NO: 525534 - RNA, 23 nt, Human
cauguugcccaggcugguuucaa

SEQ ID NO: 525535 - RNA, 24 nt, Human
cauguugcccaggcugguuucaaa

SEQ ID NO: 525536 - RNA, 20 nt, Human
ccaaagugcugggauuacag

SEQ ID NO: 525537 - RNA, 21 nt, Human
ccaaagugcugggauuacagg

SEQ ID NO: 525538 - RNA, 21 nt, Human
ccaaagugcugggauuacagg

SEQ ID NO: 525539 - RNA, 24 nt, Human
ccaaagugcugggauuacaggugu

SEQ ID NO: 525540 - RNA, 19 nt, Human
ccacaaucaaguuuuucug

SEQ ID NO: 525541 - RNA, 20 nt, Human
ccagagaagucaagagucaa

SEQ ID NO: 525542 - RNA, 18 nt, Human
ccaggagagaggaacugg

SEQ ID NO: 525543 - RNA, 20 nt, Human
ccagggcucaagcaauccuc

SEQ ID NO: 525544 - RNA, 20 nt, Human
cccacagcagcccugggaac

SEQ ID NO: 525545 - RNA, 24 nt, Human
cccacagcagcccugggaacccgg

SEQ ID NO: 525546 - RNA, 23 nt, Human
ccccgagccccagccagugacuc

SEQ ID NO: 525547 - RNA, 23 nt, Human
cccgggaggcuggagguguccuu

SEQ ID NO: 525548 - RNA, 18 nt, Human
ccgcccaggcuggagugc

SEQ ID NO: 525549 - RNA, 19 nt, Human
ccgcucccucuccccugcc

SEQ ID NO: 525550 - RNA, 20 nt, Human
ccguaacagggagaacaaca

SEQ ID NO: 525551 - RNA, 19 nt, Human
ccucagccucuggaguagc

SEQ ID NO: 525552 - RNA, 21 nt, Human
ccucagccucuggaguagcug

SEQ ID NO: 525553 - RNA, 26 nt, Human
ccucccaccucggccucccaaagugc

SEQ ID NO: 525554 - RNA, 23 nt, Human
ccuccugccucagccucuggagu

SEQ ID NO: 525555 - RNA, 24 nt, Human
ccucuccccugccugcuggcuccu

SEQ ID NO: 525556 - RNA, 23 nt, Human
ccugccaugaacagggaaaaggu

SEQ ID NO: 525557 - RNA, 24 nt, Human
ccugccucagccucuggaguagcu

SEQ ID NO: 525558 - RNA, 22 nt, Human
ccugccugcuggcuccucaccu

SEQ ID NO: 525559 - RNA, 23 nt, Human
ccugcuggcuccucaccuggagc

SEQ ID NO: 525560 - RNA, 19 nt, Human
ccuggagccccugcccugc

SEQ ID NO: 525561 - RNA, 21 nt, Human
cgcugcacucaacagacaaac

SEQ ID NO: 525562 - RNA, 21 nt, Human
cguuugguuuugggcaggugg

SEQ ID NO: 525563 - RNA, 23 nt, Human
cuaauuuuuguauuuuuuguaga

SEQ ID NO: 525564 - RNA, 24 nt, Human
cucaagcaauccuccugccucagc

SEQ ID NO: 525565 - RNA, 24 nt, Human
cucaagcgauccucccaccucggc

SEQ ID NO: 525566 - RNA, 20 nt, Human
cuccccugccugcuggcucc

SEQ ID NO: 525567 - RNA, 18 nt, Human
cuccugagcuuuacuccc

SEQ ID NO: 525568 - RNA, 23 nt, Human
cuccugggcucaagcgauccucc

SEQ ID NO: 525569 - RNA, 25 nt, Human
cuccugggcucaagcgauccuccca

SEQ ID NO: 525570 - RNA, 22 nt, Human
cugcagagccacagccuggggc

SEQ ID NO: 525571 - RNA, 21 nt, Human
cugcuggucagcaaggagacu

SEQ ID NO: 525572 - RNA, 18 nt, Human
cuggagccccugcccugc

SEQ ID NO: 525573 - RNA, 19 nt, Human
cuggagccccugcccugcc

SEQ ID NO: 525574 - RNA, 24 nt, Human
cuggaguagcugugacuacaggug

SEQ ID NO: 525575 - RNA, 20 nt, Human
cuguuuuuccuuuccagcag

SEQ ID NO: 525576 - RNA, 20 nt, Human
cuuaggggagagcuaggaga

SEQ ID NO: 525577 - RNA, 19 nt, Human
cuuguuuaucugaaauccc

SEQ ID NO: 525578 - RNA, 20 nt, Human
gaacccggaaggagacagug

SEQ ID NO: 525579 - RNA, 19 nt, Human
gaagacgugcacgccugcc

SEQ ID NO: 525580 - RNA, 18 nt, Human
gacaauggaggaacucgg

SEQ ID NO: 525581 - RNA, 19 nt, Human
gacaauggaggaacucgga

SEQ ID NO: 525582 - RNA, 20 nt, Human
gacagcuucagagaggaggu

SEQ ID NO: 525583 - RNA, 20 nt, Human
gacauaaucaagcagccacc

SEQ ID NO: 525584 - RNA, 26 nt, Human
gagccaggaucgggggcugaggagga

SEQ ID NO: 525585 - RNA, 19 nt, Human
gagggaagggggaugaggc

SEQ ID NO: 525586 - RNA, 22 nt, Human
gagguuucaccauguugcccag

SEQ ID NO: 525587 - RNA, 18 nt, Human
gauuacaggugugagcca

SEQ ID NO: 525588 - RNA, 21 nt, Human
gauuacaggugugagccacca

SEQ ID NO: 525589 - RNA, 22 nt, Human
gauuacaggugugagccaccac

SEQ ID NO: 525590 - RNA, 18 nt, Human
gcaacccugcccugcccu

SEQ ID NO: 525591 - RNA, 22 nt, Human
gcagggcaacaggggugaggaa

SEQ ID NO: 525592 - RNA, 26 nt, Human
gcaguagagggcugaaaggucuacac

SEQ ID NO: 525593 - RNA, 21 nt, Human
gcaguggcgcucacuuccucu

SEQ ID NO: 525594 - RNA, 19 nt, Human
gccacccuuagcuccuacu

SEQ ID NO: 525595 - RNA, 24 nt, Human
gcccaggcuggagugcaggggugu

SEQ ID NO: 525596 - RNA, 20 nt, Human
gccucagccucuggaguagc

SEQ ID NO: 525597 - RNA, 22 nt, Human
gcgcucacuuccucucccucag

SEQ ID NO: 525598 - RNA, 19 nt, Human
gcuggagugcaggggugua

SEQ ID NO: 525599 - RNA, 20 nt, Human
ggaggaacucggaggggggc

SEQ ID NO: 525600 - RNA, 18 nt, Human
ggaggaugggaagaugcu

SEQ ID NO: 525601 - RNA, 23 nt, Human
ggcagaggguacuucucauggcc

SEQ ID NO: 525602 - RNA, 26 nt, Human
ggcagauggggaggaaccaggagaga

SEQ ID NO: 525603 - RNA, 21 nt, Human
gggacaguugguacuggggaa

SEQ ID NO: 525604 - RNA, 22 nt, Human
gggaggcuggagguguccuucu

SEQ ID NO: 525605 - RNA, 18 nt, Human
ggggagagcuaggagagg

SEQ ID NO: 525606 - RNA, 22 nt, Human
gggggcugaggaggaagggaag

SEQ ID NO: 525607 - RNA, 20 nt, Human
ggugaugggcuccagcucag

SEQ ID NO: 525608 - RNA, 21 nt, Human
guagagaugagguuucaccau

SEQ ID NO: 525609 - RNA, 22 nt, Human
guagagaugagguuucaccaug

SEQ ID NO: 525610 - RNA, 19 nt, Human
guccccgagccccagccag

SEQ ID NO: 525611 - RNA, 24 nt, Human
guuucaccauguugcccaggcugg

SEQ ID NO: 525612 - RNA, 20 nt, Human
uaaacacaucccugcccuuc

SEQ ID NO: 525613 - RNA, 21 nt, Human
uaagccaauucccgccaccga

SEQ ID NO: 525614 - RNA, 22 nt, Human
uaauuuuuguauuuuuuguaga

SEQ ID NO: 525615 - RNA, 24 nt, Human
uaauuuuuguauuuuuuguagaga

SEQ ID NO: 525616 - RNA, 24 nt, Human
uacaggugugagccaccacgccca

SEQ ID NO: 525617 - RNA, 22 nt, Human
uacaggugugcgcuaccacacc

SEQ ID NO: 525618 - RNA, 24 nt, Human
uacaggugugcgcuaccacaccug

SEQ ID NO: 525619 - RNA, 22 nt, Human
uagagaugagguuucaccaugu

SEQ ID NO: 525620 - RNA, 23 nt, Human
uagcugggguccccgucuagggg

SEQ ID NO: 525621 - RNA, 18 nt, Human
uaggaagcacaggucugg

SEQ ID NO: 525622 - RNA, 25 nt, Human
uaucugaaaucccaguuuaaauagg

SEQ ID NO: 525623 - RNA, 20 nt, Human
ucaaacuccugggcucaagc

SEQ ID NO: 525624 - RNA, 25 nt, Human
ucacaagcaguggcgcucacuuccu

SEQ ID NO: 525625 - RNA, 21 nt, Human
ucaccauguugcccaggcugg

SEQ ID NO: 525626 - RNA, 24 nt, Human
ucacucugccgcccaggcuggagu

SEQ ID NO: 525627 - RNA, 23 nt, Human
ucacugcagccuugaacuccagg

SEQ ID NO: 525628 - RNA, 24 nt, Human
ucacugcagccuugaacuccaggg

SEQ ID NO: 525629 - RNA, 18 nt, Human
ucagccucuggaguagcu

SEQ ID NO: 525630 - RNA, 23 nt, Human
ucccaaagugcugggauuacagg

SEQ ID NO: 525631 - RNA, 18 nt, Human
ucccucaaggcccgggag

SEQ ID NO: 525632 - RNA, 21 nt, Human
uccugggcucaagcgauccuc

SEQ ID NO: 525633 - RNA, 19 nt, Human
ucggaggggggcggagaaa

SEQ ID NO: 525634 - RNA, 18 nt, Human
ucggccucccaaagugcu

SEQ ID NO: 525635 - RNA, 23 nt, Human
ucgggggcugaggaggaagggaa

SEQ ID NO: 525636 - RNA, 18 nt, Human
ucuagugccacccuuagc

SEQ ID NO: 525637 - RNA, 22 nt, Human
ucucacucugccgcccaggcug

SEQ ID NO: 525638 - RNA, 23 nt, Human
ucucacucugccgcccaggcugg

SEQ ID NO: 525639 - RNA, 24 nt, Human
ucucacucugccgcccaggcugga

SEQ ID NO: 525640 - RNA, 26 nt, Human
ucucacucugccgcccaggcuggagu

SEQ ID NO: 525641 - RNA, 27 nt, Human
ucucacucugccgcccaggcuggagug

SEQ ID NO: 525642 - RNA, 24 nt, Human
ucugccgcccaggcuggagugcag

SEQ ID NO: 525643 - RNA, 24 nt, Human
ucuggaguagcugugacuacaggu

SEQ ID NO: 525644 - RNA, 21 nt, Human
ucuggcaacccugcccugccc

SEQ ID NO: 525645 - RNA, 18 nt, Human
ucuuuuuuuuuuuuuuuu

SEQ ID NO: 525646 - RNA, 22 nt, Human
ugaaauuucccaggcuggucac

SEQ ID NO: 525647 - RNA, 24 nt, Human
ugaacuccagggcucaagcaaucc

SEQ ID NO: 525648 - RNA, 18 nt, Human
ugacauaaucaagcagcc

SEQ ID NO: 525649 - RNA, 18 nt, Human
ugacauaaucaagcagcc

SEQ ID NO: 525650 - RNA, 26 nt, Human
ugagaaacacaaggaugacuuaaaca

SEQ ID NO: 525651 - RNA, 18 nt, Human
ugagacagagucucacuc

SEQ ID NO: 525652 - RNA, 22 nt, Human
ugagacagagucucacucugcc

SEQ ID NO: 525653 - RNA, 22 nt, Human
ugagcagcguccccgagccccc

SEQ ID NO: 525654 - RNA, 23 nt, Human
ugaggaggaagggaagaaguccc

SEQ ID NO: 525655 - RNA, 18 nt, Human
ugaggccgaggaggagcc

SEQ ID NO: 525656 - RNA, 24 nt, Human
ugagguuucaccauguugcccagg

SEQ ID NO: 525657 - RNA, 19 nt, Human
ugaugugcccugggggcac

SEQ ID NO: 525658 - RNA, 18 nt, Human
ugcaggaugcaggaggga

SEQ ID NO: 525659 - RNA, 20 nt, Human
ugccagagagcucaggcagg

SEQ ID NO: 525660 - RNA, 24 nt, Human
ugcccaggcugguuucaaacuccu

SEQ ID NO: 525661 - RNA, 28 nt, Human
ugcccaggcugguuucaaacuccugggc

SEQ ID NO: 525662 - RNA, 19 nt, Human
ugcccgggccauggccugc

SEQ ID NO: 525663 - RNA, 26 nt, Human
ugcccgggccauggccugccaugaac

SEQ ID NO: 525664 - RNA, 25 nt, Human
ugcccugcccuccacagggacccua

SEQ ID NO: 525665 - RNA, 18 nt, Human
ugcccugggggcacagga

SEQ ID NO: 525666 - RNA, 21 nt, Human
ugcccugugugagacgugaga

SEQ ID NO: 525667 - RNA, 21 nt, Human
ugccguaacagggagaacaac

SEQ ID NO: 525668 - RNA, 20 nt, Human
ugccucagccucuggaguag

SEQ ID NO: 525669 - RNA, 21 nt, Human
ugccucagccucuggaguagc

SEQ ID NO: 525670 - RNA, 24 nt, Human
ugcugggauuacaggugugagcca

SEQ ID NO: 525671 - RNA, 25 nt, Human
uggagccccugcccugccucguuuc

SEQ ID NO: 525672 - RNA, 20 nt, Human
uggaggaacucggagggggg

SEQ ID NO: 525673 - RNA, 22 nt, Human
uggagggcgcccaggcaugggg

SEQ ID NO: 525674 - RNA, 21 nt, Human
uggagugcagggguguaauca

SEQ ID NO: 525675 - RNA, 23 nt, Human
ugggaggaugggaagaugcugcg

SEQ ID NO: 525676 - RNA, 22 nt, Human
ugggaggcaggaaggcagcagu

SEQ ID NO: 525677 - RNA, 18 nt, Human
ugggauuacaggugugag

SEQ ID NO: 525678 - RNA, 19 nt, Human
ugggauuacaggugugagc

SEQ ID NO: 525679 - RNA, 22 nt, Human
ugggauuacaggugugagccac

SEQ ID NO: 525680 - RNA, 23 nt, Human
ugggauuacaggugugagccacc

SEQ ID NO: 525681 - RNA, 24 nt, Human
ugggauuacaggugugagccacca

SEQ ID NO: 525682 - RNA, 25 nt, Human
uggggucagagcuggagaaguggcc

SEQ ID NO: 525683 - RNA, 19 nt, Human
uggugacuugucgcugcac

SEQ ID NO: 525684 - RNA, 24 nt, Human
uguagagaugagguuucaccaugu

SEQ ID NO: 525685 - RNA, 19 nt, Human
uguccuucuuuccucccuc

SEQ ID NO: 525686 - RNA, 20 nt, Human
uucaaacacaugagugcaag

SEQ ID NO: 525687 - RNA, 22 nt, Human
uucccacagcagcccugggaac

SEQ ID NO: 525688 - RNA, 21 nt, Human
uucuuccccguuccucucccu

SEQ ID NO: 525689 - RNA, 24 nt, Human
uuguagagaugagguuucaccaug

SEQ ID NO: 525690 - RNA, 24 nt, Human
uuucaccauguugcccaggcuggu

SEQ ID NO: 525691 - RNA, 25 nt, Human
uuucccaggcuggucacuagguguc

SEQ ID NO: 525692 - RNA, 24 nt, Human
uuuguagagaugagguuucaccau

SEQ ID NO: 525693 - RNA, 27 nt, Human
uuuuucuuuuuuuuuuuuuuuuugggg

SEQ ID NO: 525694 - RNA, 20 nt, Human
uuuuuguauuuuuuguagag

SEQ ID NO: 525695 - RNA, 23 nt, Human
uuuuuguauuuuuuguagagaug

SEQ ID NO: 525696 - RNA, 24 nt, Human
uuuuuuguagagaugagguuucac

SEQ ID NO: 525697 - RNA, 26 nt, Human
uuuuuuuuuuuugagacagagucuca

SEQ ID NO: 525698 - RNA, 23 nt, Human
uuuuuuuuuuuuuuuuucuuuuu

SEQ ID NO: 525699 - RNA, 21 nt, Human
aaaaaacacagauuucccaaa

SEQ ID NO: 525700 - RNA, 22 nt, Human
aaaaaacacagauuucccaaag

SEQ ID NO: 525701 - RNA, 21 nt, Human
aaaaauguauauucuguugau

SEQ ID NO: 525702 - RNA, 21 nt, Human
aaacacugcucucuucaaagc

SEQ ID NO: 525703 - RNA, 22 nt, Human
aaagcaaacaaacuacagauca

SEQ ID NO: 525704 - RNA, 20 nt, Human
aacuucaaugaaucugacaa

SEQ ID NO: 525705 - RNA, 20 nt, Human
aacuugguuccauucucccc

SEQ ID NO: 525706 - RNA, 19 nt, Human
aagcagccuucugauaguu

SEQ ID NO: 525707 - RNA, 21 nt, Human
aagcagccuucugauaguuga

SEQ ID NO: 525708 - RNA, 18 nt, Human
aaggggaaugaaaaaggg

SEQ ID NO: 525709 - RNA, 20 nt, Human
aagguggaaagccaaagccc

SEQ ID NO: 525710 - RNA, 21 nt, Human
aauggucaggucccuaguacc

SEQ ID NO: 525711 - RNA, 22 nt, Human
acaacagucacguaucucaaca

SEQ ID NO: 525712 - RNA, 20 nt, Human
accccugccuuuuuuuguuu

SEQ ID NO: 525713 - RNA, 24 nt, Human
accucaccuugccugagggcccag

SEQ ID NO: 525714 - RNA, 22 nt, Human
accuggugauucagcugagcua

SEQ ID NO: 525715 - RNA, 22 nt, Human
acgaaaaugcagaaaucaccca

SEQ ID NO: 525716 - RNA, 24 nt, Human
acucuaccuaaaagcaaacaaacc

SEQ ID NO: 525717 - RNA, 19 nt, Human
acuguggucugagagacag

SEQ ID NO: 525718 - RNA, 18 nt, Human
agaaagcuucaucacacu

SEQ ID NO: 525719 - RNA, 21 nt, Human
agacagggacauuuaagucug

SEQ ID NO: 525720 - RNA, 25 nt, Human
agacgaaaaugcagaaaucacccau

SEQ ID NO: 525721 - RNA, 25 nt, Human
agauaucuauuucuacaaaacaaaa

SEQ ID NO: 525722 - RNA, 18 nt, Human
agauuucccaaaguauaa

SEQ ID NO: 525723 - RNA, 19 nt, Human
aggauaguuagcucuucuu

SEQ ID NO: 525724 - RNA, 20 nt, Human
aggcugcucgggggucaggg

SEQ ID NO: 525725 - RNA, 23 nt, Human
aguaacaccaggaaagguaaagg

SEQ ID NO: 525726 - RNA, 20 nt, Human
auggucaggucccuaguacc

SEQ ID NO: 525727 - RNA, 22 nt, Human
auuucauucacuucaucuucca

SEQ ID NO: 525728 - RNA, 19 nt, Human
caaaaaaccagcuccugga

SEQ ID NO: 525729 - RNA, 21 nt, Human
caaaaaaccagcuccuggagg

SEQ ID NO: 525730 - RNA, 30 nt, Human
caaaaagacaacuggucaagugaauccuag

SEQ ID NO: 525731 - RNA, 23 nt, Human
caaaauuaccccacucacacacc

SEQ ID NO: 525732 - RNA, 24 nt, Human
caacucuaccuaaaagcaaacaaa

SEQ ID NO: 525733 - RNA, 22 nt, Human
caacuguaccuugcucagaagc

SEQ ID NO: 525734 - RNA, 22 nt, Human
caagaagcacaccuccacaaca

SEQ ID NO: 525735 - RNA, 18 nt, Human
cacgcugggagcuguaga

SEQ ID NO: 525736 - RNA, 23 nt, Human
cacucugccaaaaagacaacugg

SEQ ID NO: 525737 - RNA, 19 nt, Human
cacugcuuugaaugcaucc

SEQ ID NO: 525738 - RNA, 21 nt, Human
cacugcuuugaaugcauccca

SEQ ID NO: 525739 - RNA, 22 nt, Human
cacugucuugacuaacccaugu

SEQ ID NO: 525740 - RNA, 24 nt, Human
cacuugucuaauuuuaacacccca

SEQ ID NO: 525741 - RNA, 24 nt, Human
cagcuccuuuaagcacuucucugu

SEQ ID NO: 525742 - RNA, 19 nt, Human
cagcugcaggucuguugga

SEQ ID NO: 525743 - RNA, 21 nt, Human
caggcaucucucucauucuuu

SEQ ID NO: 525744 - RNA, 23 nt, Human
cagggacauuuaagucugcagag

SEQ ID NO: 525745 - RNA, 24 nt, Human
ccagagguggagccuccagaggca

SEQ ID NO: 525746 - RNA, 19 nt, Human
ccccagagguggagccucc

SEQ ID NO: 525747 - RNA, 23 nt, Human
cccccauaagcucuauaauaauu

SEQ ID NO: 525748 - RNA, 20 nt, Human
cccugcuggggggugccucc

SEQ ID NO: 525749 - RNA, 19 nt, Human
ccgagccaggugcgggaua

SEQ ID NO: 525750 - RNA, 21 nt, Human
ccuucugcuagcuuuugaaug

SEQ ID NO: 525751 - RNA, 19 nt, Human
cgaaaaugcagaaaucacc

SEQ ID NO: 525752 - RNA, 24 nt, Human
cgaggaguagcuuuguggcguucu

SEQ ID NO: 525753 - RNA, 23 nt, Human
cgcacccauugacuugcgcccac

SEQ ID NO: 525754 - RNA, 19 nt, Human
cggcaaaaaacacagauuu

SEQ ID NO: 525755 - RNA, 22 nt, Human
cgggcgccccuccccaagccuc

SEQ ID NO: 525756 - RNA, 21 nt, Human
cgugcugggagaaacacugcu

SEQ ID NO: 525757 - RNA, 20 nt, Human
cuaaaagcaaacaaacuaca

SEQ ID NO: 525758 - RNA, 23 nt, Human
cuaaaagcaaacaaacuacagau

SEQ ID NO: 525759 - RNA, 27 nt, Human
cuaaaagcaaacaaacuacagaucaua

SEQ ID NO: 525760 - RNA, 23 nt, Human
cuaaagguuugggagccaagacc

SEQ ID NO: 525761 - RNA, 22 nt, Human
cucaacaagguggaaagccaaa

SEQ ID NO: 525762 - RNA, 23 nt, Human
cuccagaggcaggcaggccuccu

SEQ ID NO: 525763 - RNA, 20 nt, Human
cucuacacacugcuuugaau

SEQ ID NO: 525764 - RNA, 18 nt, Human
cucuguuuuuuccccauc

SEQ ID NO: 525765 - RNA, 19 nt, Human
cugaauacagcacacugau

SEQ ID NO: 525766 - RNA, 21 nt, Human
cugccccugcuggggggugcc

SEQ ID NO: 525767 - RNA, 21 nt, Human
cugccccugcuggggggugcc

SEQ ID NO: 525768 - RNA, 24 nt, Human
cuguauugguuauucuaguuauac

SEQ ID NO: 525769 - RNA, 18 nt, Human
cuguucuuuuacauuugc

SEQ ID NO: 525770 - RNA, 20 nt, Human
cuguugauaugggguggaga

SEQ ID NO: 525771 - RNA, 18 nt, Human
gaaaaugcagaaaucacc

SEQ ID NO: 525772 - RNA, 20 nt, Human
gaaaaugcagaaaucaccca

SEQ ID NO: 525773 - RNA, 19 nt, Human
gaagaaauggucagguccc

SEQ ID NO: 525774 - RNA, 28 nt, Human
gaauaggugugguguggugacgaccucg

SEQ ID NO: 525775 - RNA, 18 nt, Human
gaaucugaauguuggccu

SEQ ID NO: 525776 - RNA, 19 nt, Human
gaaucugaauguuggccug

SEQ ID NO: 525777 - RNA, 24 nt, Human
gauucugguauguugugucuuugu

SEQ ID NO: 525778 - RNA, 25 nt, Human
gcaaacaaacuacagaucauauuaa

SEQ ID NO: 525779 - RNA, 22 nt, Human
gcacccauugacuugcgcccac

SEQ ID NO: 525780 - RNA, 23 nt, Human
gcagagaaagccuucagaccaca

SEQ ID NO: 525781 - RNA, 18 nt, Human
gccugggcaauggcgggc

SEQ ID NO: 525782 - RNA, 19 nt, Human
gcucuguuuuuuccccauc

SEQ ID NO: 525783 - RNA, 20 nt, Human
gcugaaauccaaaauuaccc

SEQ ID NO: 525784 - RNA, 22 nt, Human
gcuggcuuuucugcugaucuca

SEQ ID NO: 525785 - RNA, 24 nt, Human
gcuguggugggcuccacccaguug

SEQ ID NO: 525786 - RNA, 21 nt, Human
ggcuccuccccccauaagcuc

SEQ ID NO: 525787 - RNA, 20 nt, Human
guaaagaaagcuucaucaca

SEQ ID NO: 525788 - RNA, 20 nt, Human
gucauucaggagcagguugu

SEQ ID NO: 525789 - RNA, 20 nt, Human
gucuaauguugacagugggg

SEQ ID NO: 525790 - RNA, 26 nt, Human
gugaauccuacauuggaagaaauggu

SEQ ID NO: 525791 - RNA, 21 nt, Human
gugaugaauuauguuccuuug

SEQ ID NO: 525792 - RNA, 19 nt, Human
gugcugggagaaacacugc

SEQ ID NO: 525793 - RNA, 24 nt, Human
uaaauauauuuauucauaugugga

SEQ ID NO: 525794 - RNA, 22 nt, Human
uaacaccaggaaagguaaaggg

SEQ ID NO: 525795 - RNA, 23 nt, Human
uaacuuucugucucguugaucug

SEQ ID NO: 525796 - RNA, 19 nt, Human
uaauggccuucuuugucuc

SEQ ID NO: 525797 - RNA, 20 nt, Human
uacaaaacaaaacacuccca

SEQ ID NO: 525798 - RNA, 23 nt, Human
uacaaaacaaaacacucccaaau

SEQ ID NO: 525799 - RNA, 24 nt, Human
uacaaaacaaaacacucccaaauu

SEQ ID NO: 525800 - RNA, 22 nt, Human
uacauuggaagaaauggucagg

SEQ ID NO: 525801 - RNA, 23 nt, Human
uacauuggaagaaauggucaggu

SEQ ID NO: 525802 - RNA, 20 nt, Human
uagaggaacuagaaccucac

SEQ ID NO: 525803 - RNA, 19 nt, Human
uagcugaagaacaagcucu

SEQ ID NO: 525804 - RNA, 23 nt, Human
uagguaugauagaaacuaacacu

SEQ ID NO: 525805 - RNA, 24 nt, Human
uagugcuauaaauuucccucuaca

SEQ ID NO: 525806 - RNA, 20 nt, Human
uaguuacaaauauuaggaag

SEQ ID NO: 525807 - RNA, 23 nt, Human
uauccuugcuaacuuucuguccu

SEQ ID NO: 525808 - RNA, 19 nt, Human
uauguggauucucaacaug

SEQ ID NO: 525809 - RNA, 22 nt, Human
uauuccucuugcaaaagcagcc

SEQ ID NO: 525810 - RNA, 22 nt, Human
uauuccucuugcaaaagcagcc

SEQ ID NO: 525811 - RNA, 22 nt, Human
ucaagugaauccuacauuggaa

SEQ ID NO: 525812 - RNA, 19 nt, Human
ucaucuaucuguauuccuc

SEQ ID NO: 525813 - RNA, 22 nt, Human
ucauucaggagcagguuguuca

SEQ ID NO: 525814 - RNA, 24 nt, Human
ucauucaggagcagguuguucagu

SEQ ID NO: 525815 - RNA, 24 nt, Human
ucccagagauucugguauguugug

SEQ ID NO: 525816 - RNA, 21 nt, Human
uccccaucacuuucaguuaca

SEQ ID NO: 525817 - RNA, 18 nt, Human
uccgagccaggugcggga

SEQ ID NO: 525818 - RNA, 21 nt, Human
uccugcuuccucuugugggca

SEQ ID NO: 525819 - RNA, 20 nt, Human
uccuuuggaggaggagaggc

SEQ ID NO: 525820 - RNA, 22 nt, Human
ucgcaucggcuccugaggcuuc

SEQ ID NO: 525821 - RNA, 24 nt, Human
ucucagaucuccagcugcgugcug

SEQ ID NO: 525822 - RNA, 22 nt, Human
ucucgagccuuggucuucagcu

SEQ ID NO: 525823 - RNA, 26 nt, Human
ucucguugguuucaaagaacaucuuu

SEQ ID NO: 525824 - RNA, 19 nt, Human
ucucucaacuguaccuugc

SEQ ID NO: 525825 - RNA, 23 nt, Human
ucucuguauuucugaaucugaau

SEQ ID NO: 525826 - RNA, 22 nt, Human
ucugacaggacccucagcugca

SEQ ID NO: 525827 - RNA, 25 nt, Human
ucugagcaaggcucagcuggcuggc

SEQ ID NO: 525828 - RNA, 21 nt, Human
ucuuauaccaacugcaucuuc

SEQ ID NO: 525829 - RNA, 20 nt, Human
ucuucagcuccaucagcucc

SEQ ID NO: 525830 - RNA, 21 nt, Human
ucuucagcuccaucagcuccu

SEQ ID NO: 525831 - RNA, 18 nt, Human
ucuuggcuccucccccca

SEQ ID NO: 525832 - RNA, 21 nt, Human
ucuuugacuaggaaagggaac

SEQ ID NO: 525833 - RNA, 21 nt, Human
ucuuuguucucguugguuuca

SEQ ID NO: 525834 - RNA, 19 nt, Human
ugaaauccaaaauuacccc

SEQ ID NO: 525835 - RNA, 18 nt, Human
ugaaggguuuuuuguguc

SEQ ID NO: 525836 - RNA, 19 nt, Human
ugaaguaaauguguaaguc

SEQ ID NO: 525837 - RNA, 18 nt, Human
ugaauacagcacacugau

SEQ ID NO: 525838 - RNA, 22 nt, Human
ugacagugggguguuaaagucu

SEQ ID NO: 525839 - RNA, 20 nt, Human
ugacuugcgcccacugucug

SEQ ID NO: 525840 - RNA, 22 nt, Human
ugagacuccaugggcguaggac

SEQ ID NO: 525841 - RNA, 18 nt, Human
ugagaugaacccaguacc

SEQ ID NO: 525842 - RNA, 22 nt, Human
ugaggcaaugccucgcccugcu

SEQ ID NO: 525843 - RNA, 21 nt, Human
ugagugaguuucuucauccug

SEQ ID NO: 525844 - RNA, 20 nt, Human
ugaguuucuucauccugagu

SEQ ID NO: 525845 - RNA, 18 nt, Human
ugcccugcccccagaggu

SEQ ID NO: 525846 - RNA, 23 nt, Human
ugcccugcccccagagguggagc

SEQ ID NO: 525847 - RNA, 24 nt, Human
ugcucuguuuaccuaagcaagccu

SEQ ID NO: 525848 - RNA, 20 nt, Human
uggaaaaguaugaccuuagc

SEQ ID NO: 525849 - RNA, 18 nt, Human
uggagaacaaugcaggga

SEQ ID NO: 525850 - RNA, 22 nt, Human
uggcaugauuuugcagcggcug

SEQ ID NO: 525851 - RNA, 28 nt, Human
uggggcugaaauccaaaauuaccccacu

SEQ ID NO: 525852 - RNA, 19 nt, Human
ugguauguugugucuuugu

SEQ ID NO: 525853 - RNA, 24 nt, Human
ugguauguugugucuuuguucucg

SEQ ID NO: 525854 - RNA, 22 nt, Human
uggucuucagcuccaucagcuc

SEQ ID NO: 525855 - RNA, 20 nt, Human
ugguguggauguccuuucug

SEQ ID NO: 525856 - RNA, 19 nt, Human
uguggugggcuccacccag

SEQ ID NO: 525857 - RNA, 18 nt, Human
uguuuuccauuugcuucg

SEQ ID NO: 525858 - RNA, 26 nt, Human
uuacuuccaaguauguggucaauuuu

SEQ ID NO: 525859 - RNA, 19 nt, Human
uuaugugugaauuugaucc

SEQ ID NO: 525860 - RNA, 21 nt, Human
uucaaaaaaccagcuccugga

SEQ ID NO: 525861 - RNA, 24 nt, Human
uucaacuucaaugaaucugacaau

SEQ ID NO: 525862 - RNA, 19 nt, Human
uucacuucaucuuccaucg

SEQ ID NO: 525863 - RNA, 23 nt, Human
uucugaaucugaauguuggccug

SEQ ID NO: 525864 - RNA, 19 nt, Human
uucuucuaaacuuuucuca

SEQ ID NO: 525865 - RNA, 18 nt, Human
uugaaggaagaccaagaa

SEQ ID NO: 525866 - RNA, 24 nt, Human
uugcacuguggucugagagacagu

SEQ ID NO: 525867 - RNA, 18 nt, Human
uugcugaggagagcuuua

SEQ ID NO: 525868 - RNA, 20 nt, Human
uuggaggaggagaggcgcuc

SEQ ID NO: 525869 - RNA, 24 nt, Human
uugguguggauguccuuucuguuu

SEQ ID NO: 525870 - RNA, 18 nt, Human
uugugugugcccugcccc

SEQ ID NO: 525871 - RNA, 30 nt, Human
uuguugaauugaucccuuucccauuauguu

SEQ ID NO: 525872 - RNA, 23 nt, Human
uuuacaaucugagcaaggcucag

SEQ ID NO: 525873 - RNA, 21 nt, Human
uuuagcagauucaaaugacuc

SEQ ID NO: 525874 - RNA, 21 nt, Human
uuuccaguuuuucugcucugu

SEQ ID NO: 525875 - RNA, 24 nt, Human
uuugaucaucugaagccuucuucu

SEQ ID NO: 525876 - RNA, 19 nt, Human
uuuuccccaucuugguggu

SEQ ID NO: 525877 - RNA, 20 nt, Human
uuuuuuuucuuuauuagucu

SEQ ID NO: 525878 - RNA, 25 nt, Human
aaacauaaccugccaaaauauuuuc

SEQ ID NO: 525879 - RNA, 22 nt, Human
aagcuccacagacguuuaauaa

SEQ ID NO: 525880 - RNA, 20 nt, Human
aaguacaagaaaguuaacug

SEQ ID NO: 525881 - RNA, 20 nt, Human
aaugcagagggcggagggga

SEQ ID NO: 525882 - RNA, 18 nt, Human
acacgcccccgcgugcca

SEQ ID NO: 525883 - RNA, 18 nt, Human
agaaaaagaaguccccuc

SEQ ID NO: 525884 - RNA, 21 nt, Human
agacaagagcaaaaagaaucc

SEQ ID NO: 525885 - RNA, 22 nt, Human
agagcaaaaagaaucccauugg

SEQ ID NO: 525886 - RNA, 25 nt, Human
agagcacacgcccccgcgugccacu

SEQ ID NO: 525887 - RNA, 20 nt, Human
agagccccaagagacagcag

SEQ ID NO: 525888 - RNA, 24 nt, Human
agagggcggaggggagagagcccc

SEQ ID NO: 525889 - RNA, 19 nt, Human
agcaaaaaaguacaagaaa

SEQ ID NO: 525890 - RNA, 24 nt, Human
agccccagcuucugucucuuucug

SEQ ID NO: 525891 - RNA, 22 nt, Human
aggaugaagggagggguggagg

SEQ ID NO: 525892 - RNA, 26 nt, Human
agggagggggccuggcugggcugagu

SEQ ID NO: 525893 - RNA, 19 nt, Human
agggagggguggaggggcu

SEQ ID NO: 525894 - RNA, 30 nt, Human
aguuuaugucuuuuuuuuuuuuuuccuuuu

SEQ ID NO: 525895 - RNA, 19 nt, Human
aucaccuccaacauggacu

SEQ ID NO: 525896 - RNA, 23 nt, Human
auggggccgcugagugggguggg

SEQ ID NO: 525897 - RNA, 22 nt, Human
caaaaaaguacaagaaaguuaa

SEQ ID NO: 525898 - RNA, 21 nt, Human
caaaacuuaaagaaacaaaga

SEQ ID NO: 525899 - RNA, 20 nt, Human
caagacaagagcaaaaagaa

SEQ ID NO: 525900 - RNA, 22 nt, Human
caagacaagagcaaaaagaauc

SEQ ID NO: 525901 - RNA, 23 nt, Human
caagacaagagcaaaaagaaucc

SEQ ID NO: 525902 - RNA, 21 nt, Human
caagagcaaaaagaaucccau

SEQ ID NO: 525903 - RNA, 27 nt, Human
caagagcaaaaagaaucccauugguga

SEQ ID NO: 525904 - RNA, 24 nt, Human
caauaaguuaaaacuacaagaagc

SEQ ID NO: 525905 - RNA, 22 nt, Human
cacacgcccccgcgugccacuc

SEQ ID NO: 525906 - RNA, 20 nt, Human
cacccccgccccaguuggua

SEQ ID NO: 525907 - RNA, 22 nt, Human
cagacaccaaacguggggacac

SEQ ID NO: 525908 - RNA, 23 nt, Human
cagggagggggccuggcugggcu

SEQ ID NO: 525909 - RNA, 28 nt, Human
caguuuaugucuuuuuuuuuuuuuuccu

SEQ ID NO: 525910 - RNA, 26 nt, Human
cauagcaauaaguuaaaacuacaaga

SEQ ID NO: 525911 - RNA, 24 nt, Human
ccaagucccccucgccugggagcc

SEQ ID NO: 525912 - RNA, 21 nt, Human
ccaguugguaaacauaacccu

SEQ ID NO: 525913 - RNA, 19 nt, Human
ccccagggugggggacaaa

SEQ ID NO: 525914 - RNA, 21 nt, Human
ccccaguugguaaacauaacc

SEQ ID NO: 525915 - RNA, 22 nt, Human
cccccagggacguggaagcccc

SEQ ID NO: 525916 - RNA, 18 nt, Human
ccccccacccccgcccca

SEQ ID NO: 525917 - RNA, 27 nt, Human
ccccccacccccgccccaguugguaaa

SEQ ID NO: 525918 - RNA, 21 nt, Human
cccccugcggggaggggcugg

SEQ ID NO: 525919 - RNA, 22 nt, Human
cccccugcggggaggggcuggc

SEQ ID NO: 525920 - RNA, 23 nt, Human
ccccgcgugccacucggcuacca

SEQ ID NO: 525921 - RNA, 22 nt, Human
ccccgugggcugcuagccccua

SEQ ID NO: 525922 - RNA, 22 nt, Human
ccccuaagcccugcucccuggg

SEQ ID NO: 525923 - RNA, 21 nt, Human
ccccucgccugggagccccgg

SEQ ID NO: 525924 - RNA, 18 nt, Human
cccgcagagcacacgccc

SEQ ID NO: 525925 - RNA, 24 nt, Human
cccuaagcccugcucccugggccc

SEQ ID NO: 525926 - RNA, 25 nt, Human
cccuaagcccugcucccugggcccc

SEQ ID NO: 525927 - RNA, 20 nt, Human
cccugcucccugggcccccc

SEQ ID NO: 525928 - RNA, 23 nt, Human
cccugcucccugggcccccccca

SEQ ID NO: 525929 - RNA, 26 nt, Human
ccgugggcugcuagccccuaagcccu

SEQ ID NO: 525930 - RNA, 21 nt, Human
ccuccaacauggacucugucg

SEQ ID NO: 525931 - RNA, 23 nt, Human
ccuccaacauggacucugucgug

SEQ ID NO: 525932 - RNA, 22 nt, Human
ccugccccccagggacguggaa

SEQ ID NO: 525933 - RNA, 19 nt, Human
ccugcccugcugcagggga

SEQ ID NO: 525934 - RNA, 23 nt, Human
ccuggcccccugcggggaggggc

SEQ ID NO: 525935 - RNA, 21 nt, Human
ccuggccccugccccccaggg

SEQ ID NO: 525936 - RNA, 21 nt, Human
ccugggccccccccacccccg

SEQ ID NO: 525937 - RNA, 18 nt, Human
cggccuggcccccugcgg

SEQ ID NO: 525938 - RNA, 23 nt, Human
cguagccccagcuucugucucuu

SEQ ID NO: 525939 - RNA, 19 nt, Human
cgugggcugcuagccccua

SEQ ID NO: 525940 - RNA, 21 nt, Human
cucaagacaagagcaaaaaga

SEQ ID NO: 525941 - RNA, 18 nt, Human
cucccugggcccccccca

SEQ ID NO: 525942 - RNA, 24 nt, Human
cucucuggagccuggcccccccca

SEQ ID NO: 525943 - RNA, 22 nt, Human
cugcggggaggggcuggccucc

SEQ ID NO: 525944 - RNA, 21 nt, Human
cuggccguggggacugucccg

SEQ ID NO: 525945 - RNA, 18 nt, Human
cuggugccaguuuauguc

SEQ ID NO: 525946 - RNA, 24 nt, Human
cugucucuuucugucuaucccugu

SEQ ID NO: 525947 - RNA, 20 nt, Human
cuuuuuuuuuuuuuuuuugg

SEQ ID NO: 525948 - RNA, 25 nt, Human
cuuuuuuuuuuuuuuuuugucuuuu

SEQ ID NO: 525949 - RNA, 19 nt, Human
gagcacacgcccccgcgug

SEQ ID NO: 525950 - RNA, 19 nt, Human
gaggggcuggccuccaggg

SEQ ID NO: 525951 - RNA, 18 nt, Human
gagggggccuggcugggc

SEQ ID NO: 525952 - RNA, 20 nt, Human
gagggguggaggggcugagc

SEQ ID NO: 525953 - RNA, 21 nt, Human
gccccagcuucugucucuuuc

SEQ ID NO: 525954 - RNA, 21 nt, Human
gcucccugggccccccccacc

SEQ ID NO: 525955 - RNA, 25 nt, Human
gcuuuuuuuuccucuucuguuugug

SEQ ID NO: 525956 - RNA, 21 nt, Human
ggacaaacccagcccuuauug

SEQ ID NO: 525957 - RNA, 21 nt, Human
ggagggguggaggggcugagc

SEQ ID NO: 525958 - RNA, 21 nt, Human
ggcagggaggacuuaaaacca

SEQ ID NO: 525959 - RNA, 19 nt, Human
ggcuccggccuguggcuuc

SEQ ID NO: 525960 - RNA, 19 nt, Human
gggacugucccgcagagca

SEQ ID NO: 525961 - RNA, 23 nt, Human
gggagggggccuggcugggcuga

SEQ ID NO: 525962 - RNA, 24 nt, Human
gggagggggccuggcugggcugag

SEQ ID NO: 525963 - RNA, 21 nt, Human
gggccccccccacccccgccc

SEQ ID NO: 525964 - RNA, 24 nt, Human
gggugggggacaaacccagcccuu

SEQ ID NO: 525965 - RNA, 20 nt, Human
gggugggggagagagagcug

SEQ ID NO: 525966 - RNA, 23 nt, Human
gucuuuuuuuuuuuuuuccuuuu

SEQ ID NO: 525967 - RNA, 18 nt, Human
gugcgagggcucccaggg

SEQ ID NO: 525968 - RNA, 21 nt, Human
uacaagaagcuaaauucagca

SEQ ID NO: 525969 - RNA, 21 nt, Human
uagccccuaagcccugcuccc

SEQ ID NO: 525970 - RNA, 26 nt, Human
uaggcauaaccaugucucggcaagac

SEQ ID NO: 525971 - RNA, 24 nt, Human
uaucaagaacaagcuagggauuuc

SEQ ID NO: 525972 - RNA, 25 nt, Human
uccacagacguuuaauaacaacacc

SEQ ID NO: 525973 - RNA, 19 nt, Human
ucccaggggcuccggccug

SEQ ID NO: 525974 - RNA, 24 nt, Human
ucccccucgccugggagccccggc

SEQ ID NO: 525975 - RNA, 20 nt, Human
ucccugggccccccccaccc

SEQ ID NO: 525976 - RNA, 23 nt, Human
uccgaauaaauaacaggaugaag

SEQ ID NO: 525977 - RNA, 18 nt, Human
ucgcuguguccgucugcg

SEQ ID NO: 525978 - RNA, 20 nt, Human
ucuaucccuguccacguguc

SEQ ID NO: 525979 - RNA, 23 nt, Human
ucuuuuuuuuuuuuuuccuuuuu

SEQ ID NO: 525980 - RNA, 18 nt, Human
ucuuuuuuuuuuuuuuuu

SEQ ID NO: 525981 - RNA, 21 nt, Human
ugagcccccuccccccuggcc

SEQ ID NO: 525982 - RNA, 20 nt, Human
ugagugggguggggagcggu

SEQ ID NO: 525983 - RNA, 22 nt, Human
ugcggggaggggcuggccucca

SEQ ID NO: 525984 - RNA, 19 nt, Human
ugcucccugggcccccccc

SEQ ID NO: 525985 - RNA, 21 nt, Human
uggagccuggccccccccagg

SEQ ID NO: 525986 - RNA, 21 nt, Human
uggcaggggccuaggccucgg

SEQ ID NO: 525987 - RNA, 21 nt, Human
uggcugggcugaguuuugugu

SEQ ID NO: 525988 - RNA, 23 nt, Human
ugggccccccccacccccgcccc

SEQ ID NO: 525989 - RNA, 20 nt, Human
uggggcaugucgcugugucc

SEQ ID NO: 525990 - RNA, 26 nt, Human
uggggccgcugagugggguggggagc

SEQ ID NO: 525991 - RNA, 18 nt, Human
ugggggagagagagcugg

SEQ ID NO: 525992 - RNA, 22 nt, Human
ugggggggggguguguggggag

SEQ ID NO: 525993 - RNA, 25 nt, Human
ugggguggggagcggugcgagggcu

SEQ ID NO: 525994 - RNA, 23 nt, Human
ugucugaguuuggccaaccaguc

SEQ ID NO: 525995 - RNA, 20 nt, Human
uguguuuucuuuuuuuguug

SEQ ID NO: 525996 - RNA, 22 nt, Human
uguguuuuuuugucgcuuuuuu

SEQ ID NO: 525997 - RNA, 23 nt, Human
uguuuguguuuuuuugucgcuuu

SEQ ID NO: 525998 - RNA, 27 nt, Human
uguuuguguuuuuuugucgcuuuuuuc

SEQ ID NO: 525999 - RNA, 19 nt, Human
uuaaaacuacaagaagcua

SEQ ID NO: 526000 - RNA, 23 nt, Human
uuaaaacuacaagaagcuaaauu

SEQ ID NO: 526001 - RNA, 21 nt, Human
uuccuugcagcagaagcucca

SEQ ID NO: 526002 - RNA, 18 nt, Human
uucugucuaucccugucc

SEQ ID NO: 526003 - RNA, 23 nt, Human
uugcaaaccggaugaaguaacag

SEQ ID NO: 526004 - RNA, 20 nt, Human
uuggggguggcaggggccua

SEQ ID NO: 526005 - RNA, 19 nt, Human
uuuacaguuuuuuaucacc

SEQ ID NO: 526006 - RNA, 23 nt, Human
uuuguugcuuuuuuuuccucuuc

SEQ ID NO: 526007 - RNA, 20 nt, Human
uuuucuuuuuuuuuuuuugg

SEQ ID NO: 526008 - RNA, 24 nt, Human
uuuucuuuuuuuuuuuuugucuuu

SEQ ID NO: 526009 - RNA, 20 nt, Human
uuuuuuugucgcuuuuuuga

SEQ ID NO: 526010 - RNA, 26 nt, Human
uuuuuuuuuuuuuuuuuacaguuuuu

SEQ ID NO: 526011 - RNA, 22 nt, Human
uuuuuuuuuuuuuuuuuuacag

SEQ ID NO: 526012 - RNA, 21 nt, Human
aaccuagccgaggaguccucc

SEQ ID NO: 526013 - RNA, 19 nt, Human
acaccgcggggcggggcag

SEQ ID NO: 526014 - RNA, 24 nt, Human
acgcagcccugcgaggguccuccu

SEQ ID NO: 526015 - RNA, 21 nt, Human
acggcaagguguggguccucu

SEQ ID NO: 526016 - RNA, 19 nt, Human
agccagaguccagggugug

SEQ ID NO: 526017 - RNA, 18 nt, Human
aggacaccgcggggcggg

SEQ ID NO: 526018 - RNA, 19 nt, Human
agggcauggcgggacaggg

SEQ ID NO: 526019 - RNA, 18 nt, Human
agggugcgguggggcagg

SEQ ID NO: 526020 - RNA, 19 nt, Human
aggguguggcagggcagga

SEQ ID NO: 526021 - RNA, 22 nt, Human
agguccucuggaaccacagucc

SEQ ID NO: 526022 - RNA, 18 nt, Human
aggugccgcaguccagaa

SEQ ID NO: 526023 - RNA, 22 nt, Human
aguccagaacacugcagggcgg

SEQ ID NO: 526024 - RNA, 18 nt, Human
auccagggugccgcgggg

SEQ ID NO: 526025 - RNA, 22 nt, Human
cacggcaagguguggguccucu

SEQ ID NO: 526026 - RNA, 19 nt, Human
cagggugccgcggggcggg

SEQ ID NO: 526027 - RNA, 23 nt, Human
caguccaggacaccgcggggcgg

SEQ ID NO: 526028 - RNA, 20 nt, Human
caguccagggcacggcuggg

SEQ ID NO: 526029 - RNA, 23 nt, Human
caguccagggcgcugaggggcag

SEQ ID NO: 526030 - RNA, 21 nt, Human
ccacaguccagggcgcugagg

SEQ ID NO: 526031 - RNA, 20 nt, Human
ccagagcucagugaggcugg

SEQ ID NO: 526032 - RNA, 21 nt, Human
ccagggcgcugaggggcagga

SEQ ID NO: 526033 - RNA, 21 nt, Human
ccaggguguggcagggcagga

SEQ ID NO: 526034 - RNA, 19 nt, Human
ccagugcccggcggaucgg

SEQ ID NO: 526035 - RNA, 19 nt, Human
cccgugccauagucuaggg

SEQ ID NO: 526036 - RNA, 21 nt, Human
cgaggggcuggguccucuggu

SEQ ID NO: 526037 - RNA, 21 nt, Human
cggcguugcagguguccucca

SEQ ID NO: 526038 - RNA, 24 nt, Human
cgguagcacaaguugccccaggac

SEQ ID NO: 526039 - RNA, 21 nt, Human
cuccaguacaggaguccaugg

SEQ ID NO: 526040 - RNA, 22 nt, Human
cuguagugcaggacgcgguggc

SEQ ID NO: 526041 - RNA, 25 nt, Human
gagcagcaguccagggcgcgauggg

SEQ ID NO: 526042 - RNA, 23 nt, Human
gagccagaguccaggguguggaa

SEQ ID NO: 526043 - RNA, 24 nt, Human
gagccggggccaagguccucggga

SEQ ID NO: 526044 - RNA, 21 nt, Human
gaggcaggggugaggcuccuu

SEQ ID NO: 526045 - RNA, 24 nt, Human
gaguacacgaugcugcgggguccu

SEQ ID NO: 526046 - RNA, 22 nt, Human
gaguccuguggagcagcagucc

SEQ ID NO: 526047 - RNA, 21 nt, Human
gccacaguccagggcacggcu

SEQ ID NO: 526048 - RNA, 18 nt, Human
gcccugcgaggguccucc

SEQ ID NO: 526049 - RNA, 20 nt, Human
gccugagaccacggcagguc

SEQ ID NO: 526050 - RNA, 18 nt, Human
gcgcagcggggcgggggg

SEQ ID NO: 526051 - RNA, 24 nt, Human
gcguggaaggacugggguccugga

SEQ ID NO: 526052 - RNA, 18 nt, Human
ggaaggacugggguccug

SEQ ID NO: 526053 - RNA, 24 nt, Human
ggcaaugguccuccagugcuggag

SEQ ID NO: 526054 - RNA, 21 nt, Human
ggcgagucagagguucucccg

SEQ ID NO: 526055 - RNA, 21 nt, Human
ggcggggauccuccggugccu

SEQ ID NO: 526056 - RNA, 18 nt, Human
ggcguggaaggacugggg

SEQ ID NO: 526057 - RNA, 18 nt, Human
gggcgcgauggggcaugg

SEQ ID NO: 526058 - RNA, 18 nt, Human
gggucccucugugcagga

SEQ ID NO: 526059 - RNA, 21 nt, Human
gggugaggcuccuucaguagc

SEQ ID NO: 526060 - RNA, 18 nt, Human
ggugcugcugugccucag

SEQ ID NO: 526061 - RNA, 18 nt, Human
guaaggcaaugguccucc

SEQ ID NO: 526062 - RNA, 19 nt, Human
guccagggugcgguggggc

SEQ ID NO: 526063 - RNA, 20 nt, Human
guccaggguguggaagggug

SEQ ID NO: 526064 - RNA, 19 nt, Human
guccaggguguggcagggc

SEQ ID NO: 526065 - RNA, 20 nt, Human
gugcagguguccagggugug

SEQ ID NO: 526066 - RNA, 20 nt, Human
gugccauaguccagggugca

SEQ ID NO: 526067 - RNA, 19 nt, Human
uacacauaauguuuucagc

SEQ ID NO: 526068 - RNA, 20 nt, Human
uagcacaaguugccccagga

SEQ ID NO: 526069 - RNA, 18 nt, Human
uagccgaggaguccucca

SEQ ID NO: 526070 - RNA, 18 nt, Human
uaguccggggcacggcaa

SEQ ID NO: 526071 - RNA, 18 nt, Human
ucaggcgagggucuuggc

SEQ ID NO: 526072 - RNA, 21 nt, Human
ucagggcgagccggggccaag

SEQ ID NO: 526073 - RNA, 24 nt, Human
ucaguagcucaguccaggacgcag

SEQ ID NO: 526074 - RNA, 18 nt, Human
uccaacgcgcagcggggc

SEQ ID NO: 526075 - RNA, 20 nt, Human
uccucgggagccagagucca

SEQ ID NO: 526076 - RNA, 26 nt, Human
ucuagcgcacggcguugcaggugucc

SEQ ID NO: 526077 - RNA, 19 nt, Human
ugagaccacggcaggucgc

SEQ ID NO: 526078 - RNA, 20 nt, Human
ugagccgcgguagagguccu

SEQ ID NO: 526079 - RNA, 23 nt, Human
ugaggcaggggugaggcuccuuc

SEQ ID NO: 526080 - RNA, 19 nt, Human
ugcaggaguccaggacgug

SEQ ID NO: 526081 - RNA, 22 nt, Human
ugcagguguccaggguguggca

SEQ ID NO: 526082 - RNA, 18 nt, Human
ugcgaggggcuggguccu

SEQ ID NO: 526083 - RNA, 22 nt, Human
ugcgaggggcuggguccucugg

SEQ ID NO: 526084 - RNA, 24 nt, Human
ugcgaggggcuggguccucuggug

SEQ ID NO: 526085 - RNA, 18 nt, Human
ugcggggccggguucccc

SEQ ID NO: 526086 - RNA, 18 nt, Human
ugcuauauccagggugcc

SEQ ID NO: 526087 - RNA, 21 nt, Human
uggaaggguggggguucugca

SEQ ID NO: 526088 - RNA, 23 nt, Human
uggauucucaggugccgcagucc

SEQ ID NO: 526089 - RNA, 21 nt, Human
uggcaggggguccuccagugc

SEQ ID NO: 526090 - RNA, 19 nt, Human
uguccaggguguggcaggg

SEQ ID NO: 526091 - RNA, 27 nt, Human
ugugcaggaguacacgaugcugcgggg

SEQ ID NO: 526092 - RNA, 21 nt, Human
uguggagcagcaguccagggc

SEQ ID NO: 526093 - RNA, 19 nt, Human
uguucaggcgagggucuug

SEQ ID NO: 526094 - RNA, 20 nt, Human
uuccgugcuguaguccgggg

SEQ ID NO: 526095 - RNA, 22 nt, Human
uucuuugucuuguguaauugau

SEQ ID NO: 526096 - RNA, 24 nt, Human
aaaaaaaagaucaagaaaagagga

SEQ ID NO: 526097 - RNA, 24 nt, Human
aaaaaagaaaaaaauaauaaaaaa

SEQ ID NO: 526098 - RNA, 21 nt, Human
aaaaaagaagaaaagaaaaaa

SEQ ID NO: 526099 - RNA, 19 nt, Human
aaaaacuaccccauugaaa

SEQ ID NO: 526100 - RNA, 25 nt, Human
aaaaagaaaaaaauaauaaaaaaga

SEQ ID NO: 526101 - RNA, 25 nt, Human
aaaagaaaaaaauaauaaaaaagaa

SEQ ID NO: 526102 - RNA, 21 nt, Human
aaaagaagaaaagaaaaaaag

SEQ ID NO: 526103 - RNA, 19 nt, Human
aaaauccuugagcucuacc

SEQ ID NO: 526104 - RNA, 18 nt, Human
aaacaaaacaaaacccaa

SEQ ID NO: 526105 - RNA, 21 nt, Human
aaaugaaaacaaaacaaaacc

SEQ ID NO: 526106 - RNA, 18 nt, Human
aaccacggucagaacuuu

SEQ ID NO: 526107 - RNA, 25 nt, Human
aagaaaaaaauaauaaaaaagaaga

SEQ ID NO: 526108 - RNA, 19 nt, Human
aagaagaaaagaaaaaaag

SEQ ID NO: 526109 - RNA, 20 nt, Human
aagaagaaaagaaaaaaaga

SEQ ID NO: 526110 - RNA, 21 nt, Human
aagaagaaaagaaaaaaagac

SEQ ID NO: 526111 - RNA, 23 nt, Human
aaggaaaaugcaaaaaaaagauc

SEQ ID NO: 526112 - RNA, 18 nt, Human
aaggagacagacggagga

SEQ ID NO: 526113 - RNA, 20 nt, Human
aaggagacagacggaggagg

SEQ ID NO: 526114 - RNA, 23 nt, Human
aaugaaggaaaaugcaaaaaaaa

SEQ ID NO: 526115 - RNA, 23 nt, Human
acaaaaaaauuuacagcgcuaca

SEQ ID NO: 526116 - RNA, 23 nt, Human
acaaaacaaaacccaaaauccuu

SEQ ID NO: 526117 - RNA, 19 nt, Human
accagcagcggaccccgcc

SEQ ID NO: 526118 - RNA, 23 nt, Human
accccucccugcccacccuccca

SEQ ID NO: 526119 - RNA, 19 nt, Human
acggaggaggaggaggagg

SEQ ID NO: 526120 - RNA, 18 nt, Human
acuggggggugggguggg

SEQ ID NO: 526121 - RNA, 23 nt, Human
agaaaagaaaaaaagacuucugg

SEQ ID NO: 526122 - RNA, 27 nt, Human
agaaaagaggauaggaguggaagagaa

SEQ ID NO: 526123 - RNA, 20 nt, Human
agacagacggaggaggagga

SEQ ID NO: 526124 - RNA, 18 nt, Human
agacagucccaaauccac

SEQ ID NO: 526125 - RNA, 19 nt, Human
aggaggaggaggaagagga

SEQ ID NO: 526126 - RNA, 19 nt, Human
aggaggaggaggaagagga

SEQ ID NO: 526127 - RNA, 22 nt, Human
aggaggaggaggaggaagagga

SEQ ID NO: 526128 - RNA, 19 nt, Human
aggaggaggaggaggagga

SEQ ID NO: 526129 - RNA, 20 nt, Human
aggaggcggcggaagggaug

SEQ ID NO: 526130 - RNA, 21 nt, Human
aggaggcggcggaagggaugg

SEQ ID NO: 526131 - RNA, 18 nt, Human
aggauaggaguggaagag

SEQ ID NO: 526132 - RNA, 24 nt, Human
aggcaggaggucagaaaacacggg

SEQ ID NO: 526133 - RNA, 24 nt, Human
aggcggcggaagggauggggcgcg

SEQ ID NO: 526134 - RNA, 21 nt, Human
agggauggggcgcguuucucc

SEQ ID NO: 526135 - RNA, 19 nt, Human
agggucgggggggaaagga

SEQ ID NO: 526136 - RNA, 28 nt, Human
augcaaaaaaaagaucaagaaaagagga

SEQ ID NO: 526137 - RNA, 25 nt, Human
caaaaaaaagaucaagaaaagagga

SEQ ID NO: 526138 - RNA, 23 nt, Human
caaaacccaaaauccuugagcuc

SEQ ID NO: 526139 - RNA, 21 nt, Human
caaagcccaugaagaguccag

SEQ ID NO: 526140 - RNA, 20 nt, Human
cacagcucagcacccccucc

SEQ ID NO: 526141 - RNA, 25 nt, Human
cacagcucagcacccccucccaucc

SEQ ID NO: 526142 - RNA, 19 nt, Human
cacccccucccauccucgc

SEQ ID NO: 526143 - RNA, 24 nt, Human
cagacaccccuagggcaggggcac

SEQ ID NO: 526144 - RNA, 19 nt, Human
cagaggguggcgagccggu

SEQ ID NO: 526145 - RNA, 21 nt, Human
cagccccagccucugcuaaaa

SEQ ID NO: 526146 - RNA, 27 nt, Human
cagccccagccucugcuaaaacagcuu

SEQ ID NO: 526147 - RNA, 19 nt, Human
cagggaggaccgaccuggc

SEQ ID NO: 526148 - RNA, 19 nt, Human
caggugccgggacccccac

SEQ ID NO: 526149 - RNA, 20 nt, Human
cagucccaaauccacauccc

SEQ ID NO: 526150 - RNA, 18 nt, Human
caugaagaguccaggaaa

SEQ ID NO: 526151 - RNA, 22 nt, Human
caugccccugcacccaaacccc

SEQ ID NO: 526152 - RNA, 19 nt, Human
cauuaacuuucaacacaua

SEQ ID NO: 526153 - RNA, 22 nt, Human
cauuuuugacuuaaaaccugaa

SEQ ID NO: 526154 - RNA, 21 nt, Human
ccauggggaccucagccccag

SEQ ID NO: 526155 - RNA, 19 nt, Human
cccaaaauccuugagcucu

SEQ ID NO: 526156 - RNA, 21 nt, Human
ccccaaacucaggcaggaggu

SEQ ID NO: 526157 - RNA, 22 nt, Human
ccccacagcccgaccccccgag

SEQ ID NO: 526158 - RNA, 22 nt, Human
ccccagacagucccaaauccac

SEQ ID NO: 526159 - RNA, 23 nt, Human
cccccagacagucccaaauccac

SEQ ID NO: 526160 - RNA, 19 nt, Human
ccccgaagucugcacuggg

SEQ ID NO: 526161 - RNA, 22 nt, Human
ccccuuuuacuccuuuuuuuuc

SEQ ID NO: 526162 - RNA, 19 nt, Human
cccugcccacccucccaca

SEQ ID NO: 526163 - RNA, 23 nt, Human
cccugcccacccucccacaaaaa

SEQ ID NO: 526164 - RNA, 21 nt, Human
ccgaagucugcacuggggggu

SEQ ID NO: 526165 - RNA, 19 nt, Human
ccgccucggccgccgggcc

SEQ ID NO: 526166 - RNA, 21 nt, Human
ccuagggcaggggcacugaga

SEQ ID NO: 526167 - RNA, 22 nt, Human
ccucugggaccccucccugccc

SEQ ID NO: 526168 - RNA, 22 nt, Human
ccugcccacccucccacaaaaa

SEQ ID NO: 526169 - RNA, 22 nt, Human
ccugggcuggggugcgaggggc

SEQ ID NO: 526170 - RNA, 19 nt, Human
cgccaggugccgggacccc

SEQ ID NO: 526171 - RNA, 24 nt, Human
cgggacccccacagcccgaccccc

SEQ ID NO: 526172 - RNA, 27 nt, Human
cggucagaacuuuuuaaaaaaagaaaa

SEQ ID NO: 526173 - RNA, 20 nt, Human
cguuaaaaaacaaaacagaa

SEQ ID NO: 526174 - RNA, 22 nt, Human
cguuaaaaaacaaaacagaaca

SEQ ID NO: 526175 - RNA, 22 nt, Human
cuacacggaguugucgcccccu

SEQ ID NO: 526176 - RNA, 27 nt, Human
cucagccccagccucugcuaaaacagc

SEQ ID NO: 526177 - RNA, 19 nt, Human
cuccccagcacccagccau

SEQ ID NO: 526178 - RNA, 21 nt, Human
cucuacccucugggaccccuc

SEQ ID NO: 526179 - RNA, 21 nt, Human
cugcggccccuccccucaucu

SEQ ID NO: 526180 - RNA, 25 nt, Human
cugcggccccuccccucaucuguaa

SEQ ID NO: 526181 - RNA, 23 nt, Human
cuggagguuccacccucaaccag

SEQ ID NO: 526182 - RNA, 21 nt, Human
cuggcgcagaggugaaaggag

SEQ ID NO: 526183 - RNA, 23 nt, Human
cuuaaaaccugaauagggucggg

SEQ ID NO: 526184 - RNA, 20 nt, Human
gaaaggagacagacggagga

SEQ ID NO: 526185 - RNA, 20 nt, Human
gaaggaaaaugcaaaaaaaa

SEQ ID NO: 526186 - RNA, 23 nt, Human
gagaacaacggugggggacaggc

SEQ ID NO: 526187 - RNA, 20 nt, Human
gaggaagaggagggcaggag

SEQ ID NO: 526188 - RNA, 20 nt, Human
gaggaagaggagggcaggag

SEQ ID NO: 526189 - RNA, 19 nt, Human
gaggaggaggaggaagagg

SEQ ID NO: 526190 - RNA, 21 nt, Human
gaggcggcggaagggaugggg

SEQ ID NO: 526191 - RNA, 20 nt, Human
gagggcaggcugggggggua

SEQ ID NO: 526192 - RNA, 20 nt, Human
gagguuccacccucaaccag

SEQ ID NO: 526193 - RNA, 21 nt, Human
gaguugucgcccccugcccag

SEQ ID NO: 526194 - RNA, 18 nt, Human
gcagggaggaccgaccug

SEQ ID NO: 526195 - RNA, 19 nt, Human
gcggguaaugcuuucuugg

SEQ ID NO: 526196 - RNA, 19 nt, Human
ggaaagggugccaugcccc

SEQ ID NO: 526197 - RNA, 18 nt, Human
ggaagaggagggcaggag

SEQ ID NO: 526198 - RNA, 20 nt, Human
ggaagcaaagcccaugaaga

SEQ ID NO: 526199 - RNA, 19 nt, Human
ggaccccucccugcccacc

SEQ ID NO: 526200 - RNA, 21 nt, Human
ggaccucagccccagccucug

SEQ ID NO: 526201 - RNA, 19 nt, Human
ggagacagacggaggagga

SEQ ID NO: 526202 - RNA, 20 nt, Human
ggaggaaacagcacaguccg

SEQ ID NO: 526203 - RNA, 18 nt, Human
ggaggaggaggaagagga

SEQ ID NO: 526204 - RNA, 21 nt, Human
ggaggaggaggaagaggaggg

SEQ ID NO: 526205 - RNA, 21 nt, Human
ggaggaggaggaggaggagga

SEQ ID NO: 526206 - RNA, 20 nt, Human
ggaguugucgcccccugccc

SEQ ID NO: 526207 - RNA, 18 nt, Human
ggcagaggguggcgagcc

SEQ ID NO: 526208 - RNA, 19 nt, Human
ggcugggggaguggccgcc

SEQ ID NO: 526209 - RNA, 19 nt, Human
gggaaaaaaauccaaaaac

SEQ ID NO: 526210 - RNA, 20 nt, Human
gggcaggagugaagggugaa

SEQ ID NO: 526211 - RNA, 21 nt, Human
gggccacguucucuccggggc

SEQ ID NO: 526212 - RNA, 20 nt, Human
ggggaaaggaggcggcggaa

SEQ ID NO: 526213 - RNA, 18 nt, Human
ggggaagguuggcaggga

SEQ ID NO: 526214 - RNA, 23 nt, Human
ggggaagguuggcagggaggacc

SEQ ID NO: 526215 - RNA, 22 nt, Human
gggggaaaggaggcggcggaag

SEQ ID NO: 526216 - RNA, 18 nt, Human
ggggggugggguggguuc

SEQ ID NO: 526217 - RNA, 18 nt, Human
ggggugaggaagggucca

SEQ ID NO: 526218 - RNA, 19 nt, Human
ggggugggguggguucugc

SEQ ID NO: 526219 - RNA, 22 nt, Human
ggguggagaccccgaagucugc

SEQ ID NO: 526220 - RNA, 24 nt, Human
gugaguggggaaaaaaauccaaaa

SEQ ID NO: 526221 - RNA, 28 nt, Human
uaaaaaaagaaaaaaauaauaaaaaaga

SEQ ID NO: 526222 - RNA, 18 nt, Human
uaccccauugaaauggcc

SEQ ID NO: 526223 - RNA, 24 nt, Human
uagggucgggggggaaaggaggcg

SEQ ID NO: 526224 - RNA, 19 nt, Human
uaguuccccucucccuucc

SEQ ID NO: 526225 - RNA, 19 nt, Human
ucaacacauaaaggggggg

SEQ ID NO: 526226 - RNA, 23 nt, Human
ucagaaaauuaauagucuauaaa

SEQ ID NO: 526227 - RNA, 27 nt, Human
ucagaacuuuuuaaaaaaagaaaaaaa

SEQ ID NO: 526228 - RNA, 22 nt, Human
ucagccccagccucugcuaaaa

SEQ ID NO: 526229 - RNA, 23 nt, Human
uccagggcugggccacguucucu

SEQ ID NO: 526230 - RNA, 22 nt, Human
ucccacaaaaaaauuuacagcg

SEQ ID NO: 526231 - RNA, 22 nt, Human
uccccagcacccagccauucuc

SEQ ID NO: 526232 - RNA, 22 nt, Human
uccgccauccagagagacugcu

SEQ ID NO: 526233 - RNA, 20 nt, Human
uccuugagcucuacccucug

SEQ ID NO: 526234 - RNA, 21 nt, Human
ucggaguccccgccgcccugg

SEQ ID NO: 526235 - RNA, 18 nt, Human
ucuucaaaaaacaaaccc

SEQ ID NO: 526236 - RNA, 18 nt, Human
ugaaaacaaaacaaaacc

SEQ ID NO: 526237 - RNA, 22 nt, Human
ugaaaacaaaacaaaacccaaa

SEQ ID NO: 526238 - RNA, 23 nt, Human
ugaaaacaaaacaaaacccaaaa

SEQ ID NO: 526239 - RNA, 19 nt, Human
ugaaacucacgccaggugc

SEQ ID NO: 526240 - RNA, 18 nt, Human
ugaaauggccccaguagg

SEQ ID NO: 526241 - RNA, 21 nt, Human
ugaaggaaaaugcaaaaaaaa

SEQ ID NO: 526242 - RNA, 21 nt, Human
ugaaggagguaggaagcaaag

SEQ ID NO: 526243 - RNA, 24 nt, Human
ugaggaaggguccagacaucucca

SEQ ID NO: 526244 - RNA, 26 nt, Human
ugccaugccccugcacccaaaccccu

SEQ ID NO: 526245 - RNA, 26 nt, Human
uggaaaaaugaaaacaaaacaaaacc

SEQ ID NO: 526246 - RNA, 22 nt, Human
uggagacagacaccccuagggc

SEQ ID NO: 526247 - RNA, 24 nt, Human
uggagcuggggaagguuggcaggg

SEQ ID NO: 526248 - RNA, 23 nt, Human
uggcagggaggaccgaccuggcg

SEQ ID NO: 526249 - RNA, 21 nt, Human
uggggaagguuggcagggagg

SEQ ID NO: 526250 - RNA, 20 nt, Human
uguagguuuuuuuuuuuuuu

SEQ ID NO: 526251 - RNA, 20 nt, Human
uuaaaaaauaaaaagugagu

SEQ ID NO: 526252 - RNA, 26 nt, Human
uucuucaaaaaacaaacccgccccuu

SEQ ID NO: 526253 - RNA, 19 nt, Human
uugucgcccccugcccagg

SEQ ID NO: 526254 - RNA, 19 nt, Human
uuuauguuuucauacauga

SEQ ID NO: 526255 - RNA, 24 nt, Human
uuuuacuccuuuuuuuucuauuuu

SEQ ID NO: 526256 - RNA, 23 nt, Human
uuuuuuuuucuuuuuuuuuuggg

SEQ ID NO: 526257 - RNA, 21 nt, Human
aaaagauauuucuucagugcc

SEQ ID NO: 526258 - RNA, 21 nt, Human
aaaauaaguaaaucauuauca

SEQ ID NO: 526259 - RNA, 18 nt, Human
aaaaucccaaacagccaa

SEQ ID NO: 526260 - RNA, 26 nt, Human
aaagaaaaaagauauuucuucagugc

SEQ ID NO: 526261 - RNA, 19 nt, Human
aaagagcagcaugagacac

SEQ ID NO: 526262 - RNA, 20 nt, Human
aaaggcagcaauuaagcuuc

SEQ ID NO: 526263 - RNA, 22 nt, Human
aaauaaguaaaucauuaucaaa

SEQ ID NO: 526264 - RNA, 19 nt, Human
aacaaaaccccaggccacc

SEQ ID NO: 526265 - RNA, 21 nt, Human
aacagccaaccccuagugaac

SEQ ID NO: 526266 - RNA, 18 nt, Human
aaccccuagugaacacag

SEQ ID NO: 526267 - RNA, 28 nt, Human
acaaaaccccaggccaccaucgcaggac

SEQ ID NO: 526268 - RNA, 21 nt, Human
acagucaaagagcagcaugag

SEQ ID NO: 526269 - RNA, 22 nt, Human
acaucgcuaccacucaccaccc

SEQ ID NO: 526270 - RNA, 25 nt, Human
accacucaccacccaucaaagggca

SEQ ID NO: 526271 - RNA, 18 nt, Human
acuaaccuuuaccuccuc

SEQ ID NO: 526272 - RNA, 27 nt, Human
acuauaauaaauacuuuaaaauauguc

SEQ ID NO: 526273 - RNA, 23 nt, Human
acugcagcacagaugcaaaucug

SEQ ID NO: 526274 - RNA, 21 nt, Human
agcuaugaucucaccugagca

SEQ ID NO: 526275 - RNA, 22 nt, Human
aggaaacugaaauauucccuca

SEQ ID NO: 526276 - RNA, 21 nt, Human
aggaagauucugaccugcagg

SEQ ID NO: 526277 - RNA, 24 nt, Human
agugcaguuugcuuuagaaaaugc

SEQ ID NO: 526278 - RNA, 21 nt, Human
aucgcuaccacucaccaccca

SEQ ID NO: 526279 - RNA, 18 nt, Human
caaaaacacauuaaaggc

SEQ ID NO: 526280 - RNA, 23 nt, Human
caaagaaaaaagauauuucuuca

SEQ ID NO: 526281 - RNA, 22 nt, Human
caacagccuaggaagauucuga

SEQ ID NO: 526282 - RNA, 22 nt, Human
cacaaaauguagagauggccaa

SEQ ID NO: 526283 - RNA, 21 nt, Human
cacaagaauuaacacucagug

SEQ ID NO: 526284 - RNA, 23 nt, Human
cacaucgcuaccacucaccaccc

SEQ ID NO: 526285 - RNA, 22 nt, Human
caccacccaucaaagggcacca

SEQ ID NO: 526286 - RNA, 21 nt, Human
caccaucgcaggacucagagu

SEQ ID NO: 526287 - RNA, 21 nt, Human
cacugggccacaucgcuacca

SEQ ID NO: 526288 - RNA, 23 nt, Human
cacuuuccccuuucccuguaagc

SEQ ID NO: 526289 - RNA, 23 nt, Human
cagacacguuuaacuaaaauccc

SEQ ID NO: 526290 - RNA, 21 nt, Human
cagcaugagacacccagggga

SEQ ID NO: 526291 - RNA, 24 nt, Human
cagcgacaugaaagaaaauuuuaa

SEQ ID NO: 526292 - RNA, 23 nt, Human
caggaagaaagacuacugcagca

SEQ ID NO: 526293 - RNA, 24 nt, Human
cagucaaagagcagcaugagacac

SEQ ID NO: 526294 - RNA, 20 nt, Human
ccaggaagaaagacuacugc

SEQ ID NO: 526295 - RNA, 24 nt, Human
ccccaggccaccaucgcaggacuc

SEQ ID NO: 526296 - RNA, 21 nt, Human
cccucacuuccauggaaaaaa

SEQ ID NO: 526297 - RNA, 24 nt, Human
cugcauagaucaaugcaaucauau

SEQ ID NO: 526298 - RNA, 19 nt, Human
cuggaagccacgugacacu

SEQ ID NO: 526299 - RNA, 19 nt, Human
cugugcaaaugauuucuuu

SEQ ID NO: 526300 - RNA, 25 nt, Human
cuuccauggaaaaaaauguauuaua

SEQ ID NO: 526301 - RNA, 21 nt, Human
gaaagcucuuuuugugagcca

SEQ ID NO: 526302 - RNA, 19 nt, Human
gaauccgauuauaaaaauu

SEQ ID NO: 526303 - RNA, 21 nt, Human
gaguuuuuugguuuuuguuuu

SEQ ID NO: 526304 - RNA, 25 nt, Human
gcacagaugcaaaucuggaagccac

SEQ ID NO: 526305 - RNA, 24 nt, Human
gcagcacagaugcaaaucuggaag

SEQ ID NO: 526306 - RNA, 19 nt, Human
gccaaccccuagugaacac

SEQ ID NO: 526307 - RNA, 20 nt, Human
gcuggaaaacaggggcugug

SEQ ID NO: 526308 - RNA, 18 nt, Human
gcugugcaaaugauuucu

SEQ ID NO: 526309 - RNA, 23 nt, Human
ggaagccacgugacacucacuga

SEQ ID NO: 526310 - RNA, 23 nt, Human
uaaaaucccaaacagccaacccc

SEQ ID NO: 526311 - RNA, 23 nt, Human
uaauucucauuucucccuugggc

SEQ ID NO: 526312 - RNA, 18 nt, Human
uacacuagugcaguuugc

SEQ ID NO: 526313 - RNA, 21 nt, Human
uacagcuauugugguacuuua

SEQ ID NO: 526314 - RNA, 20 nt, Human
uaccuuggaagagcaacagc

SEQ ID NO: 526315 - RNA, 20 nt, Human
uagagauggccaacgcccuc

SEQ ID NO: 526316 - RNA, 21 nt, Human
uagagauggccaacgcccucc

SEQ ID NO: 526317 - RNA, 20 nt, Human
ucaaaaacacauuaaaggca

SEQ ID NO: 526318 - RNA, 20 nt, Human
ucaaugcaaucauaugaaag

SEQ ID NO: 526319 - RNA, 20 nt, Human
ucccuguaagcauuuaccua

SEQ ID NO: 526320 - RNA, 20 nt, Human
uccgcagcuauugagcccca

SEQ ID NO: 526321 - RNA, 22 nt, Human
uccgcagcuauugagccccagu

SEQ ID NO: 526322 - RNA, 24 nt, Human
uccgcagcuauugagccccagucc

SEQ ID NO: 526323 - RNA, 21 nt, Human
ucgucuauauggucugauuau

SEQ ID NO: 526324 - RNA, 21 nt, Human
ucugggccuacaacccagaaa

SEQ ID NO: 526325 - RNA, 24 nt, Human
ugaaacauucuauagcugcaguuc

SEQ ID NO: 526326 - RNA, 21 nt, Human
ugagaauauuuucuaccuuaa

SEQ ID NO: 526327 - RNA, 21 nt, Human
ugcauagaucaaugcaaucau

SEQ ID NO: 526328 - RNA, 21 nt, Human
ugcuuuagaaaaugcauguuc

SEQ ID NO: 526329 - RNA, 21 nt, Human
uggaagagcaacagccuagga

SEQ ID NO: 526330 - RNA, 22 nt, Human
uguauuaagaguguuuaaaaca

SEQ ID NO: 526331 - RNA, 25 nt, Human
uuuaagcuaugaucucaccugagca

SEQ ID NO: 526332 - RNA, 23 nt, Human
uuuuaaacauguuuaaggggaga

SEQ ID NO: 526333 - RNA, 18 nt, Human
uuuuuugguuuuuguuuu

SEQ ID NO: 526334 - RNA, 26 nt, Human
aaccaaacaccugacaggauucccca

SEQ ID NO: 526335 - RNA, 24 nt, Human
acaaaaguaucuaaaaauuauaca

SEQ ID NO: 526336 - RNA, 21 nt, Human
agcacccugagacacaaaaca

SEQ ID NO: 526337 - RNA, 23 nt, Human
cacuguuuaguaaaagugggaca

SEQ ID NO: 526338 - RNA, 33 nt, Human
cagaacuuccugacuggcugacauagcacauua

SEQ ID NO: 526339 - RNA, 22 nt, Human
cagcuaaacucaauauaaaauu

SEQ ID NO: 526340 - RNA, 25 nt, Human
caggaucacaggcgggguccgccgg

SEQ ID NO: 526341 - RNA, 21 nt, Human
ccacuguuuaguaaaaguggg

SEQ ID NO: 526342 - RNA, 20 nt, Human
ccagauaacuuuccacuguu

SEQ ID NO: 526343 - RNA, 18 nt, Human
ccuuaagagcaagaaaga

SEQ ID NO: 526344 - RNA, 21 nt, Human
gaaagaacaaaaguaucuaaa

SEQ ID NO: 526345 - RNA, 25 nt, Human
gcaagaaagaacaaaaguaucuaaa

SEQ ID NO: 526346 - RNA, 18 nt, Human
gcaagagugaauguagca

SEQ ID NO: 526347 - RNA, 23 nt, Human
gcugccacuguuuaggggagccc

SEQ ID NO: 526348 - RNA, 22 nt, Human
ggaaaguauacaaauaaaaaga

SEQ ID NO: 526349 - RNA, 19 nt, Human
ggcuggcuccccaguuacg

SEQ ID NO: 526350 - RNA, 22 nt, Human
uaacagguuuuuaaaauccuua

SEQ ID NO: 526351 - RNA, 26 nt, Human
uauaaccaaacaccugacaggauucc

SEQ ID NO: 526352 - RNA, 21 nt, Human
uauacuuuguagucuagauug

SEQ ID NO: 526353 - RNA, 24 nt, Human
uaucuaaaaauuauacacgacagg

SEQ ID NO: 526354 - RNA, 20 nt, Human
ugaauguagcacccugagac

SEQ ID NO: 526355 - RNA, 19 nt, Human
ugacaggauuccccauaug

SEQ ID NO: 526356 - RNA, 19 nt, Human
ugacauagcacauuaguga

SEQ ID NO: 526357 - RNA, 20 nt, Human
ugagaaaacagcuaaacuca

SEQ ID NO: 526358 - RNA, 21 nt, Human
ugagaaaacagcuaaacucag

SEQ ID NO: 526359 - RNA, 24 nt, Human
ugcuaaauuuugagaaaacagcua

SEQ ID NO: 526360 - RNA, 18 nt, Human
uggcuccccaguuacgcc

SEQ ID NO: 526361 - RNA, 18 nt, Human
ugugaacuagauuauaac

SEQ ID NO: 526362 - RNA, 25 nt, Human
uguuacuaaaaauauuccaaaagaa

SEQ ID NO: 526363 - RNA, 21 nt, Human
uuacaguauaccuaaggcaag

SEQ ID NO: 526364 - RNA, 18 nt, Human
uuccagauaacuuuccac

SEQ ID NO: 526365 - RNA, 24 nt, Human
uuccugacuggcugacauagcaca

SEQ ID NO: 526366 - RNA, 25 nt, Human
uuuaaaauauagaaaauacaguucc

SEQ ID NO: 526367 - RNA, 25 nt, Human
uuuuuuuuuuuugcacaaaugguau

SEQ ID NO: 526368 - RNA, 18 nt, Human
uuuuuuuuuuuuuuuuug

SEQ ID NO: 526369 - RNA, 23 nt, Human
uuuuuuuuuuuuuuuuugcacaa

SEQ ID NO: 526370 - RNA, 20 nt, Human
aaguuacagggaagggcuga

SEQ ID NO: 526371 - RNA, 23 nt, Human
acgggcugcacaaggaccugggc

SEQ ID NO: 526372 - RNA, 24 nt, Human
aucggccccacagcccccaauggc

SEQ ID NO: 526373 - RNA, 21 nt, Human
cagcccccaauggccuugucc

SEQ ID NO: 526374 - RNA, 18 nt, Human
cccacagcccccaauggc

SEQ ID NO: 526375 - RNA, 21 nt, Human
cccccaauggccuuguccugc

SEQ ID NO: 526376 - RNA, 21 nt, Human
ccugccaggacaccugcccca

SEQ ID NO: 526377 - RNA, 24 nt, Human
cugcacaaggaccugggccuguua

SEQ ID NO: 526378 - RNA, 23 nt, Human
gagggcuggggccuugucuucuc

SEQ ID NO: 526379 - RNA, 23 nt, Human
gccccacagcccccaauggccuu

SEQ ID NO: 526380 - RNA, 20 nt, Human
gcuggggccuugucuucucc

SEQ ID NO: 526381 - RNA, 20 nt, Human
ggagcaaggacucugagugc

SEQ ID NO: 526382 - RNA, 24 nt, Human
ggccuuguccugcuggucucaggu

SEQ ID NO: 526383 - RNA, 22 nt, Human
gggaagggcugagaucaggggu

SEQ ID NO: 526384 - RNA, 22 nt, Human
ggugugaggcucccagaggagg

SEQ ID NO: 526385 - RNA, 18 nt, Human
uccaccucaucggcccca

SEQ ID NO: 526386 - RNA, 19 nt, Human
ucccagaggagggcugggg

SEQ ID NO: 526387 - RNA, 24 nt, Human
ucccuggcuggccuggcccaggac

SEQ ID NO: 526388 - RNA, 18 nt, Human
ucuccugucccccugcca

SEQ ID NO: 526389 - RNA, 23 nt, Human
ugaggcucccagaggagggcugg

SEQ ID NO: 526390 - RNA, 24 nt, Human
ugaggcucccagaggagggcuggg

SEQ ID NO: 526391 - RNA, 19 nt, Human
ugccagggaccauggcaug

SEQ ID NO: 526392 - RNA, 23 nt, Human
ugugaggcucccagaggagggcu

SEQ ID NO: 526393 - RNA, 21 nt, Human
ugugggaaguuacagggaagg

SEQ ID NO: 526394 - RNA, 19 nt, Human
aaaaaaaaaacaccccaaa

SEQ ID NO: 526395 - RNA, 24 nt, Human
aaaaaaaaaacaccccaaaaaaga

SEQ ID NO: 526396 - RNA, 20 nt, Human
aaaaaagaaaacacaaaaaa

SEQ ID NO: 526397 - RNA, 19 nt, Human
aaaaaccccaaacaaccaa

SEQ ID NO: 526398 - RNA, 23 nt, Human
aaaaaccccaaacaaccaaacaa

SEQ ID NO: 526399 - RNA, 25 nt, Human
aaaaagaaaacacaaaaaaccccaa

SEQ ID NO: 526400 - RNA, 23 nt, Human
aaaacaccccaaaaaagaaaaca

SEQ ID NO: 526401 - RNA, 23 nt, Human
aaaagaaaacacaaaaaacccca

SEQ ID NO: 526402 - RNA, 24 nt, Human
aaaagaaaacacaaaaaaccccaa

SEQ ID NO: 526403 - RNA, 23 nt, Human
aaacacaaaaaaccccaaacaac

SEQ ID NO: 526404 - RNA, 23 nt, Human
aaacaccccaaaaaagaaaacac

SEQ ID NO: 526405 - RNA, 23 nt, Human
aaaccccaaacaaccaaacaaaa

SEQ ID NO: 526406 - RNA, 24 nt, Human
aaaccccaaacaaccaaacaaaaa

SEQ ID NO: 526407 - RNA, 23 nt, Human
aaagaaaacacaaaaaaccccaa

SEQ ID NO: 526408 - RNA, 18 nt, Human
aagaaaacacaaaaaacc

SEQ ID NO: 526409 - RNA, 19 nt, Human
aaggagagaccccguggac

SEQ ID NO: 526410 - RNA, 20 nt, Human
acaaaaaaccccaaacaacc

SEQ ID NO: 526411 - RNA, 24 nt, Human
acaaaaaaccccaaacaaccaaac

SEQ ID NO: 526412 - RNA, 25 nt, Human
acaaaaaaccccaaacaaccaaaca

SEQ ID NO: 526413 - RNA, 23 nt, Human
acacaaaaaaccccaaacaacca

SEQ ID NO: 526414 - RNA, 21 nt, Human
accccaaaaaagaaaacaaua

SEQ ID NO: 526415 - RNA, 25 nt, Human
agccagagguuggggggaggcaggu

SEQ ID NO: 526416 - RNA, 22 nt, Human
aggagagaccccguggacagaa

SEQ ID NO: 526417 - RNA, 23 nt, Human
agggggccucucugggagcuggg

SEQ ID NO: 526418 - RNA, 18 nt, Human
aggggugccugggguggg

SEQ ID NO: 526419 - RNA, 24 nt, Human
augcagaggcuguggcccccagga

SEQ ID NO: 526420 - RNA, 19 nt, Human
caaaaaaccccaaacaacc

SEQ ID NO: 526421 - RNA, 26 nt, Human
caaaaaaccccaaacaaccaaacaaa

SEQ ID NO: 526422 - RNA, 24 nt, Human
caaacaaccaaacaaaaaagcuuu

SEQ ID NO: 526423 - RNA, 23 nt, Human
caacacgacccuccucaaauauc

SEQ ID NO: 526424 - RNA, 25 nt, Human
caaccccggccccuguccguggccu

SEQ ID NO: 526425 - RNA, 22 nt, Human
caaguccggucgcccccacugg

SEQ ID NO: 526426 - RNA, 18 nt, Human
cacccaccucagcagggu

SEQ ID NO: 526427 - RNA, 23 nt, Human
caccccaaaaaagaaaacacaaa

SEQ ID NO: 526428 - RNA, 25 nt, Human
caccccccaaguccggucgccccca

SEQ ID NO: 526429 - RNA, 19 nt, Human
cacuggcuaggacgacagc

SEQ ID NO: 526430 - RNA, 21 nt, Human
cagagcgucuauuuucggggu

SEQ ID NO: 526431 - RNA, 20 nt, Human
cagagguuggggggaggcag

SEQ ID NO: 526432 - RNA, 22 nt, Human
cagcuccuugguggccaugcgg

SEQ ID NO: 526433 - RNA, 20 nt, Human
caugcagaggcuguggcccc

SEQ ID NO: 526434 - RNA, 21 nt, Human
ccaaacaaccaaacaaaaaag

SEQ ID NO: 526435 - RNA, 22 nt, Human
ccaaacaaccaaacaaaaaagc

SEQ ID NO: 526436 - RNA, 18 nt, Human
ccaggacgggcggguagu

SEQ ID NO: 526437 - RNA, 26 nt, Human
cccaaacaaccaaacaaaaggaguuc

SEQ ID NO: 526438 - RNA, 25 nt, Human
cccaaccccggccccuguccguggc

SEQ ID NO: 526439 - RNA, 22 nt, Human
cccagagggcuccaccccccaa

SEQ ID NO: 526440 - RNA, 25 nt, Human
ccccaaacaaccaaacaaaaaagcu

SEQ ID NO: 526441 - RNA, 20 nt, Human
ccccaaccccggccccuguc

SEQ ID NO: 526442 - RNA, 23 nt, Human
ccccaaccccggccccuguccgu

SEQ ID NO: 526443 - RNA, 24 nt, Human
cccggccccuguccgucggggccg

SEQ ID NO: 526444 - RNA, 23 nt, Human
ccggccccuguccguggccugug

SEQ ID NO: 526445 - RNA, 21 nt, Human
ccucagggggccucucuggga

SEQ ID NO: 526446 - RNA, 19 nt, Human
ccuggcaucuggcgacaua

SEQ ID NO: 526447 - RNA, 19 nt, Human
ccugggguggggagagggg

SEQ ID NO: 526448 - RNA, 20 nt, Human
cggcucugggcccaugcaga

SEQ ID NO: 526449 - RNA, 18 nt, Human
cuccccaaccccggcccc

SEQ ID NO: 526450 - RNA, 20 nt, Human
cucugggagcuggggagggg

SEQ ID NO: 526451 - RNA, 19 nt, Human
cuggcgacauagucucccc

SEQ ID NO: 526452 - RNA, 21 nt, Human
cugggcccaugcagaggcugu

SEQ ID NO: 526453 - RNA, 21 nt, Human
cuggggagggcggggcugggc

SEQ ID NO: 526454 - RNA, 21 nt, Human
cuggggagggcggggcugggc

SEQ ID NO: 526455 - RNA, 24 nt, Human
gaggcaggucccagucccccaagg

SEQ ID NO: 526456 - RNA, 23 nt, Human
gauuggggggugccggaugggga

SEQ ID NO: 526457 - RNA, 23 nt, Human
gcaggucccagucccccuggauu

SEQ ID NO: 526458 - RNA, 28 nt, Human
gcaguuaaaaaaaaaacaccccaaaaaa

SEQ ID NO: 526459 - RNA, 22 nt, Human
gcgacauagucuccccaacccc

SEQ ID NO: 526460 - RNA, 19 nt, Human
gcggagcuaggaacgaggg

SEQ ID NO: 526461 - RNA, 18 nt, Human
gcucggucaacaccgggc

SEQ ID NO: 526462 - RNA, 22 nt, Human
gcugggggggucccggcucugg

SEQ ID NO: 526463 - RNA, 19 nt, Human
ggccccugucacccaccuc

SEQ ID NO: 526464 - RNA, 20 nt, Human
gggagggcggggcugggcug

SEQ ID NO: 526465 - RNA, 19 nt, Human
gggcggggcugggcugggg

SEQ ID NO: 526466 - RNA, 21 nt, Human
gggcugggggggucccggcuc

SEQ ID NO: 526467 - RNA, 19 nt, Human
ggggagggcggggcugggc

SEQ ID NO: 526468 - RNA, 22 nt, Human
ggggagggcggggcugggcugg

SEQ ID NO: 526469 - RNA, 19 nt, Human
gggguggggagaggggcgg

SEQ ID NO: 526470 - RNA, 18 nt, Human
gggucccggcucugggcc

SEQ ID NO: 526471 - RNA, 19 nt, Human
gguuuuauugcgagggggu

SEQ ID NO: 526472 - RNA, 20 nt, Human
guggggggccccugucaccc

SEQ ID NO: 526473 - RNA, 21 nt, Human
guggggggccccugucaccca

SEQ ID NO: 526474 - RNA, 24 nt, Human
guucuaaggcccuggagguggggg

SEQ ID NO: 526475 - RNA, 19 nt, Human
uaaaaaaaaaacaccccaa

SEQ ID NO: 526476 - RNA, 25 nt, Human
uaaaaaaaaaacaccccaaaaaaga

SEQ ID NO: 526477 - RNA, 20 nt, Human
uagcauugcauaugcaaacg

SEQ ID NO: 526478 - RNA, 23 nt, Human
uagggaggaggaaggagagaccc

SEQ ID NO: 526479 - RNA, 18 nt, Human
ucagugcagcagagcguc

SEQ ID NO: 526480 - RNA, 26 nt, Human
ucagugcagcagagcgucuauuuucg

SEQ ID NO: 526481 - RNA, 18 nt, Human
ucccugagcuagggagga

SEQ ID NO: 526482 - RNA, 19 nt, Human
ucccugagcuagggaggag

SEQ ID NO: 526483 - RNA, 20 nt, Human
ucuaaggcccuggagguggg

SEQ ID NO: 526484 - RNA, 23 nt, Human
ucuaaggcccuggaggugggggg

SEQ ID NO: 526485 - RNA, 18 nt, Human
ucuauauacaguauguga

SEQ ID NO: 526486 - RNA, 21 nt, Human
ucuggcgacauagucucccca

SEQ ID NO: 526487 - RNA, 22 nt, Human
ugccugggguggggagaggggc

SEQ ID NO: 526488 - RNA, 22 nt, Human
ugccugggguggggagaggggc

SEQ ID NO: 526489 - RNA, 18 nt, Human
ugcgggagggacaggcgu

SEQ ID NO: 526490 - RNA, 26 nt, Human
uggcaacacuuuaucacgaccuuaau

SEQ ID NO: 526491 - RNA, 20 nt, Human
ugggagcuggggaggggugu

SEQ ID NO: 526492 - RNA, 20 nt, Human
ugggcugggggggucccggc

SEQ ID NO: 526493 - RNA, 22 nt, Human
uggggaggggugucccuggccu

SEQ ID NO: 526494 - RNA, 20 nt, Human
ugggguggggagaggggcgg

SEQ ID NO: 526495 - RNA, 21 nt, Human
ugggguggggagaggggcggu

SEQ ID NO: 526496 - RNA, 23 nt, Human
ugggguggggagaggggcggugg

SEQ ID NO: 526497 - RNA, 24 nt, Human
uguaccaggcaguuaaaaaaaaaa

SEQ ID NO: 526498 - RNA, 20 nt, Human
uuggggggugccggaugggg

SEQ ID NO: 526499 - RNA, 18 nt, Human
uuuuguuuguuuguuucc

SEQ ID NO: 526500 - RNA, 18 nt, Human
uuuuuuuuguaccaggca

SEQ ID NO: 526501 - RNA, 20 nt, Human
uuuuuuuuuuuuuuuucucu

SEQ ID NO: 526502 - RNA, 24 nt, Human
uuuuuuuuuuuuuuuucucuuuuu

SEQ ID NO: 526503 - RNA, 23 nt, Human
aaaaggcagaacugcuccaaaug

SEQ ID NO: 526504 - RNA, 19 nt, Human
aaagugcuaggauuacagg

SEQ ID NO: 526505 - RNA, 24 nt, Human
aaagugcuaggauuacaggcguga

SEQ ID NO: 526506 - RNA, 20 nt, Human
aacccacuagacguccccuu

SEQ ID NO: 526507 - RNA, 21 nt, Human
aacugcuccaaaugcacaaaa

SEQ ID NO: 526508 - RNA, 26 nt, Human
aagugcuaggauuacaggcgugagcc

SEQ ID NO: 526509 - RNA, 19 nt, Human
acaggcgccugccaccacg

SEQ ID NO: 526510 - RNA, 23 nt, Human
accagaaugaaaaggcagaacug

SEQ ID NO: 526511 - RNA, 18 nt, Human
accccgcccggccauguu

SEQ ID NO: 526512 - RNA, 25 nt, Human
acccgccucagccucccaaagugcu

SEQ ID NO: 526513 - RNA, 19 nt, Human
accgcucccgccaccccuc

SEQ ID NO: 526514 - RNA, 22 nt, Human
accgcucccgccaccccucccg

SEQ ID NO: 526515 - RNA, 24 nt, Human
accuugugaucuacccgccucagc

SEQ ID NO: 526516 - RNA, 18 nt, Human
acgggguuucaccauguu

SEQ ID NO: 526517 - RNA, 19 nt, Human
acgggguuucaccauguua

SEQ ID NO: 526518 - RNA, 20 nt, Human
acgggguuucaccauguuag

SEQ ID NO: 526519 - RNA, 24 nt, Human
acgggguuucaccauguuagccag

SEQ ID NO: 526520 - RNA, 25 nt, Human
acucuguugcccaggcuggagugca

SEQ ID NO: 526521 - RNA, 18 nt, Human
aggcuggagugcaguggc

SEQ ID NO: 526522 - RNA, 18 nt, Human
aguagcugggacuacagg

SEQ ID NO: 526523 - RNA, 19 nt, Human
aguagcugggacuacaggc

SEQ ID NO: 526524 - RNA, 23 nt, Human
agugcaguggcgcaauccaccuc

SEQ ID NO: 526525 - RNA, 20 nt, Human
aguggcgcaauccaccuccu

SEQ ID NO: 526526 - RNA, 22 nt, Human
auuaaucuaaguaauucugggg

SEQ ID NO: 526527 - RNA, 24 nt, Human
caaagugcuaggauuacaggcgug

SEQ ID NO: 526528 - RNA, 24 nt, Human
caaauaauuaauuauaccagaaug

SEQ ID NO: 526529 - RNA, 20 nt, Human
cacaaaacuuagcuagcacu

SEQ ID NO: 526530 - RNA, 18 nt, Human
caccauguuagccaggau

SEQ ID NO: 526531 - RNA, 22 nt, Human
caccauguuagccaggaugguc

SEQ ID NO: 526532 - RNA, 19 nt, Human
caccccucccgggcaacca

SEQ ID NO: 526533 - RNA, 24 nt, Human
cacucuguugcccaggcuggagug

SEQ ID NO: 526534 - RNA, 20 nt, Human
caggaccgcucccgccaccc

SEQ ID NO: 526535 - RNA, 22 nt, Human
caggaugguccugaucuccuga

SEQ ID NO: 526536 - RNA, 21 nt, Human
caggcgccugccaccacgccu

SEQ ID NO: 526537 - RNA, 23 nt, Human
caggcgccugccaccacgccugg

SEQ ID NO: 526538 - RNA, 22 nt, Human
ccaaagugcuaggauuacaggc

SEQ ID NO: 526539 - RNA, 24 nt, Human
ccaaagugcuaggauuacaggcgu

SEQ ID NO: 526540 - RNA, 20 nt, Human
ccaccacgccuggcuaauuu

SEQ ID NO: 526541 - RNA, 22 nt, Human
ccaggucucuccaccgcgaagg

SEQ ID NO: 526542 - RNA, 23 nt, Human
cccgaguagcugggacuacaggc

SEQ ID NO: 526543 - RNA, 24 nt, Human
cccgaguagcugggacuacaggcg

SEQ ID NO: 526544 - RNA, 18 nt, Human
cccucccgggcaacccac

SEQ ID NO: 526545 - RNA, 24 nt, Human
ccgccucagccucccaaagugcua

SEQ ID NO: 526546 - RNA, 20 nt, Human
cgcaauccaccuccuggguu

SEQ ID NO: 526547 - RNA, 24 nt, Human
cgcacgcgcacugccgagcuuccg

SEQ ID NO: 526548 - RNA, 24 nt, Human
cgccucagccucccaaagugcuag

SEQ ID NO: 526549 - RNA, 23 nt, Human
cgcucccgccaccccucccgggc

SEQ ID NO: 526550 - RNA, 24 nt, Human
cgggguuucaccauguuagccagg

SEQ ID NO: 526551 - RNA, 21 nt, Human
cgggugcgggcgcacgcgcag

SEQ ID NO: 526552 - RNA, 25 nt, Human
cuaaguaauucuggggaaaagaaaa

SEQ ID NO: 526553 - RNA, 24 nt, Human
cuaguaaacucaguuuuguuuucu

SEQ ID NO: 526554 - RNA, 24 nt, Human
cucacucuguugcccaggcuggag

SEQ ID NO: 526555 - RNA, 24 nt, Human
cucagccucccgaguagcugggac

SEQ ID NO: 526556 - RNA, 18 nt, Human
cucccgccaccccucccg

SEQ ID NO: 526557 - RNA, 24 nt, Human
cuccugaccuugugaucuacccgc

SEQ ID NO: 526558 - RNA, 20 nt, Human
cuccuggguuuacgccauuc

SEQ ID NO: 526559 - RNA, 24 nt, Human
gaccuugugaucuacccgccucag

SEQ ID NO: 526560 - RNA, 24 nt, Human
gagacgggguuucaccauguuagc

SEQ ID NO: 526561 - RNA, 24 nt, Human
gagagggagucucacucuguugcc

SEQ ID NO: 526562 - RNA, 26 nt, Human
gaguagcugggacuacaggcgccugc

SEQ ID NO: 526563 - RNA, 18 nt, Human
gauuacaggcgugagcca

SEQ ID NO: 526564 - RNA, 20 nt, Human
gauuacaggcgugagccacc

SEQ ID NO: 526565 - RNA, 20 nt, Human
gauuacaggcgugagccacc

SEQ ID NO: 526566 - RNA, 19 nt, Human
gccauucuucugccucagc

SEQ ID NO: 526567 - RNA, 19 nt, Human
gcccaggcuggagugcagu

SEQ ID NO: 526568 - RNA, 20 nt, Human
gcccaggcuggagugcagug

SEQ ID NO: 526569 - RNA, 23 nt, Human
gccuggcuaauuuuuuguauuuu

SEQ ID NO: 526570 - RNA, 24 nt, Human
gcuggagugcaguggcgcaaucca

SEQ ID NO: 526571 - RNA, 24 nt, Human
ggaugguccugaucuccugaccuu

SEQ ID NO: 526572 - RNA, 22 nt, Human
ggauuacaggcgugagccaccc

SEQ ID NO: 526573 - RNA, 23 nt, Human
gggguuucaccauguuagccagg

SEQ ID NO: 526574 - RNA, 20 nt, Human
gguccugaucuccugaccuu

SEQ ID NO: 526575 - RNA, 24 nt, Human
gguuucaccauguuagccaggaug

SEQ ID NO: 526576 - RNA, 23 nt, Human
guagagacgggguuucaccaugu

SEQ ID NO: 526577 - RNA, 24 nt, Human
gugaucuacccgccucagccuccc

SEQ ID NO: 526578 - RNA, 25 nt, Human
uaaacuagaauaugauaucgaagua

SEQ ID NO: 526579 - RNA, 24 nt, Human
uaauuuuuuguauuuuuaguagag

SEQ ID NO: 526580 - RNA, 25 nt, Human
uaauuuuuuguauuuuuaguagaga

SEQ ID NO: 526581 - RNA, 22 nt, Human
uacaggcgccugccaccacgcc

SEQ ID NO: 526582 - RNA, 23 nt, Human
uaccagaaugaaaaggcagaacu

SEQ ID NO: 526583 - RNA, 23 nt, Human
uacccgccucagccucccaaagu

SEQ ID NO: 526584 - RNA, 25 nt, Human
uagaacuucaaacaugaaaauucca

SEQ ID NO: 526585 - RNA, 22 nt, Human
uagagacgggguuucaccaugu

SEQ ID NO: 526586 - RNA, 18 nt, Human
uaggauuacaggcgugag

SEQ ID NO: 526587 - RNA, 19 nt, Human
uaggauuacaggcgugagc

SEQ ID NO: 526588 - RNA, 21 nt, Human
uaggauuacaggcgugagcca

SEQ ID NO: 526589 - RNA, 22 nt, Human
uaggauuacaggcgugagccac

SEQ ID NO: 526590 - RNA, 24 nt, Human
uaggauuacaggcgugagccaccc

SEQ ID NO: 526591 - RNA, 24 nt, Human
uaguagagacgggguuucaccaug

SEQ ID NO: 526592 - RNA, 26 nt, Human
uaguagagacgggguuucaccauguu

SEQ ID NO: 526593 - RNA, 24 nt, Human
ucacucuguugcccaggcuggagu

SEQ ID NO: 526594 - RNA, 23 nt, Human
ucagccucccgaguagcugggac

SEQ ID NO: 526595 - RNA, 22 nt, Human
ucauugcuuuauacugccaugg

SEQ ID NO: 526596 - RNA, 24 nt, Human
ucccaaagugcuaggauuacaggc

SEQ ID NO: 526597 - RNA, 24 nt, Human
ucccgaguagcugggacuacaggc

SEQ ID NO: 526598 - RNA, 21 nt, Human
ucuacccgccucagccuccca

SEQ ID NO: 526599 - RNA, 22 nt, Human
ucucacucuguugcccaggcug

SEQ ID NO: 526600 - RNA, 23 nt, Human
ucucacucuguugcccaggcugg

SEQ ID NO: 526601 - RNA, 24 nt, Human
ucucacucuguugcccaggcugga

SEQ ID NO: 526602 - RNA, 26 nt, Human
ucucacucuguugcccaggcuggagu

SEQ ID NO: 526603 - RNA, 27 nt, Human
ucucacucuguugcccaggcuggagug

SEQ ID NO: 526604 - RNA, 24 nt, Human
ucugccucagccucccgaguagcu

SEQ ID NO: 526605 - RNA, 18 nt, Human
ucuguugcccaggcugga

SEQ ID NO: 526606 - RNA, 27 nt, Human
ucuuucaguuucagcugauagcaaaua

SEQ ID NO: 526607 - RNA, 23 nt, Human
ugaaaaggcagaacugcuccaaa

SEQ ID NO: 526608 - RNA, 24 nt, Human
ugaaaaggcagaacugcuccaaau

SEQ ID NO: 526609 - RNA, 18 nt, Human
ugcccaggcuggagugca

SEQ ID NO: 526610 - RNA, 21 nt, Human
ugcccaggcuggagugcagug

SEQ ID NO: 526611 - RNA, 22 nt, Human
ugcccaggcuggagugcagugg

SEQ ID NO: 526612 - RNA, 24 nt, Human
ugcccaggcuggagugcaguggcg

SEQ ID NO: 526613 - RNA, 24 nt, Human
ugccucagccucccgaguagcugg

SEQ ID NO: 526614 - RNA, 24 nt, Human
ugcuaggauuacaggcgugagcca

SEQ ID NO: 526615 - RNA, 21 nt, Human
uggaacaaaaauauuuagaug

SEQ ID NO: 526616 - RNA, 18 nt, Human
uggagugcaguggcgcaa

SEQ ID NO: 526617 - RNA, 19 nt, Human
uggagugcaguggcgcaau

SEQ ID NO: 526618 - RNA, 21 nt, Human
ugggacuacaggcgccugcca

SEQ ID NO: 526619 - RNA, 22 nt, Human
ugggacuacaggcgccugccac

SEQ ID NO: 526620 - RNA, 24 nt, Human
ugggacuacaggcgccugccacca

SEQ ID NO: 526621 - RNA, 18 nt, Human
uguaaacuagaauaugau

SEQ ID NO: 526622 - RNA, 19 nt, Human
uguaaacuagaauaugaua

SEQ ID NO: 526623 - RNA, 24 nt, Human
ugugaucuacccgccucagccucc

SEQ ID NO: 526624 - RNA, 21 nt, Human
uguugcccaggcuggagugca

SEQ ID NO: 526625 - RNA, 18 nt, Human
uuaguagagacgggguuu

SEQ ID NO: 526626 - RNA, 22 nt, Human
uuaguagagacgggguuucacc

SEQ ID NO: 526627 - RNA, 24 nt, Human
uuaguagagacgggguuucaccau

SEQ ID NO: 526628 - RNA, 23 nt, Human
uucuacauuagcucagauauccu

SEQ ID NO: 526629 - RNA, 23 nt, Human
uuguauuuuuaguagagacgggg

SEQ ID NO: 526630 - RNA, 22 nt, Human
uuucacagcuauauauuaucau

SEQ ID NO: 526631 - RNA, 19 nt, Human
uuucaccauguuagccagg

SEQ ID NO: 526632 - RNA, 20 nt, Human
uuucaccauguuagccagga

SEQ ID NO: 526633 - RNA, 24 nt, Human
uuuuuaguagagacgggguuucac

SEQ ID NO: 526634 - RNA, 20 nt, Human
uuuuucaucuuaauucuucu

SEQ ID NO: 526635 - RNA, 21 nt, Human
uuuuuguauuuuuaguagaga

SEQ ID NO: 526636 - RNA, 24 nt, Human
uuuuuuguauuuuuaguagagacg

SEQ ID NO: 526637 - RNA, 23 nt, Human
aaacucccaacacccacugcccu

SEQ ID NO: 526638 - RNA, 20 nt, Human
aacucccaacacccacugcc

SEQ ID NO: 526639 - RNA, 18 nt, Human
aacuuccaucccggcccc

SEQ ID NO: 526640 - RNA, 29 nt, Human
acaacuuccaucccggccccaaacuccca

SEQ ID NO: 526641 - RNA, 21 nt, Human
acacccacugcccugucccca

SEQ ID NO: 526642 - RNA, 21 nt, Human
acgcucgacucuucgcccagc

SEQ ID NO: 526643 - RNA, 18 nt, Human
acucuucgcccagccuag

SEQ ID NO: 526644 - RNA, 21 nt, Human
agggagagccaggguggggcc

SEQ ID NO: 526645 - RNA, 21 nt, Human
caacacccacugcccuguccc

SEQ ID NO: 526646 - RNA, 19 nt, Human
ccaaacucccaacacccac

SEQ ID NO: 526647 - RNA, 18 nt, Human
ccauuggccgagcaaagu

SEQ ID NO: 526648 - RNA, 20 nt, Human
cccaaacucccaacacccac

SEQ ID NO: 526649 - RNA, 19 nt, Human
ccccaaacucccaacaccc

SEQ ID NO: 526650 - RNA, 22 nt, Human
ccccucagggagagccagggug

SEQ ID NO: 526651 - RNA, 24 nt, Human
ccccucagggagagccaggguggg

SEQ ID NO: 526652 - RNA, 26 nt, Human
cccggccccaaacucccaacacccac

SEQ ID NO: 526653 - RNA, 25 nt, Human
ccuccugucacccuggcccggagcc

SEQ ID NO: 526654 - RNA, 21 nt, Human
ccugucacccuggcccggagc

SEQ ID NO: 526655 - RNA, 24 nt, Human
ccuuguguucaguuuuggaggagu

SEQ ID NO: 526656 - RNA, 22 nt, Human
cggccccaaacucccaacaccc

SEQ ID NO: 526657 - RNA, 19 nt, Human
cuccaagucugcucauccg

SEQ ID NO: 526658 - RNA, 18 nt, Human
cucccaacacccacugcc

SEQ ID NO: 526659 - RNA, 18 nt, Human
cuccugacaaauguaaug

SEQ ID NO: 526660 - RNA, 18 nt, Human
cucuccucaaagggccua

SEQ ID NO: 526661 - RNA, 24 nt, Human
cugacaaauguaaugaucuuuccc

SEQ ID NO: 526662 - RNA, 23 nt, Human
cuggaguccuccaagucugcuca

SEQ ID NO: 526663 - RNA, 21 nt, Human
cuuggggcaucuccuuuggcu

SEQ ID NO: 526664 - RNA, 18 nt, Human
cuuggguccaagucuuuc

SEQ ID NO: 526665 - RNA, 19 nt, Human
gaguccuccaagucugcuc

SEQ ID NO: 526666 - RNA, 20 nt, Human
gcaaaguuccccucagggag

SEQ ID NO: 526667 - RNA, 23 nt, Human
gccauguugcucccacuuggggc

SEQ ID NO: 526668 - RNA, 22 nt, Human
gcccggagcccccuucacgcuc

SEQ ID NO: 526669 - RNA, 23 nt, Human
ggagcccccuucacgcucgacuc

SEQ ID NO: 526670 - RNA, 19 nt, Human
ggaguccuccaagucugcu

SEQ ID NO: 526671 - RNA, 23 nt, Human
ggcccggagcccccuucacgcuc

SEQ ID NO: 526672 - RNA, 19 nt, Human
guaaugaucuuucccuccc

SEQ ID NO: 526673 - RNA, 23 nt, Human
guaauucucacuguauccccacu

SEQ ID NO: 526674 - RNA, 19 nt, Human
guggggccugguaugcucu

SEQ ID NO: 526675 - RNA, 22 nt, Human
uagucucuggccuggaguccuu

SEQ ID NO: 526676 - RNA, 21 nt, Human
ucaaagggccuaccugccauc

SEQ ID NO: 526677 - RNA, 19 nt, Human
ucagggagagccagggugg

SEQ ID NO: 526678 - RNA, 25 nt, Human
ucaucuugaaauaucuucuuucagu

SEQ ID NO: 526679 - RNA, 19 nt, Human
ucccaacacccacugcccu

SEQ ID NO: 526680 - RNA, 25 nt, Human
uccuagggaguauauggccaucuug

SEQ ID NO: 526681 - RNA, 20 nt, Human
ucgcacuggccuucccguca

SEQ ID NO: 526682 - RNA, 23 nt, Human
ucugcucauccgcagccucugac

SEQ ID NO: 526683 - RNA, 18 nt, Human
ugacuguauacaaaugcu

SEQ ID NO: 526684 - RNA, 23 nt, Human
ugccaucuugaaucucuuuuaca

SEQ ID NO: 526685 - RNA, 22 nt, Human
uggccuggaguccuccaagucu

SEQ ID NO: 526686 - RNA, 19 nt, Human
uggcuagaaacaacuucca

SEQ ID NO: 526687 - RNA, 19 nt, Human
uggguccaagucuuucuga

SEQ ID NO: 526688 - RNA, 20 nt, Human
uuccaucccggccccaaacu

SEQ ID NO: 526689 - RNA, 21 nt, Human
aaagagcccggcugagggugc

SEQ ID NO: 526690 - RNA, 20 nt, Human
aaagccuaaggagagugggg

SEQ ID NO: 526691 - RNA, 24 nt, Human
aaauaggaaauagccguauaugua

SEQ ID NO: 526692 - RNA, 24 nt, Human
aagaacaguaaaauaggaaauagc

SEQ ID NO: 526693 - RNA, 19 nt, Human
aagcaaguggcggcagcag

SEQ ID NO: 526694 - RNA, 18 nt, Human
aagcccacccccucaguc

SEQ ID NO: 526695 - RNA, 18 nt, Human
aaggggccagugguccug

SEQ ID NO: 526696 - RNA, 26 nt, Human
aaggggccagugguccuggggcuggg

SEQ ID NO: 526697 - RNA, 24 nt, Human
aaugcuaggggcuacugaaaaaaa

SEQ ID NO: 526698 - RNA, 22 nt, Human
agagcagagcacaaagccuaag

SEQ ID NO: 526699 - RNA, 24 nt, Human
agagcagagcacaaagccuaagga

SEQ ID NO: 526700 - RNA, 22 nt, Human
agccaaugcuaggggcuacuga

SEQ ID NO: 526701 - RNA, 18 nt, Human
aggaggugcugcaggaag

SEQ ID NO: 526702 - RNA, 22 nt, Human
agguauaucaagaggccggggc

SEQ ID NO: 526703 - RNA, 21 nt, Human
caaugcuaggggcuacugaaa

SEQ ID NO: 526704 - RNA, 18 nt, Human
caccaacgugagccacug

SEQ ID NO: 526705 - RNA, 21 nt, Human
caccacccgcccaugcuacuc

SEQ ID NO: 526706 - RNA, 19 nt, Human
caccauagccaggaagcau

SEQ ID NO: 526707 - RNA, 22 nt, Human
caccccaccauagccaggaagc

SEQ ID NO: 526708 - RNA, 18 nt, Human
cagacacagggcccaugg

SEQ ID NO: 526709 - RNA, 21 nt, Human
cauagccaggaagcaucagaa

SEQ ID NO: 526710 - RNA, 22 nt, Human
ccacugccguccccaccacccg

SEQ ID NO: 526711 - RNA, 19 nt, Human
ccagacagggagaaagcca

SEQ ID NO: 526712 - RNA, 24 nt, Human
cccacagucagcggugcugcuuug

SEQ ID NO: 526713 - RNA, 18 nt, Human
cccaggccgaggcgugag

SEQ ID NO: 526714 - RNA, 21 nt, Human
ccccaagacugcccagggagu

SEQ ID NO: 526715 - RNA, 21 nt, Human
cccccaagacugcccagggag

SEQ ID NO: 526716 - RNA, 22 nt, Human
ccccucaggccaaggggccagu

SEQ ID NO: 526717 - RNA, 21 nt, Human
cccggacucgacgcugcaggu

SEQ ID NO: 526718 - RNA, 20 nt, Human
ccgcagcccuggcucccugc

SEQ ID NO: 526719 - RNA, 23 nt, Human
ccgcccggaccguccgagggauc

SEQ ID NO: 526720 - RNA, 22 nt, Human
ccuaacccgugaggaacuggaa

SEQ ID NO: 526721 - RNA, 18 nt, Human
ccugagccaggcgcgggg

SEQ ID NO: 526722 - RNA, 19 nt, Human
cgcucaccgcugcugggca

SEQ ID NO: 526723 - RNA, 25 nt, Human
cggcagcagcacgccagguggguga

SEQ ID NO: 526724 - RNA, 21 nt, Human
cucagcucuggcccccaagac

SEQ ID NO: 526725 - RNA, 21 nt, Human
cucccaggccgaggcgugagc

SEQ ID NO: 526726 - RNA, 22 nt, Human
cugccguccccaccacccgccc

SEQ ID NO: 526727 - RNA, 19 nt, Human
gacaagggcagccuggcag

SEQ ID NO: 526728 - RNA, 22 nt, Human
gcccacagucagcggugcugcu

SEQ ID NO: 526729 - RNA, 26 nt, Human
gcccccaagacugcccagggaguaag

SEQ ID NO: 526730 - RNA, 20 nt, Human
gccguccccaccacccgccc

SEQ ID NO: 526731 - RNA, 19 nt, Human
ggacaagggcagccuggca

SEQ ID NO: 526732 - RNA, 20 nt, Human
ggagcaggguaggaggugcu

SEQ ID NO: 526733 - RNA, 19 nt, Human
ggcccccaagacugcccag

SEQ ID NO: 526734 - RNA, 21 nt, Human
ggcggaggcucucagcaaggc

SEQ ID NO: 526735 - RNA, 25 nt, Human
gggaagacuuugggggaaacugagg

SEQ ID NO: 526736 - RNA, 20 nt, Human
gggcagccuggcagggcaga

SEQ ID NO: 526737 - RNA, 23 nt, Human
gggcccccagccccucaggccaa

SEQ ID NO: 526738 - RNA, 22 nt, Human
ggggagagggaggacacggagc

SEQ ID NO: 526739 - RNA, 24 nt, Human
ggggguucugcgguguuaaaggac

SEQ ID NO: 526740 - RNA, 18 nt, Human
gugaugcaggagccccua

SEQ ID NO: 526741 - RNA, 24 nt, Human
uaggaaauagccguauauguacac

SEQ ID NO: 526742 - RNA, 20 nt, Human
uaggaggugcugcaggaagc

SEQ ID NO: 526743 - RNA, 18 nt, Human
uaucaagaggccaggcuc

SEQ ID NO: 526744 - RNA, 19 nt, Human
uauggacuggccucagcuc

SEQ ID NO: 526745 - RNA, 19 nt, Human
ucacauggacaagggcagc

SEQ ID NO: 526746 - RNA, 21 nt, Human
uccagcacuccugagccaggc

SEQ ID NO: 526747 - RNA, 23 nt, Human
uccagggaagacuuugggggaaa

SEQ ID NO: 526748 - RNA, 18 nt, Human
ucccugcagacacagggc

SEQ ID NO: 526749 - RNA, 23 nt, Human
ucucagcaaggccgagccgagau

SEQ ID NO: 526750 - RNA, 18 nt, Human
ucuggcccccaagacugc

SEQ ID NO: 526751 - RNA, 25 nt, Human
ugaaaaaaacagcccagccacugua

SEQ ID NO: 526752 - RNA, 25 nt, Human
ugaaaccagacagggagaaagccag

SEQ ID NO: 526753 - RNA, 22 nt, Human
ugaagaacaguaaaauaggaaa

SEQ ID NO: 526754 - RNA, 23 nt, Human
ugagggugcccgcccggaccguc

SEQ ID NO: 526755 - RNA, 19 nt, Human
ugcaaagagcccggcugag

SEQ ID NO: 526756 - RNA, 18 nt, Human
uggacuggccucagcucu

SEQ ID NO: 526757 - RNA, 18 nt, Human
uggcccccaagacugccc

SEQ ID NO: 526758 - RNA, 20 nt, Human
uggcggcagcagcacgccag

SEQ ID NO: 526759 - RNA, 22 nt, Human
uggcucccugcagacacagggc

SEQ ID NO: 526760 - RNA, 20 nt, Human
ugggaggggguucugcggug

SEQ ID NO: 526761 - RNA, 20 nt, Human
ugggggaaacugagguuccu

SEQ ID NO: 526762 - RNA, 18 nt, Human
uuuuuuuuuuuuuuuuug

SEQ ID NO: 526763 - RNA, 22 nt, Human
uuuuuuuuuuuuuuuuuuuggc

SEQ ID NO: 526764 - RNA, 19 nt, Human
aaaaacaccagauguuaaa

SEQ ID NO: 526765 - RNA, 19 nt, Human
aaacccgaccaacccgggg

SEQ ID NO: 526766 - RNA, 25 nt, Human
aagcaucaacagaucaagcaaagcc

SEQ ID NO: 526767 - RNA, 23 nt, Human
aagugcuggagcucgggucagcc

SEQ ID NO: 526768 - RNA, 19 nt, Human
caaaagcgcauguguccuc

SEQ ID NO: 526769 - RNA, 26 nt, Human
cagaucaagcaaagccaugaaaauua

SEQ ID NO: 526770 - RNA, 21 nt, Human
cagcagaucauguuugucuga

SEQ ID NO: 526771 - RNA, 22 nt, Human
cuacaacacagguugcuaacug

SEQ ID NO: 526772 - RNA, 18 nt, Human
cuggagcucgggucagcc

SEQ ID NO: 526773 - RNA, 19 nt, Human
gaaaaaucaggcgcggaaa

SEQ ID NO: 526774 - RNA, 18 nt, Human
gcgcggaaaaagugcugg

SEQ ID NO: 526775 - RNA, 22 nt, Human
gcuacaacacagguugcuaacu

SEQ ID NO: 526776 - RNA, 22 nt, Human
ggaaaaagugcuggagcucggg

SEQ ID NO: 526777 - RNA, 21 nt, Human
gggcagggaaccaaaacugag

SEQ ID NO: 526778 - RNA, 22 nt, Human
uaagagaggaugacacaaccau

SEQ ID NO: 526779 - RNA, 19 nt, Human
uagaauuaguaaaaaugau

SEQ ID NO: 526780 - RNA, 23 nt, Human
ucagccacaucuugauuuuccua

SEQ ID NO: 526781 - RNA, 22 nt, Human
ucaggcgcggaaaaagugcugg

SEQ ID NO: 526782 - RNA, 21 nt, Human
ucuucagccacaucuugauuu

SEQ ID NO: 526783 - RNA, 21 nt, Human
ucuuuuggcagcgaauugggu

SEQ ID NO: 526784 - RNA, 19 nt, Human
ugauuaagagaggaugaca

SEQ ID NO: 526785 - RNA, 24 nt, Human
uggaauaggcccugggaauccaca

SEQ ID NO: 526786 - RNA, 22 nt, Human
acuuucaacuuugaauaaauuc

SEQ ID NO: 526787 - RNA, 25 nt, Human
agaaaggacacuuucaacuuugaau

SEQ ID NO: 526788 - RNA, 18 nt, Human
gagaaaggacacuuucaa

SEQ ID NO: 526789 - RNA, 20 nt, Human
uaaagagagagagaaaggac

SEQ ID NO: 526790 - RNA, 19 nt, Human
uauauaggauuucuaacau

SEQ ID NO: 526791 - RNA, 26 nt, Human
uaucaaguaccaaacugaguuuaaua

SEQ ID NO: 526792 - RNA, 24 nt, Human
ugaguuuauuaaagagagagagaa

SEQ ID NO: 526793 - RNA, 23 nt, Human
uuuaaaauauacuugauuuucua

SEQ ID NO: 526794 - RNA, 24 nt, Human
aaagugcugggauuacaggcguga

SEQ ID NO: 526795 - RNA, 24 nt, Human
aagcgauccaccugccuuggcuuc

SEQ ID NO: 526796 - RNA, 19 nt, Human
aagugcugggauuacaggc

SEQ ID NO: 526797 - RNA, 19 nt, Human
aagugcugggauuacaggc

SEQ ID NO: 526798 - RNA, 26 nt, Human
aagugcugggauuacaggcgugagcc

SEQ ID NO: 526799 - RNA, 24 nt, Human
aauuuuguauuuuuaguagagaca

SEQ ID NO: 526800 - RNA, 20 nt, Human
acaggguuucuccauguugg

SEQ ID NO: 526801 - RNA, 24 nt, Human
acaggguuucuccauguugguuag

SEQ ID NO: 526802 - RNA, 24 nt, Human
accaagagucuuggaaguauccac

SEQ ID NO: 526803 - RNA, 25 nt, Human
accauguugcccaggcuggucucua

SEQ ID NO: 526804 - RNA, 18 nt, Human
acgggauuucaccauguu

SEQ ID NO: 526805 - RNA, 19 nt, Human
acgggauuucaccauguug

SEQ ID NO: 526806 - RNA, 24 nt, Human
acgggauuucaccauguugcccag

SEQ ID NO: 526807 - RNA, 19 nt, Human
acuacaggugcaugccacc

SEQ ID NO: 526808 - RNA, 22 nt, Human
acucuuguugcccaggcuggag

SEQ ID NO: 526809 - RNA, 18 nt, Human
agacaggguuucuccaug

SEQ ID NO: 526810 - RNA, 18 nt, Human
agcaauucuccugcugua

SEQ ID NO: 526811 - RNA, 19 nt, Human
agccaccacacccagccua

SEQ ID NO: 526812 - RNA, 18 nt, Human
agccuccagaguagcugg

SEQ ID NO: 526813 - RNA, 25 nt, Human
aggcuggagugcaguggugcgaucu

SEQ ID NO: 526814 - RNA, 22 nt, Human
agggcagugucaugaccauggc

SEQ ID NO: 526815 - RNA, 24 nt, Human
aggugauccacuccccucggccuc

SEQ ID NO: 526816 - RNA, 22 nt, Human
aguagagacaggguuucuccau

SEQ ID NO: 526817 - RNA, 18 nt, Human
aguagcugggacuacagg

SEQ ID NO: 526818 - RNA, 21 nt, Human
aguagcugggauuacaggcau

SEQ ID NO: 526819 - RNA, 23 nt, Human
aguagcugggauuacaggcaugc

SEQ ID NO: 526820 - RNA, 23 nt, Human
agugcaguggugcgaucuuggcu

SEQ ID NO: 526821 - RNA, 24 nt, Human
agugcaguggugcgaucuuggcuc

SEQ ID NO: 526822 - RNA, 25 nt, Human
agugcaguggugcgaucuuggcucu

SEQ ID NO: 526823 - RNA, 18 nt, Human
agugcugggauuacaggc

SEQ ID NO: 526824 - RNA, 24 nt, Human
auuucaccauguugcccaggcugg

SEQ ID NO: 526825 - RNA, 24 nt, Human
caaagugcugggauuacaggcgug

SEQ ID NO: 526826 - RNA, 23 nt, Human
caacuucccugggcucaggugau

SEQ ID NO: 526827 - RNA, 23 nt, Human
cacacccagccuaauaauccuuu

SEQ ID NO: 526828 - RNA, 19 nt, Human
caccacacccagccuaaua

SEQ ID NO: 526829 - RNA, 24 nt, Human
caccauguugcccaggcuggucuc

SEQ ID NO: 526830 - RNA, 27 nt, Human
caccauguugcccaggcuggucucuaa

SEQ ID NO: 526831 - RNA, 24 nt, Human
caccucagccuccagaguagcugg

SEQ ID NO: 526832 - RNA, 23 nt, Human
caccugccuuggcuucccaaagc

SEQ ID NO: 526833 - RNA, 24 nt, Human
cacucuuguugcccaggcuggagu

SEQ ID NO: 526834 - RNA, 24 nt, Human
cagcaauacugccaauaauuuuaa

SEQ ID NO: 526835 - RNA, 23 nt, Human
cagcagccucaacuucccugggc

SEQ ID NO: 526836 - RNA, 24 nt, Human
caggguuucuccauguugguuagg

SEQ ID NO: 526837 - RNA, 19 nt, Human
caguggugcgaucuuggcu

SEQ ID NO: 526838 - RNA, 24 nt, Human
caugccaccacgcccaguuaauuu

SEQ ID NO: 526839 - RNA, 19 nt, Human
cauguugcccaggcugguc

SEQ ID NO: 526840 - RNA, 24 nt, Human
cauguugcccaggcuggucucuaa

SEQ ID NO: 526841 - RNA, 21 nt, Human
cauucagcaauacugccaaua

SEQ ID NO: 526842 - RNA, 20 nt, Human
ccaaagugcugggauuacag

SEQ ID NO: 526843 - RNA, 22 nt, Human
ccaaagugcugggauuacaggc

SEQ ID NO: 526844 - RNA, 22 nt, Human
ccaaagugcugggauuacaggc

SEQ ID NO: 526845 - RNA, 24 nt, Human
ccaaagugcugggauuacaggcgu

SEQ ID NO: 526846 - RNA, 20 nt, Human
ccaccacgccuggcuaauuu

SEQ ID NO: 526847 - RNA, 24 nt, Human
ccagaguagcugggacuacaggug

SEQ ID NO: 526848 - RNA, 19 nt, Human
ccaggcuccaggccaggcu

SEQ ID NO: 526849 - RNA, 20 nt, Human
ccaggcuccaggccaggcuu

SEQ ID NO: 526850 - RNA, 19 nt, Human
ccauguugguuaggcuggu

SEQ ID NO: 526851 - RNA, 22 nt, Human
ccauguugguuaggcuggucuc

SEQ ID NO: 526852 - RNA, 23 nt, Human
ccauguugguuaggcuggucucg

SEQ ID NO: 526853 - RNA, 22 nt, Human
cccaguuaauuuuugcauuuuu

SEQ ID NO: 526854 - RNA, 24 nt, Human
ccccucaccucagccuccagagua

SEQ ID NO: 526855 - RNA, 23 nt, Human
cccgaguucaagcaauucuccug

SEQ ID NO: 526856 - RNA, 20 nt, Human
cccugugccugggcuccuuc

SEQ ID NO: 526857 - RNA, 21 nt, Human
ccgcccgacaagcccugaccc

SEQ ID NO: 526858 - RNA, 24 nt, Human
ccucaccucagccuccagaguagc

SEQ ID NO: 526859 - RNA, 24 nt, Human
ccucccgaguucaagcaauucucc

SEQ ID NO: 526860 - RNA, 22 nt, Human
ccugacccgcucgucaggacug

SEQ ID NO: 526861 - RNA, 21 nt, Human
ccugagcucaagcgauccacc

SEQ ID NO: 526862 - RNA, 23 nt, Human
ccugaguagcugggauuacaggc

SEQ ID NO: 526863 - RNA, 24 nt, Human
ccugaguagcugggauuacaggca

SEQ ID NO: 526864 - RNA, 22 nt, Human
cgaacucaggugauccacuccc

SEQ ID NO: 526865 - RNA, 18 nt, Human
cgggagccccugugccug

SEQ ID NO: 526866 - RNA, 24 nt, Human
cgggauuucaccauguugcccagg

SEQ ID NO: 526867 - RNA, 20 nt, Human
cgggguugguggugcggagc

SEQ ID NO: 526868 - RNA, 22 nt, Human
cgucucccccuuccaggcucca

SEQ ID NO: 526869 - RNA, 22 nt, Human
cuaauaauccuuuuuaauauau

SEQ ID NO: 526870 - RNA, 24 nt, Human
cuaauuuuguauuuuuaguagaga

SEQ ID NO: 526871 - RNA, 24 nt, Human
cucaagcgauccaccugccuuggc

SEQ ID NO: 526872 - RNA, 24 nt, Human
cucagccuccagaguagcugggac

SEQ ID NO: 526873 - RNA, 23 nt, Human
cucaggugauucccccggcucag

SEQ ID NO: 526874 - RNA, 24 nt, Human
cucaggugauuccccucaccucag

SEQ ID NO: 526875 - RNA, 24 nt, Human
cuccauguugguuaggcuggucuc

SEQ ID NO: 526876 - RNA, 18 nt, Human
cucuuguugcccaggcug

SEQ ID NO: 526877 - RNA, 23 nt, Human
cugaguagcugggauuacaggca

SEQ ID NO: 526878 - RNA, 24 nt, Human
cugaguagcugggauuacaggcau

SEQ ID NO: 526879 - RNA, 23 nt, Human
cugcuguagccuccugaguagcu

SEQ ID NO: 526880 - RNA, 24 nt, Human
cuuguugcccaggcuggagugcag

SEQ ID NO: 526881 - RNA, 19 nt, Human
gaacucaggugauccacuc

SEQ ID NO: 526882 - RNA, 20 nt, Human
gagacaggguuucuccaugu

SEQ ID NO: 526883 - RNA, 21 nt, Human
gagacaggguuucuccauguu

SEQ ID NO: 526884 - RNA, 24 nt, Human
gagcucaagcgauccaccugccuu

SEQ ID NO: 526885 - RNA, 26 nt, Human
gagggcagugucaugaccauggccaa

SEQ ID NO: 526886 - RNA, 26 nt, Human
gaguagcugggacuacaggugcaugc

SEQ ID NO: 526887 - RNA, 22 nt, Human
gaguagcugggauuacaggcau

SEQ ID NO: 526888 - RNA, 18 nt, Human
gauuacaggcaugcgcca

SEQ ID NO: 526889 - RNA, 18 nt, Human
gauuacaggcgugagcca

SEQ ID NO: 526890 - RNA, 21 nt, Human
gauuacaggcgugagccacca

SEQ ID NO: 526891 - RNA, 22 nt, Human
gauuacaggcgugagccaccac

SEQ ID NO: 526892 - RNA, 19 nt, Human
gcccaggcuggagugcagu

SEQ ID NO: 526893 - RNA, 22 nt, Human
gcccaguuaauuuuugcauuuu

SEQ ID NO: 526894 - RNA, 24 nt, Human
gccucccgaguucaagcaauucuu

SEQ ID NO: 526895 - RNA, 24 nt, Human
gccuuggcuucccaaagcuuuggg

SEQ ID NO: 526896 - RNA, 24 nt, Human
gcgauccaccugccuuggcuuccc

SEQ ID NO: 526897 - RNA, 24 nt, Human
gcucaagcgauccaccugccuugg

SEQ ID NO: 526898 - RNA, 19 nt, Human
ggauuacaggcaugcgcca

SEQ ID NO: 526899 - RNA, 19 nt, Human
ggauuacaggcgugagcca

SEQ ID NO: 526900 - RNA, 22 nt, Human
ggauuucaccauguugcccagg

SEQ ID NO: 526901 - RNA, 24 nt, Human
ggcucaggugauuccccucaccuc

SEQ ID NO: 526902 - RNA, 23 nt, Human
gggauuucaccauguugcccagg

SEQ ID NO: 526903 - RNA, 24 nt, Human
ggugauccacuccccucggccucc

SEQ ID NO: 526904 - RNA, 20 nt, Human
guagcugggauuacaggcau

SEQ ID NO: 526905 - RNA, 24 nt, Human
gugauccacuccccucggccuccc

SEQ ID NO: 526906 - RNA, 23 nt, Human
uaacuccugagcucaagcgaucc

SEQ ID NO: 526907 - RNA, 22 nt, Human
uaauuuuugcauuuuuuugugg

SEQ ID NO: 526908 - RNA, 22 nt, Human
uacaggcaugcgccaccacgcc

SEQ ID NO: 526909 - RNA, 24 nt, Human
uacaggcgugagccaccacaccca

SEQ ID NO: 526910 - RNA, 24 nt, Human
uacaggugcaugccaccacgccca

SEQ ID NO: 526911 - RNA, 22 nt, Human
uagagacaggguuucuccaugu

SEQ ID NO: 526912 - RNA, 20 nt, Human
uagccuccugaguagcuggg

SEQ ID NO: 526913 - RNA, 21 nt, Human
uagccuccugaguagcuggga

SEQ ID NO: 526914 - RNA, 24 nt, Human
uaguagagacaggguuucuccaug

SEQ ID NO: 526915 - RNA, 25 nt, Human
uauauaaagaaaagaacucagggau

SEQ ID NO: 526916 - RNA, 23 nt, Human
ucacucuuguugcccaggcugga

SEQ ID NO: 526917 - RNA, 19 nt, Human
ucaggugauucccccggcu

SEQ ID NO: 526918 - RNA, 24 nt, Human
uccagaguagcugggacuacaggu

SEQ ID NO: 526919 - RNA, 20 nt, Human
uccaggcuccaggccaggcu

SEQ ID NO: 526920 - RNA, 24 nt, Human
uccaggcuccaggccaggcuuccg

SEQ ID NO: 526921 - RNA, 24 nt, Human
ucccaaagugcugggauuacaggc

SEQ ID NO: 526922 - RNA, 21 nt, Human
ucccgaguucaagcaauucuc

SEQ ID NO: 526923 - RNA, 24 nt, Human
ucccgaguucaagcaauucuccug

SEQ ID NO: 526924 - RNA, 21 nt, Human
ucccgcucgggccgucucccc

SEQ ID NO: 526925 - RNA, 24 nt, Human
uccugaguagcugggauuacaggc

SEQ ID NO: 526926 - RNA, 18 nt, Human
ucggccucccaaagugcu

SEQ ID NO: 526927 - RNA, 22 nt, Human
ucucaaucuguuguccaggcug

SEQ ID NO: 526928 - RNA, 22 nt, Human
ucucaaucuguuguccaggcug

SEQ ID NO: 526929 - RNA, 24 nt, Human
ucucaaucuguuguccaggcugga

SEQ ID NO: 526930 - RNA, 23 nt, Human
ucucuaacuccugagcucaagcg

SEQ ID NO: 526931 - RNA, 22 nt, Human
ucuuguugcccaggcuggagug

SEQ ID NO: 526932 - RNA, 23 nt, Human
ugagacagaguuucacucuuguu

SEQ ID NO: 526933 - RNA, 20 nt, Human
ugagacagggucucaaucug

SEQ ID NO: 526934 - RNA, 22 nt, Human
ugcaguggugcgaucuuggcuc

SEQ ID NO: 526935 - RNA, 19 nt, Human
ugcaugccaccacgcccag

SEQ ID NO: 526936 - RNA, 21 nt, Human
ugcaugccaccacgcccaguu

SEQ ID NO: 526937 - RNA, 18 nt, Human
ugcccaggcuggagugca

SEQ ID NO: 526938 - RNA, 21 nt, Human
ugcccaggcuggagugcagug

SEQ ID NO: 526939 - RNA, 24 nt, Human
ugcccaggcuggagugcaguggug

SEQ ID NO: 526940 - RNA, 24 nt, Human
ugcccaggcuggucucuaacuccu

SEQ ID NO: 526941 - RNA, 28 nt, Human
ugcccaggcuggucucuaacuccugagc

SEQ ID NO: 526942 - RNA, 19 nt, Human
ugccuuggcuucccaaagc

SEQ ID NO: 526943 - RNA, 24 nt, Human
ugcugggauuacaggcgugagcca

SEQ ID NO: 526944 - RNA, 23 nt, Human
uggagugcaguggugcgaucuug

SEQ ID NO: 526945 - RNA, 24 nt, Human
uggagugcaguggugcgaucuugg

SEQ ID NO: 526946 - RNA, 21 nt, Human
ugggacuacaggugcaugcca

SEQ ID NO: 526947 - RNA, 22 nt, Human
ugggacuacaggugcaugccac

SEQ ID NO: 526948 - RNA, 24 nt, Human
ugggacuacaggugcaugccacca

SEQ ID NO: 526949 - RNA, 18 nt, Human
ugggauuacaggcaugcg

SEQ ID NO: 526950 - RNA, 21 nt, Human
ugggauuacaggcaugcgcca

SEQ ID NO: 526951 - RNA, 22 nt, Human
ugggauuacaggcaugcgccac

SEQ ID NO: 526952 - RNA, 24 nt, Human
ugggauuacaggcaugcgccacca

SEQ ID NO: 526953 - RNA, 18 nt, Human
ugggauuacaggcgugag

SEQ ID NO: 526954 - RNA, 19 nt, Human
ugggauuacaggcgugagc

SEQ ID NO: 526955 - RNA, 22 nt, Human
ugggauuacaggcgugagccac

SEQ ID NO: 526956 - RNA, 23 nt, Human
ugggauuacaggcgugagccacc

SEQ ID NO: 526957 - RNA, 24 nt, Human
ugggauuacaggcgugagccacca

SEQ ID NO: 526958 - RNA, 20 nt, Human
ugggcuccuucugcuuucua

SEQ ID NO: 526959 - RNA, 19 nt, Human
uggugacgggauuucacca

SEQ ID NO: 526960 - RNA, 23 nt, Human
ugguuaggcuggucucgaacuca

SEQ ID NO: 526961 - RNA, 22 nt, Human
ugucaugaccauggcucacagc

SEQ ID NO: 526962 - RNA, 24 nt, Human
uuaguagagacaggguuucuccau

SEQ ID NO: 526963 - RNA, 21 nt, Human
uucaagcaauucuccugcugu

SEQ ID NO: 526964 - RNA, 24 nt, Human
uucacucuuguugcccaggcugga

SEQ ID NO: 526965 - RNA, 27 nt, Human
uucaguuguugucacuuggugaaaaaa

SEQ ID NO: 526966 - RNA, 21 nt, Human
uucccccggcucaggugauuc

SEQ ID NO: 526967 - RNA, 24 nt, Human
uucucuuugagucaugcugguuuc

SEQ ID NO: 526968 - RNA, 22 nt, Human
uugagacagggucucaaucugu

SEQ ID NO: 526969 - RNA, 23 nt, Human
uugagacagggucucaaucuguu

SEQ ID NO: 526970 - RNA, 24 nt, Human
uugcccaggcuggagugcaguggu

SEQ ID NO: 526971 - RNA, 24 nt, Human
uuguccaggcuggagggcaguguc

SEQ ID NO: 526972 - RNA, 21 nt, Human
uuguggugacgggauuucacc

SEQ ID NO: 526973 - RNA, 24 nt, Human
uuguggugacgggauuucaccaug

SEQ ID NO: 526974 - RNA, 23 nt, Human
uuucaccauguugcccaggcugg

SEQ ID NO: 526975 - RNA, 24 nt, Human
uuucaccauguugcccaggcuggu

SEQ ID NO: 526976 - RNA, 24 nt, Human
uuucacucuuguugcccaggcugg

SEQ ID NO: 526977 - RNA, 21 nt, Human
uuucuccauguugguuaggcu

SEQ ID NO: 526978 - RNA, 23 nt, Human
uuuguggugacgggauuucacca

SEQ ID NO: 526979 - RNA, 24 nt, Human
uuuguggugacgggauuucaccau

SEQ ID NO: 526980 - RNA, 19 nt, Human
uuuuguauuuuuaguagag

SEQ ID NO: 526981 - RNA, 20 nt, Human
uuuuguauuuuuaguagaga

SEQ ID NO: 526982 - RNA, 21 nt, Human
uuuuguggugacgggauuuca

SEQ ID NO: 526983 - RNA, 18 nt, Human
uuuuuuuuuaucaggucu

SEQ ID NO: 526984 - RNA, 23 nt, Human
uuuuuuuuuugagacagggucuc

SEQ ID NO: 526985 - RNA, 23 nt, Human
uuuuuuuuuuuugagacaggguc

SEQ ID NO: 526986 - RNA, 26 nt, Human
uuuuuuuuuuuugagacagggucuca

SEQ ID NO: 526987 - RNA, 30 nt, Human
uuuuuuuuuuuuuuuuuuuugagacagggg

SEQ ID NO: 526988 - RNA, 18 nt, Human
aaaacuauccagcaguua

SEQ ID NO: 526989 - RNA, 23 nt, Human
aaacaacacaaaccccauaaacu

SEQ ID NO: 526990 - RNA, 20 nt, Human
aaacagcaggaauugguuuu

SEQ ID NO: 526991 - RNA, 20 nt, Human
aaagagagagaaaagggaau

SEQ ID NO: 526992 - RNA, 23 nt, Human
aaauaaaagcaagacaguggcaa

SEQ ID NO: 526993 - RNA, 20 nt, Human
aacaaugacaaaaagucccc

SEQ ID NO: 526994 - RNA, 22 nt, Human
aaccauugccuuauugugaaga

SEQ ID NO: 526995 - RNA, 18 nt, Human
aacuuuucuccuucuccu

SEQ ID NO: 526996 - RNA, 21 nt, Human
aagagcccuggguuuuucuag

SEQ ID NO: 526997 - RNA, 26 nt, Human
aagaggaaagaggaacaaugacaaaa

SEQ ID NO: 526998 - RNA, 20 nt, Human
aagcaagacaguggcaagga

SEQ ID NO: 526999 - RNA, 24 nt, Human
aagcaagcuaaauugcaacaacau

SEQ ID NO: 527000 - RNA, 19 nt, Human
aagcuaccauucccauuca

SEQ ID NO: 527001 - RNA, 19 nt, Human
aauaauuggaaagagagag

SEQ ID NO: 527002 - RNA, 23 nt, Human
acaaaguauucuucugguuuuaa

SEQ ID NO: 527003 - RNA, 21 nt, Human
accaccucucauuuacuccug

SEQ ID NO: 527004 - RNA, 25 nt, Human
acugucuucucagcuggacugagau

SEQ ID NO: 527005 - RNA, 23 nt, Human
agaauuuuaaaagcagcucaaag

SEQ ID NO: 527006 - RNA, 20 nt, Human
agacagcaggcgaaagcagg

SEQ ID NO: 527007 - RNA, 21 nt, Human
agacagcaggcgaaagcaggc

SEQ ID NO: 527008 - RNA, 22 nt, Human
agacaguggcaaggaugaaagc

SEQ ID NO: 527009 - RNA, 19 nt, Human
agaggaacaaugacaaaaa

SEQ ID NO: 527010 - RNA, 18 nt, Human
agaggggaggaaaauaac

SEQ ID NO: 527011 - RNA, 19 nt, Human
agaggggaggaaaauaacg

SEQ ID NO: 527012 - RNA, 22 nt, Human
agagguuugagugggagacagg

SEQ ID NO: 527013 - RNA, 28 nt, Human
agauuucuuucaaaggaccccccugcuu

SEQ ID NO: 527014 - RNA, 24 nt, Human
agcaaaaaagggaaauaaaaauau

SEQ ID NO: 527015 - RNA, 22 nt, Human
agcaccccccauccuuugaugc

SEQ ID NO: 527016 - RNA, 23 nt, Human
aggaaaauaacggcaccuucucc

SEQ ID NO: 527017 - RNA, 23 nt, Human
aguaaaaaauaaaagcaagacag

SEQ ID NO: 527018 - RNA, 20 nt, Human
auaccauuugaacccaagca

SEQ ID NO: 527019 - RNA, 21 nt, Human
auaccauuugaacccaagcag

SEQ ID NO: 527020 - RNA, 21 nt, Human
auccuuuaccauuuuuucuuu

SEQ ID NO: 527021 - RNA, 20 nt, Human
augauaacacaaugccaaaa

SEQ ID NO: 527022 - RNA, 18 nt, Human
auggagucucaaaguucc

SEQ ID NO: 527023 - RNA, 19 nt, Human
auugcaacaacauauugau

SEQ ID NO: 527024 - RNA, 21 nt, Human
caaaauuagaagcaaaauggu

SEQ ID NO: 527025 - RNA, 22 nt, Human
caagacaguggcaaggaugaaa

SEQ ID NO: 527026 - RNA, 24 nt, Human
cacaaacagcacagccacaaagua

SEQ ID NO: 527027 - RNA, 19 nt, Human
cacucagagggaaacagua

SEQ ID NO: 527028 - RNA, 23 nt, Human
cauucccauucaaacagcaggaa

SEQ ID NO: 527029 - RNA, 24 nt, Human
ccaccugguucuaagucauauccc

SEQ ID NO: 527030 - RNA, 19 nt, Human
ccaguaccuaaguagcagg

SEQ ID NO: 527031 - RNA, 25 nt, Human
ccccccugcuucuuuuauagcaccc

SEQ ID NO: 527032 - RNA, 19 nt, Human
cccccucccacuaucuucu

SEQ ID NO: 527033 - RNA, 20 nt, Human
cccugaggaauauuucagga

SEQ ID NO: 527034 - RNA, 23 nt, Human
ccgaugauaacacaaugccaaaa

SEQ ID NO: 527035 - RNA, 24 nt, Human
ccuggcccccucccacuaucuucu

SEQ ID NO: 527036 - RNA, 20 nt, Human
ccuucaaacaacacaaaccc

SEQ ID NO: 527037 - RNA, 21 nt, Human
cgaugauaacacaaugccaaa

SEQ ID NO: 527038 - RNA, 18 nt, Human
cuccugcagccuggcccc

SEQ ID NO: 527039 - RNA, 19 nt, Human
cuccuguuuagcaaaaaaa

SEQ ID NO: 527040 - RNA, 22 nt, Human
cuccuguuuagcaaaaaaaaac

SEQ ID NO: 527041 - RNA, 20 nt, Human
cucuauauacacauauccag

SEQ ID NO: 527042 - RNA, 27 nt, Human
cuucuugcugcaaaccaacuuugccag

SEQ ID NO: 527043 - RNA, 25 nt, Human
gaaaaaaaaaguuaugcauagaagg

SEQ ID NO: 527044 - RNA, 21 nt, Human
gaacuguucucccaaaacucu

SEQ ID NO: 527045 - RNA, 25 nt, Human
gaagaauuuuaaaagcagcucaaag

SEQ ID NO: 527046 - RNA, 21 nt, Human
gacaguggcaaggaugaaagc

SEQ ID NO: 527047 - RNA, 20 nt, Human
gacuuucucauggagucuca

SEQ ID NO: 527048 - RNA, 24 nt, Human
gagagguuugagugggagacaggu

SEQ ID NO: 527049 - RNA, 19 nt, Human
gagcauccugcauuggcga

SEQ ID NO: 527050 - RNA, 27 nt, Human
gaguuuuuaagguuuuuuuuuucuuuc

SEQ ID NO: 527051 - RNA, 18 nt, Human
gcaaaaaaaaacuuccuu

SEQ ID NO: 527052 - RNA, 21 nt, Human
gcaagcauugaaccuucaaac

SEQ ID NO: 527053 - RNA, 20 nt, Human
gcuaccauucccauucaaac

SEQ ID NO: 527054 - RNA, 22 nt, Human
ggaaaauaacggcaccuucucc

SEQ ID NO: 527055 - RNA, 20 nt, Human
gggcaugauauaacuuuggu

SEQ ID NO: 527056 - RNA, 20 nt, Human
ggugaaaagauaugaaggga

SEQ ID NO: 527057 - RNA, 22 nt, Human
gguuuuggcuuccuuuaaaacc

SEQ ID NO: 527058 - RNA, 21 nt, Human
gucaaaucgccucgcaaaagc

SEQ ID NO: 527059 - RNA, 24 nt, Human
gucuauuggcacaaacagcacagc

SEQ ID NO: 527060 - RNA, 25 nt, Human
guuuuuuuuuuuuuuuuuuuauggg

SEQ ID NO: 527061 - RNA, 18 nt, Human
uaaaaccugccucugagc

SEQ ID NO: 527062 - RNA, 24 nt, Human
uaaaagcaagacaguggcaaggau

SEQ ID NO: 527063 - RNA, 22 nt, Human
uaaagauacugguugauaccau

SEQ ID NO: 527064 - RNA, 20 nt, Human
uaaauaaacacaugcaagca

SEQ ID NO: 527065 - RNA, 22 nt, Human
uaagccgaugauaacacaaugc

SEQ ID NO: 527066 - RNA, 21 nt, Human
uaaggagcauccugcauuggc

SEQ ID NO: 527067 - RNA, 19 nt, Human
uagaagguucaguaacagc

SEQ ID NO: 527068 - RNA, 19 nt, Human
uagacagugggccucagaa

SEQ ID NO: 527069 - RNA, 24 nt, Human
uauaaagauacugguugauaccau

SEQ ID NO: 527070 - RNA, 22 nt, Human
uaucuucauuuccucagcaaaa

SEQ ID NO: 527071 - RNA, 22 nt, Human
uauuucaggacuguccuugcug

SEQ ID NO: 527072 - RNA, 19 nt, Human
uauuugccuggccucucaa

SEQ ID NO: 527073 - RNA, 24 nt, Human
ucaaacaacacaaaccccauaaac

SEQ ID NO: 527074 - RNA, 26 nt, Human
ucaaacaacacaaaccccauaaacuc

SEQ ID NO: 527075 - RNA, 25 nt, Human
ucaaacagcaggaauugguuuuugc

SEQ ID NO: 527076 - RNA, 22 nt, Human
ucaaagccugaaucguuaaaug

SEQ ID NO: 527077 - RNA, 20 nt, Human
uccaaaaugucacaggaaaa

SEQ ID NO: 527078 - RNA, 24 nt, Human
uccaggugaccagccaccugguuc

SEQ ID NO: 527079 - RNA, 23 nt, Human
ucccacuaucuucuugcugcaaa

SEQ ID NO: 527080 - RNA, 18 nt, Human
ucucauuuacuccuguuu

SEQ ID NO: 527081 - RNA, 23 nt, Human
ucuggcaagguagacagugggcc

SEQ ID NO: 527082 - RNA, 23 nt, Human
ugaaaauaaauaaacacaugcaa

SEQ ID NO: 527083 - RNA, 19 nt, Human
ugagcgaaacccaacagcc

SEQ ID NO: 527084 - RNA, 21 nt, Human
ugaguggugccaggggaagaa

SEQ ID NO: 527085 - RNA, 19 nt, Human
ugauaacacaaugccaaaa

SEQ ID NO: 527086 - RNA, 23 nt, Human
ugauagauuucuuucaaaggacc

SEQ ID NO: 527087 - RNA, 22 nt, Human
ugcaagaggaaagaggaacaau

SEQ ID NO: 527088 - RNA, 20 nt, Human
ugcauagaagguucaguaac

SEQ ID NO: 527089 - RNA, 26 nt, Human
ugccaggggaagaauuuuaaaagcag

SEQ ID NO: 527090 - RNA, 24 nt, Human
ugcuaaaauuggaacuuuaggcau

SEQ ID NO: 527091 - RNA, 22 nt, Human
ugcuuaucuucauuuccucagc

SEQ ID NO: 527092 - RNA, 23 nt, Human
uggaaagagagagaaaagggaau

SEQ ID NO: 527093 - RNA, 19 nt, Human
uggaaaggucagcaaauag

SEQ ID NO: 527094 - RNA, 23 nt, Human
uggaaauaggugaaaagauauga

SEQ ID NO: 527095 - RNA, 20 nt, Human
uggaguccuugccagagcca

SEQ ID NO: 527096 - RNA, 18 nt, Human
uggcaaggaugaaagcag

SEQ ID NO: 527097 - RNA, 22 nt, Human
uggcacaaacagcacagccaca

SEQ ID NO: 527098 - RNA, 24 nt, Human
uggcacaaacagcacagccacaaa

SEQ ID NO: 527099 - RNA, 19 nt, Human
uggcgauacgcacugagga

SEQ ID NO: 527100 - RNA, 20 nt, Human
uggugccaggggaagaauuu

SEQ ID NO: 527101 - RNA, 19 nt, Human
ugguucuaagucauauccc

SEQ ID NO: 527102 - RNA, 27 nt, Human
ugguugauaccauaggaccacagacgc

SEQ ID NO: 527103 - RNA, 20 nt, Human
uguccuugcuggcuccuuuc

SEQ ID NO: 527104 - RNA, 23 nt, Human
uguuuacuuguuauuuuugaagu

SEQ ID NO: 527105 - RNA, 20 nt, Human
uuaaaugccauccuuuacca

SEQ ID NO: 527106 - RNA, 24 nt, Human
uuaagaucaauuuucauauuuuga

SEQ ID NO: 527107 - RNA, 27 nt, Human
uuaagguuuuuuuuuucuuuuuuuuaa

SEQ ID NO: 527108 - RNA, 23 nt, Human
uucaaacaacacaaaccccauaa

SEQ ID NO: 527109 - RNA, 21 nt, Human
uucaucugagcaagaggggag

SEQ ID NO: 527110 - RNA, 23 nt, Human
uuccaaaaugucacaggaaaaga

SEQ ID NO: 527111 - RNA, 20 nt, Human
uuggcuuccuuuaaaaccug

SEQ ID NO: 527112 - RNA, 20 nt, Human
uugggagaugggagagguuu

SEQ ID NO: 527113 - RNA, 21 nt, Human
uuuucuccuucuccugcagcc

SEQ ID NO: 527114 - RNA, 23 nt, Human
uuuugcuuaucuucauuuccuca

SEQ ID NO: 527115 - RNA, 22 nt, Human
uuuuggucaugacaaagucuau

SEQ ID NO: 527116 - RNA, 19 nt, Human
uuuuuuuucuuuuuuuuaa

SEQ ID NO: 527117 - RNA, 24 nt, Human
uuuuuuuuucuuuuuuuuaaguuu

SEQ ID NO: 527118 - RNA, 20 nt, Human
uuuuuuuuuuuuaugggagu

SEQ ID NO: 527119 - RNA, 25 nt, Human
aaaaauaaggaaaaaaccuuuguac

SEQ ID NO: 527120 - RNA, 21 nt, Human
aacugguccacaggagaaaau

SEQ ID NO: 527121 - RNA, 25 nt, Human
acagcgaacucuucccagagcaccc

SEQ ID NO: 527122 - RNA, 19 nt, Human
acccgcccccaggcccaag

SEQ ID NO: 527123 - RNA, 18 nt, Human
agaagaaaacaggauucu

SEQ ID NO: 527124 - RNA, 26 nt, Human
agaagaaaacaggauucuaggcaaaa

SEQ ID NO: 527125 - RNA, 21 nt, Human
agagauucgauuugguugcca

SEQ ID NO: 527126 - RNA, 19 nt, Human
aggcaaaacuaacuggucc

SEQ ID NO: 527127 - RNA, 18 nt, Human
aggggcccggccaggagg

SEQ ID NO: 527128 - RNA, 24 nt, Human
aggggcugggcuggcaaaagaggg

SEQ ID NO: 527129 - RNA, 18 nt, Human
aucuccgucaaacgucuc

SEQ ID NO: 527130 - RNA, 19 nt, Human
caaaacuaacugguccaca

SEQ ID NO: 527131 - RNA, 23 nt, Human
caaaaggcacccaucagagagac

SEQ ID NO: 527132 - RNA, 20 nt, Human
cacaggagaaaaugagagau

SEQ ID NO: 527133 - RNA, 18 nt, Human
cagggggcucuccuuccu

SEQ ID NO: 527134 - RNA, 19 nt, Human
ccccaggcccaagggucuc

SEQ ID NO: 527135 - RNA, 19 nt, Human
cccgcccccaggcccaagg

SEQ ID NO: 527136 - RNA, 25 nt, Human
ccgcccccaggcccaagggucuccc

SEQ ID NO: 527137 - RNA, 21 nt, Human
cgcccccaggcccaagggucu

SEQ ID NO: 527138 - RNA, 20 nt, Human
cggcccaggagcugcagcag

SEQ ID NO: 527139 - RNA, 24 nt, Human
cgggaggggacaggagcgcagggg

SEQ ID NO: 527140 - RNA, 20 nt, Human
cgggugaugaggaacgucac

SEQ ID NO: 527141 - RNA, 19 nt, Human
cguccacgaacauguagga

SEQ ID NO: 527142 - RNA, 23 nt, Human
cuauuccuggaacaaaggcaagc

SEQ ID NO: 527143 - RNA, 25 nt, Human
cuccagcgacgcgccgcgggguacc

SEQ ID NO: 527144 - RNA, 20 nt, Human
cucccauccaaagacccgcu

SEQ ID NO: 527145 - RNA, 24 nt, Human
gagcugcagcaggagccuggagcg

SEQ ID NO: 527146 - RNA, 18 nt, Human
gcagggcuggccccguga

SEQ ID NO: 527147 - RNA, 23 nt, Human
ggcaaaacuaacugguccacagg

SEQ ID NO: 527148 - RNA, 19 nt, Human
gggacaucgcggcggcucg

SEQ ID NO: 527149 - RNA, 19 nt, Human
ggggagggaggcgcggagg

SEQ ID NO: 527150 - RNA, 21 nt, Human
ggggagggaggcgcggaggga

SEQ ID NO: 527151 - RNA, 18 nt, Human
gggggagggaggcgcgga

SEQ ID NO: 527152 - RNA, 22 nt, Human
gggucucccggccuagaagucc

SEQ ID NO: 527153 - RNA, 20 nt, Human
gguaaucauugagcaggggg

SEQ ID NO: 527154 - RNA, 19 nt, Human
ggugaugaggaacgucacc

SEQ ID NO: 527155 - RNA, 23 nt, Human
guccuccucccauccaaagaccc

SEQ ID NO: 527156 - RNA, 20 nt, Human
uagagugcggcccaggagcu

SEQ ID NO: 527157 - RNA, 26 nt, Human
ucgagggggagggaggcgcggaggga

SEQ ID NO: 527158 - RNA, 24 nt, Human
ucguccuccucccauccaaagacc

SEQ ID NO: 527159 - RNA, 21 nt, Human
ucugcacgaugaacuccggga

SEQ ID NO: 527160 - RNA, 21 nt, Human
ugccaggcacacuuaagcccu

SEQ ID NO: 527161 - RNA, 23 nt, Human
uucaucagcugcacccgaccguc

SEQ ID NO: 527162 - RNA, 18 nt, Human
uuccuggaacaaaggcaa

SEQ ID NO: 527163 - RNA, 18 nt, Human
uugaacaaaaggcaccca

SEQ ID NO: 527164 - RNA, 18 nt, Human
aaguaugguuuauuacgg

SEQ ID NO: 527165 - RNA, 23 nt, Human
agaaaaauguuacuaauauccau

SEQ ID NO: 527166 - RNA, 20 nt, Human
aucaagaacuagcuaccagu

SEQ ID NO: 527167 - RNA, 21 nt, Human
caaaugguagaaaaauguuac

SEQ ID NO: 527168 - RNA, 23 nt, Human
caaugguuuuguccacaucuaga

SEQ ID NO: 527169 - RNA, 19 nt, Human
ccuucccgcggcuuucccu

SEQ ID NO: 527170 - RNA, 23 nt, Human
cuaaacacacaguuagcuuugcu

SEQ ID NO: 527171 - RNA, 19 nt, Human
cuggcugacaacgaagggg

SEQ ID NO: 527172 - RNA, 23 nt, Human
gagcuagucacuuuuccugccac

SEQ ID NO: 527173 - RNA, 18 nt, Human
uggcagccgggugggagc

SEQ ID NO: 527174 - RNA, 19 nt, Human
uuuguccacaucuagauug

SEQ ID NO: 527175 - RNA, 21 nt, Human
uuuuuuuuuuacgagcaagua

SEQ ID NO: 527176 - RNA, 18 nt, Human
aagggugcugggaggccu

SEQ ID NO: 527177 - RNA, 18 nt, Human
accuuacuuaucuaagac

SEQ ID NO: 527178 - RNA, 25 nt, Human
acgaaaucgucccccgcagaaaagc

SEQ ID NO: 527179 - RNA, 30 nt, Human
acuggcccuggcccuggagucugcucagcc

SEQ ID NO: 527180 - RNA, 19 nt, Human
agcaccagagggacagagc

SEQ ID NO: 527181 - RNA, 22 nt, Human
agccauagggugccagguagcc

SEQ ID NO: 527182 - RNA, 21 nt, Human
aggaggacggacacuagguug

SEQ ID NO: 527183 - RNA, 23 nt, Human
agggugcugggaggccuuaggca

SEQ ID NO: 527184 - RNA, 27 nt, Human
cacauggaccaaacgggaaaaucagga

SEQ ID NO: 527185 - RNA, 21 nt, Human
caccagccugccucugcagga

SEQ ID NO: 527186 - RNA, 28 nt, Human
caccucuggccucuaaggagaaaggccu

SEQ ID NO: 527187 - RNA, 19 nt, Human
cacuagcuggagggaggcc

SEQ ID NO: 527188 - RNA, 21 nt, Human
cagcagagggguguuuuccag

SEQ ID NO: 527189 - RNA, 18 nt, Human
cagcucccaccuucaucc

SEQ ID NO: 527190 - RNA, 25 nt, Human
cagcuuccuagagucugggucuggg

SEQ ID NO: 527191 - RNA, 24 nt, Human
caggacaagaggaccaagcugccc

SEQ ID NO: 527192 - RNA, 19 nt, Human
cagggcagcaccucuggcc

SEQ ID NO: 527193 - RNA, 19 nt, Human
caggucccccugcaccucc

SEQ ID NO: 527194 - RNA, 20 nt, Human
ccacagcaagccccgccaga

SEQ ID NO: 527195 - RNA, 18 nt, Human
ccaccccagaugauggca

SEQ ID NO: 527196 - RNA, 18 nt, Human
ccaccuguuguucccggg

SEQ ID NO: 527197 - RNA, 22 nt, Human
ccacucccauccauguuccagg

SEQ ID NO: 527198 - RNA, 22 nt, Human
ccagcuuccuagagucuggguc

SEQ ID NO: 527199 - RNA, 19 nt, Human
ccagguagcccggccaccc

SEQ ID NO: 527200 - RNA, 22 nt, Human
cccagggucacaccagccugcc

SEQ ID NO: 527201 - RNA, 21 nt, Human
ccccaaggggccucugcuucc

SEQ ID NO: 527202 - RNA, 19 nt, Human
cccccgcagaaaagccccu

SEQ ID NO: 527203 - RNA, 20 nt, Human
ccccgcguggccagucaggu

SEQ ID NO: 527204 - RNA, 19 nt, Human
ccccugcaccuccagcucc

SEQ ID NO: 527205 - RNA, 21 nt, Human
ccccugcaccuccagcuccca

SEQ ID NO: 527206 - RNA, 23 nt, Human
cccgccagagucugaagggccuc

SEQ ID NO: 527207 - RNA, 22 nt, Human
cccuggcccuggagucugcuca

SEQ ID NO: 527208 - RNA, 23 nt, Human
ccuccacugcccccgcguggcca

SEQ ID NO: 527209 - RNA, 19 nt, Human
ccugcaccuccagcuccca

SEQ ID NO: 527210 - RNA, 21 nt, Human
cgggaaaaucaggaaagcugg

SEQ ID NO: 527211 - RNA, 24 nt, Human
cucccaccuucaucccgacaucuc

SEQ ID NO: 527212 - RNA, 19 nt, Human
cugauggccugacgcucuc

SEQ ID NO: 527213 - RNA, 24 nt, Human
cuggaccaccuguuguucccgggu

SEQ ID NO: 527214 - RNA, 24 nt, Human
cuucacauggaccaaacgggaaaa

SEQ ID NO: 527215 - RNA, 26 nt, Human
gaagaugcccuacaagccuccugugg

SEQ ID NO: 527216 - RNA, 21 nt, Human
gaccaaacgggaaaaucagga

SEQ ID NO: 527217 - RNA, 20 nt, Human
gaggggagaagggaacuggc

SEQ ID NO: 527218 - RNA, 19 nt, Human
gaggggccaggccacacuc

SEQ ID NO: 527219 - RNA, 19 nt, Human
gauggagggugaggaacag

SEQ ID NO: 527220 - RNA, 19 nt, Human
gccucugcuuccucagugc

SEQ ID NO: 527221 - RNA, 21 nt, Human
gcuuccucagugcccccugag

SEQ ID NO: 527222 - RNA, 23 nt, Human
gggcacccccaaggggccucugc

SEQ ID NO: 527223 - RNA, 18 nt, Human
gucugcucagccacacca

SEQ ID NO: 527224 - RNA, 25 nt, Human
guuccaggucccccugcaccuccag

SEQ ID NO: 527225 - RNA, 18 nt, Human
uauacugaggcauguuuu

SEQ ID NO: 527226 - RNA, 24 nt, Human
ucacucccagccagggcagcaccu

SEQ ID NO: 527227 - RNA, 21 nt, Human
uccacucccauccauguucca

SEQ ID NO: 527228 - RNA, 22 nt, Human
ucccagggucacaccagccugc

SEQ ID NO: 527229 - RNA, 18 nt, Human
ucccccgcagaaaagccc

SEQ ID NO: 527230 - RNA, 21 nt, Human
ucccccugcaccuccagcucc

SEQ ID NO: 527231 - RNA, 24 nt, Human
uccucagugcccccugagcuuuau

SEQ ID NO: 527232 - RNA, 18 nt, Human
ugcagcugcucccagaga

SEQ ID NO: 527233 - RNA, 22 nt, Human
ugccagguagcccggccacccu

SEQ ID NO: 527234 - RNA, 24 nt, Human
ugccuuuaaacucaagacuggcuc

SEQ ID NO: 527235 - RNA, 18 nt, Human
ugcugggaggccuuaggc

SEQ ID NO: 527236 - RNA, 23 nt, Human
uggaagaugcccuacaagccucc

SEQ ID NO: 527237 - RNA, 20 nt, Human
uggcagggcaaggaagacug

SEQ ID NO: 527238 - RNA, 24 nt, Human
uggcccuggcccuggagucugcuc

SEQ ID NO: 527239 - RNA, 20 nt, Human
ugggccaggagcacucuccc

SEQ ID NO: 527240 - RNA, 22 nt, Human
ugggccaggagcacucucccag

SEQ ID NO: 527241 - RNA, 23 nt, Human
ugggucuggguuuggccgggagg

SEQ ID NO: 527242 - RNA, 28 nt, Human
ugggucuggguuuggccgggaggggaga

SEQ ID NO: 527243 - RNA, 25 nt, Human
uguccacucccauccauguuccagg

SEQ ID NO: 527244 - RNA, 18 nt, Human
ugugaggcuggggcucgu

SEQ ID NO: 527245 - RNA, 19 nt, Human
uucacaugcagucugcugu

SEQ ID NO: 527246 - RNA, 21 nt, Human
uucaucccgacaucucccaug

SEQ ID NO: 527247 - RNA, 21 nt, Human
uuccaggucccccugcaccuc

SEQ ID NO: 527248 - RNA, 18 nt, Human
uucccgggucaaguuccc

SEQ ID NO: 527249 - RNA, 22 nt, Human
uuugaaguguaugggcccaaca

SEQ ID NO: 527250 - RNA, 24 nt, Human
uuuuuuuuuuuuuuuuuucguuuu

SEQ ID NO: 527251 - RNA, 26 nt, Human
uuuuuuuuuuuuuuuuuuuuucgggg

SEQ ID NO: 527252 - RNA, 21 nt, Human
aaacaaauuucaaagacuugg

SEQ ID NO: 527253 - RNA, 18 nt, Human
aaaggaaacaaauuucaa

SEQ ID NO: 527254 - RNA, 22 nt, Human
aacccgaagcgugcaccccacu

SEQ ID NO: 527255 - RNA, 21 nt, Human
aacugcacagacgccagccuc

SEQ ID NO: 527256 - RNA, 18 nt, Human
aagguggguggaagggcc

SEQ ID NO: 527257 - RNA, 24 nt, Human
aauggacgaggucugcauacugag

SEQ ID NO: 527258 - RNA, 20 nt, Human
acaauggcccugccuccccc

SEQ ID NO: 527259 - RNA, 18 nt, Human
accccacuuccggcccca

SEQ ID NO: 527260 - RNA, 21 nt, Human
acugccagggagguggaaaca

SEQ ID NO: 527261 - RNA, 23 nt, Human
aggcagaaccuggugcaaaugga

SEQ ID NO: 527262 - RNA, 18 nt, Human
agggccaggggccuugaa

SEQ ID NO: 527263 - RNA, 20 nt, Human
agguggguggaagggccagg

SEQ ID NO: 527264 - RNA, 22 nt, Human
caacacaauggcccugccuccc

SEQ ID NO: 527265 - RNA, 21 nt, Human
cacaccagcccagcccagccc

SEQ ID NO: 527266 - RNA, 24 nt, Human
caccaacccgaagcgugcacccca

SEQ ID NO: 527267 - RNA, 21 nt, Human
cacuuccggccccagaaugcc

SEQ ID NO: 527268 - RNA, 20 nt, Human
cagcagccacaccagcccag

SEQ ID NO: 527269 - RNA, 19 nt, Human
cagcagcccacaguugugg

SEQ ID NO: 527270 - RNA, 20 nt, Human
cagccacaccagcccagccc

SEQ ID NO: 527271 - RNA, 18 nt, Human
cagccucuaggccugacu

SEQ ID NO: 527272 - RNA, 19 nt, Human
cccagaaugccgcgcggcu

SEQ ID NO: 527273 - RNA, 24 nt, Human
cccggcagccccuacaggcccccc

SEQ ID NO: 527274 - RNA, 22 nt, Human
cccgugucuacugccuccccca

SEQ ID NO: 527275 - RNA, 21 nt, Human
ccgaagcgugcaccccacuuc

SEQ ID NO: 527276 - RNA, 18 nt, Human
ccuacaggccccccagau

SEQ ID NO: 527277 - RNA, 19 nt, Human
ccuacaggccccccagaug

SEQ ID NO: 527278 - RNA, 23 nt, Human
ccuacaggccccccagaugggcu

SEQ ID NO: 527279 - RNA, 22 nt, Human
cgugcaccccacuuccggcccc

SEQ ID NO: 527280 - RNA, 21 nt, Human
cuccccccgcuuuauuucuuu

SEQ ID NO: 527281 - RNA, 21 nt, Human
gaagccuuccccuggaacugg

SEQ ID NO: 527282 - RNA, 18 nt, Human
gaagcgugcaccccacuu

SEQ ID NO: 527283 - RNA, 19 nt, Human
gagggcaaaggugggugga

SEQ ID NO: 527284 - RNA, 22 nt, Human
gagggcaaagguggguggaagg

SEQ ID NO: 527285 - RNA, 22 nt, Human
gagugaaggcagaaccuggugc

SEQ ID NO: 527286 - RNA, 24 nt, Human
gccuugaagccuuccccuggaacu

SEQ ID NO: 527287 - RNA, 23 nt, Human
gcuucagcagccacaccagccca

SEQ ID NO: 527288 - RNA, 19 nt, Human
ggaagggccaggggccuug

SEQ ID NO: 527289 - RNA, 21 nt, Human
uacugccucccccaacugcac

SEQ ID NO: 527290 - RNA, 20 nt, Human
ucaaaggaaaggaaacaaau

SEQ ID NO: 527291 - RNA, 25 nt, Human
ucucgauacguuuggucuuucaugc

SEQ ID NO: 527292 - RNA, 20 nt, Human
ugacuucagcagcccacagu

SEQ ID NO: 527293 - RNA, 23 nt, Human
uggaaacacuggccaccagcccg

SEQ ID NO: 527294 - RNA, 25 nt, Human
ugucccgugucuacugccuccccca

SEQ ID NO: 527295 - RNA, 30 nt, Human
uucaaaggaaaggaaacaaauuucaaagaa

SEQ ID NO: 527296 - RNA, 18 nt, Human
uuccggccccagaaugcc

SEQ ID NO: 527297 - RNA, 23 nt, Human
agaggugccagcagccccacagg

SEQ ID NO: 527298 - RNA, 20 nt, Human
agcagcuacauagggucaac

SEQ ID NO: 527299 - RNA, 21 nt, Human
agcaggugguggugaagggac

SEQ ID NO: 527300 - RNA, 20 nt, Human
agcccucucccugccugagg

SEQ ID NO: 527301 - RNA, 18 nt, Human
agcuauggaauagaagca

SEQ ID NO: 527302 - RNA, 18 nt, Human
agcuguaaugaccuugcg

SEQ ID NO: 527303 - RNA, 21 nt, Human
aggaagugguggaggggaggc

SEQ ID NO: 527304 - RNA, 22 nt, Human
aggaagugguggaggggaggcu

SEQ ID NO: 527305 - RNA, 22 nt, Human
aggcugccaaugacugcagcug

SEQ ID NO: 527306 - RNA, 18 nt, Human
aggugguggugaagggac

SEQ ID NO: 527307 - RNA, 22 nt, Human
aggugguggugaagggacuggg

SEQ ID NO: 527308 - RNA, 24 nt, Human
aggugguggugaagggacuggggu

SEQ ID NO: 527309 - RNA, 20 nt, Human
caagcaauagccccgcacau

SEQ ID NO: 527310 - RNA, 20 nt, Human
caagucccugaaauccaggg

SEQ ID NO: 527311 - RNA, 23 nt, Human
cacagucccaugagccgucacag

SEQ ID NO: 527312 - RNA, 24 nt, Human
cacuucucgucccggcaucggaaa

SEQ ID NO: 527313 - RNA, 20 nt, Human
cagagccuaagccacagggu

SEQ ID NO: 527314 - RNA, 22 nt, Human
cagcccagggcgaugaccagga

SEQ ID NO: 527315 - RNA, 24 nt, Human
cagggaaggaagugguggagggga

SEQ ID NO: 527316 - RNA, 20 nt, Human
cccacucaucacugccgucc

SEQ ID NO: 527317 - RNA, 18 nt, Human
cccaggccagagccuaag

SEQ ID NO: 527318 - RNA, 21 nt, Human
ccguccgcacagucuggcugc

SEQ ID NO: 527319 - RNA, 19 nt, Human
ccugagggacacuuaacuu

SEQ ID NO: 527320 - RNA, 23 nt, Human
ccuucgccagcucccaggccaga

SEQ ID NO: 527321 - RNA, 25 nt, Human
cgcacacccacgucucauacacgca

SEQ ID NO: 527322 - RNA, 22 nt, Human
cggcaucggaaauugccaggcu

SEQ ID NO: 527323 - RNA, 19 nt, Human
cgggagaggggggcaaagg

SEQ ID NO: 527324 - RNA, 19 nt, Human
cuaguuaauuggcauuccg

SEQ ID NO: 527325 - RNA, 24 nt, Human
cucuaagaacuuuacuuuuuaaaa

SEQ ID NO: 527326 - RNA, 24 nt, Human
cuggcaaugccgacagcgucucuc

SEQ ID NO: 527327 - RNA, 18 nt, Human
cugguaguugcagcgguc

SEQ ID NO: 527328 - RNA, 18 nt, Human
gaaauugccaggcuggca

SEQ ID NO: 527329 - RNA, 20 nt, Human
gaaggaagugguggagggga

SEQ ID NO: 527330 - RNA, 19 nt, Human
gagcuugcaggugcagccc

SEQ ID NO: 527331 - RNA, 18 nt, Human
gcaaagaugcuguacucc

SEQ ID NO: 527332 - RNA, 19 nt, Human
gcacacccacgucucauac

SEQ ID NO: 527333 - RNA, 25 nt, Human
gccgcacacuaggcugccaaugacu

SEQ ID NO: 527334 - RNA, 18 nt, Human
ggaaggaagugguggagg

SEQ ID NO: 527335 - RNA, 18 nt, Human
ggacacuuaacuuuauag

SEQ ID NO: 527336 - RNA, 21 nt, Human
ggagaggggggcaaagaugcu

SEQ ID NO: 527337 - RNA, 19 nt, Human
ggcugcccaucgcacaccc

SEQ ID NO: 527338 - RNA, 19 nt, Human
gggaaggaagugguggagg

SEQ ID NO: 527339 - RNA, 23 nt, Human
ggucagcaggcagguagcaggcu

SEQ ID NO: 527340 - RNA, 21 nt, Human
ggucugucccaaggcaagcaa

SEQ ID NO: 527341 - RNA, 19 nt, Human
guagguggcauugaagccu

SEQ ID NO: 527342 - RNA, 21 nt, Human
guaguugcagcggucagcagg

SEQ ID NO: 527343 - RNA, 21 nt, Human
gugguggugaagggacugggg

SEQ ID NO: 527344 - RNA, 20 nt, Human
uagaagcauuuguugcacuc

SEQ ID NO: 527345 - RNA, 18 nt, Human
uagagcccccaggucccc

SEQ ID NO: 527346 - RNA, 22 nt, Human
uagcagcgcucaccuaggccuc

SEQ ID NO: 527347 - RNA, 21 nt, Human
uaggagcagucccacucauca

SEQ ID NO: 527348 - RNA, 21 nt, Human
uaggagggauuguggauggca

SEQ ID NO: 527349 - RNA, 27 nt, Human
ucacuguagcagcgcucaccuaggccu

SEQ ID NO: 527350 - RNA, 22 nt, Human
ucauacacgcacuucucguccc

SEQ ID NO: 527351 - RNA, 18 nt, Human
uccaggugggcagccugg

SEQ ID NO: 527352 - RNA, 19 nt, Human
uccaggugggcagccuggg

SEQ ID NO: 527353 - RNA, 21 nt, Human
ucccugaaauccagggacagg

SEQ ID NO: 527354 - RNA, 20 nt, Human
ucgccagcucccaggccaga

SEQ ID NO: 527355 - RNA, 19 nt, Human
ucugcccaaauccuccccu

SEQ ID NO: 527356 - RNA, 19 nt, Human
ugaccaggagcaggccgca

SEQ ID NO: 527357 - RNA, 21 nt, Human
ugaccaggagcaggccgcaca

SEQ ID NO: 527358 - RNA, 28 nt, Human
ugagggacacuuaacuuuauagcagcua

SEQ ID NO: 527359 - RNA, 24 nt, Human
ugcccaaauccuccccuugggggc

SEQ ID NO: 527360 - RNA, 24 nt, Human
ugccguagcuauggaauagaagca

SEQ ID NO: 527361 - RNA, 21 nt, Human
uggcaaugccgacagcgucuc

SEQ ID NO: 527362 - RNA, 18 nt, Human
uggcauugaagccucgug

SEQ ID NO: 527363 - RNA, 24 nt, Human
uggcguggggagcaggugguggug

SEQ ID NO: 527364 - RNA, 24 nt, Human
ugggcagccugggcaguccuccuc

SEQ ID NO: 527365 - RNA, 19 nt, Human
ugguagguggcauugaagc

SEQ ID NO: 527366 - RNA, 24 nt, Human
ugguggcguggggagcagguggug

SEQ ID NO: 527367 - RNA, 20 nt, Human
ugucccaaggcaagcaauag

SEQ ID NO: 527368 - RNA, 22 nt, Human
ugugagcccucucccugccuga

SEQ ID NO: 527369 - RNA, 23 nt, Human
uguggauggcaaaaccucagguu

SEQ ID NO: 527370 - RNA, 23 nt, Human
uuaaaaacagccacccaaauggu

SEQ ID NO: 527371 - RNA, 23 nt, Human
uuacuuuuuaaaaacagccaccc

SEQ ID NO: 527372 - RNA, 22 nt, Human
uugcaggugcagcccagggcga

SEQ ID NO: 527373 - RNA, 21 nt, Human
uugggggcuggagggucucua

SEQ ID NO: 527374 - RNA, 22 nt, Human
uugggggcuggagggucucuag

SEQ ID NO: 527375 - RNA, 25 nt, Human
uuuggcaaggauggaguguccagac

SEQ ID NO: 527376 - RNA, 22 nt, Human
uuuuuugagauguaugauuccu

SEQ ID NO: 527377 - RNA, 18 nt, Human
uuuuuuuuuuuuuuuuug

SEQ ID NO: 527378 - RNA, 18 nt, Human
aaaaagacagcaggaauc

SEQ ID NO: 527379 - RNA, 24 nt, Human
aaaccagaccaaaccaaaucaaaa

SEQ ID NO: 527380 - RNA, 21 nt, Human
aaagcagaaccccaccgcgga

SEQ ID NO: 527381 - RNA, 25 nt, Human
aaaggaagagggaaaucggcaggag

SEQ ID NO: 527382 - RNA, 22 nt, Human
aaccaaaucaaaauagcccauu

SEQ ID NO: 527383 - RNA, 21 nt, Human
aagaaaagcagaaccccaccg

SEQ ID NO: 527384 - RNA, 19 nt, Human
aagcaggauccccacugcg

SEQ ID NO: 527385 - RNA, 23 nt, Human
acccucacccuggccuccucgcg

SEQ ID NO: 527386 - RNA, 20 nt, Human
acuuucuauuucguuaauga

SEQ ID NO: 527387 - RNA, 24 nt, Human
agaaaagcagaaccccaccgcgga

SEQ ID NO: 527388 - RNA, 22 nt, Human
agacagcaggaaucagguagcc

SEQ ID NO: 527389 - RNA, 19 nt, Human
agaccaaaccaaaucaaaa

SEQ ID NO: 527390 - RNA, 20 nt, Human
agaccaaaccaaaucaaaau

SEQ ID NO: 527391 - RNA, 21 nt, Human
agcagggaggaacuuggaggu

SEQ ID NO: 527392 - RNA, 21 nt, Human
aggaacuguaggaggaagggg

SEQ ID NO: 527393 - RNA, 22 nt, Human
agggaguacgcggguggggugg

SEQ ID NO: 527394 - RNA, 22 nt, Human
aggggcugcagcgaagaggaga

SEQ ID NO: 527395 - RNA, 19 nt, Human
aggucucagagaaggaucu

SEQ ID NO: 527396 - RNA, 18 nt, Human
aucuaggguucguucuuc

SEQ ID NO: 527397 - RNA, 25 nt, Human
caaaccaaaucaaaauagcccauua

SEQ ID NO: 527398 - RNA, 25 nt, Human
caaaccagaccaaaccaaaucaaaa

SEQ ID NO: 527399 - RNA, 21 nt, Human
cacagcucguugaucccaaaa

SEQ ID NO: 527400 - RNA, 18 nt, Human
cacccucacccuggccuc

SEQ ID NO: 527401 - RNA, 22 nt, Human
caccuggcguagaaaaagacag

SEQ ID NO: 527402 - RNA, 19 nt, Human
caccuuauccccuccaaga

SEQ ID NO: 527403 - RNA, 27 nt, Human
caccuuauccccuccaagagucuccca

SEQ ID NO: 527404 - RNA, 19 nt, Human
cagagcagggaggaacuug

SEQ ID NO: 527405 - RNA, 22 nt, Human
cagcaggaaucagguagccaaa

SEQ ID NO: 527406 - RNA, 23 nt, Human
cagguagccaaaccagaccaaac

SEQ ID NO: 527407 - RNA, 23 nt, Human
cauaccaggcgcuggcagcauga

SEQ ID NO: 527408 - RNA, 24 nt, Human
cauuguacugccgcaagcgcugcg

SEQ ID NO: 527409 - RNA, 18 nt, Human
ccaauccgauugucuucu

SEQ ID NO: 527410 - RNA, 19 nt, Human
ccagaccaaaccaaaucaa

SEQ ID NO: 527411 - RNA, 18 nt, Human
cccaccuuauccccucca

SEQ ID NO: 527412 - RNA, 19 nt, Human
ccccaccuuauccccucca

SEQ ID NO: 527413 - RNA, 20 nt, Human
ccccaccuuauccccuccaa

SEQ ID NO: 527414 - RNA, 19 nt, Human
ccgggccccaccuuauccc

SEQ ID NO: 527415 - RNA, 20 nt, Human
ccgugagugggcggcgcguc

SEQ ID NO: 527416 - RNA, 23 nt, Human
ccucacccuggccuccucgcggc

SEQ ID NO: 527417 - RNA, 22 nt, Human
ccucacuagguggcucucuuug

SEQ ID NO: 527418 - RNA, 21 nt, Human
cggcaggcucgcgacagcuag

SEQ ID NO: 527419 - RNA, 21 nt, Human
gaaaaagacagcaggaaucag

SEQ ID NO: 527420 - RNA, 23 nt, Human
gauagcuccuuaagugacuccac

SEQ ID NO: 527421 - RNA, 24 nt, Human
gccaagcgccaccagccggucucu

SEQ ID NO: 527422 - RNA, 25 nt, Human
ggaggcgugcaaaaaggaagaggga

SEQ ID NO: 527423 - RNA, 21 nt, Human
ggagggaguacgcgggugggg

SEQ ID NO: 527424 - RNA, 25 nt, Human
ggcguugagggacugcugggaggaa

SEQ ID NO: 527425 - RNA, 23 nt, Human
gggaggggcugcagcgaagagga

SEQ ID NO: 527426 - RNA, 23 nt, Human
gggcggggcgggugauugggggc

SEQ ID NO: 527427 - RNA, 24 nt, Human
ggggaggggcugcagcgaagagga

SEQ ID NO: 527428 - RNA, 24 nt, Human
ggggcggggcgggugauugggggc

SEQ ID NO: 527429 - RNA, 24 nt, Human
ggggugccuaucagagugauggcg

SEQ ID NO: 527430 - RNA, 21 nt, Human
gggguggauuugggggagggg

SEQ ID NO: 527431 - RNA, 23 nt, Human
guagaaagaaaagcagaacccca

SEQ ID NO: 527432 - RNA, 18 nt, Human
gucacgccgcaccauacc

SEQ ID NO: 527433 - RNA, 30 nt, Human
gucuuuaaauuaaaaaaaaaaaagaaaaaa

SEQ ID NO: 527434 - RNA, 25 nt, Human
uaaaaaaucuaaccaauacacgauc

SEQ ID NO: 527435 - RNA, 24 nt, Human
uaaaacacugcagacccgugagaa

SEQ ID NO: 527436 - RNA, 22 nt, Human
uagaaagaaaagcagaacccca

SEQ ID NO: 527437 - RNA, 23 nt, Human
uagaaagaaaagcagaaccccac

SEQ ID NO: 527438 - RNA, 21 nt, Human
uagguggcucucuuugccgug

SEQ ID NO: 527439 - RNA, 23 nt, Human
uauuggugcaggucucagagaag

SEQ ID NO: 527440 - RNA, 18 nt, Human
ucaccuggcguagaaaaa

SEQ ID NO: 527441 - RNA, 18 nt, Human
ucagagugauggcgcuag

SEQ ID NO: 527442 - RNA, 22 nt, Human
uccgggccccaccuuauccccu

SEQ ID NO: 527443 - RNA, 20 nt, Human
ucuguccuuggaauuuauuu

SEQ ID NO: 527444 - RNA, 20 nt, Human
ucuuuauuucagcuuuuugg

SEQ ID NO: 527445 - RNA, 18 nt, Human
ugagaagagaaagguugc

SEQ ID NO: 527446 - RNA, 20 nt, Human
ugcaaaaaggaagagggaaa

SEQ ID NO: 527447 - RNA, 20 nt, Human
ugcaaaaaggaagagggaaa

SEQ ID NO: 527448 - RNA, 20 nt, Human
uggcagcaugaggggcauag

SEQ ID NO: 527449 - RNA, 21 nt, Human
uggcguagaaaaagacagcag

SEQ ID NO: 527450 - RNA, 22 nt, Human
uucaccuggcguagaaaaagac

SEQ ID NO: 527451 - RNA, 25 nt, Human
uuuccagcuauuucucauacacuuc

SEQ ID NO: 527452 - RNA, 20 nt, Human
agggauuuucagaaaaaggc

SEQ ID NO: 527453 - RNA, 21 nt, Human
caccagaaaaagggauuuuca

SEQ ID NO: 527454 - RNA, 18 nt, Human
uccaccagaaaaagggau

SEQ ID NO: 527455 - RNA, 23 nt, Human
ucugcgguuugggaagugcuggu

SEQ ID NO: 527456 - RNA, 19 nt, Human
uuuucagaaaaaggcacag

SEQ ID NO: 527457 - RNA, 23 nt, Human
uuuuuuuuuuuuuuuuccaccag

SEQ ID NO: 527458 - RNA, 25 nt, Human
uuuuuuuuuuuuuuuuuuccaccag

SEQ ID NO: 527459 - RNA, 23 nt, Human
uuuuuuuuuuuuuuuuuuuucca

SEQ ID NO: 527460 - RNA, 25 nt, Human
aaaauuacagaugccaguggaucca

SEQ ID NO: 527461 - RNA, 22 nt, Human
aaagaaaaauucugaauuucac

SEQ ID NO: 527462 - RNA, 23 nt, Human
aaagcucucccauaucucagacu

SEQ ID NO: 527463 - RNA, 18 nt, Human
aaauagcuuccugauuga

SEQ ID NO: 527464 - RNA, 24 nt, Human
aacccuugaccuuaucaaugaccu

SEQ ID NO: 527465 - RNA, 24 nt, Human
aauauuuuuauagaaguugucuga

SEQ ID NO: 527466 - RNA, 22 nt, Human
acccucccccgugaaagccaag

SEQ ID NO: 527467 - RNA, 19 nt, Human
acuagcuauugcagaccca

SEQ ID NO: 527468 - RNA, 18 nt, Human
acuccaaagugugugaag

SEQ ID NO: 527469 - RNA, 20 nt, Human
acuccaucaucuaagaacaa

SEQ ID NO: 527470 - RNA, 19 nt, Human
agaaagaagaugcagaaaa

SEQ ID NO: 527471 - RNA, 24 nt, Human
agaaccugauacuucccagauaac

SEQ ID NO: 527472 - RNA, 18 nt, Human
agagcaaaugugaaaaag

SEQ ID NO: 527473 - RNA, 18 nt, Human
agaucccagaaggcacag

SEQ ID NO: 527474 - RNA, 21 nt, Human
agaugccaguggauccacuug

SEQ ID NO: 527475 - RNA, 18 nt, Human
agcaagcaagcauuacuc

SEQ ID NO: 527476 - RNA, 22 nt, Human
aggccucuagguuccagguucu

SEQ ID NO: 527477 - RNA, 19 nt, Human
agguuccagguucuggacu

SEQ ID NO: 527478 - RNA, 20 nt, Human
agguuuguaugcagcagccu

SEQ ID NO: 527479 - RNA, 21 nt, Human
auacagaaucuucuggacuua

SEQ ID NO: 527480 - RNA, 22 nt, Human
auggaacaguaauaaaaaaccc

SEQ ID NO: 527481 - RNA, 24 nt, Human
auggaagaaauauauuaaaaagaa

SEQ ID NO: 527482 - RNA, 21 nt, Human
auucauuagcaagcaagcauu

SEQ ID NO: 527483 - RNA, 26 nt, Human
caaaauggaacaguaauaaaaaaccc

SEQ ID NO: 527484 - RNA, 24 nt, Human
cacagaugggaugaugcacuuccu

SEQ ID NO: 527485 - RNA, 20 nt, Human
cagauucuggauaguaaugu

SEQ ID NO: 527486 - RNA, 25 nt, Human
cagccugauccauaaauaauacacc

SEQ ID NO: 527487 - RNA, 26 nt, Human
cagccugauccauaaauaauacaccu

SEQ ID NO: 527488 - RNA, 20 nt, Human
caggauguugcaaaauggaa

SEQ ID NO: 527489 - RNA, 19 nt, Human
caguggauccacuuguccu

SEQ ID NO: 527490 - RNA, 26 nt, Human
cauccugacguguuccauccuccaaa

SEQ ID NO: 527491 - RNA, 18 nt, Human
caucugcuggagccaggc

SEQ ID NO: 527492 - RNA, 23 nt, Human
cauuagcaagcaagcauuacuca

SEQ ID NO: 527493 - RNA, 22 nt, Human
ccagaaccugauacuucccaga

SEQ ID NO: 527494 - RNA, 18 nt, Human
ccagaaugucuccuuuuc

SEQ ID NO: 527495 - RNA, 25 nt, Human
ccagagcaaaugugaaaaagcacag

SEQ ID NO: 527496 - RNA, 21 nt, Human
ccaucuaucuugccagaccuc

SEQ ID NO: 527497 - RNA, 24 nt, Human
ccaucuggaaauacgauucauuau

SEQ ID NO: 527498 - RNA, 23 nt, Human
cccagaaccugauacuucccaga

SEQ ID NO: 527499 - RNA, 18 nt, Human
ccgaguuguaauauucac

SEQ ID NO: 527500 - RNA, 20 nt, Human
ccucauuaucucaucaucug

SEQ ID NO: 527501 - RNA, 21 nt, Human
ccugauccauaaauaauacac

SEQ ID NO: 527502 - RNA, 20 nt, Human
cgugcagagagaaaggccuc

SEQ ID NO: 527503 - RNA, 23 nt, Human
cuaaaagcucucccauaucucag

SEQ ID NO: 527504 - RNA, 24 nt, Human
cucccagaaccugauacuucccag

SEQ ID NO: 527505 - RNA, 21 nt, Human
cucugugugcaacacauccug

SEQ ID NO: 527506 - RNA, 21 nt, Human
cugaauacaacccucccccgu

SEQ ID NO: 527507 - RNA, 23 nt, Human
cugaaucucugugugcaacacau

SEQ ID NO: 527508 - RNA, 23 nt, Human
cugacacacaaguaguuuuuaga

SEQ ID NO: 527509 - RNA, 23 nt, Human
cuuaaagucuccaaagcaaggac

SEQ ID NO: 527510 - RNA, 22 nt, Human
cuuaaugcuguugccucccaga

SEQ ID NO: 527511 - RNA, 22 nt, Human
cuuguccacucucaaaauccag

SEQ ID NO: 527512 - RNA, 23 nt, Human
gaacaaaacucucaauggggaaa

SEQ ID NO: 527513 - RNA, 19 nt, Human
gauguugcaaaauggaaca

SEQ ID NO: 527514 - RNA, 22 nt, Human
ggaagaaauauauuaaaaagaa

SEQ ID NO: 527515 - RNA, 20 nt, Human
gugcuguggcugaagguguc

SEQ ID NO: 527516 - RNA, 24 nt, Human
uaaagacauuaaaacuuugugcug

SEQ ID NO: 527517 - RNA, 19 nt, Human
uaauuugaaugucuccccu

SEQ ID NO: 527518 - RNA, 25 nt, Human
uaucucagacugcaaacuaccuguu

SEQ ID NO: 527519 - RNA, 23 nt, Human
ucaaaauccaucuggaaauacga

SEQ ID NO: 527520 - RNA, 19 nt, Human
ucagaagaugacucaagca

SEQ ID NO: 527521 - RNA, 19 nt, Human
uccacuuguccacucucaa

SEQ ID NO: 527522 - RNA, 24 nt, Human
uccauccuccaaaacuuucuuguu

SEQ ID NO: 527523 - RNA, 22 nt, Human
ucccagauaacccagagcaaau

SEQ ID NO: 527524 - RNA, 18 nt, Human
ucccccgugaaagccaag

SEQ ID NO: 527525 - RNA, 20 nt, Human
ucucagacugcaaacuaccu

SEQ ID NO: 527526 - RNA, 18 nt, Human
ucuccaaagcaaggacag

SEQ ID NO: 527527 - RNA, 21 nt, Human
ucugcuggagccaggcaaaua

SEQ ID NO: 527528 - RNA, 21 nt, Human
ucugugugcaacacauccuga

SEQ ID NO: 527529 - RNA, 21 nt, Human
ucuugucucccaggauggugu

SEQ ID NO: 527530 - RNA, 19 nt, Human
ugaaaaagcacagcaugca

SEQ ID NO: 527531 - RNA, 20 nt, Human
ugacaugauaauauuuuuau

SEQ ID NO: 527532 - RNA, 19 nt, Human
ugccuuuaagcagauuggc

SEQ ID NO: 527533 - RNA, 24 nt, Human
uggaacaguaauaaaaaacccacu

SEQ ID NO: 527534 - RNA, 19 nt, Human
uggacagggaugauugaug

SEQ ID NO: 527535 - RNA, 21 nt, Human
ugguguugcaggauguugcaa

SEQ ID NO: 527536 - RNA, 23 nt, Human
uguccacucucaaaauccaucug

SEQ ID NO: 527537 - RNA, 24 nt, Human
ugucuuaaagucuccaaagcaagg

SEQ ID NO: 527538 - RNA, 20 nt, Human
ugugugaagugguuacacag

SEQ ID NO: 527539 - RNA, 26 nt, Human
ugugugcaacacauccugacguggug

SEQ ID NO: 527540 - RNA, 23 nt, Human
uuaaagcuucagaagaugacuca

SEQ ID NO: 527541 - RNA, 23 nt, Human
uuccugaguucuuguauguuuga

SEQ ID NO: 527542 - RNA, 22 nt, Human
uuccuuggaacaaaacucucaa

SEQ ID NO: 527543 - RNA, 26 nt, Human
uucuguggcuacugagucauguuacu

SEQ ID NO: 527544 - RNA, 19 nt, Human
aaaaaaaucuggaaccaaa

SEQ ID NO: 527545 - RNA, 21 nt, Human
aaaacucuuuauuguccugcc

SEQ ID NO: 527546 - RNA, 22 nt, Human
aaaacucuuuauuguccugccc

SEQ ID NO: 527547 - RNA, 23 nt, Human
aaggggcuuccagggccggaguc

SEQ ID NO: 527548 - RNA, 18 nt, Human
acccuggugggugugggg

SEQ ID NO: 527549 - RNA, 23 nt, Human
agaaaaaaaucuggaaccaaaag

SEQ ID NO: 527550 - RNA, 21 nt, Human
agagcaggggggcgaggcggg

SEQ ID NO: 527551 - RNA, 23 nt, Human
agccaucaccagcaugaggucca

SEQ ID NO: 527552 - RNA, 25 nt, Human
aggagaaaaaaaucuggaaccaaaa

SEQ ID NO: 527553 - RNA, 20 nt, Human
aggaggggacagggugcuuc

SEQ ID NO: 527554 - RNA, 20 nt, Human
aggcaggaccccagcaggug

SEQ ID NO: 527555 - RNA, 18 nt, Human
agggacccagccagcccc

SEQ ID NO: 527556 - RNA, 21 nt, Human
agguccacucaccucucuggc

SEQ ID NO: 527557 - RNA, 21 nt, Human
aggugggggacagccccuuca

SEQ ID NO: 527558 - RNA, 21 nt, Human
auccugccagccccgaccccc

SEQ ID NO: 527559 - RNA, 26 nt, Human
caacagaagaacaaaggggcuuccag

SEQ ID NO: 527560 - RNA, 18 nt, Human
cacaacagcaggcccaac

SEQ ID NO: 527561 - RNA, 21 nt, Human
caccagcaugagguccacacc

SEQ ID NO: 527562 - RNA, 22 nt, Human
caccuugacaggugagcccaaa

SEQ ID NO: 527563 - RNA, 21 nt, Human
cacugcucugucuacacgguu

SEQ ID NO: 527564 - RNA, 18 nt, Human
cacuggcugugcuggcag

SEQ ID NO: 527565 - RNA, 23 nt, Human
cacuugucagguccacucaccuc

SEQ ID NO: 527566 - RNA, 22 nt, Human
cagcaggugguggcgggagcag

SEQ ID NO: 527567 - RNA, 20 nt, Human
cagccccgacccccggucca

SEQ ID NO: 527568 - RNA, 26 nt, Human
cagccccgacccccgguccacaacag

SEQ ID NO: 527569 - RNA, 20 nt, Human
cagcugccggcaggagucug

SEQ ID NO: 527570 - RNA, 20 nt, Human
cagggagacaacaaaccccc

SEQ ID NO: 527571 - RNA, 19 nt, Human
cauccugccagccccgacc

SEQ ID NO: 527572 - RNA, 23 nt, Human
ccaaauguccuccucuccccaua

SEQ ID NO: 527573 - RNA, 20 nt, Human
ccacagagcaggggggcgag

SEQ ID NO: 527574 - RNA, 18 nt, Human
ccacucaccucucuggcc

SEQ ID NO: 527575 - RNA, 22 nt, Human
ccagcaggugguggcgggagca

SEQ ID NO: 527576 - RNA, 24 nt, Human
ccagcucuggucccagggccaccu

SEQ ID NO: 527577 - RNA, 21 nt, Human
ccauccugccagccccgaccc

SEQ ID NO: 527578 - RNA, 19 nt, Human
cccaaauguccuccucucc

SEQ ID NO: 527579 - RNA, 25 nt, Human
cccaaauguccuccucuccccauac

SEQ ID NO: 527580 - RNA, 24 nt, Human
cccauacugggcacugggcugagg

SEQ ID NO: 527581 - RNA, 22 nt, Human
ccccacuucaugcugguccuca

SEQ ID NO: 527582 - RNA, 19 nt, Human
ccccagggcagcugccggc

SEQ ID NO: 527583 - RNA, 23 nt, Human
ccccagggcagcugccggcaggg

SEQ ID NO: 527584 - RNA, 20 nt, Human
ccccaugcugggaccagcuc

SEQ ID NO: 527585 - RNA, 18 nt, Human
ccucgggacccugguggg

SEQ ID NO: 527586 - RNA, 21 nt, Human
ccucgggacccuggugggugu

SEQ ID NO: 527587 - RNA, 24 nt, Human
ccugccagccccgacccccggucc

SEQ ID NO: 527588 - RNA, 21 nt, Human
ccuggggcuggggcugagccg

SEQ ID NO: 527589 - RNA, 21 nt, Human
cgaggcgggcggcacagggcc

SEQ ID NO: 527590 - RNA, 20 nt, Human
cgggagcagcucuacagagg

SEQ ID NO: 527591 - RNA, 18 nt, Human
cuggccucaaacugcagg

SEQ ID NO: 527592 - RNA, 19 nt, Human
cuggccucaaacugcaggg

SEQ ID NO: 527593 - RNA, 24 nt, Human
cuucaugcugguccucaguccuuc

SEQ ID NO: 527594 - RNA, 25 nt, Human
gaagccaaagccuuucaacagaaga

SEQ ID NO: 527595 - RNA, 23 nt, Human
gacagggugcuucugagaggcag

SEQ ID NO: 527596 - RNA, 20 nt, Human
gacugcacgggcuggaggau

SEQ ID NO: 527597 - RNA, 23 nt, Human
gagaaaaaaaucuggaaccaaaa

SEQ ID NO: 527598 - RNA, 25 nt, Human
gagcagcucuacagagggaagccaa

SEQ ID NO: 527599 - RNA, 21 nt, Human
gagcaggggggcgaggcgggc

SEQ ID NO: 527600 - RNA, 18 nt, Human
gagcgcugucuacacugc

SEQ ID NO: 527601 - RNA, 18 nt, Human
gcacugggcugaggcagg

SEQ ID NO: 527602 - RNA, 21 nt, Human
gcacugggcugaggcaggacc

SEQ ID NO: 527603 - RNA, 19 nt, Human
gcccagggagcccuuccca

SEQ ID NO: 527604 - RNA, 24 nt, Human
gcgggagcagcucuacagagggaa

SEQ ID NO: 527605 - RNA, 21 nt, Human
gcggggguggcggcggcggca

SEQ ID NO: 527606 - RNA, 20 nt, Human
ggacagccccuucagcuccc

SEQ ID NO: 527607 - RNA, 20 nt, Human
ggaccauucuagaggccagu

SEQ ID NO: 527608 - RNA, 20 nt, Human
ggacccuggugggugugggg

SEQ ID NO: 527609 - RNA, 18 nt, Human
ggagaaaaaaaucuggaa

SEQ ID NO: 527610 - RNA, 20 nt, Human
ggaggaggggacagggugcu

SEQ ID NO: 527611 - RNA, 18 nt, Human
ggaggcacugggaggccg

SEQ ID NO: 527612 - RNA, 24 nt, Human
ggccuggggaggaggggacagggu

SEQ ID NO: 527613 - RNA, 21 nt, Human
ggcugugcuggcaggccaccc

SEQ ID NO: 527614 - RNA, 21 nt, Human
gggcggggguggcggcggcgg

SEQ ID NO: 527615 - RNA, 18 nt, Human
gggcuggggcugagcgcu

SEQ ID NO: 527616 - RNA, 19 nt, Human
ggggcgaggcgggcggcac

SEQ ID NO: 527617 - RNA, 22 nt, Human
ggugaggagaaaaaaaucugga

SEQ ID NO: 527618 - RNA, 27 nt, Human
gguggcgggagcagcucuacagaggga

SEQ ID NO: 527619 - RNA, 20 nt, Human
guccaaugcugggaggcacu

SEQ ID NO: 527620 - RNA, 19 nt, Human
guccacaacagcaggccca

SEQ ID NO: 527621 - RNA, 18 nt, Human
gugggggacagccccuuc

SEQ ID NO: 527622 - RNA, 22 nt, Human
uacccggugcaccccaugcugg

SEQ ID NO: 527623 - RNA, 19 nt, Human
uacucuggcacuugucagg

SEQ ID NO: 527624 - RNA, 19 nt, Human
ucacaggccuggggaggag

SEQ ID NO: 527625 - RNA, 19 nt, Human
ucaguccuuccauccugcc

SEQ ID NO: 527626 - RNA, 23 nt, Human
uccacaacagcaggcccaacccu

SEQ ID NO: 527627 - RNA, 18 nt, Human
ucccccagggcagcugcc

SEQ ID NO: 527628 - RNA, 23 nt, Human
ucccccagggcagcugccggcag

SEQ ID NO: 527629 - RNA, 18 nt, Human
ucccugauggcacuggcu

SEQ ID NO: 527630 - RNA, 21 nt, Human
uccuccucuccccauacuggg

SEQ ID NO: 527631 - RNA, 25 nt, Human
uccugcccagggagcccuucccaaa

SEQ ID NO: 527632 - RNA, 26 nt, Human
ugacaggugagcccaaauguccuccu

SEQ ID NO: 527633 - RNA, 18 nt, Human
ugagguccacaccugggg

SEQ ID NO: 527634 - RNA, 19 nt, Human
uggaggaugccagaugggc

SEQ ID NO: 527635 - RNA, 23 nt, Human
ugggcacugggcugaggcaggac

SEQ ID NO: 527636 - RNA, 22 nt, Human
ugggcugaggcaggaccccagc

SEQ ID NO: 527637 - RNA, 18 nt, Human
uggggaggaggggacagg

SEQ ID NO: 527638 - RNA, 22 nt, Human
ugguggcgggagcagcucuaca

SEQ ID NO: 527639 - RNA, 23 nt, Human
ugguggguguggggccaccgagc

SEQ ID NO: 527640 - RNA, 24 nt, Human
uuaggugggggacagccccuucag

SEQ ID NO: 527641 - RNA, 18 nt, Human
uuccauccugccagcccc

SEQ ID NO: 527642 - RNA, 21 nt, Human
uuggugacaacgugaaggggg

SEQ ID NO: 527643 - RNA, 18 nt, Human
uuuuuuuuuuuuggaguc

SEQ ID NO: 527644 - RNA, 18 nt, Human
uuuuuuuuuuuuuuuuug

SEQ ID NO: 527645 - RNA, 18 nt, Human
uuuuuuuuuuuuuuuuug

SEQ ID NO: 527646 - RNA, 30 nt, Human
aaacugaauuuauuuccucuuggaaaacaa

SEQ ID NO: 527647 - RNA, 19 nt, Human
aaagaguaaaacauguucc

SEQ ID NO: 527648 - RNA, 18 nt, Human
aaauggaagcaaggcccc

SEQ ID NO: 527649 - RNA, 20 nt, Human
aagaaaaggaaguccaacca

SEQ ID NO: 527650 - RNA, 18 nt, Human
aagaguaaaacauguucc

SEQ ID NO: 527651 - RNA, 19 nt, Human
aagcaaggcccccaaagcc

SEQ ID NO: 527652 - RNA, 20 nt, Human
aaggcccccaaagccaucag

SEQ ID NO: 527653 - RNA, 26 nt, Human
agaguaaacauuaauaacaguaacau

SEQ ID NO: 527654 - RNA, 22 nt, Human
agggggccccuaacccgcaggg

SEQ ID NO: 527655 - RNA, 18 nt, Human
auaauaauggaaaaugga

SEQ ID NO: 527656 - RNA, 21 nt, Human
caugugcaacacuuuauauac

SEQ ID NO: 527657 - RNA, 23 nt, Human
ccugcaaggucuuggacugcgcu

SEQ ID NO: 527658 - RNA, 22 nt, Human
cugaauagggcccaaguccacu

SEQ ID NO: 527659 - RNA, 19 nt, Human
cugcaaggucuuggacugc

SEQ ID NO: 527660 - RNA, 20 nt, Human
cuuggacugcgcugucgcuc

SEQ ID NO: 527661 - RNA, 23 nt, Human
gaacauccaacaguuugauaaua

SEQ ID NO: 527662 - RNA, 28 nt, Human
ggaaaaccuugaacacucaaagcuucaa

SEQ ID NO: 527663 - RNA, 19 nt, Human
uacauaacaacuauugcau

SEQ ID NO: 527664 - RNA, 19 nt, Human
uaccugucacauugcaagg

SEQ ID NO: 527665 - RNA, 22 nt, Human
ucauuaaggaaaaccuugaaca

SEQ ID NO: 527666 - RNA, 18 nt, Human
uccacauaauaauggaaa

SEQ ID NO: 527667 - RNA, 22 nt, Human
uccagggaaaaaaaaauucuuu

SEQ ID NO: 527668 - RNA, 19 nt, Human
ucuaggcuuaaguguaaag

SEQ ID NO: 527669 - RNA, 22 nt, Human
ucucuucaugguuugcaagaau

SEQ ID NO: 527670 - RNA, 21 nt, Human
ugcgcaaaaguucaaacacau

SEQ ID NO: 527671 - RNA, 25 nt, Human
uggaaaauggaagcaaggcccccaa

SEQ ID NO: 527672 - RNA, 23 nt, Human
uggaagcaaggcccccaaagcca

SEQ ID NO: 527673 - RNA, 23 nt, Human
ugguacaauacaauguuucugaa

SEQ ID NO: 527674 - RNA, 24 nt, Human
uggucauagucuuuuuuuuuuuuu

SEQ ID NO: 527675 - RNA, 19 nt, Human
uguaaagaaaaggaagucc

SEQ ID NO: 527676 - RNA, 23 nt, Human
uucuuugacagucuacauaacaa

SEQ ID NO: 527677 - RNA, 21 nt, Human
uuuuuuuuaaucuugccugaa

SEQ ID NO: 527678 - RNA, 23 nt, Human
aaccagacaaaaucaacagccag

SEQ ID NO: 527679 - RNA, 27 nt, Human
aagaaaaaggcagaaauaaagggaccc

SEQ ID NO: 527680 - RNA, 19 nt, Human
acaaagcucucaaccaguu

SEQ ID NO: 527681 - RNA, 23 nt, Human
acuuuggaaacugaggagaaaga

SEQ ID NO: 527682 - RNA, 29 nt, Human
aggcagaaauaaaugguaggggggacccc

SEQ ID NO: 527683 - RNA, 25 nt, Human
auuccuucaguuagguccucuauua

SEQ ID NO: 527684 - RNA, 19 nt, Human
caacaaagcucucaaccag

SEQ ID NO: 527685 - RNA, 19 nt, Human
cagagagcuaugaugaaua

SEQ ID NO: 527686 - RNA, 20 nt, Human
cagagcccaaagcagagagc

SEQ ID NO: 527687 - RNA, 21 nt, Human
cagccagcaguuuucuguucc

SEQ ID NO: 527688 - RNA, 20 nt, Human
caguuagcuccucuacaguc

SEQ ID NO: 527689 - RNA, 19 nt, Human
cauuugcuaguagaaaaga

SEQ ID NO: 527690 - RNA, 20 nt, Human
ccagcaguuuucuguuccaa

SEQ ID NO: 527691 - RNA, 19 nt, Human
cccaacugugccugagggc

SEQ ID NO: 527692 - RNA, 25 nt, Human
ccugcagagcccaaagcagagagcu

SEQ ID NO: 527693 - RNA, 21 nt, Human
ccuuguaaacauucagcuagg

SEQ ID NO: 527694 - RNA, 18 nt, Human
cugcuuggcccaacugug

SEQ ID NO: 527695 - RNA, 22 nt, Human
ggagaaagaacugcuuucccca

SEQ ID NO: 527696 - RNA, 20 nt, Human
ggauuccuucaguuaggucc

SEQ ID NO: 527697 - RNA, 19 nt, Human
ggcaaagggugugcccaga

SEQ ID NO: 527698 - RNA, 22 nt, Human
gguggccugcagagcccaaagc

SEQ ID NO: 527699 - RNA, 22 nt, Human
uaacauaaccagaaaggcugaa

SEQ ID NO: 527700 - RNA, 19 nt, Human
uagggaaaacugaaaucug

SEQ ID NO: 527701 - RNA, 19 nt, Human
ucauagggaaaacugaaau

SEQ ID NO: 527702 - RNA, 22 nt, Human
ucccagcuugagaaguaggggc

SEQ ID NO: 527703 - RNA, 19 nt, Human
uccuaaaugcucucugguc

SEQ ID NO: 527704 - RNA, 23 nt, Human
ucuaaaauaacuccuuucauaua

SEQ ID NO: 527705 - RNA, 18 nt, Human
ucugcuuggcccaacugu

SEQ ID NO: 527706 - RNA, 23 nt, Human
ugaacggaagaaaaaggcagaaa

SEQ ID NO: 527707 - RNA, 22 nt, Human
ugccucagaguuucucauaggg

SEQ ID NO: 527708 - RNA, 18 nt, Human
uggcccaacugugccuga

SEQ ID NO: 527709 - RNA, 21 nt, Human
ugguagggucauuugcuagua

SEQ ID NO: 527710 - RNA, 18 nt, Human
uucaaggugacagcagaa

SEQ ID NO: 527711 - RNA, 19 nt, Human
uuccugaguucauucaagg

SEQ ID NO: 527712 - RNA, 18 nt, Human
uuuccucacaaugaacgg

SEQ ID NO: 527713 - RNA, 20 nt, Human
aaaagaggguuaaaaagcga

SEQ ID NO: 527714 - RNA, 26 nt, Human
aaacaagcaucaaaacccgaagcuca

SEQ ID NO: 527715 - RNA, 22 nt, Human
aacaagcaucaaaacccgaagc

SEQ ID NO: 527716 - RNA, 20 nt, Human
aagacugcugaucucuaaac

SEQ ID NO: 527717 - RNA, 19 nt, Human
aagcaucaaaacccgaagc

SEQ ID NO: 527718 - RNA, 21 nt, Human
acaagcaucaaaacccgaagc

SEQ ID NO: 527719 - RNA, 18 nt, Human
acuacagccuaaugcacc

SEQ ID NO: 527720 - RNA, 25 nt, Human
agagauuagcaaggcuuacuggcua

SEQ ID NO: 527721 - RNA, 18 nt, Human
agcaucaaaacccgaagc

SEQ ID NO: 527722 - RNA, 19 nt, Human
agugaagagacagcagaga

SEQ ID NO: 527723 - RNA, 23 nt, Human
auauuuuaaaaggaauggcacaa

SEQ ID NO: 527724 - RNA, 18 nt, Human
aucacaguaugcaaaugc

SEQ ID NO: 527725 - RNA, 18 nt, Human
aucuucaguuacaaaaua

SEQ ID NO: 527726 - RNA, 19 nt, Human
caaaagaggguuaaaaagc

SEQ ID NO: 527727 - RNA, 25 nt, Human
caauauuagaacuacagccuaaugc

SEQ ID NO: 527728 - RNA, 25 nt, Human
cacaguauaauagguaucugcaaug

SEQ ID NO: 527729 - RNA, 21 nt, Human
cacaguaugcaaaugcacuag

SEQ ID NO: 527730 - RNA, 25 nt, Human
caccuuuuaauacauuacuuuauaa

SEQ ID NO: 527731 - RNA, 18 nt, Human
cagccacccgcacuggcc

SEQ ID NO: 527732 - RNA, 20 nt, Human
cagccgggauagacagcccc

SEQ ID NO: 527733 - RNA, 18 nt, Human
caggaaaggcccccgcua

SEQ ID NO: 527734 - RNA, 24 nt, Human
caggaaaggcccccgcuaauggca

SEQ ID NO: 527735 - RNA, 22 nt, Human
cauuuuacagcuguaguaacca

SEQ ID NO: 527736 - RNA, 21 nt, Human
cccccacagccccaccuaacc

SEQ ID NO: 527737 - RNA, 21 nt, Human
cccccacagccccaccuaacu

SEQ ID NO: 527738 - RNA, 18 nt, Human
ccccccucccuguuuucc

SEQ ID NO: 527739 - RNA, 18 nt, Human
ccguacgccguccucagg

SEQ ID NO: 527740 - RNA, 18 nt, Human
cugaaauccccccucccu

SEQ ID NO: 527741 - RNA, 24 nt, Human
cugaucucuaaacaagcaucaaaa

SEQ ID NO: 527742 - RNA, 18 nt, Human
cuucaaaaaugcaugguc

SEQ ID NO: 527743 - RNA, 21 nt, Human
gcaccuuuuaauacauuacuu

SEQ ID NO: 527744 - RNA, 19 nt, Human
ggcuaaagaacaauucacu

SEQ ID NO: 527745 - RNA, 19 nt, Human
ggcuaaugaagagaaaaag

SEQ ID NO: 527746 - RNA, 26 nt, Human
ggguccucagccgggauagacagccc

SEQ ID NO: 527747 - RNA, 19 nt, Human
uaaaaagcgaucagcacug

SEQ ID NO: 527748 - RNA, 26 nt, Human
uaaaauuuccaaaacaacuguuacac

SEQ ID NO: 527749 - RNA, 18 nt, Human
uaaagcaaauucacugua

SEQ ID NO: 527750 - RNA, 24 nt, Human
uaacaugagaagaauaauccaugc

SEQ ID NO: 527751 - RNA, 18 nt, Human
uaauucaaugcccaagag

SEQ ID NO: 527752 - RNA, 20 nt, Human
uagcaaggcuuacuggcuag

SEQ ID NO: 527753 - RNA, 20 nt, Human
uagcuucuaaaaaauuuuuc

SEQ ID NO: 527754 - RNA, 22 nt, Human
uagcuucuaaaaaauuuuuccc

SEQ ID NO: 527755 - RNA, 22 nt, Human
uagguuauuaauggaaauauua

SEQ ID NO: 527756 - RNA, 22 nt, Human
uccaaaacaacuguuacacagu

SEQ ID NO: 527757 - RNA, 19 nt, Human
uccaugcuacaagacgaga

SEQ ID NO: 527758 - RNA, 25 nt, Human
uccccacacuccguacgccguccuc

SEQ ID NO: 527759 - RNA, 22 nt, Human
ucccccacagccccaccuaacc

SEQ ID NO: 527760 - RNA, 20 nt, Human
uccucaggaaaggcccccgc

SEQ ID NO: 527761 - RNA, 19 nt, Human
ucuaaauuuaaauuaguca

SEQ ID NO: 527762 - RNA, 21 nt, Human
ucugaaauccccccucccugu

SEQ ID NO: 527763 - RNA, 19 nt, Human
ucugcaaugaguagguuau

SEQ ID NO: 527764 - RNA, 19 nt, Human
ugcaaauguacaguuaaua

SEQ ID NO: 527765 - RNA, 23 nt, Human
uggguuuaacaugagaagaauaa

SEQ ID NO: 527766 - RNA, 24 nt, Human
uuaaagcaaauucacuguaccacu

SEQ ID NO: 527767 - RNA, 20 nt, Human
uuaaugcacaacaaaagagg

SEQ ID NO: 527768 - RNA, 21 nt, Human
uuaaugcacaacaaaagaggg

SEQ ID NO: 527769 - RNA, 20 nt, Human
uuagaacuacagccuaaugc

SEQ ID NO: 527770 - RNA, 19 nt, Human
uucaacuuucuucacaguc

SEQ ID NO: 527771 - RNA, 23 nt, Human
uucaacuuucuucacagucugaa

SEQ ID NO: 527772 - RNA, 18 nt, Human
uucaauaccuuucuuucu

SEQ ID NO: 527773 - RNA, 22 nt, Human
uucaauaccuuucuuucuaauu

SEQ ID NO: 527774 - RNA, 19 nt, Human
uuccagugaagagacaggg

SEQ ID NO: 527775 - RNA, 21 nt, Human
uucccccacagccccaccuaa

SEQ ID NO: 527776 - RNA, 26 nt, Human
uuucccauagugucagaggcaaaaau

SEQ ID NO: 527777 - RNA, 20 nt, Human
uuuuacagcuguaguaaccu

SEQ ID NO: 527778 - RNA, 23 nt, Human
uuuuuuuuuuuuuuuuucaccaa

SEQ ID NO: 527779 - RNA, 20 nt, Human
aaaaagaaaacgaaaauagu

SEQ ID NO: 527780 - RNA, 23 nt, Human
aaacaaaauacuaugaggccaga

SEQ ID NO: 527781 - RNA, 27 nt, Human
aaaccuccgagcaauauagcaagaccc

SEQ ID NO: 527782 - RNA, 18 nt, Human
aacaccguggguuaagag

SEQ ID NO: 527783 - RNA, 21 nt, Human
aacugugugcuccugcaggau

SEQ ID NO: 527784 - RNA, 23 nt, Human
aagaaugaaauaacgugagagaa

SEQ ID NO: 527785 - RNA, 21 nt, Human
aagacccagcuaagaucagaa

SEQ ID NO: 527786 - RNA, 24 nt, Human
aaucaugccacugcacucuggccu

SEQ ID NO: 527787 - RNA, 23 nt, Human
aauugcucuggaaaggaagguaa

SEQ ID NO: 527788 - RNA, 24 nt, Human
aauugcucuggaaaggaagguaag

SEQ ID NO: 527789 - RNA, 25 nt, Human
acagaacaagacuuugucucuaaaa

SEQ ID NO: 527790 - RNA, 21 nt, Human
acauaaagcaaacauauuuug

SEQ ID NO: 527791 - RNA, 18 nt, Human
acuaugaggccagacuuu

SEQ ID NO: 527792 - RNA, 24 nt, Human
acugcacucuggccuaggcaacag

SEQ ID NO: 527793 - RNA, 26 nt, Human
agaaaaagaaugaaauaacgugagag

SEQ ID NO: 527794 - RNA, 23 nt, Human
agaacaagacuuugucucuaaaa

SEQ ID NO: 527795 - RNA, 21 nt, Human
agagaugugaggaauaagaca

SEQ ID NO: 527796 - RNA, 22 nt, Human
agaggaacauuucuuuuuuagg

SEQ ID NO: 527797 - RNA, 24 nt, Human
agcgcuuugggaggccacaguggg

SEQ ID NO: 527798 - RNA, 19 nt, Human
aggaaaaaaauaaagcuga

SEQ ID NO: 527799 - RNA, 20 nt, Human
aggaaaaaaauaaagcugaa

SEQ ID NO: 527800 - RNA, 23 nt, Human
aggaggagacaauugcucuggaa

SEQ ID NO: 527801 - RNA, 24 nt, Human
aggcucuguuuaaaaaaaaaaaaa

SEQ ID NO: 527802 - RNA, 26 nt, Human
agggagaggaacauuucuuuuuuagg

SEQ ID NO: 527803 - RNA, 21 nt, Human
aggugcccuuggucagucuga

SEQ ID NO: 527804 - RNA, 21 nt, Human
agugugaauuuagaaaaagaa

SEQ ID NO: 527805 - RNA, 19 nt, Human
aguuucccaagcaccucuc

SEQ ID NO: 527806 - RNA, 23 nt, Human
aucacugugcuacaguaaacuuc

SEQ ID NO: 527807 - RNA, 23 nt, Human
aucaugccacugcacucuggccu

SEQ ID NO: 527808 - RNA, 22 nt, Human
auccuagcgcuuugggaggcca

SEQ ID NO: 527809 - RNA, 22 nt, Human
auggacacaggauuuaacccag

SEQ ID NO: 527810 - RNA, 25 nt, Human
caacagaacaagacuuugucucuaa

SEQ ID NO: 527811 - RNA, 19 nt, Human
cacauuugugagaccagca

SEQ ID NO: 527812 - RNA, 19 nt, Human
cacugcacucuggccuagg

SEQ ID NO: 527813 - RNA, 21 nt, Human
cacugcacucuggccuaggca

SEQ ID NO: 527814 - RNA, 22 nt, Human
cacugcacucuggccuaggcaa

SEQ ID NO: 527815 - RNA, 23 nt, Human
cacugcacucuggccuaggcaac

SEQ ID NO: 527816 - RNA, 24 nt, Human
cacugcacucuggccuaggcaaca

SEQ ID NO: 527817 - RNA, 20 nt, Human
cacuucuccuuccucucuuu

SEQ ID NO: 527818 - RNA, 24 nt, Human
cagacuuuuuuuucccagaggccc

SEQ ID NO: 527819 - RNA, 18 nt, Human
cagaggugaaagggaaga

SEQ ID NO: 527820 - RNA, 19 nt, Human
caggacugaaacaaaauac

SEQ ID NO: 527821 - RNA, 21 nt, Human
caggaugaaggugucuggucc

SEQ ID NO: 527822 - RNA, 24 nt, Human
caguauagaggacucuuaggacag

SEQ ID NO: 527823 - RNA, 24 nt, Human
caugcuuguaauccuagcgcuuug

SEQ ID NO: 527824 - RNA, 20 nt, Human
cauggcuaaguuuucuucuc

SEQ ID NO: 527825 - RNA, 20 nt, Human
ccaaaggaguggaggagucc

SEQ ID NO: 527826 - RNA, 19 nt, Human
ccacugcacucuggccuag

SEQ ID NO: 527827 - RNA, 20 nt, Human
ccacugcacucuggccuagg

SEQ ID NO: 527828 - RNA, 20 nt, Human
ccacugcacucuggccuagg

SEQ ID NO: 527829 - RNA, 21 nt, Human
ccacugcacucuggccuaggc

SEQ ID NO: 527830 - RNA, 24 nt, Human
ccacugcacucuggccuaggcaac

SEQ ID NO: 527831 - RNA, 22 nt, Human
ccagcacucucucugaucuccu

SEQ ID NO: 527832 - RNA, 21 nt, Human
cccaaaggaguggaggagucc

SEQ ID NO: 527833 - RNA, 24 nt, Human
cccugcacauaugcagaaccagca

SEQ ID NO: 527834 - RNA, 22 nt, Human
ccucguaacagcacugaauacc

SEQ ID NO: 527835 - RNA, 23 nt, Human
cgcagaaugaagucauacuauga

SEQ ID NO: 527836 - RNA, 24 nt, Human
cguggcucaugcuuguaauccuag

SEQ ID NO: 527837 - RNA, 20 nt, Human
cucacuucuccuuccucucu

SEQ ID NO: 527838 - RNA, 24 nt, Human
cucaugcuuguaauccuagcgcuu

SEQ ID NO: 527839 - RNA, 23 nt, Human
cucuguuuaaaaaaaaaaaaaaa

SEQ ID NO: 527840 - RNA, 21 nt, Human
gaaaggcuuagagccugcagg

SEQ ID NO: 527841 - RNA, 22 nt, Human
gaacugauaagaguuuugagau

SEQ ID NO: 527842 - RNA, 19 nt, Human
gaagagaugggauguugcc

SEQ ID NO: 527843 - RNA, 23 nt, Human
gaagggcuggcugccguggcuca

SEQ ID NO: 527844 - RNA, 19 nt, Human
gaaugagcaacaccguggg

SEQ ID NO: 527845 - RNA, 21 nt, Human
gagccugcaggugucauuugg

SEQ ID NO: 527846 - RNA, 25 nt, Human
gagcucgaucacagugaugaagggc

SEQ ID NO: 527847 - RNA, 19 nt, Human
gcaggauggauggcagugg

SEQ ID NO: 527848 - RNA, 20 nt, Human
gccacugcacucuggccuag

SEQ ID NO: 527849 - RNA, 22 nt, Human
gcccacauuugugagaccagca

SEQ ID NO: 527850 - RNA, 20 nt, Human
gcccugcacauaugcagaac

SEQ ID NO: 527851 - RNA, 22 nt, Human
gccuaggcaacagaacaagacu

SEQ ID NO: 527852 - RNA, 20 nt, Human
gcgcuuugggaggccacagu

SEQ ID NO: 527853 - RNA, 21 nt, Human
ggaagguaaguacuuccuucu

SEQ ID NO: 527854 - RNA, 24 nt, Human
ggcugccguggcucaugcuuguaa

SEQ ID NO: 527855 - RNA, 20 nt, Human
guccagaccugccacugcag

SEQ ID NO: 527856 - RNA, 19 nt, Human
guggcccugcacauaugca

SEQ ID NO: 527857 - RNA, 20 nt, Human
guggcucaugcuuguaaucc

SEQ ID NO: 527858 - RNA, 25 nt, Human
uaaaagagcagcuugguagaaugua

SEQ ID NO: 527859 - RNA, 21 nt, Human
uaaaguccucaguuuguuuuc

SEQ ID NO: 527860 - RNA, 28 nt, Human
uaaauaaaccucugagagcgaaacagga

SEQ ID NO: 527861 - RNA, 24 nt, Human
uaacagcacugaauaccgcagaau

SEQ ID NO: 527862 - RNA, 23 nt, Human
uaacgugagagaaugagcaacac

SEQ ID NO: 527863 - RNA, 18 nt, Human
uaagaguguagaggagga

SEQ ID NO: 527864 - RNA, 19 nt, Human
uaagaguguagaggaggag

SEQ ID NO: 527865 - RNA, 19 nt, Human
uaagauuaaaagagacuuu

SEQ ID NO: 527866 - RNA, 20 nt, Human
uaaggcaaaguagaggugag

SEQ ID NO: 527867 - RNA, 24 nt, Human
uaaguauggacacaggauuuaacc

SEQ ID NO: 527868 - RNA, 24 nt, Human
uaagugacuuguucaagcccuugu

SEQ ID NO: 527869 - RNA, 24 nt, Human
uacaaucaugccacugcacucugg

SEQ ID NO: 527870 - RNA, 20 nt, Human
uacaggcaccuugagaugag

SEQ ID NO: 527871 - RNA, 18 nt, Human
uagagugguggucuucaa

SEQ ID NO: 527872 - RNA, 22 nt, Human
uagagugguggucuucaaggac

SEQ ID NO: 527873 - RNA, 21 nt, Human
uagcaaaccuccgagcaauau

SEQ ID NO: 527874 - RNA, 24 nt, Human
uagcgcuuugggaggccacagugg

SEQ ID NO: 527875 - RNA, 21 nt, Human
uaguaacgaggcccaguuauc

SEQ ID NO: 527876 - RNA, 21 nt, Human
uauagcaagacccugccucua

SEQ ID NO: 527877 - RNA, 22 nt, Human
uaucucuuucaaugcuuacacu

SEQ ID NO: 527878 - RNA, 18 nt, Human
ucaguacuaacagaagca

SEQ ID NO: 527879 - RNA, 25 nt, Human
ucaguacuaacagaagcacuucgag

SEQ ID NO: 527880 - RNA, 24 nt, Human
ucccacuuucuccccucguaacag

SEQ ID NO: 527881 - RNA, 18 nt, Human
ucgcucuuguugcccagg

SEQ ID NO: 527882 - RNA, 22 nt, Human
ucuaaggcaaaguagaggugag

SEQ ID NO: 527883 - RNA, 23 nt, Human
ucuacacaugaaaggcuuagagc

SEQ ID NO: 527884 - RNA, 19 nt, Human
ucuccauggcuaaguuuuc

SEQ ID NO: 527885 - RNA, 18 nt, Human
ucucugaucuccucuccc

SEQ ID NO: 527886 - RNA, 18 nt, Human
ucugguccuguucucauc

SEQ ID NO: 527887 - RNA, 19 nt, Human
ucuuguugcccaggcucug

SEQ ID NO: 527888 - RNA, 18 nt, Human
ugaaaagugcgauugaga

SEQ ID NO: 527889 - RNA, 18 nt, Human
ugaaagaugaagaaaagg

SEQ ID NO: 527890 - RNA, 23 nt, Human
ugaaagaugaagaaaaggauggc

SEQ ID NO: 527891 - RNA, 19 nt, Human
ugacagcaauaguaagaag

SEQ ID NO: 527892 - RNA, 19 nt, Human
ugagagagguuaagugacu

SEQ ID NO: 527893 - RNA, 18 nt, Human
ugauauacucuacccaga

SEQ ID NO: 527894 - RNA, 20 nt, Human
ugcacaaucacugugcuaca

SEQ ID NO: 527895 - RNA, 23 nt, Human
ugcuuguaauccuagcgcuuugg

SEQ ID NO: 527896 - RNA, 24 nt, Human
ugcuuguaauccuagcgcuuuggg

SEQ ID NO: 527897 - RNA, 20 nt, Human
uggaguaaauaaaccucuga

SEQ ID NO: 527898 - RNA, 25 nt, Human
uggaguaaauaaaccucugagagcg

SEQ ID NO: 527899 - RNA, 25 nt, Human
uggcagaggugaaagggaagagaug

SEQ ID NO: 527900 - RNA, 23 nt, Human
uggcaguggcccugcacauaugc

SEQ ID NO: 527901 - RNA, 19 nt, Human
uggcuaaguuuucuucucu

SEQ ID NO: 527902 - RNA, 19 nt, Human
uggcucaugcuuguaaucc

SEQ ID NO: 527903 - RNA, 23 nt, Human
uggcucaugcuuguaauccuagc

SEQ ID NO: 527904 - RNA, 24 nt, Human
uggcucaugcuuguaauccuagcg

SEQ ID NO: 527905 - RNA, 18 nt, Human
ugguggcacauaccuaua

SEQ ID NO: 527906 - RNA, 22 nt, Human
ugucauuugguccagaccugcc

SEQ ID NO: 527907 - RNA, 23 nt, Human
ugugugcuccugcaggauggaug

SEQ ID NO: 527908 - RNA, 23 nt, Human
uuaaaaaaaaaaaaaaaaaaagg

SEQ ID NO: 527909 - RNA, 20 nt, Human
uucauggaagccagaaugca

SEQ ID NO: 527910 - RNA, 20 nt, Human
uuccucucuuuguuaaaaag

SEQ ID NO: 527911 - RNA, 24 nt, Human
uuguagaaacugagaaaaaaggua

SEQ ID NO: 527912 - RNA, 23 nt, Human
uuguugcccaggcucuguuuaaa

SEQ ID NO: 527913 - RNA, 23 nt, Human
uuucgcucuuguugcccaggcuc

SEQ ID NO: 527914 - RNA, 24 nt, Human
uuuguagaaacugagaaaaaaggu

SEQ ID NO: 527915 - RNA, 20 nt, Human
aaaaaccuagugaaaaugga

SEQ ID NO: 527916 - RNA, 28 nt, Human
aaaacacaacacaauuuauaauaccuug

SEQ ID NO: 527917 - RNA, 21 nt, Human
aacaauaauaaugcaauccag

SEQ ID NO: 527918 - RNA, 22 nt, Human
aagcacgaggcagaaacucgag

SEQ ID NO: 527919 - RNA, 26 nt, Human
aagcagaaaacuaaaaggagggaccc

SEQ ID NO: 527920 - RNA, 21 nt, Human
aauaaaaaggccacauccuga

SEQ ID NO: 527921 - RNA, 20 nt, Human
acaaugccacacaguacaca

SEQ ID NO: 527922 - RNA, 18 nt, Human
acgacccugggcucuggg

SEQ ID NO: 527923 - RNA, 19 nt, Human
acucauuuuaagccaucug

SEQ ID NO: 527924 - RNA, 19 nt, Human
agaaagcuccaaagcaaua

SEQ ID NO: 527925 - RNA, 23 nt, Human
agaaauucuuucacaccaagucc

SEQ ID NO: 527926 - RNA, 24 nt, Human
aggaaacaaaaauggggaagaaga

SEQ ID NO: 527927 - RNA, 20 nt, Human
aggcagggcgcugucagccu

SEQ ID NO: 527928 - RNA, 20 nt, Human
aggcugcagagcacaaaggu

SEQ ID NO: 527929 - RNA, 18 nt, Human
agggggaagcagcagcgg

SEQ ID NO: 527930 - RNA, 18 nt, Human
agugcuaaaaauuauacc

SEQ ID NO: 527931 - RNA, 23 nt, Human
auaaugcaauccaggucaaagca

SEQ ID NO: 527932 - RNA, 20 nt, Human
auagaaccaaugaauguacu

SEQ ID NO: 527933 - RNA, 18 nt, Human
aucauucuggaaaggauc

SEQ ID NO: 527934 - RNA, 23 nt, Human
augauuucagagaaggaauagca

SEQ ID NO: 527935 - RNA, 19 nt, Human
augccacacaguacacauu

SEQ ID NO: 527936 - RNA, 25 nt, Human
caaaaauauuguuaacacuggccgu

SEQ ID NO: 527937 - RNA, 28 nt, Human
caaaugugcuugauguuguuucggcucg

SEQ ID NO: 527938 - RNA, 18 nt, Human
caacaaacccauaaucaa

SEQ ID NO: 527939 - RNA, 19 nt, Human
cacuuuaaaaaaggaugaa

SEQ ID NO: 527940 - RNA, 23 nt, Human
cagcccgcaggaagcacgaccag

SEQ ID NO: 527941 - RNA, 23 nt, Human
cagcgcccgcgcggucuccuuca

SEQ ID NO: 527942 - RNA, 20 nt, Human
caggucaaagcacgaggcag

SEQ ID NO: 527943 - RNA, 21 nt, Human
caggugcagaagcuucgccaa

SEQ ID NO: 527944 - RNA, 22 nt, Human
cagucucuucugaaaucagaga

SEQ ID NO: 527945 - RNA, 23 nt, Human
caguucaccacuacuucuaaaau

SEQ ID NO: 527946 - RNA, 19 nt, Human
cauuccccaaacuacaugg

SEQ ID NO: 527947 - RNA, 23 nt, Human
cauuguuuugguuuuaacagucu

SEQ ID NO: 527948 - RNA, 18 nt, Human
ccaguugagagcggggaa

SEQ ID NO: 527949 - RNA, 20 nt, Human
ccccgucgcgcucgcuccuc

SEQ ID NO: 527950 - RNA, 21 nt, Human
cccgcgcucagcccgcaggaa

SEQ ID NO: 527951 - RNA, 20 nt, Human
cccuacagaggaagcggagu

SEQ ID NO: 527952 - RNA, 23 nt, Human
ccggaacacugcugaagauacca

SEQ ID NO: 527953 - RNA, 20 nt, Human
ccuauagaaagcuccaaagc

SEQ ID NO: 527954 - RNA, 20 nt, Human
ccucugggcugcuacagcuc

SEQ ID NO: 527955 - RNA, 23 nt, Human
cgaggugaacauuauuacauuua

SEQ ID NO: 527956 - RNA, 22 nt, Human
cgcauaaacaauaauaaugcaa

SEQ ID NO: 527957 - RNA, 21 nt, Human
cgcucagcccgcaggaagcac

SEQ ID NO: 527958 - RNA, 24 nt, Human
cugagcacugaaaaaacaucuuua

SEQ ID NO: 527959 - RNA, 20 nt, Human
cugcagagcacaaagguuuc

SEQ ID NO: 527960 - RNA, 24 nt, Human
cuuaaaaaaaaaaaaaaaagaggu

SEQ ID NO: 527961 - RNA, 19 nt, Human
gaaaacacaacacaauuua

SEQ ID NO: 527962 - RNA, 23 nt, Human
gaaaagaacaguuauuaaaggua

SEQ ID NO: 527963 - RNA, 26 nt, Human
gaaauucuuucacaccaaguccuuuc

SEQ ID NO: 527964 - RNA, 21 nt, Human
gaacacugcugaagauaccau

SEQ ID NO: 527965 - RNA, 22 nt, Human
gaauguacuuguaugucaaaca

SEQ ID NO: 527966 - RNA, 20 nt, Human
gccuaacuccaggaaagcuc

SEQ ID NO: 527967 - RNA, 24 nt, Human
gccucccccgucgcgcucgcuccu

SEQ ID NO: 527968 - RNA, 25 nt, Human
gggaagaagaucagaacaaaaauau

SEQ ID NO: 527969 - RNA, 24 nt, Human
gggcugggaguccgcucgacacag

SEQ ID NO: 527970 - RNA, 22 nt, Human
ggucccgaaaugaaaacaggga

SEQ ID NO: 527971 - RNA, 20 nt, Human
gugggugcgccagggcggcc

SEQ ID NO: 527972 - RNA, 21 nt, Human
guuuuaaaguauuagaggcaa

SEQ ID NO: 527973 - RNA, 21 nt, Human
uaaaaaaauucucucccuaga

SEQ ID NO: 527974 - RNA, 21 nt, Human
uaaggagggggaagcagcagc

SEQ ID NO: 527975 - RNA, 20 nt, Human
uagauguauauaucacgacc

SEQ ID NO: 527976 - RNA, 24 nt, Human
uaguugauuuugcuuaaguaacac

SEQ ID NO: 527977 - RNA, 24 nt, Human
uauacugaaaacacaacacaauuu

SEQ ID NO: 527978 - RNA, 21 nt, Human
uauuuagauguauauaucacg

SEQ ID NO: 527979 - RNA, 26 nt, Human
uauuucacaguguuggccacaucuuc

SEQ ID NO: 527980 - RNA, 23 nt, Human
uauuuuacacaguucaccacuac

SEQ ID NO: 527981 - RNA, 21 nt, Human
ucagaagaaaaaggcugcaga

SEQ ID NO: 527982 - RNA, 23 nt, Human
ucagcaaaaccuuaacaucuccu

SEQ ID NO: 527983 - RNA, 21 nt, Human
ucccgaaaugaaaacagggag

SEQ ID NO: 527984 - RNA, 20 nt, Human
ucccuagaagggccuaacuc

SEQ ID NO: 527985 - RNA, 19 nt, Human
ucccucugggcugcuacag

SEQ ID NO: 527986 - RNA, 23 nt, Human
uccuacauuacaaagaaucugau

SEQ ID NO: 527987 - RNA, 20 nt, Human
uccuuaaaaaaaaaaaaaaa

SEQ ID NO: 527988 - RNA, 21 nt, Human
ugaaaaauauauucaauucac

SEQ ID NO: 527989 - RNA, 21 nt, Human
ugaaaaugggaccuucacacc

SEQ ID NO: 527990 - RNA, 23 nt, Human
ugacuuuaaaucuccacucuccu

SEQ ID NO: 527991 - RNA, 21 nt, Human
ugcacacacuuuaaaaaagga

SEQ ID NO: 527992 - RNA, 18 nt, Human
uggaaaucugaagucugg

SEQ ID NO: 527993 - RNA, 19 nt, Human
uggaauagaaguuugcucc

SEQ ID NO: 527994 - RNA, 21 nt, Human
uggcagcgcucagcccgcgcu

SEQ ID NO: 527995 - RNA, 26 nt, Human
uguuuugguuuuaacagucucuucug

SEQ ID NO: 527996 - RNA, 22 nt, Human
uucacaccaaguccuucucuuc

SEQ ID NO: 527997 - RNA, 20 nt, Human
uucacaguguuggccacauc

SEQ ID NO: 527998 - RNA, 21 nt, Human
uuccugaugacaauaaaaaaa

SEQ ID NO: 527999 - RNA, 19 nt, Human
uuuauaaaugcuauaaaau

SEQ ID NO: 528000 - RNA, 25 nt, Human
uuuuuaugcagaguuguuuuuuuuu

SEQ ID NO: 528001 - RNA, 21 nt, Human
aaaacuacaggauacguggaa

SEQ ID NO: 528002 - RNA, 22 nt, Human
aagaacaaugaggaauuaaaac

SEQ ID NO: 528003 - RNA, 21 nt, Human
aagcaaucaaaucuguaaagc

SEQ ID NO: 528004 - RNA, 22 nt, Human
aagcaaucaaaucuguaaagca

SEQ ID NO: 528005 - RNA, 21 nt, Human
caauugaauugaaggucaaga

SEQ ID NO: 528006 - RNA, 18 nt, Human
cagaaagcauauacuuuc

SEQ ID NO: 528007 - RNA, 24 nt, Human
caugcaggguauaauuucauacua

SEQ ID NO: 528008 - RNA, 24 nt, Human
cccaaagaagguccugauacuuaa

SEQ ID NO: 528009 - RNA, 18 nt, Human
gaaauuccuccucaagcu

SEQ ID NO: 528010 - RNA, 20 nt, Human
gaagaguaccaaaaaagcac

SEQ ID NO: 528011 - RNA, 18 nt, Human
gcacuguaacugugaaau

SEQ ID NO: 528012 - RNA, 23 nt, Human
ggguuugaucaaagcagaaagca

SEQ ID NO: 528013 - RNA, 19 nt, Human
uaaaacuacaggauacgug

SEQ ID NO: 528014 - RNA, 22 nt, Human
uaacugugaaauuccuccucaa

SEQ ID NO: 528015 - RNA, 25 nt, Human
uaagaacaaugaggaauuaaaacua

SEQ ID NO: 528016 - RNA, 23 nt, Human
uaauucuuuugcuucugcuucug

SEQ ID NO: 528017 - RNA, 25 nt, Human
uacuauugauaaaguucaccaugaa

SEQ ID NO: 528018 - RNA, 18 nt, Human
uagcugcugccaugcauu

SEQ ID NO: 528019 - RNA, 23 nt, Human
ugaaacaaaucacaugugaaagc

SEQ ID NO: 528020 - RNA, 19 nt, Human
ugaaauguuacugugaaga

SEQ ID NO: 528021 - RNA, 19 nt, Human
ugagaaaacagcaguggca

SEQ ID NO: 528022 - RNA, 20 nt, Human
ugagaagcccuuuucuguuu

SEQ ID NO: 528023 - RNA, 18 nt, Human
uggcaggcuugagucuuc

SEQ ID NO: 528024 - RNA, 19 nt, Human
uguaacugugaaauuccuc

SEQ ID NO: 528025 - RNA, 19 nt, Human
uuaauucuuuugcuucugc

SEQ ID NO: 528026 - RNA, 22 nt, Human
uuagguccaugaaaaaguuuca

SEQ ID NO: 528027 - RNA, 19 nt, Human
uucaacuuuacaaagcauc

SEQ ID NO: 528028 - RNA, 30 nt, Human
uucauggauauaccuacaucuugaaaaacc

SEQ ID NO: 528029 - RNA, 21 nt, Human
uuuuguuuaggagaggggaug

SEQ ID NO: 528030 - RNA, 21 nt, Human
aaacagcccaguguuucaaau

SEQ ID NO: 528031 - RNA, 20 nt, Human
aaagagcacuuguugaccug

SEQ ID NO: 528032 - RNA, 22 nt, Human
aaaugcuuucuguuguuuuuca

SEQ ID NO: 528033 - RNA, 23 nt, Human
aacaacuuaaaaucaaggcccaa

SEQ ID NO: 528034 - RNA, 20 nt, Human
aacauacuacacaaugaggc

SEQ ID NO: 528035 - RNA, 23 nt, Human
aacucagaaugcacuuuggucau

SEQ ID NO: 528036 - RNA, 18 nt, Human
aagauuaugauuuaggga

SEQ ID NO: 528037 - RNA, 18 nt, Human
acaaagccuaaguuuuca

SEQ ID NO: 528038 - RNA, 24 nt, Human
acacaacaucugccacaauucucu

SEQ ID NO: 528039 - RNA, 21 nt, Human
acaccaacaugauaaguucuc

SEQ ID NO: 528040 - RNA, 24 nt, Human
acggugcugagcaauggcuucuau

SEQ ID NO: 528041 - RNA, 24 nt, Human
acuaaguacaucaaugcuuaaaaa

SEQ ID NO: 528042 - RNA, 24 nt, Human
agaaaauuauuuacuugaguaaac

SEQ ID NO: 528043 - RNA, 22 nt, Human
agaaauauuuuauugguucuua

SEQ ID NO: 528044 - RNA, 19 nt, Human
agagagaaaaacauacaaa

SEQ ID NO: 528045 - RNA, 20 nt, Human
aggaaaaacaucagacaaag

SEQ ID NO: 528046 - RNA, 27 nt, Human
aguaaaauaaauauaagaauugcacaa

SEQ ID NO: 528047 - RNA, 19 nt, Human
aguacaucaaugcuuaaaa

SEQ ID NO: 528048 - RNA, 28 nt, Human
auaaauuuuuagaaaccagaugcccagg

SEQ ID NO: 528049 - RNA, 19 nt, Human
aucauauuugcccgauuua

SEQ ID NO: 528050 - RNA, 22 nt, Human
caaaaggagacugaacagcaug

SEQ ID NO: 528051 - RNA, 22 nt, Human
caacucccuagcugagacuccu

SEQ ID NO: 528052 - RNA, 19 nt, Human
caagagagaaaaacauaca

SEQ ID NO: 528053 - RNA, 24 nt, Human
caagagagaaaaacauacaaauga

SEQ ID NO: 528054 - RNA, 26 nt, Human
cacacaacaucugccacaauucucuu

SEQ ID NO: 528055 - RNA, 21 nt, Human
caccaacaugauaaguucuca

SEQ ID NO: 528056 - RNA, 18 nt, Human
cacggcauugauggagaa

SEQ ID NO: 528057 - RNA, 18 nt, Human
cagcaugcagacauagca

SEQ ID NO: 528058 - RNA, 24 nt, Human
caguaggcacuucacuugugagau

SEQ ID NO: 528059 - RNA, 21 nt, Human
cauagaaagaaaaaacauacu

SEQ ID NO: 528060 - RNA, 21 nt, Human
ccacaugauacacuuugcacc

SEQ ID NO: 528061 - RNA, 27 nt, Human
ccuacacuagaguguaccauggggaga

SEQ ID NO: 528062 - RNA, 19 nt, Human
ccucaaucuaaaacaagca

SEQ ID NO: 528063 - RNA, 19 nt, Human
cuaaaaacaaccucaacau

SEQ ID NO: 528064 - RNA, 23 nt, Human
cuagcugagacuccugaagcaaa

SEQ ID NO: 528065 - RNA, 20 nt, Human
cucaaaaauauuuccauucu

SEQ ID NO: 528066 - RNA, 18 nt, Human
cuuagccuuauucuucag

SEQ ID NO: 528067 - RNA, 20 nt, Human
gacaauagaggaaggaaaaa

SEQ ID NO: 528068 - RNA, 23 nt, Human
gacagucugauguaaacacuuca

SEQ ID NO: 528069 - RNA, 21 nt, Human
gaccaauuaccaggaucucaa

SEQ ID NO: 528070 - RNA, 21 nt, Human
gcaagagagaaaaacauacaa

SEQ ID NO: 528071 - RNA, 25 nt, Human
ggaaaaacaucagacaaagccuaag

SEQ ID NO: 528072 - RNA, 24 nt, Human
guaaaacuuucaaauacaacacau

SEQ ID NO: 528073 - RNA, 23 nt, Human
uaaaacaagcauuuucuuaaacc

SEQ ID NO: 528074 - RNA, 21 nt, Human
uaaaagcaucuaaaauagccc

SEQ ID NO: 528075 - RNA, 30 nt, Human
uaaaauaaauauaagaauugcacaagacaa

SEQ ID NO: 528076 - RNA, 26 nt, Human
uaaaauaugguaaaaauaugaggaua

SEQ ID NO: 528077 - RNA, 23 nt, Human
uaauacugaagggugcuuaaacu

SEQ ID NO: 528078 - RNA, 24 nt, Human
uacaaaugacuuuauuucccaccg

SEQ ID NO: 528079 - RNA, 19 nt, Human
uacaacacauguggcaaag

SEQ ID NO: 528080 - RNA, 23 nt, Human
uaccaggaucucaaguaucugga

SEQ ID NO: 528081 - RNA, 22 nt, Human
uagaguguaccauggggagaaa

SEQ ID NO: 528082 - RNA, 21 nt, Human
uauaagaauugcacaagacag

SEQ ID NO: 528083 - RNA, 20 nt, Human
uccaaaauaauucaagagaa

SEQ ID NO: 528084 - RNA, 18 nt, Human
ucccuagcugagacuccu

SEQ ID NO: 528085 - RNA, 23 nt, Human
ucccuagcugagacuccugaagc

SEQ ID NO: 528086 - RNA, 19 nt, Human
ucuccacacauuccugauu

SEQ ID NO: 528087 - RNA, 19 nt, Human
ugaaaaaacucagaaugca

SEQ ID NO: 528088 - RNA, 22 nt, Human
ugacauggcucuguucuccaca

SEQ ID NO: 528089 - RNA, 22 nt, Human
ugagacuccugaagcaaagaau

SEQ ID NO: 528090 - RNA, 19 nt, Human
ugaggcugaauugaggcug

SEQ ID NO: 528091 - RNA, 21 nt, Human
ugauaaguucucauuggacac

SEQ ID NO: 528092 - RNA, 22 nt, Human
ugcaagagagaaaaacauacaa

SEQ ID NO: 528093 - RNA, 21 nt, Human
ugcccuaguauacuauaacag

SEQ ID NO: 528094 - RNA, 24 nt, Human
uggaaaagaggcuacaucuucuuu

SEQ ID NO: 528095 - RNA, 28 nt, Human
uggcaaagaaacaacaguucacacacaa

SEQ ID NO: 528096 - RNA, 18 nt, Human
ugggggugggguggggag

SEQ ID NO: 528097 - RNA, 22 nt, Human
ugggggugggguggggagaaug

SEQ ID NO: 528098 - RNA, 23 nt, Human
ugggggugggguggggagaaugc

SEQ ID NO: 528099 - RNA, 22 nt, Human
ugggguggggagaaugcaccag

SEQ ID NO: 528100 - RNA, 23 nt, Human
ugguucuuagccuuauucuucag

SEQ ID NO: 528101 - RNA, 25 nt, Human
ugugcaaacagcccaguguuucaaa

SEQ ID NO: 528102 - RNA, 18 nt, Human
uuagaaaccagaugccca

SEQ ID NO: 528103 - RNA, 21 nt, Human
uucacacacaacaucugccac

SEQ ID NO: 528104 - RNA, 20 nt, Human
uucaucuuuuauuccuaaca

SEQ ID NO: 528105 - RNA, 23 nt, Human
uucaucuuuuauuccuaacagaa

SEQ ID NO: 528106 - RNA, 24 nt, Human
uucaugguauucuuaaaggcagca

SEQ ID NO: 528107 - RNA, 23 nt, Human
uuccacaugauacacuuugcacc

SEQ ID NO: 528108 - RNA, 19 nt, Human
uuucuaaaauacucgauug

SEQ ID NO: 528109 - RNA, 20 nt, Human
uuuuaagauuaugauuuagg

SEQ ID NO: 528110 - RNA, 20 nt, Human
uuuuagaaaccagaugccca

SEQ ID NO: 528111 - RNA, 18 nt, Human
uuuuucauagaaagaaaa

SEQ ID NO: 528112 - RNA, 22 nt, Human
aaaaauaagguugaaggaggaa

SEQ ID NO: 528113 - RNA, 18 nt, Human
aaacugcauauugaaaac

SEQ ID NO: 528114 - RNA, 25 nt, Human
aaccaccuuuuaaaaaauuuuucau

SEQ ID NO: 528115 - RNA, 21 nt, Human
aacugugcuuggaaaauagga

SEQ ID NO: 528116 - RNA, 20 nt, Human
aagcaaaacacauauaaaug

SEQ ID NO: 528117 - RNA, 18 nt, Human
aaugugcuaucugcaaaa

SEQ ID NO: 528118 - RNA, 19 nt, Human
aucaugaagcacacguggc

SEQ ID NO: 528119 - RNA, 19 nt, Human
augcuuaugccaagcagga

SEQ ID NO: 528120 - RNA, 20 nt, Human
auuucaaguaaaaauaaggu

SEQ ID NO: 528121 - RNA, 23 nt, Human
caaaaacccagcaagaagcauca

SEQ ID NO: 528122 - RNA, 21 nt, Human
cacacaaagcacaccuccagc

SEQ ID NO: 528123 - RNA, 20 nt, Human
cagauacuuuauugcucacc

SEQ ID NO: 528124 - RNA, 21 nt, Human
caguaagggagaauguaaaac

SEQ ID NO: 528125 - RNA, 19 nt, Human
caugucauguagauuucag

SEQ ID NO: 528126 - RNA, 19 nt, Human
ccuacaaaugcuuaugcca

SEQ ID NO: 528127 - RNA, 21 nt, Human
ccuccugcacuuagcaaaaau

SEQ ID NO: 528128 - RNA, 22 nt, Human
ccuccugcacuuagcaaaaauc

SEQ ID NO: 528129 - RNA, 23 nt, Human
cuaaaaaagucuaggugaauccu

SEQ ID NO: 528130 - RNA, 18 nt, Human
cuaaaugccuacauguac

SEQ ID NO: 528131 - RNA, 21 nt, Human
cucagccaggcuuuuguuuuc

SEQ ID NO: 528132 - RNA, 21 nt, Human
cugaaugugcuaucugcaaaa

SEQ ID NO: 528133 - RNA, 23 nt, Human
gagccagugguauuaacucaugc

SEQ ID NO: 528134 - RNA, 20 nt, Human
gauacuuuauugcucaccuu

SEQ ID NO: 528135 - RNA, 21 nt, Human
uaaaaauaagguugaaggagg

SEQ ID NO: 528136 - RNA, 24 nt, Human
uaaaggcaauuuuaaccaccuuuu

SEQ ID NO: 528137 - RNA, 21 nt, Human
uaaaugccuacauguacuaua

SEQ ID NO: 528138 - RNA, 24 nt, Human
uacauguacaaaaacccagcaaga

SEQ ID NO: 528139 - RNA, 20 nt, Human
uaggaacugaccuaaaaguu

SEQ ID NO: 528140 - RNA, 26 nt, Human
uagucuacugggcaauuaaaggcaau

SEQ ID NO: 528141 - RNA, 21 nt, Human
uauuucuucuagcaaauuuca

SEQ ID NO: 528142 - RNA, 19 nt, Human
uccaucaacaaaauaaggc

SEQ ID NO: 528143 - RNA, 19 nt, Human
uccuaguaguaaaucuaaa

SEQ ID NO: 528144 - RNA, 24 nt, Human
ucuuccauuacaaaaaaaguuacc

SEQ ID NO: 528145 - RNA, 18 nt, Human
ugaaaacaugaaaacuac

SEQ ID NO: 528146 - RNA, 22 nt, Human
ugaagaccuacaaaugcuuauu

SEQ ID NO: 528147 - RNA, 19 nt, Human
ugcaaaagagcucauuuaa

SEQ ID NO: 528148 - RNA, 28 nt, Human
ugcagcaauaauaaagggccuccugcac

SEQ ID NO: 528149 - RNA, 21 nt, Human
ugcauaaaacaaauuucgguu

SEQ ID NO: 528150 - RNA, 19 nt, Human
uggaaaauaggcauuggaa

SEQ ID NO: 528151 - RNA, 18 nt, Human
uggauggaugcaggucag

SEQ ID NO: 528152 - RNA, 24 nt, Human
uguaaaacaucaacucagccaggc

SEQ ID NO: 528153 - RNA, 22 nt, Human
uguacaaaaacccagcaagaag

SEQ ID NO: 528154 - RNA, 24 nt, Human
uguacaaaaacccagcaagaagca

SEQ ID NO: 528155 - RNA, 23 nt, Human
uucaaguaauuucuucaaaaaag

SEQ ID NO: 528156 - RNA, 21 nt, Human
uucucaaauaaacggcauuau

SEQ ID NO: 528157 - RNA, 24 nt, Human
uugcucaccuuucacacaaagcac

SEQ ID NO: 528158 - RNA, 18 nt, Human
uuguagugcauuucuucc

SEQ ID NO: 528159 - RNA, 22 nt, Human
uuuauaaucuuuauggauuuug

SEQ ID NO: 528160 - RNA, 22 nt, Human
uuucaaaacugcauauugaaaa

SEQ ID NO: 528161 - RNA, 18 nt, Human
uuucacacaaagcacacc

SEQ ID NO: 528162 - RNA, 24 nt, Human
uuugcuauuucuucuagcaaauuu

SEQ ID NO: 528163 - RNA, 19 nt, Human
aagaaacuuuuggcuaccg

SEQ ID NO: 528164 - RNA, 22 nt, Human
accccagcuccauuuggauuuc

SEQ ID NO: 528165 - RNA, 23 nt, Human
auggaagaaaaacauuucuuuua

SEQ ID NO: 528166 - RNA, 20 nt, Human
cuuuuggcuaccgacacucu

SEQ ID NO: 528167 - RNA, 22 nt, Human
gaauguaccugaccacaguguu

SEQ ID NO: 528168 - RNA, 21 nt, Human
gcaaacuuuacaccuuuaaga

SEQ ID NO: 528169 - RNA, 18 nt, Human
gccuacaucccacgcaac

SEQ ID NO: 528170 - RNA, 18 nt, Human
uaaggaauguaccugacc

SEQ ID NO: 528171 - RNA, 24 nt, Human
uaaggaauguaccugaccccugaa

SEQ ID NO: 528172 - RNA, 25 nt, Human
ucccaaccccagcuccauuuggauu

SEQ ID NO: 528173 - RNA, 18 nt, Human
uccuagauggaagaaaaa

SEQ ID NO: 528174 - RNA, 19 nt, Human
uggcagggaggucacuuuc

SEQ ID NO: 528175 - RNA, 22 nt, Human
ugggcguccuuucauuuuagcc

SEQ ID NO: 528176 - RNA, 23 nt, Human
uuccauguucuucccaaccccag

SEQ ID NO: 528177 - RNA, 18 nt, Human
uuccuagauggaagaaaa

SEQ ID NO: 528178 - RNA, 20 nt, Human
uuuaagauaucuacaaagau

SEQ ID NO: 528179 - RNA, 22 nt, Human
aaaagaaagaggaauaggagau

SEQ ID NO: 528180 - RNA, 24 nt, Human
aaacaaagaauaaggaaugaucug

SEQ ID NO: 528181 - RNA, 21 nt, Human
aaacuuacuguaacccuuuaa

SEQ ID NO: 528182 - RNA, 18 nt, Human
aacagaaaaguuaaucug

SEQ ID NO: 528183 - RNA, 20 nt, Human
aacauggugaaauccugucu

SEQ ID NO: 528184 - RNA, 21 nt, Human
aacauggugaaauccugucuc

SEQ ID NO: 528185 - RNA, 23 nt, Human
aaccccaggaacauguuuaauac

SEQ ID NO: 528186 - RNA, 19 nt, Human
aaccuggaaggcagaggcu

SEQ ID NO: 528187 - RNA, 23 nt, Human
aacuccgucucaaaaauaaaaaa

SEQ ID NO: 528188 - RNA, 22 nt, Human
aagcaucaaauguauuuugaca

SEQ ID NO: 528189 - RNA, 18 nt, Human
aagcuuucuuuucauccu

SEQ ID NO: 528190 - RNA, 18 nt, Human
aaggggaaaagaaagagg

SEQ ID NO: 528191 - RNA, 24 nt, Human
aaucacuugaaccuggaaggcaga

SEQ ID NO: 528192 - RNA, 23 nt, Human
aaugguuaccaagauuugaaggu

SEQ ID NO: 528193 - RNA, 20 nt, Human
acaagagcgaaacuccgucu

SEQ ID NO: 528194 - RNA, 21 nt, Human
acaagagcgaaacuccgucuc

SEQ ID NO: 528195 - RNA, 23 nt, Human
acagcaaugcuacaauaaagcua

SEQ ID NO: 528196 - RNA, 24 nt, Human
acaggcugggcgcaguggcucacg

SEQ ID NO: 528197 - RNA, 20 nt, Human
acauggguauauacacagaa

SEQ ID NO: 528198 - RNA, 26 nt, Human
accccaggaacauguuuaauaccuua

SEQ ID NO: 528199 - RNA, 21 nt, Human
accuuuuuuuauaaauguucu

SEQ ID NO: 528200 - RNA, 22 nt, Human
acuaaaaaugcaaaauuagcag

SEQ ID NO: 528201 - RNA, 18 nt, Human
acugcacuacagccuggg

SEQ ID NO: 528202 - RNA, 19 nt, Human
acugcacuacagccugggc

SEQ ID NO: 528203 - RNA, 20 nt, Human
acugcacuacagccugggcg

SEQ ID NO: 528204 - RNA, 25 nt, Human
acugcacuacagccugggcgacaag

SEQ ID NO: 528205 - RNA, 24 nt, Human
acuguaccacugcacuacagccug

SEQ ID NO: 528206 - RNA, 24 nt, Human
acuugaggucaggaguucaagacc

SEQ ID NO: 528207 - RNA, 24 nt, Human
agagggaggagcaaaaacaaaccu

SEQ ID NO: 528208 - RNA, 22 nt, Human
agauuacuugaggucaggaguu

SEQ ID NO: 528209 - RNA, 23 nt, Human
agauuacuugaggucaggaguuc

SEQ ID NO: 528210 - RNA, 23 nt, Human
agcagggcgugguggugugugcc

SEQ ID NO: 528211 - RNA, 24 nt, Human
agccuggccaacauggugaaaucc

SEQ ID NO: 528212 - RNA, 20 nt, Human
agcucaaaaucuuuuuuauu

SEQ ID NO: 528213 - RNA, 22 nt, Human
aggaaggggaaaagaaagagga

SEQ ID NO: 528214 - RNA, 20 nt, Human
aggcagaggcuccagugagc

SEQ ID NO: 528215 - RNA, 24 nt, Human
aggcagaggcuccagugagcugag

SEQ ID NO: 528216 - RNA, 22 nt, Human
aggcaggagaaucacuugaacc

SEQ ID NO: 528217 - RNA, 24 nt, Human
aggcaggagaaucacuugaaccug

SEQ ID NO: 528218 - RNA, 24 nt, Human
aggcugaggcaggagaaucacuug

SEQ ID NO: 528219 - RNA, 18 nt, Human
aggggaggguaaagaggg

SEQ ID NO: 528220 - RNA, 24 nt, Human
aguggcucacgccuguaauuccag

SEQ ID NO: 528221 - RNA, 21 nt, Human
auaaaaaggggacauauaaug

SEQ ID NO: 528222 - RNA, 24 nt, Human
auaaagcaaacuuacuguaacccu

SEQ ID NO: 528223 - RNA, 18 nt, Human
auauacauaucacaugca

SEQ ID NO: 528224 - RNA, 22 nt, Human
augagggcagauuacuugaggu

SEQ ID NO: 528225 - RNA, 24 nt, Human
auuacuugaggucaggaguucaag

SEQ ID NO: 528226 - RNA, 22 nt, Human
auuccagcacuucgggaggcca

SEQ ID NO: 528227 - RNA, 22 nt, Human
auucuauaauuccuaugcuacu

SEQ ID NO: 528228 - RNA, 25 nt, Human
caaauauuuacuguccagaaacauc

SEQ ID NO: 528229 - RNA, 24 nt, Human
caacauggugaaauccugucucua

SEQ ID NO: 528230 - RNA, 24 nt, Human
caagaccagccuggccaacauggu

SEQ ID NO: 528231 - RNA, 20 nt, Human
caagguagauaaaucaauga

SEQ ID NO: 528232 - RNA, 24 nt, Human
caccucuagugacuuccaucucuu

SEQ ID NO: 528233 - RNA, 24 nt, Human
cacgccuguaauuccagcacuucg

SEQ ID NO: 528234 - RNA, 24 nt, Human
cacuacagccugggcgacaagagc

SEQ ID NO: 528235 - RNA, 23 nt, Human
cacugcacuacagccugggcgac

SEQ ID NO: 528236 - RNA, 24 nt, Human
cacugcacuacagccugggcgaca

SEQ ID NO: 528237 - RNA, 24 nt, Human
cagauuacuugaggucaggaguuc

SEQ ID NO: 528238 - RNA, 21 nt, Human
cagcacuucgggaggccaaug

SEQ ID NO: 528239 - RNA, 28 nt, Human
cagcacuucgggaggccaaugagggcag

SEQ ID NO: 528240 - RNA, 24 nt, Human
cagcuacucaggaggcugaggcag

SEQ ID NO: 528241 - RNA, 22 nt, Human
caggaacauguuuaauaccuua

SEQ ID NO: 528242 - RNA, 24 nt, Human
caggaggcugaggcaggagaauca

SEQ ID NO: 528243 - RNA, 25 nt, Human
cauaaaacuuaauaaacugagcaua

SEQ ID NO: 528244 - RNA, 20 nt, Human
cauaaaauggaugggaaagg

SEQ ID NO: 528245 - RNA, 20 nt, Human
ccacugcacuacagccuggg

SEQ ID NO: 528246 - RNA, 21 nt, Human
ccacugcacuacagccugggc

SEQ ID NO: 528247 - RNA, 21 nt, Human
ccacugcacuacagccugggc

SEQ ID NO: 528248 - RNA, 23 nt, Human
ccacugcacuacagccugggcga

SEQ ID NO: 528249 - RNA, 22 nt, Human
ccuggccaacauggugaaaucc

SEQ ID NO: 528250 - RNA, 24 nt, Human
ccuggccaacauggugaaauccug

SEQ ID NO: 528251 - RNA, 21 nt, Human
ccuguaaucccagcuacucag

SEQ ID NO: 528252 - RNA, 23 nt, Human
cgccuguaauuccagcacuucgg

SEQ ID NO: 528253 - RNA, 24 nt, Human
cgccuguaauuccagcacuucggg

SEQ ID NO: 528254 - RNA, 26 nt, Human
cgucucaaaaauaaaaaauaaaaaac

SEQ ID NO: 528255 - RNA, 19 nt, Human
cuaaaaaugcaaaauuagc

SEQ ID NO: 528256 - RNA, 23 nt, Human
cuaaugauaaauuaauuuuuccc

SEQ ID NO: 528257 - RNA, 20 nt, Human
cuacugaauuaacauagcac

SEQ ID NO: 528258 - RNA, 24 nt, Human
cucacgccuguaauuccagcacuu

SEQ ID NO: 528259 - RNA, 20 nt, Human
cucucuauaaaugaaagaac

SEQ ID NO: 528260 - RNA, 24 nt, Human
cuggccaacauggugaaauccugu

SEQ ID NO: 528261 - RNA, 20 nt, Human
cugugacugaaacaagcuaa

SEQ ID NO: 528262 - RNA, 18 nt, Human
cuuacuguaacccuuuaa

SEQ ID NO: 528263 - RNA, 21 nt, Human
gaaacaauuaaaaaaaaaaac

SEQ ID NO: 528264 - RNA, 22 nt, Human
gaaccuggaaggcagaggcucc

SEQ ID NO: 528265 - RNA, 21 nt, Human
gagcaaaaacaaaccuuuaaa

SEQ ID NO: 528266 - RNA, 23 nt, Human
gauuacuugaggucaggaguuca

SEQ ID NO: 528267 - RNA, 24 nt, Human
gauuacuugaggucaggaguucaa

SEQ ID NO: 528268 - RNA, 22 nt, Human
gcaggagaaucacuugaaccug

SEQ ID NO: 528269 - RNA, 20 nt, Human
gccaacauggugaaauccug

SEQ ID NO: 528270 - RNA, 24 nt, Human
gccaacauggugaaauccugucuc

SEQ ID NO: 528271 - RNA, 20 nt, Human
gcgcaguggcucacgccugu

SEQ ID NO: 528272 - RNA, 23 nt, Human
gcuacaauaaagcuacugugacu

SEQ ID NO: 528273 - RNA, 20 nt, Human
ggaacaggcugggcgcagug

SEQ ID NO: 528274 - RNA, 19 nt, Human
ggaaggggaaaagaaagag

SEQ ID NO: 528275 - RNA, 19 nt, Human
ggaggggaggguaaagagg

SEQ ID NO: 528276 - RNA, 21 nt, Human
ggcagauuacuugaggucagg

SEQ ID NO: 528277 - RNA, 23 nt, Human
ggcgugguggugugugccuguaa

SEQ ID NO: 528278 - RNA, 21 nt, Human
gggaggccaaugagggcagau

SEQ ID NO: 528279 - RNA, 24 nt, Human
gggcgcaguggcucacgccuguaa

SEQ ID NO: 528280 - RNA, 21 nt, Human
ggugauaggaaggggaaaaga

SEQ ID NO: 528281 - RNA, 24 nt, Human
gguggugugugccuguaaucccag

SEQ ID NO: 528282 - RNA, 24 nt, Human
guggugugugccuguaaucccagc

SEQ ID NO: 528283 - RNA, 19 nt, Human
uaaaaaaaaaaacccuccc

SEQ ID NO: 528284 - RNA, 23 nt, Human
uaaaaaugcaaaauuagcagggc

SEQ ID NO: 528285 - RNA, 21 nt, Human
uaaaauggaugggaaagggug

SEQ ID NO: 528286 - RNA, 21 nt, Human
uaacagcaaugcuacaauaaa

SEQ ID NO: 528287 - RNA, 19 nt, Human
uaacaguaucccgcacagc

SEQ ID NO: 528288 - RNA, 23 nt, Human
uacauacagguauaaauacaugg

SEQ ID NO: 528289 - RNA, 18 nt, Human
uaccaagcauauaaaaag

SEQ ID NO: 528290 - RNA, 18 nt, Human
uaccacugcacuacagcc

SEQ ID NO: 528291 - RNA, 20 nt, Human
uacuaaaaaugcaaaauuag

SEQ ID NO: 528292 - RNA, 20 nt, Human
uacugugacugaaacaagcu

SEQ ID NO: 528293 - RNA, 23 nt, Human
uacuugaggucaggaguucaaga

SEQ ID NO: 528294 - RNA, 18 nt, Human
uagcagggcgugguggug

SEQ ID NO: 528295 - RNA, 23 nt, Human
uagcagggcgugguggugugugc

SEQ ID NO: 528296 - RNA, 21 nt, Human
uauagucagauauucuauacc

SEQ ID NO: 528297 - RNA, 18 nt, Human
uaucacaugcagcagucu

SEQ ID NO: 528298 - RNA, 22 nt, Human
ucacgccuguaauuccagcacu

SEQ ID NO: 528299 - RNA, 25 nt, Human
ucacugcaaccuuuuuuugggcccc

SEQ ID NO: 528300 - RNA, 26 nt, Human
ucacugcaaccuuuuuuugggcccuc

SEQ ID NO: 528301 - RNA, 26 nt, Human
ucacugcaaccuuuuuuuggguacuc

SEQ ID NO: 528302 - RNA, 25 nt, Human
ucacugcaaccuuuuuuuggguccc

SEQ ID NO: 528303 - RNA, 26 nt, Human
ucacugcaaccuuuuuuuggguccuc

SEQ ID NO: 528304 - RNA, 18 nt, Human
ucauccuuuccuuaaucc

SEQ ID NO: 528305 - RNA, 21 nt, Human
uccagaaacaucaaagaaaca

SEQ ID NO: 528306 - RNA, 19 nt, Human
ucccaacagaaaaguuaau

SEQ ID NO: 528307 - RNA, 18 nt, Human
uccgcugaccugcucuaa

SEQ ID NO: 528308 - RNA, 24 nt, Human
ucucaacauaaaauggaugggaaa

SEQ ID NO: 528309 - RNA, 19 nt, Human
ucucccugaguucuuguuc

SEQ ID NO: 528310 - RNA, 20 nt, Human
ucucuacuaaaaaugcaaaa

SEQ ID NO: 528311 - RNA, 23 nt, Human
ucuguaaugaaagaggccggggc

SEQ ID NO: 528312 - RNA, 22 nt, Human
ugaaagaacucucaacauaaaa

SEQ ID NO: 528313 - RNA, 18 nt, Human
ugacuuccaucucuuacc

SEQ ID NO: 528314 - RNA, 20 nt, Human
ugaggcaggagaaucacuug

SEQ ID NO: 528315 - RNA, 24 nt, Human
ugaggcaggagaaucacuugaacc

SEQ ID NO: 528316 - RNA, 24 nt, Human
ugaggcaggagaaucacuugaacc

SEQ ID NO: 528317 - RNA, 20 nt, Human
ugaguucuuguucuaaaaug

SEQ ID NO: 528318 - RNA, 24 nt, Human
ugccuguaaucccagcuacucagg

SEQ ID NO: 528319 - RNA, 23 nt, Human
ugcucacggaccaaggauuugac

SEQ ID NO: 528320 - RNA, 27 nt, Human
uggaugggaaagggugauaggaagggg

SEQ ID NO: 528321 - RNA, 24 nt, Human
uggccaacauggugaaauccuguc

SEQ ID NO: 528322 - RNA, 22 nt, Human
uggcucacgccuguaauuccag

SEQ ID NO: 528323 - RNA, 24 nt, Human
uggcucacgccuguaauuccagca

SEQ ID NO: 528324 - RNA, 24 nt, Human
ugguggugugugccuguaauccca

SEQ ID NO: 528325 - RNA, 21 nt, Human
uggugugugccuguaauccca

SEQ ID NO: 528326 - RNA, 24 nt, Human
uggugugugccuguaaucccagcu

SEQ ID NO: 528327 - RNA, 23 nt, Human
uguccagaaacaucaaagaaaca

SEQ ID NO: 528328 - RNA, 21 nt, Human
uuaacaaagacccccaaaaaa

SEQ ID NO: 528329 - RNA, 26 nt, Human
uuaacaucucucaccucuagugacuu

SEQ ID NO: 528330 - RNA, 21 nt, Human
uuaccaagauuugaagguuuu

SEQ ID NO: 528331 - RNA, 23 nt, Human
uuagaauaccaaaugcauuuauu

SEQ ID NO: 528332 - RNA, 22 nt, Human
uuagcagggcgugguggugugu

SEQ ID NO: 528333 - RNA, 24 nt, Human
uuagcagggcgugguggugugugc

SEQ ID NO: 528334 - RNA, 23 nt, Human
uucaaauauuuacuguccagaaa

SEQ ID NO: 528335 - RNA, 24 nt, Human
uuccuacuuuuaacaucucucacc

SEQ ID NO: 528336 - RNA, 18 nt, Human
uuuaacaaagacccccaa

SEQ ID NO: 528337 - RNA, 22 nt, Human
uuuaacaaagacccccaaaaaa

SEQ ID NO: 528338 - RNA, 24 nt, Human
uuuagaauaccaaaugcauuuauu

SEQ ID NO: 528339 - RNA, 19 nt, Human
uuugacaacuccaagucca

SEQ ID NO: 528340 - RNA, 20 nt, Human
uuuuuuuuuuuuuuuuuugg

SEQ ID NO: 528341 - RNA, 22 nt, Human
aaaagaccagaacuggacaaua

SEQ ID NO: 528342 - RNA, 24 nt, Human
aaaaggaaggaauuuuuuaaagaa

SEQ ID NO: 528343 - RNA, 22 nt, Human
aaacagauuuagcuuaagagau

SEQ ID NO: 528344 - RNA, 18 nt, Human
aaagaaaaccaaaagagu

SEQ ID NO: 528345 - RNA, 18 nt, Human
aaagaauucuuuuauucc

SEQ ID NO: 528346 - RNA, 18 nt, Human
aaagucuccacacucuuc

SEQ ID NO: 528347 - RNA, 22 nt, Human
aacaaagaagaagaaaacugga

SEQ ID NO: 528348 - RNA, 23 nt, Human
aaccauucagaacuuacacccuc

SEQ ID NO: 528349 - RNA, 20 nt, Human
aaccucauauaagucaccuc

SEQ ID NO: 528350 - RNA, 24 nt, Human
aagaacaacaaagaagaagaaaac

SEQ ID NO: 528351 - RNA, 20 nt, Human
aagaagaaaacuggaaugaa

SEQ ID NO: 528352 - RNA, 21 nt, Human
aagaagaaaacuggaaugaac

SEQ ID NO: 528353 - RNA, 21 nt, Human
acaaagaagaagaaaacugga

SEQ ID NO: 528354 - RNA, 23 nt, Human
acaacaaagaagaagaaaacugg

SEQ ID NO: 528355 - RNA, 19 nt, Human
acacuagaagaacaacaaa

SEQ ID NO: 528356 - RNA, 21 nt, Human
acccaaagucagcaaggaacc

SEQ ID NO: 528357 - RNA, 26 nt, Human
agaaagaauucuuuuauucccacaug

SEQ ID NO: 528358 - RNA, 18 nt, Human
agaagaacaacaaagaag

SEQ ID NO: 528359 - RNA, 24 nt, Human
agaccagaacuggacaauauuaaa

SEQ ID NO: 528360 - RNA, 19 nt, Human
agccaguaugugguacaug

SEQ ID NO: 528361 - RNA, 19 nt, Human
agcuauauaaagaaaacca

SEQ ID NO: 528362 - RNA, 19 nt, Human
agcuauauaaagaaaacca

SEQ ID NO: 528363 - RNA, 24 nt, Human
aggaaaaaggagggagggaaaaug

SEQ ID NO: 528364 - RNA, 19 nt, Human
aggagggagggaaaauggg

SEQ ID NO: 528365 - RNA, 21 nt, Human
agucaggccaguuuuauuuua

SEQ ID NO: 528366 - RNA, 24 nt, Human
agucccuuuuauauuuuuuaaaag

SEQ ID NO: 528367 - RNA, 19 nt, Human
auaaaacaagauuuggcug

SEQ ID NO: 528368 - RNA, 19 nt, Human
auaaaacagaauguaguag

SEQ ID NO: 528369 - RNA, 23 nt, Human
auggguguggggucauuuggggu

SEQ ID NO: 528370 - RNA, 20 nt, Human
auguaguaggaaagaaagaa

SEQ ID NO: 528371 - RNA, 19 nt, Human
cagaaaagaccagaacugg

SEQ ID NO: 528372 - RNA, 23 nt, Human
cagaaaagaccagaacuggacaa

SEQ ID NO: 528373 - RNA, 22 nt, Human
cauagaaaacauugucaagucc

SEQ ID NO: 528374 - RNA, 22 nt, Human
cauuugggguaccaacagacuc

SEQ ID NO: 528375 - RNA, 19 nt, Human
cccaaagucagcaaggaac

SEQ ID NO: 528376 - RNA, 19 nt, Human
ccgccgguaccggccucca

SEQ ID NO: 528377 - RNA, 21 nt, Human
ccuggacuggcucacacggcc

SEQ ID NO: 528378 - RNA, 25 nt, Human
cucacagcacuggguuugcagccag

SEQ ID NO: 528379 - RNA, 24 nt, Human
cuccucagccuaugaucaguuauu

SEQ ID NO: 528380 - RNA, 18 nt, Human
cuggggagugaggagcag

SEQ ID NO: 528381 - RNA, 25 nt, Human
gcacuggguuugcagccagcuacau

SEQ ID NO: 528382 - RNA, 22 nt, Human
ggcccagugguaauucacagaa

SEQ ID NO: 528383 - RNA, 19 nt, Human
guggacacagucuuuaacc

SEQ ID NO: 528384 - RNA, 23 nt, Human
gugguacaugugucacccaaagu

SEQ ID NO: 528385 - RNA, 21 nt, Human
uaaaacaagauuuggcugagc

SEQ ID NO: 528386 - RNA, 19 nt, Human
uaaacaagggaaccagagu

SEQ ID NO: 528387 - RNA, 21 nt, Human
uaaauaaaacagaauguagua

SEQ ID NO: 528388 - RNA, 18 nt, Human
uaagucaggccaguuuua

SEQ ID NO: 528389 - RNA, 30 nt, Human
uacaauagaaccaugacuuaaacugagccc

SEQ ID NO: 528390 - RNA, 24 nt, Human
uaccaacagacucagauaaacaag

SEQ ID NO: 528391 - RNA, 21 nt, Human
uagaaaaaacucaucuggcca

SEQ ID NO: 528392 - RNA, 19 nt, Human
uagaagaacaacaaagaag

SEQ ID NO: 528393 - RNA, 24 nt, Human
uagaagaacaacaaagaagaagaa

SEQ ID NO: 528394 - RNA, 22 nt, Human
uaguaggaaagaaagaauucuu

SEQ ID NO: 528395 - RNA, 24 nt, Human
uaugaucaguuauuaauacauacc

SEQ ID NO: 528396 - RNA, 20 nt, Human
uaugugguacaugugucacc

SEQ ID NO: 528397 - RNA, 19 nt, Human
uauguuucccauagccucu

SEQ ID NO: 528398 - RNA, 21 nt, Human
ucacacggccugucuuugauc

SEQ ID NO: 528399 - RNA, 22 nt, Human
uccaaacagauuuagcuuaaga

SEQ ID NO: 528400 - RNA, 19 nt, Human
ucuaagaaagagaagagaa

SEQ ID NO: 528401 - RNA, 19 nt, Human
ugaaauagcaacaaugagu

SEQ ID NO: 528402 - RNA, 21 nt, Human
ugacaagauuuucaauuggug

SEQ ID NO: 528403 - RNA, 18 nt, Human
ugacagagcucuagaaaa

SEQ ID NO: 528404 - RNA, 26 nt, Human
ugaggacaggacauaaaacaagauuu

SEQ ID NO: 528405 - RNA, 19 nt, Human
ugagguaaggggcccagug

SEQ ID NO: 528406 - RNA, 22 nt, Human
ugcccaaaguggacacagucuu

SEQ ID NO: 528407 - RNA, 25 nt, Human
uggaaaggaaaaaggagggagggaa

SEQ ID NO: 528408 - RNA, 21 nt, Human
uggacaauauuaaagucagga

SEQ ID NO: 528409 - RNA, 24 nt, Human
uggacacagucuuuaaccuguacu

SEQ ID NO: 528410 - RNA, 18 nt, Human
uggacuggcucacacggc

SEQ ID NO: 528411 - RNA, 23 nt, Human
uggcugagcuauauaaagaaaac

SEQ ID NO: 528412 - RNA, 18 nt, Human
uggguguggggucauuug

SEQ ID NO: 528413 - RNA, 22 nt, Human
uggguguggggucauuuggggu

SEQ ID NO: 528414 - RNA, 20 nt, Human
uuaaacugagccaguaugug

SEQ ID NO: 528415 - RNA, 24 nt, Human
uuaaagaaauauaaaagucaaguc

SEQ ID NO: 528416 - RNA, 25 nt, Human
uucccauagccucuuucuuuucaga

SEQ ID NO: 528417 - RNA, 23 nt, Human
aaaaaaugaaacauuacagaaag

SEQ ID NO: 528418 - RNA, 18 nt, Human
aagaagcucguagauuuu

SEQ ID NO: 528419 - RNA, 23 nt, Human
acagaaaguucaggaacaacaca

SEQ ID NO: 528420 - RNA, 28 nt, Human
acuccaaugcccaaagaucaaggaacag

SEQ ID NO: 528421 - RNA, 21 nt, Human
agagucugggaggaaaggggg

SEQ ID NO: 528422 - RNA, 20 nt, Human
auggagccguacagaagacu

SEQ ID NO: 528423 - RNA, 22 nt, Human
auuacagaaaguucaggaacaa

SEQ ID NO: 528424 - RNA, 28 nt, Human
caaaacaaccucugcaagaaggucaucc

SEQ ID NO: 528425 - RNA, 18 nt, Human
caacuccaaugcccaaag

SEQ ID NO: 528426 - RNA, 25 nt, Human
caaugcccaaagaucaaggaacaga

SEQ ID NO: 528427 - RNA, 24 nt, Human
cauggagccguacagaagacugac

SEQ ID NO: 528428 - RNA, 20 nt, Human
ccaacuccaaugcccaaaga

SEQ ID NO: 528429 - RNA, 22 nt, Human
ccaaugcccaaagaucaagggg

SEQ ID NO: 528430 - RNA, 19 nt, Human
cccaaagaucaaggaacag

SEQ ID NO: 528431 - RNA, 22 nt, Human
ccccaucaccuauguaacuccc

SEQ ID NO: 528432 - RNA, 21 nt, Human
cucccuaaauaaauaaaaauu

SEQ ID NO: 528433 - RNA, 22 nt, Human
cucgccaacuccaaugcccaaa

SEQ ID NO: 528434 - RNA, 28 nt, Human
cucuucccugaugguagccaucuuuaac

SEQ ID NO: 528435 - RNA, 24 nt, Human
cugacacagaugcugaucucuucc

SEQ ID NO: 528436 - RNA, 18 nt, Human
cugaugguagccaucuuu

SEQ ID NO: 528437 - RNA, 24 nt, Human
cuucacagccguggagugccuacc

SEQ ID NO: 528438 - RNA, 21 nt, Human
gauguaaccuugacuucccag

SEQ ID NO: 528439 - RNA, 20 nt, Human
ggaggaaagggggcagcagu

SEQ ID NO: 528440 - RNA, 24 nt, Human
gucagagucugggaggaaaggggg

SEQ ID NO: 528441 - RNA, 21 nt, Human
uaaccuugacuucccaggaaa

SEQ ID NO: 528442 - RNA, 20 nt, Human
uacagaaaguucaggaacaa

SEQ ID NO: 528443 - RNA, 21 nt, Human
uaguuugucagauuuaaaaaa

SEQ ID NO: 528444 - RNA, 18 nt, Human
ucacagccguggagugcc

SEQ ID NO: 528445 - RNA, 19 nt, Human
ucccauggagccguacaga

SEQ ID NO: 528446 - RNA, 18 nt, Human
ucccuaaauaaauaaaaa

SEQ ID NO: 528447 - RNA, 20 nt, Human
uccuuaacucagaagggccc

SEQ ID NO: 528448 - RNA, 21 nt, Human
ugacacagaugcugaucucuu

SEQ ID NO: 528449 - RNA, 19 nt, Human
uguaaccuugacuucccag

SEQ ID NO: 528450 - RNA, 19 nt, Human
ugucagauuuaaaaaauga

SEQ ID NO: 528451 - RNA, 21 nt, Human
uuacagaaaguucaggaacaa

SEQ ID NO: 528452 - RNA, 19 nt, Human
uucucuuuguucugacacc

SEQ ID NO: 528453 - RNA, 19 nt, Human
uuuaaaaaaugaaacauua

SEQ ID NO: 528454 - RNA, 18 nt, Human
uuuuuuuuuuuucuuuug

SEQ ID NO: 528455 - RNA, 24 nt, Human
uuuuuuuuuuuuuuuuuuucuuuu

SEQ ID NO: 528456 - RNA, 25 nt, Human
aaaaagaaaacaaaaaaccuuagga

SEQ ID NO: 528457 - RNA, 19 nt, Human
aaaaagacaaaaacaaaaa

SEQ ID NO: 528458 - RNA, 21 nt, Human
aaaaaggagauaaaaagcaag

SEQ ID NO: 528459 - RNA, 19 nt, Human
aaaagaaugaaggauaggc

SEQ ID NO: 528460 - RNA, 22 nt, Human
aaaaguuauuugaaaccacacu

SEQ ID NO: 528461 - RNA, 19 nt, Human
aaacaaaaaacaccuuuca

SEQ ID NO: 528462 - RNA, 20 nt, Human
aaaguacuugaggccuuacc

SEQ ID NO: 528463 - RNA, 20 nt, Human
aaaguacuugaggccuuacc

SEQ ID NO: 528464 - RNA, 21 nt, Human
aaauaaguaccaaagugcuuu

SEQ ID NO: 528465 - RNA, 18 nt, Human
aacccguucuuucucccc

SEQ ID NO: 528466 - RNA, 23 nt, Human
aacccguucuuucuccccgcccc

SEQ ID NO: 528467 - RNA, 21 nt, Human
aacuugauucucuauuaacaa

SEQ ID NO: 528468 - RNA, 21 nt, Human
aagcuuucuucuggcagaggc

SEQ ID NO: 528469 - RNA, 25 nt, Human
aaggaggaaucuguuuuguuucaag

SEQ ID NO: 528470 - RNA, 24 nt, Human
aaguagcugggaacacaggcaugc

SEQ ID NO: 528471 - RNA, 18 nt, Human
aauaaaacaauuugaugc

SEQ ID NO: 528472 - RNA, 18 nt, Human
aaucagagauaauaccac

SEQ ID NO: 528473 - RNA, 19 nt, Human
aaugaagaugaaguaaccu

SEQ ID NO: 528474 - RNA, 19 nt, Human
aauuccaauucaacagcau

SEQ ID NO: 528475 - RNA, 28 nt, Human
acaaaaacaaaaaacaccuuucaaacac

SEQ ID NO: 528476 - RNA, 24 nt, Human
acauggcggacacaacccguucuu

SEQ ID NO: 528477 - RNA, 18 nt, Human
accaaaggacuuuacagc

SEQ ID NO: 528478 - RNA, 18 nt, Human
acccguucuuucuccccg

SEQ ID NO: 528479 - RNA, 23 nt, Human
acccguucuuucuccccgccccc

SEQ ID NO: 528480 - RNA, 23 nt, Human
accuuagccucccaaguagcugg

SEQ ID NO: 528481 - RNA, 22 nt, Human
acucauucagcgcccuuagguc

SEQ ID NO: 528482 - RNA, 25 nt, Human
acuccauugcccaggcuggagugca

SEQ ID NO: 528483 - RNA, 23 nt, Human
acucuacaggaaagauuacagca

SEQ ID NO: 528484 - RNA, 21 nt, Human
agacaaaaacaaaaaacaccu

SEQ ID NO: 528485 - RNA, 26 nt, Human
agagaacaaaugaacagaagaucugu

SEQ ID NO: 528486 - RNA, 21 nt, Human
agcaagauuuauaacauucac

SEQ ID NO: 528487 - RNA, 19 nt, Human
agcaguuuuaaggucaugu

SEQ ID NO: 528488 - RNA, 24 nt, Human
aggaugucuucauguguaaaucag

SEQ ID NO: 528489 - RNA, 23 nt, Human
aggcauuccuuaguaaagagagu

SEQ ID NO: 528490 - RNA, 23 nt, Human
aggguuccuauuaaacauuagug

SEQ ID NO: 528491 - RNA, 21 nt, Human
agugcagucgugcaaucacag

SEQ ID NO: 528492 - RNA, 23 nt, Human
agugcagucgugcaaucacagcu

SEQ ID NO: 528493 - RNA, 23 nt, Human
auaaaacucucucaaggcugcaa

SEQ ID NO: 528494 - RNA, 22 nt, Human
augaagaggaaaaaaaaagccc

SEQ ID NO: 528495 - RNA, 19 nt, Human
augaugauuauauguuggc

SEQ ID NO: 528496 - RNA, 21 nt, Human
auuuauagcuauguuuuccuu

SEQ ID NO: 528497 - RNA, 19 nt, Human
caaaaacaaaaaacaccuu

SEQ ID NO: 528498 - RNA, 19 nt, Human
caaacugaaagcagcauuu

SEQ ID NO: 528499 - RNA, 22 nt, Human
caacagcauuuaccaaaggacu

SEQ ID NO: 528500 - RNA, 24 nt, Human
caacccguucuuucuccccgcccc

SEQ ID NO: 528501 - RNA, 31 nt, Human
cacagcucacuauagccucaaccuccuaggg

SEQ ID NO: 528502 - RNA, 22 nt, Human
caccaacauggcggacacaacc

SEQ ID NO: 528503 - RNA, 19 nt, Human
cacuauagccucaaccucc

SEQ ID NO: 528504 - RNA, 24 nt, Human
cacuccauugcccaggcuggagug

SEQ ID NO: 528505 - RNA, 24 nt, Human
cagccuucccuuucucuuuauuaa

SEQ ID NO: 528506 - RNA, 22 nt, Human
cauaauucaggucaaaugccaa

SEQ ID NO: 528507 - RNA, 19 nt, Human
cauugcccaggcuggagug

SEQ ID NO: 528508 - RNA, 20 nt, Human
cauuugauuauaaaaagguc

SEQ ID NO: 528509 - RNA, 18 nt, Human
ccaacuguaccaagccag

SEQ ID NO: 528510 - RNA, 23 nt, Human
cccaccuuagccucccaaguagc

SEQ ID NO: 528511 - RNA, 22 nt, Human
cccuccuggagcucuagucgcc

SEQ ID NO: 528512 - RNA, 22 nt, Human
ccgaaugaauaaauaaauugca

SEQ ID NO: 528513 - RNA, 19 nt, Human
ccuauauuauagcaaaauu

SEQ ID NO: 528514 - RNA, 25 nt, Human
ccugcggugggugugacccuaggac

SEQ ID NO: 528515 - RNA, 18 nt, Human
ccuucccuuucucuuuau

SEQ ID NO: 528516 - RNA, 19 nt, Human
ccuucccuuucucuuuauu

SEQ ID NO: 528517 - RNA, 21 nt, Human
ccuuugcauuuccuugggagg

SEQ ID NO: 528518 - RNA, 20 nt, Human
cgugcaaucacagcucacua

SEQ ID NO: 528519 - RNA, 24 nt, Human
cuaaaaaaggagauaaaaagcaag

SEQ ID NO: 528520 - RNA, 21 nt, Human
cuagagcccacagaacuggcc

SEQ ID NO: 528521 - RNA, 18 nt, Human
cucacuccauugcccagg

SEQ ID NO: 528522 - RNA, 21 nt, Human
cugaauuccaauucaacagca

SEQ ID NO: 528523 - RNA, 19 nt, Human
cuggcugcuaagcuuucuu

SEQ ID NO: 528524 - RNA, 19 nt, Human
cuguucuuuuaacaguagu

SEQ ID NO: 528525 - RNA, 24 nt, Human
cuucacauucaaauauuuucaaaa

SEQ ID NO: 528526 - RNA, 26 nt, Human
cuucccaccuuagccucccaaguagc

SEQ ID NO: 528527 - RNA, 22 nt, Human
cuuucuucuggcagaggcugga

SEQ ID NO: 528528 - RNA, 21 nt, Human
cuuuggcagcgguccucagag

SEQ ID NO: 528529 - RNA, 24 nt, Human
gacaaaaacaaaaaacaccuuuca

SEQ ID NO: 528530 - RNA, 23 nt, Human
gagaacaaauaaguaccaaagug

SEQ ID NO: 528531 - RNA, 20 nt, Human
gagacaggagucucacucca

SEQ ID NO: 528532 - RNA, 24 nt, Human
gagccaagcaaaugcaauccuaaa

SEQ ID NO: 528533 - RNA, 19 nt, Human
gcccaggcuggagugcagu

SEQ ID NO: 528534 - RNA, 19 nt, Human
gcccccaagagggagcgga

SEQ ID NO: 528535 - RNA, 22 nt, Human
gcccuuaggucucuacugaggc

SEQ ID NO: 528536 - RNA, 25 nt, Human
ggaaaaaauucuucucuaaguuaaa

SEQ ID NO: 528537 - RNA, 25 nt, Human
ggacacaacccguucuuucuccccg

SEQ ID NO: 528538 - RNA, 25 nt, Human
ggcagaaaauaauguaauauuccuu

SEQ ID NO: 528539 - RNA, 20 nt, Human
gggggcggaggcgaaggacg

SEQ ID NO: 528540 - RNA, 21 nt, Human
guaaccuuguccaaaauuugu

SEQ ID NO: 528541 - RNA, 21 nt, Human
gugaaauaaagcaaacccuuu

SEQ ID NO: 528542 - RNA, 25 nt, Human
uaaaaaaaaaacuaucaaacugaaa

SEQ ID NO: 528543 - RNA, 24 nt, Human
uaaaaagaaaacaaaaaaccuuag

SEQ ID NO: 528544 - RNA, 19 nt, Human
uaaaaagcaagcugauguc

SEQ ID NO: 528545 - RNA, 23 nt, Human
uaaaacaauuugaugcaaagagu

SEQ ID NO: 528546 - RNA, 18 nt, Human
uaaaaggaagagguguuu

SEQ ID NO: 528547 - RNA, 24 nt, Human
uaaaauagauauggucagugaaug

SEQ ID NO: 528548 - RNA, 21 nt, Human
uaacauucacaaaaagauuuu

SEQ ID NO: 528549 - RNA, 21 nt, Human
uaagagacuuuuccuaccuuu

SEQ ID NO: 528550 - RNA, 22 nt, Human
uaagcuuucuucuggcagaggc

SEQ ID NO: 528551 - RNA, 21 nt, Human
uaagguagacaaauguauguu

SEQ ID NO: 528552 - RNA, 20 nt, Human
uaccacacagaauguaagga

SEQ ID NO: 528553 - RNA, 24 nt, Human
uacucuacaggaaagauuacagca

SEQ ID NO: 528554 - RNA, 18 nt, Human
uagcaaaaaaaugaaauu

SEQ ID NO: 528555 - RNA, 23 nt, Human
uagcaaaaaaaugaaauuuuuaa

SEQ ID NO: 528556 - RNA, 23 nt, Human
uagggaacauuuaauuucccuua

SEQ ID NO: 528557 - RNA, 24 nt, Human
uaugaagaggaaaaaaaaagccca

SEQ ID NO: 528558 - RNA, 23 nt, Human
ucaauauaaggaggaaucuguuu

SEQ ID NO: 528559 - RNA, 22 nt, Human
ucacagacauacacauauuucu

SEQ ID NO: 528560 - RNA, 22 nt, Human
ucacuaaaaaaggagauaaaaa

SEQ ID NO: 528561 - RNA, 23 nt, Human
ucacuauagccucaaccuccuag

SEQ ID NO: 528562 - RNA, 24 nt, Human
ucacuccauugcccaggcuggagu

SEQ ID NO: 528563 - RNA, 20 nt, Human
ucaggacagcacaaugaaaa

SEQ ID NO: 528564 - RNA, 21 nt, Human
ucagugaauguuugaugauga

SEQ ID NO: 528565 - RNA, 21 nt, Human
ucauucaauaaaacaccauaa

SEQ ID NO: 528566 - RNA, 24 nt, Human
ucccaaguagcugggaacacaggc

SEQ ID NO: 528567 - RNA, 18 nt, Human
uccuaaauagcaaaaaaa

SEQ ID NO: 528568 - RNA, 20 nt, Human
uccuagguucaauugaucuu

SEQ ID NO: 528569 - RNA, 18 nt, Human
ucuacaguuuauaguucu

SEQ ID NO: 528570 - RNA, 23 nt, Human
ucucacuccauugcccaggcugg

SEQ ID NO: 528571 - RNA, 24 nt, Human
ucucacuccauugcccaggcugga

SEQ ID NO: 528572 - RNA, 26 nt, Human
ucucacuccauugcccaggcuggagu

SEQ ID NO: 528573 - RNA, 23 nt, Human
ucucuacugaggcgcuggcugcu

SEQ ID NO: 528574 - RNA, 18 nt, Human
ucuucuggcagaggcugg

SEQ ID NO: 528575 - RNA, 19 nt, Human
ucuucuggcagaggcugga

SEQ ID NO: 528576 - RNA, 20 nt, Human
ugaauuaaauaaguugaguu

SEQ ID NO: 528577 - RNA, 19 nt, Human
ugacuugguuuaugcuacc

SEQ ID NO: 528578 - RNA, 21 nt, Human
ugagaaaugagauaaaacaca

SEQ ID NO: 528579 - RNA, 22 nt, Human
ugagaaaugagauaaaacacaa

SEQ ID NO: 528580 - RNA, 22 nt, Human
ugagagcuuagucgugagagcg

SEQ ID NO: 528581 - RNA, 21 nt, Human
ugagguauaguaugcauuugg

SEQ ID NO: 528582 - RNA, 19 nt, Human
ugaguaguaguuuaauacu

SEQ ID NO: 528583 - RNA, 25 nt, Human
ugauuuauccuauuuuaguaaccug

SEQ ID NO: 528584 - RNA, 20 nt, Human
ugcaauaugccaacuuuggu

SEQ ID NO: 528585 - RNA, 22 nt, Human
ugcauuaacaaggaugucuuca

SEQ ID NO: 528586 - RNA, 18 nt, Human
ugcccaggcuggagugca

SEQ ID NO: 528587 - RNA, 24 nt, Human
ugcccaggcuggagugcagucgug

SEQ ID NO: 528588 - RNA, 23 nt, Human
ugcggugggugugacccuaggac

SEQ ID NO: 528589 - RNA, 18 nt, Human
ugcuaagcuuucuucugg

SEQ ID NO: 528590 - RNA, 19 nt, Human
uggagugcagucgugcaau

SEQ ID NO: 528591 - RNA, 23 nt, Human
ugggaacugggcuacacaaauaa

SEQ ID NO: 528592 - RNA, 19 nt, Human
ugggugugacccuaggacc

SEQ ID NO: 528593 - RNA, 23 nt, Human
ugguacaggaaaaaauucuucuc

SEQ ID NO: 528594 - RNA, 18 nt, Human
ugugaagauauaaguagu

SEQ ID NO: 528595 - RNA, 21 nt, Human
ugugaauaaagcuaguuuuaa

SEQ ID NO: 528596 - RNA, 20 nt, Human
uuaauacaaaacccagcagu

SEQ ID NO: 528597 - RNA, 19 nt, Human
uuagagacaggagucucac

SEQ ID NO: 528598 - RNA, 19 nt, Human
uuaggaguuuugguuauca

SEQ ID NO: 528599 - RNA, 22 nt, Human
uuaguuuauggucagagugauu

SEQ ID NO: 528600 - RNA, 21 nt, Human
uuaucaacaaauauggaagca

SEQ ID NO: 528601 - RNA, 23 nt, Human
uucaaauauuuucaaaauauuuu

SEQ ID NO: 528602 - RNA, 24 nt, Human
uucaauugaucuucccaccuuagc

SEQ ID NO: 528603 - RNA, 18 nt, Human
uucauuuuaaaggguaaa

SEQ ID NO: 528604 - RNA, 23 nt, Human
uucccaccuuagccucccaagua

SEQ ID NO: 528605 - RNA, 22 nt, Human
uugcccaggcuggagugcaguc

SEQ ID NO: 528606 - RNA, 19 nt, Human
uuuaccaaaggacuuuaca

SEQ ID NO: 528607 - RNA, 21 nt, Human
uuucuucuggcagaggcugga

SEQ ID NO: 528608 - RNA, 28 nt, Human
uuugguacaggaaaaaauucuucucuaa

SEQ ID NO: 528609 - RNA, 23 nt, Human
aaaaaacaauucuaaacuguaug

SEQ ID NO: 528610 - RNA, 18 nt, Human
aaaacgcaguggugaaaa

SEQ ID NO: 528611 - RNA, 22 nt, Human
aaacaaaaguuuacacauucuc

SEQ ID NO: 528612 - RNA, 19 nt, Human
aaagaugugccucaaacuu

SEQ ID NO: 528613 - RNA, 24 nt, Human
aaagugcugggauuacaggcguga

SEQ ID NO: 528614 - RNA, 19 nt, Human
aacaaauugguagauuaca

SEQ ID NO: 528615 - RNA, 20 nt, Human
aacauacuguauacacagau

SEQ ID NO: 528616 - RNA, 21 nt, Human
aagcaaugccacaguugccuc

SEQ ID NO: 528617 - RNA, 19 nt, Human
aagugcugggauuacaggc

SEQ ID NO: 528618 - RNA, 19 nt, Human
aagugcugggauuacaggc

SEQ ID NO: 528619 - RNA, 21 nt, Human
aauaguaauaaaaauacaauc

SEQ ID NO: 528620 - RNA, 21 nt, Human
acacaguuacuaccacuggca

SEQ ID NO: 528621 - RNA, 23 nt, Human
acaguuaucacacuuaaagccca

SEQ ID NO: 528622 - RNA, 23 nt, Human
accagggaaaccuuugcucacca

SEQ ID NO: 528623 - RNA, 24 nt, Human
accauguuggccagguuggucuug

SEQ ID NO: 528624 - RNA, 25 nt, Human
acucuguugcccagccuggagugca

SEQ ID NO: 528625 - RNA, 18 nt, Human
acuuugucuucucauuau

SEQ ID NO: 528626 - RNA, 24 nt, Human
agaaucuuuccaaacugugcacau

SEQ ID NO: 528627 - RNA, 27 nt, Human
agacuaaauuuaaucacuuguuuaaaa

SEQ ID NO: 528628 - RNA, 21 nt, Human
agcuguacuugacgagaacac

SEQ ID NO: 528629 - RNA, 22 nt, Human
agggugcugucgucugcuuguu

SEQ ID NO: 528630 - RNA, 20 nt, Human
agugcaguggcaugauccug

SEQ ID NO: 528631 - RNA, 23 nt, Human
agugcaguggcaugauccuggcu

SEQ ID NO: 528632 - RNA, 24 nt, Human
agugcaguggcaugauccuggcuc

SEQ ID NO: 528633 - RNA, 18 nt, Human
agugcugggauuacaggc

SEQ ID NO: 528634 - RNA, 20 nt, Human
auaguccuaaagaugcagaa

SEQ ID NO: 528635 - RNA, 19 nt, Human
augcaaccucugccuccug

SEQ ID NO: 528636 - RNA, 21 nt, Human
augcaaccucugccuccuggg

SEQ ID NO: 528637 - RNA, 21 nt, Human
auuucuggaggacaauccugg

SEQ ID NO: 528638 - RNA, 24 nt, Human
caaagugcugggauuacaggcgug

SEQ ID NO: 528639 - RNA, 19 nt, Human
caaaugaacaucauucaag

SEQ ID NO: 528640 - RNA, 25 nt, Human
caacaaaaauaagaaugcacuuuga

SEQ ID NO: 528641 - RNA, 26 nt, Human
caacaaaaauaagaaugcacuuugaa

SEQ ID NO: 528642 - RNA, 19 nt, Human
caacaaaauccagcaguau

SEQ ID NO: 528643 - RNA, 22 nt, Human
caagcaauucuccugccucagc

SEQ ID NO: 528644 - RNA, 19 nt, Human
caagugauccacccauauc

SEQ ID NO: 528645 - RNA, 22 nt, Human
caauauacaccugacucaaaau

SEQ ID NO: 528646 - RNA, 19 nt, Human
caaugcaaccucugccucc

SEQ ID NO: 528647 - RNA, 22 nt, Human
cacacaccaugagcugguuaag

SEQ ID NO: 528648 - RNA, 21 nt, Human
cacacccggcuaauuuuugua

SEQ ID NO: 528649 - RNA, 22 nt, Human
cacacgccaucacacccggcua

SEQ ID NO: 528650 - RNA, 18 nt, Human
cacagaaauccaaagaca

SEQ ID NO: 528651 - RNA, 21 nt, Human
caccauguuggccagguuggu

SEQ ID NO: 528652 - RNA, 22 nt, Human
caccauguuggccagguugguc

SEQ ID NO: 528653 - RNA, 23 nt, Human
caccauguuggccagguuggucu

SEQ ID NO: 528654 - RNA, 24 nt, Human
caccauguuggccagguuggucuu

SEQ ID NO: 528655 - RNA, 22 nt, Human
caccauugacagccaaauagcc

SEQ ID NO: 528656 - RNA, 23 nt, Human
caccauugacagccaaauagccu

SEQ ID NO: 528657 - RNA, 19 nt, Human
cacccacuaacaacccuag

SEQ ID NO: 528658 - RNA, 24 nt, Human
caccgaacacccuggauggguucu

SEQ ID NO: 528659 - RNA, 19 nt, Human
caccucccuucgacaacaa

SEQ ID NO: 528660 - RNA, 24 nt, Human
cacucuguugcccagccuggagug

SEQ ID NO: 528661 - RNA, 20 nt, Human
cacugaaaucacuaaaucca

SEQ ID NO: 528662 - RNA, 18 nt, Human
cagcuccaauuuacuaaa

SEQ ID NO: 528663 - RNA, 20 nt, Human
cagggaacaaugaaauuaga

SEQ ID NO: 528664 - RNA, 23 nt, Human
caguggugaaaaauucaccaggg

SEQ ID NO: 528665 - RNA, 24 nt, Human
cauguuggccagguuggucuugaa

SEQ ID NO: 528666 - RNA, 21 nt, Human
ccaaagcuuuuuauaaacugu

SEQ ID NO: 528667 - RNA, 22 nt, Human
ccaaagugcugggauuacaggc

SEQ ID NO: 528668 - RNA, 22 nt, Human
ccaaagugcugggauuacaggc

SEQ ID NO: 528669 - RNA, 24 nt, Human
ccaaagugcugggauuacaggcgu

SEQ ID NO: 528670 - RNA, 18 nt, Human
ccacaguuaucacacuua

SEQ ID NO: 528671 - RNA, 20 nt, Human
ccacauguugcacaaaucca

SEQ ID NO: 528672 - RNA, 24 nt, Human
ccauauacacuggcgguucaugug

SEQ ID NO: 528673 - RNA, 21 nt, Human
ccauuuaagaucaccaccuaa

SEQ ID NO: 528674 - RNA, 19 nt, Human
cccacuaacaacccuagcc

SEQ ID NO: 528675 - RNA, 23 nt, Human
cccagccuggagugcaguggcau

SEQ ID NO: 528676 - RNA, 22 nt, Human
ccccuacaguuuuaacaaaaac

SEQ ID NO: 528677 - RNA, 19 nt, Human
cccgaguagcugggauuau

SEQ ID NO: 528678 - RNA, 24 nt, Human
ccuccuggguucaagcaauucucc

SEQ ID NO: 528679 - RNA, 19 nt, Human
ccucugccuccuggguuca

SEQ ID NO: 528680 - RNA, 23 nt, Human
ccugacuucaagugauccaccca

SEQ ID NO: 528681 - RNA, 23 nt, Human
ccuggguucaagcaauucuccug

SEQ ID NO: 528682 - RNA, 19 nt, Human
cgagauucuacuucuucag

SEQ ID NO: 528683 - RNA, 23 nt, Human
cuaauuuuuguauuuuuaguagg

SEQ ID NO: 528684 - RNA, 24 nt, Human
cucaaugcaaccucugccuccugg

SEQ ID NO: 528685 - RNA, 24 nt, Human
cucagccucccgaguagcugggau

SEQ ID NO: 528686 - RNA, 20 nt, Human
cucccaaagcuacauuacaa

SEQ ID NO: 528687 - RNA, 21 nt, Human
cuccuggguucaagcaauucu

SEQ ID NO: 528688 - RNA, 24 nt, Human
cugcagaauuaaguggcccuuccu

SEQ ID NO: 528689 - RNA, 23 nt, Human
cugccucagccucccgaguagcu

SEQ ID NO: 528690 - RNA, 24 nt, Human
cuggaugcuugaaauaaauagauu

SEQ ID NO: 528691 - RNA, 23 nt, Human
cuucacccacuaacaacccuagc

SEQ ID NO: 528692 - RNA, 24 nt, Human
gacuucaagugauccacccauauc

SEQ ID NO: 528693 - RNA, 26 nt, Human
gaguagcugggauuauauaugcacac

SEQ ID NO: 528694 - RNA, 19 nt, Human
gagugucauuucugggaaa

SEQ ID NO: 528695 - RNA, 18 nt, Human
gauuacaggcgugagcca

SEQ ID NO: 528696 - RNA, 21 nt, Human
gauuacaggcgugagccacug

SEQ ID NO: 528697 - RNA, 24 nt, Human
gauuacaggcgugagccacuggac

SEQ ID NO: 528698 - RNA, 22 nt, Human
gcaaccucugccuccuggguuc

SEQ ID NO: 528699 - RNA, 19 nt, Human
gcacaaauccacuuucagc

SEQ ID NO: 528700 - RNA, 27 nt, Human
gccauuagccaaaaaacaauucuaaac

SEQ ID NO: 528701 - RNA, 20 nt, Human
gcccagccuggagugcagug

SEQ ID NO: 528702 - RNA, 20 nt, Human
gccucagccucccgaguagc

SEQ ID NO: 528703 - RNA, 21 nt, Human
ggguuucaccauguuggccag

SEQ ID NO: 528704 - RNA, 22 nt, Human
ggguuucaccauguuggccagg

SEQ ID NO: 528705 - RNA, 24 nt, Human
gguuggucuugaacuccugacuuc

SEQ ID NO: 528706 - RNA, 23 nt, Human
guaggguuucaccauguuggcca

SEQ ID NO: 528707 - RNA, 24 nt, Human
guaggguuucaccauguuggccag

SEQ ID NO: 528708 - RNA, 25 nt, Human
guaggguuucaccauguuggccagg

SEQ ID NO: 528709 - RNA, 24 nt, Human
gugauccacccauaucagccuccc

SEQ ID NO: 528710 - RNA, 24 nt, Human
guucaugugaagucaugaaagugg

SEQ ID NO: 528711 - RNA, 21 nt, Human
uaaacagacaguauccacaua

SEQ ID NO: 528712 - RNA, 20 nt, Human
uaaagcccacauguugcaca

SEQ ID NO: 528713 - RNA, 18 nt, Human
uaaagcccacauguugcc

SEQ ID NO: 528714 - RNA, 20 nt, Human
uaaaggccaucaaugaccac

SEQ ID NO: 528715 - RNA, 21 nt, Human
uaaaguguauauccuagaagc

SEQ ID NO: 528716 - RNA, 22 nt, Human
uaaaugaugcacaacaaaaucc

SEQ ID NO: 528717 - RNA, 20 nt, Human
uaacacauaggaaccaaugc

SEQ ID NO: 528718 - RNA, 26 nt, Human
uaagaaaacagaaaauaaguaaacaa

SEQ ID NO: 528719 - RNA, 19 nt, Human
uaaguggcccuuccucacu

SEQ ID NO: 528720 - RNA, 22 nt, Human
uacaggcgugagccacuggacc

SEQ ID NO: 528721 - RNA, 22 nt, Human
uacaggcgugagccacuggacc

SEQ ID NO: 528722 - RNA, 23 nt, Human
uacaggcgugagccacuggaccu

SEQ ID NO: 528723 - RNA, 22 nt, Human
uacuguauacacagauaagaag

SEQ ID NO: 528724 - RNA, 18 nt, Human
uacuucuguacucggcug

SEQ ID NO: 528725 - RNA, 26 nt, Human
uagccaaaaaacaauucuaaacugua

SEQ ID NO: 528726 - RNA, 24 nt, Human
uaggguuucaccauguuggccagg

SEQ ID NO: 528727 - RNA, 21 nt, Human
uauaaacagacaguauccaca

SEQ ID NO: 528728 - RNA, 20 nt, Human
uauaugcacacgccaucaca

SEQ ID NO: 528729 - RNA, 22 nt, Human
uaucacacuuaaagcccacaug

SEQ ID NO: 528730 - RNA, 21 nt, Human
uauccuagaagcaaacaccau

SEQ ID NO: 528731 - RNA, 22 nt, Human
uaugaccaaguucuuugaaacc

SEQ ID NO: 528732 - RNA, 29 nt, Human
uauucuauccacuucuacuccccucucaa

SEQ ID NO: 528733 - RNA, 21 nt, Human
ucaacaccauugacagccaaa

SEQ ID NO: 528734 - RNA, 19 nt, Human
ucaagcaauucuccugccu

SEQ ID NO: 528735 - RNA, 20 nt, Human
ucaaugaccaccacugggac

SEQ ID NO: 528736 - RNA, 24 nt, Human
ucaaugcaaccucugccuccuggg

SEQ ID NO: 528737 - RNA, 18 nt, Human
ucacagaaauccaaagac

SEQ ID NO: 528738 - RNA, 21 nt, Human
ucaccauguuggccagguugg

SEQ ID NO: 528739 - RNA, 18 nt, Human
ucagccucccaaagugcu

SEQ ID NO: 528740 - RNA, 20 nt, Human
ucagccucccgaguagcugg

SEQ ID NO: 528741 - RNA, 21 nt, Human
ucagcuugcauuugcugaagu

SEQ ID NO: 528742 - RNA, 21 nt, Human
ucauugguuaaaacuuugucu

SEQ ID NO: 528743 - RNA, 21 nt, Human
uccacccauaucagccuccca

SEQ ID NO: 528744 - RNA, 22 nt, Human
uccagcaguauaaaagaaugca

SEQ ID NO: 528745 - RNA, 24 nt, Human
ucccaaagugcugggauuacaggc

SEQ ID NO: 528746 - RNA, 18 nt, Human
ucccgaguagcugggauu

SEQ ID NO: 528747 - RNA, 20 nt, Human
uccuagaagcaaacaccauc

SEQ ID NO: 528748 - RNA, 24 nt, Human
uccucaccucccuucgacaacaaa

SEQ ID NO: 528749 - RNA, 26 nt, Human
uccugacaaaugaacaucauucaaga

SEQ ID NO: 528750 - RNA, 21 nt, Human
uccuggguucaagcaauucuc

SEQ ID NO: 528751 - RNA, 24 nt, Human
uccuggguucaagcaauucuccug

SEQ ID NO: 528752 - RNA, 23 nt, Human
uccuguugcccaauucaucugcu

SEQ ID NO: 528753 - RNA, 26 nt, Human
ucuaugccacaguuaucacacuuaaa

SEQ ID NO: 528754 - RNA, 24 nt, Human
ucucacucuguugcccagccugga

SEQ ID NO: 528755 - RNA, 19 nt, Human
ucuccugacaaaugaacau

SEQ ID NO: 528756 - RNA, 25 nt, Human
ucuccugacaaaugaacaucauuca

SEQ ID NO: 528757 - RNA, 24 nt, Human
ucuccugccucagccucccgagua

SEQ ID NO: 528758 - RNA, 22 nt, Human
ucugaccuauaaauagguucua

SEQ ID NO: 528759 - RNA, 23 nt, Human
ucugaccuauaaauagguucuaa

SEQ ID NO: 528760 - RNA, 24 nt, Human
ucugccuccuggguucaagcaauu

SEQ ID NO: 528761 - RNA, 23 nt, Human
ucuguacucggcuggcaaccugu

SEQ ID NO: 528762 - RNA, 27 nt, Human
ucuguacucggcuggcaaccuguuuuu

SEQ ID NO: 528763 - RNA, 24 nt, Human
ucuguugcccagccuggagugcag

SEQ ID NO: 528764 - RNA, 21 nt, Human
ucuugaacuccugacuucaag

SEQ ID NO: 528765 - RNA, 19 nt, Human
ucuuugaugaguuguacug

SEQ ID NO: 528766 - RNA, 19 nt, Human
ugaaaucacuaaauccacu

SEQ ID NO: 528767 - RNA, 20 nt, Human
ugaaauccaagaaaagaugg

SEQ ID NO: 528768 - RNA, 19 nt, Human
ugaccaaguucuuugaaac

SEQ ID NO: 528769 - RNA, 21 nt, Human
ugacuucaagugauccaccca

SEQ ID NO: 528770 - RNA, 20 nt, Human
ugcaaccucugccuccuggg

SEQ ID NO: 528771 - RNA, 23 nt, Human
ugcaaccucugccuccuggguuc

SEQ ID NO: 528772 - RNA, 21 nt, Human
ugcagaaaaaucuggaugcuu

SEQ ID NO: 528773 - RNA, 21 nt, Human
ugcagaaaaaucuggaugcuu

SEQ ID NO: 528774 - RNA, 18 nt, Human
ugccaccgaacacccugg

SEQ ID NO: 528775 - RNA, 24 nt, Human
ugccucaaacuucacccacuaaca

SEQ ID NO: 528776 - RNA, 24 nt, Human
ugccucagccucccgaguagcugg

SEQ ID NO: 528777 - RNA, 24 nt, Human
ugcugggauuacaggcgugagcca

SEQ ID NO: 528778 - RNA, 24 nt, Human
uggaaugccagcuuuaguuagcuu

SEQ ID NO: 528779 - RNA, 19 nt, Human
uggagugcaguggcaugau

SEQ ID NO: 528780 - RNA, 23 nt, Human
uggagugcaguggcaugauccug

SEQ ID NO: 528781 - RNA, 24 nt, Human
uggagugcaguggcaugauccugg

SEQ ID NO: 528782 - RNA, 22 nt, Human
uggcaaugccaccgaacacccu

SEQ ID NO: 528783 - RNA, 24 nt, Human
uggccagguuggucuugaacuccu

SEQ ID NO: 528784 - RNA, 19 nt, Human
ugggauuacaggcgugagc

SEQ ID NO: 528785 - RNA, 21 nt, Human
ugggauuacaggcgugagcca

SEQ ID NO: 528786 - RNA, 22 nt, Human
ugggauuacaggcgugagccac

SEQ ID NO: 528787 - RNA, 22 nt, Human
ugggauuacaggcgugagccac

SEQ ID NO: 528788 - RNA, 23 nt, Human
ugggauuacaggcgugagccacu

SEQ ID NO: 528789 - RNA, 24 nt, Human
ugggauuacaggcgugagccacug

SEQ ID NO: 528790 - RNA, 26 nt, Human
ugggauuauauaugcacacgccauca

SEQ ID NO: 528791 - RNA, 21 nt, Human
uggguucaagcaauucuccug

SEQ ID NO: 528792 - RNA, 23 nt, Human
uggguucaagcaauucuccugcc

SEQ ID NO: 528793 - RNA, 24 nt, Human
uggguucaagcaauucuccugccu

SEQ ID NO: 528794 - RNA, 20 nt, Human
uguaacuggugcccugagac

SEQ ID NO: 528795 - RNA, 20 nt, Human
ugucuaaagaagucaguuuc

SEQ ID NO: 528796 - RNA, 24 nt, Human
uguucauguggcuaugaaaacaag

SEQ ID NO: 528797 - RNA, 27 nt, Human
uuaagcagcuccaauuuacuaaaggcc

SEQ ID NO: 528798 - RNA, 23 nt, Human
uuacauuuaaaaaauauaucuga

SEQ ID NO: 528799 - RNA, 18 nt, Human
uuaguaggguuucaccau

SEQ ID NO: 528800 - RNA, 23 nt, Human
uuauccccaaacaaaaguuuaca

SEQ ID NO: 528801 - RNA, 20 nt, Human
uucaacuacugcagaauuaa

SEQ ID NO: 528802 - RNA, 21 nt, Human
uucaagcaauucuccugccuc

SEQ ID NO: 528803 - RNA, 24 nt, Human
uucaagcaauucuccugccucagc

SEQ ID NO: 528804 - RNA, 24 nt, Human
uucaagugauccacccauaucagc

SEQ ID NO: 528805 - RNA, 24 nt, Human
uucacccacuaacaacccuagcca

SEQ ID NO: 528806 - RNA, 22 nt, Human
uucauugugguuaaaagaaauu

SEQ ID NO: 528807 - RNA, 22 nt, Human
uucuguacucggcuggcaaccu

SEQ ID NO: 528808 - RNA, 19 nt, Human
uugcauuugcugaaguuuc

SEQ ID NO: 528809 - RNA, 19 nt, Human
uugcugaaguuucugcuuc

SEQ ID NO: 528810 - RNA, 20 nt, Human
uugcugaaguuucugcuucu

SEQ ID NO: 528811 - RNA, 19 nt, Human
uuguacugacaacuccaaa

SEQ ID NO: 528812 - RNA, 19 nt, Human
uuuaaaacucauggcuaac

SEQ ID NO: 528813 - RNA, 24 nt, Human
uuuaaaguguauauccuagaagca

SEQ ID NO: 528814 - RNA, 18 nt, Human
uuuaguaggguuucacca

SEQ ID NO: 528815 - RNA, 19 nt, Human
uuucaccauguuggccagg

SEQ ID NO: 528816 - RNA, 20 nt, Human
uuucaccauguuggccaggu

SEQ ID NO: 528817 - RNA, 21 nt, Human
uuuccuguaacacauaggaac

SEQ ID NO: 528818 - RNA, 18 nt, Human
uuuuuguauuuuuaguag

SEQ ID NO: 528819 - RNA, 18 nt, Human
aaauagugauuuccucaa

SEQ ID NO: 528820 - RNA, 24 nt, Human
aacacagaacaccugccugcccac

SEQ ID NO: 528821 - RNA, 20 nt, Human
aaccugggggggaaacgggg

SEQ ID NO: 528822 - RNA, 20 nt, Human
aaggguccaggggaguuguu

SEQ ID NO: 528823 - RNA, 19 nt, Human
accgaccagucaaggaggu

SEQ ID NO: 528824 - RNA, 21 nt, Human
acucuuuaagaacuccuccug

SEQ ID NO: 528825 - RNA, 22 nt, Human
agaauaaccacugaaucccaaa

SEQ ID NO: 528826 - RNA, 25 nt, Human
agagcuucuccgaagcagcggucau

SEQ ID NO: 528827 - RNA, 21 nt, Human
agcagggaaccagggcuggcc

SEQ ID NO: 528828 - RNA, 21 nt, Human
agccccuggcacccacagccc

SEQ ID NO: 528829 - RNA, 24 nt, Human
agcgacgccagcuucagcagcgcg

SEQ ID NO: 528830 - RNA, 21 nt, Human
agcuuuagaaaagccccuagg

SEQ ID NO: 528831 - RNA, 23 nt, Human
aggacgguggcugcagcagggaa

SEQ ID NO: 528832 - RNA, 18 nt, Human
aggcagcuuugcuccucu

SEQ ID NO: 528833 - RNA, 19 nt, Human
agggagcagccugggcugc

SEQ ID NO: 528834 - RNA, 24 nt, Human
aguaacagugacugcaguuagggu

SEQ ID NO: 528835 - RNA, 19 nt, Human
agucagaugcaggcccaag

SEQ ID NO: 528836 - RNA, 19 nt, Human
agugacaggaacgugggga

SEQ ID NO: 528837 - RNA, 23 nt, Human
auagauauccuaauaaaaguuuu

SEQ ID NO: 528838 - RNA, 20 nt, Human
augugcaauauucagucaac

SEQ ID NO: 528839 - RNA, 22 nt, Human
caaggagguguuggugggagug

SEQ ID NO: 528840 - RNA, 22 nt, Human
cacccacagccccggcgcgcuc

SEQ ID NO: 528841 - RNA, 19 nt, Human
caccugccugcccaccccc

SEQ ID NO: 528842 - RNA, 19 nt, Human
cacugaaucccaaaaaguc

SEQ ID NO: 528843 - RNA, 21 nt, Human
cacuuggaaggcagcuuugcu

SEQ ID NO: 528844 - RNA, 22 nt, Human
cagacaggcacuuggaaggcag

SEQ ID NO: 528845 - RNA, 19 nt, Human
cagaugggacaaacugggg

SEQ ID NO: 528846 - RNA, 23 nt, Human
cagaugggacaaacugggggccu

SEQ ID NO: 528847 - RNA, 22 nt, Human
cagcagcgcggggcggcggcgc

SEQ ID NO: 528848 - RNA, 19 nt, Human
cagccagggcaccccgggc

SEQ ID NO: 528849 - RNA, 21 nt, Human
cagccagggcaccccgggcga

SEQ ID NO: 528850 - RNA, 23 nt, Human
cagccccuggcacccacagcccc

SEQ ID NO: 528851 - RNA, 26 nt, Human
cagccgcugcaggucgggcccugguc

SEQ ID NO: 528852 - RNA, 21 nt, Human
cagcggcgucuccuccugcuc

SEQ ID NO: 528853 - RNA, 20 nt, Human
cagcuuugcuccucuggcca

SEQ ID NO: 528854 - RNA, 20 nt, Human
caggauuucggugaugggcc

SEQ ID NO: 528855 - RNA, 22 nt, Human
caggcccaaggguccaggggag

SEQ ID NO: 528856 - RNA, 19 nt, Human
caugcaggcuuuugugugg

SEQ ID NO: 528857 - RNA, 22 nt, Human
ccacccggaaaccucccagcag

SEQ ID NO: 528858 - RNA, 23 nt, Human
ccacccggaaaccucccagcagu

SEQ ID NO: 528859 - RNA, 19 nt, Human
ccacccugagaccgggcgc

SEQ ID NO: 528860 - RNA, 23 nt, Human
ccaggugcgacagcucaggccgg

SEQ ID NO: 528861 - RNA, 26 nt, Human
cccacagcuggaggggcacuuaaggc

SEQ ID NO: 528862 - RNA, 19 nt, Human
ccccggccugcuccgauga

SEQ ID NO: 528863 - RNA, 20 nt, Human
ccccuaggaguguccaccuc

SEQ ID NO: 528864 - RNA, 22 nt, Human
cccgccaggccaccucucaccc

SEQ ID NO: 528865 - RNA, 20 nt, Human
cccugagaccgggcgcgggc

SEQ ID NO: 528866 - RNA, 18 nt, Human
cccugaguccuggcgcuc

SEQ ID NO: 528867 - RNA, 24 nt, Human
ccgccaggccaccucucacccagc

SEQ ID NO: 528868 - RNA, 20 nt, Human
ccggcagcggugggaaaggg

SEQ ID NO: 528869 - RNA, 21 nt, Human
ccuagcacucagccccuggcc

SEQ ID NO: 528870 - RNA, 19 nt, Human
ccucgucuguggggacggg

SEQ ID NO: 528871 - RNA, 21 nt, Human
ccuggacucagcuucugacuc

SEQ ID NO: 528872 - RNA, 21 nt, Human
cgacagcucaggccggagacc

SEQ ID NO: 528873 - RNA, 20 nt, Human
cgagcggccagccauggcgc

SEQ ID NO: 528874 - RNA, 25 nt, Human
cgcggacccuucccgccggcggcgu

SEQ ID NO: 528875 - RNA, 23 nt, Human
cggccagccauggcgcgcggacc

SEQ ID NO: 528876 - RNA, 18 nt, Human
cggugaugggcccucccu

SEQ ID NO: 528877 - RNA, 18 nt, Human
cggugcugaagaccgacc

SEQ ID NO: 528878 - RNA, 20 nt, Human
cucacccagccagggcaccc

SEQ ID NO: 528879 - RNA, 21 nt, Human
cucacccagccagggcacccc

SEQ ID NO: 528880 - RNA, 28 nt, Human
cucagccccuggcacccacagccccggc

SEQ ID NO: 528881 - RNA, 20 nt, Human
cuccaccacuuccaccgugc

SEQ ID NO: 528882 - RNA, 23 nt, Human
cugcagcagggaaccagggcugg

SEQ ID NO: 528883 - RNA, 21 nt, Human
cugcagccgcugcaggucggg

SEQ ID NO: 528884 - RNA, 20 nt, Human
cugcaguuagggucgagagc

SEQ ID NO: 528885 - RNA, 24 nt, Human
cugcccacccccggugcugaagac

SEQ ID NO: 528886 - RNA, 21 nt, Human
cugcucuguucucccaggcac

SEQ ID NO: 528887 - RNA, 24 nt, Human
cuucagcagcgcggggcggcggcg

SEQ ID NO: 528888 - RNA, 19 nt, Human
gaaggcagcuuugcuccuc

SEQ ID NO: 528889 - RNA, 21 nt, Human
gacaggaacguggggaucccc

SEQ ID NO: 528890 - RNA, 18 nt, Human
gacugggcagggcuugcu

SEQ ID NO: 528891 - RNA, 18 nt, Human
gagucccuagcacucagc

SEQ ID NO: 528892 - RNA, 18 nt, Human
gcacuuggaaggcagcuu

SEQ ID NO: 528893 - RNA, 21 nt, Human
gcacuuggaaggcagcuuugc

SEQ ID NO: 528894 - RNA, 18 nt, Human
gcagcggugggaaagggc

SEQ ID NO: 528895 - RNA, 24 nt, Human
gccucgguuucccggcagcggugg

SEQ ID NO: 528896 - RNA, 21 nt, Human
ggaaggcagcuuugcuccucu

SEQ ID NO: 528897 - RNA, 22 nt, Human
ggaucuguccaguagggucacu

SEQ ID NO: 528898 - RNA, 18 nt, Human
ggccugcagccgcugcag

SEQ ID NO: 528899 - RNA, 21 nt, Human
ggcgcggggcucgguuggggg

SEQ ID NO: 528900 - RNA, 18 nt, Human
gggcagguacuggcuuua

SEQ ID NO: 528901 - RNA, 19 nt, Human
gguaaccggguguccaggg

SEQ ID NO: 528902 - RNA, 18 nt, Human
gguagggagcagccuggg

SEQ ID NO: 528903 - RNA, 18 nt, Human
gguccccgagucaguccc

SEQ ID NO: 528904 - RNA, 23 nt, Human
gguccccgagucaguccccgggc

SEQ ID NO: 528905 - RNA, 20 nt, Human
gugauucuuggcaagcuccu

SEQ ID NO: 528906 - RNA, 18 nt, Human
gugccgggaaggccaggc

SEQ ID NO: 528907 - RNA, 24 nt, Human
gugcguggcacgagggcggcagcg

SEQ ID NO: 528908 - RNA, 21 nt, Human
guguccaccuccaccacuucc

SEQ ID NO: 528909 - RNA, 23 nt, Human
uaaauagauauccuaauaaaagu

SEQ ID NO: 528910 - RNA, 18 nt, Human
uaacagugacugcaguua

SEQ ID NO: 528911 - RNA, 22 nt, Human
uaaccacugaaucccaaaaagu

SEQ ID NO: 528912 - RNA, 19 nt, Human
uaauuuaaaauauuuugau

SEQ ID NO: 528913 - RNA, 25 nt, Human
uacacaauuuucacucauaauuuaa

SEQ ID NO: 528914 - RNA, 25 nt, Human
uaccgcaucuucuuugcugacuuug

SEQ ID NO: 528915 - RNA, 25 nt, Human
ucagaugggacaaacugggggccug

SEQ ID NO: 528916 - RNA, 18 nt, Human
ucagccccuggcacccac

SEQ ID NO: 528917 - RNA, 20 nt, Human
ucaguauuaaauagauaucc

SEQ ID NO: 528918 - RNA, 18 nt, Human
ucccaaaaagucacugcg

SEQ ID NO: 528919 - RNA, 19 nt, Human
uccccaaacgcugagcaga

SEQ ID NO: 528920 - RNA, 23 nt, Human
uccccacucaugacgagucccua

SEQ ID NO: 528921 - RNA, 21 nt, Human
uccccgagucaguccccgggc

SEQ ID NO: 528922 - RNA, 19 nt, Human
uccccgggcgcggggcucg

SEQ ID NO: 528923 - RNA, 20 nt, Human
ucccuagcacucagccccug

SEQ ID NO: 528924 - RNA, 24 nt, Human
ucccuagcacucagccccuggcac

SEQ ID NO: 528925 - RNA, 19 nt, Human
uccgcgccaggugcgacag

SEQ ID NO: 528926 - RNA, 22 nt, Human
uccggggccgccacccugagac

SEQ ID NO: 528927 - RNA, 24 nt, Human
ucuaguaaucguucaggauuucgg

SEQ ID NO: 528928 - RNA, 20 nt, Human
ugaaauguuuuuaauagaau

SEQ ID NO: 528929 - RNA, 19 nt, Human
ugacagcagugacaggaac

SEQ ID NO: 528930 - RNA, 24 nt, Human
ugagaccgggcgcgggcaggacgg

SEQ ID NO: 528931 - RNA, 23 nt, Human
ugaguccuggcgcucgggagguc

SEQ ID NO: 528932 - RNA, 19 nt, Human
ugauuaauauuauagcugc

SEQ ID NO: 528933 - RNA, 22 nt, Human
ugauuagaauuacacgaaauuu

SEQ ID NO: 528934 - RNA, 18 nt, Human
ugccgggaaggccaggcc

SEQ ID NO: 528935 - RNA, 22 nt, Human
ugccgugagugagguguucuca

SEQ ID NO: 528936 - RNA, 19 nt, Human
ugcgacagcucaggccgga

SEQ ID NO: 528937 - RNA, 23 nt, Human
ugcgggcgcugggccugcagccg

SEQ ID NO: 528938 - RNA, 19 nt, Human
ugcucuguucucccaggca

SEQ ID NO: 528939 - RNA, 21 nt, Human
ugcucuguucucccaggcaca

SEQ ID NO: 528940 - RNA, 18 nt, Human
uggcaagcuccgcccgcc

SEQ ID NO: 528941 - RNA, 20 nt, Human
uggcaagcuccgcccgccag

SEQ ID NO: 528942 - RNA, 20 nt, Human
uggccuuggaucuguccagu

SEQ ID NO: 528943 - RNA, 18 nt, Human
uggcugacgcuucccuuu

SEQ ID NO: 528944 - RNA, 18 nt, Human
uggcugacgcuucccuuu

SEQ ID NO: 528945 - RNA, 22 nt, Human
uggcugcagcagggaaccaggg

SEQ ID NO: 528946 - RNA, 22 nt, Human
uggcugcauuuugugcucagag

SEQ ID NO: 528947 - RNA, 18 nt, Human
ugggaaagggcgcgagcg

SEQ ID NO: 528948 - RNA, 18 nt, Human
ugguagggagcagccugg

SEQ ID NO: 528949 - RNA, 19 nt, Human
uguggcugacgcuucccuu

SEQ ID NO: 528950 - RNA, 20 nt, Human
uuguguggcugacgcuuccc

SEQ ID NO: 528951 - RNA, 24 nt, Human
aaaaaaaaaaaacucauuugaagg

SEQ ID NO: 528952 - RNA, 20 nt, Human
aaaaccuuuugcuuugccaa

SEQ ID NO: 528953 - RNA, 21 nt, Human
aacugacagaggaaagaggaa

SEQ ID NO: 528954 - RNA, 20 nt, Human
aaucucugccucccugguuc

SEQ ID NO: 528955 - RNA, 24 nt, Human
aaugauucuacugccucagccucc

SEQ ID NO: 528956 - RNA, 25 nt, Human
acacugucacccaggcuagagugca

SEQ ID NO: 528957 - RNA, 23 nt, Human
acagaggaaagaggaagacaagg

SEQ ID NO: 528958 - RNA, 23 nt, Human
acagaguaagacucugucuaaaa

SEQ ID NO: 528959 - RNA, 23 nt, Human
acgccacaggcuggguuaccagu

SEQ ID NO: 528960 - RNA, 20 nt, Human
acucccaccugcccaccccu

SEQ ID NO: 528961 - RNA, 24 nt, Human
acugcacuccagccuaggugacag

SEQ ID NO: 528962 - RNA, 26 nt, Human
acugcacuccagccuaggugacagag

SEQ ID NO: 528963 - RNA, 23 nt, Human
acugccucagccuccugaguaga

SEQ ID NO: 528964 - RNA, 19 nt, Human
acugggcaauucuuagccu

SEQ ID NO: 528965 - RNA, 20 nt, Human
acugugccacugcacuccag

SEQ ID NO: 528966 - RNA, 18 nt, Human
agacagagucucacacug

SEQ ID NO: 528967 - RNA, 24 nt, Human
agagacugugccacugcacuccag

SEQ ID NO: 528968 - RNA, 22 nt, Human
agaggaaagaggaagacaaggc

SEQ ID NO: 528969 - RNA, 21 nt, Human
agaguaagacucugucuaaaa

SEQ ID NO: 528970 - RNA, 24 nt, Human
agccuaggugacagaguaagacuc

SEQ ID NO: 528971 - RNA, 23 nt, Human
aggcgguccuccgccucagccuc

SEQ ID NO: 528972 - RNA, 24 nt, Human
aggcgguccuccgccucagccucc

SEQ ID NO: 528973 - RNA, 23 nt, Human
augauucuacugccucagccucc

SEQ ID NO: 528974 - RNA, 22 nt, Human
caaaauggugggauuacaggug

SEQ ID NO: 528975 - RNA, 24 nt, Human
cacacugucacccaggcuagagug

SEQ ID NO: 528976 - RNA, 20 nt, Human
caccugcccaccccucuaga

SEQ ID NO: 528977 - RNA, 18 nt, Human
cacugcaaucucugccuc

SEQ ID NO: 528978 - RNA, 19 nt, Human
cacugcacuccagccuagg

SEQ ID NO: 528979 - RNA, 21 nt, Human
cacugcacuccagccuaggug

SEQ ID NO: 528980 - RNA, 23 nt, Human
cacugcacuccagccuaggugac

SEQ ID NO: 528981 - RNA, 24 nt, Human
cacugcacuccagccuaggugaca

SEQ ID NO: 528982 - RNA, 24 nt, Human
cacugcacuccagccuaggugaca

SEQ ID NO: 528983 - RNA, 18 nt, Human
cagagcacugcgacugac

SEQ ID NO: 528984 - RNA, 23 nt, Human
ccaaagccaauuaaguccuagca

SEQ ID NO: 528985 - RNA, 21 nt, Human
ccacagugccuggccaaagcu

SEQ ID NO: 528986 - RNA, 19 nt, Human
ccacugcacuccagccuag

SEQ ID NO: 528987 - RNA, 20 nt, Human
ccacugcacuccagccuagg

SEQ ID NO: 528988 - RNA, 20 nt, Human
ccacugcacuccagccuagg

SEQ ID NO: 528989 - RNA, 21 nt, Human
ccacugcacuccagccuaggu

SEQ ID NO: 528990 - RNA, 24 nt, Human
ccacugcacuccagccuaggugac

SEQ ID NO: 528991 - RNA, 22 nt, Human
cccaccugcccaccccucuaga

SEQ ID NO: 528992 - RNA, 18 nt, Human
cccuugaggccaagguag

SEQ ID NO: 528993 - RNA, 22 nt, Human
ccgccucagccucccaaaaugg

SEQ ID NO: 528994 - RNA, 22 nt, Human
ccuaggugacagaguaagacuc

SEQ ID NO: 528995 - RNA, 18 nt, Human
ccuccgccucagccuccc

SEQ ID NO: 528996 - RNA, 20 nt, Human
ccucuagaaccgacuacacc

SEQ ID NO: 528997 - RNA, 25 nt, Human
cucacugcaaucucugccucccugg

SEQ ID NO: 528998 - RNA, 23 nt, Human
cucugucuaaaaaaaaaaaaaaa

SEQ ID NO: 528999 - RNA, 24 nt, Human
cugaaugaacccaagguguuacau

SEQ ID NO: 529000 - RNA, 24 nt, Human
cugagguagguacuuuuuuuuuuu

SEQ ID NO: 529001 - RNA, 24 nt, Human
cugcaaucucugccucccugguuc

SEQ ID NO: 529002 - RNA, 24 nt, Human
cugcuauguaaaagagcuggaggu

SEQ ID NO: 529003 - RNA, 23 nt, Human
cugucacccaggcuagagugcag

SEQ ID NO: 529004 - RNA, 24 nt, Human
cugucuaaaaaaaaaaaaaaaacu

SEQ ID NO: 529005 - RNA, 18 nt, Human
cuuuuuuuuuuuuuuuug

SEQ ID NO: 529006 - RNA, 24 nt, Human
gcacuccagccuaggugacagagu

SEQ ID NO: 529007 - RNA, 23 nt, Human
gccagguauuuuuccaaagugcc

SEQ ID NO: 529008 - RNA, 18 nt, Human
gcccaccccucuagaacc

SEQ ID NO: 529009 - RNA, 23 nt, Human
gccucagccucccaaaauggugg

SEQ ID NO: 529010 - RNA, 23 nt, Human
gcgguccuccgccucagccuccc

SEQ ID NO: 529011 - RNA, 22 nt, Human
ggcugguggccuuggguagggc

SEQ ID NO: 529012 - RNA, 24 nt, Human
gggaaaaugaggagagccgguacc

SEQ ID NO: 529013 - RNA, 21 nt, Human
gguacuuuuuuuuuuuuuuuu

SEQ ID NO: 529014 - RNA, 25 nt, Human
uaaaaaaaaaaaaaaaacucauuug

SEQ ID NO: 529015 - RNA, 23 nt, Human
uacacaugagggagaagaauaag

SEQ ID NO: 529016 - RNA, 24 nt, Human
uacacaugagggagaagaauaagc

SEQ ID NO: 529017 - RNA, 21 nt, Human
uacuuuuuuuuuuuuuuuuga

SEQ ID NO: 529018 - RNA, 18 nt, Human
uagaaccgacuacaccca

SEQ ID NO: 529019 - RNA, 21 nt, Human
uagaaccgacuacacccauga

SEQ ID NO: 529020 - RNA, 26 nt, Human
uaugccagguauuuuuccaaagugcc

SEQ ID NO: 529021 - RNA, 24 nt, Human
uauguugcccagagugguucugaa

SEQ ID NO: 529022 - RNA, 22 nt, Human
ucaaaaauaguaaucuuguacu

SEQ ID NO: 529023 - RNA, 24 nt, Human
ucacacugucacccaggcuagagu

SEQ ID NO: 529024 - RNA, 25 nt, Human
ucacacugucacccaggcuagagug

SEQ ID NO: 529025 - RNA, 19 nt, Human
ucacugcaaucucugccuc

SEQ ID NO: 529026 - RNA, 24 nt, Human
ucacugcaaucucugccucccugg

SEQ ID NO: 529027 - RNA, 24 nt, Human
ucacugcaaucucugccucccugg

SEQ ID NO: 529028 - RNA, 22 nt, Human
ucagccuccugaguagagacug

SEQ ID NO: 529029 - RNA, 23 nt, Human
ucccaaaauggugggauuacagg

SEQ ID NO: 529030 - RNA, 19 nt, Human
ucccaccugcccaccccuc

SEQ ID NO: 529031 - RNA, 19 nt, Human
ucccugguucaaaugauuc

SEQ ID NO: 529032 - RNA, 21 nt, Human
ucccuguuuuggggaaaauga

SEQ ID NO: 529033 - RNA, 24 nt, Human
ucucacacugucacccaggcuaga

SEQ ID NO: 529034 - RNA, 22 nt, Human
ucugucuaaaaaaaaaaaaaaa

SEQ ID NO: 529035 - RNA, 23 nt, Human
ucugucuaaaaaaaaaaaaaaaa

SEQ ID NO: 529036 - RNA, 24 nt, Human
ucuucauggaagaucucuacuaua

SEQ ID NO: 529037 - RNA, 24 nt, Human
ucuuccucagcuacucccaccugc

SEQ ID NO: 529038 - RNA, 22 nt, Human
ugagacagagucucacacuguc

SEQ ID NO: 529039 - RNA, 22 nt, Human
ugagggagaagaauaagcccug

SEQ ID NO: 529040 - RNA, 22 nt, Human
ugcagccaugcaaucucggcuc

SEQ ID NO: 529041 - RNA, 23 nt, Human
ugcagccaugcaaucucggcuca

SEQ ID NO: 529042 - RNA, 19 nt, Human
ugcccaccccucuagaacc

SEQ ID NO: 529043 - RNA, 22 nt, Human
ugccucagccuccugaguagag

SEQ ID NO: 529044 - RNA, 23 nt, Human
ugcgacugacgccacaggcuggg

SEQ ID NO: 529045 - RNA, 24 nt, Human
ugcuauaguguuggccagagcacu

SEQ ID NO: 529046 - RNA, 21 nt, Human
ugggaaaaguuauucuccugg

SEQ ID NO: 529047 - RNA, 18 nt, Human
ugggauuacaggugagcg

SEQ ID NO: 529048 - RNA, 21 nt, Human
ugggauuacaggugagcgcca

SEQ ID NO: 529049 - RNA, 22 nt, Human
ugggauuacaggugagcgccac

SEQ ID NO: 529050 - RNA, 21 nt, Human
uggggaaaaugaggagagcug

SEQ ID NO: 529051 - RNA, 21 nt, Human
uggguuaccaguuaaagucuc

SEQ ID NO: 529052 - RNA, 20 nt, Human
ugguucugaauuccuugccu

SEQ ID NO: 529053 - RNA, 23 nt, Human
uucaaaugauucuacugccucag

SEQ ID NO: 529054 - RNA, 23 nt, Human
uucagucccuaccugagguaggu

SEQ ID NO: 529055 - RNA, 23 nt, Human
uucccuugguucuagccuugauu

SEQ ID NO: 529056 - RNA, 23 nt, Human
uugauccucauucauaugucauu

SEQ ID NO: 529057 - RNA, 20 nt, Human
uuuuuuuuuuugagacagag

SEQ ID NO: 529058 - RNA, 26 nt, Human
uuuuuuuuuuuugagacagagucuca

SEQ ID NO: 529059 - RNA, 25 nt, Human
aaaagaagaaaaauugcagucagag

SEQ ID NO: 529060 - RNA, 21 nt, Human
aagcaaucauucuggaaucca

SEQ ID NO: 529061 - RNA, 19 nt, Human
aagccagauacugcagaga

SEQ ID NO: 529062 - RNA, 23 nt, Human
aaugguagcuguauguauguaac

SEQ ID NO: 529063 - RNA, 18 nt, Human
accagauggacaagccag

SEQ ID NO: 529064 - RNA, 21 nt, Human
accuuaaaaauacaguaaagc

SEQ ID NO: 529065 - RNA, 21 nt, Human
agacagaaaguauuucuccuu

SEQ ID NO: 529066 - RNA, 24 nt, Human
agaucaaccucaacuugaaaccca

SEQ ID NO: 529067 - RNA, 22 nt, Human
agaugacuugucaaucuggaac

SEQ ID NO: 529068 - RNA, 25 nt, Human
agcacagacacccugaaugaagccc

SEQ ID NO: 529069 - RNA, 25 nt, Human
agugacagaggaaauaacugaaaga

SEQ ID NO: 529070 - RNA, 25 nt, Human
auaagacagaaaguauuucuccuuc

SEQ ID NO: 529071 - RNA, 23 nt, Human
aucaagaucaaccucaacuugaa

SEQ ID NO: 529072 - RNA, 22 nt, Human
auuaaaauauauauauauauau

SEQ ID NO: 529073 - RNA, 21 nt, Human
caacaauuguagaucaagauc

SEQ ID NO: 529074 - RNA, 22 nt, Human
cagacacccugaaugaagcccc

SEQ ID NO: 529075 - RNA, 20 nt, Human
cagaggccaccaugcacugu

SEQ ID NO: 529076 - RNA, 23 nt, Human
cccaacaauuguagaucaagauc

SEQ ID NO: 529077 - RNA, 18 nt, Human
cccugaaugaagccccug

SEQ ID NO: 529078 - RNA, 19 nt, Human
ccuauuccccaaccuggcu

SEQ ID NO: 529079 - RNA, 21 nt, Human
ccuuccucuccucucaccucc

SEQ ID NO: 529080 - RNA, 19 nt, Human
cugacucauggcuggggaa

SEQ ID NO: 529081 - RNA, 24 nt, Human
cugcauugcuuccuuuucccaaca

SEQ ID NO: 529082 - RNA, 23 nt, Human
cugggcuuuucggggaagacucu

SEQ ID NO: 529083 - RNA, 25 nt, Human
cuuaugaaggcagucgaguggcauu

SEQ ID NO: 529084 - RNA, 19 nt, Human
gaacaaagucuaucaugua

SEQ ID NO: 529085 - RNA, 19 nt, Human
gaagaagcagccaccuuag

SEQ ID NO: 529086 - RNA, 23 nt, Human
gaagaagcagccaccuuagacca

SEQ ID NO: 529087 - RNA, 28 nt, Human
gcacagcuuucaacaaaaagggaacgcc

SEQ ID NO: 529088 - RNA, 28 nt, Human
ggaaauaacugaaagaugaccgguaccc

SEQ ID NO: 529089 - RNA, 19 nt, Human
ggaggguuccuggagaagg

SEQ ID NO: 529090 - RNA, 23 nt, Human
guggcauuugcaaaagaagaaaa

SEQ ID NO: 529091 - RNA, 19 nt, Human
uaagagcuccuauucccca

SEQ ID NO: 529092 - RNA, 22 nt, Human
uacaguaaagcagucauggaaa

SEQ ID NO: 529093 - RNA, 20 nt, Human
uagcuguauguauguaacuc

SEQ ID NO: 529094 - RNA, 24 nt, Human
uauccuauggacgcuuaugaaggc

SEQ ID NO: 529095 - RNA, 18 nt, Human
uaugaaggcagucgagug

SEQ ID NO: 529096 - RNA, 19 nt, Human
uauugggcaagcuggaguu

SEQ ID NO: 529097 - RNA, 23 nt, Human
uauugggcaagcuggaguuuuga

SEQ ID NO: 529098 - RNA, 23 nt, Human
uccaugucugcuguaauguaucc

SEQ ID NO: 529099 - RNA, 19 nt, Human
uccccaaccuggcuucccu

SEQ ID NO: 529100 - RNA, 18 nt, Human
ugaaggcagucgaguggc

SEQ ID NO: 529101 - RNA, 18 nt, Human
ugauuugaaaggaaaaaa

SEQ ID NO: 529102 - RNA, 18 nt, Human
ugcagagaaguuucuggg

SEQ ID NO: 529103 - RNA, 21 nt, Human
ugcagagaaguuucugggcuu

SEQ ID NO: 529104 - RNA, 21 nt, Human
ugcagucagagcacagacacc

SEQ ID NO: 529105 - RNA, 23 nt, Human
ugcagucagagcacagacacccu

SEQ ID NO: 529106 - RNA, 19 nt, Human
uggcuggggaagaagcagc

SEQ ID NO: 529107 - RNA, 22 nt, Human
uguaaacacaaaagaaaguguc

SEQ ID NO: 529108 - RNA, 28 nt, Human
uguaaacacaaaagaaagugucucagca

SEQ ID NO: 529109 - RNA, 18 nt, Human
uuagaccagauggacaag

SEQ ID NO: 529110 - RNA, 27 nt, Human
uuccuggagaagguaauauaacagugg

SEQ ID NO: 529111 - RNA, 18 nt, Human
uugaccuuaaaaauacag

SEQ ID NO: 529112 - RNA, 20 nt, Human
uugaccuuaaaaauacagua

SEQ ID NO: 529113 - RNA, 24 nt, Human
uuuucauauaaaaugguagcugua

SEQ ID NO: 529114 - RNA, 20 nt, Human
aagcagccagcuuagcaaag

SEQ ID NO: 529115 - RNA, 23 nt, Human
acaacagccccugggaccaggcc

SEQ ID NO: 529116 - RNA, 18 nt, Human
acaguuucugaaacacug

SEQ ID NO: 529117 - RNA, 19 nt, Human
agagaugaaacaaggagga

SEQ ID NO: 529118 - RNA, 21 nt, Human
agaugguagaagcagccagcu

SEQ ID NO: 529119 - RNA, 19 nt, Human
aggaggaacuggugugaaa

SEQ ID NO: 529120 - RNA, 21 nt, Human
aucccaucauuccuccuccuu

SEQ ID NO: 529121 - RNA, 23 nt, Human
aucccaucauuccuccuccuuca

SEQ ID NO: 529122 - RNA, 20 nt, Human
caaagaaucacacccagggc

SEQ ID NO: 529123 - RNA, 23 nt, Human
cacaacagccccugggaccaggc

SEQ ID NO: 529124 - RNA, 19 nt, Human
cagccccugggaccaggcc

SEQ ID NO: 529125 - RNA, 25 nt, Human
cagggugaccaccccuuuguguccc

SEQ ID NO: 529126 - RNA, 18 nt, Human
ccacaacagccccuggga

SEQ ID NO: 529127 - RNA, 23 nt, Human
cccacaacagccccugggaccag

SEQ ID NO: 529128 - RNA, 20 nt, Human
ccccugggaccaggccacuu

SEQ ID NO: 529129 - RNA, 20 nt, Human
cuccccacaacagccccugg

SEQ ID NO: 529130 - RNA, 23 nt, Human
cuguuugcucuguaucuucuuua

SEQ ID NO: 529131 - RNA, 21 nt, Human
cuucaaauugaagccaaagaa

SEQ ID NO: 529132 - RNA, 23 nt, Human
gagaugaaacaaggaggaacugg

SEQ ID NO: 529133 - RNA, 26 nt, Human
gaugguagaagcagccagcuuagcaa

SEQ ID NO: 529134 - RNA, 18 nt, Human
gccaaagaaucacaccca

SEQ ID NO: 529135 - RNA, 20 nt, Human
gggcagggugaccaccccuu

SEQ ID NO: 529136 - RNA, 24 nt, Human
gggcagggugaccaccccuuugug

SEQ ID NO: 529137 - RNA, 20 nt, Human
uauuagaugguagaagcagc

SEQ ID NO: 529138 - RNA, 21 nt, Human
uccccacaacagccccuggga

SEQ ID NO: 529139 - RNA, 23 nt, Human
uccccacaacagccccugggacc

SEQ ID NO: 529140 - RNA, 24 nt, Human
ugaaauaaaauaugaaaucccauc

SEQ ID NO: 529141 - RNA, 18 nt, Human
ugaaaucccaucauuccu

SEQ ID NO: 529142 - RNA, 19 nt, Human
ugaaaucccaucauuccuc

SEQ ID NO: 529143 - RNA, 21 nt, Human
ugagggcagggugaccacccc

SEQ ID NO: 529144 - RNA, 24 nt, Human
ugcucuguaucuucuuuacucuca

SEQ ID NO: 529145 - RNA, 19 nt, Human
ugggaccaggccacugucc

SEQ ID NO: 529146 - RNA, 23 nt, Human
ugggaccaggccacuguccuagg

SEQ ID NO: 529147 - RNA, 22 nt, Human
uguuugcucuguaucuucuuua

SEQ ID NO: 529148 - RNA, 21 nt, Human
uugaagccaaagaaucacacc

SEQ ID NO: 529149 - RNA, 22 nt, Human
uugaagccaaagaaucacaccc

SEQ ID NO: 529150 - RNA, 25 nt, Human
uuuuuuuuuuuuuuuuuuaacuugg

SEQ ID NO: 529151 - RNA, 27 nt, Human
aaaaagaauccuucucaaaagaguaaa

SEQ ID NO: 529152 - RNA, 24 nt, Human
aaggaaaagaaaugcuuccaagag

SEQ ID NO: 529153 - RNA, 18 nt, Human
aaggcacuaaguggcaca

SEQ ID NO: 529154 - RNA, 20 nt, Human
aguaauaugaaaauagacac

SEQ ID NO: 529155 - RNA, 19 nt, Human
auccuccauccccucccca

SEQ ID NO: 529156 - RNA, 22 nt, Human
auccuccauccccuccccaucg

SEQ ID NO: 529157 - RNA, 25 nt, Human
augagguuauccuccauccccuccc

SEQ ID NO: 529158 - RNA, 23 nt, Human
cagaaacccagaaaucaguaggg

SEQ ID NO: 529159 - RNA, 20 nt, Human
cauaaagaacuuaaaagcug

SEQ ID NO: 529160 - RNA, 22 nt, Human
ccuccauccccuccccaucgug

SEQ ID NO: 529161 - RNA, 28 nt, Human
ccuguggccguggcagaaaccggggucc

SEQ ID NO: 529162 - RNA, 19 nt, Human
cuuaaaaggcacuaagugg

SEQ ID NO: 529163 - RNA, 23 nt, Human
gaaaugucaaguuucacccgaaa

SEQ ID NO: 529164 - RNA, 23 nt, Human
gaaucaaucuuaaaaggcacuaa

SEQ ID NO: 529165 - RNA, 23 nt, Human
ggccauguuuuagcucuuccugg

SEQ ID NO: 529166 - RNA, 18 nt, Human
uaaaaggcacuaaguggc

SEQ ID NO: 529167 - RNA, 27 nt, Human
uaaaaggcacuaaguggcacauaaaga

SEQ ID NO: 529168 - RNA, 24 nt, Human
uaauaauuugaaaccacaggagag

SEQ ID NO: 529169 - RNA, 26 nt, Human
uaauaauuugaaaccacaggagaggu

SEQ ID NO: 529170 - RNA, 23 nt, Human
uauaacagcaaggaaaagaaaug

SEQ ID NO: 529171 - RNA, 19 nt, Human
uggauaugaaccuguggcc

SEQ ID NO: 529172 - RNA, 19 nt, Human
uggccguggcagaaaccca

SEQ ID NO: 529173 - RNA, 25 nt, Human
uggccguggcagaaacccagaaauc

SEQ ID NO: 529174 - RNA, 19 nt, Human
uuccucuggauaugaaccu

SEQ ID NO: 529175 - RNA, 21 nt, Human
uugaaaccacaggagaggucu

SEQ ID NO: 529176 - RNA, 22 nt, Human
uuuccucuagcuuccuccucca

SEQ ID NO: 529177 - RNA, 21 nt, Human
aagaaucuuugcuccucacag

SEQ ID NO: 529178 - RNA, 21 nt, Human
accgcugcacugacugugaac

SEQ ID NO: 529179 - RNA, 22 nt, Human
agacacacagauaaauauaaca

SEQ ID NO: 529180 - RNA, 23 nt, Human
agaggugugggcucccgugggug

SEQ ID NO: 529181 - RNA, 25 nt, Human
auaaauauaacacuuguuccuccau

SEQ ID NO: 529182 - RNA, 21 nt, Human
cacaggugcuccaaugguucu

SEQ ID NO: 529183 - RNA, 21 nt, Human
cgcugcacugacugugaacug

SEQ ID NO: 529184 - RNA, 20 nt, Human
cuccaggaauaaacggagcc

SEQ ID NO: 529185 - RNA, 25 nt, Human
cuccaggaauaaacggagccccucu

SEQ ID NO: 529186 - RNA, 22 nt, Human
cucuccguggaugagccggugg

SEQ ID NO: 529187 - RNA, 20 nt, Human
cucucggucuaacaucucac

SEQ ID NO: 529188 - RNA, 21 nt, Human
cucuguguggccgacccagac

SEQ ID NO: 529189 - RNA, 20 nt, Human
cuuccagccugacaagcuug

SEQ ID NO: 529190 - RNA, 24 nt, Human
gacaagcuugcacgugcugggguc

SEQ ID NO: 529191 - RNA, 25 nt, Human
gacgauagggaagguggguagaaag

SEQ ID NO: 529192 - RNA, 18 nt, Human
gggcgaacgagcuugaaa

SEQ ID NO: 529193 - RNA, 22 nt, Human
ggugugggcucccgugggugua

SEQ ID NO: 529194 - RNA, 21 nt, Human
guagagcucuguguggccgac

SEQ ID NO: 529195 - RNA, 26 nt, Human
uauaacacuuguuccuccauuuuuca

SEQ ID NO: 529196 - RNA, 23 nt, Human
ucaauggcuuucugcacauuucu

SEQ ID NO: 529197 - RNA, 21 nt, Human
ucacaguaaaaccgugccuuc

SEQ ID NO: 529198 - RNA, 23 nt, Human
ucagacacacagauaaauauaac

SEQ ID NO: 529199 - RNA, 20 nt, Human
ucccagaguaaccgcugcaa

SEQ ID NO: 529200 - RNA, 23 nt, Human
ucucacacugucagacacacaga

SEQ ID NO: 529201 - RNA, 21 nt, Human
ugacgauagggaaggugggua

SEQ ID NO: 529202 - RNA, 19 nt, Human
uggggucaggccaccucuc

SEQ ID NO: 529203 - RNA, 18 nt, Human
aaauuccccaaguaugcc

SEQ ID NO: 529204 - RNA, 24 nt, Human
agagcagaacuggugagacuugag

SEQ ID NO: 529205 - RNA, 18 nt, Human
agcagggugaggcucagg

SEQ ID NO: 529206 - RNA, 21 nt, Human
agcagggugaggcucaggugg

SEQ ID NO: 529207 - RNA, 18 nt, Human
aggggguggggagcacaa

SEQ ID NO: 529208 - RNA, 21 nt, Human
aggggguggggagcacaaggg

SEQ ID NO: 529209 - RNA, 22 nt, Human
agguaggggguggggagcacaa

SEQ ID NO: 529210 - RNA, 24 nt, Human
agguaggggguggggagcacaagg

SEQ ID NO: 529211 - RNA, 19 nt, Human
auuuccacaaaccucccca

SEQ ID NO: 529212 - RNA, 23 nt, Human
caaccaaauggacucuacuuccc

SEQ ID NO: 529213 - RNA, 21 nt, Human
ccacucagggcucaacagcag

SEQ ID NO: 529214 - RNA, 24 nt, Human
ccgccgccugggcuugcugcguuc

SEQ ID NO: 529215 - RNA, 21 nt, Human
ccuccuuuagccuuuccaccg

SEQ ID NO: 529216 - RNA, 21 nt, Human
cgcagucaaagcucaucaacc

SEQ ID NO: 529217 - RNA, 22 nt, Human
cugccuaauucauuagcuauau

SEQ ID NO: 529218 - RNA, 19 nt, Human
cuucaaaaaauagcucccc

SEQ ID NO: 529219 - RNA, 18 nt, Human
gcaacaagauggccaggc

SEQ ID NO: 529220 - RNA, 23 nt, Human
gccaggccauggcaauccucuuc

SEQ ID NO: 529221 - RNA, 20 nt, Human
gcugcguucuccuucgcagu

SEQ ID NO: 529222 - RNA, 22 nt, Human
gcuugcugcguucuccuucgca

SEQ ID NO: 529223 - RNA, 19 nt, Human
gggcuacauucccccagua

SEQ ID NO: 529224 - RNA, 22 nt, Human
uaaggaggagagguaagguucc

SEQ ID NO: 529225 - RNA, 18 nt, Human
uaggacccaagacagcau

SEQ ID NO: 529226 - RNA, 20 nt, Human
uaggacccaagacagcauau

SEQ ID NO: 529227 - RNA, 21 nt, Human
uaggggguggggagcacaagg

SEQ ID NO: 529228 - RNA, 22 nt, Human
uaggggguggggagcacaaggg

SEQ ID NO: 529229 - RNA, 23 nt, Human
uaggggguggggagcacaagggc

SEQ ID NO: 529230 - RNA, 22 nt, Human
uagugcaaccaacaaaaggccu

SEQ ID NO: 529231 - RNA, 20 nt, Human
uauugggcuaaggaggagag

SEQ ID NO: 529232 - RNA, 19 nt, Human
ucaucaaccaaauggacuc

SEQ ID NO: 529233 - RNA, 21 nt, Human
uccacaaaccuccccaaucac

SEQ ID NO: 529234 - RNA, 23 nt, Human
uccacaaaccuccccaaucacaa

SEQ ID NO: 529235 - RNA, 19 nt, Human
ugaauaggacccaagacag

SEQ ID NO: 529236 - RNA, 19 nt, Human
ugagaccaggagaaauaac

SEQ ID NO: 529237 - RNA, 21 nt, Human
ugagacuugagggaagggucc

SEQ ID NO: 529238 - RNA, 19 nt, Human
ugaucuaaccaagcagcaa

SEQ ID NO: 529239 - RNA, 23 nt, Human
ugccaacauuacaaaaaagauag

SEQ ID NO: 529240 - RNA, 20 nt, Human
ugcugcguucuccuucgcag

SEQ ID NO: 529241 - RNA, 18 nt, Human
uggagguagggggugggg

SEQ ID NO: 529242 - RNA, 19 nt, Human
uggggagcacaagggcuac

SEQ ID NO: 529243 - RNA, 21 nt, Human
uuccccuagccacucagggcu

SEQ ID NO: 529244 - RNA, 23 nt, Human
uugaauaggacccaagacagcau

SEQ ID NO: 529245 - RNA, 22 nt, Human
uugcugcguucuccuucgcagu

SEQ ID NO: 529246 - RNA, 27 nt, Human
uuuuuuuuuuuuuuuuuuuuuuugggg

SEQ ID NO: 529247 - RNA, 25 nt, Human
aaaaaaaaucaaagcaugaacaaaa

SEQ ID NO: 529248 - RNA, 18 nt, Human
aaauccacaucuuugcag

SEQ ID NO: 529249 - RNA, 20 nt, Human
aacaaguacagucuugacca

SEQ ID NO: 529250 - RNA, 23 nt, Human
aagcaugaacaaaacuuuaacaa

SEQ ID NO: 529251 - RNA, 25 nt, Human
acagagugagacccugucucuaaaa

SEQ ID NO: 529252 - RNA, 24 nt, Human
acuccagccugggcaacagaguga

SEQ ID NO: 529253 - RNA, 21 nt, Human
acucuuccugccccaggcccc

SEQ ID NO: 529254 - RNA, 24 nt, Human
acugcacuccagccugggcaacag

SEQ ID NO: 529255 - RNA, 24 nt, Human
acugcacuccagccugggcaacag

SEQ ID NO: 529256 - RNA, 18 nt, Human
agacguggccagcacucc

SEQ ID NO: 529257 - RNA, 22 nt, Human
agcauuuugggaggccgaggca

SEQ ID NO: 529258 - RNA, 24 nt, Human
agcauuuugggaggccgaggcagg

SEQ ID NO: 529259 - RNA, 23 nt, Human
agccccaacaaacuacuguagcc

SEQ ID NO: 529260 - RNA, 22 nt, Human
agccugggcaacagagugagac

SEQ ID NO: 529261 - RNA, 26 nt, Human
agcuggaaacguggugucccgccgac

SEQ ID NO: 529262 - RNA, 21 nt, Human
aggaucacuugaggccagaag

SEQ ID NO: 529263 - RNA, 24 nt, Human
aggaucacuugaggccagaaguuu

SEQ ID NO: 529264 - RNA, 18 nt, Human
aggcaggaggaucacuug

SEQ ID NO: 529265 - RNA, 18 nt, Human
aggcagucgggggacggc

SEQ ID NO: 529266 - RNA, 24 nt, Human
aggccgaggcaggaggaucacuug

SEQ ID NO: 529267 - RNA, 21 nt, Human
aggcgcugggaggccccagcc

SEQ ID NO: 529268 - RNA, 19 nt, Human
aguagggucccccgccccc

SEQ ID NO: 529269 - RNA, 20 nt, Human
agucuugagggagggacugg

SEQ ID NO: 529270 - RNA, 21 nt, Human
agugagacccugucucuaaaa

SEQ ID NO: 529271 - RNA, 24 nt, Human
aucaugccacugcacuccagccug

SEQ ID NO: 529272 - RNA, 24 nt, Human
augccacugcacuccagccugggc

SEQ ID NO: 529273 - RNA, 22 nt, Human
caacagagugagacccugucuc

SEQ ID NO: 529274 - RNA, 20 nt, Human
caaguccggcucccccacca

SEQ ID NO: 529275 - RNA, 24 nt, Human
cacaucuguaaucccagcauuuug

SEQ ID NO: 529276 - RNA, 23 nt, Human
caccuccacuuugaaguucagag

SEQ ID NO: 529277 - RNA, 22 nt, Human
cacuccagccugggcaacagag

SEQ ID NO: 529278 - RNA, 22 nt, Human
cacuccagccugggcaacagag

SEQ ID NO: 529279 - RNA, 24 nt, Human
cacuccagccugggcaacagagug

SEQ ID NO: 529280 - RNA, 19 nt, Human
cacugcacuccagccuggg

SEQ ID NO: 529281 - RNA, 21 nt, Human
cacugcacuccagccugggca

SEQ ID NO: 529282 - RNA, 22 nt, Human
cacugcacuccagccugggcaa

SEQ ID NO: 529283 - RNA, 23 nt, Human
cacugcacuccagccugggcaac

SEQ ID NO: 529284 - RNA, 24 nt, Human
cacugcacuccagccugggcaaca

SEQ ID NO: 529285 - RNA, 21 nt, Human
cacuugaggccagaaguuuga

SEQ ID NO: 529286 - RNA, 24 nt, Human
cagcauuuugggaggccgaggcag

SEQ ID NO: 529287 - RNA, 25 nt, Human
cagcauuuugggaggccgaggcagg

SEQ ID NO: 529288 - RNA, 25 nt, Human
cagcgacucuuccugccccaggccc

SEQ ID NO: 529289 - RNA, 22 nt, Human
caggccccagggacgcggcugg

SEQ ID NO: 529290 - RNA, 19 nt, Human
caguagggucccccgcccu

SEQ ID NO: 529291 - RNA, 22 nt, Human
ccaaucucuucgccugcaacaa

SEQ ID NO: 529292 - RNA, 19 nt, Human
ccaccguggaguccuccuc

SEQ ID NO: 529293 - RNA, 20 nt, Human
ccacugcacuccagccuggg

SEQ ID NO: 529294 - RNA, 21 nt, Human
ccacugcacuccagccugggc

SEQ ID NO: 529295 - RNA, 23 nt, Human
ccacugcacuccagccugggcaa

SEQ ID NO: 529296 - RNA, 24 nt, Human
ccacugcacuccagccugggcaac

SEQ ID NO: 529297 - RNA, 23 nt, Human
cccagcuccaggcugaccuugac

SEQ ID NO: 529298 - RNA, 21 nt, Human
ccccaacaaacuacuguagcc

SEQ ID NO: 529299 - RNA, 19 nt, Human
ccccaccguggaguccucc

SEQ ID NO: 529300 - RNA, 23 nt, Human
ccccacgggcuuuagggcuucca

SEQ ID NO: 529301 - RNA, 26 nt, Human
cccccacguggcuuuucucgagaguc

SEQ ID NO: 529302 - RNA, 21 nt, Human
cccccaggcaggccgccaccc

SEQ ID NO: 529303 - RNA, 26 nt, Human
cccccaggcaggccgccacccagcuc

SEQ ID NO: 529304 - RNA, 26 nt, Human
ccccccacguggcuuuucucgagagu

SEQ ID NO: 529305 - RNA, 19 nt, Human
ccuccaaucucuucgccug

SEQ ID NO: 529306 - RNA, 22 nt, Human
ccuccaguagggucccccgccc

SEQ ID NO: 529307 - RNA, 20 nt, Human
cgaggcaggaggaucacuug

SEQ ID NO: 529308 - RNA, 25 nt, Human
cgaggcaggaggaucacuugaggcc

SEQ ID NO: 529309 - RNA, 26 nt, Human
cgaggcaggaggaucacuugaggcca

SEQ ID NO: 529310 - RNA, 20 nt, Human
cgaggucagucccaaggcuc

SEQ ID NO: 529311 - RNA, 19 nt, Human
cggcaggaagccccagggg

SEQ ID NO: 529312 - RNA, 25 nt, Human
cguccaaauccacaucuuugcagac

SEQ ID NO: 529313 - RNA, 22 nt, Human
cguggagcgcgcgggcagcccc

SEQ ID NO: 529314 - RNA, 21 nt, Human
cucacaucuguaaucccagca

SEQ ID NO: 529315 - RNA, 18 nt, Human
cuccaaagaaugaggcag

SEQ ID NO: 529316 - RNA, 22 nt, Human
cuccaggcugaccuugacgcgc

SEQ ID NO: 529317 - RNA, 18 nt, Human
cuggauggggggaguucc

SEQ ID NO: 529318 - RNA, 21 nt, Human
cuguaaucccagcauuuuggg

SEQ ID NO: 529319 - RNA, 23 nt, Human
cuuccugccccaggccccaggga

SEQ ID NO: 529320 - RNA, 21 nt, Human
cuuggagggagggcccguggg

SEQ ID NO: 529321 - RNA, 19 nt, Human
gaccuugacgcgccgcagc

SEQ ID NO: 529322 - RNA, 22 nt, Human
gacggcaggaagccccagggga

SEQ ID NO: 529323 - RNA, 18 nt, Human
gaggccccagcccgggcc

SEQ ID NO: 529324 - RNA, 22 nt, Human
gaggcgcugggaggccccagcc

SEQ ID NO: 529325 - RNA, 24 nt, Human
gaucacuugaggccagaaguuuga

SEQ ID NO: 529326 - RNA, 21 nt, Human
gaucaugccacugcacuccag

SEQ ID NO: 529327 - RNA, 21 nt, Human
gauggugugugugguggcuca

SEQ ID NO: 529328 - RNA, 24 nt, Human
gcacuccagccugggcaacagagu

SEQ ID NO: 529329 - RNA, 18 nt, Human
gcagagcaucucucccuc

SEQ ID NO: 529330 - RNA, 22 nt, Human
gccacugcacuccagccugggc

SEQ ID NO: 529331 - RNA, 24 nt, Human
gccacugcacuccagccugggcaa

SEQ ID NO: 529332 - RNA, 23 nt, Human
gccagaaguuugaggcugcagug

SEQ ID NO: 529333 - RNA, 18 nt, Human
gccccagcccgggccucc

SEQ ID NO: 529334 - RNA, 23 nt, Human
gcccgugggcugucucuagcccu

SEQ ID NO: 529335 - RNA, 18 nt, Human
gccgcagccugccagccc

SEQ ID NO: 529336 - RNA, 20 nt, Human
ggacgcuccaaagaaugagg

SEQ ID NO: 529337 - RNA, 22 nt, Human
ggaucacuugaggccagaaguu

SEQ ID NO: 529338 - RNA, 21 nt, Human
ggcaaugagccccaacaaacu

SEQ ID NO: 529339 - RNA, 18 nt, Human
ggcucccccaccaaggac

SEQ ID NO: 529340 - RNA, 23 nt, Human
gggaggccccagcccgggccucc

SEQ ID NO: 529341 - RNA, 24 nt, Human
gguggcucacaucuguaaucccag

SEQ ID NO: 529342 - RNA, 18 nt, Human
ggugugugugguggcuca

SEQ ID NO: 529343 - RNA, 30 nt, Human
uaaaaaaaaaucaaagcaugaacaaaacuu

SEQ ID NO: 529344 - RNA, 19 nt, Human
uaacaagagaauaaagagg

SEQ ID NO: 529345 - RNA, 22 nt, Human
ucagaggcagagcaucucuccc

SEQ ID NO: 529346 - RNA, 23 nt, Human
ucaugccacugcacuccagccug

SEQ ID NO: 529347 - RNA, 23 nt, Human
uccaaauccacaucuuugcagac

SEQ ID NO: 529348 - RNA, 21 nt, Human
uccaaguuggggcgcgcgggc

SEQ ID NO: 529349 - RNA, 23 nt, Human
uccaaguuggggcgcgcgggcug

SEQ ID NO: 529350 - RNA, 23 nt, Human
uccagccugggcaacagagugag

SEQ ID NO: 529351 - RNA, 24 nt, Human
uccagccugggcaacagagugaga

SEQ ID NO: 529352 - RNA, 19 nt, Human
uccagggugauaucugggg

SEQ ID NO: 529353 - RNA, 18 nt, Human
ucccaaggcucaaggccc

SEQ ID NO: 529354 - RNA, 21 nt, Human
ucccacacuuggagggagggc

SEQ ID NO: 529355 - RNA, 25 nt, Human
ucccucccacacuuggagggagggc

SEQ ID NO: 529356 - RNA, 22 nt, Human
ucugcaccguggagcgcgcggg

SEQ ID NO: 529357 - RNA, 21 nt, Human
ugaccaaguccggcuccccca

SEQ ID NO: 529358 - RNA, 23 nt, Human
ugaggcugcagugaguuaugauc

SEQ ID NO: 529359 - RNA, 18 nt, Human
ugagggggcaaugagccc

SEQ ID NO: 529360 - RNA, 20 nt, Human
ugauaucuggggugaggggg

SEQ ID NO: 529361 - RNA, 22 nt, Human
ugcaacaaguacagucuugacc

SEQ ID NO: 529362 - RNA, 24 nt, Human
ugccacugcacuccagccugggca

SEQ ID NO: 529363 - RNA, 22 nt, Human
ugccagcccgcgcgcuuagagc

SEQ ID NO: 529364 - RNA, 21 nt, Human
uggcucacaucuguaauccca

SEQ ID NO: 529365 - RNA, 24 nt, Human
uggcucacaucuguaaucccagca

SEQ ID NO: 529366 - RNA, 20 nt, Human
ugggaggccgaggcaggagg

SEQ ID NO: 529367 - RNA, 24 nt, Human
ugggaggccgaggcaggaggauca

SEQ ID NO: 529368 - RNA, 21 nt, Human
ugggcaacagagugagacccu

SEQ ID NO: 529369 - RNA, 24 nt, Human
ugggcaacagagugagacccuguc

SEQ ID NO: 529370 - RNA, 24 nt, Human
ugguggcucacaucuguaauccca

SEQ ID NO: 529371 - RNA, 25 nt, Human
ugucucuaaaaaauuuaaaaaaaaa

SEQ ID NO: 529372 - RNA, 23 nt, Human
uuccugccccaggccccagggac

SEQ ID NO: 529373 - RNA, 21 nt, Human
uugagggagggacuggauggg

SEQ ID NO: 529374 - RNA, 20 nt, Human
uuggagggagggcccguggg

SEQ ID NO: 529375 - RNA, 25 nt, Human
uugggaggccgaggcaggaggauca

SEQ ID NO: 529376 - RNA, 22 nt, Human
uuuuuuuuuuuuuuuuuggguu

SEQ ID NO: 529377 - RNA, 23 nt, Human
uuuuuuuuuuuuuuuuuuugggu

SEQ ID NO: 529378 - RNA, 23 nt, Human
uuuuuuuuuuuuuuuuuuuuggg

SEQ ID NO: 529379 - RNA, 21 nt, Human
aaaaagacaaacgaaauuuag

SEQ ID NO: 529380 - RNA, 19 nt, Human
aaaauaagcacccccaccu

SEQ ID NO: 529381 - RNA, 25 nt, Human
aaacaaacucugucucacacaaaca

SEQ ID NO: 529382 - RNA, 20 nt, Human
aaagggcaggacgcucuaca

SEQ ID NO: 529383 - RNA, 25 nt, Human
aacagcuucuggaagaggaaggcug

SEQ ID NO: 529384 - RNA, 19 nt, Human
aagaggaguguuuggaccc

SEQ ID NO: 529385 - RNA, 21 nt, Human
aagaguccaugugacuuccca

SEQ ID NO: 529386 - RNA, 23 nt, Human
aagcaugcacagaucugcuucaa

SEQ ID NO: 529387 - RNA, 26 nt, Human
aaggcccucuccugucucuggagucc

SEQ ID NO: 529388 - RNA, 18 nt, Human
aauaagcacccccaccuc

SEQ ID NO: 529389 - RNA, 22 nt, Human
aaugcaaaacaaaugaccugga

SEQ ID NO: 529390 - RNA, 25 nt, Human
acacaaccucagagagaggggaacc

SEQ ID NO: 529391 - RNA, 23 nt, Human
acacaauggaaacaagaauggcc

SEQ ID NO: 529392 - RNA, 22 nt, Human
acacacccgcuuagacccaaca

SEQ ID NO: 529393 - RNA, 21 nt, Human
acaccaaaucacuccguaucc

SEQ ID NO: 529394 - RNA, 18 nt, Human
acaugccaccugcaccuc

SEQ ID NO: 529395 - RNA, 25 nt, Human
accaaaucacuccguauccacuucc

SEQ ID NO: 529396 - RNA, 19 nt, Human
acccaccacuggagcugcc

SEQ ID NO: 529397 - RNA, 19 nt, Human
accugcaccuccagcacug

SEQ ID NO: 529398 - RNA, 23 nt, Human
agaaacagaagcaacagaggaga

SEQ ID NO: 529399 - RNA, 18 nt, Human
agaaacaugacaaggggc

SEQ ID NO: 529400 - RNA, 22 nt, Human
agacagaaacaugacaaggggc

SEQ ID NO: 529401 - RNA, 22 nt, Human
agacccaacacaaccucagaga

SEQ ID NO: 529402 - RNA, 24 nt, Human
agacugcgucagaaacagaagcaa

SEQ ID NO: 529403 - RNA, 22 nt, Human
aggaaaagcaugcacagaucug

SEQ ID NO: 529404 - RNA, 21 nt, Human
aggaagugauuucccaugaaa

SEQ ID NO: 529405 - RNA, 23 nt, Human
aggccuccaaggcaagccugauu

SEQ ID NO: 529406 - RNA, 24 nt, Human
agggaaaggcccucuccugucucu

SEQ ID NO: 529407 - RNA, 21 nt, Human
augcacuuccauaaacacacc

SEQ ID NO: 529408 - RNA, 22 nt, Human
augucucuccaacagcuucugg

SEQ ID NO: 529409 - RNA, 18 nt, Human
caaaagagaacaaaaaag

SEQ ID NO: 529410 - RNA, 22 nt, Human
caaaauuccccaggagguucuc

SEQ ID NO: 529411 - RNA, 19 nt, Human
cacacauaggaaacaggau

SEQ ID NO: 529412 - RNA, 23 nt, Human
cacauaggaaacaggauccuauc

SEQ ID NO: 529413 - RNA, 23 nt, Human
caccacacuaccaugugagagca

SEQ ID NO: 529414 - RNA, 24 nt, Human
cacccgcuuagacccaacacaacc

SEQ ID NO: 529415 - RNA, 19 nt, Human
cacccuucagaacccacca

SEQ ID NO: 529416 - RNA, 21 nt, Human
cacccuucagaacccaccacu

SEQ ID NO: 529417 - RNA, 19 nt, Human
cagaaacagaagcaacaga

SEQ ID NO: 529418 - RNA, 23 nt, Human
cagaagcaacagaggagacaaag

SEQ ID NO: 529419 - RNA, 22 nt, Human
caggagaagucuaucuuuagga

SEQ ID NO: 529420 - RNA, 18 nt, Human
caggagguucuccgauua

SEQ ID NO: 529421 - RNA, 22 nt, Human
cagggaaaggcccucuccuguc

SEQ ID NO: 529422 - RNA, 24 nt, Human
cauggaaagccugaaagagagcug

SEQ ID NO: 529423 - RNA, 21 nt, Human
cauuaaaaaugcaaaacaaau

SEQ ID NO: 529424 - RNA, 19 nt, Human
ccaaaucagaccaagagcu

SEQ ID NO: 529425 - RNA, 23 nt, Human
ccaagugucucccacaaaauucc

SEQ ID NO: 529426 - RNA, 21 nt, Human
ccacacuaccaugugagagca

SEQ ID NO: 529427 - RNA, 19 nt, Human
ccaccacuggagcugccug

SEQ ID NO: 529428 - RNA, 21 nt, Human
ccaggggcagcuuagugugcu

SEQ ID NO: 529429 - RNA, 23 nt, Human
ccauccacacaauggaaacaaga

SEQ ID NO: 529430 - RNA, 21 nt, Human
cccaccauccacacaauggaa

SEQ ID NO: 529431 - RNA, 18 nt, Human
cccagcaagcuccuccuc

SEQ ID NO: 529432 - RNA, 20 nt, Human
cccagggugucuguuuuguu

SEQ ID NO: 529433 - RNA, 21 nt, Human
cccaugaauuuaaauaaauuu

SEQ ID NO: 529434 - RNA, 19 nt, Human
ccccaggagguucuccgau

SEQ ID NO: 529435 - RNA, 21 nt, Human
ccccgugauacagcacaucua

SEQ ID NO: 529436 - RNA, 21 nt, Human
cccgugauacagcacaucuag

SEQ ID NO: 529437 - RNA, 19 nt, Human
cccuagccaucacugucuc

SEQ ID NO: 529438 - RNA, 21 nt, Human
ccgcuagccgucaacuacuca

SEQ ID NO: 529439 - RNA, 21 nt, Human
ccuccaaggcaagccugauuc

SEQ ID NO: 529440 - RNA, 22 nt, Human
ccugcaccuccagcacugccuu

SEQ ID NO: 529441 - RNA, 22 nt, Human
ccuucagaacccaccacuggag

SEQ ID NO: 529442 - RNA, 22 nt, Human
cgaagacagaaaggccagggaa

SEQ ID NO: 529443 - RNA, 19 nt, Human
cgcuuagacccaacacaac

SEQ ID NO: 529444 - RNA, 21 nt, Human
cgucagaaacagaagcaacag

SEQ ID NO: 529445 - RNA, 22 nt, Human
cgucagaaacagaagcaacaga

SEQ ID NO: 529446 - RNA, 24 nt, Human
cuccaaaucagaccaagagcucac

SEQ ID NO: 529447 - RNA, 19 nt, Human
cucucuccugaaugucucu

SEQ ID NO: 529448 - RNA, 20 nt, Human
cugcagcaugggagguacca

SEQ ID NO: 529449 - RNA, 24 nt, Human
cugucucacacaaacaugggaaua

SEQ ID NO: 529450 - RNA, 24 nt, Human
cuuaacauaauuugcuaucaaaaa

SEQ ID NO: 529451 - RNA, 30 nt, Human
cuuagacccaacacaaccucagagagagac

SEQ ID NO: 529452 - RNA, 25 nt, Human
gaaacagaagcaacagaggagacaa

SEQ ID NO: 529453 - RNA, 19 nt, Human
gagcugucucacuccagga

SEQ ID NO: 529454 - RNA, 22 nt, Human
gagguucuccgauuaaaugucc

SEQ ID NO: 529455 - RNA, 21 nt, Human
gcacagacugcgucagaaaca

SEQ ID NO: 529456 - RNA, 23 nt, Human
gcagaggaaaagcaugcacagaa

SEQ ID NO: 529457 - RNA, 20 nt, Human
gcagcccacgagaccguucc

SEQ ID NO: 529458 - RNA, 18 nt, Human
gcugccugagggaaggag

SEQ ID NO: 529459 - RNA, 18 nt, Human
ggacaccaaaucacuccg

SEQ ID NO: 529460 - RNA, 23 nt, Human
ggagaggcagugauguccaggga

SEQ ID NO: 529461 - RNA, 21 nt, Human
ggagcagaugaccugcugggc

SEQ ID NO: 529462 - RNA, 21 nt, Human
gggcaggacgcucuacaugca

SEQ ID NO: 529463 - RNA, 22 nt, Human
gugcuugcaacugcauucccag

SEQ ID NO: 529464 - RNA, 20 nt, Human
uaaaaaauaagcacccccac

SEQ ID NO: 529465 - RNA, 21 nt, Human
uaaauaaauuugcuuagugga

SEQ ID NO: 529466 - RNA, 18 nt, Human
uacagcacaucuaguaau

SEQ ID NO: 529467 - RNA, 23 nt, Human
uaccaugugagagcacagacugc

SEQ ID NO: 529468 - RNA, 22 nt, Human
uacucaggagacuaccugugag

SEQ ID NO: 529469 - RNA, 21 nt, Human
uagcucuuagcacacaggaca

SEQ ID NO: 529470 - RNA, 18 nt, Human
uaucaaaagagaacaaaa

SEQ ID NO: 529471 - RNA, 19 nt, Human
uaucaaaagagaacaaaaa

SEQ ID NO: 529472 - RNA, 25 nt, Human
uaucaaaagagaacaaaaaagagaa

SEQ ID NO: 529473 - RNA, 23 nt, Human
ucaacuacucaggagacuaccuu

SEQ ID NO: 529474 - RNA, 23 nt, Human
ucagaacccaccacuggagcugc

SEQ ID NO: 529475 - RNA, 18 nt, Human
ucagagugaaaagcaugg

SEQ ID NO: 529476 - RNA, 21 nt, Human
uccaaaucagaccaagagcuc

SEQ ID NO: 529477 - RNA, 22 nt, Human
uccacacaauggaaacaagaau

SEQ ID NO: 529478 - RNA, 23 nt, Human
uccauaaacacaccaaaaaaaug

SEQ ID NO: 529479 - RNA, 19 nt, Human
ucccacaaaauuccccagg

SEQ ID NO: 529480 - RNA, 22 nt, Human
ucggcugcugcuucaucggcuu

SEQ ID NO: 529481 - RNA, 19 nt, Human
ucucccacaaaauucccca

SEQ ID NO: 529482 - RNA, 19 nt, Human
ucuccucuugcacgugggc

SEQ ID NO: 529483 - RNA, 19 nt, Human
ucuccugaaugucucucca

SEQ ID NO: 529484 - RNA, 21 nt, Human
ucuccugucucuccucuugca

SEQ ID NO: 529485 - RNA, 18 nt, Human
ucucucuccuguagaucu

SEQ ID NO: 529486 - RNA, 19 nt, Human
ugaaagcacccuucagaac

SEQ ID NO: 529487 - RNA, 20 nt, Human
ugaaagcacccuucagaacc

SEQ ID NO: 529488 - RNA, 19 nt, Human
ugaacagagacagaaacau

SEQ ID NO: 529489 - RNA, 22 nt, Human
ugaaugucucuccaacagcuuc

SEQ ID NO: 529490 - RNA, 20 nt, Human
ugacgagaggacaggcugga

SEQ ID NO: 529491 - RNA, 25 nt, Human
ugagagcacagacugcgucagaaac

SEQ ID NO: 529492 - RNA, 26 nt, Human
ugagagcacagacugcgucagaaaca

SEQ ID NO: 529493 - RNA, 18 nt, Human
ugcaaaacaaaugaccug

SEQ ID NO: 529494 - RNA, 21 nt, Human
ugccugggaugcucggccugg

SEQ ID NO: 529495 - RNA, 18 nt, Human
ugcgucagaaacagaagc

SEQ ID NO: 529496 - RNA, 18 nt, Human
ugcuccaguucaaugagu

SEQ ID NO: 529497 - RNA, 21 nt, Human
ugcugugaggauaucagagga

SEQ ID NO: 529498 - RNA, 18 nt, Human
uggaaagccugaaagaga

SEQ ID NO: 529499 - RNA, 20 nt, Human
uggcagcaucugugcuugca

SEQ ID NO: 529500 - RNA, 20 nt, Human
ugggcacaacccaccaucca

SEQ ID NO: 529501 - RNA, 25 nt, Human
ugggcacaacccaccauccacacaa

SEQ ID NO: 529502 - RNA, 19 nt, Human
uggucagagacacuggugg

SEQ ID NO: 529503 - RNA, 18 nt, Human
uguaaacagugaacauug

SEQ ID NO: 529504 - RNA, 19 nt, Human
ugucaccacacuaccaugu

SEQ ID NO: 529505 - RNA, 21 nt, Human
ugucaggccuccaaggcaagc

SEQ ID NO: 529506 - RNA, 20 nt, Human
ugucucacacaaacauggga

SEQ ID NO: 529507 - RNA, 24 nt, Human
uguuuuguucccaagugucuccca

SEQ ID NO: 529508 - RNA, 24 nt, Human
uucccaugaauuuaaauaaauuug

SEQ ID NO: 529509 - RNA, 23 nt, Human
uuguugcagaggaaaagcaugca

SEQ ID NO: 529510 - RNA, 24 nt, Human
uuugcacacauaggaaacaggauc

SEQ ID NO: 529511 - RNA, 21 nt, Human
aaaaaaagagguaauacagaa

SEQ ID NO: 529512 - RNA, 21 nt, Human
aaacacacacgauuuucguuu

SEQ ID NO: 529513 - RNA, 19 nt, Human
aaagugcugagauuacagg

SEQ ID NO: 529514 - RNA, 20 nt, Human
aaagugcugagauuacaggc

SEQ ID NO: 529515 - RNA, 23 nt, Human
aaagugcugagauuacaggcgua

SEQ ID NO: 529516 - RNA, 21 nt, Human
accauacucaagcagaaauua

SEQ ID NO: 529517 - RNA, 24 nt, Human
accauguuggccaggauggucucg

SEQ ID NO: 529518 - RNA, 24 nt, Human
accucgugaucugccugccuuggc

SEQ ID NO: 529519 - RNA, 18 nt, Human
acgggguuucaccauguu

SEQ ID NO: 529520 - RNA, 23 nt, Human
acgggguuucaccauguuggcca

SEQ ID NO: 529521 - RNA, 24 nt, Human
acgggguuucaccauguuggccag

SEQ ID NO: 529522 - RNA, 18 nt, Human
acucuaucacucaggcug

SEQ ID NO: 529523 - RNA, 25 nt, Human
acucuaucacucaggcuggagcgca

SEQ ID NO: 529524 - RNA, 23 nt, Human
agauuacaggcguaagucacugc

SEQ ID NO: 529525 - RNA, 21 nt, Human
aggaaauaugcaaggaggagg

SEQ ID NO: 529526 - RNA, 20 nt, Human
aggagauggaaugaaucuga

SEQ ID NO: 529527 - RNA, 25 nt, Human
aggcuggagugcaguggcgugaucu

SEQ ID NO: 529528 - RNA, 24 nt, Human
agugauucucgugccucagccucc

SEQ ID NO: 529529 - RNA, 19 nt, Human
agugcaguggcgugaucuc

SEQ ID NO: 529530 - RNA, 20 nt, Human
agugcaguggcgugaucucg

SEQ ID NO: 529531 - RNA, 23 nt, Human
agugcaguggcgugaucucggcu

SEQ ID NO: 529532 - RNA, 24 nt, Human
agugcaguggcgugaucucggcuc

SEQ ID NO: 529533 - RNA, 19 nt, Human
aucugccugccuuggccuc

SEQ ID NO: 529534 - RNA, 24 nt, Human
auuuuuauauuuuuaguagagacg

SEQ ID NO: 529535 - RNA, 24 nt, Human
caaagugcugagauuacaggcgua

SEQ ID NO: 529536 - RNA, 22 nt, Human
caagugauucucgugccucagc

SEQ ID NO: 529537 - RNA, 25 nt, Human
caagugauucucgugccucagccuc

SEQ ID NO: 529538 - RNA, 27 nt, Human
cacauccacacaaagaugaagaagcua

SEQ ID NO: 529539 - RNA, 18 nt, Human
caccauguuggccaggau

SEQ ID NO: 529540 - RNA, 22 nt, Human
caccauguuggccaggaugguc

SEQ ID NO: 529541 - RNA, 24 nt, Human
caccauguuggccaggauggucuc

SEQ ID NO: 529542 - RNA, 23 nt, Human
cacucuaucacucaggcuggagc

SEQ ID NO: 529543 - RNA, 24 nt, Human
cacucuaucacucaggcuggagcg

SEQ ID NO: 529544 - RNA, 23 nt, Human
cagaggauugcuuguuaaggcac

SEQ ID NO: 529545 - RNA, 26 nt, Human
cagggaguccuuuucuaacugagccu

SEQ ID NO: 529546 - RNA, 22 nt, Human
ccaaagugcugagauuacaggc

SEQ ID NO: 529547 - RNA, 22 nt, Human
ccaaagugcugagauuacaggc

SEQ ID NO: 529548 - RNA, 24 nt, Human
ccaaagugcugagauuacaggcgu

SEQ ID NO: 529549 - RNA, 19 nt, Human
ccacacaaagaugaagaag

SEQ ID NO: 529550 - RNA, 24 nt, Human
ccaucuccugaguucaagugauuc

SEQ ID NO: 529551 - RNA, 21 nt, Human
ccucucccuucuauaaguccc

SEQ ID NO: 529552 - RNA, 21 nt, Human
ccugaccucgugaucugccug

SEQ ID NO: 529553 - RNA, 20 nt, Human
ccugaguucaagugauucuc

SEQ ID NO: 529554 - RNA, 22 nt, Human
ccugccuuggccucccaaagug

SEQ ID NO: 529555 - RNA, 24 nt, Human
ccugugcagcugggauuacaggcu

SEQ ID NO: 529556 - RNA, 26 nt, Human
cgcuccucucccuucuauaaguccca

SEQ ID NO: 529557 - RNA, 24 nt, Human
cgggguuucaccauguuggccagg

SEQ ID NO: 529558 - RNA, 27 nt, Human
cucacucuaucacucaggcuggagcgc

SEQ ID NO: 529559 - RNA, 21 nt, Human
cucacugaaaccuccaucucc

SEQ ID NO: 529560 - RNA, 24 nt, Human
cucacugaaaccuccaucuccuga

SEQ ID NO: 529561 - RNA, 21 nt, Human
cucccaaagugcugagauuac

SEQ ID NO: 529562 - RNA, 24 nt, Human
cuccugaccucgugaucugccugc

SEQ ID NO: 529563 - RNA, 19 nt, Human
cuccugaguucaagugauu

SEQ ID NO: 529564 - RNA, 23 nt, Human
cucgcucuguugccaggcuggag

SEQ ID NO: 529565 - RNA, 23 nt, Human
cucgugccucagccuccugugca

SEQ ID NO: 529566 - RNA, 24 nt, Human
cugaaaccuccaucuccugaguuc

SEQ ID NO: 529567 - RNA, 23 nt, Human
cugccuuggccucccaaagugcu

SEQ ID NO: 529568 - RNA, 21 nt, Human
cuggccagggaguccuuuucu

SEQ ID NO: 529569 - RNA, 19 nt, Human
cuuuuuuuuugagacagag

SEQ ID NO: 529570 - RNA, 21 nt, Human
gaccucgugaucugccugccu

SEQ ID NO: 529571 - RNA, 24 nt, Human
gaccucgugaucugccugccuugg

SEQ ID NO: 529572 - RNA, 24 nt, Human
gagacgggguuucaccauguuggc

SEQ ID NO: 529573 - RNA, 20 nt, Human
gagucucgcucuguugccag

SEQ ID NO: 529574 - RNA, 18 nt, Human
gauuacaggcguaaguca

SEQ ID NO: 529575 - RNA, 22 nt, Human
gauuacaggcguaagucacugc

SEQ ID NO: 529576 - RNA, 18 nt, Human
gcagcugggauuacaggc

SEQ ID NO: 529577 - RNA, 22 nt, Human
gccuuggccucccaaagugcug

SEQ ID NO: 529578 - RNA, 19 nt, Human
gcuggagugcaguggcgug

SEQ ID NO: 529579 - RNA, 22 nt, Human
ggcuggagugcaguggcgugau

SEQ ID NO: 529580 - RNA, 23 nt, Human
gggguuucaccauguuggccagg

SEQ ID NO: 529581 - RNA, 20 nt, Human
ggucucgaacuccugaccuc

SEQ ID NO: 529582 - RNA, 24 nt, Human
gguuucaccauguuggccaggaug

SEQ ID NO: 529583 - RNA, 23 nt, Human
guagagacgggguuucaccaugu

SEQ ID NO: 529584 - RNA, 24 nt, Human
gucucgcucuguugccaggcugga

SEQ ID NO: 529585 - RNA, 23 nt, Human
gugauucucgugccucagccucc

SEQ ID NO: 529586 - RNA, 26 nt, Human
uaaaucacuugaaaaaaagagguaau

SEQ ID NO: 529587 - RNA, 24 nt, Human
uaauuuuuauauuuuuaguagaga

SEQ ID NO: 529588 - RNA, 25 nt, Human
uacaagguaguuaacaccauacuca

SEQ ID NO: 529589 - RNA, 24 nt, Human
uacaggcuccugccaccacaccca

SEQ ID NO: 529590 - RNA, 22 nt, Human
uagagacgggguuucaccaugu

SEQ ID NO: 529591 - RNA, 24 nt, Human
uaguagagacgggguuucaccaug

SEQ ID NO: 529592 - RNA, 26 nt, Human
uaguagagacgggguuucaccauguu

SEQ ID NO: 529593 - RNA, 20 nt, Human
uauacacauccacacaaaga

SEQ ID NO: 529594 - RNA, 22 nt, Human
uauacacauccacacaaagaug

SEQ ID NO: 529595 - RNA, 24 nt, Human
ucaccauguuggccaggauggucu

SEQ ID NO: 529596 - RNA, 20 nt, Human
ucacugaaaccuccaucucc

SEQ ID NO: 529597 - RNA, 22 nt, Human
ucacugaaaccuccaucuccug

SEQ ID NO: 529598 - RNA, 21 nt, Human
uccacacaaagaugaagaagc

SEQ ID NO: 529599 - RNA, 24 nt, Human
ucccaaagugcugagauuacaggc

SEQ ID NO: 529600 - RNA, 21 nt, Human
uccugaguucaagugauucuc

SEQ ID NO: 529601 - RNA, 24 nt, Human
uccugaguucaagugauucucgug

SEQ ID NO: 529602 - RNA, 24 nt, Human
uccugugcagcugggauuacaggc

SEQ ID NO: 529603 - RNA, 23 nt, Human
ucucacucuaucacucaggcugg

SEQ ID NO: 529604 - RNA, 24 nt, Human
ucucacucuaucacucaggcugga

SEQ ID NO: 529605 - RNA, 19 nt, Human
ucucgaacuccugaccucg

SEQ ID NO: 529606 - RNA, 22 nt, Human
ucucgcucuguugccaggcugg

SEQ ID NO: 529607 - RNA, 23 nt, Human
ucucgcucuguugccaggcugga

SEQ ID NO: 529608 - RNA, 18 nt, Human
ucuguugccaggcuggag

SEQ ID NO: 529609 - RNA, 25 nt, Human
ugaaaaaaagagguaauacagaaua

SEQ ID NO: 529610 - RNA, 19 nt, Human
ugacagaggauugcuuguu

SEQ ID NO: 529611 - RNA, 18 nt, Human
ugagacagagucucacuc

SEQ ID NO: 529612 - RNA, 22 nt, Human
ugagacagagucucacucuauc

SEQ ID NO: 529613 - RNA, 22 nt, Human
ugagauggagucucgcucuguu

SEQ ID NO: 529614 - RNA, 21 nt, Human
ugagauuacaggcguaaguca

SEQ ID NO: 529615 - RNA, 22 nt, Human
ugagauuacaggcguaagucac

SEQ ID NO: 529616 - RNA, 22 nt, Human
ugagauuacaggcguaagucac

SEQ ID NO: 529617 - RNA, 24 nt, Human
ugagauuacaggcguaagucacug

SEQ ID NO: 529618 - RNA, 18 nt, Human
ugaguucaagugauucuc

SEQ ID NO: 529619 - RNA, 22 nt, Human
ugcaaggaggaggagaaacaac

SEQ ID NO: 529620 - RNA, 25 nt, Human
ugcagcugggauuacaggcuccugc

SEQ ID NO: 529621 - RNA, 22 nt, Human
ugcaguggcgugaucucggcuc

SEQ ID NO: 529622 - RNA, 21 nt, Human
ugccaggcuggagugcagugg

SEQ ID NO: 529623 - RNA, 23 nt, Human
ugccaggcuggagugcaguggcg

SEQ ID NO: 529624 - RNA, 24 nt, Human
ugccaggcuggagugcaguggcgu

SEQ ID NO: 529625 - RNA, 22 nt, Human
ugccucagccuccugugcagcu

SEQ ID NO: 529626 - RNA, 24 nt, Human
ugccucagccuccugugcagcugg

SEQ ID NO: 529627 - RNA, 18 nt, Human
ugccugccuuggccuccc

SEQ ID NO: 529628 - RNA, 24 nt, Human
ugcugagauuacaggcguaaguca

SEQ ID NO: 529629 - RNA, 19 nt, Human
uggagugcaguggcgugau

SEQ ID NO: 529630 - RNA, 23 nt, Human
uggagugcaguggcgugaucucg

SEQ ID NO: 529631 - RNA, 24 nt, Human
uggagugcaguggcgugaucucgg

SEQ ID NO: 529632 - RNA, 24 nt, Human
uggccaggauggucucgaacuccu

SEQ ID NO: 529633 - RNA, 23 nt, Human
ugggaacaccuggucaggacuua

SEQ ID NO: 529634 - RNA, 22 nt, Human
ugggauuacaggcuccugccac

SEQ ID NO: 529635 - RNA, 24 nt, Human
ugggauuacaggcuccugccacca

SEQ ID NO: 529636 - RNA, 20 nt, Human
uguugccaggcuggagugca

SEQ ID NO: 529637 - RNA, 18 nt, Human
uuaguagagacgggguuu

SEQ ID NO: 529638 - RNA, 22 nt, Human
uuaguagagacgggguuucacc

SEQ ID NO: 529639 - RNA, 24 nt, Human
uuaguagagacgggguuucaccau

SEQ ID NO: 529640 - RNA, 23 nt, Human
uucaagugauucucgugccucag

SEQ ID NO: 529641 - RNA, 23 nt, Human
uugcauucuucuuuucaaacaca

SEQ ID NO: 529642 - RNA, 21 nt, Human
uugccaggcuggagugcagug

SEQ ID NO: 529643 - RNA, 24 nt, Human
uugccaggcuggagugcaguggcg

SEQ ID NO: 529644 - RNA, 18 nt, Human
uuggccucccaaagugcu

SEQ ID NO: 529645 - RNA, 19 nt, Human
uuucaccauguuggccagg

SEQ ID NO: 529646 - RNA, 20 nt, Human
uuucaccauguuggccagga

SEQ ID NO: 529647 - RNA, 24 nt, Human
uuuuaggccauguauaaguuacac

SEQ ID NO: 529648 - RNA, 24 nt, Human
uuuuuaguagagacgggguuucac

SEQ ID NO: 529649 - RNA, 20 nt, Human
uuuuuauauuuuuaguagag

SEQ ID NO: 529650 - RNA, 25 nt, Human
uuuuuuuuuuuugagauggagucuc

SEQ ID NO: 529651 - RNA, 22 nt, Human
uuuuuuuuuuuuuugagaugga

SEQ ID NO: 529652 - RNA, 18 nt, Human
uuuuuuuuuuuuuuuuug

SEQ ID NO: 529653 - RNA, 25 nt, Human
aaacacuaggugagcuaaauaaagc

SEQ ID NO: 529654 - RNA, 19 nt, Human
aaacccaaaccugcaaggg

SEQ ID NO: 529655 - RNA, 19 nt, Human
aaacccaaaccugcaaggg

SEQ ID NO: 529656 - RNA, 18 nt, Human
aagaaaccccuacuuagu

SEQ ID NO: 529657 - RNA, 26 nt, Human
aauacaaauaaaugaaacaggccagg

SEQ ID NO: 529658 - RNA, 19 nt, Human
aauggcaucuccccuaacu

SEQ ID NO: 529659 - RNA, 22 nt, Human
agguaaaauugcaggcauaaag

SEQ ID NO: 529660 - RNA, 20 nt, Human
agguuccuccacgacaccuu

SEQ ID NO: 529661 - RNA, 21 nt, Human
auaauacaaauaaaugaaaca

SEQ ID NO: 529662 - RNA, 21 nt, Human
caaaagaggcauaaacugacg

SEQ ID NO: 529663 - RNA, 21 nt, Human
cacgacaccugcagagaccug

SEQ ID NO: 529664 - RNA, 23 nt, Human
ccagccacaguuugcaacugcaa

SEQ ID NO: 529665 - RNA, 19 nt, Human
ccaggcagauaauacaaau

SEQ ID NO: 529666 - RNA, 21 nt, Human
ccaguuuucaauacuccucuu

SEQ ID NO: 529667 - RNA, 24 nt, Human
ccgaucgagagaggccagaaauuc

SEQ ID NO: 529668 - RNA, 19 nt, Human
ccucuucugaaaaugcaga

SEQ ID NO: 529669 - RNA, 18 nt, Human
ccucuugcagagagugaa

SEQ ID NO: 529670 - RNA, 19 nt, Human
cgccucagggaccaggcag

SEQ ID NO: 529671 - RNA, 19 nt, Human
cuccacgacaccugcagag

SEQ ID NO: 529672 - RNA, 21 nt, Human
gagcuaaauaaagcugacagu

SEQ ID NO: 529673 - RNA, 20 nt, Human
gaggagagacccagacgccu

SEQ ID NO: 529674 - RNA, 24 nt, Human
gcuaaauaaagcugacaguccacc

SEQ ID NO: 529675 - RNA, 20 nt, Human
ggaagaggauggcaggugcu

SEQ ID NO: 529676 - RNA, 18 nt, Human
uaaaauugcaggcauaaa

SEQ ID NO: 529677 - RNA, 18 nt, Human
uaaaauugcaggcauaaa

SEQ ID NO: 529678 - RNA, 19 nt, Human
uaacucuauaggaaaaagu

SEQ ID NO: 529679 - RNA, 24 nt, Human
uaacucuauaggaaaaaguagaag

SEQ ID NO: 529680 - RNA, 21 nt, Human
ucuuagacgguggcucaauuu

SEQ ID NO: 529681 - RNA, 19 nt, Human
ugaaaacacuaggugagcu

SEQ ID NO: 529682 - RNA, 18 nt, Human
ugagcuaaauaaagcuga

SEQ ID NO: 529683 - RNA, 21 nt, Human
ugcaagggagaggagagaccc

SEQ ID NO: 529684 - RNA, 19 nt, Human
ugccaaaagaagaaacccc

SEQ ID NO: 529685 - RNA, 18 nt, Human
uggcaaaguccgggcgcg

SEQ ID NO: 529686 - RNA, 19 nt, Human
uggcucccgggcgcauccc

SEQ ID NO: 529687 - RNA, 21 nt, Human
uguggcucccgggcgcauccc

SEQ ID NO: 529688 - RNA, 21 nt, Human
uguggcucccgggcgcauccc

SEQ ID NO: 529689 - RNA, 22 nt, Human
uucaauacuccucuugcagaga

SEQ ID NO: 529690 - RNA, 18 nt, Human
uuccucagcuucaaaccc

SEQ ID NO: 529691 - RNA, 18 nt, Human
uuccuccacgacaccugc

SEQ ID NO: 529692 - RNA, 23 nt, Human
uugauuguccucuucugaaaaug

SEQ ID NO: 529693 - RNA, 18 nt, Human
uugcaacugcaaaagagg

SEQ ID NO: 529694 - RNA, 24 nt, Human
uuuuuuuuuuuuuuuuuuuuaggg

SEQ ID NO: 529695 - RNA, 25 nt, Human
aaaacacauguucccaggggcccag

SEQ ID NO: 529696 - RNA, 22 nt, Human
aaacaagugcuguaagaacuug

SEQ ID NO: 529697 - RNA, 20 nt, Human
aacugagacuucugacucca

SEQ ID NO: 529698 - RNA, 26 nt, Human
aaguacccaguccccuuucuucagcc

SEQ ID NO: 529699 - RNA, 23 nt, Human
aaucuuaugcucccccgccacac

SEQ ID NO: 529700 - RNA, 21 nt, Human
auuuauucaccacaaaacaca

SEQ ID NO: 529701 - RNA, 22 nt, Human
caaagucuccaaguacccaguc

SEQ ID NO: 529702 - RNA, 20 nt, Human
cacacccaucccaugaaaca

SEQ ID NO: 529703 - RNA, 21 nt, Human
caggggcccaggcaaagucuc

SEQ ID NO: 529704 - RNA, 24 nt, Human
ccaggacaaaugacagaacugaga

SEQ ID NO: 529705 - RNA, 24 nt, Human
cccacacccaucccaugaaacaag

SEQ ID NO: 529706 - RNA, 21 nt, Human
ccccaccaccugcugcccccc

SEQ ID NO: 529707 - RNA, 21 nt, Human
ccucuuugccuuucucuuuca

SEQ ID NO: 529708 - RNA, 24 nt, Human
cucccccgccacaccucuuugccu

SEQ ID NO: 529709 - RNA, 20 nt, Human
cucuuaacaaaaacuucugg

SEQ ID NO: 529710 - RNA, 21 nt, Human
cuugcccacacccucagccuu

SEQ ID NO: 529711 - RNA, 20 nt, Human
gccuugcccacacccucagc

SEQ ID NO: 529712 - RNA, 18 nt, Human
gcucccccgccacaccuc

SEQ ID NO: 529713 - RNA, 23 nt, Human
ucccacacccaucccaugaaaca

SEQ ID NO: 529714 - RNA, 22 nt, Human
ucuucagccuugcccacaccuu

SEQ ID NO: 529715 - RNA, 22 nt, Human
ugacuccaaaucuuaugcuccc

SEQ ID NO: 529716 - RNA, 27 nt, Human
uucaaagagacucaauaaccugcucca

SEQ ID NO: 529717 - RNA, 21 nt, Human
uucccacacccaucccaugaa

SEQ ID NO: 529718 - RNA, 21 nt, Human
uuuacagaugugaaaaccaag

SEQ ID NO: 529719 - RNA, 18 nt, Human
uuuuuuuuuuuuuuuuug

SEQ ID NO: 529720 - RNA, 23 nt, Human
aaaaccucucacaccccaaccgg

SEQ ID NO: 529721 - RNA, 19 nt, Human
aaaccucucacaccccaac

SEQ ID NO: 529722 - RNA, 22 nt, Human
aacagagccagccaguccacaa

SEQ ID NO: 529723 - RNA, 24 nt, Human
accaagcaaaucaagccugcaaga

SEQ ID NO: 529724 - RNA, 18 nt, Human
agaaaaccucucacaccc

SEQ ID NO: 529725 - RNA, 22 nt, Human
agcagcaaaaauauaauuugca

SEQ ID NO: 529726 - RNA, 22 nt, Human
caacaauaauagguaacuuuaa

SEQ ID NO: 529727 - RNA, 23 nt, Human
caacaauaauagguaacuuuaau

SEQ ID NO: 529728 - RNA, 21 nt, Human
caagaccaagacagcaucucu

SEQ ID NO: 529729 - RNA, 20 nt, Human
caccauggaaugcaaauucu

SEQ ID NO: 529730 - RNA, 18 nt, Human
cagcagcaaaaauauaau

SEQ ID NO: 529731 - RNA, 21 nt, Human
caucuaacuaaagcaagcucc

SEQ ID NO: 529732 - RNA, 18 nt, Human
ccaaaccagcuugcucau

SEQ ID NO: 529733 - RNA, 20 nt, Human
ccaguccacaaaacaggcag

SEQ ID NO: 529734 - RNA, 19 nt, Human
ccggcuuccgaucccugca

SEQ ID NO: 529735 - RNA, 23 nt, Human
ccuagagcgagaaaaccucucac

SEQ ID NO: 529736 - RNA, 20 nt, Human
cgagaaaaccucucacaccc

SEQ ID NO: 529737 - RNA, 26 nt, Human
cuaaagcaagcuccuccaacaagacc

SEQ ID NO: 529738 - RNA, 19 nt, Human
cugcaggcgcacccagucc

SEQ ID NO: 529739 - RNA, 22 nt, Human
cuuucuggauuugguuuaaaca

SEQ ID NO: 529740 - RNA, 27 nt, Human
gaaaaccucucacaccccaaccggcuu

SEQ ID NO: 529741 - RNA, 22 nt, Human
ggaagccaauauucaaaaugcc

SEQ ID NO: 529742 - RNA, 20 nt, Human
uaacaccauggaaugcaaaa

SEQ ID NO: 529743 - RNA, 24 nt, Human
uauaucagcagcaaaaauauaauu

SEQ ID NO: 529744 - RNA, 19 nt, Human
uauuucuauuucaagauga

SEQ ID NO: 529745 - RNA, 26 nt, Human
uccaaaauaucugacauucugcagca

SEQ ID NO: 529746 - RNA, 24 nt, Human
uccaugcacuuuuuggacagagaa

SEQ ID NO: 529747 - RNA, 22 nt, Human
ucccugcaggcgcacccagucc

SEQ ID NO: 529748 - RNA, 19 nt, Human
ucuuuagaacuaaguucau

SEQ ID NO: 529749 - RNA, 18 nt, Human
ugcaagaaaggaagccaa

SEQ ID NO: 529750 - RNA, 22 nt, Human
ugccauguuaccaucuaaaccc

SEQ ID NO: 529751 - RNA, 21 nt, Human
ugcuugaagaaucucccuaga

SEQ ID NO: 529752 - RNA, 21 nt, Human
uggugauucuuuaauaaauac

SEQ ID NO: 529753 - RNA, 21 nt, Human
ugguuuaaacacaugcauaua

SEQ ID NO: 529754 - RNA, 24 nt, Human
uguuaucuucuuuagaacuaaguu

SEQ ID NO: 529755 - RNA, 19 nt, Human
uuaaccaaauccauuauag

SEQ ID NO: 529756 - RNA, 22 nt, Human
uucaaaaugccauguuaccauc

SEQ ID NO: 529757 - RNA, 23 nt, Human
uucauuuaccuuugcgugagugc

SEQ ID NO: 529758 - RNA, 26 nt, Human
uuuuuuuuuuuuuuuuuuuucauggg

SEQ ID NO: 529759 - RNA, 19 nt, Human
aaacuccauaaacaaguuu

SEQ ID NO: 529760 - RNA, 22 nt, Human
agaaauauguuucuuuauuuuc

SEQ ID NO: 529761 - RNA, 22 nt, Human
agauggugcagaaagugcuugg

SEQ ID NO: 529762 - RNA, 21 nt, Human
agucaaacucuauaaauccaa

SEQ ID NO: 529763 - RNA, 18 nt, Human
agugucuuuccacccugg

SEQ ID NO: 529764 - RNA, 23 nt, Human
augcagugucuuuccacccuggc

SEQ ID NO: 529765 - RNA, 20 nt, Human
caaauggucugcagcaaagc

SEQ ID NO: 529766 - RNA, 20 nt, Human
caacacucaauaauguuuuc

SEQ ID NO: 529767 - RNA, 24 nt, Human
caauaacuuaugacacuccccaag

SEQ ID NO: 529768 - RNA, 22 nt, Human
ccaaaacacuuccgaauucuaa

SEQ ID NO: 529769 - RNA, 19 nt, Human
ccacuucaguugcucagca

SEQ ID NO: 529770 - RNA, 20 nt, Human
ccccaagggaugucaacaga

SEQ ID NO: 529771 - RNA, 18 nt, Human
ccuaagcgagcaagcucu

SEQ ID NO: 529772 - RNA, 18 nt, Human
ccuucuacuagagcccca

SEQ ID NO: 529773 - RNA, 23 nt, Human
cuagagccccaagggaugucaac

SEQ ID NO: 529774 - RNA, 19 nt, Human
cugcagcaaagcacagagc

SEQ ID NO: 529775 - RNA, 19 nt, Human
gagauggaaccaggacagu

SEQ ID NO: 529776 - RNA, 19 nt, Human
gagcaagcucugcgcucca

SEQ ID NO: 529777 - RNA, 22 nt, Human
ggaaaagccugccucgaucaag

SEQ ID NO: 529778 - RNA, 24 nt, Human
uaacaaauacaaaucuaaucgaaa

SEQ ID NO: 529779 - RNA, 23 nt, Human
uaacaaauacaaauugaauagaa

SEQ ID NO: 529780 - RNA, 22 nt, Human
uaacugcaucaaagaagggggc

SEQ ID NO: 529781 - RNA, 18 nt, Human
uaacuuaugacacucccc

SEQ ID NO: 529782 - RNA, 20 nt, Human
uaacuuaugacacuccccaa

SEQ ID NO: 529783 - RNA, 21 nt, Human
uaacuuaugacacuccccaag

SEQ ID NO: 529784 - RNA, 21 nt, Human
uagagccccaagggaugucaa

SEQ ID NO: 529785 - RNA, 25 nt, Human
uagagccccaagggaugucaacaga

SEQ ID NO: 529786 - RNA, 18 nt, Human
uagcagagauggaaccag

SEQ ID NO: 529787 - RNA, 20 nt, Human
ucagcaaaguccaaacucca

SEQ ID NO: 529788 - RNA, 22 nt, Human
uccaaacuccaugcucccccug

SEQ ID NO: 529789 - RNA, 19 nt, Human
uccaugcucccccugcucc

SEQ ID NO: 529790 - RNA, 21 nt, Human
ucuauaaauccaacuugauuu

SEQ ID NO: 529791 - RNA, 19 nt, Human
ucugcagcaaagcacagag

SEQ ID NO: 529792 - RNA, 20 nt, Human
ugcagaaagugcuuggcaug

SEQ ID NO: 529793 - RNA, 20 nt, Human
uggaaccaggacagugaugc

SEQ ID NO: 529794 - RNA, 22 nt, Human
aaaagcauuaagcaauaaccac

SEQ ID NO: 529795 - RNA, 21 nt, Human
aaaaguacugcaaacaagcuc

SEQ ID NO: 529796 - RNA, 25 nt, Human
aaaaguacugcaaacaagcucaaaa

SEQ ID NO: 529797 - RNA, 23 nt, Human
aaacaagcucaaaacaugauuca

SEQ ID NO: 529798 - RNA, 22 nt, Human
aaaugcuaaauggcugauacuu

SEQ ID NO: 529799 - RNA, 22 nt, Human
agaaauuggugcuaauaaacaa

SEQ ID NO: 529800 - RNA, 18 nt, Human
agaacuagaggugaaaac

SEQ ID NO: 529801 - RNA, 18 nt, Human
agcuuaguggcaagaaau

SEQ ID NO: 529802 - RNA, 23 nt, Human
agucagcauagaguuaaagcuca

SEQ ID NO: 529803 - RNA, 25 nt, Human
aguuuucuuaagaguuuuuuuuuuu

SEQ ID NO: 529804 - RNA, 18 nt, Human
auaaagcucuccucuagg

SEQ ID NO: 529805 - RNA, 20 nt, Human
auaaagcucuccucuagggg

SEQ ID NO: 529806 - RNA, 24 nt, Human
auaaagcucuccucuaggguccug

SEQ ID NO: 529807 - RNA, 19 nt, Human
auggaaauggaauguacau

SEQ ID NO: 529808 - RNA, 18 nt, Human
cagaacuagaggugaaaa

SEQ ID NO: 529809 - RNA, 20 nt, Human
cauccagaacuagaggugaa

SEQ ID NO: 529810 - RNA, 20 nt, Human
cccaccacuacugccgggcc

SEQ ID NO: 529811 - RNA, 18 nt, Human
cccgccgccaucuugagg

SEQ ID NO: 529812 - RNA, 22 nt, Human
cgcucugggcgcccgccgccau

SEQ ID NO: 529813 - RNA, 18 nt, Human
cucuaaauaccccaacuu

SEQ ID NO: 529814 - RNA, 19 nt, Human
cugcugcagccacucccgg

SEQ ID NO: 529815 - RNA, 20 nt, Human
cugcugcagccacucccggg

SEQ ID NO: 529816 - RNA, 23 nt, Human
cugcugcagccacucccggggcg

SEQ ID NO: 529817 - RNA, 25 nt, Human
cugcugcagccacucccggggcggc

SEQ ID NO: 529818 - RNA, 27 nt, Human
gagccagcauuuagauuacaggcucua

SEQ ID NO: 529819 - RNA, 22 nt, Human
gcaggccccagcagcuagugcc

SEQ ID NO: 529820 - RNA, 20 nt, Human
gcugcagccacucccggggc

SEQ ID NO: 529821 - RNA, 19 nt, Human
ggugaaaacuaagaccugg

SEQ ID NO: 529822 - RNA, 23 nt, Human
uaaaacaaauagcuuaguggcaa

SEQ ID NO: 529823 - RNA, 23 nt, Human
uaaaacaaauagguccacaacca

SEQ ID NO: 529824 - RNA, 19 nt, Human
uaagcaauaaccacacaca

SEQ ID NO: 529825 - RNA, 27 nt, Human
uaagcaauaaccacacacaagaugaaa

SEQ ID NO: 529826 - RNA, 19 nt, Human
uaaggaaaugguagcagag

SEQ ID NO: 529827 - RNA, 21 nt, Human
uaauuguauaaagcucuccuc

SEQ ID NO: 529828 - RNA, 24 nt, Human
uacugugacaguccugaaaggcca

SEQ ID NO: 529829 - RNA, 20 nt, Human
uagcuuaguggcaagaaauu

SEQ ID NO: 529830 - RNA, 19 nt, Human
uagugcaucugcauuaagg

SEQ ID NO: 529831 - RNA, 22 nt, Human
uauacaauuuuuacaaaguaac

SEQ ID NO: 529832 - RNA, 21 nt, Human
uaucuaagaaguuacauauau

SEQ ID NO: 529833 - RNA, 18 nt, Human
uaugcaaacauuaaaaga

SEQ ID NO: 529834 - RNA, 19 nt, Human
ucccggggcggcaggcccc

SEQ ID NO: 529835 - RNA, 20 nt, Human
uccuggcgcugcugcagcca

SEQ ID NO: 529836 - RNA, 20 nt, Human
ucuuuggaaaacugucuggu

SEQ ID NO: 529837 - RNA, 21 nt, Human
ugauagaaaaaucuuccugau

SEQ ID NO: 529838 - RNA, 19 nt, Human
ugcaaacaagcucaaaaca

SEQ ID NO: 529839 - RNA, 22 nt, Human
ugguauaagaaguagcugggga

SEQ ID NO: 529840 - RNA, 22 nt, Human
ugguucuaaguucccacuuccu

SEQ ID NO: 529841 - RNA, 22 nt, Human
uguauaaagcucuccucuaggg

SEQ ID NO: 529842 - RNA, 23 nt, Human
uuaagaccuuauuuaaccauagu

SEQ ID NO: 529843 - RNA, 20 nt, Human
uuaguacaguuuucuuaaga

SEQ ID NO: 529844 - RNA, 21 nt, Human
uucaugcagauacauuucuua

SEQ ID NO: 529845 - RNA, 22 nt, Human
uucccacuuccuuuaguuccca

SEQ ID NO: 529846 - RNA, 19 nt, Human
uuuaacuuuauuaacagaa

SEQ ID NO: 529847 - RNA, 22 nt, Human
uuuuuuuuuuaaaugcaaacaa

SEQ ID NO: 529848 - RNA, 20 nt, Human
aaaacugaaguagaagggcc

SEQ ID NO: 529849 - RNA, 25 nt, Human
aaacaugcagcuaagcaggcucuag

SEQ ID NO: 529850 - RNA, 25 nt, Human
aaacccaacgaauggauggucagaa

SEQ ID NO: 529851 - RNA, 23 nt, Human
aaauucucuucacaccucugcuc

SEQ ID NO: 529852 - RNA, 20 nt, Human
aaccagcugcuagagacaag

SEQ ID NO: 529853 - RNA, 19 nt, Human
aagaacacucuccaggcug

SEQ ID NO: 529854 - RNA, 20 nt, Human
aagaacacucuccaggcugc

SEQ ID NO: 529855 - RNA, 21 nt, Human
aagacccaugcuagggaacag

SEQ ID NO: 529856 - RNA, 24 nt, Human
aagcagaaagccaucucccuaggg

SEQ ID NO: 529857 - RNA, 18 nt, Human
aaggacugcagggaaagg

SEQ ID NO: 529858 - RNA, 20 nt, Human
aaggacugcagggaaaggca

SEQ ID NO: 529859 - RNA, 20 nt, Human
acaaaacaugcagcuaagca

SEQ ID NO: 529860 - RNA, 24 nt, Human
acaagaacacucuccaggcugcau

SEQ ID NO: 529861 - RNA, 22 nt, Human
acugaaguagaagggccuucug

SEQ ID NO: 529862 - RNA, 21 nt, Human
agaaaaaaaaagccaaauuuc

SEQ ID NO: 529863 - RNA, 21 nt, Human
agaggcauccaaaugccuuuc

SEQ ID NO: 529864 - RNA, 18 nt, Human
agcaggcucuagcaaguc

SEQ ID NO: 529865 - RNA, 23 nt, Human
agccaaacuucacugagggccug

SEQ ID NO: 529866 - RNA, 21 nt, Human
agccugggcuaugaaauucug

SEQ ID NO: 529867 - RNA, 19 nt, Human
aggaggacucagaguucca

SEQ ID NO: 529868 - RNA, 23 nt, Human
aggcucuagcaaguccagaaaca

SEQ ID NO: 529869 - RNA, 21 nt, Human
aguggaauaaggguugacaga

SEQ ID NO: 529870 - RNA, 18 nt, Human
agugguggcagcaggagg

SEQ ID NO: 529871 - RNA, 21 nt, Human
auaggaggacucagaguucca

SEQ ID NO: 529872 - RNA, 18 nt, Human
aucaaaccuggagcuggu

SEQ ID NO: 529873 - RNA, 19 nt, Human
auccaaaugccuuucccag

SEQ ID NO: 529874 - RNA, 26 nt, Human
augcuagggaacagugauccaaagca

SEQ ID NO: 529875 - RNA, 24 nt, Human
caaaacccaacgaauggaugguca

SEQ ID NO: 529876 - RNA, 27 nt, Human
caaagugggauuccaaaaaucguaacu

SEQ ID NO: 529877 - RNA, 19 nt, Human
caaaugccuuucccagcuc

SEQ ID NO: 529878 - RNA, 19 nt, Human
caacagagaggcauccaaa

SEQ ID NO: 529879 - RNA, 19 nt, Human
caagcccaagguguaagaa

SEQ ID NO: 529880 - RNA, 22 nt, Human
caccucugcucccacauggaag

SEQ ID NO: 529881 - RNA, 20 nt, Human
caggcccuccaaggagacuc

SEQ ID NO: 529882 - RNA, 26 nt, Human
caugggugacagucacaaaaguggug

SEQ ID NO: 529883 - RNA, 20 nt, Human
ccaacagagaggcauccaaa

SEQ ID NO: 529884 - RNA, 22 nt, Human
ccagaccagaguuagauguccc

SEQ ID NO: 529885 - RNA, 19 nt, Human
cccaccaacgacccuucau

SEQ ID NO: 529886 - RNA, 19 nt, Human
cccaugcacaaccauggga

SEQ ID NO: 529887 - RNA, 26 nt, Human
ccccaaccagcugcuagagacaagaa

SEQ ID NO: 529888 - RNA, 25 nt, Human
ccccaggccccaacagagaggcauc

SEQ ID NO: 529889 - RNA, 18 nt, Human
ccugggcuaugaaauucu

SEQ ID NO: 529890 - RNA, 25 nt, Human
ccuguaacugauuuaaucccagggc

SEQ ID NO: 529891 - RNA, 24 nt, Human
cggggucccugcauucaaaacucc

SEQ ID NO: 529892 - RNA, 19 nt, Human
cuacaaaacaugcagcuaa

SEQ ID NO: 529893 - RNA, 21 nt, Human
cuccagugacagaauauaguc

SEQ ID NO: 529894 - RNA, 20 nt, Human
cucucagacuuggaacauga

SEQ ID NO: 529895 - RNA, 21 nt, Human
cucuugauuuuuacaccaacc

SEQ ID NO: 529896 - RNA, 20 nt, Human
cuggucaguugcacagcuaa

SEQ ID NO: 529897 - RNA, 18 nt, Human
cuguucugugauuuuggc

SEQ ID NO: 529898 - RNA, 19 nt, Human
cuuggaacaugagaacagc

SEQ ID NO: 529899 - RNA, 23 nt, Human
gacaaugaauggagugaaaggaa

SEQ ID NO: 529900 - RNA, 18 nt, Human
gaccagaguuagaugucc

SEQ ID NO: 529901 - RNA, 25 nt, Human
gacugcagggaaaggcacaucacag

SEQ ID NO: 529902 - RNA, 19 nt, Human
gauguccccaugcacaacc

SEQ ID NO: 529903 - RNA, 24 nt, Human
gcccugggguggguggcuucccag

SEQ ID NO: 529904 - RNA, 21 nt, Human
gcuagagacaagaacacucuc

SEQ ID NO: 529905 - RNA, 23 nt, Human
ggacaaugaauggagugaaagga

SEQ ID NO: 529906 - RNA, 21 nt, Human
ggccugaagagacuugauugg

SEQ ID NO: 529907 - RNA, 18 nt, Human
ggguugacagaggccagc

SEQ ID NO: 529908 - RNA, 23 nt, Human
guaaggugagcagcauguaaccc

SEQ ID NO: 529909 - RNA, 23 nt, Human
gucaaaugcaaaacccaacgaau

SEQ ID NO: 529910 - RNA, 23 nt, Human
uaagaaaaaaaaagccaaauuuc

SEQ ID NO: 529911 - RNA, 21 nt, Human
uaccaguuuuuaauucuuugu

SEQ ID NO: 529912 - RNA, 26 nt, Human
uagacccaagacccaugcuccgaggg

SEQ ID NO: 529913 - RNA, 19 nt, Human
uagagacaagaacacucuc

SEQ ID NO: 529914 - RNA, 21 nt, Human
uagccaaacuucacugagggc

SEQ ID NO: 529915 - RNA, 23 nt, Human
ucagaccacaugacaaauguugc

SEQ ID NO: 529916 - RNA, 26 nt, Human
ucagaccacaugacaaauguugcuuu

SEQ ID NO: 529917 - RNA, 19 nt, Human
uccaaaugccuuucccagc

SEQ ID NO: 529918 - RNA, 22 nt, Human
uccauccugguuuccaaagaaa

SEQ ID NO: 529919 - RNA, 24 nt, Human
uccccaaccagcugcuagagacaa

SEQ ID NO: 529920 - RNA, 20 nt, Human
ugagucaaacaacacggcag

SEQ ID NO: 529921 - RNA, 20 nt, Human
ugcacaaccaugggaaugcg

SEQ ID NO: 529922 - RNA, 21 nt, Human
ugccugcuccuuccauaccuc

SEQ ID NO: 529923 - RNA, 18 nt, Human
ugcucaggccagugccug

SEQ ID NO: 529924 - RNA, 20 nt, Human
ugcucaggccagugccugcu

SEQ ID NO: 529925 - RNA, 18 nt, Human
uggaauaaggguugacag

SEQ ID NO: 529926 - RNA, 20 nt, Human
ugugcugcucaaugacagug

SEQ ID NO: 529927 - RNA, 21 nt, Human
uuccaaagaaagcuccucagg

SEQ ID NO: 529928 - RNA, 19 nt, Human
uugguuugaucaaaccugg

SEQ ID NO: 529929 - RNA, 21 nt, Human
aaacuuagaccagaccuggca

SEQ ID NO: 529930 - RNA, 23 nt, Human
aagaaacuuagaccagaccuggc

SEQ ID NO: 529931 - RNA, 20 nt, Human
acuagcuguuugaccuuggc

SEQ ID NO: 529932 - RNA, 22 nt, Human
agaccagaccuggcaaucaagg

SEQ ID NO: 529933 - RNA, 22 nt, Human
ccaaagagaccagauccuggca

SEQ ID NO: 529934 - RNA, 19 nt, Human
ccagaccuggcaaucaagg

SEQ ID NO: 529935 - RNA, 23 nt, Human
cccaccagaauccgggacucacc

SEQ ID NO: 529936 - RNA, 28 nt, Human
cccaccagaauccgggacucaccaaacg

SEQ ID NO: 529937 - RNA, 20 nt, Human
ccuuuuguuuuccccgcucc

SEQ ID NO: 529938 - RNA, 20 nt, Human
cgccgggaggcugcugccgg

SEQ ID NO: 529939 - RNA, 19 nt, Human
cugagucacuuaaccucuc

SEQ ID NO: 529940 - RNA, 20 nt, Human
cuggaaucucccugaggcca

SEQ ID NO: 529941 - RNA, 21 nt, Human
cugugggcagggguugggggu

SEQ ID NO: 529942 - RNA, 21 nt, Human
gacccggaagcgcuucaccca

SEQ ID NO: 529943 - RNA, 25 nt, Human
ggaggcugcugccggcggcgacccg

SEQ ID NO: 529944 - RNA, 20 nt, Human
ggccaucagcugguucugug

SEQ ID NO: 529945 - RNA, 18 nt, Human
gggcagggguuggggguu

SEQ ID NO: 529946 - RNA, 18 nt, Human
ggggguugggaugcaggg

SEQ ID NO: 529947 - RNA, 21 nt, Human
guaguuugggcuggccuggaa

SEQ ID NO: 529948 - RNA, 19 nt, Human
guuucaggcccuggggauu

SEQ ID NO: 529949 - RNA, 25 nt, Human
uccaccacuuacuagcuguuugacc

SEQ ID NO: 529950 - RNA, 18 nt, Human
ucccugaggccacccugc

SEQ ID NO: 529951 - RNA, 20 nt, Human
ucccugaggccacccugccu

SEQ ID NO: 529952 - RNA, 23 nt, Human
uccuggcagcagcugaggaggug

SEQ ID NO: 529953 - RNA, 23 nt, Human
ugcccaagggcacuuucaggcac

SEQ ID NO: 529954 - RNA, 20 nt, Human
uggcaaucaaggggugaggu

SEQ ID NO: 529955 - RNA, 24 nt, Human
uggcuccaccacuuacuagcuguu

SEQ ID NO: 529956 - RNA, 23 nt, Human
uucgucuccuuuuguuuuccccg

SEQ ID NO: 529957 - RNA, 21 nt, Human
uuucaggcccuggggauuuca

SEQ ID NO: 529958 - RNA, 22 nt, Human
uuugaaaaucacuccuuugucu

SEQ ID NO: 529959 - RNA, 19 nt, Human
uuuguuuuccccgcucccc

SEQ ID NO: 529960 - RNA, 18 nt, Human
uuuuccccgcuccccccc

SEQ ID NO: 529961 - RNA, 20 nt, Human
uuuuuuuuuuuuuuuuuugg

SEQ ID NO: 529962 - RNA, 19 nt, Human
aaagagucuuggaauaugu

SEQ ID NO: 529963 - RNA, 24 nt, Human
aaagugcugggauuacaggcguga

SEQ ID NO: 529964 - RNA, 21 nt, Human
aaagugcugggauuauguugc

SEQ ID NO: 529965 - RNA, 23 nt, Human
aaagugcugggauuauguugcga

SEQ ID NO: 529966 - RNA, 21 nt, Human
aacaagcucagcaugaaagcc

SEQ ID NO: 529967 - RNA, 21 nt, Human
aagaagcugggaccacaggca

SEQ ID NO: 529968 - RNA, 24 nt, Human
aagaagcugggaccacaggcaugu

SEQ ID NO: 529969 - RNA, 25 nt, Human
aagcaauccucccaccucagccucc

SEQ ID NO: 529970 - RNA, 26 nt, Human
aagcaauccucucaccuuggcuaccu

SEQ ID NO: 529971 - RNA, 22 nt, Human
aagcucagcaugaaagccaaga

SEQ ID NO: 529972 - RNA, 20 nt, Human
aagcuuagaccaacaagcuc

SEQ ID NO: 529973 - RNA, 22 nt, Human
aaguagcugggauuacaggugc

SEQ ID NO: 529974 - RNA, 21 nt, Human
aagugauucuccugcuucagc

SEQ ID NO: 529975 - RNA, 19 nt, Human
aagugcugggauuacaggc

SEQ ID NO: 529976 - RNA, 19 nt, Human
aagugcugggauuacaggc

SEQ ID NO: 529977 - RNA, 25 nt, Human
acacugucacccaggcuacagcaca

SEQ ID NO: 529978 - RNA, 19 nt, Human
acagacaggguuucaccau

SEQ ID NO: 529979 - RNA, 18 nt, Human
acaggguuucaccauguu

SEQ ID NO: 529980 - RNA, 21 nt, Human
acaggguuucaccauguuggc

SEQ ID NO: 529981 - RNA, 24 nt, Human
acaggguuucaccauguuggccag

SEQ ID NO: 529982 - RNA, 20 nt, Human
acauuagcaaauacacagaa

SEQ ID NO: 529983 - RNA, 24 nt, Human
accauguuggccaggauggucucg

SEQ ID NO: 529984 - RNA, 20 nt, Human
acccuaacaggguuacagau

SEQ ID NO: 529985 - RNA, 22 nt, Human
acccucacugggccacucuggg

SEQ ID NO: 529986 - RNA, 19 nt, Human
accgccccuggacuacuua

SEQ ID NO: 529987 - RNA, 24 nt, Human
accuugugauccgccugccucggc

SEQ ID NO: 529988 - RNA, 19 nt, Human
acucuuugcuggagacuuc

SEQ ID NO: 529989 - RNA, 19 nt, Human
acugcaucuagcacccaca

SEQ ID NO: 529990 - RNA, 18 nt, Human
agacagaaucucacacug

SEQ ID NO: 529991 - RNA, 23 nt, Human
agaccaacaagcucagcaugaaa

SEQ ID NO: 529992 - RNA, 18 nt, Human
agcaggugaggaaaaggg

SEQ ID NO: 529993 - RNA, 22 nt, Human
agccaccgccccuggacuacuu

SEQ ID NO: 529994 - RNA, 20 nt, Human
agccucgugaggagcuggga

SEQ ID NO: 529995 - RNA, 22 nt, Human
agcucacggccuucacagccuc

SEQ ID NO: 529996 - RNA, 18 nt, Human
agcucugugcuaaagggu

SEQ ID NO: 529997 - RNA, 24 nt, Human
aggcuggagugcaggaucgugauc

SEQ ID NO: 529998 - RNA, 18 nt, Human
aggcuggagugcaguggc

SEQ ID NO: 529999 - RNA, 25 nt, Human
aggcuggagugcaguggugugaucu

SEQ ID NO: 530000 - RNA, 18 nt, Human
agggaagggggcaguggg

SEQ ID NO: 530001 - RNA, 20 nt, Human
aggugccacaucaucuuuac

SEQ ID NO: 530002 - RNA, 22 nt, Human
aguagagaugggguuucaccau

SEQ ID NO: 530003 - RNA, 18 nt, Human
aguagcugggauuacagg

SEQ ID NO: 530004 - RNA, 18 nt, Human
agugcaguggcucacugc

SEQ ID NO: 530005 - RNA, 19 nt, Human
agugcaguggugugaucuc

SEQ ID NO: 530006 - RNA, 21 nt, Human
agugcaguggugugaucucag

SEQ ID NO: 530007 - RNA, 23 nt, Human
agugcaguggugugaucucagcu

SEQ ID NO: 530008 - RNA, 24 nt, Human
agugcaguggugugaucucagcuc

SEQ ID NO: 530009 - RNA, 24 nt, Human
aguggugugaucucagcucacugc

SEQ ID NO: 530010 - RNA, 19 nt, Human
auacuuuguuuuuucugag

SEQ ID NO: 530011 - RNA, 19 nt, Human
auauugcccaggauggucu

SEQ ID NO: 530012 - RNA, 19 nt, Human
augcaagaacauuccugca

SEQ ID NO: 530013 - RNA, 24 nt, Human
augggguuucaccauguaagccag

SEQ ID NO: 530014 - RNA, 19 nt, Human
augggguuuugccauauug

SEQ ID NO: 530015 - RNA, 21 nt, Human
auucuccugccucagccuccc

SEQ ID NO: 530016 - RNA, 18 nt, Human
auucuccugcuucagccu

SEQ ID NO: 530017 - RNA, 24 nt, Human
caaagugcugggauuacaggcgug

SEQ ID NO: 530018 - RNA, 23 nt, Human
caaagugcugggauuauguugcg

SEQ ID NO: 530019 - RNA, 22 nt, Human
caaccacagagaagcacucuau

SEQ ID NO: 530020 - RNA, 21 nt, Human
caaccccacugcuggcuucug

SEQ ID NO: 530021 - RNA, 24 nt, Human
caaccuccaccucccggguuaaag

SEQ ID NO: 530022 - RNA, 18 nt, Human
caagaacauuccugcacc

SEQ ID NO: 530023 - RNA, 27 nt, Human
caagcaauccucccaccucagccuccc

SEQ ID NO: 530024 - RNA, 27 nt, Human
caagcaauccucccaccucagccuccc

SEQ ID NO: 530025 - RNA, 24 nt, Human
caagcaauccucucaccuuggcua

SEQ ID NO: 530026 - RNA, 22 nt, Human
caagcaauucuccugccucagc

SEQ ID NO: 530027 - RNA, 22 nt, Human
caaguagcagagcaaaugcuaa

SEQ ID NO: 530028 - RNA, 18 nt, Human
caccauaaucuaagccca

SEQ ID NO: 530029 - RNA, 24 nt, Human
caccaugccuggcuaguuuuugua

SEQ ID NO: 530030 - RNA, 21 nt, Human
caccauguaagccaggcuggu

SEQ ID NO: 530031 - RNA, 24 nt, Human
caccauguaagccaggcuggucuc

SEQ ID NO: 530032 - RNA, 18 nt, Human
caccauguuggccaggau

SEQ ID NO: 530033 - RNA, 22 nt, Human
caccauguuggccaggaugguc

SEQ ID NO: 530034 - RNA, 24 nt, Human
caccauguuggccaggauggucuc

SEQ ID NO: 530035 - RNA, 19 nt, Human
cacccuaacaggguuacag

SEQ ID NO: 530036 - RNA, 24 nt, Human
caccucagccucccaagaagcugg

SEQ ID NO: 530037 - RNA, 24 nt, Human
caccucagccucgugaggagcugg

SEQ ID NO: 530038 - RNA, 21 nt, Human
cacugcaaccuccaccucccg

SEQ ID NO: 530039 - RNA, 23 nt, Human
cacugcaaccuccaccucccggg

SEQ ID NO: 530040 - RNA, 21 nt, Human
cacugcaaccuccgccuccca

SEQ ID NO: 530041 - RNA, 19 nt, Human
cagacucugcagcuuuugg

SEQ ID NO: 530042 - RNA, 20 nt, Human
cagccucuaccucccggguu

SEQ ID NO: 530043 - RNA, 23 nt, Human
cagccucuaccucccggguucaa

SEQ ID NO: 530044 - RNA, 21 nt, Human
cagcgagacccucacugggcc

SEQ ID NO: 530045 - RNA, 23 nt, Human
caggccugacguuuagagaaggu

SEQ ID NO: 530046 - RNA, 24 nt, Human
caggguuucaccauguuggccagg

SEQ ID NO: 530047 - RNA, 19 nt, Human
cagguguccaccaccaugc

SEQ ID NO: 530048 - RNA, 24 nt, Human
cauauugcccaggauggucucgaa

SEQ ID NO: 530049 - RNA, 18 nt, Human
caucaucuuuacuaagaa

SEQ ID NO: 530050 - RNA, 19 nt, Human
cauuagcuggagucuucuu

SEQ ID NO: 530051 - RNA, 22 nt, Human
ccaaagugcugggauuacaggc

SEQ ID NO: 530052 - RNA, 22 nt, Human
ccaaagugcugggauuacaggc

SEQ ID NO: 530053 - RNA, 24 nt, Human
ccaaagugcugggauuacaggcgu

SEQ ID NO: 530054 - RNA, 18 nt, Human
ccaaagugcugggauuau

SEQ ID NO: 530055 - RNA, 19 nt, Human
ccaaagugcugggauuaug

SEQ ID NO: 530056 - RNA, 21 nt, Human
ccaaguagcugggauuacagg

SEQ ID NO: 530057 - RNA, 21 nt, Human
ccaccacgcccagccucauuu

SEQ ID NO: 530058 - RNA, 22 nt, Human
ccagagcucacggccuucaccg

SEQ ID NO: 530059 - RNA, 22 nt, Human
ccaggaucgacuguaacuugag

SEQ ID NO: 530060 - RNA, 20 nt, Human
ccauaaucuaagcccagggc

SEQ ID NO: 530061 - RNA, 24 nt, Human
ccauugcagccucuaccucccggg

SEQ ID NO: 530062 - RNA, 22 nt, Human
cccaaguagcugggauuacagg

SEQ ID NO: 530063 - RNA, 23 nt, Human
cccaaguagcugggauuacaggu

SEQ ID NO: 530064 - RNA, 24 nt, Human
cccaaguagcugggauuacaggug

SEQ ID NO: 530065 - RNA, 22 nt, Human
cccaauuaauuuuuguauuuuu

SEQ ID NO: 530066 - RNA, 24 nt, Human
cccacauuaucuuugaaagcaguu

SEQ ID NO: 530067 - RNA, 22 nt, Human
cccaggcuacagcacagugggg

SEQ ID NO: 530068 - RNA, 23 nt, Human
cccagguucaagcaauucuccug

SEQ ID NO: 530069 - RNA, 23 nt, Human
cccggguuaaagugauucuccug

SEQ ID NO: 530070 - RNA, 20 nt, Human
cccggguucaagcaauccuc

SEQ ID NO: 530071 - RNA, 23 nt, Human
cccuaguagcugggauuacaggu

SEQ ID NO: 530072 - RNA, 22 nt, Human
ccgcccaggcuggagugcagug

SEQ ID NO: 530073 - RNA, 26 nt, Human
ccgccucccagguucaagcaauucuu

SEQ ID NO: 530074 - RNA, 23 nt, Human
ccuaguagcugggauuacaggug

SEQ ID NO: 530075 - RNA, 24 nt, Human
ccuaguagcugggauuacaggugu

SEQ ID NO: 530076 - RNA, 21 nt, Human
ccucacugggccacucuggga

SEQ ID NO: 530077 - RNA, 24 nt, Human
ccucccagguucaagcaauucucc

SEQ ID NO: 530078 - RNA, 24 nt, Human
ccucccggguuaaagugauucucc

SEQ ID NO: 530079 - RNA, 21 nt, Human
ccucccggguucaagcaaucc

SEQ ID NO: 530080 - RNA, 24 nt, Human
ccugcacugcagugaaucugugaa

SEQ ID NO: 530081 - RNA, 24 nt, Human
ccuggccucaagcaauccucucac

SEQ ID NO: 530082 - RNA, 18 nt, Human
ccuggccucaagugaucu

SEQ ID NO: 530083 - RNA, 26 nt, Human
ccuuccaccucagccucgugaggagc

SEQ ID NO: 530084 - RNA, 24 nt, Human
cgcccaggcuggagugcaguggug

SEQ ID NO: 530085 - RNA, 20 nt, Human
cuaguagcugggauuacagg

SEQ ID NO: 530086 - RNA, 22 nt, Human
cuaguagcugggauuacaggug

SEQ ID NO: 530087 - RNA, 25 nt, Human
cucaagcaauccucucaccuuggcu

SEQ ID NO: 530088 - RNA, 24 nt, Human
cucacugcaaccuccaccucccgg

SEQ ID NO: 530089 - RNA, 24 nt, Human
cucacugcaaccuccgccucccag

SEQ ID NO: 530090 - RNA, 21 nt, Human
cucagaacuccuggccucaag

SEQ ID NO: 530091 - RNA, 24 nt, Human
cucagccucccuaguagcugggau

SEQ ID NO: 530092 - RNA, 22 nt, Human
cucccaccucagccucccaaga

SEQ ID NO: 530093 - RNA, 18 nt, Human
cucccggguuaaagugau

SEQ ID NO: 530094 - RNA, 24 nt, Human
cucucucuguugcccaggcuggag

SEQ ID NO: 530095 - RNA, 19 nt, Human
cucucuguugcccaggcug

SEQ ID NO: 530096 - RNA, 19 nt, Human
cucugccgcccaggcugga

SEQ ID NO: 530097 - RNA, 20 nt, Human
cucuguugcccaggcuggag

SEQ ID NO: 530098 - RNA, 18 nt, Human
cugcaaccuccaccuccc

SEQ ID NO: 530099 - RNA, 23 nt, Human
cugcaaccuccaccucccggguu

SEQ ID NO: 530100 - RNA, 23 nt, Human
cugcaaccuccgccucccagguu

SEQ ID NO: 530101 - RNA, 24 nt, Human
cugcaaccuccgccucccagguuc

SEQ ID NO: 530102 - RNA, 19 nt, Human
cugccgcccaggcuggagu

SEQ ID NO: 530103 - RNA, 23 nt, Human
cugccucagccucccuaguagcu

SEQ ID NO: 530104 - RNA, 23 nt, Human
cugccucggccucccaaagugcu

SEQ ID NO: 530105 - RNA, 23 nt, Human
cugcuucagccucccaaguagcu

SEQ ID NO: 530106 - RNA, 24 nt, Human
cuggagccucaaccucuugcgcuc

SEQ ID NO: 530107 - RNA, 24 nt, Human
cuggagugcaguggugugaucuca

SEQ ID NO: 530108 - RNA, 22 nt, Human
cuggccucaagcaauccucuca

SEQ ID NO: 530109 - RNA, 19 nt, Human
cuggggucucagacucugc

SEQ ID NO: 530110 - RNA, 20 nt, Human
cuuagaccaacaagcucagc

SEQ ID NO: 530111 - RNA, 25 nt, Human
cuucagccucccaaguagcugggau

SEQ ID NO: 530112 - RNA, 23 nt, Human
cuugcucugucaucaggcuggag

SEQ ID NO: 530113 - RNA, 20 nt, Human
cuuuggguuuuuugggccau

SEQ ID NO: 530114 - RNA, 22 nt, Human
gaccuugugauccgccugccuc

SEQ ID NO: 530115 - RNA, 24 nt, Human
gaccuugugauccgccugccucgg

SEQ ID NO: 530116 - RNA, 20 nt, Human
gagaugggguuucaccaugu

SEQ ID NO: 530117 - RNA, 24 nt, Human
gagaugggguuucaccauguaagc

SEQ ID NO: 530118 - RNA, 21 nt, Human
gagcaaaugcuaaaccaucac

SEQ ID NO: 530119 - RNA, 19 nt, Human
gaguccaugugaauaaugg

SEQ ID NO: 530120 - RNA, 23 nt, Human
gaguguugggagaagcugaggca

SEQ ID NO: 530121 - RNA, 21 nt, Human
gaguugucauacauaagcaaa

SEQ ID NO: 530122 - RNA, 18 nt, Human
gauuacagaugugagcca

SEQ ID NO: 530123 - RNA, 21 nt, Human
gauuacagaugugagccacca

SEQ ID NO: 530124 - RNA, 18 nt, Human
gauuacaggcgugagcca

SEQ ID NO: 530125 - RNA, 21 nt, Human
gauuacaggcgugagccaccg

SEQ ID NO: 530126 - RNA, 22 nt, Human
gauuacaggcgugagccaccgc

SEQ ID NO: 530127 - RNA, 24 nt, Human
gauuacaggugccucccaccaugc

SEQ ID NO: 530128 - RNA, 19 nt, Human
gauuacagguguccaccac

SEQ ID NO: 530129 - RNA, 21 nt, Human
gauucuccugcuucagccucc

SEQ ID NO: 530130 - RNA, 21 nt, Human
gcaaccuccaccucccggguu

SEQ ID NO: 530131 - RNA, 22 nt, Human
gcaaccuccgccucccagguuc

SEQ ID NO: 530132 - RNA, 24 nt, Human
gcaauccucucaccuuggcuaccu

SEQ ID NO: 530133 - RNA, 20 nt, Human
gcccaauuaauuuuuguauu

SEQ ID NO: 530134 - RNA, 24 nt, Human
gcccaggcuggagugcaggaucgu

SEQ ID NO: 530135 - RNA, 20 nt, Human
gcccaggcuggagugcagug

SEQ ID NO: 530136 - RNA, 23 nt, Human
gcccaggcuggagugcaguggug

SEQ ID NO: 530137 - RNA, 24 nt, Human
gcccaggcuggagugcaguggugu

SEQ ID NO: 530138 - RNA, 21 nt, Human
gcccauugcagccucuaccuc

SEQ ID NO: 530139 - RNA, 19 nt, Human
gcuagucucaaacuccugg

SEQ ID NO: 530140 - RNA, 23 nt, Human
gcuagucucaaacuccuggccuc

SEQ ID NO: 530141 - RNA, 20 nt, Human
gcucugccgcccaggcugga

SEQ ID NO: 530142 - RNA, 25 nt, Human
gcucugccgcccaggcuggagugca

SEQ ID NO: 530143 - RNA, 22 nt, Human
gcuggagugcaguggcucacug

SEQ ID NO: 530144 - RNA, 18 nt, Human
gcuggcuccuugcucucc

SEQ ID NO: 530145 - RNA, 24 nt, Human
gcuggucucagaacuccuggccuc

SEQ ID NO: 530146 - RNA, 23 nt, Human
ggaaagccaacaguauacucaga

SEQ ID NO: 530147 - RNA, 19 nt, Human
ggaagauaaaucauguucu

SEQ ID NO: 530148 - RNA, 21 nt, Human
ggaguccaugugaauaauggu

SEQ ID NO: 530149 - RNA, 20 nt, Human
ggaugcauaccaauucacaa

SEQ ID NO: 530150 - RNA, 22 nt, Human
ggccaggaucugaguauuucca

SEQ ID NO: 530151 - RNA, 24 nt, Human
ggccucaagugaucugccagccuu

SEQ ID NO: 530152 - RNA, 19 nt, Human
ggcuggagugcaguggcuc

SEQ ID NO: 530153 - RNA, 22 nt, Human
ggcuggagugcaguggugugau

SEQ ID NO: 530154 - RNA, 18 nt, Human
gggguuucaccauguaag

SEQ ID NO: 530155 - RNA, 22 nt, Human
gggguuucaccauguaagccag

SEQ ID NO: 530156 - RNA, 22 nt, Human
gggguuuugccauauugcccag

SEQ ID NO: 530157 - RNA, 22 nt, Human
ggguuacagauguaagccacug

SEQ ID NO: 530158 - RNA, 22 nt, Human
ggguuucaccauguuggccagg

SEQ ID NO: 530159 - RNA, 19 nt, Human
ggucaagggucuaaaaccc

SEQ ID NO: 530160 - RNA, 21 nt, Human
ggucucagaacuccuggccuc

SEQ ID NO: 530161 - RNA, 18 nt, Human
gguuacagauguaagcca

SEQ ID NO: 530162 - RNA, 24 nt, Human
gguuucaccauguuggccaggaug

SEQ ID NO: 530163 - RNA, 19 nt, Human
guaaagaugggguuuugcc

SEQ ID NO: 530164 - RNA, 21 nt, Human
guaaagaugggguuuugccau

SEQ ID NO: 530165 - RNA, 24 nt, Human
guaaaucaugugcuuaaugcaagg

SEQ ID NO: 530166 - RNA, 21 nt, Human
guacagacaggguuucaccau

SEQ ID NO: 530167 - RNA, 23 nt, Human
guagagaugggguuucaccaugu

SEQ ID NO: 530168 - RNA, 19 nt, Human
guagagaugggguuuuacc

SEQ ID NO: 530169 - RNA, 18 nt, Human
guagcugggauuacaggu

SEQ ID NO: 530170 - RNA, 18 nt, Human
guagcugggauuacaggu

SEQ ID NO: 530171 - RNA, 24 nt, Human
gucuugcucugucaucaggcugga

SEQ ID NO: 530172 - RNA, 24 nt, Human
gugaagaggcgcgugugcaacccc

SEQ ID NO: 530173 - RNA, 24 nt, Human
gugauucuccugcuucagccuccc

SEQ ID NO: 530174 - RNA, 18 nt, Human
guggucuuuggaacacca

SEQ ID NO: 530175 - RNA, 21 nt, Human
guugcccaggcuagucucaaa

SEQ ID NO: 530176 - RNA, 24 nt, Human
guuuugcucugccgcccaggcugg

SEQ ID NO: 530177 - RNA, 24 nt, Human
guuuuuguauuuuuaguagagaug

SEQ ID NO: 530178 - RNA, 23 nt, Human
uaaaagaaccugcucuccaucau

SEQ ID NO: 530179 - RNA, 20 nt, Human
uaaagaugggguuuugccau

SEQ ID NO: 530180 - RNA, 18 nt, Human
uaacuugggcuuuuccuc

SEQ ID NO: 530181 - RNA, 24 nt, Human
uaauuuuuguauuuuugguacaga

SEQ ID NO: 530182 - RNA, 22 nt, Human
uacagacaggguuucaccaugu

SEQ ID NO: 530183 - RNA, 20 nt, Human
uacagauguaagccacugca

SEQ ID NO: 530184 - RNA, 24 nt, Human
uacagaugugagccaccacgccca

SEQ ID NO: 530185 - RNA, 22 nt, Human
uacaggcgugagccaccgcccc

SEQ ID NO: 530186 - RNA, 23 nt, Human
uacaggcgugagccaccgccccu

SEQ ID NO: 530187 - RNA, 27 nt, Human
uaccaaguugcccaggcuagucucaaa

SEQ ID NO: 530188 - RNA, 27 nt, Human
uaccaaguugcccaggcuagucucaaa

SEQ ID NO: 530189 - RNA, 24 nt, Human
uaccucccggguucaagcaauccu

SEQ ID NO: 530190 - RNA, 18 nt, Human
uacucagaagcaaagcaa

SEQ ID NO: 530191 - RNA, 22 nt, Human
uagagaugggguuucaccaugu

SEQ ID NO: 530192 - RNA, 19 nt, Human
uagcuggagucuucuuucc

SEQ ID NO: 530193 - RNA, 24 nt, Human
uaguagagaugggguuucaccaug

SEQ ID NO: 530194 - RNA, 25 nt, Human
uaguagcugggauuacaggugucca

SEQ ID NO: 530195 - RNA, 24 nt, Human
uaguuuuuguauuuuuaguagaga

SEQ ID NO: 530196 - RNA, 24 nt, Human
uaugucaggauuacuuauggaggu

SEQ ID NO: 530197 - RNA, 22 nt, Human
uauguugcgaaaagcugagugu

SEQ ID NO: 530198 - RNA, 19 nt, Human
ucacacugucacccaggcu

SEQ ID NO: 530199 - RNA, 23 nt, Human
ucacacugucacccaggcuacag

SEQ ID NO: 530200 - RNA, 18 nt, Human
ucacagccuccaccaucc

SEQ ID NO: 530201 - RNA, 19 nt, Human
ucacagccuccaccauccc

SEQ ID NO: 530202 - RNA, 24 nt, Human
ucaccauguuggccaggauggucu

SEQ ID NO: 530203 - RNA, 23 nt, Human
ucacugcaaccuccaccucccgg

SEQ ID NO: 530204 - RNA, 24 nt, Human
ucacugcaaccuccaccucccggg

SEQ ID NO: 530205 - RNA, 25 nt, Human
ucacugcaaccuccaccucccgggu

SEQ ID NO: 530206 - RNA, 27 nt, Human
ucacugcaaccuccaccucccggguua

SEQ ID NO: 530207 - RNA, 19 nt, Human
ucacugcaaccuccgccuc

SEQ ID NO: 530208 - RNA, 23 nt, Human
ucacugcaaccuccgccucccag

SEQ ID NO: 530209 - RNA, 24 nt, Human
ucacugcaaccuccgccucccagg

SEQ ID NO: 530210 - RNA, 27 nt, Human
ucacugcaaccuccgccucccagguuc

SEQ ID NO: 530211 - RNA, 19 nt, Human
ucacuggagccucaaccuc

SEQ ID NO: 530212 - RNA, 18 nt, Human
ucagccucccaaguagcu

SEQ ID NO: 530213 - RNA, 20 nt, Human
ucagccucccaaguagcugg

SEQ ID NO: 530214 - RNA, 23 nt, Human
ucauacauaagcaaauccauaug

SEQ ID NO: 530215 - RNA, 22 nt, Human
uccaccaucccgauggucugcu

SEQ ID NO: 530216 - RNA, 22 nt, Human
uccagggucaagggucuaaaac

SEQ ID NO: 530217 - RNA, 24 nt, Human
ucccaaagugcugggauuacaggc

SEQ ID NO: 530218 - RNA, 23 nt, Human
ucccaagaagcugggaccacagg

SEQ ID NO: 530219 - RNA, 23 nt, Human
ucccaaguagcugggauuacagg

SEQ ID NO: 530220 - RNA, 21 nt, Human
ucccagguucaagcaauucuc

SEQ ID NO: 530221 - RNA, 24 nt, Human
ucccagguucaagcaauucuccug

SEQ ID NO: 530222 - RNA, 24 nt, Human
ucccggguuaaagugauucuccug

SEQ ID NO: 530223 - RNA, 18 nt, Human
ucccggguucaagcaauc

SEQ ID NO: 530224 - RNA, 24 nt, Human
ucccggguucaagcaauccuccca

SEQ ID NO: 530225 - RNA, 24 nt, Human
ucccuaguagcugggauuacaggu

SEQ ID NO: 530226 - RNA, 22 nt, Human
uccuaaauuccguagccgacuc

SEQ ID NO: 530227 - RNA, 27 nt, Human
uccucccaccucagccucccaagaagc

SEQ ID NO: 530228 - RNA, 18 nt, Human
uccuggguucaagcaauc

SEQ ID NO: 530229 - RNA, 18 nt, Human
ucggccucccaaagugcu

SEQ ID NO: 530230 - RNA, 24 nt, Human
ucguugaccuugugauccgccugc

SEQ ID NO: 530231 - RNA, 25 nt, Human
ucucacacugucacccaggcuacag

SEQ ID NO: 530232 - RNA, 26 nt, Human
ucucacacugucacccaggcuacagc

SEQ ID NO: 530233 - RNA, 25 nt, Human
ucuccugccucagccucccuaguag

SEQ ID NO: 530234 - RNA, 19 nt, Human
ucucgaacuccuggguuca

SEQ ID NO: 530235 - RNA, 23 nt, Human
ucucgaacuccuggguucaagca

SEQ ID NO: 530236 - RNA, 23 nt, Human
ucucucucuguugcccaggcugg

SEQ ID NO: 530237 - RNA, 24 nt, Human
ucucucucuguugcccaggcugga

SEQ ID NO: 530238 - RNA, 24 nt, Human
ucucucuguugcccaggcuggagu

SEQ ID NO: 530239 - RNA, 18 nt, Human
ucucuguugcccaggcug

SEQ ID NO: 530240 - RNA, 23 nt, Human
ucucuguugcccaggcuggagug

SEQ ID NO: 530241 - RNA, 25 nt, Human
ucucuguugcccaggcuggagugca

SEQ ID NO: 530242 - RNA, 24 nt, Human
ucugccgcccaggcuggagugcag

SEQ ID NO: 530243 - RNA, 18 nt, Human
ucugucaucaggcuggag

SEQ ID NO: 530244 - RNA, 23 nt, Human
ucugucaucaggcuggagugcag

SEQ ID NO: 530245 - RNA, 23 nt, Human
ucugugaacuuacuacuacggau

SEQ ID NO: 530246 - RNA, 19 nt, Human
ucuguuccuucuuugauuc

SEQ ID NO: 530247 - RNA, 24 nt, Human
ucuguugcccaggcuggagugcag

SEQ ID NO: 530248 - RNA, 25 nt, Human
ucuguugcccaggcuggagugcagg

SEQ ID NO: 530249 - RNA, 21 nt, Human
ucuugcucugucaucaggcug

SEQ ID NO: 530250 - RNA, 22 nt, Human
ucuugcucugucaucaggcugg

SEQ ID NO: 530251 - RNA, 23 nt, Human
ucuugcucugucaucaggcugga

SEQ ID NO: 530252 - RNA, 23 nt, Human
ucuuugcuggagacuucuuuccu

SEQ ID NO: 530253 - RNA, 24 nt, Human
ucuuuuguagagaugggguuuuac

SEQ ID NO: 530254 - RNA, 21 nt, Human
ugaaaggccacguaccuaaaa

SEQ ID NO: 530255 - RNA, 26 nt, Human
ugaacaaccacagagaagcacucuau

SEQ ID NO: 530256 - RNA, 24 nt, Human
ugaauaugauggaguccaugugaa

SEQ ID NO: 530257 - RNA, 18 nt, Human
ugagacugggccagggaa

SEQ ID NO: 530258 - RNA, 21 nt, Human
ugaguauuuccaaaaagcucu

SEQ ID NO: 530259 - RNA, 23 nt, Human
ugaguuaaaagaaccugcucucc

SEQ ID NO: 530260 - RNA, 22 nt, Human
ugcaguggugugaucucagcuc

SEQ ID NO: 530261 - RNA, 27 nt, Human
ugccauauugcccaggauggucucgaa

SEQ ID NO: 530262 - RNA, 24 nt, Human
ugcccaggauggucucgaacuccu

SEQ ID NO: 530263 - RNA, 25 nt, Human
ugcccaggauggucucgaacuccug

SEQ ID NO: 530264 - RNA, 19 nt, Human
ugcccaggcuggagugcag

SEQ ID NO: 530265 - RNA, 21 nt, Human
ugcccaggcuggagugcagga

SEQ ID NO: 530266 - RNA, 24 nt, Human
ugccucagccucccuaguagcugg

SEQ ID NO: 530267 - RNA, 25 nt, Human
ugccuccgguagguaggauucaauu

SEQ ID NO: 530268 - RNA, 21 nt, Human
ugccucggccucccaaagugc

SEQ ID NO: 530269 - RNA, 24 nt, Human
ugccucggccucccaaagugcugg

SEQ ID NO: 530270 - RNA, 24 nt, Human
ugcucugccgcccaggcuggagug

SEQ ID NO: 530271 - RNA, 23 nt, Human
ugcucugucaucaggcuggagug

SEQ ID NO: 530272 - RNA, 23 nt, Human
ugcugaacaaccacagagaagca

SEQ ID NO: 530273 - RNA, 24 nt, Human
ugcugggauuacaggcgugagcca

SEQ ID NO: 530274 - RNA, 24 nt, Human
ugcuucagccucccaaguagcugg

SEQ ID NO: 530275 - RNA, 26 nt, Human
uggaaacguuagcaaucuacucuucc

SEQ ID NO: 530276 - RNA, 22 nt, Human
uggaaagccaacaguauacuca

SEQ ID NO: 530277 - RNA, 19 nt, Human
uggagugcaguggugugau

SEQ ID NO: 530278 - RNA, 24 nt, Human
uggagugcaguggugugaucucag

SEQ ID NO: 530279 - RNA, 19 nt, Human
uggcauguuuuugaaucuc

SEQ ID NO: 530280 - RNA, 21 nt, Human
uggccaggauggucucgaucu

SEQ ID NO: 530281 - RNA, 23 nt, Human
uggccaggauggucucgaucucg

SEQ ID NO: 530282 - RNA, 21 nt, Human
uggccucaagcaauccucuca

SEQ ID NO: 530283 - RNA, 24 nt, Human
uggccucaagcaauccucucaccu

SEQ ID NO: 530284 - RNA, 18 nt, Human
uggccucaagugaucugc

SEQ ID NO: 530285 - RNA, 24 nt, Human
uggccucaagugaucugccagccu

SEQ ID NO: 530286 - RNA, 20 nt, Human
ugggaagcuuuucucacaga

SEQ ID NO: 530287 - RNA, 24 nt, Human
ugggaccacaggcauguuccacca

SEQ ID NO: 530288 - RNA, 19 nt, Human
ugggagaagcugaggcagg

SEQ ID NO: 530289 - RNA, 21 nt, Human
ugggagaagcugaggcagggc

SEQ ID NO: 530290 - RNA, 21 nt, Human
ugggagaagcugaggcagggc

SEQ ID NO: 530291 - RNA, 21 nt, Human
ugggagcacagaugcaugcca

SEQ ID NO: 530292 - RNA, 18 nt, Human
ugggauuacagaugugag

SEQ ID NO: 530293 - RNA, 19 nt, Human
ugggauuacagaugugagc

SEQ ID NO: 530294 - RNA, 22 nt, Human
ugggauuacagaugugagccac

SEQ ID NO: 530295 - RNA, 24 nt, Human
ugggauuacagaugugagccacca

SEQ ID NO: 530296 - RNA, 19 nt, Human
ugggauuacaggcgugagc

SEQ ID NO: 530297 - RNA, 21 nt, Human
ugggauuacaggcgugagcca

SEQ ID NO: 530298 - RNA, 22 nt, Human
ugggauuacaggcgugagccac

SEQ ID NO: 530299 - RNA, 23 nt, Human
ugggauuacaggcgugagccacc

SEQ ID NO: 530300 - RNA, 24 nt, Human
ugggauuacaggcgugagccaccg

SEQ ID NO: 530301 - RNA, 22 nt, Human
ugggauuacaggugccucccac

SEQ ID NO: 530302 - RNA, 24 nt, Human
ugggauuacaggugccucccacca

SEQ ID NO: 530303 - RNA, 25 nt, Human
ugggauuacaggugccucccaccau

SEQ ID NO: 530304 - RNA, 21 nt, Human
ugggauuacagguguccacca

SEQ ID NO: 530305 - RNA, 24 nt, Human
ugggauuacagguguccaccacca

SEQ ID NO: 530306 - RNA, 25 nt, Human
ugggauuacagguguccaccaccau

SEQ ID NO: 530307 - RNA, 19 nt, Human
ugggccauuuuuugggggu

SEQ ID NO: 530308 - RNA, 21 nt, Human
uggggucucagaugcuggcaa

SEQ ID NO: 530309 - RNA, 24 nt, Human
ugggguuucaccauguaagccagg

SEQ ID NO: 530310 - RNA, 24 nt, Human
ugggguuuuaccaaguugcccagg

SEQ ID NO: 530311 - RNA, 24 nt, Human
ugggguuuugccauauugcccagg

SEQ ID NO: 530312 - RNA, 21 nt, Human
uggguucaagcaauccaccca

SEQ ID NO: 530313 - RNA, 23 nt, Human
ugguaaagaugggguuuugccau

SEQ ID NO: 530314 - RNA, 24 nt, Human
ugguacagacaggguuucaccaug

SEQ ID NO: 530315 - RNA, 24 nt, Human
uggugugaucucagcucacugcaa

SEQ ID NO: 530316 - RNA, 21 nt, Human
uguauuuuuaguagagauggg

SEQ ID NO: 530317 - RNA, 22 nt, Human
uguuccaccacacccagcuuau

SEQ ID NO: 530318 - RNA, 23 nt, Human
uuaaagugauucuccugcuucag

SEQ ID NO: 530319 - RNA, 21 nt, Human
uuacagauguaagccacugca

SEQ ID NO: 530320 - RNA, 18 nt, Human
uuaguagagaugggguuu

SEQ ID NO: 530321 - RNA, 22 nt, Human
uuaguagagaugggguuucacc

SEQ ID NO: 530322 - RNA, 24 nt, Human
uuaguagagaugggguuucaccau

SEQ ID NO: 530323 - RNA, 18 nt, Human
uucaagcaauccacccag

SEQ ID NO: 530324 - RNA, 24 nt, Human
uucaagcaauccucccaccucagc

SEQ ID NO: 530325 - RNA, 21 nt, Human
uucaagcaauucuccugccuc

SEQ ID NO: 530326 - RNA, 24 nt, Human
uucaagcaauucuccugccucagc

SEQ ID NO: 530327 - RNA, 21 nt, Human
uucacaaccagugaaaggcca

SEQ ID NO: 530328 - RNA, 18 nt, Human
uucacagccuccaccauc

SEQ ID NO: 530329 - RNA, 18 nt, Human
uuccuguggcauguuuuu

SEQ ID NO: 530330 - RNA, 21 nt, Human
uucucugggcuuuucccuggg

SEQ ID NO: 530331 - RNA, 23 nt, Human
uucuuuccuguggcauguuuuug

SEQ ID NO: 530332 - RNA, 20 nt, Human
uugcagccucuaccucccgg

SEQ ID NO: 530333 - RNA, 24 nt, Human
uugcagccucuaccucccggguuc

SEQ ID NO: 530334 - RNA, 24 nt, Human
uugcccaggcuggagugcaggauc

SEQ ID NO: 530335 - RNA, 22 nt, Human
uugcucugccgcccaggcugga

SEQ ID NO: 530336 - RNA, 20 nt, Human
uugcuggcuccuugcucucc

SEQ ID NO: 530337 - RNA, 24 nt, Human
uuggcuucuucucugggaggacgc

SEQ ID NO: 530338 - RNA, 20 nt, Human
uugggggugugggaagcuuu

SEQ ID NO: 530339 - RNA, 24 nt, Human
uugguaaagaugggguuuugccau

SEQ ID NO: 530340 - RNA, 21 nt, Human
uugguacagacaggguuucac

SEQ ID NO: 530341 - RNA, 24 nt, Human
uugguacagacaggguuucaccau

SEQ ID NO: 530342 - RNA, 18 nt, Human
uugguaccagcuguggga

SEQ ID NO: 530343 - RNA, 24 nt, Human
uuguagagaugggguuuuaccaag

SEQ ID NO: 530344 - RNA, 23 nt, Human
uuguauuuuuaguagagaugggg

SEQ ID NO: 530345 - RNA, 19 nt, Human
uuucaccauguuggccagg

SEQ ID NO: 530346 - RNA, 20 nt, Human
uuucaccauguuggccagga

SEQ ID NO: 530347 - RNA, 22 nt, Human
uuucauuagcuggagucuucuu

SEQ ID NO: 530348 - RNA, 26 nt, Human
uuuggcuucuucucugggaggacggc

SEQ ID NO: 530349 - RNA, 19 nt, Human
uuuggguuuuuugggccau

SEQ ID NO: 530350 - RNA, 23 nt, Human
uuuguagagaugggguuuuacca

SEQ ID NO: 530351 - RNA, 18 nt, Human
uuuucauuagcuggaguc

SEQ ID NO: 530352 - RNA, 24 nt, Human
uuuugcucugccgcccaggcugga

SEQ ID NO: 530353 - RNA, 24 nt, Human
uuuuuaguagagaugggguuucac

SEQ ID NO: 530354 - RNA, 21 nt, Human
uuuuugguaaagaugggguuu

SEQ ID NO: 530355 - RNA, 24 nt, Human
uuuuugguaaagaugggguuuugc

SEQ ID NO: 530356 - RNA, 24 nt, Human
uuuuugguacagacaggguuucac

SEQ ID NO: 530357 - RNA, 20 nt, Human
uuuuuguauuuuuaguagag

SEQ ID NO: 530358 - RNA, 21 nt, Human
uuuuuguauuuuuaguagaga

SEQ ID NO: 530359 - RNA, 20 nt, Human
uuuuuguauuuuugguacag

SEQ ID NO: 530360 - RNA, 22 nt, Human
aaaaaaaaaagaaagaaagaaa

SEQ ID NO: 530361 - RNA, 23 nt, Human
aaaaaaauaaaugaaacacccaa

SEQ ID NO: 530362 - RNA, 26 nt, Human
aaaagggccaaggccagaagcaccac

SEQ ID NO: 530363 - RNA, 20 nt, Human
aaagaaacaaacacucaggg

SEQ ID NO: 530364 - RNA, 22 nt, Human
aaauccccaagccugacacccu

SEQ ID NO: 530365 - RNA, 19 nt, Human
aacauagugagaccccauc

SEQ ID NO: 530366 - RNA, 20 nt, Human
aacauagugagaccccaucu

SEQ ID NO: 530367 - RNA, 21 nt, Human
aacauagugagaccccaucuc

SEQ ID NO: 530368 - RNA, 18 nt, Human
aacgaaggcuacacggga

SEQ ID NO: 530369 - RNA, 26 nt, Human
aagaaacaaacacucaguccaggcgc

SEQ ID NO: 530370 - RNA, 24 nt, Human
aagaagcccagcuuaaaaggaagc

SEQ ID NO: 530371 - RNA, 18 nt, Human
aagcagcuugguacagac

SEQ ID NO: 530372 - RNA, 21 nt, Human
aagcugcggguucagaggugc

SEQ ID NO: 530373 - RNA, 22 nt, Human
aagcugggcugcuguggugguc

SEQ ID NO: 530374 - RNA, 18 nt, Human
aaggaccccaagggaaag

SEQ ID NO: 530375 - RNA, 18 nt, Human
aaucaugccagccuggcc

SEQ ID NO: 530376 - RNA, 18 nt, Human
acacacaccuccuggcca

SEQ ID NO: 530377 - RNA, 20 nt, Human
acagacgaggacacacccca

SEQ ID NO: 530378 - RNA, 21 nt, Human
acaggaacaucauggaggacc

SEQ ID NO: 530379 - RNA, 24 nt, Human
acaggaguuuggggcagcuuaaaa

SEQ ID NO: 530380 - RNA, 20 nt, Human
accacaaauacaagacugca

SEQ ID NO: 530381 - RNA, 26 nt, Human
accacucuucugcaggagcccugcca

SEQ ID NO: 530382 - RNA, 19 nt, Human
accccaggagaugcaucuc

SEQ ID NO: 530383 - RNA, 18 nt, Human
accugaggcucagcuccu

SEQ ID NO: 530384 - RNA, 21 nt, Human
acucaguagagcucuggaucc

SEQ ID NO: 530385 - RNA, 23 nt, Human
acugcugcagcaggguggcuuuu

SEQ ID NO: 530386 - RNA, 18 nt, Human
agacaaguguauaaaccu

SEQ ID NO: 530387 - RNA, 25 nt, Human
agacaaguuagcacagaccggaccc

SEQ ID NO: 530388 - RNA, 21 nt, Human
agacaccugaggcucagcucc

SEQ ID NO: 530389 - RNA, 21 nt, Human
agacccuccucccaggccccc

SEQ ID NO: 530390 - RNA, 18 nt, Human
agacuaguccucccuugg

SEQ ID NO: 530391 - RNA, 23 nt, Human
agagggcuuugccucggaaggca

SEQ ID NO: 530392 - RNA, 22 nt, Human
agccugggcaacauagugagac

SEQ ID NO: 530393 - RNA, 23 nt, Human
agccugggcaacauagugagacc

SEQ ID NO: 530394 - RNA, 24 nt, Human
agccugggcaacauagugagaccc

SEQ ID NO: 530395 - RNA, 18 nt, Human
agcgcacugcugcagcag

SEQ ID NO: 530396 - RNA, 22 nt, Human
agcugguacauggaggcagaug

SEQ ID NO: 530397 - RNA, 22 nt, Human
agcugucuuuggcaagaagucc

SEQ ID NO: 530398 - RNA, 24 nt, Human
aggaggacagcuugaggagggagu

SEQ ID NO: 530399 - RNA, 19 nt, Human
aggcaggaacuguaggaag

SEQ ID NO: 530400 - RNA, 24 nt, Human
aggcgcaguggcucacaccuguaa

SEQ ID NO: 530401 - RNA, 26 nt, Human
aggcgcaguggcucacaccuguaacc

SEQ ID NO: 530402 - RNA, 27 nt, Human
aggcggccaaagcugucggcgggcgcc

SEQ ID NO: 530403 - RNA, 22 nt, Human
agggagcugguuccuguggacc

SEQ ID NO: 530404 - RNA, 22 nt, Human
agggcgugggggaagcguaggg

SEQ ID NO: 530405 - RNA, 23 nt, Human
agggggcuguggaggagggacag

SEQ ID NO: 530406 - RNA, 18 nt, Human
aguuugcuguuuuuggaa

SEQ ID NO: 530407 - RNA, 23 nt, Human
auacaacagcaccaauguggcag

SEQ ID NO: 530408 - RNA, 23 nt, Human
augaagccaucuaugauccucug

SEQ ID NO: 530409 - RNA, 20 nt, Human
augggacucugagcccagga

SEQ ID NO: 530410 - RNA, 23 nt, Human
auguaguagcuguuccggacuug

SEQ ID NO: 530411 - RNA, 22 nt, Human
caaaggccaccaagcaccuccc

SEQ ID NO: 530412 - RNA, 18 nt, Human
caacagcaccaauguggc

SEQ ID NO: 530413 - RNA, 20 nt, Human
caaggaaaaagggaacaaaa

SEQ ID NO: 530414 - RNA, 18 nt, Human
caaggccagaagcaccac

SEQ ID NO: 530415 - RNA, 23 nt, Human
cacaccuguaaccccagcacuuc

SEQ ID NO: 530416 - RNA, 18 nt, Human
cacagccaaggaagaugg

SEQ ID NO: 530417 - RNA, 21 nt, Human
cacaggaaaaauauaagaucc

SEQ ID NO: 530418 - RNA, 19 nt, Human
cagaauucauuuuccacac

SEQ ID NO: 530419 - RNA, 21 nt, Human
cagacaccugaggcucagcuc

SEQ ID NO: 530420 - RNA, 21 nt, Human
cagacagguuggugguuaugg

SEQ ID NO: 530421 - RNA, 24 nt, Human
cagcacuucaggaggccaaggugg

SEQ ID NO: 530422 - RNA, 22 nt, Human
cagcauggggguggcaccgaca

SEQ ID NO: 530423 - RNA, 22 nt, Human
cagcuccugccaggacggccga

SEQ ID NO: 530424 - RNA, 22 nt, Human
caggaacaucauggaggaccaa

SEQ ID NO: 530425 - RNA, 19 nt, Human
caggaguuuggggcagcuu

SEQ ID NO: 530426 - RNA, 22 nt, Human
caggguuaggccuucacacuca

SEQ ID NO: 530427 - RNA, 19 nt, Human
cagguccuacagacccucc

SEQ ID NO: 530428 - RNA, 19 nt, Human
caggucuucacugauguca

SEQ ID NO: 530429 - RNA, 22 nt, Human
cagucaagauacaguguuagaa

SEQ ID NO: 530430 - RNA, 18 nt, Human
caguccaggcgcaguggc

SEQ ID NO: 530431 - RNA, 25 nt, Human
cauagugagaccccaucucuaugaa

SEQ ID NO: 530432 - RNA, 19 nt, Human
caucacucccuuuacuccu

SEQ ID NO: 530433 - RNA, 19 nt, Human
cauuccagaggggguaaga

SEQ ID NO: 530434 - RNA, 19 nt, Human
ccaaggccagaagcaccac

SEQ ID NO: 530435 - RNA, 18 nt, Human
ccacagaagcugggcugc

SEQ ID NO: 530436 - RNA, 21 nt, Human
ccacagcaggccugcagagca

SEQ ID NO: 530437 - RNA, 22 nt, Human
ccaccacucuucugcaggagcc

SEQ ID NO: 530438 - RNA, 20 nt, Human
ccagaagcagcuugguacag

SEQ ID NO: 530439 - RNA, 19 nt, Human
ccagaaggccggaauugcc

SEQ ID NO: 530440 - RNA, 20 nt, Human
ccagagccuccugugagugg

SEQ ID NO: 530441 - RNA, 27 nt, Human
ccagcucaugccucccacagcaggccu

SEQ ID NO: 530442 - RNA, 21 nt, Human
ccaggaugggacugaucaacu

SEQ ID NO: 530443 - RNA, 24 nt, Human
ccaguacaccuggccaucugggac

SEQ ID NO: 530444 - RNA, 21 nt, Human
cccacaucacacuggguaccu

SEQ ID NO: 530445 - RNA, 23 nt, Human
cccauaaaaguuccauuuucuaa

SEQ ID NO: 530446 - RNA, 22 nt, Human
cccauggucacccaguacaccu

SEQ ID NO: 530447 - RNA, 28 nt, Human
ccccaagaaguuuugguugccucccuuu

SEQ ID NO: 530448 - RNA, 20 nt, Human
ccccagcacuucaggaggcc

SEQ ID NO: 530449 - RNA, 22 nt, Human
cccccugcccucacugcucccc

SEQ ID NO: 530450 - RNA, 19 nt, Human
cccucgccugggccuuccc

SEQ ID NO: 530451 - RNA, 18 nt, Human
ccucccaucucccagagc

SEQ ID NO: 530452 - RNA, 22 nt, Human
ccugaggccaggaguuugagaa

SEQ ID NO: 530453 - RNA, 18 nt, Human
ccugcagcccaaauggaa

SEQ ID NO: 530454 - RNA, 21 nt, Human
ccugcaugccuuccccuuccu

SEQ ID NO: 530455 - RNA, 22 nt, Human
ccuggacuuugagcaguggaug

SEQ ID NO: 530456 - RNA, 24 nt, Human
ccugggcaacauagugagacccca

SEQ ID NO: 530457 - RNA, 20 nt, Human
ccuugccuuuggcauuccag

SEQ ID NO: 530458 - RNA, 19 nt, Human
ccuuuaaagaaacaaacac

SEQ ID NO: 530459 - RNA, 24 nt, Human
cucacaccuguaaccccagcacuu

SEQ ID NO: 530460 - RNA, 25 nt, Human
cucacaccuguaaccccagcacuuc

SEQ ID NO: 530461 - RNA, 18 nt, Human
cucagcaucaccgcccuc

SEQ ID NO: 530462 - RNA, 20 nt, Human
cucaggaugggagucgaugc

SEQ ID NO: 530463 - RNA, 19 nt, Human
cuccagacuaguccucccu

SEQ ID NO: 530464 - RNA, 19 nt, Human
cuccccaagaaguuuuggu

SEQ ID NO: 530465 - RNA, 24 nt, Human
cuccccaucagcacacacagccaa

SEQ ID NO: 530466 - RNA, 21 nt, Human
cuccugggcuuaguggcugcc

SEQ ID NO: 530467 - RNA, 20 nt, Human
cucuaucaccucagcaauga

SEQ ID NO: 530468 - RNA, 20 nt, Human
cucuccccacagaagcuggg

SEQ ID NO: 530469 - RNA, 23 nt, Human
cucucuguacuucauauguaaaa

SEQ ID NO: 530470 - RNA, 19 nt, Human
cugcaagugguaaaacugc

SEQ ID NO: 530471 - RNA, 19 nt, Human
cugcaggagcccugccaag

SEQ ID NO: 530472 - RNA, 20 nt, Human
cugcauuuauuuacagccuu

SEQ ID NO: 530473 - RNA, 24 nt, Human
cugcccagucugccuugccaucau

SEQ ID NO: 530474 - RNA, 20 nt, Human
cugggaucccucaggagaug

SEQ ID NO: 530475 - RNA, 21 nt, Human
cuucugugcccccuccugguu

SEQ ID NO: 530476 - RNA, 19 nt, Human
cuugggaacugcccugcuc

SEQ ID NO: 530477 - RNA, 21 nt, Human
cuuguguucuucaggccaaac

SEQ ID NO: 530478 - RNA, 19 nt, Human
cuuuggggagggggcugug

SEQ ID NO: 530479 - RNA, 19 nt, Human
gaaagcuugaacaggaguu

SEQ ID NO: 530480 - RNA, 19 nt, Human
gaacaaggggcucccagcu

SEQ ID NO: 530481 - RNA, 22 nt, Human
gacucugagcccaggauguuau

SEQ ID NO: 530482 - RNA, 18 nt, Human
gagaagaaauccaccacu

SEQ ID NO: 530483 - RNA, 20 nt, Human
gaguuuggggcagcuuaaaa

SEQ ID NO: 530484 - RNA, 24 nt, Human
gaucgccugaggccaggaguuuga

SEQ ID NO: 530485 - RNA, 22 nt, Human
gcaagaaguccuugguccucuc

SEQ ID NO: 530486 - RNA, 21 nt, Human
gcaagugguaaaacugcauuc

SEQ ID NO: 530487 - RNA, 23 nt, Human
gcagacagguuggugguuauggu

SEQ ID NO: 530488 - RNA, 18 nt, Human
gcagcccaaauggaaacc

SEQ ID NO: 530489 - RNA, 21 nt, Human
gcaguaauuuaccugcaugcc

SEQ ID NO: 530490 - RNA, 18 nt, Human
gccaaacuguuuuccauc

SEQ ID NO: 530491 - RNA, 19 nt, Human
gccagcagcagccgcaagg

SEQ ID NO: 530492 - RNA, 18 nt, Human
gccaggucuggcuccugg

SEQ ID NO: 530493 - RNA, 22 nt, Human
gcgaaaucuccucuccccaaga

SEQ ID NO: 530494 - RNA, 19 nt, Human
gcgaagauuuguuuuucuu

SEQ ID NO: 530495 - RNA, 18 nt, Human
gcgcaguggcucacaccu

SEQ ID NO: 530496 - RNA, 23 nt, Human
gcugccucagcuugggcgugcuc

SEQ ID NO: 530497 - RNA, 22 nt, Human
ggaaaccaacucaaaagggcca

SEQ ID NO: 530498 - RNA, 19 nt, Human
ggacacacaccuccuggcc

SEQ ID NO: 530499 - RNA, 20 nt, Human
ggacaugcacugaacugucu

SEQ ID NO: 530500 - RNA, 26 nt, Human
ggcaccgccagacaccugaggcucag

SEQ ID NO: 530501 - RNA, 22 nt, Human
ggcagaugggacuuugggaacu

SEQ ID NO: 530502 - RNA, 26 nt, Human
ggcgccugaggcagacagguuggugg

SEQ ID NO: 530503 - RNA, 22 nt, Human
ggcuguggaggagggacagggc

SEQ ID NO: 530504 - RNA, 26 nt, Human
ggcuguggaggagggacagggcgugg

SEQ ID NO: 530505 - RNA, 22 nt, Human
gggaucccucaggagauguguc

SEQ ID NO: 530506 - RNA, 21 nt, Human
gggauccuucaacuucucucc

SEQ ID NO: 530507 - RNA, 18 nt, Human
gggcaaccaguggacaag

SEQ ID NO: 530508 - RNA, 22 nt, Human
gggggggugggauaaaaaggaa

SEQ ID NO: 530509 - RNA, 19 nt, Human
gggguaggagagaaggcag

SEQ ID NO: 530510 - RNA, 18 nt, Human
ggugguggcagaggggcu

SEQ ID NO: 530511 - RNA, 19 nt, Human
gguugccagaaggccggaa

SEQ ID NO: 530512 - RNA, 23 nt, Human
gugccuuaaauagagagguuuuc

SEQ ID NO: 530513 - RNA, 21 nt, Human
gugguggcagaggggcugagg

SEQ ID NO: 530514 - RNA, 19 nt, Human
gugguuucaggcuuguuau

SEQ ID NO: 530515 - RNA, 22 nt, Human
guguugggugaauccagggcug

SEQ ID NO: 530516 - RNA, 20 nt, Human
uaaaaguuccauuuucuaag

SEQ ID NO: 530517 - RNA, 20 nt, Human
uagacaaguguauaaaccua

SEQ ID NO: 530518 - RNA, 21 nt, Human
uagagcuccccaucagcacac

SEQ ID NO: 530519 - RNA, 20 nt, Human
uagcugucuuuggcaagaag

SEQ ID NO: 530520 - RNA, 18 nt, Human
uaugaaaaaaaaaagaaa

SEQ ID NO: 530521 - RNA, 19 nt, Human
uaugucacuggucuggggg

SEQ ID NO: 530522 - RNA, 20 nt, Human
ucacacuacagaaaaaaaua

SEQ ID NO: 530523 - RNA, 22 nt, Human
ucagcacacacagccaaggaag

SEQ ID NO: 530524 - RNA, 19 nt, Human
ucaguccaggcgcaguggc

SEQ ID NO: 530525 - RNA, 18 nt, Human
ucagugguggcggcugag

SEQ ID NO: 530526 - RNA, 22 nt, Human
ucagugguggcggcugaguggu

SEQ ID NO: 530527 - RNA, 23 nt, Human
ucagugguggcggcugaguggug

SEQ ID NO: 530528 - RNA, 22 nt, Human
ucauugugaucacacuacagaa

SEQ ID NO: 530529 - RNA, 20 nt, Human
uccacacuuaauguaaaugu

SEQ ID NO: 530530 - RNA, 22 nt, Human
uccagacuucaggaaaaugauu

SEQ ID NO: 530531 - RNA, 18 nt, Human
ucccagcauggggguggc

SEQ ID NO: 530532 - RNA, 21 nt, Human
ucccccugcccucacugcucc

SEQ ID NO: 530533 - RNA, 24 nt, Human
uccccgggccaggucuggcuccug

SEQ ID NO: 530534 - RNA, 21 nt, Human
ucccugcuucugagagggcuc

SEQ ID NO: 530535 - RNA, 18 nt, Human
ucccuggagcaagaugaa

SEQ ID NO: 530536 - RNA, 19 nt, Human
uccuacagacccuccuccc

SEQ ID NO: 530537 - RNA, 22 nt, Human
uccuacagacccuccucccagg

SEQ ID NO: 530538 - RNA, 18 nt, Human
ucgccugaggccaggagu

SEQ ID NO: 530539 - RNA, 22 nt, Human
ucuacaaaacacugcccagucu

SEQ ID NO: 530540 - RNA, 22 nt, Human
ucuacgggcacccaccuuggga

SEQ ID NO: 530541 - RNA, 22 nt, Human
ucuccagcucaugccucccaca

SEQ ID NO: 530542 - RNA, 19 nt, Human
ucucccugacgacacaggc

SEQ ID NO: 530543 - RNA, 22 nt, Human
ucuccugugggcaggcuuuggg

SEQ ID NO: 530544 - RNA, 23 nt, Human
ucuccugugggcaggcuuugggu

SEQ ID NO: 530545 - RNA, 18 nt, Human
ucucuaugaaaaaaaaaa

SEQ ID NO: 530546 - RNA, 29 nt, Human
ucugagguugucauaaaaugucgggaccg

SEQ ID NO: 530547 - RNA, 24 nt, Human
ucugcaggagcccugccaaggagc

SEQ ID NO: 530548 - RNA, 21 nt, Human
ucuggcuuugggagaaaggag

SEQ ID NO: 530549 - RNA, 24 nt, Human
ucugguguugggugaauccagggc

SEQ ID NO: 530550 - RNA, 18 nt, Human
ugacacccugcugagagc

SEQ ID NO: 530551 - RNA, 21 nt, Human
ugaccucugagcagacauccc

SEQ ID NO: 530552 - RNA, 23 nt, Human
ugaccucugagcagacaucccuu

SEQ ID NO: 530553 - RNA, 18 nt, Human
ugagagcuugaaagcuca

SEQ ID NO: 530554 - RNA, 23 nt, Human
ugagaggcguaagucccuucugg

SEQ ID NO: 530555 - RNA, 22 nt, Human
ugagugguggagggaagauacu

SEQ ID NO: 530556 - RNA, 23 nt, Human
ugaugugccuuaaauagagaggu

SEQ ID NO: 530557 - RNA, 23 nt, Human
ugcacugaacugucuguaucacu

SEQ ID NO: 530558 - RNA, 19 nt, Human
ugcagcaguguguagaagg

SEQ ID NO: 530559 - RNA, 25 nt, Human
ugcauccuuggcauaaccaucgucu

SEQ ID NO: 530560 - RNA, 22 nt, Human
ugccagccuggccucccagauc

SEQ ID NO: 530561 - RNA, 18 nt, Human
ugccaugccuuugccaug

SEQ ID NO: 530562 - RNA, 21 nt, Human
ugccauggguggccuucuguu

SEQ ID NO: 530563 - RNA, 19 nt, Human
ugcccugcuccuggugggg

SEQ ID NO: 530564 - RNA, 25 nt, Human
ugccuugccaucaucuucugugccc

SEQ ID NO: 530565 - RNA, 22 nt, Human
ugcgggguaggagagaaggcag

SEQ ID NO: 530566 - RNA, 19 nt, Human
uggaagcccagccugcccc

SEQ ID NO: 530567 - RNA, 18 nt, Human
uggaagguuaaaugaaag

SEQ ID NO: 530568 - RNA, 21 nt, Human
uggaucgccugaggccaggag

SEQ ID NO: 530569 - RNA, 23 nt, Human
uggaucgccugaggccaggaguu

SEQ ID NO: 530570 - RNA, 24 nt, Human
uggaucgccugaggccaggaguuu

SEQ ID NO: 530571 - RNA, 22 nt, Human
uggcagugaggcgcauaacacu

SEQ ID NO: 530572 - RNA, 22 nt, Human
uggcauaaccaucgucuccaga

SEQ ID NO: 530573 - RNA, 21 nt, Human
uggcucacaccuguaacccca

SEQ ID NO: 530574 - RNA, 22 nt, Human
uggcucacaccuguaaccccag

SEQ ID NO: 530575 - RNA, 23 nt, Human
uggcucacaccuguaaccccagc

SEQ ID NO: 530576 - RNA, 24 nt, Human
uggcucacaccuguaaccccagca

SEQ ID NO: 530577 - RNA, 23 nt, Human
uggcugcugccucagcuugggcg

SEQ ID NO: 530578 - RNA, 19 nt, Human
uggcuuccccucccaucuc

SEQ ID NO: 530579 - RNA, 18 nt, Human
ugggaacugcccugcucc

SEQ ID NO: 530580 - RNA, 23 nt, Human
ugggaccaccagccagaggggca

SEQ ID NO: 530581 - RNA, 21 nt, Human
ugggagaaaggaggagaugaa

SEQ ID NO: 530582 - RNA, 22 nt, Human
ugggauucugguguugggugaa

SEQ ID NO: 530583 - RNA, 22 nt, Human
ugggcaacauagugagacccca

SEQ ID NO: 530584 - RNA, 19 nt, Human
ugggcugcuguggugguau

SEQ ID NO: 530585 - RNA, 19 nt, Human
uggggcagcuuaaaaaagg

SEQ ID NO: 530586 - RNA, 28 nt, Human
ugggggaagcguagggagcugguuccug

SEQ ID NO: 530587 - RNA, 19 nt, Human
uggguggccuucuguucug

SEQ ID NO: 530588 - RNA, 23 nt, Human
ugguaucaaacagauagagcucc

SEQ ID NO: 530589 - RNA, 18 nt, Human
uggugagugucaaaaggg

SEQ ID NO: 530590 - RNA, 19 nt, Human
uguaacccauaaaaguucc

SEQ ID NO: 530591 - RNA, 19 nt, Human
ugucacuggucugggggaa

SEQ ID NO: 530592 - RNA, 23 nt, Human
uguccuuguguggucacacucuu

SEQ ID NO: 530593 - RNA, 24 nt, Human
ugugaagguuggagaggauaaggu

SEQ ID NO: 530594 - RNA, 20 nt, Human
uguucuggguguugaggaaa

SEQ ID NO: 530595 - RNA, 21 nt, Human
uguucuguggacauggugccc

SEQ ID NO: 530596 - RNA, 22 nt, Human
uuaguuccagacuucaggaaaa

SEQ ID NO: 530597 - RNA, 19 nt, Human
uucaggaggccaaggugga

SEQ ID NO: 530598 - RNA, 18 nt, Human
uuccugaccucugagcag

SEQ ID NO: 530599 - RNA, 23 nt, Human
uuccuggaagcccagccugcccc

SEQ ID NO: 530600 - RNA, 22 nt, Human
uucucuagaggggaagcuguuu

SEQ ID NO: 530601 - RNA, 22 nt, Human
uucugauucuuuguucuguguc

SEQ ID NO: 530602 - RNA, 21 nt, Human
uugaaggcuugcugugcagug

SEQ ID NO: 530603 - RNA, 22 nt, Human
uuggagccuauuacauaggcac

SEQ ID NO: 530604 - RNA, 19 nt, Human
uuguacagguagucuccug

SEQ ID NO: 530605 - RNA, 23 nt, Human
uuguacagguagucuccuguggg

SEQ ID NO: 530606 - RNA, 19 nt, Human
uuuccacacuuaauguaaa

SEQ ID NO: 530607 - RNA, 22 nt, Human
uuuggcaagaaguccuuggucc

SEQ ID NO: 530608 - RNA, 23 nt, Human
uuuggcuuccccucccaucuccc

SEQ ID NO: 530609 - RNA, 24 nt, Human
uuuuuuguuaagcauuuuuccaga

SEQ ID NO: 530610 - RNA, 22 nt, Human
aaaccgacgccaggacauucuc

SEQ ID NO: 530611 - RNA, 19 nt, Human
acaagaaacccagaaaugc

SEQ ID NO: 530612 - RNA, 23 nt, Human
accacauaugcuaaaaaccgacg

SEQ ID NO: 530613 - RNA, 19 nt, Human
accgcaggacuacgucaag

SEQ ID NO: 530614 - RNA, 22 nt, Human
acuacaauuagcugaacuaugg

SEQ ID NO: 530615 - RNA, 27 nt, Human
agaaaucaauaggaaauuagggccggu

SEQ ID NO: 530616 - RNA, 18 nt, Human
agaaugccacuaccguaa

SEQ ID NO: 530617 - RNA, 21 nt, Human
agggcauggucaacagggguu

SEQ ID NO: 530618 - RNA, 22 nt, Human
agguauaacaaggugaggacaa

SEQ ID NO: 530619 - RNA, 19 nt, Human
auaugcuaaaaaccgacgc

SEQ ID NO: 530620 - RNA, 23 nt, Human
cacugaguagccaaccgcggaaa

SEQ ID NO: 530621 - RNA, 27 nt, Human
cccugcggcggucaccgccugccgccu

SEQ ID NO: 530622 - RNA, 18 nt, Human
ccgcaggcccugcggcgg

SEQ ID NO: 530623 - RNA, 20 nt, Human
ccucccgcgggcuggcggac

SEQ ID NO: 530624 - RNA, 23 nt, Human
ccucuguagcuauaaauuuuucc

SEQ ID NO: 530625 - RNA, 18 nt, Human
ccugcugagggaucugcc

SEQ ID NO: 530626 - RNA, 21 nt, Human
ccuguauuuugaaacaaaaaa

SEQ ID NO: 530627 - RNA, 18 nt, Human
cgcgggcuggcggacagc

SEQ ID NO: 530628 - RNA, 25 nt, Human
cggcggucaccgccugccgccuguc

SEQ ID NO: 530629 - RNA, 28 nt, Human
cuauaaauuuuucccuuccugaaaaucu

SEQ ID NO: 530630 - RNA, 22 nt, Human
cuuagggaguauuaaaaaagaa

SEQ ID NO: 530631 - RNA, 21 nt, Human
gaaauguggaauccugccaug

SEQ ID NO: 530632 - RNA, 18 nt, Human
gggcauggucaacagggg

SEQ ID NO: 530633 - RNA, 23 nt, Human
uaaaacuacaauuagcugaacua

SEQ ID NO: 530634 - RNA, 18 nt, Human
uaaauaccacauaugcua

SEQ ID NO: 530635 - RNA, 22 nt, Human
uaaugcauacgcugagagaacc

SEQ ID NO: 530636 - RNA, 24 nt, Human
uaccacauaugcuaaaaaccgacg

SEQ ID NO: 530637 - RNA, 26 nt, Human
uagaaugccacuaccguaaaugcugc

SEQ ID NO: 530638 - RNA, 23 nt, Human
uagcuauaaauuuuucccuuccu

SEQ ID NO: 530639 - RNA, 22 nt, Human
uaucuucagacaucacauucua

SEQ ID NO: 530640 - RNA, 21 nt, Human
ucagaaagguaauaggaaugu

SEQ ID NO: 530641 - RNA, 20 nt, Human
uccacacaagaaacccagaa

SEQ ID NO: 530642 - RNA, 22 nt, Human
uccacacaagaaacccagaaau

SEQ ID NO: 530643 - RNA, 21 nt, Human
uccagcuucuugcagggugag

SEQ ID NO: 530644 - RNA, 20 nt, Human
uccugaaaaucucucuucca

SEQ ID NO: 530645 - RNA, 25 nt, Human
uccugaaaaucucucuuccacaccu

SEQ ID NO: 530646 - RNA, 24 nt, Human
ucuugcagggugaggaucauccac

SEQ ID NO: 530647 - RNA, 25 nt, Human
ugaacauaaagccuuucuucauuuc

SEQ ID NO: 530648 - RNA, 24 nt, Human
ugagaccaagacacugaguagcug

SEQ ID NO: 530649 - RNA, 21 nt, Human
ugaggcaacuugagaccaaga

SEQ ID NO: 530650 - RNA, 20 nt, Human
ugccauggugccacgcaggu

SEQ ID NO: 530651 - RNA, 22 nt, Human
uguauugggaacgccagccgca

SEQ ID NO: 530652 - RNA, 26 nt, Human
uuagggaguauuaaaaaagaaacgau

SEQ ID NO: 530653 - RNA, 24 nt, Human
uucacauauaaguuaugauuuuuc

SEQ ID NO: 530654 - RNA, 23 nt, Human
uucagaguguucaggaucauuuc

SEQ ID NO: 530655 - RNA, 19 nt, Human
uugagaccaagacacugag

SEQ ID NO: 530656 - RNA, 21 nt, Human
uuucaggaaguaccuuuuuua

SEQ ID NO: 530657 - RNA, 18 nt, Human
aaaaacagcuucuuucca

SEQ ID NO: 530658 - RNA, 23 nt, Human
aaaacugacaaaaugccaaaaca

SEQ ID NO: 530659 - RNA, 24 nt, Human
aaaaugauguccaaugcuccuucu

SEQ ID NO: 530660 - RNA, 18 nt, Human
aacagaaaaacauauccc

SEQ ID NO: 530661 - RNA, 23 nt, Human
aagugugugugugagcauguggu

SEQ ID NO: 530662 - RNA, 24 nt, Human
acuccacgagguguccgcuaggag

SEQ ID NO: 530663 - RNA, 21 nt, Human
agaaaacuuuuucuguaaagg

SEQ ID NO: 530664 - RNA, 21 nt, Human
agacagacacuccagaccagg

SEQ ID NO: 530665 - RNA, 27 nt, Human
agaccuaaacagacgacauguaguggu

SEQ ID NO: 530666 - RNA, 23 nt, Human
agagaaagaucuggaguccaagg

SEQ ID NO: 530667 - RNA, 23 nt, Human
agcaaagaaaaauauaacuauaa

SEQ ID NO: 530668 - RNA, 22 nt, Human
agccauaauaaguaaaacauac

SEQ ID NO: 530669 - RNA, 18 nt, Human
aggaaggaagauggagga

SEQ ID NO: 530670 - RNA, 23 nt, Human
aggcaggugggccacauguggcu

SEQ ID NO: 530671 - RNA, 22 nt, Human
aggcaggugggccacauguggg

SEQ ID NO: 530672 - RNA, 24 nt, Human
auagagacagacacuccagaccag

SEQ ID NO: 530673 - RNA, 22 nt, Human
augaagcauugguaccuuacca

SEQ ID NO: 530674 - RNA, 18 nt, Human
caaaaugccaaaacacca

SEQ ID NO: 530675 - RNA, 23 nt, Human
caaaugucuacuugcuguccaca

SEQ ID NO: 530676 - RNA, 19 nt, Human
caacagaaaaacauauccc

SEQ ID NO: 530677 - RNA, 22 nt, Human
caacagaaaaacauaucccuac

SEQ ID NO: 530678 - RNA, 21 nt, Human
caaucuccaacucuucccuua

SEQ ID NO: 530679 - RNA, 18 nt, Human
cacauguggcucacagac

SEQ ID NO: 530680 - RNA, 22 nt, Human
cacugucuuuccuaauauugca

SEQ ID NO: 530681 - RNA, 22 nt, Human
cagacuuaugagcaaagaaaaa

SEQ ID NO: 530682 - RNA, 25 nt, Human
caggcaggugggccacauguggcuc

SEQ ID NO: 530683 - RNA, 22 nt, Human
caguaauuccucaaggccaagc

SEQ ID NO: 530684 - RNA, 20 nt, Human
caugcaguucaacaauaauc

SEQ ID NO: 530685 - RNA, 24 nt, Human
ccaaugcuccuucuucugaccucc

SEQ ID NO: 530686 - RNA, 20 nt, Human
ccucuaacaaugcuuaacuc

SEQ ID NO: 530687 - RNA, 24 nt, Human
ccuucaggacagcuucauuucuaa

SEQ ID NO: 530688 - RNA, 25 nt, Human
cuccucuaacaaugcuuaacucuag

SEQ ID NO: 530689 - RNA, 19 nt, Human
cugcagcaucucauuuucc

SEQ ID NO: 530690 - RNA, 18 nt, Human
cuguccacauguggcaaa

SEQ ID NO: 530691 - RNA, 24 nt, Human
gaacugaaauuauuaagccauaau

SEQ ID NO: 530692 - RNA, 21 nt, Human
gaagauggaggauggagugaa

SEQ ID NO: 530693 - RNA, 18 nt, Human
gaggauggagugagaaag

SEQ ID NO: 530694 - RNA, 18 nt, Human
gccaaucuccaacucuuc

SEQ ID NO: 530695 - RNA, 20 nt, Human
ggacagcuucauuucuaaau

SEQ ID NO: 530696 - RNA, 18 nt, Human
ggaguuccgcccaccgcc

SEQ ID NO: 530697 - RNA, 20 nt, Human
ggcaaaugcacacaccucuc

SEQ ID NO: 530698 - RNA, 22 nt, Human
ggcaauuacuuaacucugccau

SEQ ID NO: 530699 - RNA, 21 nt, Human
gggcaaaugcacacaccucuc

SEQ ID NO: 530700 - RNA, 23 nt, Human
guaaaacauacuuaaaaaaaaac

SEQ ID NO: 530701 - RNA, 19 nt, Human
guucagagaaagaucugga

SEQ ID NO: 530702 - RNA, 20 nt, Human
uaaaacaagacuauauuuac

SEQ ID NO: 530703 - RNA, 20 nt, Human
uaaacagacgacauguagug

SEQ ID NO: 530704 - RNA, 24 nt, Human
uaaacagacgacauguaguggcca

SEQ ID NO: 530705 - RNA, 20 nt, Human
uaacaaugcuuaacucuagu

SEQ ID NO: 530706 - RNA, 25 nt, Human
uaauagagacagacacuccagacca

SEQ ID NO: 530707 - RNA, 20 nt, Human
uaauuaccaugcaguucaac

SEQ ID NO: 530708 - RNA, 26 nt, Human
uacuuccuaucuuuuaucagguuggg

SEQ ID NO: 530709 - RNA, 21 nt, Human
uagagacagacacuccagacc

SEQ ID NO: 530710 - RNA, 20 nt, Human
uauaacuaauuaccaugcag

SEQ ID NO: 530711 - RNA, 18 nt, Human
uauaauagagacagacac

SEQ ID NO: 530712 - RNA, 19 nt, Human
ucagaacucauuuacaauc

SEQ ID NO: 530713 - RNA, 19 nt, Human
uccccaggucauugaacau

SEQ ID NO: 530714 - RNA, 24 nt, Human
uccucuaacaaugcuuaacucuag

SEQ ID NO: 530715 - RNA, 22 nt, Human
uccucugacuucucaguaauuc

SEQ ID NO: 530716 - RNA, 23 nt, Human
ucucuguggcaauuacuuaacuc

SEQ ID NO: 530717 - RNA, 19 nt, Human
ucugaccuccaaggcaggu

SEQ ID NO: 530718 - RNA, 20 nt, Human
ucuggaguccaagggcuagc

SEQ ID NO: 530719 - RNA, 21 nt, Human
ucuuccggccggacuccacga

SEQ ID NO: 530720 - RNA, 21 nt, Human
ucuugaauuuggauagcacuu

SEQ ID NO: 530721 - RNA, 19 nt, Human
ugaaauuauuaagccauaa

SEQ ID NO: 530722 - RNA, 21 nt, Human
ugaaggcaugaguaaaacuaa

SEQ ID NO: 530723 - RNA, 19 nt, Human
ugacaaaaugccaaaacac

SEQ ID NO: 530724 - RNA, 20 nt, Human
ugacaaaaugccaaaacacc

SEQ ID NO: 530725 - RNA, 19 nt, Human
ugacuucucaguaauuccu

SEQ ID NO: 530726 - RNA, 20 nt, Human
ugacuucucaguaauuccuc

SEQ ID NO: 530727 - RNA, 21 nt, Human
ugagcaugugguaguugcagg

SEQ ID NO: 530728 - RNA, 23 nt, Human
ugcaguucaacaauaaucacaaa

SEQ ID NO: 530729 - RNA, 25 nt, Human
uggcugacuucuagcagagcucuau

SEQ ID NO: 530730 - RNA, 21 nt, Human
ugguaguugcaggaagagugu

SEQ ID NO: 530731 - RNA, 21 nt, Human
ugucuacuugcuguccacaug

SEQ ID NO: 530732 - RNA, 21 nt, Human
uuaagaaaaaguucagagaaa

SEQ ID NO: 530733 - RNA, 25 nt, Human
uucaacagaaaaacauaucccuacu

SEQ ID NO: 530734 - RNA, 21 nt, Human
uucaucccaaaugucuacuug

SEQ ID NO: 530735 - RNA, 23 nt, Human
uuccuaucuuuuaucagguuggg

SEQ ID NO: 530736 - RNA, 20 nt, Human
aaaaaacaaagaaaugacuu

SEQ ID NO: 530737 - RNA, 23 nt, Human
aaaaaacaaagaaaugacuuuag

SEQ ID NO: 530738 - RNA, 22 nt, Human
aaagaagaaaugggccaggcgc

SEQ ID NO: 530739 - RNA, 20 nt, Human
aacagagcaagacuccaucu

SEQ ID NO: 530740 - RNA, 20 nt, Human
aauauggugaaaacccaucu

SEQ ID NO: 530741 - RNA, 24 nt, Human
aaucgcuugaacccgggaggugga

SEQ ID NO: 530742 - RNA, 25 nt, Human
acauuaaguaugggucaaaaaaaga

SEQ ID NO: 530743 - RNA, 24 nt, Human
acgccacugcauuccagccugggc

SEQ ID NO: 530744 - RNA, 24 nt, Human
acgccacugcauuccagccugggc

SEQ ID NO: 530745 - RNA, 21 nt, Human
acuccaucucccaaaaaacaa

SEQ ID NO: 530746 - RNA, 24 nt, Human
acugcauuccagccugggcaacag

SEQ ID NO: 530747 - RNA, 24 nt, Human
acugcauuccagccugggcaacag

SEQ ID NO: 530748 - RNA, 18 nt, Human
agccaggcaugguggugc

SEQ ID NO: 530749 - RNA, 23 nt, Human
agccaggcaugguggugcacgcc

SEQ ID NO: 530750 - RNA, 24 nt, Human
agccugggcaacagagcaagacuc

SEQ ID NO: 530751 - RNA, 24 nt, Human
aggcaggagaaucgcuugaacccg

SEQ ID NO: 530752 - RNA, 19 nt, Human
aggcagguguaucacaagg

SEQ ID NO: 530753 - RNA, 24 nt, Human
aggcagguguaucacaaggucagg

SEQ ID NO: 530754 - RNA, 21 nt, Human
aggcaugguggugcacgccug

SEQ ID NO: 530755 - RNA, 24 nt, Human
aggcaugguggugcacgccuguaa

SEQ ID NO: 530756 - RNA, 24 nt, Human
aggcgcgguggcucaucccuuugg

SEQ ID NO: 530757 - RNA, 20 nt, Human
aggcugaggcaggagaaucg

SEQ ID NO: 530758 - RNA, 24 nt, Human
aggcugaggcaggagaaucgcuug

SEQ ID NO: 530759 - RNA, 24 nt, Human
agguggagguugcagugagccgag

SEQ ID NO: 530760 - RNA, 24 nt, Human
agguguaucacaaggucaggaguu

SEQ ID NO: 530761 - RNA, 21 nt, Human
aucacaaggucaggaguucga

SEQ ID NO: 530762 - RNA, 24 nt, Human
aucacgccacugcauuccagccug

SEQ ID NO: 530763 - RNA, 18 nt, Human
auggugaaaacccaucuc

SEQ ID NO: 530764 - RNA, 23 nt, Human
caaaaaaagaagaaaugggccag

SEQ ID NO: 530765 - RNA, 22 nt, Human
caaaaaauaccagcaguaaaau

SEQ ID NO: 530766 - RNA, 24 nt, Human
caacagagcaagacuccaucuccc

SEQ ID NO: 530767 - RNA, 25 nt, Human
caacagagcaagacuccaucuccca

SEQ ID NO: 530768 - RNA, 20 nt, Human
cacgccuguaaucccagaua

SEQ ID NO: 530769 - RNA, 19 nt, Human
cacugcauuccagccuggg

SEQ ID NO: 530770 - RNA, 22 nt, Human
cacugcauuccagccugggcaa

SEQ ID NO: 530771 - RNA, 23 nt, Human
cacugcauuccagccugggcaac

SEQ ID NO: 530772 - RNA, 24 nt, Human
cacugcauuccagccugggcaaca

SEQ ID NO: 530773 - RNA, 21 nt, Human
cagagcaagacuccaucuccc

SEQ ID NO: 530774 - RNA, 24 nt, Human
cagauacucaggaggcugaggcag

SEQ ID NO: 530775 - RNA, 24 nt, Human
caggcuaaaaauaaauaauaaaug

SEQ ID NO: 530776 - RNA, 24 nt, Human
caucccuuugggaggcugaggcag

SEQ ID NO: 530777 - RNA, 20 nt, Human
ccacugcauuccagccuggg

SEQ ID NO: 530778 - RNA, 21 nt, Human
ccacugcauuccagccugggc

SEQ ID NO: 530779 - RNA, 23 nt, Human
ccacugcauuccagccugggcaa

SEQ ID NO: 530780 - RNA, 24 nt, Human
ccacugcauuccagccugggcaac

SEQ ID NO: 530781 - RNA, 22 nt, Human
cccaucucuacuaaaaaaaaca

SEQ ID NO: 530782 - RNA, 21 nt, Human
cccgggagguggagguugcag

SEQ ID NO: 530783 - RNA, 24 nt, Human
ccugaccaauauggugaaaaccca

SEQ ID NO: 530784 - RNA, 22 nt, Human
ccugggcaacagagcaagacuc

SEQ ID NO: 530785 - RNA, 24 nt, Human
cgagaccagccugaccaauauggu

SEQ ID NO: 530786 - RNA, 24 nt, Human
cgagaucacgccacugcauuccag

SEQ ID NO: 530787 - RNA, 24 nt, Human
cgccacugcauuccagccugggca

SEQ ID NO: 530788 - RNA, 24 nt, Human
cgccuguaaucccagauacucagg

SEQ ID NO: 530789 - RNA, 29 nt, Human
cgggagguggagguugcagugacaacggu

SEQ ID NO: 530790 - RNA, 24 nt, Human
cgggagguggagguugcagugagc

SEQ ID NO: 530791 - RNA, 22 nt, Human
cuccaucucccaaaaaacaaag

SEQ ID NO: 530792 - RNA, 21 nt, Human
cucuacuaaaaaaaacacaaa

SEQ ID NO: 530793 - RNA, 23 nt, Human
gagaaucgcuugaacccgggagg

SEQ ID NO: 530794 - RNA, 22 nt, Human
gagcaagacuccaucucccaaa

SEQ ID NO: 530795 - RNA, 22 nt, Human
gagguugcagugagccgagauc

SEQ ID NO: 530796 - RNA, 20 nt, Human
gcacucuauauucuucuucu

SEQ ID NO: 530797 - RNA, 20 nt, Human
gcaguaaaaucucuugaaga

SEQ ID NO: 530798 - RNA, 24 nt, Human
gcauuccagccugggcaacagagc

SEQ ID NO: 530799 - RNA, 22 nt, Human
gccacugcauuccagccugggc

SEQ ID NO: 530800 - RNA, 24 nt, Human
gccacugcauuccagccugggcaa

SEQ ID NO: 530801 - RNA, 20 nt, Human
gccgagaucacgccacugca

SEQ ID NO: 530802 - RNA, 18 nt, Human
ggagguugcagugagccg

SEQ ID NO: 530803 - RNA, 20 nt, Human
ggagguugcagugagccgag

SEQ ID NO: 530804 - RNA, 22 nt, Human
ggagguugcagugagccgagau

SEQ ID NO: 530805 - RNA, 23 nt, Human
ggagguugcagugagccgagauc

SEQ ID NO: 530806 - RNA, 24 nt, Human
ggagguugcagugagccgagauca

SEQ ID NO: 530807 - RNA, 21 nt, Human
ggcacucuauauucuucuucu

SEQ ID NO: 530808 - RNA, 21 nt, Human
gguggcucaucccuuugggag

SEQ ID NO: 530809 - RNA, 24 nt, Human
gguggugcacgccuguaaucccag

SEQ ID NO: 530810 - RNA, 19 nt, Human
guugcagugagccgagauc

SEQ ID NO: 530811 - RNA, 25 nt, Human
uacuaaaaaaaacacaaaacuuagc

SEQ ID NO: 530812 - RNA, 18 nt, Human
uagacaaauggcuugaau

SEQ ID NO: 530813 - RNA, 24 nt, Human
uaucacaaggucaggaguucgaga

SEQ ID NO: 530814 - RNA, 21 nt, Human
ucaaaaaaagaagaaaugggc

SEQ ID NO: 530815 - RNA, 23 nt, Human
ucaaaaaaagaagaaaugggcca

SEQ ID NO: 530816 - RNA, 20 nt, Human
ucaaaaaauaccagcaguaa

SEQ ID NO: 530817 - RNA, 18 nt, Human
ucacaaggucaggaguuc

SEQ ID NO: 530818 - RNA, 24 nt, Human
ucacaaggucaggaguucgagacc

SEQ ID NO: 530819 - RNA, 23 nt, Human
ucacgccacugcauuccagccug

SEQ ID NO: 530820 - RNA, 19 nt, Human
ucccaaaaaacaaagaaau

SEQ ID NO: 530821 - RNA, 23 nt, Human
ucccaaaaaacaaagaaaugacu

SEQ ID NO: 530822 - RNA, 24 nt, Human
ucgcuugaacccgggagguggagg

SEQ ID NO: 530823 - RNA, 21 nt, Human
ucucccaaaaaacaaagaaau

SEQ ID NO: 530824 - RNA, 23 nt, Human
ugaaaacccaucucuacuaaaaa

SEQ ID NO: 530825 - RNA, 22 nt, Human
ugaaauuacaaagaggagugca

SEQ ID NO: 530826 - RNA, 23 nt, Human
ugaaugaaauuacaaagaggagu

SEQ ID NO: 530827 - RNA, 22 nt, Human
ugacaagaauaguuucugcaac

SEQ ID NO: 530828 - RNA, 19 nt, Human
ugacuuuagacaaauggcu

SEQ ID NO: 530829 - RNA, 22 nt, Human
ugagccgagaucacgccacugc

SEQ ID NO: 530830 - RNA, 24 nt, Human
ugaggcaggagaaucgcuugaacc

SEQ ID NO: 530831 - RNA, 25 nt, Human
ugaggcaggagaaucgcuugaaccc

SEQ ID NO: 530832 - RNA, 24 nt, Human
ugaggcagguguaucacaagguca

SEQ ID NO: 530833 - RNA, 19 nt, Human
ugggaggcugaggcaggug

SEQ ID NO: 530834 - RNA, 24 nt, Human
ugggaggcugaggcagguguauca

SEQ ID NO: 530835 - RNA, 21 nt, Human
uggugcacgccuguaauccca

SEQ ID NO: 530836 - RNA, 22 nt, Human
uggugcacgccuguaaucccag

SEQ ID NO: 530837 - RNA, 24 nt, Human
ugguggugcacgccuguaauccca

SEQ ID NO: 530838 - RNA, 22 nt, Human
uguaucacaaggucaggaguuc

SEQ ID NO: 530839 - RNA, 24 nt, Human
uguaucacaaggucaggaguucga

SEQ ID NO: 530840 - RNA, 20 nt, Human
uucuauuguaaaguuuccau

SEQ ID NO: 530841 - RNA, 24 nt, Human
uugaacccgggagguggagguugc

SEQ ID NO: 530842 - RNA, 18 nt, Human
uugcagugagccgagauc

SEQ ID NO: 530843 - RNA, 20 nt, Human
uugcagugagccgagaucac

SEQ ID NO: 530844 - RNA, 21 nt, Human
uugcagugagccgagaucacg

SEQ ID NO: 530845 - RNA, 24 nt, Human
aaacaacccaaauccuccuccucg

SEQ ID NO: 530846 - RNA, 26 nt, Human
aaaguaaccccuaacaaaacaaccca

SEQ ID NO: 530847 - RNA, 21 nt, Human
aacaaaaacaaccauaccaac

SEQ ID NO: 530848 - RNA, 21 nt, Human
aacaaaacaacccaaauccuc

SEQ ID NO: 530849 - RNA, 23 nt, Human
aacaaaacaacccaaauccuccu

SEQ ID NO: 530850 - RNA, 22 nt, Human
aaccauaccaacaaaacagggc

SEQ ID NO: 530851 - RNA, 22 nt, Human
aaccccuaacaaaacaacccaa

SEQ ID NO: 530852 - RNA, 22 nt, Human
aagcaggcagcauccugucaga

SEQ ID NO: 530853 - RNA, 24 nt, Human
acaaaaacaaccauaccaacaaaa

SEQ ID NO: 530854 - RNA, 26 nt, Human
agccaagcaggcagcauccugucaga

SEQ ID NO: 530855 - RNA, 22 nt, Human
aggcagcauccugucagaaaca

SEQ ID NO: 530856 - RNA, 23 nt, Human
agguggccuggaggggagaacag

SEQ ID NO: 530857 - RNA, 21 nt, Human
caaaacaacccaaauccuccu

SEQ ID NO: 530858 - RNA, 23 nt, Human
caaaacaacccaaauccuccucc

SEQ ID NO: 530859 - RNA, 19 nt, Human
caaccauaccaacaaaaca

SEQ ID NO: 530860 - RNA, 21 nt, Human
caaccauaccaacaaaacagg

SEQ ID NO: 530861 - RNA, 24 nt, Human
cacaaaugaaauguuccccugaaa

SEQ ID NO: 530862 - RNA, 23 nt, Human
cacuugugggcugggaucccagc

SEQ ID NO: 530863 - RNA, 24 nt, Human
cagagacagguggccuggagggga

SEQ ID NO: 530864 - RNA, 23 nt, Human
cagcauccugucagaaacaacca

SEQ ID NO: 530865 - RNA, 20 nt, Human
cagcccggggcgggcggcaa

SEQ ID NO: 530866 - RNA, 19 nt, Human
cagcuaagaagcugcuuuc

SEQ ID NO: 530867 - RNA, 22 nt, Human
cagcuucucuuccacuucccca

SEQ ID NO: 530868 - RNA, 23 nt, Human
cauuuuacagccauuauccaaca

SEQ ID NO: 530869 - RNA, 23 nt, Human
ccacuuccccacaccguacaugc

SEQ ID NO: 530870 - RNA, 25 nt, Human
ccauaccaacaaaacagggcuuaag

SEQ ID NO: 530871 - RNA, 23 nt, Human
ccccacaccguacaugccucucc

SEQ ID NO: 530872 - RNA, 20 nt, Human
ccccgccagcuucucuucca

SEQ ID NO: 530873 - RNA, 22 nt, Human
ccccgccagcuucucuuccacu

SEQ ID NO: 530874 - RNA, 22 nt, Human
ccguacaugccucucccuuucu

SEQ ID NO: 530875 - RNA, 18 nt, Human
ccugucagaaacaaccag

SEQ ID NO: 530876 - RNA, 21 nt, Human
cugcucucucccaugcagggu

SEQ ID NO: 530877 - RNA, 19 nt, Human
cuggcccacuucagcugca

SEQ ID NO: 530878 - RNA, 18 nt, Human
cuguggauaucucuggcc

SEQ ID NO: 530879 - RNA, 21 nt, Human
cuuguaccagaaaggggaagu

SEQ ID NO: 530880 - RNA, 22 nt, Human
gaaagaagccuucaccauggug

SEQ ID NO: 530881 - RNA, 18 nt, Human
gaacagagcagacauccu

SEQ ID NO: 530882 - RNA, 19 nt, Human
gaacagagcagacauccuu

SEQ ID NO: 530883 - RNA, 28 nt, Human
gaccugcuggcccccuccagggcacuuc

SEQ ID NO: 530884 - RNA, 21 nt, Human
gaggaaaacaaaaacaaccau

SEQ ID NO: 530885 - RNA, 18 nt, Human
gcaguggggaaagaagcc

SEQ ID NO: 530886 - RNA, 18 nt, Human
gccuggcuggugcaaggc

SEQ ID NO: 530887 - RNA, 22 nt, Human
ggaaaacaaaaacaaccauacc

SEQ ID NO: 530888 - RNA, 23 nt, Human
ggagaacagguaggggcacacug

SEQ ID NO: 530889 - RNA, 23 nt, Human
ggagccgggaggcgcgaacagcu

SEQ ID NO: 530890 - RNA, 22 nt, Human
ggaggcgcgaacagcuccagug

SEQ ID NO: 530891 - RNA, 21 nt, Human
ggagggcgcgaggcaaacgag

SEQ ID NO: 530892 - RNA, 21 nt, Human
ggccuggcuggugcaaggcug

SEQ ID NO: 530893 - RNA, 23 nt, Human
gggcuccuccaagcuguggauau

SEQ ID NO: 530894 - RNA, 20 nt, Human
gguagccugguauuuggugc

SEQ ID NO: 530895 - RNA, 22 nt, Human
gguccugcaguggggaaagaag

SEQ ID NO: 530896 - RNA, 22 nt, Human
gguggucuggccuggcuggugc

SEQ ID NO: 530897 - RNA, 25 nt, Human
uaaaaaggaaucugagaaaacccug

SEQ ID NO: 530898 - RNA, 18 nt, Human
uaacaaaacaacccaaau

SEQ ID NO: 530899 - RNA, 20 nt, Human
uaacacaaaugaaauguucc

SEQ ID NO: 530900 - RNA, 20 nt, Human
uaacucagcucaucucauag

SEQ ID NO: 530901 - RNA, 25 nt, Human
uacagagacagguggccuggagggg

SEQ ID NO: 530902 - RNA, 22 nt, Human
uacagccauuauccaacagaca

SEQ ID NO: 530903 - RNA, 21 nt, Human
uccuccucgguccuucucaaa

SEQ ID NO: 530904 - RNA, 18 nt, Human
ucucccccgccagcuucu

SEQ ID NO: 530905 - RNA, 18 nt, Human
ugaccugcuggcccccuc

SEQ ID NO: 530906 - RNA, 19 nt, Human
ugguagcgacuccucugcc

SEQ ID NO: 530907 - RNA, 23 nt, Human
ugguggucuggccuggcuggugc

SEQ ID NO: 530908 - RNA, 23 nt, Human
uuccccugaaaguaaccccuaac

SEQ ID NO: 530909 - RNA, 20 nt, Human
uucucuuccacuuccccaca

SEQ ID NO: 530910 - RNA, 19 nt, Human
uugcggacugacagagcgc

SEQ ID NO: 530911 - RNA, 19 nt, Human
uuuaaagaaugguucuucu

SEQ ID NO: 530912 - RNA, 23 nt, Human
uuuuaaacauuuuacagccauua

SEQ ID NO: 530913 - RNA, 24 nt, Human
aaugaauuccagggaaaaccaccu

SEQ ID NO: 530914 - RNA, 21 nt, Human
agcaaacaauuaaugaauucc

SEQ ID NO: 530915 - RNA, 21 nt, Human
aggaugacaaaaaauauacaa

SEQ ID NO: 530916 - RNA, 24 nt, Human
cucaggaugacaaaaaauauacaa

SEQ ID NO: 530917 - RNA, 21 nt, Human
uacaaugaaauuagaaguauc

SEQ ID NO: 530918 - RNA, 22 nt, Human
uagaaguaucucaggaugacug

SEQ ID NO: 530919 - RNA, 24 nt, Human
uaguaaggcucuuuccacaugucc

SEQ ID NO: 530920 - RNA, 24 nt, Human
aaaaagaaaaaagaaaaguuauga

SEQ ID NO: 530921 - RNA, 20 nt, Human
aaaagacaagcaacagauac

SEQ ID NO: 530922 - RNA, 23 nt, Human
aagcauugucauaguuguaguac

SEQ ID NO: 530923 - RNA, 20 nt, Human
aaguaagcaaaauaguauga

SEQ ID NO: 530924 - RNA, 23 nt, Human
acaaaagacaagcaacagauaca

SEQ ID NO: 530925 - RNA, 18 nt, Human
acaagcaacagauacaga

SEQ ID NO: 530926 - RNA, 20 nt, Human
agaagucaacuuuuuacaca

SEQ ID NO: 530927 - RNA, 21 nt, Human
agcuguaaccaccuaugguca

SEQ ID NO: 530928 - RNA, 21 nt, Human
aggcaggacccgcggaaggcu

SEQ ID NO: 530929 - RNA, 20 nt, Human
aguuuauuuaucaaaaaaug

SEQ ID NO: 530930 - RNA, 22 nt, Human
aguuuauuuaucaaaaaaugug

SEQ ID NO: 530931 - RNA, 19 nt, Human
auuuuuuuuuuuuuugcaa

SEQ ID NO: 530932 - RNA, 24 nt, Human
caaaagacaagcaacagauacaga

SEQ ID NO: 530933 - RNA, 21 nt, Human
caaaggacaggaggaaaagga

SEQ ID NO: 530934 - RNA, 21 nt, Human
cccggcucggcccgguccggc

SEQ ID NO: 530935 - RNA, 22 nt, Human
cccgggcggcccggcucggccc

SEQ ID NO: 530936 - RNA, 19 nt, Human
cccucuuuaaguuggugcc

SEQ ID NO: 530937 - RNA, 22 nt, Human
ccgcagccgcgucacccggagc

SEQ ID NO: 530938 - RNA, 25 nt, Human
ccuauggucauaacacauaaucacu

SEQ ID NO: 530939 - RNA, 24 nt, Human
cuaaauagccauggguuaggaaac

SEQ ID NO: 530940 - RNA, 24 nt, Human
gauaaucuuuguauugaggccuug

SEQ ID NO: 530941 - RNA, 24 nt, Human
uaagacagauguuuaaauagcacu

SEQ ID NO: 530942 - RNA, 25 nt, Human
uaagcaaaauaguaugacuucuuuu

SEQ ID NO: 530943 - RNA, 25 nt, Human
uacagaauuaacgauauacuuuuaa

SEQ ID NO: 530944 - RNA, 24 nt, Human
uauuuuagaaauguaggucaagca

SEQ ID NO: 530945 - RNA, 26 nt, Human
ucacuccuaaacaguucuaauuaaaa

SEQ ID NO: 530946 - RNA, 22 nt, Human
ugagaauaauggcuucaauuug

SEQ ID NO: 530947 - RNA, 20 nt, Human
ugagaccaggaaaaccuggu

SEQ ID NO: 530948 - RNA, 22 nt, Human
uguucuccuaauggaaaaagaa

SEQ ID NO: 530949 - RNA, 20 nt, Human
uuacaaaagacaagcaacag

SEQ ID NO: 530950 - RNA, 24 nt, Human
uuagaacauaaacugacaugaagu

SEQ ID NO: 530951 - RNA, 18 nt, Human
uuaggcccacagagauag

SEQ ID NO: 530952 - RNA, 21 nt, Human
uucuuuggcaaaagauucuaa

SEQ ID NO: 530953 - RNA, 18 nt, Human
uugaggccuugauuucag

SEQ ID NO: 530954 - RNA, 27 nt, Human
uuuaagacagauguuuaaauagcacuc

SEQ ID NO: 530955 - RNA, 23 nt, Human
aaacagaaucacagcauuucugc

SEQ ID NO: 530956 - RNA, 18 nt, Human
aaagcccucaaacucucc

SEQ ID NO: 530957 - RNA, 19 nt, Human
accucuggucaaagauaga

SEQ ID NO: 530958 - RNA, 24 nt, Human
agauguuuaacagagcugagauug

SEQ ID NO: 530959 - RNA, 20 nt, Human
auacuagagcauccugaagc

SEQ ID NO: 530960 - RNA, 27 nt, Human
caaccacugcguacuuucuucucaaau

SEQ ID NO: 530961 - RNA, 21 nt, Human
cagagacucuuccugacguua

SEQ ID NO: 530962 - RNA, 21 nt, Human
cagcaauguucuccuuccucc

SEQ ID NO: 530963 - RNA, 20 nt, Human
cuacagcaauguucuccuuc

SEQ ID NO: 530964 - RNA, 18 nt, Human
gaaaauauuucaagcaga

SEQ ID NO: 530965 - RNA, 23 nt, Human
gacucuuccugacguuaucugua

SEQ ID NO: 530966 - RNA, 18 nt, Human
gagcauuucauugaaaau

SEQ ID NO: 530967 - RNA, 22 nt, Human
guuaucuguaaugcacagcugg

SEQ ID NO: 530968 - RNA, 21 nt, Human
uaacagagcugagauugauca

SEQ ID NO: 530969 - RNA, 20 nt, Human
ucauugaaaauauuucaagc

SEQ ID NO: 530970 - RNA, 23 nt, Human
ucccuuuuucccucaauuaaaau

SEQ ID NO: 530971 - RNA, 18 nt, Human
ucuccuuccuccuuuucu

SEQ ID NO: 530972 - RNA, 24 nt, Human
ucugcgaaagcccucaaacucucc

SEQ ID NO: 530973 - RNA, 21 nt, Human
ucuguaaugcacagcuggaag

SEQ ID NO: 530974 - RNA, 21 nt, Human
ugacacacucacguaaggcac

SEQ ID NO: 530975 - RNA, 21 nt, Human
ugcaagcugcugaaugcagua

SEQ ID NO: 530976 - RNA, 20 nt, Human
uggaagagguguucaaagua

SEQ ID NO: 530977 - RNA, 21 nt, Human
uggaagagguguucaaaguaa

SEQ ID NO: 530978 - RNA, 21 nt, Human
uuaaaacagaaucacagcauu

SEQ ID NO: 530979 - RNA, 22 nt, Human
uucauaaaguuaaaaccucugg

SEQ ID NO: 530980 - RNA, 23 nt, Human
uucauugaaaauauuucaagcag

SEQ ID NO: 530981 - RNA, 24 nt, Human
uucauugaaaauauuucaagcaga

SEQ ID NO: 530982 - RNA, 19 nt, Human
uuugcaagcugcugaaugc

SEQ ID NO: 530983 - RNA, 23 nt, Human
aaaaaagaaggaaagcuccaaaa

SEQ ID NO: 530984 - RNA, 22 nt, Human
aaaaagaaggaaagcuccaaaa

SEQ ID NO: 530985 - RNA, 23 nt, Human
aaaagcacuuaagaguuaccacc

SEQ ID NO: 530986 - RNA, 21 nt, Human
aaagaaggaaagcuccaaaag

SEQ ID NO: 530987 - RNA, 18 nt, Human
aaccccaacaagcagcga

SEQ ID NO: 530988 - RNA, 23 nt, Human
aagaguuaccaccacauuuugcc

SEQ ID NO: 530989 - RNA, 24 nt, Human
aagcauuuucaguugaaaugaaaa

SEQ ID NO: 530990 - RNA, 21 nt, Human
aagcccaaccagccaaccacc

SEQ ID NO: 530991 - RNA, 19 nt, Human
agaaugcaaacagacagcu

SEQ ID NO: 530992 - RNA, 20 nt, Human
agaaugcaaacagacagcua

SEQ ID NO: 530993 - RNA, 20 nt, Human
agagggcgaaaucgugcagu

SEQ ID NO: 530994 - RNA, 21 nt, Human
agcccaaccagccaaccaccu

SEQ ID NO: 530995 - RNA, 23 nt, Human
agccccugccggucagguuuccc

SEQ ID NO: 530996 - RNA, 21 nt, Human
aggcagccucaggaaggucuu

SEQ ID NO: 530997 - RNA, 25 nt, Human
aggcaggggugcucuaugcucauca

SEQ ID NO: 530998 - RNA, 24 nt, Human
agggaagaggugaagcuuucagga

SEQ ID NO: 530999 - RNA, 20 nt, Human
aggggagcugagcagagggc

SEQ ID NO: 531000 - RNA, 24 nt, Human
agggggcagaggggagcugagcag

SEQ ID NO: 531001 - RNA, 24 nt, Human
aguggugguguguuuguacucagc

SEQ ID NO: 531002 - RNA, 24 nt, Human
caaaagcacuuaagaguuaccagu

SEQ ID NO: 531003 - RNA, 18 nt, Human
caagagauaccaaaagca

SEQ ID NO: 531004 - RNA, 19 nt, Human
cagaaugcaaacagacagc

SEQ ID NO: 531005 - RNA, 27 nt, Human
cagaaugcaaacagacagcuauaaacg

SEQ ID NO: 531006 - RNA, 22 nt, Human
cagcaagcuccagacagucuga

SEQ ID NO: 531007 - RNA, 25 nt, Human
cagcuauaaacgaagaaaugcuuaa

SEQ ID NO: 531008 - RNA, 18 nt, Human
caggaaggucuuugggug

SEQ ID NO: 531009 - RNA, 26 nt, Human
cauaaccccuucaccuguaaccccaa

SEQ ID NO: 531010 - RNA, 25 nt, Human
cauacuaguagagucauucaaaaca

SEQ ID NO: 531011 - RNA, 23 nt, Human
ccaagcuuaaaaauuaugaaucc

SEQ ID NO: 531012 - RNA, 19 nt, Human
ccaccacauuuugcccaag

SEQ ID NO: 531013 - RNA, 25 nt, Human
cccauaaccccuucaccuguaaccc

SEQ ID NO: 531014 - RNA, 20 nt, Human
cccaucaugggaacagcagc

SEQ ID NO: 531015 - RNA, 24 nt, Human
ccccggaacuggcgccucacagac

SEQ ID NO: 531016 - RNA, 20 nt, Human
ccgccacgguggcgggaagg

SEQ ID NO: 531017 - RNA, 19 nt, Human
ccuguaaccccaacaagca

SEQ ID NO: 531018 - RNA, 22 nt, Human
cgccucacagacagcgcggggc

SEQ ID NO: 531019 - RNA, 23 nt, Human
cgguggcgggaaggccaagcgcu

SEQ ID NO: 531020 - RNA, 29 nt, Human
cucaagagauaccaaaagcacuuaagagg

SEQ ID NO: 531021 - RNA, 23 nt, Human
cucagagcgaggggaggccggga

SEQ ID NO: 531022 - RNA, 19 nt, Human
cuccagacagucugaguug

SEQ ID NO: 531023 - RNA, 25 nt, Human
cugaggcagccucaggaaggucuuu

SEQ ID NO: 531024 - RNA, 26 nt, Human
cuggggaccccgagccucagagcgag

SEQ ID NO: 531025 - RNA, 22 nt, Human
cuguaaccccaacaagcagcga

SEQ ID NO: 531026 - RNA, 20 nt, Human
cuucaccuguaaccccaacc

SEQ ID NO: 531027 - RNA, 19 nt, Human
gagcagcgccccggaacug

SEQ ID NO: 531028 - RNA, 18 nt, Human
gaggaaggcaggggugcu

SEQ ID NO: 531029 - RNA, 22 nt, Human
gaggccgggagcagcgccccgg

SEQ ID NO: 531030 - RNA, 20 nt, Human
ggaaguuaaagcccaaccag

SEQ ID NO: 531031 - RNA, 23 nt, Human
ggcgggaaggccaagcgcuggcc

SEQ ID NO: 531032 - RNA, 19 nt, Human
ggggagcugagcagagggc

SEQ ID NO: 531033 - RNA, 22 nt, Human
ggggcggccgccacgguggcgg

SEQ ID NO: 531034 - RNA, 18 nt, Human
ggguggcuauucuagagg

SEQ ID NO: 531035 - RNA, 23 nt, Human
ggguggcuauucuagaggugaac

SEQ ID NO: 531036 - RNA, 20 nt, Human
guaaccccaacaagcagcga

SEQ ID NO: 531037 - RNA, 22 nt, Human
guugaaaugaaaaaagaaggaa

SEQ ID NO: 531038 - RNA, 18 nt, Human
uaaccccaacaagcagcg

SEQ ID NO: 531039 - RNA, 20 nt, Human
uaaccccuucaccuguaacc

SEQ ID NO: 531040 - RNA, 21 nt, Human
uaaccccuucaccuguaaccc

SEQ ID NO: 531041 - RNA, 18 nt, Human
ucaagagauaccaaaagc

SEQ ID NO: 531042 - RNA, 22 nt, Human
ucaggaaaugugcccaucaugg

SEQ ID NO: 531043 - RNA, 19 nt, Human
ucagucauucaagcuucuc

SEQ ID NO: 531044 - RNA, 21 nt, Human
ucaguugaaaugaaaaaagaa

SEQ ID NO: 531045 - RNA, 22 nt, Human
ucaguugaaaugaaaaaagaag

SEQ ID NO: 531046 - RNA, 24 nt, Human
ucaguugaaaugaaaaaagaagga

SEQ ID NO: 531047 - RNA, 23 nt, Human
uccaagcuuaaaaauuaugaauc

SEQ ID NO: 531048 - RNA, 21 nt, Human
ucccaggaaguuaaagcccaa

SEQ ID NO: 531049 - RNA, 19 nt, Human
uccugaggaaggcaggggu

SEQ ID NO: 531050 - RNA, 24 nt, Human
ugaaaaaagaaggaaagcuccaaa

SEQ ID NO: 531051 - RNA, 24 nt, Human
ugaaaaugaucccaguguucccaa

SEQ ID NO: 531052 - RNA, 24 nt, Human
ugaaaaugcccuuacaguugagau

SEQ ID NO: 531053 - RNA, 21 nt, Human
ugaggcagccucaggaagguc

SEQ ID NO: 531054 - RNA, 19 nt, Human
ugggaucuggaagucucuc

SEQ ID NO: 531055 - RNA, 18 nt, Human
uggggaccccgagccuca

SEQ ID NO: 531056 - RNA, 19 nt, Human
uggugguguguuuguacuc

SEQ ID NO: 531057 - RNA, 23 nt, Human
uguaaccccaacaagcagcgaaa

SEQ ID NO: 531058 - RNA, 19 nt, Human
uguacucagcaagcuccag

SEQ ID NO: 531059 - RNA, 18 nt, Human
ugugggaucuggaagucu

SEQ ID NO: 531060 - RNA, 23 nt, Human
uuaaagcccaaccagccaaccac

SEQ ID NO: 531061 - RNA, 26 nt, Human
uuaguggugguguguuuguacucagc

SEQ ID NO: 531062 - RNA, 18 nt, Human
uucaaaacagcaaguggu

SEQ ID NO: 531063 - RNA, 23 nt, Human
uucaccuguaaccccaacaagca

SEQ ID NO: 531064 - RNA, 22 nt, Human
uucuucacccauaaccccuuca

SEQ ID NO: 531065 - RNA, 18 nt, Human
aaaagacaacagaaacaa

SEQ ID NO: 531066 - RNA, 19 nt, Human
aaaaucuugcagguuauga

SEQ ID NO: 531067 - RNA, 18 nt, Human
aaacagauccggaacuuu

SEQ ID NO: 531068 - RNA, 20 nt, Human
aacaaauccacagauuacuc

SEQ ID NO: 531069 - RNA, 22 nt, Human
aagaaaauuuagguuucaacug

SEQ ID NO: 531070 - RNA, 18 nt, Human
aagaagcucacagacuca

SEQ ID NO: 531071 - RNA, 25 nt, Human
aagagacuccgcgccccccuaaucc

SEQ ID NO: 531072 - RNA, 20 nt, Human
aagcagacgcagaaucggac

SEQ ID NO: 531073 - RNA, 22 nt, Human
acaaauccuccguucacaaaac

SEQ ID NO: 531074 - RNA, 25 nt, Human
acaacaaccaaaaaaaaaaaaaaaa

SEQ ID NO: 531075 - RNA, 21 nt, Human
acaacagaaacaaauccacag

SEQ ID NO: 531076 - RNA, 26 nt, Human
acaaccaaaaaaaaaaaaaaaauagg

SEQ ID NO: 531077 - RNA, 18 nt, Human
acaaucaccacaacauaa

SEQ ID NO: 531078 - RNA, 20 nt, Human
agacaacagaaacaaaucca

SEQ ID NO: 531079 - RNA, 19 nt, Human
agcacauuucuguaucugg

SEQ ID NO: 531080 - RNA, 26 nt, Human
agccagagaagagaaaaacaaaucuc

SEQ ID NO: 531081 - RNA, 20 nt, Human
auuauacauaaaauuaccau

SEQ ID NO: 531082 - RNA, 25 nt, Human
caaaagcucuugguauauucaguag

SEQ ID NO: 531083 - RNA, 22 nt, Human
caacaaccaaaaaaaaaaaaaa

SEQ ID NO: 531084 - RNA, 28 nt, Human
caacagaaacaaauccacagauuacucu

SEQ ID NO: 531085 - RNA, 22 nt, Human
caaccgggaccuaugcacucaa

SEQ ID NO: 531086 - RNA, 18 nt, Human
cacaaaacaguggcaaaa

SEQ ID NO: 531087 - RNA, 21 nt, Human
cacagauuacuccaccuuuac

SEQ ID NO: 531088 - RNA, 19 nt, Human
caccccauucaccccaaac

SEQ ID NO: 531089 - RNA, 23 nt, Human
caccccauucaccccaaacuuaa

SEQ ID NO: 531090 - RNA, 23 nt, Human
caccuccgccgaccgccuccgac

SEQ ID NO: 531091 - RNA, 19 nt, Human
cacucuccgcuuugcccca

SEQ ID NO: 531092 - RNA, 21 nt, Human
cacuguacauauuuacagaga

SEQ ID NO: 531093 - RNA, 18 nt, Human
cauccaccccauucaccc

SEQ ID NO: 531094 - RNA, 19 nt, Human
ccacagauuacuccaccuu

SEQ ID NO: 531095 - RNA, 19 nt, Human
ccaccccauucaccccaaa

SEQ ID NO: 531096 - RNA, 28 nt, Human
cccaaaaacaauaaaaaguuuaaaaaua

SEQ ID NO: 531097 - RNA, 21 nt, Human
cccaaacuuaagauaaaaaaa

SEQ ID NO: 531098 - RNA, 20 nt, Human
ccccaaacuuaagauaaaaa

SEQ ID NO: 531099 - RNA, 18 nt, Human
ccccagaaggcagggcgg

SEQ ID NO: 531100 - RNA, 19 nt, Human
ccccagaaggcagggcggg

SEQ ID NO: 531101 - RNA, 20 nt, Human
ccgcgccccccuaauccgcc

SEQ ID NO: 531102 - RNA, 23 nt, Human
ccgcgccccccuaauccgccucc

SEQ ID NO: 531103 - RNA, 19 nt, Human
ccuaauccgccuccucagc

SEQ ID NO: 531104 - RNA, 26 nt, Human
cgccgaccgccuccgaccggcgcucc

SEQ ID NO: 531105 - RNA, 18 nt, Human
cgggguagacaccuccgc

SEQ ID NO: 531106 - RNA, 19 nt, Human
cguucaacgccaucaccgg

SEQ ID NO: 531107 - RNA, 23 nt, Human
cuaauuaaucacccagaaagcca

SEQ ID NO: 531108 - RNA, 21 nt, Human
cucauccaccccauucacccc

SEQ ID NO: 531109 - RNA, 23 nt, Human
cuccgcgccccccuaauccgccu

SEQ ID NO: 531110 - RNA, 24 nt, Human
cuccgcgccccccuaauccgccuc

SEQ ID NO: 531111 - RNA, 24 nt, Human
cuuaaaggaaaaaaaaaaggguuc

SEQ ID NO: 531112 - RNA, 18 nt, Human
gaaauagauuuccuuuau

SEQ ID NO: 531113 - RNA, 19 nt, Human
gaagagacuccgcgccccc

SEQ ID NO: 531114 - RNA, 23 nt, Human
gauuacuccaccuuuacccccac

SEQ ID NO: 531115 - RNA, 21 nt, Human
gccgaccgccuccgaccggcg

SEQ ID NO: 531116 - RNA, 22 nt, Human
gcucccggagaacuccagccuc

SEQ ID NO: 531117 - RNA, 18 nt, Human
ggaauaaagucuaugacc

SEQ ID NO: 531118 - RNA, 22 nt, Human
gggguagacaccuccgccgacc

SEQ ID NO: 531119 - RNA, 20 nt, Human
guagcuugaaauagauuucc

SEQ ID NO: 531120 - RNA, 24 nt, Human
gucucauccaccccauucacccca

SEQ ID NO: 531121 - RNA, 21 nt, Human
guuuuaagaaaaaucuugcag

SEQ ID NO: 531122 - RNA, 18 nt, Human
uaacaacaaccaaaaaaa

SEQ ID NO: 531123 - RNA, 31 nt, Human
uaaccauguuugacacucuucuuuuaucccc

SEQ ID NO: 531124 - RNA, 23 nt, Human
uaaccuacuaaauaugucuauua

SEQ ID NO: 531125 - RNA, 19 nt, Human
uaccaauauaugaaauuau

SEQ ID NO: 531126 - RNA, 23 nt, Human
uaccauauaaaguaauauuuaac

SEQ ID NO: 531127 - RNA, 21 nt, Human
uagcuugaaauagauuuccuu

SEQ ID NO: 531128 - RNA, 23 nt, Human
uaggauggaaaugugucacuaaa

SEQ ID NO: 531129 - RNA, 18 nt, Human
uagucccucgcagccuuc

SEQ ID NO: 531130 - RNA, 22 nt, Human
uauuccuucuuuuucauuccug

SEQ ID NO: 531131 - RNA, 18 nt, Human
ucaaacauaaacuuaagg

SEQ ID NO: 531132 - RNA, 20 nt, Human
ucaaguaagcuuuuauagua

SEQ ID NO: 531133 - RNA, 20 nt, Human
ucaaucagucucauccaccc

SEQ ID NO: 531134 - RNA, 20 nt, Human
ucacaaaacaguggcaaaaa

SEQ ID NO: 531135 - RNA, 19 nt, Human
ucauccaccccauucaccc

SEQ ID NO: 531136 - RNA, 19 nt, Human
ucucauagcccgugcacuu

SEQ ID NO: 531137 - RNA, 24 nt, Human
ucuuuccucgcguuacuguggggc

SEQ ID NO: 531138 - RNA, 20 nt, Human
ugaaugugucauuaaauuaa

SEQ ID NO: 531139 - RNA, 21 nt, Human
ugccccagaaggcagggcggg

SEQ ID NO: 531140 - RNA, 19 nt, Human
ugccucaaugaacugccuc

SEQ ID NO: 531141 - RNA, 26 nt, Human
uggggcagaaccgaccacucuccgcu

SEQ ID NO: 531142 - RNA, 22 nt, Human
uguccauucauucauucacuua

SEQ ID NO: 531143 - RNA, 23 nt, Human
uguugcuaucucauagcccgugc

SEQ ID NO: 531144 - RNA, 20 nt, Human
uuaaaagacaacagaaacaa

SEQ ID NO: 531145 - RNA, 20 nt, Human
uuuacagagaaaaaaauaaa

SEQ ID NO: 531146 - RNA, 23 nt, Human
aaagcagauuuaguuaaugcaaa

SEQ ID NO: 531147 - RNA, 21 nt, Human
aagacagagagggaaguucac

SEQ ID NO: 531148 - RNA, 24 nt, Human
aagcagauuuaguuaaugcaaaau

SEQ ID NO: 531149 - RNA, 26 nt, Human
aagccuuuaaucacauagaucagcuu

SEQ ID NO: 531150 - RNA, 22 nt, Human
agcuuauaaaagcagauuuagu

SEQ ID NO: 531151 - RNA, 24 nt, Human
agcuuucaaacaucaucuaaacaa

SEQ ID NO: 531152 - RNA, 18 nt, Human
aguaaucuuuuauaauua

SEQ ID NO: 531153 - RNA, 20 nt, Human
caaaaaggauaaauaaggca

SEQ ID NO: 531154 - RNA, 20 nt, Human
caaacaagacagagagggaa

SEQ ID NO: 531155 - RNA, 22 nt, Human
caaacaagacagagagggaagu

SEQ ID NO: 531156 - RNA, 24 nt, Human
cacuguacuuuuaaaaacgaaaac

SEQ ID NO: 531157 - RNA, 22 nt, Human
cccuuagccucagagaaggacu

SEQ ID NO: 531158 - RNA, 19 nt, Human
cucucaaaugacaaaacau

SEQ ID NO: 531159 - RNA, 20 nt, Human
cugaccuaggggagcugcuc

SEQ ID NO: 531160 - RNA, 22 nt, Human
cuugcugugggagcugagacug

SEQ ID NO: 531161 - RNA, 22 nt, Human
gaaggugagcagggagaggcca

SEQ ID NO: 531162 - RNA, 19 nt, Human
gaccaacaaugaacaugau

SEQ ID NO: 531163 - RNA, 23 nt, Human
gagagggaaguucacugcugggg

SEQ ID NO: 531164 - RNA, 18 nt, Human
gagcugcucagguucggc

SEQ ID NO: 531165 - RNA, 26 nt, Human
gcagggagaggccacaccaggcugga

SEQ ID NO: 531166 - RNA, 19 nt, Human
gcagguccucuucaggaag

SEQ ID NO: 531167 - RNA, 23 nt, Human
gguuugcaaagaagggcaucugu

SEQ ID NO: 531168 - RNA, 25 nt, Human
uaaaaacaaaaaggauaaauaaggc

SEQ ID NO: 531169 - RNA, 24 nt, Human
uaaaaggggguaacagaaauagua

SEQ ID NO: 531170 - RNA, 22 nt, Human
uauagaacaguuuuacucuugg

SEQ ID NO: 531171 - RNA, 19 nt, Human
ucaaaggugagaggaggga

SEQ ID NO: 531172 - RNA, 18 nt, Human
ucaggcucuugagguucu

SEQ ID NO: 531173 - RNA, 23 nt, Human
ucgugggcagaugcugcagggug

SEQ ID NO: 531174 - RNA, 23 nt, Human
ucugcaaguucccuucuccaucu

SEQ ID NO: 531175 - RNA, 26 nt, Human
ugaaaggcuugauaagcuuauaaaag

SEQ ID NO: 531176 - RNA, 25 nt, Human
ugacaaaacaucaaaggugagagga

SEQ ID NO: 531177 - RNA, 19 nt, Human
ugaccuaggggagcugcuc

SEQ ID NO: 531178 - RNA, 23 nt, Human
ugauaagcuuauaaaagcagauu

SEQ ID NO: 531179 - RNA, 18 nt, Human
ugggcagaugcugcaggg

SEQ ID NO: 531180 - RNA, 22 nt, Human
uucaggguugucuucucuggga

SEQ ID NO: 531181 - RNA, 19 nt, Human
uucccuucuccaucugaga

SEQ ID NO: 531182 - RNA, 19 nt, Human
uugaaaggcuugauaagcu

SEQ ID NO: 531183 - RNA, 18 nt, Human
uuuagaauacaugcucuc

SEQ ID NO: 531184 - RNA, 21 nt, Human
aguagcaaagaucaaagucuc

SEQ ID NO: 531185 - RNA, 20 nt, Human
auagauccucuucuuugagc

SEQ ID NO: 531186 - RNA, 25 nt, Human
caaaguaaguuggacuucccaaauc

SEQ ID NO: 531187 - RNA, 26 nt, Human
caaaguaaguuggacuucccaaauca

SEQ ID NO: 531188 - RNA, 20 nt, Human
caaagucuccgaauuuugcc

SEQ ID NO: 531189 - RNA, 24 nt, Human
ccagcaaaccuggaaauaucuccu

SEQ ID NO: 531190 - RNA, 24 nt, Human
ccaguagcaaagaucaaagucucc

SEQ ID NO: 531191 - RNA, 21 nt, Human
cccugcgagucgccgccgccc

SEQ ID NO: 531192 - RNA, 20 nt, Human
ccugcgagucgccgccgccc

SEQ ID NO: 531193 - RNA, 21 nt, Human
ccugcgagucgccgccgcccu

SEQ ID NO: 531194 - RNA, 24 nt, Human
cgccgccgcccugcucugccgccc

SEQ ID NO: 531195 - RNA, 21 nt, Human
cuagaguccuguagcuuuucu

SEQ ID NO: 531196 - RNA, 21 nt, Human
cuggccaaaguaaguuggacu

SEQ ID NO: 531197 - RNA, 18 nt, Human
cuguagcuuuucuguccu

SEQ ID NO: 531198 - RNA, 23 nt, Human
gacaagaaggaaacgguuaugua

SEQ ID NO: 531199 - RNA, 22 nt, Human
gccgcccgcuccgccgccgccg

SEQ ID NO: 531200 - RNA, 22 nt, Human
gcugcugucuggccaaaguaag

SEQ ID NO: 531201 - RNA, 19 nt, Human
uagaguccuguagcuuuuc

SEQ ID NO: 531202 - RNA, 21 nt, Human
uagcaaagaucaaagucuccg

SEQ ID NO: 531203 - RNA, 19 nt, Human
ucagugacaagaaggaaac

SEQ ID NO: 531204 - RNA, 25 nt, Human
ucgccgccgcccugcucugccgccc

SEQ ID NO: 531205 - RNA, 19 nt, Human
ugaaccagcuuagcugcug

SEQ ID NO: 531206 - RNA, 24 nt, Human
uggaaauaucuccugugauucagu

SEQ ID NO: 531207 - RNA, 19 nt, Human
uuaugcucugcuggguuga

SEQ ID NO: 531208 - RNA, 19 nt, Human
uuugccuuuggagaagggg

SEQ ID NO: 531209 - RNA, 18 nt, Human
uuuuuuuuuuuuuuuuug

SEQ ID NO: 531210 - RNA, 21 nt, Human
aaaagaaaauggacccaaagu

SEQ ID NO: 531211 - RNA, 26 nt, Human
aaaagaaaauggacccaaagucagaa

SEQ ID NO: 531212 - RNA, 18 nt, Human
aaaaggaggcaaugaaaa

SEQ ID NO: 531213 - RNA, 27 nt, Human
aaacaaaauagaaaguacccauucacc

SEQ ID NO: 531214 - RNA, 20 nt, Human
aaacaagaguuaagugcuuu

SEQ ID NO: 531215 - RNA, 18 nt, Human
aaacagaaaagaguagug

SEQ ID NO: 531216 - RNA, 21 nt, Human
aaagagcuccccugaaacuuu

SEQ ID NO: 531217 - RNA, 24 nt, Human
aaagcacagccucuugaaccuccu

SEQ ID NO: 531218 - RNA, 19 nt, Human
aacucggucgccaucuugg

SEQ ID NO: 531219 - RNA, 19 nt, Human
acacagcacagacucguac

SEQ ID NO: 531220 - RNA, 22 nt, Human
acagguaucaaagccuugggca

SEQ ID NO: 531221 - RNA, 18 nt, Human
acauguaaacacacaaga

SEQ ID NO: 531222 - RNA, 22 nt, Human
accaacacaacccucuuaucau

SEQ ID NO: 531223 - RNA, 24 nt, Human
agaaaaagugaagaagagaaucca

SEQ ID NO: 531224 - RNA, 21 nt, Human
agaaaauagguucccaguauu

SEQ ID NO: 531225 - RNA, 21 nt, Human
agaaauuaaaagaugagacaa

SEQ ID NO: 531226 - RNA, 22 nt, Human
agaacacaacauggaggaagau

SEQ ID NO: 531227 - RNA, 21 nt, Human
agacuacacagcagagaccca

SEQ ID NO: 531228 - RNA, 21 nt, Human
agagacccaggaaauaggucu

SEQ ID NO: 531229 - RNA, 18 nt, Human
agagggaaaggaaaguag

SEQ ID NO: 531230 - RNA, 19 nt, Human
agcaaagagcuccccugaa

SEQ ID NO: 531231 - RNA, 19 nt, Human
agcugcaagaaauuaaaca

SEQ ID NO: 531232 - RNA, 26 nt, Human
aggcaaugaaaagaaaauggacccaa

SEQ ID NO: 531233 - RNA, 25 nt, Human
agguaucaaagccuugggcaaaacc

SEQ ID NO: 531234 - RNA, 23 nt, Human
auggcagggcagagggaaaggaa

SEQ ID NO: 531235 - RNA, 24 nt, Human
caaagaacacaacauggaggaaga

SEQ ID NO: 531236 - RNA, 23 nt, Human
caaaguagcggcuagaaucuguc

SEQ ID NO: 531237 - RNA, 24 nt, Human
caaagucagaaaaagugaagaaga

SEQ ID NO: 531238 - RNA, 19 nt, Human
caaucaggcuggucuaauu

SEQ ID NO: 531239 - RNA, 25 nt, Human
caaucaggcuggucuaauuuccagu

SEQ ID NO: 531240 - RNA, 21 nt, Human
cacaauucaaacucaacaaac

SEQ ID NO: 531241 - RNA, 28 nt, Human
cacccagcacuggauguucacugagcac

SEQ ID NO: 531242 - RNA, 19 nt, Human
cacuggauguucacugagc

SEQ ID NO: 531243 - RNA, 19 nt, Human
cagagacccaggaaauagg

SEQ ID NO: 531244 - RNA, 18 nt, Human
cagcaaccagauggagcu

SEQ ID NO: 531245 - RNA, 23 nt, Human
cagcaauaccaggaaauuguucu

SEQ ID NO: 531246 - RNA, 18 nt, Human
caggggagugacauaaac

SEQ ID NO: 531247 - RNA, 19 nt, Human
ccaaaacuaugauaagauc

SEQ ID NO: 531248 - RNA, 21 nt, Human
ccaaaacuaugauaagaucca

SEQ ID NO: 531249 - RNA, 21 nt, Human
ccaacucggucgccaucuugg

SEQ ID NO: 531250 - RNA, 23 nt, Human
ccaacuuccuucacaaaugacaa

SEQ ID NO: 531251 - RNA, 25 nt, Human
ccagauacccaggcagcaaggcaau

SEQ ID NO: 531252 - RNA, 23 nt, Human
ccccucaaacagacgcuggccuu

SEQ ID NO: 531253 - RNA, 24 nt, Human
ccccugaaacuuuauccucgaggg

SEQ ID NO: 531254 - RNA, 21 nt, Human
cccucaaggucauuuuuauuc

SEQ ID NO: 531255 - RNA, 23 nt, Human
cggggcggaauccgguagacgcu

SEQ ID NO: 531256 - RNA, 19 nt, Human
cuccccugaaacuuuaucc

SEQ ID NO: 531257 - RNA, 21 nt, Human
cugaaaagaaauguuuaugga

SEQ ID NO: 531258 - RNA, 20 nt, Human
cugaaggagacuacacagca

SEQ ID NO: 531259 - RNA, 22 nt, Human
cugagcacaauaagccugaagg

SEQ ID NO: 531260 - RNA, 20 nt, Human
cugcuauggcucugcaagaa

SEQ ID NO: 531261 - RNA, 21 nt, Human
cuuaaacauuuuccauuuuuc

SEQ ID NO: 531262 - RNA, 18 nt, Human
cuuucuuggcuguacaag

SEQ ID NO: 531263 - RNA, 22 nt, Human
gaaaauggacccaaagucagaa

SEQ ID NO: 531264 - RNA, 18 nt, Human
gaaagagacauguaaaca

SEQ ID NO: 531265 - RNA, 19 nt, Human
gaccaguccaaucaggcug

SEQ ID NO: 531266 - RNA, 26 nt, Human
gcaaugaaaagaaaauggacccaaaa

SEQ ID NO: 531267 - RNA, 23 nt, Human
ggaaaaggaggcaaugaaaagaa

SEQ ID NO: 531268 - RNA, 18 nt, Human
ggaaaguagugggagaac

SEQ ID NO: 531269 - RNA, 22 nt, Human
ggaggugccaccaacacaaccc

SEQ ID NO: 531270 - RNA, 20 nt, Human
ggcagggcagagggaaagga

SEQ ID NO: 531271 - RNA, 24 nt, Human
gugauggagaagcuaugaaaaaga

SEQ ID NO: 531272 - RNA, 19 nt, Human
uaaagaacuacaugaacug

SEQ ID NO: 531273 - RNA, 22 nt, Human
uacacaauucaaacucaacaaa

SEQ ID NO: 531274 - RNA, 24 nt, Human
uacagcauacacuuuauauacaua

SEQ ID NO: 531275 - RNA, 21 nt, Human
uacaugaacugaaaagaaaug

SEQ ID NO: 531276 - RNA, 19 nt, Human
uaccaggaaauuguucuac

SEQ ID NO: 531277 - RNA, 20 nt, Human
uacccaccaguaccauccug

SEQ ID NO: 531278 - RNA, 22 nt, Human
ucaaagccuugggcaaaaccug

SEQ ID NO: 531279 - RNA, 18 nt, Human
ucacagauuggugcccuc

SEQ ID NO: 531280 - RNA, 19 nt, Human
ucagccaaaacuaugauaa

SEQ ID NO: 531281 - RNA, 20 nt, Human
uccaaucaggcuggucuaau

SEQ ID NO: 531282 - RNA, 20 nt, Human
ucccccucaaacagacgcug

SEQ ID NO: 531283 - RNA, 23 nt, Human
uccuuggaaaucucagauuccug

SEQ ID NO: 531284 - RNA, 19 nt, Human
ucucagauuccugcuuuac

SEQ ID NO: 531285 - RNA, 22 nt, Human
ugaaacuuuauccucgaguuug

SEQ ID NO: 531286 - RNA, 22 nt, Human
ugagcaaagagcuccccugaaa

SEQ ID NO: 531287 - RNA, 20 nt, Human
ugauauaggcagucuucccu

SEQ ID NO: 531288 - RNA, 21 nt, Human
ugauuccacagacuuucccuu

SEQ ID NO: 531289 - RNA, 26 nt, Human
ugcaagaaauuaaacacuccuauaga

SEQ ID NO: 531290 - RNA, 25 nt, Human
ugccuggaaaaggaggcaaugaaag

SEQ ID NO: 531291 - RNA, 24 nt, Human
uggaaaaggaggcaaugaaaagaa

SEQ ID NO: 531292 - RNA, 21 nt, Human
uggcuguacaaguaacaacac

SEQ ID NO: 531293 - RNA, 19 nt, Human
uggggaggaaauggguucc

SEQ ID NO: 531294 - RNA, 23 nt, Human
ugggugacagguaucaaagccuu

SEQ ID NO: 531295 - RNA, 22 nt, Human
uuaaagaaauuaaaagaugaga

SEQ ID NO: 531296 - RNA, 24 nt, Human
uucaaacucaacaaacagaaaaga

SEQ ID NO: 531297 - RNA, 20 nt, Human
uuugacuccccugaaauugc

SEQ ID NO: 531298 - RNA, 22 nt, Human
uuugauauaggcagucuucccu

SEQ ID NO: 531299 - RNA, 19 nt, Human
uuuuaagauacccugggug

SEQ ID NO: 531300 - RNA, 27 nt, Human
uuuuuuuuuuucuuuuuucauauuuuu

SEQ ID NO: 531301 - RNA, 21 nt, Human
aaacccgcgcuagccccgcgc

SEQ ID NO: 531302 - RNA, 21 nt, Human
aacccgcgcuagccccgcgcg

SEQ ID NO: 531303 - RNA, 23 nt, Human
aaugugggagagauaaagaggaa

SEQ ID NO: 531304 - RNA, 21 nt, Human
agaggaaggaagggguaggug

SEQ ID NO: 531305 - RNA, 26 nt, Human
agaggaaggaagggguagguggggag

SEQ ID NO: 531306 - RNA, 28 nt, Human
agaggaaggaagggguagguggggaggg

SEQ ID NO: 531307 - RNA, 29 nt, Human
agaggaaggaagggguagguggggagggg

SEQ ID NO: 531308 - RNA, 25 nt, Human
aggaaggaagggguagguggggagg

SEQ ID NO: 531309 - RNA, 26 nt, Human
aggaaggaagggguagguggggaggg

SEQ ID NO: 531310 - RNA, 20 nt, Human
cagcucaguggcagcugcaa

SEQ ID NO: 531311 - RNA, 19 nt, Human
caggcaucaaggagguacu

SEQ ID NO: 531312 - RNA, 23 nt, Human
ccgucgcugaaacccgcgcuagc

SEQ ID NO: 531313 - RNA, 19 nt, Human
ccuugagggcucccgucgc

SEQ ID NO: 531314 - RNA, 22 nt, Human
cggagugggcaagaugugggcc

SEQ ID NO: 531315 - RNA, 24 nt, Human
cugaaacccgcgcuagccccgcgc

SEQ ID NO: 531316 - RNA, 20 nt, Human
gaagguagacguccaggguc

SEQ ID NO: 531317 - RNA, 24 nt, Human
gccuugugccuuucagaagugccg

SEQ ID NO: 531318 - RNA, 20 nt, Human
ggaaggaagggguagguggg

SEQ ID NO: 531319 - RNA, 22 nt, Human
ggagugggcaagaugugggccu

SEQ ID NO: 531320 - RNA, 19 nt, Human
ggcagcugcaaaccccauc

SEQ ID NO: 531321 - RNA, 21 nt, Human
gggagggguucucaaaggagc

SEQ ID NO: 531322 - RNA, 21 nt, Human
ggucgagaagaggugggaucc

SEQ ID NO: 531323 - RNA, 23 nt, Human
uaauuaccaagucuauauuuagc

SEQ ID NO: 531324 - RNA, 19 nt, Human
uaccaagucuauauuuagc

SEQ ID NO: 531325 - RNA, 18 nt, Human
uagcaagacaauguggga

SEQ ID NO: 531326 - RNA, 19 nt, Human
uagcaagacaaugugggag

SEQ ID NO: 531327 - RNA, 23 nt, Human
uccagggucgagaagagguggga

SEQ ID NO: 531328 - RNA, 23 nt, Human
ucugcagcugcgggaaagaggac

SEQ ID NO: 531329 - RNA, 19 nt, Human
ucugcauuggcugcagagc

SEQ ID NO: 531330 - RNA, 21 nt, Human
ugcagcugcgggaaagaggac

SEQ ID NO: 531331 - RNA, 23 nt, Human
uggccaggaguucuuggccuugu

SEQ ID NO: 531332 - RNA, 25 nt, Human
uggccaggaguucuuggccuugugc

SEQ ID NO: 531333 - RNA, 18 nt, Human
ugggagagauaaagagga

SEQ ID NO: 531334 - RNA, 21 nt, Human
ugggagagauaaagaggaagg

SEQ ID NO: 531335 - RNA, 22 nt, Human
uuuaauagucuuccuccucucu

SEQ ID NO: 531336 - RNA, 20 nt, Human
aaaaaagaacauagaaacac

SEQ ID NO: 531337 - RNA, 18 nt, Human
aaaacucccccugcccuc

SEQ ID NO: 531338 - RNA, 18 nt, Human
aaaaggccacaaucugaa

SEQ ID NO: 531339 - RNA, 26 nt, Human
aaaaggccacaaucugaaaacaaaug

SEQ ID NO: 531340 - RNA, 18 nt, Human
aagaacauagaaacacca

SEQ ID NO: 531341 - RNA, 21 nt, Human
aagaagaguuaauacuaaaau

SEQ ID NO: 531342 - RNA, 22 nt, Human
aagcuacaaauuauuuaaaauu

SEQ ID NO: 531343 - RNA, 20 nt, Human
aagucauuaaagugcuucuc

SEQ ID NO: 531344 - RNA, 21 nt, Human
aagugcuucucaacaaauucu

SEQ ID NO: 531345 - RNA, 20 nt, Human
acaaucugaaaacaaauggc

SEQ ID NO: 531346 - RNA, 18 nt, Human
accugcgcugcuguggga

SEQ ID NO: 531347 - RNA, 22 nt, Human
acgcagcuucauggacaugcgg

SEQ ID NO: 531348 - RNA, 26 nt, Human
acugcugggcugcuugucuccuuagg

SEQ ID NO: 531349 - RNA, 22 nt, Human
agaauaaaacucccccugcccu

SEQ ID NO: 531350 - RNA, 20 nt, Human
agacauuggagaggccaggu

SEQ ID NO: 531351 - RNA, 18 nt, Human
aggccacaaucugaaaac

SEQ ID NO: 531352 - RNA, 24 nt, Human
auggacaugcggcuuuugcuaguu

SEQ ID NO: 531353 - RNA, 20 nt, Human
caacaaauucuuuuucuucu

SEQ ID NO: 531354 - RNA, 24 nt, Human
caaucugaaaacaaauggcauuua

SEQ ID NO: 531355 - RNA, 19 nt, Human
cacagccaagaaaugagac

SEQ ID NO: 531356 - RNA, 22 nt, Human
cagccaauaauaaaaggccaca

SEQ ID NO: 531357 - RNA, 26 nt, Human
cagugauaccacuugaaaugcaaaac

SEQ ID NO: 531358 - RNA, 21 nt, Human
caucuucuucaucucuuauug

SEQ ID NO: 531359 - RNA, 18 nt, Human
ccuucagauaaacagaac

SEQ ID NO: 531360 - RNA, 20 nt, Human
cuaaagaccauuuauuuuga

SEQ ID NO: 531361 - RNA, 22 nt, Human
cugugggaguuucacuggguag

SEQ ID NO: 531362 - RNA, 24 nt, Human
cuucauggacaugcggcuuuugcu

SEQ ID NO: 531363 - RNA, 19 nt, Human
gacauuggagaggccaggu

SEQ ID NO: 531364 - RNA, 19 nt, Human
gcacagccaagaaaugaga

SEQ ID NO: 531365 - RNA, 23 nt, Human
gcuugucuccuuaggauuuauug

SEQ ID NO: 531366 - RNA, 19 nt, Human
guagaauaaaacucccccu

SEQ ID NO: 531367 - RNA, 19 nt, Human
uaaaacucccccugcccuc

SEQ ID NO: 531368 - RNA, 21 nt, Human
uaaaaggccacaaucugaaaa

SEQ ID NO: 531369 - RNA, 23 nt, Human
uaaaaggccacaaucugaaaaca

SEQ ID NO: 531370 - RNA, 18 nt, Human
uacuuggaagcuaaacau

SEQ ID NO: 531371 - RNA, 22 nt, Human
uagaauaaaacucccccugccc

SEQ ID NO: 531372 - RNA, 23 nt, Human
uagaaucucuggguaggagccuu

SEQ ID NO: 531373 - RNA, 23 nt, Human
uauaacauggcaucaccugcaca

SEQ ID NO: 531374 - RNA, 18 nt, Human
ucacuggguagaaucucu

SEQ ID NO: 531375 - RNA, 18 nt, Human
ucucuguaagcauucagg

SEQ ID NO: 531376 - RNA, 19 nt, Human
ucucuguaagcauucagga

SEQ ID NO: 531377 - RNA, 23 nt, Human
ucuucuguauguugcuuaaggau

SEQ ID NO: 531378 - RNA, 22 nt, Human
ugaaacaauaaauaacuuaaau

SEQ ID NO: 531379 - RNA, 24 nt, Human
ugaaacaauaaauaacuuaaaucu

SEQ ID NO: 531380 - RNA, 24 nt, Human
ugaaggccugaaaggguuaacccu

SEQ ID NO: 531381 - RNA, 19 nt, Human
ugagaugcuaaagaccauu

SEQ ID NO: 531382 - RNA, 19 nt, Human
ugcacacagguuguggagc

SEQ ID NO: 531383 - RNA, 19 nt, Human
ugcuuugggaagaagaguu

SEQ ID NO: 531384 - RNA, 21 nt, Human
uggauauaacauggcaucacc

SEQ ID NO: 531385 - RNA, 18 nt, Human
uggcugagccagaggaac

SEQ ID NO: 531386 - RNA, 23 nt, Human
uggcugagccagaggaacgacgc

SEQ ID NO: 531387 - RNA, 20 nt, Human
uggguagaaucucuggguag

SEQ ID NO: 531388 - RNA, 21 nt, Human
uguagaauaaaacuccccccu

SEQ ID NO: 531389 - RNA, 28 nt, Human
uguagaauaaaacucccccugcccucaa

SEQ ID NO: 531390 - RNA, 19 nt, Human
uguuauggcagacaugaag

SEQ ID NO: 531391 - RNA, 23 nt, Human
uuaagcuacaaauuauuuaaaau

SEQ ID NO: 531392 - RNA, 22 nt, Human
uuaauacuaaaaugauuucagu

SEQ ID NO: 531393 - RNA, 21 nt, Human
uucaggacuaguaacacccaa

SEQ ID NO: 531394 - RNA, 18 nt, Human
uucuguguauuaacaggu

SEQ ID NO: 531395 - RNA, 22 nt, Human
uugcuguaacuuuacaaaugcu

SEQ ID NO: 531396 - RNA, 22 nt, Human
uugguacaguuucucuaaaucu

SEQ ID NO: 531397 - RNA, 19 nt, Human
aaaaaacuugacagaugca

SEQ ID NO: 531398 - RNA, 25 nt, Human
aaaaauagagguucuaugaaaggaa

SEQ ID NO: 531399 - RNA, 21 nt, Human
aaacaaauagcaccacaauga

SEQ ID NO: 531400 - RNA, 24 nt, Human
aaacucaaguuuagaaaaaaaaaa

SEQ ID NO: 531401 - RNA, 20 nt, Human
aauaucuuuaaacaugcuaa

SEQ ID NO: 531402 - RNA, 19 nt, Human
accuaaaauccugaaaaaa

SEQ ID NO: 531403 - RNA, 23 nt, Human
agacaaaaaauggcacaucagaa

SEQ ID NO: 531404 - RNA, 21 nt, Human
aggggcaagggggggaaucgg

SEQ ID NO: 531405 - RNA, 22 nt, Human
aggggcaagggggggaaucggg

SEQ ID NO: 531406 - RNA, 24 nt, Human
aggugcuaaaggagguaccuuauu

SEQ ID NO: 531407 - RNA, 21 nt, Human
agugcugagauuuggaagagg

SEQ ID NO: 531408 - RNA, 21 nt, Human
auauagauauauuuauaugca

SEQ ID NO: 531409 - RNA, 23 nt, Human
augaaaucaauauuuuccuguga

SEQ ID NO: 531410 - RNA, 25 nt, Human
augcauccauauucuacuaaaaaca

SEQ ID NO: 531411 - RNA, 18 nt, Human
auuaccuaaaauccugaa

SEQ ID NO: 531412 - RNA, 24 nt, Human
auucuacuaaaaacaaacaaaaua

SEQ ID NO: 531413 - RNA, 19 nt, Human
auucuguuagcauauaaaa

SEQ ID NO: 531414 - RNA, 21 nt, Human
caaaauaaucagaccgaugug

SEQ ID NO: 531415 - RNA, 27 nt, Human
caaauuaccuaaaauccugaaaaaagu

SEQ ID NO: 531416 - RNA, 25 nt, Human
caagaaguguaaaaauuuuuaaaaa

SEQ ID NO: 531417 - RNA, 20 nt, Human
caaggcgauuagagcggugg

SEQ ID NO: 531418 - RNA, 23 nt, Human
caaggcgauuagagcgguggcca

SEQ ID NO: 531419 - RNA, 21 nt, Human
caaguuuaaaaauuuggauuu

SEQ ID NO: 531420 - RNA, 20 nt, Human
caccgaaaaacagggcacgg

SEQ ID NO: 531421 - RNA, 19 nt, Human
cagcgcagcaugaacuccc

SEQ ID NO: 531422 - RNA, 22 nt, Human
cagggcacggccaucuuccucu

SEQ ID NO: 531423 - RNA, 23 nt, Human
cauaacaaggacucaaacucaag

SEQ ID NO: 531424 - RNA, 18 nt, Human
cauaauguuacauaguuu

SEQ ID NO: 531425 - RNA, 18 nt, Human
ccacugagcccccgagcc

SEQ ID NO: 531426 - RNA, 19 nt, Human
cccccgagccugggacaaa

SEQ ID NO: 531427 - RNA, 20 nt, Human
cccccgagccugggacaaac

SEQ ID NO: 531428 - RNA, 20 nt, Human
ccgccaggggcaaggggggg

SEQ ID NO: 531429 - RNA, 20 nt, Human
ccuuggaauaaauaagaaaa

SEQ ID NO: 531430 - RNA, 22 nt, Human
cggcacaaggcgauuagagcgg

SEQ ID NO: 531431 - RNA, 21 nt, Human
cuaaccauuaccuuaugauga

SEQ ID NO: 531432 - RNA, 23 nt, Human
cuaggcacgaagggacgcgcgcu

SEQ ID NO: 531433 - RNA, 19 nt, Human
cuagggucucuguauuuuc

SEQ ID NO: 531434 - RNA, 18 nt, Human
cuaugaaaggaagauuag

SEQ ID NO: 531435 - RNA, 23 nt, Human
gaaaauugcauuccuucuaguuc

SEQ ID NO: 531436 - RNA, 18 nt, Human
gaacaaacauucaaauua

SEQ ID NO: 531437 - RNA, 25 nt, Human
gagccuccagcgcagcaugaacucc

SEQ ID NO: 531438 - RNA, 26 nt, Human
gagccugggacaaacgcaucucccgg

SEQ ID NO: 531439 - RNA, 19 nt, Human
ggccaagagccuccagcgc

SEQ ID NO: 531440 - RNA, 23 nt, Human
gguaaaaacaaauagcaccacaa

SEQ ID NO: 531441 - RNA, 20 nt, Human
guaaaaacaaauagcaccac

SEQ ID NO: 531442 - RNA, 20 nt, Human
uaaaaagacaaaaaauggca

SEQ ID NO: 531443 - RNA, 26 nt, Human
uaaaaagacaaaaaauggcacaucag

SEQ ID NO: 531444 - RNA, 20 nt, Human
uaaacaugcuaaccauuacc

SEQ ID NO: 531445 - RNA, 24 nt, Human
uaaaucauauuuucaauaaggguc

SEQ ID NO: 531446 - RNA, 20 nt, Human
uacuuggaccuucaaaccac

SEQ ID NO: 531447 - RNA, 20 nt, Human
uagaaaaaaaaaaaauagag

SEQ ID NO: 531448 - RNA, 22 nt, Human
uagaaaaaaaaaaaauagaggu

SEQ ID NO: 531449 - RNA, 19 nt, Human
uagagcgguggccaagagc

SEQ ID NO: 531450 - RNA, 20 nt, Human
uauugcaacauauaaaugca

SEQ ID NO: 531451 - RNA, 24 nt, Human
ucagaaaacucgcugaaauucuua

SEQ ID NO: 531452 - RNA, 20 nt, Human
uccaggaguguuuuagauau

SEQ ID NO: 531453 - RNA, 18 nt, Human
ucccacugagcccccgag

SEQ ID NO: 531454 - RNA, 19 nt, Human
ucccugcagagugaacgcu

SEQ ID NO: 531455 - RNA, 22 nt, Human
ucccugcagagugaacgcuccu

SEQ ID NO: 531456 - RNA, 20 nt, Human
uccugaaaaaaguuuaagcu

SEQ ID NO: 531457 - RNA, 23 nt, Human
ucucuaaacuccuuucaaauuac

SEQ ID NO: 531458 - RNA, 21 nt, Human
ugaaaggauuaaauauguagg

SEQ ID NO: 531459 - RNA, 19 nt, Human
ugccuuacaccgaaaaaca

SEQ ID NO: 531460 - RNA, 27 nt, Human
uggaauaaauaagaaaaauuuuaagug

SEQ ID NO: 531461 - RNA, 23 nt, Human
uucacuguaucguauuacugaug

SEQ ID NO: 531462 - RNA, 19 nt, Human
uugcauuccuucuaguuca

SEQ ID NO: 531463 - RNA, 20 nt, Human
uuggaagaggaauaucuuua

SEQ ID NO: 531464 - RNA, 24 nt, Human
uuuuuuuuuuuuuuuuucagcuuu

SEQ ID NO: 531465 - RNA, 21 nt, Human
uuuuuuuuuuuuuuuuuucag

SEQ ID NO: 531466 - RNA, 27 nt, Human
uuuuuuuuuuuuuuuuuucagcuuuaa

SEQ ID NO: 531467 - RNA, 24 nt, Human
aaaccccaggcugagugcgguccc

SEQ ID NO: 531468 - RNA, 21 nt, Human
aacccacagucagucuaaaaa

SEQ ID NO: 531469 - RNA, 27 nt, Human
aacuagucauccaccuagccaaagauc

SEQ ID NO: 531470 - RNA, 24 nt, Human
aagcaaaaucagagguagaggcaa

SEQ ID NO: 531471 - RNA, 26 nt, Human
aagcaucaucaaucaaauccaagauc

SEQ ID NO: 531472 - RNA, 24 nt, Human
aagccuuguuccuugcuagaaaug

SEQ ID NO: 531473 - RNA, 25 nt, Human
aagggcuuugagaaaaggcuuugaa

SEQ ID NO: 531474 - RNA, 18 nt, Human
acaaaccaugcuuuaucu

SEQ ID NO: 531475 - RNA, 24 nt, Human
acaagaaaggagccaagcgucagu

SEQ ID NO: 531476 - RNA, 20 nt, Human
agaaaauccauccacaagaa

SEQ ID NO: 531477 - RNA, 24 nt, Human
agcaaagcaaaaucagagguagag

SEQ ID NO: 531478 - RNA, 25 nt, Human
agcaaagcaaaaucagagguagagg

SEQ ID NO: 531479 - RNA, 18 nt, Human
aggcagcuugucuucucg

SEQ ID NO: 531480 - RNA, 23 nt, Human
aggcagcuugucuucucgccaag

SEQ ID NO: 531481 - RNA, 19 nt, Human
aggccgccuccaaacccca

SEQ ID NO: 531482 - RNA, 19 nt, Human
auaaaaucaaagcgggaaa

SEQ ID NO: 531483 - RNA, 18 nt, Human
augaaugucuuuccaaac

SEQ ID NO: 531484 - RNA, 20 nt, Human
auggagguacuguaaggcua

SEQ ID NO: 531485 - RNA, 22 nt, Human
caaagcaaaaucagagguagag

SEQ ID NO: 531486 - RNA, 18 nt, Human
caagauccuuccaucucu

SEQ ID NO: 531487 - RNA, 22 nt, Human
cacaacaucuacaggcuaaaua

SEQ ID NO: 531488 - RNA, 18 nt, Human
caccaccauccgcaccgu

SEQ ID NO: 531489 - RNA, 18 nt, Human
cagcagcacaaaaggaau

SEQ ID NO: 531490 - RNA, 22 nt, Human
ccaagcaucaucaaucaaaucc

SEQ ID NO: 531491 - RNA, 19 nt, Human
ccaggcugagugcgguccc

SEQ ID NO: 531492 - RNA, 18 nt, Human
cccgguacccaccccucc

SEQ ID NO: 531493 - RNA, 19 nt, Human
cccgguacccaccccucca

SEQ ID NO: 531494 - RNA, 22 nt, Human
ccugcguuuccagggacaggga

SEQ ID NO: 531495 - RNA, 24 nt, Human
ccuugcuagaaaugagccucgcag

SEQ ID NO: 531496 - RNA, 20 nt, Human
cggucccgguacccaccccu

SEQ ID NO: 531497 - RNA, 21 nt, Human
cuaagcacagagcauggcacc

SEQ ID NO: 531498 - RNA, 19 nt, Human
gaauaaauauacaugaaug

SEQ ID NO: 531499 - RNA, 22 nt, Human
gacagcaaagcaaaaucagagg

SEQ ID NO: 531500 - RNA, 25 nt, Human
gagaaaaggcuuugaauaaaacuag

SEQ ID NO: 531501 - RNA, 24 nt, Human
ggagaacagagauuaacugucaga

SEQ ID NO: 531502 - RNA, 19 nt, Human
gggcuuugagaaaaggcuu

SEQ ID NO: 531503 - RNA, 20 nt, Human
gucccgaugccugcaaugcu

SEQ ID NO: 531504 - RNA, 23 nt, Human
uaacugucagauaucuuucuaau

SEQ ID NO: 531505 - RNA, 23 nt, Human
uacccaccccuccaggggucuca

SEQ ID NO: 531506 - RNA, 22 nt, Human
uaucacaacaucuacaggcuaa

SEQ ID NO: 531507 - RNA, 23 nt, Human
uauccaaaguuugaaaauaccau

SEQ ID NO: 531508 - RNA, 20 nt, Human
uauucaguguuuucagaguu

SEQ ID NO: 531509 - RNA, 21 nt, Human
ucaaagguuugaauuuggaga

SEQ ID NO: 531510 - RNA, 21 nt, Human
ucagaguuucaacaagggaua

SEQ ID NO: 531511 - RNA, 22 nt, Human
ucagugguauugcgacauccuc

SEQ ID NO: 531512 - RNA, 21 nt, Human
uccgcaccguacgacaggccg

SEQ ID NO: 531513 - RNA, 18 nt, Human
uccuuuuuauuccaguga

SEQ ID NO: 531514 - RNA, 22 nt, Human
ucgcauugcacuuugcuaccac

SEQ ID NO: 531515 - RNA, 24 nt, Human
ucuacaggcuaaauacacuccgaa

SEQ ID NO: 531516 - RNA, 20 nt, Human
ucuguccacuucauuucuug

SEQ ID NO: 531517 - RNA, 22 nt, Human
ugacagcaaagcaaaaucagag

SEQ ID NO: 531518 - RNA, 20 nt, Human
ugagaaaaggcuuugaauag

SEQ ID NO: 531519 - RNA, 21 nt, Human
ugagaaaauccauccacaaga

SEQ ID NO: 531520 - RNA, 23 nt, Human
ugccuuucccucucauacguuca

SEQ ID NO: 531521 - RNA, 18 nt, Human
uggagguacuguaaggcu

SEQ ID NO: 531522 - RNA, 19 nt, Human
ugguauugcgacauccuca

SEQ ID NO: 531523 - RNA, 22 nt, Human
ugucuuguucagguucaggaag

SEQ ID NO: 531524 - RNA, 18 nt, Human
uguggugccaccauuguc

SEQ ID NO: 531525 - RNA, 22 nt, Human
uucaccauuacugagaaaucuc

SEQ ID NO: 531526 - RNA, 18 nt, Human
uuccuuuuucuuugccuu

SEQ ID NO: 531527 - RNA, 19 nt, Human
uucucauggagguacugua

SEQ ID NO: 531528 - RNA, 24 nt, Human
uugaauaaaacuagucauccaccu

SEQ ID NO: 531529 - RNA, 22 nt, Human
uuucgcauugcacuuugcuacc

SEQ ID NO: 531530 - RNA, 22 nt, Human
uuuucuuugccuuucccucuca

SEQ ID NO: 531531 - RNA, 23 nt, Human
aaaaaaaaaaaacucucaaaaga

SEQ ID NO: 531532 - RNA, 19 nt, Human
aaaaaaauaaacuacccuc

SEQ ID NO: 531533 - RNA, 19 nt, Human
aaaacucucaaaagaucgu

SEQ ID NO: 531534 - RNA, 22 nt, Human
aaaaggacagagaaaaaaaaua

SEQ ID NO: 531535 - RNA, 19 nt, Human
aaaaguaaagcagauucaa

SEQ ID NO: 531536 - RNA, 20 nt, Human
aaacuuggaaaguuaaguug

SEQ ID NO: 531537 - RNA, 19 nt, Human
aaauagcaaaaacaaugga

SEQ ID NO: 531538 - RNA, 20 nt, Human
aagauggauaaaaggaauca

SEQ ID NO: 531539 - RNA, 23 nt, Human
aagcagauucaauaaguagaaac

SEQ ID NO: 531540 - RNA, 21 nt, Human
aaucuccaaagucacgccuga

SEQ ID NO: 531541 - RNA, 23 nt, Human
acaaaagucccccagaaagauuc

SEQ ID NO: 531542 - RNA, 20 nt, Human
acuuuucuacagugucucaa

SEQ ID NO: 531543 - RNA, 21 nt, Human
agaaaauugcuaaaaaguaaa

SEQ ID NO: 531544 - RNA, 24 nt, Human
agaaagauuccuaaacgcugugga

SEQ ID NO: 531545 - RNA, 24 nt, Human
agaaaucuacuguaucacacagcu

SEQ ID NO: 531546 - RNA, 18 nt, Human
agagcauuuaguaugcag

SEQ ID NO: 531547 - RNA, 24 nt, Human
agauguuuuuuaacaacaagagau

SEQ ID NO: 531548 - RNA, 20 nt, Human
aggaagaaaauugcuaaaaa

SEQ ID NO: 531549 - RNA, 18 nt, Human
aguaaagcagauucaaua

SEQ ID NO: 531550 - RNA, 18 nt, Human
auacaauuuaaacuugag

SEQ ID NO: 531551 - RNA, 22 nt, Human
auugcaaauauuuugacuguaa

SEQ ID NO: 531552 - RNA, 24 nt, Human
auuuauaguuaugagagcauuuag

SEQ ID NO: 531553 - RNA, 21 nt, Human
caaaacagaagcaacaauuuu

SEQ ID NO: 531554 - RNA, 19 nt, Human
caaaagacugaagacagga

SEQ ID NO: 531555 - RNA, 20 nt, Human
caaaaggacagagaaaaaaa

SEQ ID NO: 531556 - RNA, 22 nt, Human
caaggaagaaaauugcuaaaaa

SEQ ID NO: 531557 - RNA, 22 nt, Human
cacaguggacaguaccagcucc

SEQ ID NO: 531558 - RNA, 25 nt, Human
caccuguauacaaccuaagaccaac

SEQ ID NO: 531559 - RNA, 25 nt, Human
cagaaagauuccuaaacgcugugga

SEQ ID NO: 531560 - RNA, 22 nt, Human
cagaggacucucucccacgucc

SEQ ID NO: 531561 - RNA, 18 nt, Human
caguaccagcuccuuuca

SEQ ID NO: 531562 - RNA, 21 nt, Human
caguugacaucccagacaaac

SEQ ID NO: 531563 - RNA, 19 nt, Human
cauuaagucacagacacuu

SEQ ID NO: 531564 - RNA, 18 nt, Human
cccacguccgauaccaca

SEQ ID NO: 531565 - RNA, 23 nt, Human
cccagacaaacuugcauuaaaaa

SEQ ID NO: 531566 - RNA, 24 nt, Human
cccauuaacauuuuuuugcaacaa

SEQ ID NO: 531567 - RNA, 22 nt, Human
cccuauauaugguuuacuuuag

SEQ ID NO: 531568 - RNA, 18 nt, Human
cccuuccuccccacuuuc

SEQ ID NO: 531569 - RNA, 18 nt, Human
ccuguauacaaccuaaga

SEQ ID NO: 531570 - RNA, 19 nt, Human
cguugccuucaggugcugg

SEQ ID NO: 531571 - RNA, 23 nt, Human
cuaccucgcauguuucugcuaag

SEQ ID NO: 531572 - RNA, 19 nt, Human
cuuuagucuuccuuuuccu

SEQ ID NO: 531573 - RNA, 21 nt, Human
gacaggaccgaauauuuugaa

SEQ ID NO: 531574 - RNA, 25 nt, Human
gcccauuaacauuuuuuugcaacaa

SEQ ID NO: 531575 - RNA, 20 nt, Human
gggugcaagagggcguugcc

SEQ ID NO: 531576 - RNA, 19 nt, Human
ggugcaagagggcguugcc

SEQ ID NO: 531577 - RNA, 18 nt, Human
gguucauguucacaagga

SEQ ID NO: 531578 - RNA, 23 nt, Human
guuugucucagucacugaaccag

SEQ ID NO: 531579 - RNA, 20 nt, Human
uaaaacaaaacagaagcaac

SEQ ID NO: 531580 - RNA, 18 nt, Human
uaaaaggaaucauuugug

SEQ ID NO: 531581 - RNA, 23 nt, Human
uaaagcauaauuuacauauuuga

SEQ ID NO: 531582 - RNA, 26 nt, Human
uaacagucacaaaagucccccagaaa

SEQ ID NO: 531583 - RNA, 22 nt, Human
uaaguacaaggauuuucaaaac

SEQ ID NO: 531584 - RNA, 24 nt, Human
uacaaaagaaggauguaugcgaca

SEQ ID NO: 531585 - RNA, 20 nt, Human
uacacacuauaaaauuucag

SEQ ID NO: 531586 - RNA, 23 nt, Human
uaccaaaaggacagagaaaaaaa

SEQ ID NO: 531587 - RNA, 20 nt, Human
uagcagacaaaaguaauguu

SEQ ID NO: 531588 - RNA, 26 nt, Human
uauaaaucacaauaaaaaaaaaaaac

SEQ ID NO: 531589 - RNA, 19 nt, Human
uaucacacagcucaggaug

SEQ ID NO: 531590 - RNA, 28 nt, Human
uauggguccuguuggugaagcggguccc

SEQ ID NO: 531591 - RNA, 23 nt, Human
uauuugauucuugugacugaugu

SEQ ID NO: 531592 - RNA, 23 nt, Human
uauuuggaccaaccaaguaaauu

SEQ ID NO: 531593 - RNA, 21 nt, Human
ucaagcagugucuacagacag

SEQ ID NO: 531594 - RNA, 25 nt, Human
ucacaaaagucccccagaaagauuc

SEQ ID NO: 531595 - RNA, 19 nt, Human
ucauaccaaaaggacagag

SEQ ID NO: 531596 - RNA, 24 nt, Human
uccacaugguguaagcuacaaaag

SEQ ID NO: 531597 - RNA, 18 nt, Human
ucccccagaaagauuccu

SEQ ID NO: 531598 - RNA, 21 nt, Human
ucccccagaaagauuccuaaa

SEQ ID NO: 531599 - RNA, 18 nt, Human
ucucuugccaguuuucuu

SEQ ID NO: 531600 - RNA, 21 nt, Human
ugacuguaauuauuuuuccuc

SEQ ID NO: 531601 - RNA, 21 nt, Human
uggacaguaccagcuccuuuc

SEQ ID NO: 531602 - RNA, 19 nt, Human
uggcaaacagaggacucuc

SEQ ID NO: 531603 - RNA, 28 nt, Human
ugguaguucauugaggguuccggcaccg

SEQ ID NO: 531604 - RNA, 22 nt, Human
uggugaagcgggucccacaggg

SEQ ID NO: 531605 - RNA, 24 nt, Human
ugguguaagcuacaaaagaaggau

SEQ ID NO: 531606 - RNA, 19 nt, Human
uucuaagccacuaauaccu

SEQ ID NO: 531607 - RNA, 21 nt, Human
uucucauuuccucuuaaaaca

SEQ ID NO: 531608 - RNA, 20 nt, Human
uugcaacaauaaaaacaaaa

SEQ ID NO: 531609 - RNA, 19 nt, Human
uugcuuuucaccuuauuuu

SEQ ID NO: 531610 - RNA, 21 nt, Human
uuuaaucuacuucugcuggcc

SEQ ID NO: 531611 - RNA, 18 nt, Human
uuuacuuuagcagacaaa

SEQ ID NO: 531612 - RNA, 23 nt, Human
uuuguuguuuauuaaaucuaccu

SEQ ID NO: 531613 - RNA, 26 nt, Human
aaacaaaagaaaugguuuaaaagcaa

SEQ ID NO: 531614 - RNA, 22 nt, Human
aaggagcugcugugucauaaug

SEQ ID NO: 531615 - RNA, 20 nt, Human
accaagggauggacaugacc

SEQ ID NO: 531616 - RNA, 22 nt, Human
agccggcgcuggcgcaggcgca

SEQ ID NO: 531617 - RNA, 27 nt, Human
auaauggaaacagcauauuaggagaaa

SEQ ID NO: 531618 - RNA, 23 nt, Human
caucagcgugagaaaaaaaaacc

SEQ ID NO: 531619 - RNA, 23 nt, Human
ccaagccaucagcgugagaaaaa

SEQ ID NO: 531620 - RNA, 19 nt, Human
ccaagggauggacaugacc

SEQ ID NO: 531621 - RNA, 21 nt, Human
ccagaaguugccuccagauaa

SEQ ID NO: 531622 - RNA, 18 nt, Human
ccagcagccacggcccca

SEQ ID NO: 531623 - RNA, 18 nt, Human
gaaaaaaaaaccaccaga

SEQ ID NO: 531624 - RNA, 24 nt, Human
gcuuuauuuacuuauuuauuuauu

SEQ ID NO: 531625 - RNA, 25 nt, Human
gugagaaaaaaaaaccaccagaagu

SEQ ID NO: 531626 - RNA, 20 nt, Human
uaccaagggauggacaugac

SEQ ID NO: 531627 - RNA, 18 nt, Human
ugagaaaaaaaaaccacc

SEQ ID NO: 531628 - RNA, 23 nt, Human
ugagaaaaaaaaaccaccagaag

SEQ ID NO: 531629 - RNA, 22 nt, Human
uucgugugcugucugcuugagu

SEQ ID NO: 531630 - RNA, 19 nt, Human
uuuuuuuuuuuuuuuugca

SEQ ID NO: 531631 - RNA, 18 nt, Human
uuuuuuuuuuuuuuuuug

SEQ ID NO: 531632 - RNA, 24 nt, Human
uuuuuuuuuuuuuuuuuugcauuu

SEQ ID NO: 531633 - RNA, 18 nt, Human
caagccuuuagcgcaguu

SEQ ID NO: 531634 - RNA, 19 nt, Human
caggaucaggagaacaggc

SEQ ID NO: 531635 - RNA, 24 nt, Human
caguuuuccgucgggcucccagug

SEQ ID NO: 531636 - RNA, 18 nt, Human
cccauggaaagccuaagg

SEQ ID NO: 531637 - RNA, 19 nt, Human
ccgcaagucccugggcagc

SEQ ID NO: 531638 - RNA, 22 nt, Human
ccgccauggucugggaacccau

SEQ ID NO: 531639 - RNA, 24 nt, Human
cuagcuuuuucaguagcuucuuuu

SEQ ID NO: 531640 - RNA, 22 nt, Human
cugcacagcuccgcgugccucc

SEQ ID NO: 531641 - RNA, 19 nt, Human
gaaaauaaggaagcuguag

SEQ ID NO: 531642 - RNA, 24 nt, Human
gggaacccauggaaagccuaaggg

SEQ ID NO: 531643 - RNA, 21 nt, Human
ggucaugaacuugaacauccc

SEQ ID NO: 531644 - RNA, 23 nt, Human
uagaacacgcaggaucaggagaa

SEQ ID NO: 531645 - RNA, 23 nt, Human
uagcgcaguuuuccgucgggcuc

SEQ ID NO: 531646 - RNA, 22 nt, Human
ucaguagcuucuuuuaucuucu

SEQ ID NO: 531647 - RNA, 19 nt, Human
ucccaggcuucagugucuc

SEQ ID NO: 531648 - RNA, 18 nt, Human
ucgggcaggggaaagaca

SEQ ID NO: 531649 - RNA, 20 nt, Human
ucuuuuaucuucuggucaug

SEQ ID NO: 531650 - RNA, 21 nt, Human
ugccgcaagucccugggcagc

SEQ ID NO: 531651 - RNA, 20 nt, Human
ugggcagcgccaccgccaug

SEQ ID NO: 531652 - RNA, 22 nt, Human
ugggcagcgccaccgccauggu

SEQ ID NO: 531653 - RNA, 18 nt, Human
uggucaugaacuugaaca

SEQ ID NO: 531654 - RNA, 24 nt, Human
uucaugucuagcuuuuucaguagc

SEQ ID NO: 531655 - RNA, 25 nt, Human
uuuuuuuuuuuuuuuuuuuuuaagg

SEQ ID NO: 531656 - RNA, 21 nt, Human
caagaagggccaagccuugaa

SEQ ID NO: 531657 - RNA, 19 nt, Human
cacuggcuaggagugcccc

SEQ ID NO: 531658 - RNA, 21 nt, Human
cccaugcccaguucuuagaga

SEQ ID NO: 531659 - RNA, 21 nt, Human
ccugugguggagguauaaggc

SEQ ID NO: 531660 - RNA, 21 nt, Human
cuuagagacccuugauagcuc

SEQ ID NO: 531661 - RNA, 18 nt, Human
uagaagacaggaggcugc

SEQ ID NO: 531662 - RNA, 18 nt, Human
uaugaccaugacucacug

SEQ ID NO: 531663 - RNA, 19 nt, Human
ucaagaagggccaagccuu

SEQ ID NO: 531664 - RNA, 19 nt, Human
uggagguauaaggcucagg

SEQ ID NO: 531665 - RNA, 18 nt, Human
aaaacucuccaaaauuga

SEQ ID NO: 531666 - RNA, 23 nt, Human
aaaauaaauaguuaaaacaagug

SEQ ID NO: 531667 - RNA, 24 nt, Human
aaaugugcuagaugcauaauuuuu

SEQ ID NO: 531668 - RNA, 19 nt, Human
aacagggaaaguugucuga

SEQ ID NO: 531669 - RNA, 22 nt, Human
aacccuccccccgcccaacacc

SEQ ID NO: 531670 - RNA, 22 nt, Human
acuuaucaagaacaaguaacag

SEQ ID NO: 531671 - RNA, 18 nt, Human
aggcagcggcuuggcggc

SEQ ID NO: 531672 - RNA, 19 nt, Human
aggcagcggcuuggcggcg

SEQ ID NO: 531673 - RNA, 19 nt, Human
auacuauuuugccuugaac

SEQ ID NO: 531674 - RNA, 21 nt, Human
auuuccuagcuaugaaucuuc

SEQ ID NO: 531675 - RNA, 21 nt, Human
caagaacaaguaacagggaaa

SEQ ID NO: 531676 - RNA, 21 nt, Human
cacuaugaagguguccaacgc

SEQ ID NO: 531677 - RNA, 18 nt, Human
ccaaaauugaaaagacaa

SEQ ID NO: 531678 - RNA, 23 nt, Human
ccaguuaaaauaugcagccuuca

SEQ ID NO: 531679 - RNA, 21 nt, Human
ccccgcccaacaccugggaug

SEQ ID NO: 531680 - RNA, 18 nt, Human
ccuccccccgcccaacac

SEQ ID NO: 531681 - RNA, 18 nt, Human
cggcuuggcggcguccag

SEQ ID NO: 531682 - RNA, 19 nt, Human
cuauuccauuuuuucugug

SEQ ID NO: 531683 - RNA, 28 nt, Human
cuuacagucagacuuuuuccaacccguu

SEQ ID NO: 531684 - RNA, 21 nt, Human
cuugccacaacccuccccccg

SEQ ID NO: 531685 - RNA, 23 nt, Human
cuugccacaacccuccccccgcc

SEQ ID NO: 531686 - RNA, 22 nt, Human
gacgcagucguugagaucaggc

SEQ ID NO: 531687 - RNA, 18 nt, Human
gauacaaaauguaaacau

SEQ ID NO: 531688 - RNA, 21 nt, Human
gcauguaucgauccaucccuu

SEQ ID NO: 531689 - RNA, 19 nt, Human
ggaaggagaguuuacucau

SEQ ID NO: 531690 - RNA, 18 nt, Human
ggauuuauuuuuacaaga

SEQ ID NO: 531691 - RNA, 20 nt, Human
uacaaaauguaaacauggca

SEQ ID NO: 531692 - RNA, 18 nt, Human
uacuauaguccauuuagg

SEQ ID NO: 531693 - RNA, 23 nt, Human
uagaaaaaaauuacaagaauuuc

SEQ ID NO: 531694 - RNA, 20 nt, Human
uaucuagacuuccaauaauu

SEQ ID NO: 531695 - RNA, 20 nt, Human
uaugugauguguuacaguuu

SEQ ID NO: 531696 - RNA, 21 nt, Human
ucaggcauguccuugccgcgg

SEQ ID NO: 531697 - RNA, 24 nt, Human
uccuauuccauuuuuucuguguaa

SEQ ID NO: 531698 - RNA, 20 nt, Human
ugaaaacuuuacaguuccuu

SEQ ID NO: 531699 - RNA, 18 nt, Human
ugaaaagacaaucuugcc

SEQ ID NO: 531700 - RNA, 19 nt, Human
ugacugcacaccaucagca

SEQ ID NO: 531701 - RNA, 21 nt, Human
ugacugcacaccaucagcaca

SEQ ID NO: 531702 - RNA, 22 nt, Human
ugauacaaauaaacuauuuuac

SEQ ID NO: 531703 - RNA, 21 nt, Human
ugauccacagaguguugccuu

SEQ ID NO: 531704 - RNA, 22 nt, Human
ugcaguuuucacuuaucaagaa

SEQ ID NO: 531705 - RNA, 22 nt, Human
uguaaacauggcaaaauaaaua

SEQ ID NO: 531706 - RNA, 22 nt, Human
uuaaaacaagugaugcaggauc

SEQ ID NO: 531707 - RNA, 19 nt, Human
uucccugcaguuuucacuu

SEQ ID NO: 531708 - RNA, 22 nt, Human
uugccuuuugcauucagcugga

SEQ ID NO: 531709 - RNA, 22 nt, Human
uuuccuagcuaugaaucuuuaa

SEQ ID NO: 531710 - RNA, 22 nt, Human
uuugacagugaaaugccacuaa

SEQ ID NO: 531711 - RNA, 18 nt, Human
uuuuuuuuuuuuuuuuug

SEQ ID NO: 531712 - RNA, 22 nt, Human
uuuuuuuuuuuuuuuuuguuuu

SEQ ID NO: 531713 - RNA, 23 nt, Human
aaaacaugucuaaauuaugccag

SEQ ID NO: 531714 - RNA, 19 nt, Human
aaaaggaaaaggauuccac

SEQ ID NO: 531715 - RNA, 18 nt, Human
aaacagagcugcagcccc

SEQ ID NO: 531716 - RNA, 23 nt, Human
aaacucacuauauagaacacaaa

SEQ ID NO: 531717 - RNA, 20 nt, Human
aaaugaucacuuugugcccu

SEQ ID NO: 531718 - RNA, 25 nt, Human
aacccugaagaaauggcuucccgag

SEQ ID NO: 531719 - RNA, 19 nt, Human
aagcagcugagggccagag

SEQ ID NO: 531720 - RNA, 23 nt, Human
aagcagcugagggccagagcugg

SEQ ID NO: 531721 - RNA, 19 nt, Human
aagcugguuugggaagggg

SEQ ID NO: 531722 - RNA, 18 nt, Human
aagggcuuugggagcucc

SEQ ID NO: 531723 - RNA, 19 nt, Human
aaugcccacuucucugaug

SEQ ID NO: 531724 - RNA, 21 nt, Human
acaacaaaaacaaaguuucua

SEQ ID NO: 531725 - RNA, 22 nt, Human
acacuaucacuugucuaccuga

SEQ ID NO: 531726 - RNA, 24 nt, Human
acagugccgggaggcaguggccac

SEQ ID NO: 531727 - RNA, 21 nt, Human
accacuaagaccaaugcccac

SEQ ID NO: 531728 - RNA, 20 nt, Human
accugaugauccaccacuaa

SEQ ID NO: 531729 - RNA, 22 nt, Human
accugaugauccaccacuaaga

SEQ ID NO: 531730 - RNA, 25 nt, Human
accugaugauccaccacuaagacca

SEQ ID NO: 531731 - RNA, 20 nt, Human
acuggccccagcccacauca

SEQ ID NO: 531732 - RNA, 22 nt, Human
agcagcacugguagguauugca

SEQ ID NO: 531733 - RNA, 19 nt, Human
agcgaguggcucuccgugg

SEQ ID NO: 531734 - RNA, 21 nt, Human
agcucagaaacaacaaaaaca

SEQ ID NO: 531735 - RNA, 27 nt, Human
aggcagaggugguguggcuggaugggg

SEQ ID NO: 531736 - RNA, 18 nt, Human
agggauggauggguucca

SEQ ID NO: 531737 - RNA, 18 nt, Human
agguaauuaucugggggu

SEQ ID NO: 531738 - RNA, 24 nt, Human
agguccuccugcuuggcguugccu

SEQ ID NO: 531739 - RNA, 23 nt, Human
aguacacuuucacugaguccaaa

SEQ ID NO: 531740 - RNA, 21 nt, Human
auaaaaaucagaccauggacg

SEQ ID NO: 531741 - RNA, 19 nt, Human
auaauugaggcauaugggc

SEQ ID NO: 531742 - RNA, 19 nt, Human
auagagucaccuuuaaaag

SEQ ID NO: 531743 - RNA, 23 nt, Human
auccucacuggugccccccccau

SEQ ID NO: 531744 - RNA, 20 nt, Human
auggguuucuuccaggaccg

SEQ ID NO: 531745 - RNA, 22 nt, Human
auugaaacugguauucugguga

SEQ ID NO: 531746 - RNA, 21 nt, Human
auugugugggggaguuggggu

SEQ ID NO: 531747 - RNA, 21 nt, Human
caaaauuaggagcaaaaauac

SEQ ID NO: 531748 - RNA, 22 nt, Human
caaaguccugccuucccuuuuc

SEQ ID NO: 531749 - RNA, 21 nt, Human
caagcaggucagagcacccgu

SEQ ID NO: 531750 - RNA, 21 nt, Human
caaguggcuccuccacuucca

SEQ ID NO: 531751 - RNA, 23 nt, Human
caauuggcugcagaaaagcuggu

SEQ ID NO: 531752 - RNA, 25 nt, Human
cacacacaaaaauaaauauuuacac

SEQ ID NO: 531753 - RNA, 23 nt, Human
cacacacuaucacuugucuaccu

SEQ ID NO: 531754 - RNA, 19 nt, Human
cacagcucugcagcaaagu

SEQ ID NO: 531755 - RNA, 19 nt, Human
caccagcagccaauaagag

SEQ ID NO: 531756 - RNA, 22 nt, Human
cacuaaauuauauaaaaaucag

SEQ ID NO: 531757 - RNA, 19 nt, Human
cacuauauagaacacaaau

SEQ ID NO: 531758 - RNA, 18 nt, Human
cacuccagggauuauggg

SEQ ID NO: 531759 - RNA, 22 nt, Human
cacuggugccccccccaucccu

SEQ ID NO: 531760 - RNA, 27 nt, Human
cacuuucacugaguccaaaauuaggag

SEQ ID NO: 531761 - RNA, 21 nt, Human
cagaacacacagggacugggg

SEQ ID NO: 531762 - RNA, 19 nt, Human
cagacagacacagacuagc

SEQ ID NO: 531763 - RNA, 19 nt, Human
cagaccauggacggauuga

SEQ ID NO: 531764 - RNA, 24 nt, Human
cagaccauggacggauugaaacug

SEQ ID NO: 531765 - RNA, 21 nt, Human
cagcgccuugucaggggagcc

SEQ ID NO: 531766 - RNA, 18 nt, Human
cagcuccuggacacccag

SEQ ID NO: 531767 - RNA, 26 nt, Human
cagucuggacuuacuuaccucccagg

SEQ ID NO: 531768 - RNA, 18 nt, Human
caugaaggagcugccccc

SEQ ID NO: 531769 - RNA, 23 nt, Human
cauucugaccuucccacucccag

SEQ ID NO: 531770 - RNA, 22 nt, Human
ccaaaaaaaaaaaaaaaaaaaa

SEQ ID NO: 531771 - RNA, 23 nt, Human
ccaaaaaaaaaaaaaaaaaaaaa

SEQ ID NO: 531772 - RNA, 21 nt, Human
ccacagcugcaacaggcaauu

SEQ ID NO: 531773 - RNA, 18 nt, Human
ccagcaguccguccuguc

SEQ ID NO: 531774 - RNA, 22 nt, Human
cccaacccuuccagagcugccc

SEQ ID NO: 531775 - RNA, 24 nt, Human
cccaaguggcuccuccacuuccac

SEQ ID NO: 531776 - RNA, 21 nt, Human
cccacgcuggagugugaggua

SEQ ID NO: 531777 - RNA, 22 nt, Human
cccccccaucccuccuuggggg

SEQ ID NO: 531778 - RNA, 20 nt, Human
ccccuggggccucucugcuc

SEQ ID NO: 531779 - RNA, 18 nt, Human
cccuaaauccuggauggc

SEQ ID NO: 531780 - RNA, 18 nt, Human
cccuccuaacucccugcc

SEQ ID NO: 531781 - RNA, 18 nt, Human
cccugggggccugcugag

SEQ ID NO: 531782 - RNA, 19 nt, Human
cccugggggccugcugagg

SEQ ID NO: 531783 - RNA, 21 nt, Human
cccuguggcagcacugggauc

SEQ ID NO: 531784 - RNA, 18 nt, Human
ccuaggauccacucggcc

SEQ ID NO: 531785 - RNA, 19 nt, Human
ccucacuggugcccccccc

SEQ ID NO: 531786 - RNA, 20 nt, Human
ccucacuggugcccccccca

SEQ ID NO: 531787 - RNA, 19 nt, Human
ccuccggaagggcuggucu

SEQ ID NO: 531788 - RNA, 19 nt, Human
ccuccuaacucccugccug

SEQ ID NO: 531789 - RNA, 21 nt, Human
ccugccccuacuggccccagc

SEQ ID NO: 531790 - RNA, 18 nt, Human
ccugccuucccuuuuccu

SEQ ID NO: 531791 - RNA, 22 nt, Human
ccuggcaccuguccugccccua

SEQ ID NO: 531792 - RNA, 22 nt, Human
ccuggcuccccuggggccucuc

SEQ ID NO: 531793 - RNA, 18 nt, Human
ccugguggugucccugug

SEQ ID NO: 531794 - RNA, 23 nt, Human
cucgaaaacccuccuaacucccu

SEQ ID NO: 531795 - RNA, 21 nt, Human
cucggcccuggcuccccuggg

SEQ ID NO: 531796 - RNA, 22 nt, Human
cugaugcuacccuucuuguggg

SEQ ID NO: 531797 - RNA, 19 nt, Human
cugccccguuggccucuuc

SEQ ID NO: 531798 - RNA, 21 nt, Human
cuggagcccugugccccuccc

SEQ ID NO: 531799 - RNA, 22 nt, Human
cuggagcccugugccccucccc

SEQ ID NO: 531800 - RNA, 24 nt, Human
cuggccaagggcuagcggccacag

SEQ ID NO: 531801 - RNA, 21 nt, Human
cugguggugucccuguggcag

SEQ ID NO: 531802 - RNA, 19 nt, Human
cugugccccuccccggagg

SEQ ID NO: 531803 - RNA, 22 nt, Human
cugugcuaagggugagucucag

SEQ ID NO: 531804 - RNA, 19 nt, Human
cuucccuuuuccucugucc

SEQ ID NO: 531805 - RNA, 21 nt, Human
cuuugugcccugaggcccuuc

SEQ ID NO: 531806 - RNA, 24 nt, Human
gaaaacccuccuaacucccugccu

SEQ ID NO: 531807 - RNA, 25 nt, Human
gaaaaggauuccacauacuuaugaa

SEQ ID NO: 531808 - RNA, 18 nt, Human
gaaagucuuaaaucucau

SEQ ID NO: 531809 - RNA, 18 nt, Human
gaacugguaguuaauccu

SEQ ID NO: 531810 - RNA, 22 nt, Human
gaaggcagucccucuggugagg

SEQ ID NO: 531811 - RNA, 20 nt, Human
gaagggcuggucuuaggaga

SEQ ID NO: 531812 - RNA, 22 nt, Human
gaaggggugccuguucugggag

SEQ ID NO: 531813 - RNA, 18 nt, Human
gaauggggucggggugcc

SEQ ID NO: 531814 - RNA, 21 nt, Human
gaccugaggcaggauggggca

SEQ ID NO: 531815 - RNA, 23 nt, Human
gagaggcccugggggccugcuga

SEQ ID NO: 531816 - RNA, 20 nt, Human
gagcaaaaauacaaagguuc

SEQ ID NO: 531817 - RNA, 19 nt, Human
gagcccccaacccuuccag

SEQ ID NO: 531818 - RNA, 19 nt, Human
gagcugcagcccgcccugg

SEQ ID NO: 531819 - RNA, 18 nt, Human
gagguccuccugcuuggc

SEQ ID NO: 531820 - RNA, 18 nt, Human
gaguggcucuccguggcc

SEQ ID NO: 531821 - RNA, 22 nt, Human
gauaacgaccacccccaaccuc

SEQ ID NO: 531822 - RNA, 19 nt, Human
gaucacuuugugcccugag

SEQ ID NO: 531823 - RNA, 24 nt, Human
gcaacaggcaauuggcugcagaaa

SEQ ID NO: 531824 - RNA, 23 nt, Human
gccagagcuggagggcugcagug

SEQ ID NO: 531825 - RNA, 20 nt, Human
gcccugggggccugcugagg

SEQ ID NO: 531826 - RNA, 18 nt, Human
gcugcagccccagcgccu

SEQ ID NO: 531827 - RNA, 18 nt, Human
gcuuugccaugggugugg

SEQ ID NO: 531828 - RNA, 22 nt, Human
ggcaggggcgggcagcagagag

SEQ ID NO: 531829 - RNA, 18 nt, Human
ggcuggaugggguauugg

SEQ ID NO: 531830 - RNA, 20 nt, Human
ggcuggggugugggagaggc

SEQ ID NO: 531831 - RNA, 22 nt, Human
ggcuggggugugggagaggccu

SEQ ID NO: 531832 - RNA, 19 nt, Human
gggaauagggauggauggg

SEQ ID NO: 531833 - RNA, 22 nt, Human
gggaggaaaggcaacagagggc

SEQ ID NO: 531834 - RNA, 20 nt, Human
gggauuggucagauggaagg

SEQ ID NO: 531835 - RNA, 18 nt, Human
gggcacuggagguugugc

SEQ ID NO: 531836 - RNA, 20 nt, Human
gggcacuggagguugugcug

SEQ ID NO: 531837 - RNA, 19 nt, Human
gggcauccucacuggugcc

SEQ ID NO: 531838 - RNA, 23 nt, Human
ggguuucuuccaggaccggcccc

SEQ ID NO: 531839 - RNA, 24 nt, Human
guaagcacggggugggcacccuac

SEQ ID NO: 531840 - RNA, 21 nt, Human
gugagacagcagugagcuuag

SEQ ID NO: 531841 - RNA, 28 nt, Human
gugagauuccaaaaaaaaaaaaaaaaaa

SEQ ID NO: 531842 - RNA, 21 nt, Human
guggauggcugggguguggga

SEQ ID NO: 531843 - RNA, 26 nt, Human
guggauggcuggggugugggagaggc

SEQ ID NO: 531844 - RNA, 23 nt, Human
guggugacgguaaaaugaauuuc

SEQ ID NO: 531845 - RNA, 24 nt, Human
guuaaguaacugauaccaggaauu

SEQ ID NO: 531846 - RNA, 25 nt, Human
uaagaccaaugcccacuucucugau

SEQ ID NO: 531847 - RNA, 19 nt, Human
uaccaggaauucuagggug

SEQ ID NO: 531848 - RNA, 20 nt, Human
uaccaggaauucuagggugg

SEQ ID NO: 531849 - RNA, 21 nt, Human
uaccugaugauccaccacuaa

SEQ ID NO: 531850 - RNA, 18 nt, Human
uacuuuguaguauuguuc

SEQ ID NO: 531851 - RNA, 19 nt, Human
uagcucagaaacaacaaaa

SEQ ID NO: 531852 - RNA, 18 nt, Human
uaggaucccaaaugauca

SEQ ID NO: 531853 - RNA, 22 nt, Human
ucaaaaggaaaaggauuccaca

SEQ ID NO: 531854 - RNA, 22 nt, Human
ucaagcagcugagggccagagc

SEQ ID NO: 531855 - RNA, 18 nt, Human
ucagaaacaacaaaaaca

SEQ ID NO: 531856 - RNA, 20 nt, Human
ucagggaggaaggaaaccag

SEQ ID NO: 531857 - RNA, 23 nt, Human
ucaguguagugauauggaauguu

SEQ ID NO: 531858 - RNA, 20 nt, Human
ucauuccacaaacaaaacag

SEQ ID NO: 531859 - RNA, 22 nt, Human
uccacgaaggugauucuaaaca

SEQ ID NO: 531860 - RNA, 21 nt, Human
uccaugcaguuacccaccagc

SEQ ID NO: 531861 - RNA, 22 nt, Human
uccaugcaguuacccaccagca

SEQ ID NO: 531862 - RNA, 26 nt, Human
uccaugcaguuacccaccagcagcca

SEQ ID NO: 531863 - RNA, 23 nt, Human
ucccaaaugaucacuuugugccc

SEQ ID NO: 531864 - RNA, 19 nt, Human
ucccucuggugagggugag

SEQ ID NO: 531865 - RNA, 18 nt, Human
uccuaggauccacucggc

SEQ ID NO: 531866 - RNA, 22 nt, Human
uccuaggauccacucggcccug

SEQ ID NO: 531867 - RNA, 19 nt, Human
uccuggacacccagucugg

SEQ ID NO: 531868 - RNA, 18 nt, Human
uccuggauggcuugaucc

SEQ ID NO: 531869 - RNA, 25 nt, Human
uccuggauggcuugauccugaaggc

SEQ ID NO: 531870 - RNA, 18 nt, Human
uccuucugaucagacaga

SEQ ID NO: 531871 - RNA, 21 nt, Human
uccuugggaauaaacuguccu

SEQ ID NO: 531872 - RNA, 23 nt, Human
ucucagguguccuggcccugacc

SEQ ID NO: 531873 - RNA, 21 nt, Human
ucuuuuguuuugcuuugccau

SEQ ID NO: 531874 - RNA, 22 nt, Human
ugagauuccaaaaaaaaaaaaa

SEQ ID NO: 531875 - RNA, 21 nt, Human
ugagguagaauacaggugacc

SEQ ID NO: 531876 - RNA, 19 nt, Human
ugagguccuccugcuuggc

SEQ ID NO: 531877 - RNA, 23 nt, Human
ugagguccuccugcuuggcguug

SEQ ID NO: 531878 - RNA, 19 nt, Human
ugaguaguacugagcaggu

SEQ ID NO: 531879 - RNA, 20 nt, Human
ugauaccaggaauucuaggg

SEQ ID NO: 531880 - RNA, 23 nt, Human
ugcaccaggcaugcagaggaaca

SEQ ID NO: 531881 - RNA, 21 nt, Human
ugcacggagaggcccuggggg

SEQ ID NO: 531882 - RNA, 22 nt, Human
ugcacggagaggcccugggggc

SEQ ID NO: 531883 - RNA, 18 nt, Human
ugcagaaaagcugguuug

SEQ ID NO: 531884 - RNA, 21 nt, Human
ugccacagugccgggaggcag

SEQ ID NO: 531885 - RNA, 24 nt, Human
ugccauccacuguuugccuuaagu

SEQ ID NO: 531886 - RNA, 18 nt, Human
ugccccccccaucccucc

SEQ ID NO: 531887 - RNA, 20 nt, Human
ugccccguuggccucuucca

SEQ ID NO: 531888 - RNA, 19 nt, Human
ugcccugaggcccuucaga

SEQ ID NO: 531889 - RNA, 20 nt, Human
ugccgggaggcaguggccac

SEQ ID NO: 531890 - RNA, 21 nt, Human
ugccugguggugucccugugg

SEQ ID NO: 531891 - RNA, 22 nt, Human
uggaaaaagcccacgcuggagu

SEQ ID NO: 531892 - RNA, 23 nt, Human
uggaaaaagcccacgcuggagug

SEQ ID NO: 531893 - RNA, 20 nt, Human
uggauggcugggguguggga

SEQ ID NO: 531894 - RNA, 23 nt, Human
uggccaagggcuagcggccacag

SEQ ID NO: 531895 - RNA, 18 nt, Human
uggccuggccaagggcua

SEQ ID NO: 531896 - RNA, 23 nt, Human
uggcuacggaguguugcacggag

SEQ ID NO: 531897 - RNA, 23 nt, Human
uggcuggaugggguauuggaggc

SEQ ID NO: 531898 - RNA, 18 nt, Human
uggcugugggacaagggc

SEQ ID NO: 531899 - RNA, 22 nt, Human
ugggaaggggugccuguucugg

SEQ ID NO: 531900 - RNA, 19 nt, Human
ugggaauagggauggaugg

SEQ ID NO: 531901 - RNA, 19 nt, Human
ugggacaagggcuuuggga

SEQ ID NO: 531902 - RNA, 21 nt, Human
ugggacaagggcuuugggagc

SEQ ID NO: 531903 - RNA, 18 nt, Human
ugggagaggccuugggca

SEQ ID NO: 531904 - RNA, 21 nt, Human
ugggagcgaguggcucuccgu

SEQ ID NO: 531905 - RNA, 19 nt, Human
uggggauuggucagaugga

SEQ ID NO: 531906 - RNA, 21 nt, Human
uggggcauccucacuggugcc

SEQ ID NO: 531907 - RNA, 18 nt, Human
ugggugagguccuccugc

SEQ ID NO: 531908 - RNA, 25 nt, Human
uggucagauggaaggcagagguggu

SEQ ID NO: 531909 - RNA, 21 nt, Human
ugguuagggacaggacgcucc

SEQ ID NO: 531910 - RNA, 18 nt, Human
uguaaacaguacacuuuc

SEQ ID NO: 531911 - RNA, 24 nt, Human
uguaaacaguacacuuucacugag

SEQ ID NO: 531912 - RNA, 19 nt, Human
uguaagaguggugacggua

SEQ ID NO: 531913 - RNA, 20 nt, Human
uguacaaacacaaaagaauc

SEQ ID NO: 531914 - RNA, 21 nt, Human
uguacaaacacaaaagaaucc

SEQ ID NO: 531915 - RNA, 23 nt, Human
uguacaaacacaaaagaauccau

SEQ ID NO: 531916 - RNA, 24 nt, Human
uguccuggcccugaccagaggccu

SEQ ID NO: 531917 - RNA, 22 nt, Human
ugucuaaauuaugccagaggac

SEQ ID NO: 531918 - RNA, 21 nt, Human
ugucucugccagguuuuaaca

SEQ ID NO: 531919 - RNA, 22 nt, Human
uuaugccagaggacuaaagacc

SEQ ID NO: 531920 - RNA, 20 nt, Human
uucacauuggucuuagguag

SEQ ID NO: 531921 - RNA, 21 nt, Human
uucagaguucuggaccugagg

SEQ ID NO: 531922 - RNA, 19 nt, Human
uuccagagcugccccguug

SEQ ID NO: 531923 - RNA, 20 nt, Human
uugauccugaaggcaacaug

SEQ ID NO: 531924 - RNA, 21 nt, Human
uugauccugaaggcaacaugg

SEQ ID NO: 531925 - RNA, 22 nt, Human
uugcuuugccaugggugugggu

SEQ ID NO: 531926 - RNA, 18 nt, Human
uuggucagauggaaggca

SEQ ID NO: 531927 - RNA, 22 nt, Human
uuggugccauccacuguuugcc

SEQ ID NO: 531928 - RNA, 19 nt, Human
uugucuaccugaugaucca

SEQ ID NO: 531929 - RNA, 25 nt, Human
uuuaaaaguuggugccauccacugu

SEQ ID NO: 531930 - RNA, 28 nt, Human
uuucacacuccagggauuauggguuucu

SEQ ID NO: 531931 - RNA, 20 nt, Human
uuuguaguauuguucacaca

SEQ ID NO: 531932 - RNA, 20 nt, Human
uuuugcaaaagaucuuacug

SEQ ID NO: 531933 - RNA, 18 nt, Human
aaaaggauaggugugggu

SEQ ID NO: 531934 - RNA, 20 nt, Human
aagccccucaaaaggauagg

SEQ ID NO: 531935 - RNA, 20 nt, Human
agcagaagcggaguucugcg

SEQ ID NO: 531936 - RNA, 20 nt, Human
agcgggaggaaagaggcuga

SEQ ID NO: 531937 - RNA, 23 nt, Human
aggagcagaagcggaguucugcg

SEQ ID NO: 531938 - RNA, 18 nt, Human
agggagaagcuugggaug

SEQ ID NO: 531939 - RNA, 24 nt, Human
aggggacggagccuaacacaggug

SEQ ID NO: 531940 - RNA, 19 nt, Human
auggaauguccccuauccc

SEQ ID NO: 531941 - RNA, 19 nt, Human
caaccacccccagguccca

SEQ ID NO: 531942 - RNA, 24 nt, Human
cagaagcggaguucugcgcccucc

SEQ ID NO: 531943 - RNA, 22 nt, Human
ccacccccaggucccacuuccc

SEQ ID NO: 531944 - RNA, 18 nt, Human
ccaggucccacuucccag

SEQ ID NO: 531945 - RNA, 22 nt, Human
ccccagcuccaccccaaagccc

SEQ ID NO: 531946 - RNA, 22 nt, Human
cccccaggucccacuucccagc

SEQ ID NO: 531947 - RNA, 18 nt, Human
ccgguccucuccucccuc

SEQ ID NO: 531948 - RNA, 20 nt, Human
ccucuggaaaagggcuuccg

SEQ ID NO: 531949 - RNA, 18 nt, Human
cucaaagaaugagauauc

SEQ ID NO: 531950 - RNA, 19 nt, Human
cucaaagaaugagauaucc

SEQ ID NO: 531951 - RNA, 22 nt, Human
cuccaccccaaagccccucaaa

SEQ ID NO: 531952 - RNA, 25 nt, Human
cucccugccccuccuuuaggauccc

SEQ ID NO: 531953 - RNA, 21 nt, Human
gaagacccagucccucugcuu

SEQ ID NO: 531954 - RNA, 19 nt, Human
gagcagaagcggaguucug

SEQ ID NO: 531955 - RNA, 22 nt, Human
gaggaaagaggcugaggaggcc

SEQ ID NO: 531956 - RNA, 22 nt, Human
gggaaggguggcggagcucaag

SEQ ID NO: 531957 - RNA, 21 nt, Human
ggugacagaaaaacuucggga

SEQ ID NO: 531958 - RNA, 18 nt, Human
uacggggauaaaacgcgg

SEQ ID NO: 531959 - RNA, 20 nt, Human
uccaacccguuuaguggagc

SEQ ID NO: 531960 - RNA, 21 nt, Human
uccaacccguuuaguggagcu

SEQ ID NO: 531961 - RNA, 24 nt, Human
ucccugccccuccuuuaggauccc

SEQ ID NO: 531962 - RNA, 24 nt, Human
ugcuaggugggccguguucccucu

SEQ ID NO: 531963 - RNA, 19 nt, Human
uggaaaagggcuuccggua

SEQ ID NO: 531964 - RNA, 19 nt, Human
uggaaaagggcuuccggua

SEQ ID NO: 531965 - RNA, 18 nt, Human
uggaauguccccuauccc

SEQ ID NO: 531966 - RNA, 18 nt, Human
ugggaggcacuaaaugua

SEQ ID NO: 531967 - RNA, 23 nt, Human
ugguagcaaggagcagaagcgga

SEQ ID NO: 531968 - RNA, 23 nt, Human
uguucccagccucuggaaaaggg

SEQ ID NO: 531969 - RNA, 22 nt, Human
uuagcccaagaagugaagaccc

SEQ ID NO: 531970 - RNA, 22 nt, Human
uucugcgcccucccugccccuc

SEQ ID NO: 531971 - RNA, 24 nt, Human
uuggaugcuugagaugaaggacuu

SEQ ID NO: 531972 - RNA, 27 nt, Human
aaaaaaaaaaaaaagucuuucaaagaa

SEQ ID NO: 531973 - RNA, 22 nt, Human
aaaaacaaaacaaaaugaaaac

SEQ ID NO: 531974 - RNA, 23 nt, Human
aaaaacaaugaacaaacauugac

SEQ ID NO: 531975 - RNA, 24 nt, Human
aaaaggagggggguuauagcagaa

SEQ ID NO: 531976 - RNA, 22 nt, Human
aaacaaaacaaaaugaaaacaa

SEQ ID NO: 531977 - RNA, 23 nt, Human
aaacaagaaaaagguaggggacc

SEQ ID NO: 531978 - RNA, 25 nt, Human
aaacaagaaaaagguaggggaccug

SEQ ID NO: 531979 - RNA, 22 nt, Human
aaacagaacaaggacagccugc

SEQ ID NO: 531980 - RNA, 25 nt, Human
aaacauuucagcaggaauaaaaacg

SEQ ID NO: 531981 - RNA, 20 nt, Human
aaacgaaacaaaacagagcc

SEQ ID NO: 531982 - RNA, 20 nt, Human
aaacgaaaccaagagaaugc

SEQ ID NO: 531983 - RNA, 18 nt, Human
aaagugcugggauuacag

SEQ ID NO: 531984 - RNA, 20 nt, Human
aaagugcugggauuacaggc

SEQ ID NO: 531985 - RNA, 23 nt, Human
aaagugcugggauuacaggcgug

SEQ ID NO: 531986 - RNA, 24 nt, Human
aaagugcugggauuacaggcguga

SEQ ID NO: 531987 - RNA, 25 nt, Human
aaauuuggaaaucuuucagugaacc

SEQ ID NO: 531988 - RNA, 21 nt, Human
aacuguaugcaacagcaaaac

SEQ ID NO: 531989 - RNA, 24 nt, Human
aagacgcucuauucauacaaggcu

SEQ ID NO: 531990 - RNA, 19 nt, Human
aagcacuggaauagacaga

SEQ ID NO: 531991 - RNA, 23 nt, Human
aagcaggagaaagugagcaccaa

SEQ ID NO: 531992 - RNA, 18 nt, Human
aagccugucuccacccag

SEQ ID NO: 531993 - RNA, 24 nt, Human
aagggccaggugcgguggcucaua

SEQ ID NO: 531994 - RNA, 18 nt, Human
aaguauaggagacugccu

SEQ ID NO: 531995 - RNA, 19 nt, Human
aagugcugggauuacaggc

SEQ ID NO: 531996 - RNA, 19 nt, Human
aagugcugggauuacaggc

SEQ ID NO: 531997 - RNA, 26 nt, Human
aagugcugggauuacaggcgugagcc

SEQ ID NO: 531998 - RNA, 20 nt, Human
aaucggcaacagaaugacgc

SEQ ID NO: 531999 - RNA, 21 nt, Human
aaugaaaacaaaacacaaaga

SEQ ID NO: 532000 - RNA, 31 nt, Human
acaaaacaaaaugaaaacaaaacacaaagaa

SEQ ID NO: 532001 - RNA, 24 nt, Human
acaaguaucccaauuucuucagga

SEQ ID NO: 532002 - RNA, 23 nt, Human
acacauauaugaggcaagccaua

SEQ ID NO: 532003 - RNA, 25 nt, Human
acacucuugaaaaacaagaaaaagg

SEQ ID NO: 532004 - RNA, 20 nt, Human
acaggcaagacguuacuacg

SEQ ID NO: 532005 - RNA, 19 nt, Human
acauauaugaggcaagcca

SEQ ID NO: 532006 - RNA, 22 nt, Human
accaacuuccuuccucuaucau

SEQ ID NO: 532007 - RNA, 22 nt, Human
accugaauuaaccaagcugcac

SEQ ID NO: 532008 - RNA, 24 nt, Human
accuugagcaaauucccuaaccuc

SEQ ID NO: 532009 - RNA, 22 nt, Human
acuccauucauaggaaguucaa

SEQ ID NO: 532010 - RNA, 24 nt, Human
acugcaguggcgcaaucucggcuc

SEQ ID NO: 532011 - RNA, 23 nt, Human
agaaagcuucagaaacuuuucaa

SEQ ID NO: 532012 - RNA, 27 nt, Human
agaaagugagcaccaaauuccagucgg

SEQ ID NO: 532013 - RNA, 22 nt, Human
agacacucuugaaaaacaagaa

SEQ ID NO: 532014 - RNA, 19 nt, Human
agacagagagaccaacaga

SEQ ID NO: 532015 - RNA, 18 nt, Human
agacaugcaaaacuaaua

SEQ ID NO: 532016 - RNA, 21 nt, Human
agagauggugaaugguaaugg

SEQ ID NO: 532017 - RNA, 24 nt, Human
agcagaaccauaaaugcccaacag

SEQ ID NO: 532018 - RNA, 19 nt, Human
agcaggagaaagugagcac

SEQ ID NO: 532019 - RNA, 22 nt, Human
agcaggagaaagugagcaccaa

SEQ ID NO: 532020 - RNA, 20 nt, Human
agcuguggccugaagcacca

SEQ ID NO: 532021 - RNA, 18 nt, Human
aggagggggguuauagca

SEQ ID NO: 532022 - RNA, 22 nt, Human
aggauggaagugccaaaaagga

SEQ ID NO: 532023 - RNA, 26 nt, Human
aggauggaagugccaaaaaggagccg

SEQ ID NO: 532024 - RNA, 23 nt, Human
aggcaacuaugggguuugugagc

SEQ ID NO: 532025 - RNA, 18 nt, Human
aggcgugagccaccaagc

SEQ ID NO: 532026 - RNA, 19 nt, Human
aggcuggagugcaguggca

SEQ ID NO: 532027 - RNA, 24 nt, Human
aggugcgguggcucauaccuguaa

SEQ ID NO: 532028 - RNA, 24 nt, Human
aguaagugacaggauuuuuucuug

SEQ ID NO: 532029 - RNA, 22 nt, Human
aguagggauggcguuucaccau

SEQ ID NO: 532030 - RNA, 24 nt, Human
agucugugcaaucuuuuuuuuuuu

SEQ ID NO: 532031 - RNA, 19 nt, Human
agugcaguggcauggucuc

SEQ ID NO: 532032 - RNA, 21 nt, Human
agugcaguggcauggucucag

SEQ ID NO: 532033 - RNA, 23 nt, Human
agugcaguggcauggucucagcu

SEQ ID NO: 532034 - RNA, 26 nt, Human
agugcuccugcacauacacguaugca

SEQ ID NO: 532035 - RNA, 18 nt, Human
agugcugggauuacaggc

SEQ ID NO: 532036 - RNA, 24 nt, Human
aguggcauggucucagcucacugc

SEQ ID NO: 532037 - RNA, 19 nt, Human
aguucacaaucugaaagau

SEQ ID NO: 532038 - RNA, 19 nt, Human
auaagaaauuuggaaaucu

SEQ ID NO: 532039 - RNA, 22 nt, Human
auagacagagagaccaacagaa

SEQ ID NO: 532040 - RNA, 19 nt, Human
auccaccugccuuggccuc

SEQ ID NO: 532041 - RNA, 24 nt, Human
aucucaugauccaccugccuuggc

SEQ ID NO: 532042 - RNA, 28 nt, Human
augacgccacacaagaucauuaaacauu

SEQ ID NO: 532043 - RNA, 24 nt, Human
augauccaccugccuuggccuccu

SEQ ID NO: 532044 - RNA, 22 nt, Human
augcaacagcaaaacacuggaa

SEQ ID NO: 532045 - RNA, 19 nt, Human
auggagaaaaaccaccaca

SEQ ID NO: 532046 - RNA, 24 nt, Human
auggcguuucaccaugcugaccag

SEQ ID NO: 532047 - RNA, 26 nt, Human
caaaaaggagccggcacacaugcuca

SEQ ID NO: 532048 - RNA, 28 nt, Human
caaaacaaaaugaaaacaaaacacaaag

SEQ ID NO: 532049 - RNA, 25 nt, Human
caaaacacuggaaccaacugaaaug

SEQ ID NO: 532050 - RNA, 18 nt, Human
caaaacagagccuugcuc

SEQ ID NO: 532051 - RNA, 23 nt, Human
caaaucuagaaaaagacaaucaa

SEQ ID NO: 532052 - RNA, 22 nt, Human
caacacuuccaccagcuuggcu

SEQ ID NO: 532053 - RNA, 25 nt, Human
caacagaacaaaacagcuuagaaaa

SEQ ID NO: 532054 - RNA, 23 nt, Human
caacagcaaaacacuggaaccaa

SEQ ID NO: 532055 - RNA, 22 nt, Human
caacagcccacugaggccaccu

SEQ ID NO: 532056 - RNA, 26 nt, Human
caaccagcagaaccauaaaugcccaa

SEQ ID NO: 532057 - RNA, 24 nt, Human
caaccuccaccuccuggguuuaag

SEQ ID NO: 532058 - RNA, 24 nt, Human
caacucucucacucagcugugacc

SEQ ID NO: 532059 - RNA, 19 nt, Human
caaggacagccugcugagc

SEQ ID NO: 532060 - RNA, 26 nt, Human
caauggaugcccggcuucugaggcuu

SEQ ID NO: 532061 - RNA, 24 nt, Human
caauuuuuguauccuuaguaggga

SEQ ID NO: 532062 - RNA, 18 nt, Human
cacaaucggcaacagaau

SEQ ID NO: 532063 - RNA, 23 nt, Human
cacaggcacgcgccaccgcaccc

SEQ ID NO: 532064 - RNA, 26 nt, Human
cacauacacguaugcacuaaugugcg

SEQ ID NO: 532065 - RNA, 18 nt, Human
cacauauaugaggcaagc

SEQ ID NO: 532066 - RNA, 20 nt, Human
caccaucacuccacucuuaa

SEQ ID NO: 532067 - RNA, 21 nt, Human
caccaugcugaccaggcuagu

SEQ ID NO: 532068 - RNA, 27 nt, Human
caccaugcugaccaggcuagucucaaa

SEQ ID NO: 532069 - RNA, 21 nt, Human
caccuaagaagccugucucca

SEQ ID NO: 532070 - RNA, 24 nt, Human
caccugccuuggccuccuaaagug

SEQ ID NO: 532071 - RNA, 19 nt, Human
cacucuugaaaaacaagaa

SEQ ID NO: 532072 - RNA, 21 nt, Human
cacugcaaccuccaccuccug

SEQ ID NO: 532073 - RNA, 23 nt, Human
cacugcaaccuccaccuccuggg

SEQ ID NO: 532074 - RNA, 19 nt, Human
cagaacaaggacagccugc

SEQ ID NO: 532075 - RNA, 19 nt, Human
cagaaccauaaaugcccaa

SEQ ID NO: 532076 - RNA, 23 nt, Human
cagaaugacgccacacaagauca

SEQ ID NO: 532077 - RNA, 22 nt, Human
cagauacgcauaccuguaacuc

SEQ ID NO: 532078 - RNA, 20 nt, Human
cagcagaacuguaugcaaca

SEQ ID NO: 532079 - RNA, 20 nt, Human
cagcaggaauaaaaacgaaa

SEQ ID NO: 532080 - RNA, 28 nt, Human
cagccacgugcgcaugcgugcguguggu

SEQ ID NO: 532081 - RNA, 24 nt, Human
caggaauaaaaacgaaaccaagag

SEQ ID NO: 532082 - RNA, 20 nt, Human
caggaccaaagcucaaaagc

SEQ ID NO: 532083 - RNA, 20 nt, Human
caggaugcagagcugccucu

SEQ ID NO: 532084 - RNA, 21 nt, Human
cagugauaagaaauuuggaaa

SEQ ID NO: 532085 - RNA, 21 nt, Human
cauaacagguaccuuucuaga

SEQ ID NO: 532086 - RNA, 22 nt, Human
cauaaggaaaaggagggggguu

SEQ ID NO: 532087 - RNA, 20 nt, Human
cauaccuguaaucccagcug

SEQ ID NO: 532088 - RNA, 24 nt, Human
caugcugaccaggcuagucucaaa

SEQ ID NO: 532089 - RNA, 28 nt, Human
cauuaaaguaaaaaacaaaacaaaauga

SEQ ID NO: 532090 - RNA, 22 nt, Human
ccaacugaaauguccaucaaca

SEQ ID NO: 532091 - RNA, 24 nt, Human
ccaccuccuggguuuaagugauuc

SEQ ID NO: 532092 - RNA, 19 nt, Human
ccauaaggaaaaggagggg

SEQ ID NO: 532093 - RNA, 21 nt, Human
cccaucaagagcuuuuuuaaa

SEQ ID NO: 532094 - RNA, 18 nt, Human
cccuccucccuuuccucc

SEQ ID NO: 532095 - RNA, 18 nt, Human
ccgaugcgccuguuucca

SEQ ID NO: 532096 - RNA, 23 nt, Human
ccuaaagugcugggauuacaggc

SEQ ID NO: 532097 - RNA, 22 nt, Human
ccuaaaugaccaagagagauuu

SEQ ID NO: 532098 - RNA, 20 nt, Human
ccucccuuuccuccgacugg

SEQ ID NO: 532099 - RNA, 21 nt, Human
ccucccuuuccuccgacugga

SEQ ID NO: 532100 - RNA, 27 nt, Human
ccucucgggauaaaggggaaugaaaac

SEQ ID NO: 532101 - RNA, 23 nt, Human
ccugccuuaagagcacucaggaa

SEQ ID NO: 532102 - RNA, 20 nt, Human
ccuguaacucaaaaauuguc

SEQ ID NO: 532103 - RNA, 21 nt, Human
ccuguaaucccagcugguuag

SEQ ID NO: 532104 - RNA, 24 nt, Human
ccuugagcaaauucccuaaccucu

SEQ ID NO: 532105 - RNA, 22 nt, Human
ccuugcucuguugcccaggcug

SEQ ID NO: 532106 - RNA, 23 nt, Human
ccuugcucuguugcccaggcugg

SEQ ID NO: 532107 - RNA, 24 nt, Human
ccuugcucuguugcccaggcugga

SEQ ID NO: 532108 - RNA, 24 nt, Human
ccuuuauaggguuguggugaggau

SEQ ID NO: 532109 - RNA, 18 nt, Human
cgaaacaaaacagagccu

SEQ ID NO: 532110 - RNA, 19 nt, Human
cgaaacaaaacagagccuu

SEQ ID NO: 532111 - RNA, 25 nt, Human
cgaagaacauacacuuauguuacaa

SEQ ID NO: 532112 - RNA, 21 nt, Human
cgcagcuuaggcuuuggcuca

SEQ ID NO: 532113 - RNA, 22 nt, Human
cgcagcuuaggcuuuggcucag

SEQ ID NO: 532114 - RNA, 26 nt, Human
cgccacgagcucccuccuuuauaggg

SEQ ID NO: 532115 - RNA, 21 nt, Human
cgcccaggcuggacugcggac

SEQ ID NO: 532116 - RNA, 24 nt, Human
cgcucugucgcccaggcuggacug

SEQ ID NO: 532117 - RNA, 19 nt, Human
cggcuucugaggcuuaccu

SEQ ID NO: 532118 - RNA, 22 nt, Human
cgggauaaaggggaaugaaaac

SEQ ID NO: 532119 - RNA, 22 nt, Human
cuaaagugcugggauuacaggc

SEQ ID NO: 532120 - RNA, 24 nt, Human
cuaaagugcugggauuacaggcgu

SEQ ID NO: 532121 - RNA, 21 nt, Human
cuaaguuaaaaaaaaaaaaaa

SEQ ID NO: 532122 - RNA, 22 nt, Human
cuaaguuaaaaaaaaaaaaaag

SEQ ID NO: 532123 - RNA, 23 nt, Human
cuauacccuaaagaauucgugug

SEQ ID NO: 532124 - RNA, 24 nt, Human
cucacugcaaccuccaccuccugg

SEQ ID NO: 532125 - RNA, 22 nt, Human
cucauacaucacugaguccugc

SEQ ID NO: 532126 - RNA, 21 nt, Human
cucauaccuguaaucccagcu

SEQ ID NO: 532127 - RNA, 18 nt, Human
cucaugauccaccugccu

SEQ ID NO: 532128 - RNA, 21 nt, Human
cuccagugaucucagguccac

SEQ ID NO: 532129 - RNA, 23 nt, Human
cuccagugaucucagguccaccg

SEQ ID NO: 532130 - RNA, 25 nt, Human
cucccucaaccucccgagcagcugg

SEQ ID NO: 532131 - RNA, 24 nt, Human
cuccugaucucaugauccaccugc

SEQ ID NO: 532132 - RNA, 21 nt, Human
cuccuggguuuaagugauucu

SEQ ID NO: 532133 - RNA, 23 nt, Human
cucgggauaaaggggaaugaaaa

SEQ ID NO: 532134 - RNA, 23 nt, Human
cucuuggccucuguuucuucauu

SEQ ID NO: 532135 - RNA, 21 nt, Human
cugaaauguccaucaacagca

SEQ ID NO: 532136 - RNA, 23 nt, Human
cugaagaucucagcugcaaccag

SEQ ID NO: 532137 - RNA, 18 nt, Human
cugcaaccuccaccuccu

SEQ ID NO: 532138 - RNA, 23 nt, Human
cugcaaccuccaccuccuggguu

SEQ ID NO: 532139 - RNA, 24 nt, Human
cugcaaccuccaccuccuggguuu

SEQ ID NO: 532140 - RNA, 21 nt, Human
cugcgcaaucauuagcagagu

SEQ ID NO: 532141 - RNA, 19 nt, Human
cuggagugcaguggcaugg

SEQ ID NO: 532142 - RNA, 22 nt, Human
cuggguuuaagugauucuucuc

SEQ ID NO: 532143 - RNA, 24 nt, Human
cuguacauuaaaguaaaaaacaaa

SEQ ID NO: 532144 - RNA, 26 nt, Human
cuuccugcaggcagauagcaagaggc

SEQ ID NO: 532145 - RNA, 19 nt, Human
cuucugaggcuuaccucuc

SEQ ID NO: 532146 - RNA, 23 nt, Human
cuugcacuuuaaugcagaauuag

SEQ ID NO: 532147 - RNA, 23 nt, Human
cuuggcuccagugaucucagguc

SEQ ID NO: 532148 - RNA, 18 nt, Human
cuuucagugaaccauuuc

SEQ ID NO: 532149 - RNA, 24 nt, Human
gaaaaaccaccacaggaagguuaa

SEQ ID NO: 532150 - RNA, 24 nt, Human
gaaaaagacaaucaaauugaaaag

SEQ ID NO: 532151 - RNA, 19 nt, Human
gaaaaggaccagaaacuca

SEQ ID NO: 532152 - RNA, 24 nt, Human
gaaacagauucacacucuuacgga

SEQ ID NO: 532153 - RNA, 23 nt, Human
gaaacucaauucgcagcuuaggc

SEQ ID NO: 532154 - RNA, 23 nt, Human
gaaccauuucaaaauugagcuaa

SEQ ID NO: 532155 - RNA, 21 nt, Human
gacagagagaccaacagaaca

SEQ ID NO: 532156 - RNA, 22 nt, Human
gaccaagagagauuucuaacaa

SEQ ID NO: 532157 - RNA, 21 nt, Human
gaccuugagcaaauucccuaa

SEQ ID NO: 532158 - RNA, 19 nt, Human
gagaaaaacaaugaacaaa

SEQ ID NO: 532159 - RNA, 24 nt, Human
gagcagcuggaaccacaggcacgc

SEQ ID NO: 532160 - RNA, 23 nt, Human
gaggauggaagugccaaaaagga

SEQ ID NO: 532161 - RNA, 24 nt, Human
gaucucaugauccaccugccuugg

SEQ ID NO: 532162 - RNA, 18 nt, Human
gauuacaggcgugagcca

SEQ ID NO: 532163 - RNA, 21 nt, Human
gauuacaggcgugagccacca

SEQ ID NO: 532164 - RNA, 24 nt, Human
gauuacaggcgugagccaccaagc

SEQ ID NO: 532165 - RNA, 23 nt, Human
gcaacacaaaucaguggagaaaa

SEQ ID NO: 532166 - RNA, 23 nt, Human
gcaacagaaugacgccacacaag

SEQ ID NO: 532167 - RNA, 26 nt, Human
gcaacuaugggguuugucgucucgac

SEQ ID NO: 532168 - RNA, 24 nt, Human
gcacuggaauagacagagagacca

SEQ ID NO: 532169 - RNA, 24 nt, Human
gcccaggcuggagugcaguggcau

SEQ ID NO: 532170 - RNA, 22 nt, Human
gccuuggccuccuaaagugcug

SEQ ID NO: 532171 - RNA, 25 nt, Human
gcucugucgcccaggcuggacugcg

SEQ ID NO: 532172 - RNA, 25 nt, Human
gcucuguugcccaggcuggagugca

SEQ ID NO: 532173 - RNA, 21 nt, Human
gcucuuaacaaaacagaacaa

SEQ ID NO: 532174 - RNA, 18 nt, Human
gcugcacugugguccaau

SEQ ID NO: 532175 - RNA, 21 nt, Human
gcuggacugcggacugcagug

SEQ ID NO: 532176 - RNA, 24 nt, Human
gcuggagcacauagagacuuccug

SEQ ID NO: 532177 - RNA, 19 nt, Human
gcuggagugcaguggcaug

SEQ ID NO: 532178 - RNA, 25 nt, Human
gcuucccggguucacgccauucucc

SEQ ID NO: 532179 - RNA, 21 nt, Human
ggaauaaaaacgaaaccaaga

SEQ ID NO: 532180 - RNA, 24 nt, Human
ggaccaaagcucaaaagcaggaga

SEQ ID NO: 532181 - RNA, 21 nt, Human
ggagucacuaacagucauaaa

SEQ ID NO: 532182 - RNA, 19 nt, Human
ggauuacaggcgugagcca

SEQ ID NO: 532183 - RNA, 18 nt, Human
ggccaggugcgguggcuc

SEQ ID NO: 532184 - RNA, 22 nt, Human
ggcguuucaccaugcugaccag

SEQ ID NO: 532185 - RNA, 23 nt, Human
ggcguuucaccaugcugaccagg

SEQ ID NO: 532186 - RNA, 21 nt, Human
ggcucauaccuguaaucccag

SEQ ID NO: 532187 - RNA, 23 nt, Human
gguggcucauaccuguaauccca

SEQ ID NO: 532188 - RNA, 24 nt, Human
gguggcucauaccuguaaucccag

SEQ ID NO: 532189 - RNA, 23 nt, Human
gugcgcaugcgugcgugugcaug

SEQ ID NO: 532190 - RNA, 23 nt, Human
gugugcaugagagagcgcgcaug

SEQ ID NO: 532191 - RNA, 20 nt, Human
guuaaaaaaaaaaaaaaguu

SEQ ID NO: 532192 - RNA, 26 nt, Human
uaaaaaacaaaacaaaaugaaaacaa

SEQ ID NO: 532193 - RNA, 18 nt, Human
uaaaagugaaauaacuca

SEQ ID NO: 532194 - RNA, 24 nt, Human
uaaaauagcagauacgcauaccug

SEQ ID NO: 532195 - RNA, 21 nt, Human
uaaagcuagacagugaagcac

SEQ ID NO: 532196 - RNA, 19 nt, Human
uaaagugccacuaaucaag

SEQ ID NO: 532197 - RNA, 20 nt, Human
uaaaugcccaacagcccacu

SEQ ID NO: 532198 - RNA, 19 nt, Human
uaacaaaacagaacaagga

SEQ ID NO: 532199 - RNA, 21 nt, Human
uaacaaaacagaacaaggaca

SEQ ID NO: 532200 - RNA, 22 nt, Human
uaacaaaacagaacaaggacag

SEQ ID NO: 532201 - RNA, 24 nt, Human
uaacacaggaccaaagcucaaaag

SEQ ID NO: 532202 - RNA, 20 nt, Human
uaacagucauaaaagugaaa

SEQ ID NO: 532203 - RNA, 23 nt, Human
uaagaugaguaucuagaacucuu

SEQ ID NO: 532204 - RNA, 18 nt, Human
uaagccacaagccagaag

SEQ ID NO: 532205 - RNA, 21 nt, Human
uaaggaaccuccucgagacuc

SEQ ID NO: 532206 - RNA, 24 nt, Human
uacaaaucuaugaugaaaccacac

SEQ ID NO: 532207 - RNA, 20 nt, Human
uacaggcgugagccaccaag

SEQ ID NO: 532208 - RNA, 22 nt, Human
uacaggcgugagccaccaagcc

SEQ ID NO: 532209 - RNA, 22 nt, Human
uacaggcgugagccaccaagcc

SEQ ID NO: 532210 - RNA, 23 nt, Human
uacaggcgugagccaccaagccu

SEQ ID NO: 532211 - RNA, 25 nt, Human
uacauaaaacagaggagucacuaac

SEQ ID NO: 532212 - RNA, 26 nt, Human
uaccacaggaugcagagcugccucuc

SEQ ID NO: 532213 - RNA, 19 nt, Human
uaccuguaaucccagcugg

SEQ ID NO: 532214 - RNA, 24 nt, Human
uacucucaaaaaugaaaaugauuu

SEQ ID NO: 532215 - RNA, 23 nt, Human
uagaaaaagacaaucaaauugaa

SEQ ID NO: 532216 - RNA, 23 nt, Human
uagaaaacaguaaguauaggaga

SEQ ID NO: 532217 - RNA, 22 nt, Human
uaggaaguucaaagacaugcaa

SEQ ID NO: 532218 - RNA, 24 nt, Human
uaguagggauggcguuucaccaug

SEQ ID NO: 532219 - RNA, 18 nt, Human
uaucccaauuucuucagg

SEQ ID NO: 532220 - RNA, 20 nt, Human
uauuacagaaacaaguaaau

SEQ ID NO: 532221 - RNA, 20 nt, Human
ucaaaagcaggagaaaguga

SEQ ID NO: 532222 - RNA, 24 nt, Human
ucacgcugugagaauccucuggac

SEQ ID NO: 532223 - RNA, 23 nt, Human
ucacugcaaccuccaccuccugg

SEQ ID NO: 532224 - RNA, 24 nt, Human
ucacugcaaccuccaccuccuggg

SEQ ID NO: 532225 - RNA, 25 nt, Human
ucacugcaaccuccaccuccugggu

SEQ ID NO: 532226 - RNA, 23 nt, Human
ucacugcaagcuccgcuucccgg

SEQ ID NO: 532227 - RNA, 24 nt, Human
ucacugcaagcuccgcuucccggg

SEQ ID NO: 532228 - RNA, 24 nt, Human
ucaguaagugacaggauuuuuucu

SEQ ID NO: 532229 - RNA, 24 nt, Human
uccaaugacacuuuggcacuaaaa

SEQ ID NO: 532230 - RNA, 22 nt, Human
uccagagaugacacugggacac

SEQ ID NO: 532231 - RNA, 20 nt, Human
ucccggguucacgccauucu

SEQ ID NO: 532232 - RNA, 21 nt, Human
ucccggguucacgccauucuc

SEQ ID NO: 532233 - RNA, 24 nt, Human
ucccggguucacgccauucuccug

SEQ ID NO: 532234 - RNA, 24 nt, Human
ucccucaaccucccgagcagcugg

SEQ ID NO: 532235 - RNA, 24 nt, Human
uccuaaagugcugggauuacaggc

SEQ ID NO: 532236 - RNA, 25 nt, Human
ucgagacucuccuuaucuagaaacc

SEQ ID NO: 532237 - RNA, 18 nt, Human
ucgcccaggcuggacugc

SEQ ID NO: 532238 - RNA, 21 nt, Human
ucuagaaaaagacaaucaaau

SEQ ID NO: 532239 - RNA, 22 nt, Human
ucuagccuuuuucaacuggagu

SEQ ID NO: 532240 - RNA, 22 nt, Human
ucucagguccaccuuugugccc

SEQ ID NO: 532241 - RNA, 26 nt, Human
ucuccuaugaacggaacauaacaggu

SEQ ID NO: 532242 - RNA, 25 nt, Human
ucuccugcuuaaaaaaaaaaaaaaa

SEQ ID NO: 532243 - RNA, 19 nt, Human
ucucgcucugucgcccagg

SEQ ID NO: 532244 - RNA, 23 nt, Human
ucucgcucugucgcccaggcugg

SEQ ID NO: 532245 - RNA, 24 nt, Human
ucucgcucugucgcccaggcugga

SEQ ID NO: 532246 - RNA, 24 nt, Human
ucucucagaacuccgagugagaac

SEQ ID NO: 532247 - RNA, 27 nt, Human
ucucuuggccucuguuucuucauuuua

SEQ ID NO: 532248 - RNA, 24 nt, Human
ucugucgcccaggcuggacugcgg

SEQ ID NO: 532249 - RNA, 22 nt, Human
ucugucugaagaucucagcugc

SEQ ID NO: 532250 - RNA, 18 nt, Human
ucuguugcccaggcugga

SEQ ID NO: 532251 - RNA, 24 nt, Human
ucuguugcccaggcuggagugcag

SEQ ID NO: 532252 - RNA, 24 nt, Human
ucuucaggaccagguggcacucuc

SEQ ID NO: 532253 - RNA, 20 nt, Human
ucuuuuuuuuuuuuuuuugg

SEQ ID NO: 532254 - RNA, 18 nt, Human
ugaaaaacaagaaaaagg

SEQ ID NO: 532255 - RNA, 18 nt, Human
ugaaaaacaagaaaaagg

SEQ ID NO: 532256 - RNA, 21 nt, Human
ugaaaaacaagaaaaagguag

SEQ ID NO: 532257 - RNA, 21 nt, Human
ugaaaaacaagaaaaagguag

SEQ ID NO: 532258 - RNA, 21 nt, Human
ugaaaacagcaaggugcagga

SEQ ID NO: 532259 - RNA, 23 nt, Human
ugaaaacagcaaggugcaggaca

SEQ ID NO: 532260 - RNA, 22 nt, Human
ugaaaaguaagcaaaagauuua

SEQ ID NO: 532261 - RNA, 18 nt, Human
ugaaaaugauuuccccag

SEQ ID NO: 532262 - RNA, 24 nt, Human
ugaaauguccaucaacagcagaaa

SEQ ID NO: 532263 - RNA, 23 nt, Human
ugagaacagcugccacuggcugc

SEQ ID NO: 532264 - RNA, 22 nt, Human
ugagacggagucucgcucuguc

SEQ ID NO: 532265 - RNA, 23 nt, Human
ugaggauggaagugccaaaaagg

SEQ ID NO: 532266 - RNA, 19 nt, Human
ugaggcaagccauaaggaa

SEQ ID NO: 532267 - RNA, 18 nt, Human
ugaguaucuagaacucuu

SEQ ID NO: 532268 - RNA, 23 nt, Human
ugaucucaugauccaccugccuu

SEQ ID NO: 532269 - RNA, 21 nt, Human
ugcaacagcaaaacacuggaa

SEQ ID NO: 532270 - RNA, 20 nt, Human
ugcaaucuuuuuuuuuuuuu

SEQ ID NO: 532271 - RNA, 22 nt, Human
ugcaccagaaauacauaaaaca

SEQ ID NO: 532272 - RNA, 22 nt, Human
ugcaguggcauggucucagcuc

SEQ ID NO: 532273 - RNA, 18 nt, Human
ugcaguggcgcaaucucg

SEQ ID NO: 532274 - RNA, 23 nt, Human
ugcaguggcgcaaucucggcuca

SEQ ID NO: 532275 - RNA, 21 nt, Human
ugccacuggcugcacgaccuu

SEQ ID NO: 532276 - RNA, 20 nt, Human
ugcccaagggccaggugcgg

SEQ ID NO: 532277 - RNA, 19 nt, Human
ugcccacaaguaucccaau

SEQ ID NO: 532278 - RNA, 18 nt, Human
ugcccaggcuggagugca

SEQ ID NO: 532279 - RNA, 21 nt, Human
ugcccaggcuggagugcagug

SEQ ID NO: 532280 - RNA, 22 nt, Human
ugcccaggcuggagugcagugg

SEQ ID NO: 532281 - RNA, 24 nt, Human
ugcccaggcuggagugcaguggca

SEQ ID NO: 532282 - RNA, 18 nt, Human
ugccugacacaagauggg

SEQ ID NO: 532283 - RNA, 23 nt, Human
ugcgcuuggaauuuaccagaaca

SEQ ID NO: 532284 - RNA, 19 nt, Human
ugcuacacaaucaccaaac

SEQ ID NO: 532285 - RNA, 24 nt, Human
ugcucuguugcccaggcuggagug

SEQ ID NO: 532286 - RNA, 24 nt, Human
ugcugggauuacaggcgugagcca

SEQ ID NO: 532287 - RNA, 21 nt, Human
uggaaccacaggcacgcgcca

SEQ ID NO: 532288 - RNA, 24 nt, Human
uggaaccacaggcacgcgccaccg

SEQ ID NO: 532289 - RNA, 23 nt, Human
uggaauagacagagagaccaaca

SEQ ID NO: 532290 - RNA, 20 nt, Human
uggaauuuaccagaacacac

SEQ ID NO: 532291 - RNA, 18 nt, Human
uggagaaaaacaaugaac

SEQ ID NO: 532292 - RNA, 20 nt, Human
uggagugcaguggcaugguc

SEQ ID NO: 532293 - RNA, 23 nt, Human
uggagugcaguggcauggucuca

SEQ ID NO: 532294 - RNA, 24 nt, Human
uggagugcaguggcauggucucag

SEQ ID NO: 532295 - RNA, 19 nt, Human
uggcauggucucagcucac

SEQ ID NO: 532296 - RNA, 24 nt, Human
uggcauggucucagcucacugcaa

SEQ ID NO: 532297 - RNA, 24 nt, Human
uggcguuucaccaugcugaccagg

SEQ ID NO: 532298 - RNA, 21 nt, Human
uggcucauaccuguaauccca

SEQ ID NO: 532299 - RNA, 22 nt, Human
uggcucauaccuguaaucccag

SEQ ID NO: 532300 - RNA, 20 nt, Human
uggcugcacgaccuugagca

SEQ ID NO: 532301 - RNA, 18 nt, Human
ugggauuacaggcgugag

SEQ ID NO: 532302 - RNA, 19 nt, Human
ugggauuacaggcgugagc

SEQ ID NO: 532303 - RNA, 22 nt, Human
ugggauuacaggcgugagccac

SEQ ID NO: 532304 - RNA, 23 nt, Human
ugggauuacaggcgugagccacc

SEQ ID NO: 532305 - RNA, 24 nt, Human
ugggauuacaggcgugagccacca

SEQ ID NO: 532306 - RNA, 19 nt, Human
ugucugaagaucucagcug

SEQ ID NO: 532307 - RNA, 28 nt, Human
ugucuuaacuauacccuaaagaauucgu

SEQ ID NO: 532308 - RNA, 25 nt, Human
ugugcaaucuuuuuuuuuuuuuuuu

SEQ ID NO: 532309 - RNA, 19 nt, Human
ugugcuggagcacauagag

SEQ ID NO: 532310 - RNA, 22 nt, Human
uguguagcaauacacauauaug

SEQ ID NO: 532311 - RNA, 19 nt, Human
ugugugccaguugaugugu

SEQ ID NO: 532312 - RNA, 22 nt, Human
ugugugccaguugaugugugca

SEQ ID NO: 532313 - RNA, 19 nt, Human
uguuggcuaggaugugaag

SEQ ID NO: 532314 - RNA, 19 nt, Human
uuaagggacuuagaacauc

SEQ ID NO: 532315 - RNA, 19 nt, Human
uuacaauuuaugcccaagg

SEQ ID NO: 532316 - RNA, 18 nt, Human
uuaguagggauggcguuu

SEQ ID NO: 532317 - RNA, 24 nt, Human
uuaguagggauggcguuucaccau

SEQ ID NO: 532318 - RNA, 18 nt, Human
uuccccuccucccuuucc

SEQ ID NO: 532319 - RNA, 19 nt, Human
uuccugcaggcagauagca

SEQ ID NO: 532320 - RNA, 30 nt, Human
uucuccugcuuaaaaaaaaaaaaaaaaaaa

SEQ ID NO: 532321 - RNA, 21 nt, Human
uugaaaaacaagaaaaaggua

SEQ ID NO: 532322 - RNA, 24 nt, Human
uugcccaggcuggagugcaguggc

SEQ ID NO: 532323 - RNA, 24 nt, Human
uugcucuguugcccaggcuggagu

SEQ ID NO: 532324 - RNA, 18 nt, Human
uuggccuccuaaagugcu

SEQ ID NO: 532325 - RNA, 19 nt, Human
uuggcuccagugaucucag

SEQ ID NO: 532326 - RNA, 22 nt, Human
uuggcuccagugaucucagguc

SEQ ID NO: 532327 - RNA, 23 nt, Human
uuuaagaugaguaucuagaacuc

SEQ ID NO: 532328 - RNA, 18 nt, Human
uuuuaaggucugauucua

SEQ ID NO: 532329 - RNA, 23 nt, Human
uuuuuguauccuuaguagggaug

SEQ ID NO: 532330 - RNA, 25 nt, Human
uuuuuuuuuuuugagacggagucuc

SEQ ID NO: 532331 - RNA, 18 nt, Human
uuuuuuuuuuuuuuaaac

SEQ ID NO: 532332 - RNA, 22 nt, Human
uuuuuuuuuuuuuugagacgga

SEQ ID NO: 532333 - RNA, 23 nt, Human
uuuuuuuuuuuuuuuuuuaaacg

SEQ ID NO: 532334 - RNA, 20 nt, Human
aaaaauucaaaaaauuagcc

SEQ ID NO: 532335 - RNA, 20 nt, Human
aaacaaugucagcuuccuga

SEQ ID NO: 532336 - RNA, 21 nt, Human
aagaaagcauucuccuuccac

SEQ ID NO: 532337 - RNA, 18 nt, Human
aauuagccaggcauggug

SEQ ID NO: 532338 - RNA, 21 nt, Human
acaaagaaagcauucuccuuc

SEQ ID NO: 532339 - RNA, 23 nt, Human
acaaagaaagcauucuccuucca

SEQ ID NO: 532340 - RNA, 24 nt, Human
acagagaaagacccugucucaaaa

SEQ ID NO: 532341 - RNA, 23 nt, Human
acaguggaaacuaguuuccuuca

SEQ ID NO: 532342 - RNA, 24 nt, Human
accagugcacucuagccugggcaa

SEQ ID NO: 532343 - RNA, 26 nt, Human
accagugcacucuagccugggcaaca

SEQ ID NO: 532344 - RNA, 28 nt, Human
acccugucucaaaaaaaaaaaaaaaaaa

SEQ ID NO: 532345 - RNA, 25 nt, Human
acgaaaccacagaugaggccacaaa

SEQ ID NO: 532346 - RNA, 27 nt, Human
acgaaaccacagaugaggccacaaaga

SEQ ID NO: 532347 - RNA, 21 nt, Human
acugaacugugcuuuaaauag

SEQ ID NO: 532348 - RNA, 23 nt, Human
acuuguagucccagcuacucagg

SEQ ID NO: 532349 - RNA, 24 nt, Human
agcacuuugggaggucgagguggg

SEQ ID NO: 532350 - RNA, 18 nt, Human
agccaggcaugguggugc

SEQ ID NO: 532351 - RNA, 24 nt, Human
agcuacucaggaggcugagguggg

SEQ ID NO: 532352 - RNA, 24 nt, Human
aggaucgcuugaggccaggaguuc

SEQ ID NO: 532353 - RNA, 24 nt, Human
aggcgagguggcucacaccuguaa

SEQ ID NO: 532354 - RNA, 21 nt, Human
aggcuagagugagccgugauc

SEQ ID NO: 532355 - RNA, 24 nt, Human
aggcugaggugggagaauugcuug

SEQ ID NO: 532356 - RNA, 20 nt, Human
agggagaaagggggagagaa

SEQ ID NO: 532357 - RNA, 24 nt, Human
aggucgaggugggaggaucgcuug

SEQ ID NO: 532358 - RNA, 18 nt, Human
aggugggaggaucgcuug

SEQ ID NO: 532359 - RNA, 23 nt, Human
aggugggaggaucgcuugaggcc

SEQ ID NO: 532360 - RNA, 24 nt, Human
agugcacucuagccugggcaacag

SEQ ID NO: 532361 - RNA, 24 nt, Human
aguucgagaccacccugggcaaca

SEQ ID NO: 532362 - RNA, 23 nt, Human
aucaucugguucucccagacccc

SEQ ID NO: 532363 - RNA, 19 nt, Human
auuugcuuugugauuccca

SEQ ID NO: 532364 - RNA, 22 nt, Human
caacagagaaagacccugucuc

SEQ ID NO: 532365 - RNA, 19 nt, Human
caacagagcgagaucccau

SEQ ID NO: 532366 - RNA, 24 nt, Human
caacagagcgagaucccaucacua

SEQ ID NO: 532367 - RNA, 24 nt, Human
cacaccuguaaucccagcacuuug

SEQ ID NO: 532368 - RNA, 20 nt, Human
cacagcaacuggcugagaaa

SEQ ID NO: 532369 - RNA, 18 nt, Human
cacccugggcaacagagc

SEQ ID NO: 532370 - RNA, 19 nt, Human
caccuguaaucccagcacu

SEQ ID NO: 532371 - RNA, 24 nt, Human
caccuguaaucccagcacuuuggg

SEQ ID NO: 532372 - RNA, 24 nt, Human
cacuuguagucccagcuacucagg

SEQ ID NO: 532373 - RNA, 24 nt, Human
cagcacuuugggaggucgaggugg

SEQ ID NO: 532374 - RNA, 24 nt, Human
cagcuacucaggaggcugaggugg

SEQ ID NO: 532375 - RNA, 24 nt, Human
cagcuuccugaaucauccagggag

SEQ ID NO: 532376 - RNA, 26 nt, Human
cagcuuccugaaucauccagggagaa

SEQ ID NO: 532377 - RNA, 18 nt, Human
caggaauucaaggcuaga

SEQ ID NO: 532378 - RNA, 20 nt, Human
caggcuacucuccagggaca

SEQ ID NO: 532379 - RNA, 19 nt, Human
cagugcacucuagccuggg

SEQ ID NO: 532380 - RNA, 23 nt, Human
cagugcacucuagccugggcaac

SEQ ID NO: 532381 - RNA, 24 nt, Human
cagugcacucuagccugggcaaca

SEQ ID NO: 532382 - RNA, 25 nt, Human
caucugguucucccagacccuuuua

SEQ ID NO: 532383 - RNA, 25 nt, Human
ccaggaguucgagaccacccugggc

SEQ ID NO: 532384 - RNA, 18 nt, Human
ccaggcgagguggcucac

SEQ ID NO: 532385 - RNA, 20 nt, Human
ccagugcacucuagccuggg

SEQ ID NO: 532386 - RNA, 21 nt, Human
ccagugcacucuagccugggc

SEQ ID NO: 532387 - RNA, 23 nt, Human
ccagugcacucuagccugggcaa

SEQ ID NO: 532388 - RNA, 24 nt, Human
ccagugcacucuagccugggcaac

SEQ ID NO: 532389 - RNA, 24 nt, Human
cccaucacuacaaaaauucaaaaa

SEQ ID NO: 532390 - RNA, 19 nt, Human
cccugucucaaaaaaaaaa

SEQ ID NO: 532391 - RNA, 23 nt, Human
ccgcgcugcgccgcguacaccca

SEQ ID NO: 532392 - RNA, 23 nt, Human
ccugucucaaaaaaaaaaaaaaa

SEQ ID NO: 532393 - RNA, 24 nt, Human
cgaaaccacagaugaggccacaaa

SEQ ID NO: 532394 - RNA, 23 nt, Human
cgaggugggaggaucgcuugagg

SEQ ID NO: 532395 - RNA, 24 nt, Human
cgaggugggaggaucgcuugaggc

SEQ ID NO: 532396 - RNA, 26 nt, Human
cgaggugggaggaucgcuugaggcca

SEQ ID NO: 532397 - RNA, 18 nt, Human
cucaaaaaaaaaaaaaaa

SEQ ID NO: 532398 - RNA, 22 nt, Human
cucacaccuguaaucccagcac

SEQ ID NO: 532399 - RNA, 24 nt, Human
cucacaccuguaaucccagcacuu

SEQ ID NO: 532400 - RNA, 18 nt, Human
cucaggaggcugaggugg

SEQ ID NO: 532401 - RNA, 18 nt, Human
cugccuugaggaaacaau

SEQ ID NO: 532402 - RNA, 19 nt, Human
gaaaccacagaugaggcca

SEQ ID NO: 532403 - RNA, 24 nt, Human
gaggugggagaauugcuugggccc

SEQ ID NO: 532404 - RNA, 24 nt, Human
gaggugggaggaucgcuugaggcc

SEQ ID NO: 532405 - RNA, 18 nt, Human
gaucgcuugaggccagga

SEQ ID NO: 532406 - RNA, 24 nt, Human
gaucgcuugaggccaggaguucga

SEQ ID NO: 532407 - RNA, 23 nt, Human
ggaucgcuugaggccaggaguuc

SEQ ID NO: 532408 - RNA, 21 nt, Human
ggcucacaccuguaaucccag

SEQ ID NO: 532409 - RNA, 22 nt, Human
ggugcacacuuguagucccagc

SEQ ID NO: 532410 - RNA, 23 nt, Human
gguggcucacaccuguaauccca

SEQ ID NO: 532411 - RNA, 24 nt, Human
gguggcucacaccuguaaucccag

SEQ ID NO: 532412 - RNA, 18 nt, Human
uagccugggcaacagaga

SEQ ID NO: 532413 - RNA, 22 nt, Human
ucaaaaaaaaaaaaaaaaaaaa

SEQ ID NO: 532414 - RNA, 23 nt, Human
ucaaaaaaaaaaaaaaaaaaaaa

SEQ ID NO: 532415 - RNA, 18 nt, Human
ucaccagugcacucuagc

SEQ ID NO: 532416 - RNA, 18 nt, Human
uccagggagaaaggggga

SEQ ID NO: 532417 - RNA, 23 nt, Human
uccagggagaaagggggagagaa

SEQ ID NO: 532418 - RNA, 23 nt, Human
ucgcuugaggccaggaguucgag

SEQ ID NO: 532419 - RNA, 21 nt, Human
ugaggaaacaaugucagcuuc

SEQ ID NO: 532420 - RNA, 22 nt, Human
ugaggaaacaaugucagcuucc

SEQ ID NO: 532421 - RNA, 21 nt, Human
ugaggccacaaagaaagcauu

SEQ ID NO: 532422 - RNA, 23 nt, Human
ugaggugggagaauugcuugggc

SEQ ID NO: 532423 - RNA, 24 nt, Human
ugaggugggagaauugcuugggcc

SEQ ID NO: 532424 - RNA, 21 nt, Human
uggcucacaccuguaauccca

SEQ ID NO: 532425 - RNA, 24 nt, Human
uggcucacaccuguaaucccagca

SEQ ID NO: 532426 - RNA, 24 nt, Human
uggcugagaaaacagaaccaggaa

SEQ ID NO: 532427 - RNA, 23 nt, Human
ugggaggucgaggugggaggauc

SEQ ID NO: 532428 - RNA, 21 nt, Human
ugggcaacagagaaagacccu

SEQ ID NO: 532429 - RNA, 18 nt, Human
uggugcacacuuguaguc

SEQ ID NO: 532430 - RNA, 24 nt, Human
ugguggugcacacuuguaguccca

SEQ ID NO: 532431 - RNA, 24 nt, Human
uguuccaauuguuuguguguuugc

SEQ ID NO: 532432 - RNA, 22 nt, Human
uugaggccaggaguucgagacc

SEQ ID NO: 532433 - RNA, 24 nt, Human
uugcuugggcccaggaauucaagg

SEQ ID NO: 532434 - RNA, 22 nt, Human
uuguuuguguguuugcaauccu

SEQ ID NO: 532435 - RNA, 22 nt, Human
uuuggaggcauauggagaaggg

SEQ ID NO: 532436 - RNA, 22 nt, Human
aaaaaaaaaaaaaaggcaagaa

SEQ ID NO: 532437 - RNA, 25 nt, Human
aaaaaaaaaaaaaaggcaagaaaag

SEQ ID NO: 532438 - RNA, 23 nt, Human
aaaaaaaaaaaggcaagaaaaga

SEQ ID NO: 532439 - RNA, 22 nt, Human
aaaaacagcacucgcuccccuc

SEQ ID NO: 532440 - RNA, 27 nt, Human
aaaaacauguauuuuuucuuuugccuc

SEQ ID NO: 532441 - RNA, 22 nt, Human
aaaaacggucccugcgucccga

SEQ ID NO: 532442 - RNA, 21 nt, Human
aaaagaaaaccaacucgguga

SEQ ID NO: 532443 - RNA, 23 nt, Human
aaaaggcaagacccccguccaca

SEQ ID NO: 532444 - RNA, 18 nt, Human
aaacagacacauacacaa

SEQ ID NO: 532445 - RNA, 19 nt, Human
aaacagaccaagauccccc

SEQ ID NO: 532446 - RNA, 21 nt, Human
aaacagaccaagaucccccau

SEQ ID NO: 532447 - RNA, 20 nt, Human
aaagaacagauagaaguuac

SEQ ID NO: 532448 - RNA, 23 nt, Human
aaagcaaagggugggguggguga

SEQ ID NO: 532449 - RNA, 20 nt, Human
aaaugaaagcaaaggguggg

SEQ ID NO: 532450 - RNA, 19 nt, Human
aacaagacacauaaaaagc

SEQ ID NO: 532451 - RNA, 23 nt, Human
aacacaccugaaaugaaagcaaa

SEQ ID NO: 532452 - RNA, 19 nt, Human
aaccaacucggugaucugc

SEQ ID NO: 532453 - RNA, 23 nt, Human
aaccuggacugacuggagaccug

SEQ ID NO: 532454 - RNA, 18 nt, Human
aagcagugggaggugggg

SEQ ID NO: 532455 - RNA, 20 nt, Human
aagcggggagcaagagagag

SEQ ID NO: 532456 - RNA, 19 nt, Human
aagggcagcaguuaaggga

SEQ ID NO: 532457 - RNA, 22 nt, Human
acaacaggcauuuuuacugaaa

SEQ ID NO: 532458 - RNA, 22 nt, Human
acacacgccccugugauuuaaa

SEQ ID NO: 532459 - RNA, 18 nt, Human
acaccugaaaugaaagca

SEQ ID NO: 532460 - RNA, 20 nt, Human
acaggaauugaaaaggcaag

SEQ ID NO: 532461 - RNA, 20 nt, Human
accuggacugacuggagacc

SEQ ID NO: 532462 - RNA, 27 nt, Human
acuaggaauuuuuucaauacaaucagu

SEQ ID NO: 532463 - RNA, 19 nt, Human
acucucugcagccaaaaca

SEQ ID NO: 532464 - RNA, 23 nt, Human
acugcagcugggcagacuggcgg

SEQ ID NO: 532465 - RNA, 22 nt, Human
agaaaagaaaaccaacucggug

SEQ ID NO: 532466 - RNA, 18 nt, Human
agccccuggccugcucag

SEQ ID NO: 532467 - RNA, 19 nt, Human
aggaagcagugggaggugg

SEQ ID NO: 532468 - RNA, 18 nt, Human
aggaaggcucugagucca

SEQ ID NO: 532469 - RNA, 25 nt, Human
aggcaagaaaagaaaagaaaaccaa

SEQ ID NO: 532470 - RNA, 26 nt, Human
aggcaagaaaagaaaagaagggaccc

SEQ ID NO: 532471 - RNA, 23 nt, Human
agggaccagcaaaaauaauaaac

SEQ ID NO: 532472 - RNA, 18 nt, Human
agggaugaggaccacugu

SEQ ID NO: 532473 - RNA, 18 nt, Human
agggcagcaguuaaggga

SEQ ID NO: 532474 - RNA, 19 nt, Human
auaaacagacacauacaca

SEQ ID NO: 532475 - RNA, 24 nt, Human
auacagcuauauacacacguccag

SEQ ID NO: 532476 - RNA, 24 nt, Human
caaaaaaaaaaaaaaggcaagaaa

SEQ ID NO: 532477 - RNA, 22 nt, Human
caaaaauaauaaaccaccccca

SEQ ID NO: 532478 - RNA, 26 nt, Human
caagaaaaacagaccaagauccccca

SEQ ID NO: 532479 - RNA, 22 nt, Human
caagaaaagaaaagaaaaccaa

SEQ ID NO: 532480 - RNA, 20 nt, Human
caagaccaggacaggugauu

SEQ ID NO: 532481 - RNA, 23 nt, Human
caagucaccuccccaacaagaca

SEQ ID NO: 532482 - RNA, 21 nt, Human
caaucaguuagaaauacacac

SEQ ID NO: 532483 - RNA, 21 nt, Human
cacacagcaagaccaggacag

SEQ ID NO: 532484 - RNA, 21 nt, Human
cacagcgcacccucguccucc

SEQ ID NO: 532485 - RNA, 22 nt, Human
cacagcugggagcagagaggcc

SEQ ID NO: 532486 - RNA, 24 nt, Human
caccaugcaagucaccuccccaac

SEQ ID NO: 532487 - RNA, 21 nt, Human
cacccucguccuccugcccug

SEQ ID NO: 532488 - RNA, 22 nt, Human
cacgacagccuuguccccacca

SEQ ID NO: 532489 - RNA, 18 nt, Human
cacgucugcucuccacua

SEQ ID NO: 532490 - RNA, 24 nt, Human
cagaacggaauuccgcggacugcu

SEQ ID NO: 532491 - RNA, 19 nt, Human
cagcaaaaauaauaaacca

SEQ ID NO: 532492 - RNA, 18 nt, Human
cagcacucgcuccccuca

SEQ ID NO: 532493 - RNA, 18 nt, Human
cagccccacggcuagcga

SEQ ID NO: 532494 - RNA, 19 nt, Human
cagccuggaagaccacgcc

SEQ ID NO: 532495 - RNA, 22 nt, Human
cagcgcacccucguccuccugc

SEQ ID NO: 532496 - RNA, 23 nt, Human
caggacagccccacggcuagcga

SEQ ID NO: 532497 - RNA, 21 nt, Human
caggcagacaacagagggagg

SEQ ID NO: 532498 - RNA, 22 nt, Human
cauccuggcugcaguucucugc

SEQ ID NO: 532499 - RNA, 21 nt, Human
caugaugggaaaaacacaguu

SEQ ID NO: 532500 - RNA, 22 nt, Human
caugcaagucaccuccccaaca

SEQ ID NO: 532501 - RNA, 24 nt, Human
caugcaagucaccuccccaacaag

SEQ ID NO: 532502 - RNA, 22 nt, Human
cauggaguagaauggggugacc

SEQ ID NO: 532503 - RNA, 23 nt, Human
cauggggcgugaguacugcagcu

SEQ ID NO: 532504 - RNA, 23 nt, Human
cauguuuguuuucuuaccccaaa

SEQ ID NO: 532505 - RNA, 25 nt, Human
ccaaaggccaacuuucucauacaac

SEQ ID NO: 532506 - RNA, 18 nt, Human
ccacaaggggaggcgagg

SEQ ID NO: 532507 - RNA, 22 nt, Human
ccacagcugggagcagagaggc

SEQ ID NO: 532508 - RNA, 20 nt, Human
ccacugccucuacuaggcug

SEQ ID NO: 532509 - RNA, 18 nt, Human
ccagccuggaagaccacg

SEQ ID NO: 532510 - RNA, 21 nt, Human
cccacccaccaagacccauug

SEQ ID NO: 532511 - RNA, 20 nt, Human
cccacuccaucucgggagca

SEQ ID NO: 532512 - RNA, 24 nt, Human
ccccaccaugcaagucaccucccc

SEQ ID NO: 532513 - RNA, 18 nt, Human
ccccagagccacaaugac

SEQ ID NO: 532514 - RNA, 21 nt, Human
cccugagccucaaaaaagaac

SEQ ID NO: 532515 - RNA, 19 nt, Human
ccucaaaaaagaacagaua

SEQ ID NO: 532516 - RNA, 22 nt, Human
ccuucccaggacagccccacgg

SEQ ID NO: 532517 - RNA, 22 nt, Human
cgaggaguuggaagaaguuauu

SEQ ID NO: 532518 - RNA, 21 nt, Human
cgcccacuccaucucgggagc

SEQ ID NO: 532519 - RNA, 22 nt, Human
cgccccugugauuuaaaaacgg

SEQ ID NO: 532520 - RNA, 25 nt, Human
cgccccugugauuuaaaaacggucc

SEQ ID NO: 532521 - RNA, 25 nt, Human
cgcugaggguccugacauuagcugu

SEQ ID NO: 532522 - RNA, 18 nt, Human
cuacaauaagaaauccua

SEQ ID NO: 532523 - RNA, 18 nt, Human
cucauacaacuggugccc

SEQ ID NO: 532524 - RNA, 18 nt, Human
cucccacccaccaagacc

SEQ ID NO: 532525 - RNA, 24 nt, Human
cucuccacuaggcucccacaagaa

SEQ ID NO: 532526 - RNA, 25 nt, Human
cucuccacugagcacucagcccccc

SEQ ID NO: 532527 - RNA, 20 nt, Human
cucuccuuuacucuccuccc

SEQ ID NO: 532528 - RNA, 25 nt, Human
cucuuggccacacgguacugcuuug

SEQ ID NO: 532529 - RNA, 24 nt, Human
cugaguccaccucuuggccacacu

SEQ ID NO: 532530 - RNA, 23 nt, Human
cugcagccaaaacagaacgaagc

SEQ ID NO: 532531 - RNA, 19 nt, Human
cugccucuacuaggcugcc

SEQ ID NO: 532532 - RNA, 20 nt, Human
cugccucuacuaggcugccu

SEQ ID NO: 532533 - RNA, 18 nt, Human
cuggcauccccagagcca

SEQ ID NO: 532534 - RNA, 21 nt, Human
cuuccuuucucagagggccuu

SEQ ID NO: 532535 - RNA, 19 nt, Human
gaaaaaaaaaaaaaagagg

SEQ ID NO: 532536 - RNA, 21 nt, Human
gaaugagaguauggaugaacc

SEQ ID NO: 532537 - RNA, 24 nt, Human
gaccuuuccuuuccugcacuucac

SEQ ID NO: 532538 - RNA, 21 nt, Human
gagaaggaagggccagccugg

SEQ ID NO: 532539 - RNA, 19 nt, Human
gaggaguuggaagaaguua

SEQ ID NO: 532540 - RNA, 19 nt, Human
gcacugccucuuaaaaacc

SEQ ID NO: 532541 - RNA, 23 nt, Human
gcagcuuccuuucucagagggcc

SEQ ID NO: 532542 - RNA, 23 nt, Human
gcucaaggaaggcucugagucca

SEQ ID NO: 532543 - RNA, 19 nt, Human
gcuccaccgcugagggucc

SEQ ID NO: 532544 - RNA, 24 nt, Human
ggaagggccagccuggaagaccac

SEQ ID NO: 532545 - RNA, 19 nt, Human
ggagagagagaugaagacu

SEQ ID NO: 532546 - RNA, 20 nt, Human
ggagguggggagggaugagg

SEQ ID NO: 532547 - RNA, 21 nt, Human
ggcaggcugacacacgccccu

SEQ ID NO: 532548 - RNA, 18 nt, Human
ggcagggaagguggcggu

SEQ ID NO: 532549 - RNA, 19 nt, Human
ggcggccgagugcggacac

SEQ ID NO: 532550 - RNA, 20 nt, Human
ggcugccggccucucccacu

SEQ ID NO: 532551 - RNA, 21 nt, Human
gggcacggcaggcggccgagu

SEQ ID NO: 532552 - RNA, 22 nt, Human
gggcaggcugacacacgccccu

SEQ ID NO: 532553 - RNA, 19 nt, Human
ggggcagggaagguggcgg

SEQ ID NO: 532554 - RNA, 22 nt, Human
ggggcuggggcagggaaggugg

SEQ ID NO: 532555 - RNA, 18 nt, Human
gggugggugaaacuggag

SEQ ID NO: 532556 - RNA, 22 nt, Human
gggugggugaaacuggagagag

SEQ ID NO: 532557 - RNA, 22 nt, Human
gguccccccagcaggcuccacc

SEQ ID NO: 532558 - RNA, 24 nt, Human
guggacacaacuccccgcucucca

SEQ ID NO: 532559 - RNA, 18 nt, Human
uaaacagacacauacaca

SEQ ID NO: 532560 - RNA, 20 nt, Human
uaaacagacacauacacaaa

SEQ ID NO: 532561 - RNA, 23 nt, Human
uaaacagacacauacacaaagua

SEQ ID NO: 532562 - RNA, 19 nt, Human
uaagaaauccuaaguccaa

SEQ ID NO: 532563 - RNA, 19 nt, Human
uaagcagcuuccuuucuca

SEQ ID NO: 532564 - RNA, 25 nt, Human
uaauaaaccacccccauaaacagac

SEQ ID NO: 532565 - RNA, 21 nt, Human
uacaaucaguuagaaauacac

SEQ ID NO: 532566 - RNA, 21 nt, Human
uaccccaaauguuccuugcuu

SEQ ID NO: 532567 - RNA, 22 nt, Human
uacuccuaaaaagugcugggaa

SEQ ID NO: 532568 - RNA, 24 nt, Human
uagcgacgucggcaagguggacac

SEQ ID NO: 532569 - RNA, 21 nt, Human
uauauacacacguccagaacu

SEQ ID NO: 532570 - RNA, 20 nt, Human
ucaaaaaaaaaaaaaaggca

SEQ ID NO: 532571 - RNA, 21 nt, Human
ucaaaaacagcacucgcuccc

SEQ ID NO: 532572 - RNA, 19 nt, Human
ucagccccuggccugcuca

SEQ ID NO: 532573 - RNA, 19 nt, Human
ucagccccuggccugcuca

SEQ ID NO: 532574 - RNA, 18 nt, Human
uccacugagcacucagcc

SEQ ID NO: 532575 - RNA, 19 nt, Human
uccacugagcacucagccc

SEQ ID NO: 532576 - RNA, 22 nt, Human
uccccaccaugcaagucaccuc

SEQ ID NO: 532577 - RNA, 21 nt, Human
uccccagagccacaaugaccu

SEQ ID NO: 532578 - RNA, 22 nt, Human
ucccugcgucccgagugaggau

SEQ ID NO: 532579 - RNA, 20 nt, Human
ucccuugccaugccucccuu

SEQ ID NO: 532580 - RNA, 22 nt, Human
ucccuugccaugccucccuucu

SEQ ID NO: 532581 - RNA, 23 nt, Human
uccgucaugaugggaaaaacaca

SEQ ID NO: 532582 - RNA, 24 nt, Human
ucggcaagguggacacaacucccc

SEQ ID NO: 532583 - RNA, 28 nt, Human
ucucaaaaacagcacucgcuccccucac

SEQ ID NO: 532584 - RNA, 23 nt, Human
ucucaaacucgaucccaagguuc

SEQ ID NO: 532585 - RNA, 21 nt, Human
ucucugcagccaaaacagaac

SEQ ID NO: 532586 - RNA, 21 nt, Human
ucugcagccaaaacagaacga

SEQ ID NO: 532587 - RNA, 24 nt, Human
ucugcagccaaaacagaacgaagc

SEQ ID NO: 532588 - RNA, 21 nt, Human
ugaaagcaaaggguggggugg

SEQ ID NO: 532589 - RNA, 22 nt, Human
ugaagcauuuguccugcaaccu

SEQ ID NO: 532590 - RNA, 23 nt, Human
ugacaaaaaguaguuuggaaaaa

SEQ ID NO: 532591 - RNA, 18 nt, Human
ugagcacucagccccccc

SEQ ID NO: 532592 - RNA, 24 nt, Human
ugagccuaccacagcugggagcag

SEQ ID NO: 532593 - RNA, 23 nt, Human
ugaggggacaugcugcgugccuu

SEQ ID NO: 532594 - RNA, 23 nt, Human
ugcaaaacagaagccucguuuga

SEQ ID NO: 532595 - RNA, 23 nt, Human
ugcaggaagcagugggagguggg

SEQ ID NO: 532596 - RNA, 23 nt, Human
ugccacgacagccuuguccccac

SEQ ID NO: 532597 - RNA, 22 nt, Human
ugccccaccucccacccaccaa

SEQ ID NO: 532598 - RNA, 23 nt, Human
ugcccuggcauccccagagccac

SEQ ID NO: 532599 - RNA, 20 nt, Human
ugccucuacuaggcugccug

SEQ ID NO: 532600 - RNA, 20 nt, Human
uggaagggcagcaguuaagg

SEQ ID NO: 532601 - RNA, 19 nt, Human
uggcucuaagcagcuuccu

SEQ ID NO: 532602 - RNA, 19 nt, Human
uggcugcuggggcuggggc

SEQ ID NO: 532603 - RNA, 19 nt, Human
ugggagcagagaggccaug

SEQ ID NO: 532604 - RNA, 19 nt, Human
ugggagguggggagggaug

SEQ ID NO: 532605 - RNA, 18 nt, Human
uggggagaagccagggau

SEQ ID NO: 532606 - RNA, 19 nt, Human
uggggcuggggcagggaag

SEQ ID NO: 532607 - RNA, 24 nt, Human
ugucacacaggcagacaacagagg

SEQ ID NO: 532608 - RNA, 19 nt, Human
uguccgggaacaacauggg

SEQ ID NO: 532609 - RNA, 25 nt, Human
ugugagccuaccacagcugggagca

SEQ ID NO: 532610 - RNA, 25 nt, Human
ugugugucacacaggcagacaacag

SEQ ID NO: 532611 - RNA, 23 nt, Human
uucaggguagcagauaagggaag

SEQ ID NO: 532612 - RNA, 25 nt, Human
uugccaugccucccuucugcccuug

SEQ ID NO: 532613 - RNA, 21 nt, Human
uuggaaaaaaaaaaaugcuag

SEQ ID NO: 532614 - RNA, 23 nt, Human
uuucaaaaaaaaaaaaaaggcaa

SEQ ID NO: 532615 - RNA, 18 nt, Human
uuuuuuuuuuuuuuuuug

SEQ ID NO: 532616 - RNA, 24 nt, Human
aaacaacggaaaguuaucuggaac

SEQ ID NO: 532617 - RNA, 18 nt, Human
aaacaggugaaaucuuca

SEQ ID NO: 532618 - RNA, 21 nt, Human
aaagucuucucuaauccaguu

SEQ ID NO: 532619 - RNA, 24 nt, Human
aaagugcugcgauuacaggcguga

SEQ ID NO: 532620 - RNA, 21 nt, Human
aaaucaucucccgaacucaga

SEQ ID NO: 532621 - RNA, 20 nt, Human
acaacggaaaguuaucugga

SEQ ID NO: 532622 - RNA, 23 nt, Human
acaggcgcccgccaccacgcccg

SEQ ID NO: 532623 - RNA, 21 nt, Human
acaguggcgcaaucucagcuc

SEQ ID NO: 532624 - RNA, 19 nt, Human
acccuguuagccaagaugg

SEQ ID NO: 532625 - RNA, 22 nt, Human
acggagucucgcuguugcccag

SEQ ID NO: 532626 - RNA, 18 nt, Human
acgggguuucacccuguu

SEQ ID NO: 532627 - RNA, 20 nt, Human
acgggguuucacccuguuag

SEQ ID NO: 532628 - RNA, 24 nt, Human
acuugccuguuuucauuucuggcc

SEQ ID NO: 532629 - RNA, 18 nt, Human
agccuccagaguagcugg

SEQ ID NO: 532630 - RNA, 21 nt, Human
aguacaguggcgcaaucucag

SEQ ID NO: 532631 - RNA, 20 nt, Human
aguagagacgggguuucacc

SEQ ID NO: 532632 - RNA, 18 nt, Human
aguagcugggacuacagg

SEQ ID NO: 532633 - RNA, 18 nt, Human
auucuccugccucagccu

SEQ ID NO: 532634 - RNA, 24 nt, Human
auugauucuccugccucagccucc

SEQ ID NO: 532635 - RNA, 24 nt, Human
caaagugcugcgauuacaggcgug

SEQ ID NO: 532636 - RNA, 22 nt, Human
caauugauucuccugccucagc

SEQ ID NO: 532637 - RNA, 18 nt, Human
cagcucacuguaagcucc

SEQ ID NO: 532638 - RNA, 20 nt, Human
cagcuucacuggagauuaau

SEQ ID NO: 532639 - RNA, 21 nt, Human
caggcgcccgccaccacgccc

SEQ ID NO: 532640 - RNA, 22 nt, Human
ccaaagugcugcgauuacaggc

SEQ ID NO: 532641 - RNA, 24 nt, Human
ccaaagugcugcgauuacaggcgu

SEQ ID NO: 532642 - RNA, 24 nt, Human
ccagaguagcugggacuacaggcg

SEQ ID NO: 532643 - RNA, 23 nt, Human
cccggguucaauugauucuccug

SEQ ID NO: 532644 - RNA, 24 nt, Human
ccgccucccggguucaauugauuc

SEQ ID NO: 532645 - RNA, 24 nt, Human
ccucccggguucaauugauucucc

SEQ ID NO: 532646 - RNA, 20 nt, Human
cgaugggucuggguagauac

SEQ ID NO: 532647 - RNA, 25 nt, Human
cgccucggccucccaaagugcugcg

SEQ ID NO: 532648 - RNA, 23 nt, Human
cgcguccggccaauaaaugguuu

SEQ ID NO: 532649 - RNA, 19 nt, Human
cgugagccaccgcguccgg

SEQ ID NO: 532650 - RNA, 23 nt, Human
cuaauccaguuuuacaaaaggaa

SEQ ID NO: 532651 - RNA, 24 nt, Human
cucacuguaagcuccgccucccgg

SEQ ID NO: 532652 - RNA, 24 nt, Human
cucagccuccagaguagcugggac

SEQ ID NO: 532653 - RNA, 24 nt, Human
cuccugacgucgugagccgcccgc

SEQ ID NO: 532654 - RNA, 23 nt, Human
cugccucagccuccagaguagcu

SEQ ID NO: 532655 - RNA, 18 nt, Human
cuguaaacacagcuucac

SEQ ID NO: 532656 - RNA, 20 nt, Human
gagacgggguuucacccugu

SEQ ID NO: 532657 - RNA, 20 nt, Human
gaguagcugggacuacaggc

SEQ ID NO: 532658 - RNA, 25 nt, Human
gaguagcugggacuacaggcgcccg

SEQ ID NO: 532659 - RNA, 18 nt, Human
gauuacaggcgugagcca

SEQ ID NO: 532660 - RNA, 22 nt, Human
gauuacaggcgugagccaccgc

SEQ ID NO: 532661 - RNA, 23 nt, Human
gcccggcuaauuuuuuguauuuu

SEQ ID NO: 532662 - RNA, 18 nt, Human
gccucccggguucaauug

SEQ ID NO: 532663 - RNA, 24 nt, Human
gugagccgcccgccucggccuccc

SEQ ID NO: 532664 - RNA, 27 nt, Human
guuucuuuuuuuuuuuuuuuuuuuuga

SEQ ID NO: 532665 - RNA, 24 nt, Human
uaauuuuuuguauuuuuaguagag

SEQ ID NO: 532666 - RNA, 25 nt, Human
uaauuuuuuguauuuuuaguagaga

SEQ ID NO: 532667 - RNA, 23 nt, Human
uacaggcgcccgccaccacgccc

SEQ ID NO: 532668 - RNA, 23 nt, Human
uacaggcgugagccaccgcgucc

SEQ ID NO: 532669 - RNA, 23 nt, Human
uacaguggcgcaaucucagcuca

SEQ ID NO: 532670 - RNA, 21 nt, Human
uagauacccuaaguaaacagg

SEQ ID NO: 532671 - RNA, 24 nt, Human
uaguagagacgggguuucacccug

SEQ ID NO: 532672 - RNA, 26 nt, Human
uaguagagacgggguuucacccuguu

SEQ ID NO: 532673 - RNA, 25 nt, Human
ucaauugauucuccugccucagccu

SEQ ID NO: 532674 - RNA, 18 nt, Human
ucacuguaagcuccgccu

SEQ ID NO: 532675 - RNA, 19 nt, Human
ucacuguaagcuccgccuc

SEQ ID NO: 532676 - RNA, 24 nt, Human
ucacuguaagcuccgccucccggg

SEQ ID NO: 532677 - RNA, 19 nt, Human
ucagcaaguccgagauggg

SEQ ID NO: 532678 - RNA, 24 nt, Human
uccagaguagcugggacuacaggc

SEQ ID NO: 532679 - RNA, 24 nt, Human
ucccaaagugcugcgauuacaggc

SEQ ID NO: 532680 - RNA, 24 nt, Human
ucccggguucaauugauucuccug

SEQ ID NO: 532681 - RNA, 23 nt, Human
uccgaagaaauacuuuacuugcc

SEQ ID NO: 532682 - RNA, 18 nt, Human
ucggccucccaaagugcu

SEQ ID NO: 532683 - RNA, 24 nt, Human
ucuccugccucagccuccagagua

SEQ ID NO: 532684 - RNA, 18 nt, Human
ucucgcuguugcccagga

SEQ ID NO: 532685 - RNA, 23 nt, Human
ucuugcucccuucucucucgaaa

SEQ ID NO: 532686 - RNA, 21 nt, Human
ugaguugaggcauagcaaucu

SEQ ID NO: 532687 - RNA, 22 nt, Human
ugauaagaaucacuuggaaaaa

SEQ ID NO: 532688 - RNA, 18 nt, Human
ugcccaggaguacagugg

SEQ ID NO: 532689 - RNA, 24 nt, Human
ugccucagccuccagaguagcugg

SEQ ID NO: 532690 - RNA, 19 nt, Human
ugcgauuacaggcgugagc

SEQ ID NO: 532691 - RNA, 22 nt, Human
ugcgauuacaggcgugagccac

SEQ ID NO: 532692 - RNA, 24 nt, Human
ugcgauuacaggcgugagccaccg

SEQ ID NO: 532693 - RNA, 20 nt, Human
uggcgcaaucucagcucacu

SEQ ID NO: 532694 - RNA, 21 nt, Human
ugggacuacaggcgcccgcca

SEQ ID NO: 532695 - RNA, 22 nt, Human
ugggacuacaggcgcccgccac

SEQ ID NO: 532696 - RNA, 24 nt, Human
ugggacuacaggcgcccgccacca

SEQ ID NO: 532697 - RNA, 18 nt, Human
ugggucuggguagauacc

SEQ ID NO: 532698 - RNA, 23 nt, Human
ugguuucuuuuuuuuuuuuuuuu

SEQ ID NO: 532699 - RNA, 26 nt, Human
ugguuugauaaaauguuuuccgaaga

SEQ ID NO: 532700 - RNA, 21 nt, Human
uguauuuuuaguagagacggg

SEQ ID NO: 532701 - RNA, 22 nt, Human
ugucuugcucccuucucucucg

SEQ ID NO: 532702 - RNA, 18 nt, Human
uuaguagagacgggguuu

SEQ ID NO: 532703 - RNA, 22 nt, Human
uuaguagagacgggguuucacc

SEQ ID NO: 532704 - RNA, 24 nt, Human
uuaguagagacgggguuucacccu

SEQ ID NO: 532705 - RNA, 25 nt, Human
uuaguagagacgggguuucacccug

SEQ ID NO: 532706 - RNA, 22 nt, Human
uucaaaaucaucucccgaacuc

SEQ ID NO: 532707 - RNA, 18 nt, Human
uucaauugauucuccugc

SEQ ID NO: 532708 - RNA, 23 nt, Human
uucaauugauucuccugccucag

SEQ ID NO: 532709 - RNA, 23 nt, Human
uuguauuuuuaguagagacgggg

SEQ ID NO: 532710 - RNA, 24 nt, Human
uuuuuaguagagacgggguuucac

SEQ ID NO: 532711 - RNA, 21 nt, Human
uuuuuguauuuuuaguagaga

SEQ ID NO: 532712 - RNA, 24 nt, Human
uuuuuuguauuuuuaguagagacg

SEQ ID NO: 532713 - RNA, 21 nt, Human
uuuuuuuuuuuggaagggagc

SEQ ID NO: 532714 - RNA, 25 nt, Human
uuuuuuuuuuuugagacggagucuc

SEQ ID NO: 532715 - RNA, 22 nt, Human
uuuuuuuuuuuuggaagggagc

SEQ ID NO: 532716 - RNA, 22 nt, Human
uuuuuuuuuuuuuugagacgga

SEQ ID NO: 532717 - RNA, 21 nt, Human
uuuuuuuuuuuuuuggaaggg

SEQ ID NO: 532718 - RNA, 18 nt, Human
uuuuuuuuuuuuuuuuug

SEQ ID NO: 532719 - RNA, 18 nt, Human
uuuuuuuuuuuuuuuuug

SEQ ID NO: 532720 - RNA, 24 nt, Human
uuuuuuuuuuuuuuuuuggaaggg

SEQ ID NO: 532721 - RNA, 21 nt, Human
aacaacaaaaaacacugcuau

SEQ ID NO: 532722 - RNA, 22 nt, Human
aaccuagccuuuccuggcaaac

SEQ ID NO: 532723 - RNA, 19 nt, Human
aaguccugcaguuucaaau

SEQ ID NO: 532724 - RNA, 22 nt, Human
aaugcaaaaacaacaaaaaaca

SEQ ID NO: 532725 - RNA, 22 nt, Human
aauuaaccacuccccaaaucca

SEQ ID NO: 532726 - RNA, 23 nt, Human
acacuaaucauuuucucuuugca

SEQ ID NO: 532727 - RNA, 19 nt, Human
acauaguuucaaacaaaua

SEQ ID NO: 532728 - RNA, 22 nt, Human
acuggcuuuuguuccugaaguu

SEQ ID NO: 532729 - RNA, 23 nt, Human
cccaaauccaaugcaaaaacaac

SEQ ID NO: 532730 - RNA, 21 nt, Human
cccccggccguaaugggcccu

SEQ ID NO: 532731 - RNA, 24 nt, Human
cuaaaagauuccugucuuccauuu

SEQ ID NO: 532732 - RNA, 22 nt, Human
cugcaguuucaaauuccuuuug

SEQ ID NO: 532733 - RNA, 20 nt, Human
cuggcuuuuguuccugaagu

SEQ ID NO: 532734 - RNA, 19 nt, Human
gcaaaaacaacaaaaaaca

SEQ ID NO: 532735 - RNA, 23 nt, Human
ggagaaaagcuucuuaaguccug

SEQ ID NO: 532736 - RNA, 26 nt, Human
uaaaacagaacuggcuuuuguuccug

SEQ ID NO: 532737 - RNA, 20 nt, Human
uaaccacuccccaaauccaa

SEQ ID NO: 532738 - RNA, 22 nt, Human
uacaaauucggagaaaagcuuc

SEQ ID NO: 532739 - RNA, 24 nt, Human
uacacuaaucauuuucucuuugca

SEQ ID NO: 532740 - RNA, 24 nt, Human
uacugaaccuagccuuuccuggca

SEQ ID NO: 532741 - RNA, 21 nt, Human
uacuuuggagguuuucugaag

SEQ ID NO: 532742 - RNA, 24 nt, Human
uccccaaauccaaugcaaaaacaa

SEQ ID NO: 532743 - RNA, 20 nt, Human
ucugaagaaucaaguacuca

SEQ ID NO: 532744 - RNA, 22 nt, Human
ugccagaaaccuuuuguguucu

SEQ ID NO: 532745 - RNA, 22 nt, Human
ugggcccccggccguaaugggc

SEQ ID NO: 532746 - RNA, 20 nt, Human
uuaaccacuccccaaaucca

SEQ ID NO: 532747 - RNA, 27 nt, Human
uuggagguuuucugaagaaucaaguac

SEQ ID NO: 532748 - RNA, 20 nt, Human
aaacaugagauauaccauga

SEQ ID NO: 532749 - RNA, 21 nt, Human
aaagaaaauaaacugauaaac

SEQ ID NO: 532750 - RNA, 26 nt, Human
aaauauuaaaggccaauucgagucac

SEQ ID NO: 532751 - RNA, 22 nt, Human
aaaugcuucccagaccaacagg

SEQ ID NO: 532752 - RNA, 22 nt, Human
aacauuuucucaauacauagaa

SEQ ID NO: 532753 - RNA, 20 nt, Human
aagaucaauaaguaaacacu

SEQ ID NO: 532754 - RNA, 21 nt, Human
aaguccuggaaauccucagcu

SEQ ID NO: 532755 - RNA, 21 nt, Human
aauauacucauucagccaaaa

SEQ ID NO: 532756 - RNA, 21 nt, Human
acaguaacagagagaaaauaa

SEQ ID NO: 532757 - RNA, 21 nt, Human
accagaacuccuuguccaaaa

SEQ ID NO: 532758 - RNA, 18 nt, Human
agaaagaaaauaaacuga

SEQ ID NO: 532759 - RNA, 22 nt, Human
agaaagaaaauaaacugauaaa

SEQ ID NO: 532760 - RNA, 20 nt, Human
agacaucugucuuaaaaaug

SEQ ID NO: 532761 - RNA, 19 nt, Human
agcaaagcccuucagcaca

SEQ ID NO: 532762 - RNA, 25 nt, Human
aggcagcaguaugaaaauguaggaa

SEQ ID NO: 532763 - RNA, 24 nt, Human
auacucauucagccaaaagaacaa

SEQ ID NO: 532764 - RNA, 23 nt, Human
aucguuuuauguaacaucuguuu

SEQ ID NO: 532765 - RNA, 23 nt, Human
augaaucugguuuuccaaaauug

SEQ ID NO: 532766 - RNA, 18 nt, Human
augcuucccagaccaaca

SEQ ID NO: 532767 - RNA, 19 nt, Human
auggaacucuggaaaaaaa

SEQ ID NO: 532768 - RNA, 21 nt, Human
auggaacucuggaaaaaaaac

SEQ ID NO: 532769 - RNA, 23 nt, Human
auuuuaguuuuggacuguucacc

SEQ ID NO: 532770 - RNA, 21 nt, Human
auuuuuggcauauaauuauuu

SEQ ID NO: 532771 - RNA, 23 nt, Human
caaacuuuauuaguuagcuaaag

SEQ ID NO: 532772 - RNA, 25 nt, Human
caaagcagacuaaguaauauguuaa

SEQ ID NO: 532773 - RNA, 19 nt, Human
caaccaaauagccaagcug

SEQ ID NO: 532774 - RNA, 23 nt, Human
caccagaacuccuuguccaaaau

SEQ ID NO: 532775 - RNA, 24 nt, Human
cagaacuccuuguccaaaauauca

SEQ ID NO: 532776 - RNA, 24 nt, Human
cagcacagugcaaacauguucuuu

SEQ ID NO: 532777 - RNA, 25 nt, Human
cagccaccuuuccaaauaaaaucuu

SEQ ID NO: 532778 - RNA, 22 nt, Human
ccaagccaaaugauauugcccu

SEQ ID NO: 532779 - RNA, 18 nt, Human
ccagcaaaaaguacaggc

SEQ ID NO: 532780 - RNA, 18 nt, Human
ccuggaaauccucagcuc

SEQ ID NO: 532781 - RNA, 19 nt, Human
cuccuuguccaaaauauca

SEQ ID NO: 532782 - RNA, 24 nt, Human
cuccuuguccaaaauaucacuauu

SEQ ID NO: 532783 - RNA, 23 nt, Human
cucucuccagccaccuuuccaaa

SEQ ID NO: 532784 - RNA, 23 nt, Human
cucuugggcuuucuauauaaaca

SEQ ID NO: 532785 - RNA, 24 nt, Human
cuggaaauccucagcucucuccag

SEQ ID NO: 532786 - RNA, 22 nt, Human
gaaaaggagccuuaguguccug

SEQ ID NO: 532787 - RNA, 22 nt, Human
gcaaaguccuauaauaaaauua

SEQ ID NO: 532788 - RNA, 27 nt, Human
ggagcucucccuauccaugaaaugcuu

SEQ ID NO: 532789 - RNA, 22 nt, Human
gucaggccaaaggucuaguuag

SEQ ID NO: 532790 - RNA, 23 nt, Human
uaaacugauaaaccaagaaagca

SEQ ID NO: 532791 - RNA, 19 nt, Human
uaaacuguacaaacacuca

SEQ ID NO: 532792 - RNA, 22 nt, Human
uaaguaaacacugaucacccca

SEQ ID NO: 532793 - RNA, 24 nt, Human
uacaguaacagagagaaaauaaaa

SEQ ID NO: 532794 - RNA, 25 nt, Human
uagaaagaaaauaaacugauaaacc

SEQ ID NO: 532795 - RNA, 24 nt, Human
uagcauagaauucuucugaagaaa

SEQ ID NO: 532796 - RNA, 24 nt, Human
uagcuaaagaacaugaauagacau

SEQ ID NO: 532797 - RNA, 23 nt, Human
uaggaaagaacucaggcauggca

SEQ ID NO: 532798 - RNA, 19 nt, Human
ucaacagaggugagaaagu

SEQ ID NO: 532799 - RNA, 20 nt, Human
ucaacagaggugagaaagua

SEQ ID NO: 532800 - RNA, 22 nt, Human
ucaacagaggugagaaaguaaa

SEQ ID NO: 532801 - RNA, 24 nt, Human
ucaaccaauucaaauauacucauu

SEQ ID NO: 532802 - RNA, 22 nt, Human
uccagccaccuuuccaaauaaa

SEQ ID NO: 532803 - RNA, 19 nt, Human
uccaugaaaugcuucccag

SEQ ID NO: 532804 - RNA, 24 nt, Human
ucuaaauguuucaacagaggugag

SEQ ID NO: 532805 - RNA, 22 nt, Human
ugaaaaauacaucaaacaugaa

SEQ ID NO: 532806 - RNA, 23 nt, Human
ugaaaaauacaucaaacaugaga

SEQ ID NO: 532807 - RNA, 22 nt, Human
ugaaaugcuucccagaccaaca

SEQ ID NO: 532808 - RNA, 21 nt, Human
ugaacaauguaaacagaauca

SEQ ID NO: 532809 - RNA, 18 nt, Human
ugagacugguaaaaggcu

SEQ ID NO: 532810 - RNA, 19 nt, Human
ugaggaggugcaaacccac

SEQ ID NO: 532811 - RNA, 22 nt, Human
ugaguuaaacuguacaaacacu

SEQ ID NO: 532812 - RNA, 27 nt, Human
ugauuuaauggaacucuggaaaaaaaa

SEQ ID NO: 532813 - RNA, 22 nt, Human
uggaagaggucaugauuauugg

SEQ ID NO: 532814 - RNA, 23 nt, Human
ugggaaguuauuuugauauuguu

SEQ ID NO: 532815 - RNA, 19 nt, Human
uggguucccaaauccaguu

SEQ ID NO: 532816 - RNA, 26 nt, Human
uguaugcauagcaaagcccuucagca

SEQ ID NO: 532817 - RNA, 22 nt, Human
uguccaaaauaucacuauuaau

SEQ ID NO: 532818 - RNA, 19 nt, Human
uguguccaaaguuagucca

SEQ ID NO: 532819 - RNA, 18 nt, Human
uguuagggugggauagga

SEQ ID NO: 532820 - RNA, 19 nt, Human
uuaaaggccaauuaucaaa

SEQ ID NO: 532821 - RNA, 20 nt, Human
uuaaaggccaauuaucaaaa

SEQ ID NO: 532822 - RNA, 18 nt, Human
uuagcuaaagggcaaaga

SEQ ID NO: 532823 - RNA, 19 nt, Human
uuagguauagcuugucacc

SEQ ID NO: 532824 - RNA, 21 nt, Human
uucuaaauguuucaacagagg

SEQ ID NO: 532825 - RNA, 22 nt, Human
uuggccuuauguucucccagaa

SEQ ID NO: 532826 - RNA, 25 nt, Human
uuuagaaagaaaauaaacugauaaa

SEQ ID NO: 532827 - RNA, 24 nt, Human
aaacacugcaaguuacauguuacc

SEQ ID NO: 532828 - RNA, 23 nt, Human
aaaguaugaccgagaacaacugg

SEQ ID NO: 532829 - RNA, 19 nt, Human
aauauucucgggaguggua

SEQ ID NO: 532830 - RNA, 22 nt, Human
aaucacuuaacuuggaaacaaa

SEQ ID NO: 532831 - RNA, 22 nt, Human
aaugcuuuucccccauuucuac

SEQ ID NO: 532832 - RNA, 21 nt, Human
acagcaaugguguggcaugcc

SEQ ID NO: 532833 - RNA, 20 nt, Human
acauuuaggcuccuccuaga

SEQ ID NO: 532834 - RNA, 20 nt, Human
accaucuuguaugugaggga

SEQ ID NO: 532835 - RNA, 19 nt, Human
acuggaugcaggaacauca

SEQ ID NO: 532836 - RNA, 19 nt, Human
agagguuugggaggcacug

SEQ ID NO: 532837 - RNA, 23 nt, Human
agcacaaaauacagaugggaaua

SEQ ID NO: 532838 - RNA, 21 nt, Human
agcgcgaggggcggagaggaa

SEQ ID NO: 532839 - RNA, 18 nt, Human
aggaagcacaacauuuga

SEQ ID NO: 532840 - RNA, 20 nt, Human
aggagcagcuccuuaggcug

SEQ ID NO: 532841 - RNA, 22 nt, Human
aggcgcuggaguuaagcgaccu

SEQ ID NO: 532842 - RNA, 22 nt, Human
agggugagggaggugguggagc

SEQ ID NO: 532843 - RNA, 18 nt, Human
aggugguggagcugaggc

SEQ ID NO: 532844 - RNA, 21 nt, Human
aguggcuggagcgcgaggggc

SEQ ID NO: 532845 - RNA, 23 nt, Human
caaaacaccaaaguuagucagug

SEQ ID NO: 532846 - RNA, 21 nt, Human
caagagacggcuccaaggccg

SEQ ID NO: 532847 - RNA, 25 nt, Human
cacaaaauacagaugggaauauucu

SEQ ID NO: 532848 - RNA, 22 nt, Human
cacaauaccuuaagcuacuuaa

SEQ ID NO: 532849 - RNA, 23 nt, Human
cacaauaccuuaagcuacuuaaa

SEQ ID NO: 532850 - RNA, 23 nt, Human
cagcuccuuaggcuguggccccc

SEQ ID NO: 532851 - RNA, 19 nt, Human
cccaagagacggcuccaag

SEQ ID NO: 532852 - RNA, 22 nt, Human
cccccggaaucuggauaccgcc

SEQ ID NO: 532853 - RNA, 18 nt, Human
cccgcgccgucgccgccg

SEQ ID NO: 532854 - RNA, 22 nt, Human
cccgcgccgucgccgccguccg

SEQ ID NO: 532855 - RNA, 20 nt, Human
cccuacaacuccugucacuu

SEQ ID NO: 532856 - RNA, 20 nt, Human
ccgcgccgucgccgccgucc

SEQ ID NO: 532857 - RNA, 22 nt, Human
ccuacaacuccugucacuuuaa

SEQ ID NO: 532858 - RNA, 23 nt, Human
ccucggccagcuacgugaggugg

SEQ ID NO: 532859 - RNA, 22 nt, Human
ccugcgcugguuuaucuaaaag

SEQ ID NO: 532860 - RNA, 22 nt, Human
ccuuaagcuacuuaaaagaguu

SEQ ID NO: 532861 - RNA, 20 nt, Human
cgcagcugggggcgagggag

SEQ ID NO: 532862 - RNA, 21 nt, Human
cgcagcugggggcgagggagu

SEQ ID NO: 532863 - RNA, 18 nt, Human
cgccgucgccgccguccg

SEQ ID NO: 532864 - RNA, 19 nt, Human
cgcgcagcugggggcgagg

SEQ ID NO: 532865 - RNA, 20 nt, Human
cggcugcggccgaguggcuu

SEQ ID NO: 532866 - RNA, 20 nt, Human
cgggcaggaggaggagaggu

SEQ ID NO: 532867 - RNA, 21 nt, Human
cgggcuuuugaggagcagcuc

SEQ ID NO: 532868 - RNA, 22 nt, Human
cuacuaggcuaggccauugcac

SEQ ID NO: 532869 - RNA, 18 nt, Human
cuaugccaaggagcgaga

SEQ ID NO: 532870 - RNA, 22 nt, Human
cuccaaggccgcgcgcuucccc

SEQ ID NO: 532871 - RNA, 19 nt, Human
cuccagugcugcgcccucc

SEQ ID NO: 532872 - RNA, 18 nt, Human
cugaagacuauggaagcu

SEQ ID NO: 532873 - RNA, 22 nt, Human
cugaggcugccgcuaggaaccc

SEQ ID NO: 532874 - RNA, 21 nt, Human
cugcggccgaguggcuggagc

SEQ ID NO: 532875 - RNA, 21 nt, Human
cuggcccgcaggccgccgcgc

SEQ ID NO: 532876 - RNA, 22 nt, Human
cuggcgcggcggcuccgggggg

SEQ ID NO: 532877 - RNA, 18 nt, Human
cuguggccccccucccca

SEQ ID NO: 532878 - RNA, 26 nt, Human
cuguggccccccuccccacucggcga

SEQ ID NO: 532879 - RNA, 22 nt, Human
cuuucaaaauaaccagggcuag

SEQ ID NO: 532880 - RNA, 20 nt, Human
gagcagcuccuuaggcugug

SEQ ID NO: 532881 - RNA, 23 nt, Human
gccgaguggcuggagcgcgaggg

SEQ ID NO: 532882 - RNA, 18 nt, Human
gccgccguccgcccgggc

SEQ ID NO: 532883 - RNA, 21 nt, Human
gcgcggggagggugagggagg

SEQ ID NO: 532884 - RNA, 18 nt, Human
gcggauccggcgccagcc

SEQ ID NO: 532885 - RNA, 19 nt, Human
gcggccgaguggcuggagc

SEQ ID NO: 532886 - RNA, 20 nt, Human
gcuccggggggcggaggaca

SEQ ID NO: 532887 - RNA, 21 nt, Human
gcuccuccuagaacagccccg

SEQ ID NO: 532888 - RNA, 20 nt, Human
gcuuccccaucccccgcucc

SEQ ID NO: 532889 - RNA, 20 nt, Human
ggagcgagacccccggaauc

SEQ ID NO: 532890 - RNA, 21 nt, Human
ggaggcacugggaaggcgcug

SEQ ID NO: 532891 - RNA, 21 nt, Human
ggcuccggggggcggaggaca

SEQ ID NO: 532892 - RNA, 21 nt, Human
gggagggugagggagguggug

SEQ ID NO: 532893 - RNA, 22 nt, Human
ggggagggugagggagguggug

SEQ ID NO: 532894 - RNA, 19 nt, Human
gggggcggaggacagcgcc

SEQ ID NO: 532895 - RNA, 23 nt, Human
ggucuggcgcggcggcuccgggg

SEQ ID NO: 532896 - RNA, 20 nt, Human
ggugagggaggugguggagc

SEQ ID NO: 532897 - RNA, 25 nt, Human
uaccauauuacacaugggaggaccc

SEQ ID NO: 532898 - RNA, 20 nt, Human
uagaacagccccgggcagga

SEQ ID NO: 532899 - RNA, 18 nt, Human
uauuuguccuucuaguuu

SEQ ID NO: 532900 - RNA, 26 nt, Human
ugaacaaaaaaaaggaggaaucacuu

SEQ ID NO: 532901 - RNA, 19 nt, Human
ugaccgagaacaacuggau

SEQ ID NO: 532902 - RNA, 20 nt, Human
ugagggaggugguggagcug

SEQ ID NO: 532903 - RNA, 20 nt, Human
ugccaaggagcgagaccccc

SEQ ID NO: 532904 - RNA, 21 nt, Human
uggaauggucaagagcaggaa

SEQ ID NO: 532905 - RNA, 18 nt, Human
uggcuggagcgcgagggg

SEQ ID NO: 532906 - RNA, 20 nt, Human
ugggaggcacugggaaggcg

SEQ ID NO: 532907 - RNA, 18 nt, Human
ugguggagcugaggcugc

SEQ ID NO: 532908 - RNA, 21 nt, Human
ugucacuuuaacaauggucca

SEQ ID NO: 532909 - RNA, 18 nt, Human
ugucugaagacuauggaa

SEQ ID NO: 532910 - RNA, 20 nt, Human
uguuuacgcaccacaauccc

SEQ ID NO: 532911 - RNA, 23 nt, Human
uuaacaaugguccacagcaaugc

SEQ ID NO: 532912 - RNA, 18 nt, Human
uuaauccuguuuacgcac

SEQ ID NO: 532913 - RNA, 23 nt, Human
uucccccauuucuacuaggcuag

SEQ ID NO: 532914 - RNA, 21 nt, Human
uugggaggcacugggaaggcg

SEQ ID NO: 532915 - RNA, 19 nt, Human
uuguccaguagcaucagaa

SEQ ID NO: 532916 - RNA, 27 nt, Human
aaacauaaaaaggagccugugcccuag

SEQ ID NO: 532917 - RNA, 19 nt, Human
aaaguccuuuugucacugg

SEQ ID NO: 532918 - RNA, 21 nt, Human
aagcccagaggucacuggcca

SEQ ID NO: 532919 - RNA, 18 nt, Human
aggcaggcugggcaggac

SEQ ID NO: 532920 - RNA, 22 nt, Human
aggcaggcugggcaggacuggc

SEQ ID NO: 532921 - RNA, 19 nt, Human
aggcuggaauggcaagccc

SEQ ID NO: 532922 - RNA, 23 nt, Human
caagcccagaggucacuggccag

SEQ ID NO: 532923 - RNA, 21 nt, Human
cacccauggcccugauugucc

SEQ ID NO: 532924 - RNA, 22 nt, Human
cagcccgggccacccauggccc

SEQ ID NO: 532925 - RNA, 19 nt, Human
ccaguagcugcccauggag

SEQ ID NO: 532926 - RNA, 20 nt, Human
ccauggcccugauuguccau

SEQ ID NO: 532927 - RNA, 28 nt, Human
ccuagccccagcccgggccacccauggc

SEQ ID NO: 532928 - RNA, 24 nt, Human
ccuccaaacauaaaaaggagccug

SEQ ID NO: 532929 - RNA, 25 nt, Human
ccugugcccuagccccagcccgggc

SEQ ID NO: 532930 - RNA, 23 nt, Human
gcaagcccagaggucacuggcca

SEQ ID NO: 532931 - RNA, 18 nt, Human
gccccagcccgggccacc

SEQ ID NO: 532932 - RNA, 21 nt, Human
gcccgggccacccauggcccu

SEQ ID NO: 532933 - RNA, 19 nt, Human
gccugugcccuagccccag

SEQ ID NO: 532934 - RNA, 27 nt, Human
uaaaaaggagccugugcccuagcccca

SEQ ID NO: 532935 - RNA, 19 nt, Human
ugaggauuugccagcugga

SEQ ID NO: 532936 - RNA, 19 nt, Human
ugaggauuugccagcugga

SEQ ID NO: 532937 - RNA, 25 nt, Human
uggcagccagaggccuacacucuga

SEQ ID NO: 532938 - RNA, 25 nt, Human
ugugucuccagucugcuucauccgg

SEQ ID NO: 532939 - RNA, 20 nt, Human
uuuggagauuucccuuuuau

SEQ ID NO: 532940 - RNA, 18 nt, Human
uuuuuuuuuuuuuuuuug

SEQ ID NO: 532941 - RNA, 24 nt, Human
uuuuuuuuuuuuuuuuuggagauu

SEQ ID NO: 532942 - RNA, 27 nt, Human
aaaaauaaugauuaaaaaugcuaaaac

SEQ ID NO: 532943 - RNA, 22 nt, Human
aaccaaagaguaaaacaaaucc

SEQ ID NO: 532944 - RNA, 18 nt, Human
acauaaccucuauaagga

SEQ ID NO: 532945 - RNA, 19 nt, Human
acaugaaaagauucaacaa

SEQ ID NO: 532946 - RNA, 19 nt, Human
acuucaggaauuuaacaaa

SEQ ID NO: 532947 - RNA, 21 nt, Human
agcauuuuaaacagagguaau

SEQ ID NO: 532948 - RNA, 24 nt, Human
caacagaaaauuuaguuucucaau

SEQ ID NO: 532949 - RNA, 26 nt, Human
caagucaaauugccgauuguaaagua

SEQ ID NO: 532950 - RNA, 22 nt, Human
cacaaaaaaauuaaaucaacag

SEQ ID NO: 532951 - RNA, 18 nt, Human
cacuauguaacaacaugu

SEQ ID NO: 532952 - RNA, 19 nt, Human
cagaaguaauacagcauca

SEQ ID NO: 532953 - RNA, 24 nt, Human
cccuccagacaugcagcagagcaa

SEQ ID NO: 532954 - RNA, 21 nt, Human
cuuuauauauauauauauauu

SEQ ID NO: 532955 - RNA, 30 nt, Human
cuuuugaaucuuuauauauauauauauauu

SEQ ID NO: 532956 - RNA, 26 nt, Human
gaccagcugggucauguuuccuuuuc

SEQ ID NO: 532957 - RNA, 20 nt, Human
gagcaagucaaauugccgau

SEQ ID NO: 532958 - RNA, 22 nt, Human
gguugcuccggcggcuuugagg

SEQ ID NO: 532959 - RNA, 18 nt, Human
uaaaguaaagaccugggg

SEQ ID NO: 532960 - RNA, 20 nt, Human
uaacaaaguuuuaaggcaca

SEQ ID NO: 532961 - RNA, 23 nt, Human
uaacacuauguaacaacauguuu

SEQ ID NO: 532962 - RNA, 18 nt, Human
uaaccaaagaguaaaaca

SEQ ID NO: 532963 - RNA, 19 nt, Human
uaaccaaagaguaaaacaa

SEQ ID NO: 532964 - RNA, 19 nt, Human
uaaccaaagaguaaaacaa

SEQ ID NO: 532965 - RNA, 21 nt, Human
uaaccaaagaguaaaacaaau

SEQ ID NO: 532966 - RNA, 20 nt, Human
uaaggcacaaaaaaauuaaa

SEQ ID NO: 532967 - RNA, 20 nt, Human
uaaggcacaaaaaaauuaaa

SEQ ID NO: 532968 - RNA, 21 nt, Human
uaauacagcaucacaaaaacc

SEQ ID NO: 532969 - RNA, 19 nt, Human
uacaauaauaauuaacaga

SEQ ID NO: 532970 - RNA, 22 nt, Human
uacaauaauaauuaacagagca

SEQ ID NO: 532971 - RNA, 22 nt, Human
uauugucuaaaacccagaagua

SEQ ID NO: 532972 - RNA, 23 nt, Human
ucacugauuuuacucucaauuau

SEQ ID NO: 532973 - RNA, 24 nt, Human
uccacacuuuccuuggucccucca

SEQ ID NO: 532974 - RNA, 19 nt, Human
uccagacaugcagcagagc

SEQ ID NO: 532975 - RNA, 23 nt, Human
ucuaaaacccagaaguaauacag

SEQ ID NO: 532976 - RNA, 21 nt, Human
ucucagaagcauccaagccag

SEQ ID NO: 532977 - RNA, 20 nt, Human
uguaaaguaaagaccugggg

SEQ ID NO: 532978 - RNA, 18 nt, Human
ugucuaaaacccagaagu

SEQ ID NO: 532979 - RNA, 18 nt, Human
uucaaaauccucaguccc

SEQ ID NO: 532980 - RNA, 26 nt, Human
uuccuugaauucauuaaauggaauuu

SEQ ID NO: 532981 - RNA, 22 nt, Human
uuggucccuccagacaugcagc

SEQ ID NO: 532982 - RNA, 19 nt, Human
uugucuaaaacccagaagu

SEQ ID NO: 532983 - RNA, 18 nt, Human
uuucucagaagcauccaa

SEQ ID NO: 532984 - RNA, 20 nt, Human
uuugacagugaaauguacaa

SEQ ID NO: 532985 - RNA, 21 nt, Human
uuuucaagcuccgaucaccuu

SEQ ID NO: 532986 - RNA, 23 nt, Human
uuuuguuuauuuguuuggcuuuu

SEQ ID NO: 532987 - RNA, 18 nt, Human
uuuuuuuuuuuuuuuuug

SEQ ID NO: 532988 - RNA, 20 nt, Human
uuuuuuuuuuuuuuuuuguu

SEQ ID NO: 532989 - RNA, 22 nt, Human
aaaaacgccagucccagcugga

SEQ ID NO: 532990 - RNA, 25 nt, Human
aaagaucucauccuacccaugagaa

SEQ ID NO: 532991 - RNA, 19 nt, Human
aaaggagagacuuggaacc

SEQ ID NO: 532992 - RNA, 18 nt, Human
aacauguuugaugggggc

SEQ ID NO: 532993 - RNA, 20 nt, Human
aaccaggaguggcagggcca

SEQ ID NO: 532994 - RNA, 23 nt, Human
aagaaaccagauguucaguuaaa

SEQ ID NO: 532995 - RNA, 26 nt, Human
aagcgcggcggggacucgagucagaa

SEQ ID NO: 532996 - RNA, 20 nt, Human
accugccaggaaaggagaga

SEQ ID NO: 532997 - RNA, 24 nt, Human
agaaaacuuccaaaaagaaaccag

SEQ ID NO: 532998 - RNA, 21 nt, Human
agaacgucuuguuccuuacag

SEQ ID NO: 532999 - RNA, 19 nt, Human
agacuuggaaccaggagug

SEQ ID NO: 533000 - RNA, 23 nt, Human
agcgauccaucucucacagacug

SEQ ID NO: 533001 - RNA, 22 nt, Human
agcgcaggcucagagcaccacc

SEQ ID NO: 533002 - RNA, 18 nt, Human
auggauguucagguucug

SEQ ID NO: 533003 - RNA, 21 nt, Human
caccgaagaccuuucugccaa

SEQ ID NO: 533004 - RNA, 22 nt, Human
caccgaagaccuuucugccaaa

SEQ ID NO: 533005 - RNA, 19 nt, Human
cagcauauagauauaugca

SEQ ID NO: 533006 - RNA, 23 nt, Human
cagcgcaggcucagagcaccacc

SEQ ID NO: 533007 - RNA, 18 nt, Human
cagguucugaauguacaa

SEQ ID NO: 533008 - RNA, 18 nt, Human
cauauagauauaugcaua

SEQ ID NO: 533009 - RNA, 20 nt, Human
caucucucaaaaauggaccc

SEQ ID NO: 533010 - RNA, 23 nt, Human
caugugaaagaaaacuuccaaaa

SEQ ID NO: 533011 - RNA, 25 nt, Human
cccaugagaaccaucauacuccaga

SEQ ID NO: 533012 - RNA, 21 nt, Human
cggugcggguuggggaacacu

SEQ ID NO: 533013 - RNA, 18 nt, Human
cucagagcaccaccgaag

SEQ ID NO: 533014 - RNA, 21 nt, Human
cuccagagacuaaaaaacgcc

SEQ ID NO: 533015 - RNA, 18 nt, Human
cucucaaaaauggaccca

SEQ ID NO: 533016 - RNA, 18 nt, Human
cuuaacacagcauauaga

SEQ ID NO: 533017 - RNA, 20 nt, Human
cuucccuuaagaccugccag

SEQ ID NO: 533018 - RNA, 22 nt, Human
gaaagaaaacuuccaaaaagaa

SEQ ID NO: 533019 - RNA, 20 nt, Human
gaaauaaugagauacacuga

SEQ ID NO: 533020 - RNA, 20 nt, Human
gccaggaaaggagagacuug

SEQ ID NO: 533021 - RNA, 18 nt, Human
gcgcggcggggacucgag

SEQ ID NO: 533022 - RNA, 19 nt, Human
gcugcggaucccggcggcg

SEQ ID NO: 533023 - RNA, 23 nt, Human
ggaaacuccucaucucgaugguc

SEQ ID NO: 533024 - RNA, 18 nt, Human
ggaggaggugggucugcu

SEQ ID NO: 533025 - RNA, 18 nt, Human
ggcucagagcaccaccga

SEQ ID NO: 533026 - RNA, 22 nt, Human
gggggcggcaggugaugggggc

SEQ ID NO: 533027 - RNA, 19 nt, Human
ggucugcucaguccuaugc

SEQ ID NO: 533028 - RNA, 22 nt, Human
uacaaaacagguaaaggucuuu

SEQ ID NO: 533029 - RNA, 22 nt, Human
uacagaacggugcggguugggg

SEQ ID NO: 533030 - RNA, 22 nt, Human
uagaaauuaggaagugacauac

SEQ ID NO: 533031 - RNA, 20 nt, Human
uaugcagcgcaggcucagag

SEQ ID NO: 533032 - RNA, 22 nt, Human
ucuacagaaucuaaaccuaccg

SEQ ID NO: 533033 - RNA, 21 nt, Human
ugacaaaccaugugaaagaaa

SEQ ID NO: 533034 - RNA, 22 nt, Human
ugagagguacagaacggugcgg

SEQ ID NO: 533035 - RNA, 19 nt, Human
ugagauacacugauagaaa

SEQ ID NO: 533036 - RNA, 18 nt, Human
ugccaggaaaggagagac

SEQ ID NO: 533037 - RNA, 19 nt, Human
ugcccgggcaagcaguggu

SEQ ID NO: 533038 - RNA, 20 nt, Human
ugcggaucccggcggcggcg

SEQ ID NO: 533039 - RNA, 22 nt, Human
uggauguucagguucugaaugu

SEQ ID NO: 533040 - RNA, 21 nt, Human
uggcagggccacccaagcugg

SEQ ID NO: 533041 - RNA, 21 nt, Human
ugggggcggcaggugaugggg

SEQ ID NO: 533042 - RNA, 23 nt, Human
uggugugagagguacagaacggu

SEQ ID NO: 533043 - RNA, 23 nt, Human
uucguccaugcaaagcuuauacg

SEQ ID NO: 533044 - RNA, 23 nt, Human
uuugaugggggcggcaggugaug

SEQ ID NO: 533045 - RNA, 20 nt, Human
caaaugcaacugucccuugg

SEQ ID NO: 533046 - RNA, 21 nt, Human
ccccagcuccauauuuauucc

SEQ ID NO: 533047 - RNA, 22 nt, Human
cucugcccuggcccuggcuggu

SEQ ID NO: 533048 - RNA, 22 nt, Human
gagugcugcuucucugcccugg

SEQ ID NO: 533049 - RNA, 18 nt, Human
gcuuguugucguuuuuga

SEQ ID NO: 533050 - RNA, 21 nt, Human
uauuccuuaaguguuuccccu

SEQ ID NO: 533051 - RNA, 22 nt, Human
ugcccuggcccuggcuggucag

SEQ ID NO: 533052 - RNA, 19 nt, Human
uuguccucugccagcagau

SEQ ID NO: 533053 - RNA, 22 nt, Human
uuuuuuuuuuuuuuuacuguuu

SEQ ID NO: 533054 - RNA, 18 nt, Human
aagggaaacaaguuccca

SEQ ID NO: 533055 - RNA, 24 nt, Human
aauaggaugugaacuugaacaaaa

SEQ ID NO: 533056 - RNA, 23 nt, Human
acaaguucccagccuaugucaca

SEQ ID NO: 533057 - RNA, 23 nt, Human
acuaugagccuaaugaaaaagga

SEQ ID NO: 533058 - RNA, 24 nt, Human
aguuuucucuccugaguggggccu

SEQ ID NO: 533059 - RNA, 24 nt, Human
aucagaaagguagaauuuaucuuc

SEQ ID NO: 533060 - RNA, 18 nt, Human
ccaaggguaaauguaaua

SEQ ID NO: 533061 - RNA, 18 nt, Human
cccauggucagccccacc

SEQ ID NO: 533062 - RNA, 22 nt, Human
cuuguaagaucucccacagcca

SEQ ID NO: 533063 - RNA, 23 nt, Human
cuuuccgguaaaaggauuuucug

SEQ ID NO: 533064 - RNA, 20 nt, Human
ggauaagggaaacaaguucc

SEQ ID NO: 533065 - RNA, 25 nt, Human
uacauucauaaaguuugaaucccac

SEQ ID NO: 533066 - RNA, 26 nt, Human
ucaccaaauuuaucuccagcuugugu

SEQ ID NO: 533067 - RNA, 18 nt, Human
ucccauggucagccccac

SEQ ID NO: 533068 - RNA, 20 nt, Human
ucuccugaguggggccucug

SEQ ID NO: 533069 - RNA, 19 nt, Human
ucuguacauucauuauguu

SEQ ID NO: 533070 - RNA, 19 nt, Human
ugacagaaagcuuucccac

SEQ ID NO: 533071 - RNA, 20 nt, Human
uguaauauuuaucauuagca

SEQ ID NO: 533072 - RNA, 20 nt, Human
uuaucuucugugugaauucu

SEQ ID NO: 533073 - RNA, 23 nt, Human
aaaagacaauggagagugaaggc

SEQ ID NO: 533074 - RNA, 20 nt, Human
aaacccaacuuacuaacuau

SEQ ID NO: 533075 - RNA, 20 nt, Human
aaguacaugcauggacacaa

SEQ ID NO: 533076 - RNA, 22 nt, Human
acaauggagagugaaggcuaga

SEQ ID NO: 533077 - RNA, 23 nt, Human
acagcaacaacaaaaacccacag

SEQ ID NO: 533078 - RNA, 24 nt, Human
acagugcuucaugcauuuacaaua

SEQ ID NO: 533079 - RNA, 23 nt, Human
acaguggaggcagcagaguugaa

SEQ ID NO: 533080 - RNA, 26 nt, Human
acugaacacaucacaguaaaagccca

SEQ ID NO: 533081 - RNA, 22 nt, Human
agcaacaacaaaaacccacaga

SEQ ID NO: 533082 - RNA, 27 nt, Human
agccaaaaauuuucuaacagcaacaac

SEQ ID NO: 533083 - RNA, 23 nt, Human
agcccaugccagugaaggugaca

SEQ ID NO: 533084 - RNA, 21 nt, Human
agcccauggccccugcuccuc

SEQ ID NO: 533085 - RNA, 18 nt, Human
aguuacccaucagaaaaa

SEQ ID NO: 533086 - RNA, 27 nt, Human
auacuauacgacugcaggacaaugcca

SEQ ID NO: 533087 - RNA, 21 nt, Human
auagaauauuccugcaaguua

SEQ ID NO: 533088 - RNA, 19 nt, Human
cacacacaaaagcuaaacc

SEQ ID NO: 533089 - RNA, 19 nt, Human
cacacggaccaccccuagc

SEQ ID NO: 533090 - RNA, 23 nt, Human
cacacggaccaccccuagcaaga

SEQ ID NO: 533091 - RNA, 22 nt, Human
cacacuuaacaguacacacaga

SEQ ID NO: 533092 - RNA, 20 nt, Human
cacaguggaggcagcagagu

SEQ ID NO: 533093 - RNA, 20 nt, Human
cagcaacaacaaaaacccac

SEQ ID NO: 533094 - RNA, 21 nt, Human
cagcagaguugaagauccaca

SEQ ID NO: 533095 - RNA, 21 nt, Human
cagccacugucaguuacaguu

SEQ ID NO: 533096 - RNA, 26 nt, Human
caugccagugaaggugacaaaaaaca

SEQ ID NO: 533097 - RNA, 18 nt, Human
ccucccacacacuuaaca

SEQ ID NO: 533098 - RNA, 22 nt, Human
ccucuccugaucuccccaggcu

SEQ ID NO: 533099 - RNA, 19 nt, Human
ccucucucugccucccaca

SEQ ID NO: 533100 - RNA, 19 nt, Human
cuaaacccaacuuacuaac

SEQ ID NO: 533101 - RNA, 28 nt, Human
cucccacacacuuaacaguacacacaga

SEQ ID NO: 533102 - RNA, 19 nt, Human
cuccucucucugccuccca

SEQ ID NO: 533103 - RNA, 19 nt, Human
cugaucuccccaggcuggg

SEQ ID NO: 533104 - RNA, 18 nt, Human
cugcuccucucucugccu

SEQ ID NO: 533105 - RNA, 19 nt, Human
cugcuccucucucugccuc

SEQ ID NO: 533106 - RNA, 18 nt, Human
gaacugaacacaucacag

SEQ ID NO: 533107 - RNA, 19 nt, Human
gaagcccauggccccugcu

SEQ ID NO: 533108 - RNA, 21 nt, Human
gcccauggccccugcuccucu

SEQ ID NO: 533109 - RNA, 25 nt, Human
gguuuguuucaguucuagcugugag

SEQ ID NO: 533110 - RNA, 24 nt, Human
guacacacagacuuugcuggcaag

SEQ ID NO: 533111 - RNA, 21 nt, Human
guagaggcugcugccaguucc

SEQ ID NO: 533112 - RNA, 22 nt, Human
gugaaggugacaaaaaacaaaa

SEQ ID NO: 533113 - RNA, 18 nt, Human
gugacaaaaaacaaaaca

SEQ ID NO: 533114 - RNA, 24 nt, Human
uaacagcaacaacaaaaacccaca

SEQ ID NO: 533115 - RNA, 25 nt, Human
uaacagcaacaacaaaaacccacag

SEQ ID NO: 533116 - RNA, 26 nt, Human
uaacagcaacaacaaaaacccacaga

SEQ ID NO: 533117 - RNA, 19 nt, Human
uaaggauucccaccugggg

SEQ ID NO: 533118 - RNA, 20 nt, Human
uacaugcauggacacaagug

SEQ ID NO: 533119 - RNA, 19 nt, Human
uacuauacgacugcaggac

SEQ ID NO: 533120 - RNA, 22 nt, Human
uagaggcugcugccaguuccag

SEQ ID NO: 533121 - RNA, 25 nt, Human
uaucuuuuccaauagaauauuccug

SEQ ID NO: 533122 - RNA, 21 nt, Human
uaugcagaccucuccugaucu

SEQ ID NO: 533123 - RNA, 25 nt, Human
uauuccugcaaguuacccaucagaa

SEQ ID NO: 533124 - RNA, 18 nt, Human
uccauggcccagagaagg

SEQ ID NO: 533125 - RNA, 26 nt, Human
uccauggcccagagaaggcagccacu

SEQ ID NO: 533126 - RNA, 19 nt, Human
ucccacaggugugccaugc

SEQ ID NO: 533127 - RNA, 21 nt, Human
ucccacaggugugccaugcug

SEQ ID NO: 533128 - RNA, 19 nt, Human
ucuaacagcaacaacaaaa

SEQ ID NO: 533129 - RNA, 22 nt, Human
ugaaaaagaagugguuagccca

SEQ ID NO: 533130 - RNA, 22 nt, Human
ugacaaaaaacaaaacaacuug

SEQ ID NO: 533131 - RNA, 24 nt, Human
ugaggaaggggucaagaagcacuu

SEQ ID NO: 533132 - RNA, 19 nt, Human
ugcacacacaaaagcuaaa

SEQ ID NO: 533133 - RNA, 22 nt, Human
ugcacacacaaaagcuaaaccc

SEQ ID NO: 533134 - RNA, 22 nt, Human
uuagcccaugccagugaaggug

SEQ ID NO: 533135 - RNA, 20 nt, Human
uuuuuuuuuuuuuuuuccau

SEQ ID NO: 533136 - RNA, 23 nt, Human
aaaaaaaaaaccaacaacaaacc

SEQ ID NO: 533137 - RNA, 26 nt, Human
aaaaaaaaaaccaacaacaaaccaaa

SEQ ID NO: 533138 - RNA, 22 nt, Human
aaaaaaaccaacaacaaaccaa

SEQ ID NO: 533139 - RNA, 24 nt, Human
aaaccaaaaaaaccgccccccaaa

SEQ ID NO: 533140 - RNA, 28 nt, Human
aacaacaaaccaaaaaaaccgcccccca

SEQ ID NO: 533141 - RNA, 20 nt, Human
aacacagugagacccugucu

SEQ ID NO: 533142 - RNA, 21 nt, Human
aacacagugagacccugucuc

SEQ ID NO: 533143 - RNA, 20 nt, Human
aaccaaaaaaaccgcccccc

SEQ ID NO: 533144 - RNA, 24 nt, Human
aaccaaaaaaaccgccccccaaaa

SEQ ID NO: 533145 - RNA, 24 nt, Human
aaccaccucaaauaguuuuaugga

SEQ ID NO: 533146 - RNA, 21 nt, Human
aaguauuaaggaaaaugaacc

SEQ ID NO: 533147 - RNA, 24 nt, Human
aaucacuugagcccaggaguucaa

SEQ ID NO: 533148 - RNA, 26 nt, Human
aaucacuugagcccaggaguucaaga

SEQ ID NO: 533149 - RNA, 21 nt, Human
accuaggauaccuaauuauuc

SEQ ID NO: 533150 - RNA, 24 nt, Human
accuuaaccaccucaaauaguuuu

SEQ ID NO: 533151 - RNA, 18 nt, Human
acuggaauaaaagacaua

SEQ ID NO: 533152 - RNA, 21 nt, Human
acuucuuuuuuuuuuuuuuuu

SEQ ID NO: 533153 - RNA, 27 nt, Human
acuucuuuuuuuuuuuuuuuuuuuuuu

SEQ ID NO: 533154 - RNA, 24 nt, Human
agaaucacuugagcccaggaguuc

SEQ ID NO: 533155 - RNA, 22 nt, Human
agcucuuaacugccagcucaca

SEQ ID NO: 533156 - RNA, 18 nt, Human
aggaguucaagaccggcc

SEQ ID NO: 533157 - RNA, 18 nt, Human
aggugggagaaucacuug

SEQ ID NO: 533158 - RNA, 23 nt, Human
aggugggagaaucacuugagccc

SEQ ID NO: 533159 - RNA, 23 nt, Human
aucacuugagcccaggaguucaa

SEQ ID NO: 533160 - RNA, 23 nt, Human
aucuuuaucuuaagacuugagaa

SEQ ID NO: 533161 - RNA, 21 nt, Human
augaacccaagaaccuuaacc

SEQ ID NO: 533162 - RNA, 24 nt, Human
caaaaaaaagguuucucuucuccc

SEQ ID NO: 533163 - RNA, 19 nt, Human
caaaaaaaccgccccccaa

SEQ ID NO: 533164 - RNA, 21 nt, Human
caacaaaccaaaaaaaccgcc

SEQ ID NO: 533165 - RNA, 22 nt, Human
caacacagugagacccugucuc

SEQ ID NO: 533166 - RNA, 21 nt, Human
caaucuacaauauucagcaaa

SEQ ID NO: 533167 - RNA, 19 nt, Human
cacaccuguaaucccaaca

SEQ ID NO: 533168 - RNA, 24 nt, Human
cacaccuguaaucccaacaauuua

SEQ ID NO: 533169 - RNA, 23 nt, Human
ccaaaaaaaaaaaaaaaaccaac

SEQ ID NO: 533170 - RNA, 24 nt, Human
ccaaaaaaaccgccccccaaaaaa

SEQ ID NO: 533171 - RNA, 25 nt, Human
ccaaaaaaaccgccccccaaaaaaa

SEQ ID NO: 533172 - RNA, 22 nt, Human
cccaaaaaaaagguuucucuuc

SEQ ID NO: 533173 - RNA, 21 nt, Human
cccccaaaaaaaagguuucuc

SEQ ID NO: 533174 - RNA, 21 nt, Human
cucacaccuguaaucccaaca

SEQ ID NO: 533175 - RNA, 21 nt, Human
cucacaccuguaaucccaaca

SEQ ID NO: 533176 - RNA, 22 nt, Human
cucuaaccaaccuaacacucgc

SEQ ID NO: 533177 - RNA, 21 nt, Human
cugaagcuuuaaauucuuuga

SEQ ID NO: 533178 - RNA, 24 nt, Human
cuuccauaguugcaaagaacaaag

SEQ ID NO: 533179 - RNA, 19 nt, Human
gaacaaagaaaucaucuuc

SEQ ID NO: 533180 - RNA, 24 nt, Human
gagacggagucuugccaaaaaaaa

SEQ ID NO: 533181 - RNA, 19 nt, Human
gccaaaaaaaaaaaaaaaa

SEQ ID NO: 533182 - RNA, 22 nt, Human
gcccaggaguucaagaccggcc

SEQ ID NO: 533183 - RNA, 24 nt, Human
uaaaauaguacuuuuacaaaauca

SEQ ID NO: 533184 - RNA, 19 nt, Human
uaagacuugagaacuggaa

SEQ ID NO: 533185 - RNA, 23 nt, Human
uacuacauuuauuaaaauuccua

SEQ ID NO: 533186 - RNA, 19 nt, Human
uagcauuuuaaauguaaaa

SEQ ID NO: 533187 - RNA, 23 nt, Human
ucacuugagcccaggaguucaag

SEQ ID NO: 533188 - RNA, 24 nt, Human
uccauaguugcaaagaaccggggc

SEQ ID NO: 533189 - RNA, 23 nt, Human
ucggccaggugcacugucucaca

SEQ ID NO: 533190 - RNA, 21 nt, Human
ucuacaauauucagcaaagua

SEQ ID NO: 533191 - RNA, 22 nt, Human
ucuugccaaaaaaaaaaaaaaa

SEQ ID NO: 533192 - RNA, 23 nt, Human
ucuugccaaaaaaaaaaaaaaaa

SEQ ID NO: 533193 - RNA, 23 nt, Human
ucuuugagccauucagcucuuaa

SEQ ID NO: 533194 - RNA, 18 nt, Human
ugaagcuuuaaauucuuu

SEQ ID NO: 533195 - RNA, 23 nt, Human
ugagcccaggaguucaagaccgg

SEQ ID NO: 533196 - RNA, 24 nt, Human
ugcacugucucacaccuguaaucc

SEQ ID NO: 533197 - RNA, 18 nt, Human
ugccaaaaaaaaaaaaaa

SEQ ID NO: 533198 - RNA, 21 nt, Human
ugccaaaaaaaaaaaaaaaac

SEQ ID NO: 533199 - RNA, 24 nt, Human
ugccaaaaaaaaaaaaaaaaccaa

SEQ ID NO: 533200 - RNA, 26 nt, Human
uggaauaaaagacauaaagcugggca

SEQ ID NO: 533201 - RNA, 22 nt, Human
ugucucacaccuguaaucccaa

SEQ ID NO: 533202 - RNA, 19 nt, Human
uucaagguuuuccuaauuu

SEQ ID NO: 533203 - RNA, 20 nt, Human
uucacagcuuccauaguugc

SEQ ID NO: 533204 - RNA, 22 nt, Human
uugagcccaggaguucaagacc

SEQ ID NO: 533205 - RNA, 24 nt, Human
uuuuuuuuuuuugagacggagucu

SEQ ID NO: 533206 - RNA, 22 nt, Human
uuuuuuuuuuuuuugagacgga

SEQ ID NO: 533207 - RNA, 18 nt, Human
uuuuuuuuuuuuuuuuug

SEQ ID NO: 533208 - RNA, 20 nt, Human
aaaucacaugucuuuaacaa

SEQ ID NO: 533209 - RNA, 23 nt, Human
acaucacaauggaauugggccug

SEQ ID NO: 533210 - RNA, 23 nt, Human
accagguacauuacccagcauuu

SEQ ID NO: 533211 - RNA, 21 nt, Human
auaaagguaaacaucacaaug

SEQ ID NO: 533212 - RNA, 28 nt, Human
aucacaauggaauugggccugucugacu

SEQ ID NO: 533213 - RNA, 19 nt, Human
cacaugucuuuaacaaggc

SEQ ID NO: 533214 - RNA, 22 nt, Human
caguugacuguaucucaaguuc

SEQ ID NO: 533215 - RNA, 21 nt, Human
caucacaauggaauugggccu

SEQ ID NO: 533216 - RNA, 21 nt, Human
caugucuuuaacaaggcaauu

SEQ ID NO: 533217 - RNA, 25 nt, Human
ccuauaauuaagacaaaccauuuua

SEQ ID NO: 533218 - RNA, 23 nt, Human
ccucuacugccuggcuuuccuca

SEQ ID NO: 533219 - RNA, 18 nt, Human
cuauaauuaagacaaacc

SEQ ID NO: 533220 - RNA, 18 nt, Human
cuguauuuuaauaggaaa

SEQ ID NO: 533221 - RNA, 22 nt, Human
gggaaaaagaucacuucaauau

SEQ ID NO: 533222 - RNA, 23 nt, Human
guaucucaaguucaaacugcacu

SEQ ID NO: 533223 - RNA, 19 nt, Human
gucuuuaacaaggcaauuu

SEQ ID NO: 533224 - RNA, 25 nt, Human
uaaaauacaaaucacaugucuuuaa

SEQ ID NO: 533225 - RNA, 21 nt, Human
uaacuuuauguuccuuaggau

SEQ ID NO: 533226 - RNA, 22 nt, Human
uaagacaaaccauuuuacacuu

SEQ ID NO: 533227 - RNA, 19 nt, Human
uaccagguacauuacccag

SEQ ID NO: 533228 - RNA, 22 nt, Human
uagccaacaaauagucuacauu

SEQ ID NO: 533229 - RNA, 19 nt, Human
uaggauccuagcaaacacu

SEQ ID NO: 533230 - RNA, 21 nt, Human
uauuuuaauaggaaacaagca

SEQ ID NO: 533231 - RNA, 19 nt, Human
ucacaauggaauugggccu

SEQ ID NO: 533232 - RNA, 23 nt, Human
ucugacuagggaaaaagaucacu

SEQ ID NO: 533233 - RNA, 18 nt, Human
uggcuauaaagguaaaca

SEQ ID NO: 533234 - RNA, 22 nt, Human
uuccuuaggauccuagcaaaca

SEQ ID NO: 533235 - RNA, 21 nt, Human
uuuccuuucuuuaaaaacaag

SEQ ID NO: 533236 - RNA, 24 nt, Human
uuuggguggggggaauuuaggaag

SEQ ID NO: 533237 - RNA, 22 nt, Human
aacuuagagggugggccaaugg

SEQ ID NO: 533238 - RNA, 21 nt, Human
aagcccagagcuggcagggga

SEQ ID NO: 533239 - RNA, 21 nt, Human
aggagcugaggccaagggagg

SEQ ID NO: 533240 - RNA, 19 nt, Human
aggcagaaggaagugacaa

SEQ ID NO: 533241 - RNA, 29 nt, Human
aggcagaaggaagugacaaaggggacccc

SEQ ID NO: 533242 - RNA, 23 nt, Human
caaagggaaagggcaugcuggag

SEQ ID NO: 533243 - RNA, 23 nt, Human
cacuccagcucacucugggugcu

SEQ ID NO: 533244 - RNA, 24 nt, Human
cagcacagcagugagaggagcuga

SEQ ID NO: 533245 - RNA, 21 nt, Human
cagcagugagaggagcugagg

SEQ ID NO: 533246 - RNA, 18 nt, Human
gagcuggcaggggagggc

SEQ ID NO: 533247 - RNA, 22 nt, Human
ggcaggggagggcaugacccag

SEQ ID NO: 533248 - RNA, 21 nt, Human
gugcugucuguaguucuggaa

SEQ ID NO: 533249 - RNA, 19 nt, Human
ugacaaaggccaccucagc

SEQ ID NO: 533250 - RNA, 22 nt, Human
ugcacaaggaaaaugccuuauc

SEQ ID NO: 533251 - RNA, 18 nt, Human
ugcuggagaggcaugggg

SEQ ID NO: 533252 - RNA, 23 nt, Human
ugcuggagaggcauggggaccca

SEQ ID NO: 533253 - RNA, 18 nt, Human
ugcugucuguaguucugg

SEQ ID NO: 533254 - RNA, 18 nt, Human
uggcaggggagggcauga

SEQ ID NO: 533255 - RNA, 25 nt, Human
uguggaggcucugaaacaggcugag

SEQ ID NO: 533256 - RNA, 24 nt, Human
uguggaggcucugaaacaggcugg

SEQ ID NO: 533257 - RNA, 18 nt, Human
uuuuucacgcucacuggg

SEQ ID NO: 533258 - RNA, 21 nt, Human
uuuuuuuuuuuuuucuugcuu

SEQ ID NO: 533259 - RNA, 20 nt, Human
uuuuuuuuuuuuuuucuugg

SEQ ID NO: 533260 - RNA, 23 nt, Human
aaaaagccuaaaauauacucuaa

SEQ ID NO: 533261 - RNA, 25 nt, Human
aaaccuccuucaggaaggagaugau

SEQ ID NO: 533262 - RNA, 18 nt, Human
aagcagauguggugaagu

SEQ ID NO: 533263 - RNA, 23 nt, Human
aauaaguuuuuauuggaacauag

SEQ ID NO: 533264 - RNA, 20 nt, Human
acacgucgccugcacgccgg

SEQ ID NO: 533265 - RNA, 22 nt, Human
acuacaccuucaggaacugcag

SEQ ID NO: 533266 - RNA, 18 nt, Human
acugcagaagcguggcug

SEQ ID NO: 533267 - RNA, 21 nt, Human
agagacacagacuacaccuuc

SEQ ID NO: 533268 - RNA, 20 nt, Human
agcagauguggugaagugcc

SEQ ID NO: 533269 - RNA, 22 nt, Human
agggagaauucuuucucuggcu

SEQ ID NO: 533270 - RNA, 19 nt, Human
aggggauggcuuccacugu

SEQ ID NO: 533271 - RNA, 20 nt, Human
caagcaggggucugaauagc

SEQ ID NO: 533272 - RNA, 18 nt, Human
caauggggaaggccacug

SEQ ID NO: 533273 - RNA, 19 nt, Human
cagcccagcccaggugucc

SEQ ID NO: 533274 - RNA, 21 nt, Human
cauacugcagaagcguggcug

SEQ ID NO: 533275 - RNA, 22 nt, Human
cauacugcagaagcguggcuga

SEQ ID NO: 533276 - RNA, 20 nt, Human
ccagcuaggaccuuuucuca

SEQ ID NO: 533277 - RNA, 22 nt, Human
ccagguguccaucucuguugca

SEQ ID NO: 533278 - RNA, 22 nt, Human
ccucccgguaguacacgucgcc

SEQ ID NO: 533279 - RNA, 20 nt, Human
ccuugcugcuucguggcagu

SEQ ID NO: 533280 - RNA, 19 nt, Human
cgagaggaggugggguggc

SEQ ID NO: 533281 - RNA, 22 nt, Human
cgcaggacucacaggugguugg

SEQ ID NO: 533282 - RNA, 20 nt, Human
cgccguugucuaaaaaaguc

SEQ ID NO: 533283 - RNA, 23 nt, Human
cguacuguucugcuuacaaagau

SEQ ID NO: 533284 - RNA, 20 nt, Human
cuaaaaaagucugaacucca

SEQ ID NO: 533285 - RNA, 22 nt, Human
cucaucuuccuggguguuagaa

SEQ ID NO: 533286 - RNA, 23 nt, Human
cuccuucaggaaggagaugaucc

SEQ ID NO: 533287 - RNA, 20 nt, Human
cugccagucgcgccguuguc

SEQ ID NO: 533288 - RNA, 22 nt, Human
cugcccagaaggcugccaccac

SEQ ID NO: 533289 - RNA, 21 nt, Human
cuggaggaccagagcaggggc

SEQ ID NO: 533290 - RNA, 20 nt, Human
cuuaaacauuguccagccca

SEQ ID NO: 533291 - RNA, 21 nt, Human
cuucaggaaggagaugauccc

SEQ ID NO: 533292 - RNA, 21 nt, Human
gccugcacgccgguuguccac

SEQ ID NO: 533293 - RNA, 22 nt, Human
gcgcuggcuuuccagcuggguc

SEQ ID NO: 533294 - RNA, 21 nt, Human
gcuggugugugcacaggccug

SEQ ID NO: 533295 - RNA, 22 nt, Human
gggaaggccacuggggugaacu

SEQ ID NO: 533296 - RNA, 18 nt, Human
gucauaaacacgcuggag

SEQ ID NO: 533297 - RNA, 20 nt, Human
gucugaauagcuuuuuccau

SEQ ID NO: 533298 - RNA, 19 nt, Human
gugggaagcagauguggug

SEQ ID NO: 533299 - RNA, 20 nt, Human
gugguuggucccagaggggu

SEQ ID NO: 533300 - RNA, 19 nt, Human
uaacuaguccauaggaugg

SEQ ID NO: 533301 - RNA, 24 nt, Human
uacccuugugacuugucauucagg

SEQ ID NO: 533302 - RNA, 21 nt, Human
ucacagaggggacugacucca

SEQ ID NO: 533303 - RNA, 18 nt, Human
ucauccaguuuuuagacc

SEQ ID NO: 533304 - RNA, 18 nt, Human
uccagcccagcccaggug

SEQ ID NO: 533305 - RNA, 21 nt, Human
uccgcagagacacagacuaca

SEQ ID NO: 533306 - RNA, 24 nt, Human
uccgcagagacacagacuacaccu

SEQ ID NO: 533307 - RNA, 24 nt, Human
uccucuagaggccugaggagagag

SEQ ID NO: 533308 - RNA, 24 nt, Human
ucuaagaucguguuuacuaccuga

SEQ ID NO: 533309 - RNA, 19 nt, Human
ucucaggguguccuuuuuc

SEQ ID NO: 533310 - RNA, 21 nt, Human
ucugcgcuacuguagccacag

SEQ ID NO: 533311 - RNA, 24 nt, Human
ucugcgcuacuguagccacaggga

SEQ ID NO: 533312 - RNA, 22 nt, Human
ucuuucuuugauacccuuguga

SEQ ID NO: 533313 - RNA, 18 nt, Human
ugaaagaggaaaggaagg

SEQ ID NO: 533314 - RNA, 21 nt, Human
ugaagccuaggugaucucaua

SEQ ID NO: 533315 - RNA, 18 nt, Human
ugacaucaccuggucucu

SEQ ID NO: 533316 - RNA, 20 nt, Human
ugaggagagaggucacagag

SEQ ID NO: 533317 - RNA, 19 nt, Human
ugccuguggcugugucugc

SEQ ID NO: 533318 - RNA, 24 nt, Human
uggacuaaaaggaaccuuaaacau

SEQ ID NO: 533319 - RNA, 24 nt, Human
uggcaauggggaaggccacugggg

SEQ ID NO: 533320 - RNA, 18 nt, Human
ugggaagcagauguggug

SEQ ID NO: 533321 - RNA, 23 nt, Human
ugggucagcggucgugaggcuca

SEQ ID NO: 533322 - RNA, 24 nt, Human
ugguccaucacaguuccuucucaa

SEQ ID NO: 533323 - RNA, 21 nt, Human
uggucccagaggggucucuca

SEQ ID NO: 533324 - RNA, 21 nt, Human
uggucucugcccuucagcccc

SEQ ID NO: 533325 - RNA, 21 nt, Human
uggugaagugccguacuguuc

SEQ ID NO: 533326 - RNA, 24 nt, Human
ugguggaguguaacaagaacgucu

SEQ ID NO: 533327 - RNA, 21 nt, Human
uggugggaagcagauguggug

SEQ ID NO: 533328 - RNA, 22 nt, Human
uguaacaagaacgucuuaaauc

SEQ ID NO: 533329 - RNA, 21 nt, Human
ugucuaagaucguguuuacua

SEQ ID NO: 533330 - RNA, 24 nt, Human
ugucuaagaucguguuuacuaccu

SEQ ID NO: 533331 - RNA, 19 nt, Human
uuagcagggggaagacagc

SEQ ID NO: 533332 - RNA, 19 nt, Human
uucaggggauggcuuccac

SEQ ID NO: 533333 - RNA, 22 nt, Human
uucaggggauggcuuccacugu

SEQ ID NO: 533334 - RNA, 23 nt, Human
uucaggggauggcuuccacuguu

SEQ ID NO: 533335 - RNA, 22 nt, Human
uucugcuuacaaagauggggau

SEQ ID NO: 533336 - RNA, 18 nt, Human
uugggccucgaagggaga

SEQ ID NO: 533337 - RNA, 23 nt, Human
uuggucccagaggggucucucag

SEQ ID NO: 533338 - RNA, 20 nt, Human
uuguccagcccagcccaggu

SEQ ID NO: 533339 - RNA, 21 nt, Human
uuuaugaaagaggaaaggaag

SEQ ID NO: 533340 - RNA, 23 nt, Human
cuugagguaucacagaaccagca

SEQ ID NO: 533341 - RNA, 21 nt, Human
ucacagaaccagcauucccca

SEQ ID NO: 533342 - RNA, 22 nt, Human
ucuguagucuccaauuccuacu

SEQ ID NO: 533343 - RNA, 25 nt, Human
ucuguagucuccaauuccuacuugg

SEQ ID NO: 533344 - RNA, 20 nt, Human
ugaaauaaaaacauauaaau

SEQ ID NO: 533345 - RNA, 21 nt, Human
ugcccaacaaaguagcuaaua

SEQ ID NO: 533346 - RNA, 20 nt, Human
uuccuacuuggcuguuuccg

SEQ ID NO: 533347 - RNA, 23 nt, Human
uugaagaaaucugauucugugcg

SEQ ID NO: 533348 - RNA, 22 nt, Human
uugaagaaaucugauucugugg

SEQ ID NO: 533349 - RNA, 19 nt, Human
uugaagaaaucugauuuua

SEQ ID NO: 533350 - RNA, 18 nt, Human
aaaacaaaaccccagaaa

SEQ ID NO: 533351 - RNA, 21 nt, Human
aaaacaaaaccccagaaaccc

SEQ ID NO: 533352 - RNA, 23 nt, Human
aaaacaaagacagaaaaauuaaa

SEQ ID NO: 533353 - RNA, 24 nt, Human
aaacaaaaccccagaaaccccuca

SEQ ID NO: 533354 - RNA, 19 nt, Human
aaaccccagaaaccccuca

SEQ ID NO: 533355 - RNA, 24 nt, Human
aaagugcugggauuacaggcauga

SEQ ID NO: 533356 - RNA, 19 nt, Human
aaauagcugggauuacagg

SEQ ID NO: 533357 - RNA, 26 nt, Human
aaauagcugggauuacaggcgccugc

SEQ ID NO: 533358 - RNA, 25 nt, Human
aacauuuccuuuuuuuuuuuuuuuu

SEQ ID NO: 533359 - RNA, 22 nt, Human
aaccuugugauccaccugccuc

SEQ ID NO: 533360 - RNA, 22 nt, Human
aaccuugugauccaccugccuc

SEQ ID NO: 533361 - RNA, 24 nt, Human
aaccuugugauccaccugccucgg

SEQ ID NO: 533362 - RNA, 25 nt, Human
aagcgauucuucugccucagccucc

SEQ ID NO: 533363 - RNA, 19 nt, Human
aagugcugggauuacaggc

SEQ ID NO: 533364 - RNA, 21 nt, Human
aagugcugggauuacaggcau

SEQ ID NO: 533365 - RNA, 22 nt, Human
aaucucugcucacugcaaccuc

SEQ ID NO: 533366 - RNA, 24 nt, Human
acaaaaccccagaaaccccucagc

SEQ ID NO: 533367 - RNA, 24 nt, Human
accauguuggccaggcuggucucg

SEQ ID NO: 533368 - RNA, 19 nt, Human
accccagaaaccccucagc

SEQ ID NO: 533369 - RNA, 25 nt, Human
acccugucgcccagacuugagugca

SEQ ID NO: 533370 - RNA, 24 nt, Human
accuugugauccaccugccucggc

SEQ ID NO: 533371 - RNA, 18 nt, Human
acgggguuucaccauguu

SEQ ID NO: 533372 - RNA, 23 nt, Human
acgggguuucaccauguuggcca

SEQ ID NO: 533373 - RNA, 24 nt, Human
acgggguuucaccauguuggccag

SEQ ID NO: 533374 - RNA, 19 nt, Human
agaaggaaggaagggagag

SEQ ID NO: 533375 - RNA, 18 nt, Human
agacagaaaaauuaaaau

SEQ ID NO: 533376 - RNA, 22 nt, Human
agcaggaauugaugacaacaac

SEQ ID NO: 533377 - RNA, 24 nt, Human
agugacuucaagccacagugacac

SEQ ID NO: 533378 - RNA, 21 nt, Human
agugcaguggcgcaaucucug

SEQ ID NO: 533379 - RNA, 18 nt, Human
agugcugggauuacaggc

SEQ ID NO: 533380 - RNA, 18 nt, Human
auagcugggauuacaggc

SEQ ID NO: 533381 - RNA, 24 nt, Human
auuuuuguguuuuuaguagagacg

SEQ ID NO: 533382 - RNA, 24 nt, Human
caaagugcugggauuacaggcaug

SEQ ID NO: 533383 - RNA, 20 nt, Human
caacacccgguugucaccac

SEQ ID NO: 533384 - RNA, 22 nt, Human
caagcgauucuucugccucagc

SEQ ID NO: 533385 - RNA, 23 nt, Human
caccaugcccagcuaauuuuugu

SEQ ID NO: 533386 - RNA, 21 nt, Human
caccauguuggccaggcuggu

SEQ ID NO: 533387 - RNA, 24 nt, Human
caccauguuggccaggcuggucuc

SEQ ID NO: 533388 - RNA, 19 nt, Human
cacccugucgcccagacuu

SEQ ID NO: 533389 - RNA, 24 nt, Human
cacccugucgcccagacuugagug

SEQ ID NO: 533390 - RNA, 23 nt, Human
caccugccucggccucccaaagu

SEQ ID NO: 533391 - RNA, 24 nt, Human
cagcagaagcuucaguucuuugau

SEQ ID NO: 533392 - RNA, 23 nt, Human
cauguuggccaggcuggucucga

SEQ ID NO: 533393 - RNA, 23 nt, Human
ccaaagugcugggauuacaggca

SEQ ID NO: 533394 - RNA, 24 nt, Human
ccaaagugcugggauuacaggcau

SEQ ID NO: 533395 - RNA, 18 nt, Human
ccagguucaagcgauucu

SEQ ID NO: 533396 - RNA, 22 nt, Human
ccagguucaagcgauucuucug

SEQ ID NO: 533397 - RNA, 24 nt, Human
cccaaagugcugggauuacaggca

SEQ ID NO: 533398 - RNA, 23 nt, Human
cccaaauagcugggauuacaggc

SEQ ID NO: 533399 - RNA, 24 nt, Human
cccaaauagcugggauuacaggcg

SEQ ID NO: 533400 - RNA, 22 nt, Human
cccaacacccgguugucaccac

SEQ ID NO: 533401 - RNA, 21 nt, Human
ccccagaaaccccucagcagg

SEQ ID NO: 533402 - RNA, 24 nt, Human
ccgccuuccagguucaagcgauuc

SEQ ID NO: 533403 - RNA, 19 nt, Human
ccucgagggcugagaagga

SEQ ID NO: 533404 - RNA, 24 nt, Human
ccuuccagguucaagcgauucuuc

SEQ ID NO: 533405 - RNA, 19 nt, Human
cgcccagacuugagugcag

SEQ ID NO: 533406 - RNA, 20 nt, Human
cuacccaucacuggcacuug

SEQ ID NO: 533407 - RNA, 24 nt, Human
cucccaaauagcugggauuacagg

SEQ ID NO: 533408 - RNA, 24 nt, Human
cugcaaccuccgccuuccagguuc

SEQ ID NO: 533409 - RNA, 23 nt, Human
cugccucagccucccaaauagcu

SEQ ID NO: 533410 - RNA, 23 nt, Human
cugccucggccucccaaagugcu

SEQ ID NO: 533411 - RNA, 23 nt, Human
cuggucucgagcucccaaccuug

SEQ ID NO: 533412 - RNA, 19 nt, Human
cuuuuuuuuuuuuuuuuug

SEQ ID NO: 533413 - RNA, 20 nt, Human
cuuuuuuuuuuuuuuuuugg

SEQ ID NO: 533414 - RNA, 22 nt, Human
gacaacaacagaggaauccaac

SEQ ID NO: 533415 - RNA, 24 nt, Human
gagacgggguuucaccauguuggc

SEQ ID NO: 533416 - RNA, 20 nt, Human
gagugcaguggcgcaaucuc

SEQ ID NO: 533417 - RNA, 18 nt, Human
gauuacaggcgccugcca

SEQ ID NO: 533418 - RNA, 22 nt, Human
gauuacaggcgccugccaccau

SEQ ID NO: 533419 - RNA, 21 nt, Human
gauucuucugccucagccucc

SEQ ID NO: 533420 - RNA, 22 nt, Human
gcaaccuccgccuuccagguuc

SEQ ID NO: 533421 - RNA, 24 nt, Human
gcgauucuucugccucagccuccc

SEQ ID NO: 533422 - RNA, 21 nt, Human
gcugcagaugaccaggucugg

SEQ ID NO: 533423 - RNA, 23 nt, Human
ggaaggaagggagaguccgcaag

SEQ ID NO: 533424 - RNA, 20 nt, Human
gggagcucuguuugguacca

SEQ ID NO: 533425 - RNA, 23 nt, Human
gggguuucaccauguuggccagg

SEQ ID NO: 533426 - RNA, 22 nt, Human
ggguuucaccauguuggccagg

SEQ ID NO: 533427 - RNA, 23 nt, Human
guagagacgggguuucaccaugu

SEQ ID NO: 533428 - RNA, 20 nt, Human
gugacaaaggcuacaaagga

SEQ ID NO: 533429 - RNA, 24 nt, Human
gugauccaccugccucggccuccc

SEQ ID NO: 533430 - RNA, 20 nt, Human
guggacagcagaagcuucag

SEQ ID NO: 533431 - RNA, 22 nt, Human
uaaaaacaaaaccccagaaacc

SEQ ID NO: 533432 - RNA, 26 nt, Human
uaaaaacaaaaccccagaaaccccuc

SEQ ID NO: 533433 - RNA, 24 nt, Human
uaauuuuuguguuuuuaguagaga

SEQ ID NO: 533434 - RNA, 22 nt, Human
uagagacgggguuucaccaugu

SEQ ID NO: 533435 - RNA, 24 nt, Human
uaguagagacgggguuucaccaug

SEQ ID NO: 533436 - RNA, 26 nt, Human
uaguagagacgggguuucaccauguu

SEQ ID NO: 533437 - RNA, 18 nt, Human
ucacugcaaccuccgccu

SEQ ID NO: 533438 - RNA, 19 nt, Human
ucacugcaaccuccgccuu

SEQ ID NO: 533439 - RNA, 24 nt, Human
ucacugcaaccuccgccuuccagg

SEQ ID NO: 533440 - RNA, 25 nt, Human
ucacugcaaccuccgccuuccaggu

SEQ ID NO: 533441 - RNA, 27 nt, Human
ucacugcaaccuccgccuuccagguuc

SEQ ID NO: 533442 - RNA, 20 nt, Human
ucagccucccaaauagcugg

SEQ ID NO: 533443 - RNA, 19 nt, Human
ucauuuuggagccccccuc

SEQ ID NO: 533444 - RNA, 24 nt, Human
ucccaaagugcugggauuacaggc

SEQ ID NO: 533445 - RNA, 24 nt, Human
ucccaaauagcugggauuacaggc

SEQ ID NO: 533446 - RNA, 23 nt, Human
ucccaaccuugugauccaccugc

SEQ ID NO: 533447 - RNA, 18 nt, Human
uccuuuuuuuuuuuuuuu

SEQ ID NO: 533448 - RNA, 18 nt, Human
ucggccucccaaagugcu

SEQ ID NO: 533449 - RNA, 18 nt, Human
ucuaugacugggccagag

SEQ ID NO: 533450 - RNA, 24 nt, Human
ucucacccugucgcccagacuuga

SEQ ID NO: 533451 - RNA, 25 nt, Human
ucucacccugucgcccagacuugag

SEQ ID NO: 533452 - RNA, 22 nt, Human
ucucugggccugcuuaauuagc

SEQ ID NO: 533453 - RNA, 22 nt, Human
ugacccacugccaggauaacau

SEQ ID NO: 533454 - RNA, 20 nt, Human
ugacugggccagagcugcag

SEQ ID NO: 533455 - RNA, 19 nt, Human
ugagaaggaaggaagggag

SEQ ID NO: 533456 - RNA, 22 nt, Human
ugagauggagucucacccuguc

SEQ ID NO: 533457 - RNA, 26 nt, Human
ugccucagccucccaaauagcuggga

SEQ ID NO: 533458 - RNA, 21 nt, Human
ugccucggccucccaaagugc

SEQ ID NO: 533459 - RNA, 24 nt, Human
ugccucggccucccaaagugcugg

SEQ ID NO: 533460 - RNA, 20 nt, Human
ugcugggauuacaggcauga

SEQ ID NO: 533461 - RNA, 23 nt, Human
uggccaggcuggucucgagcucc

SEQ ID NO: 533462 - RNA, 18 nt, Human
ugggauuacaggcaugaa

SEQ ID NO: 533463 - RNA, 18 nt, Human
ugggauuacaggcaugaa

SEQ ID NO: 533464 - RNA, 18 nt, Human
ugggauuacaggcaugaa

SEQ ID NO: 533465 - RNA, 18 nt, Human
ugggauuacaggcaugaa

SEQ ID NO: 533466 - RNA, 18 nt, Human
ugggauuacaggcaugaa

SEQ ID NO: 533467 - RNA, 19 nt, Human
ugggauuacaggcaugaag

SEQ ID NO: 533468 - RNA, 21 nt, Human
ugggauuacaggcaugaagga

SEQ ID NO: 533469 - RNA, 22 nt, Human
ugggauuacaggcaugaaggau

SEQ ID NO: 533470 - RNA, 23 nt, Human
ugggauuacaggcaugaaggaua

SEQ ID NO: 533471 - RNA, 24 nt, Human
ugggauuacaggcaugaaggauaa

SEQ ID NO: 533472 - RNA, 21 nt, Human
ugggauuacaggcgccugcca

SEQ ID NO: 533473 - RNA, 22 nt, Human
ugggauuacaggcgccugccac

SEQ ID NO: 533474 - RNA, 24 nt, Human
ugggauuacaggcgccugccacca

SEQ ID NO: 533475 - RNA, 25 nt, Human
ugggauuacaggcgccugccaccau

SEQ ID NO: 533476 - RNA, 21 nt, Human
ugggccagagcugcagaugac

SEQ ID NO: 533477 - RNA, 18 nt, Human
uuaguagagacgggguuu

SEQ ID NO: 533478 - RNA, 22 nt, Human
uuaguagagacgggguuucacc

SEQ ID NO: 533479 - RNA, 24 nt, Human
uuaguagagacgggguuucaccau

SEQ ID NO: 533480 - RNA, 23 nt, Human
uucaagcgauucuucugccucag

SEQ ID NO: 533481 - RNA, 24 nt, Human
uucaagcgauucuucugccucagc

SEQ ID NO: 533482 - RNA, 24 nt, Human
uuccagguucaagcgauucuucug

SEQ ID NO: 533483 - RNA, 22 nt, Human
uugacaacaggaugggugcccc

SEQ ID NO: 533484 - RNA, 24 nt, Human
uuucaccauguuggccaggcuggu

SEQ ID NO: 533485 - RNA, 24 nt, Human
uuuguguuuuuaguagagacgggg

SEQ ID NO: 533486 - RNA, 24 nt, Human
uuuuuaguagagacgggguuucac

SEQ ID NO: 533487 - RNA, 20 nt, Human
uuuuuguguuuuuaguagag

SEQ ID NO: 533488 - RNA, 26 nt, Human
uuuuuuuuuuuugagauggagucuca

SEQ ID NO: 533489 - RNA, 22 nt, Human
uuuuuuuuuuuuuugagaugga

SEQ ID NO: 533490 - RNA, 21 nt, Human
aaacagccccgugaaccuggc

SEQ ID NO: 533491 - RNA, 26 nt, Human
aagacaaugggggaacuccggguggc

SEQ ID NO: 533492 - RNA, 18 nt, Human
aagcccucggucaccagc

SEQ ID NO: 533493 - RNA, 21 nt, Human
aagucccgcaggaggcucugc

SEQ ID NO: 533494 - RNA, 22 nt, Human
aauccacccauuuacuuuggcc

SEQ ID NO: 533495 - RNA, 21 nt, Human
aaugcccuguccuuuaaucuc

SEQ ID NO: 533496 - RNA, 25 nt, Human
acacagcaccccauccccuaccccu

SEQ ID NO: 533497 - RNA, 25 nt, Human
acagacugugccugaugcugccccc

SEQ ID NO: 533498 - RNA, 18 nt, Human
acagcaccccauccccua

SEQ ID NO: 533499 - RNA, 20 nt, Human
acugaggcccuaggggugag

SEQ ID NO: 533500 - RNA, 23 nt, Human
agaauccacccauuuacuuuggc

SEQ ID NO: 533501 - RNA, 19 nt, Human
agaauucgagggcaaggcc

SEQ ID NO: 533502 - RNA, 18 nt, Human
agcccaggcaccaaagac

SEQ ID NO: 533503 - RNA, 19 nt, Human
agcuccucguuguacuccu

SEQ ID NO: 533504 - RNA, 21 nt, Human
aggaggaaacagccccgugaa

SEQ ID NO: 533505 - RNA, 18 nt, Human
aggcccuggccucggcag

SEQ ID NO: 533506 - RNA, 21 nt, Human
aggcccuggccucggcagccu

SEQ ID NO: 533507 - RNA, 19 nt, Human
agggcaaggccgugagggg

SEQ ID NO: 533508 - RNA, 21 nt, Human
aggggggacaucugggggagg

SEQ ID NO: 533509 - RNA, 21 nt, Human
aguagagcuuggagggccugg

SEQ ID NO: 533510 - RNA, 20 nt, Human
augcccuguccuuuaaucuc

SEQ ID NO: 533511 - RNA, 21 nt, Human
caaaacaagagcugaggccau

SEQ ID NO: 533512 - RNA, 18 nt, Human
caaaccuuugaagaacaa

SEQ ID NO: 533513 - RNA, 20 nt, Human
caaccauaccccgacauggu

SEQ ID NO: 533514 - RNA, 21 nt, Human
caagccccugggggcuuuuca

SEQ ID NO: 533515 - RNA, 25 nt, Human
cacagcaccccauccccuaccccuu

SEQ ID NO: 533516 - RNA, 21 nt, Human
cacccagggggagugcauggc

SEQ ID NO: 533517 - RNA, 23 nt, Human
cacccagggggagugcauggcuu

SEQ ID NO: 533518 - RNA, 18 nt, Human
caccuucugaaaugccug

SEQ ID NO: 533519 - RNA, 21 nt, Human
cagaaaccaucaagcugggga

SEQ ID NO: 533520 - RNA, 24 nt, Human
cagaaaggccucuucuccuggccc

SEQ ID NO: 533521 - RNA, 22 nt, Human
cagcagcaaaacaagagcugag

SEQ ID NO: 533522 - RNA, 18 nt, Human
cagccccgugaaccuggc

SEQ ID NO: 533523 - RNA, 22 nt, Human
cagcucuagggcagaggagaug

SEQ ID NO: 533524 - RNA, 18 nt, Human
caggagccccaguuggga

SEQ ID NO: 533525 - RNA, 23 nt, Human
caggccacuggaugcccacauua

SEQ ID NO: 533526 - RNA, 23 nt, Human
cagggggggguccacaggccacu

SEQ ID NO: 533527 - RNA, 25 nt, Human
caguccccagugggaccuguuugcc

SEQ ID NO: 533528 - RNA, 19 nt, Human
caucuccccuuugcccauc

SEQ ID NO: 533529 - RNA, 24 nt, Human
cauuuacuuuggccccuaaaacca

SEQ ID NO: 533530 - RNA, 22 nt, Human
ccaaagacaaugggggaacucc

SEQ ID NO: 533531 - RNA, 18 nt, Human
ccacaggccacuggaugc

SEQ ID NO: 533532 - RNA, 22 nt, Human
ccagcagcaaaacaagagcuga

SEQ ID NO: 533533 - RNA, 23 nt, Human
ccagcagcaaaacaagagcugag

SEQ ID NO: 533534 - RNA, 20 nt, Human
ccagcuccucguuguacucc

SEQ ID NO: 533535 - RNA, 21 nt, Human
ccccuaaaaccagcagcaaaa

SEQ ID NO: 533536 - RNA, 24 nt, Human
ccccuaaaaccagcagcaaaacaa

SEQ ID NO: 533537 - RNA, 19 nt, Human
ccccuugccccuccaugcc

SEQ ID NO: 533538 - RNA, 20 nt, Human
cccuaaaaccagcagcaaaa

SEQ ID NO: 533539 - RNA, 22 nt, Human
cccuaaaaccagcagcaaaaca

SEQ ID NO: 533540 - RNA, 18 nt, Human
cccuaccccuugccccuc

SEQ ID NO: 533541 - RNA, 18 nt, Human
cccuccaugccagacuua

SEQ ID NO: 533542 - RNA, 22 nt, Human
cccuggcaccuccacaggcccu

SEQ ID NO: 533543 - RNA, 21 nt, Human
ccuccaugccagacuuagcuc

SEQ ID NO: 533544 - RNA, 31 nt, Human
ccuggcaccuccacaggcccuggccucggcc

SEQ ID NO: 533545 - RNA, 18 nt, Human
ccuuaccuuccaucaaug

SEQ ID NO: 533546 - RNA, 18 nt, Human
cgagggcaaggccgugag

SEQ ID NO: 533547 - RNA, 18 nt, Human
cuccaagagucacagucc

SEQ ID NO: 533548 - RNA, 20 nt, Human
cuccaagagucacagucccc

SEQ ID NO: 533549 - RNA, 27 nt, Human
cuccucguuguacuccuccucucugau

SEQ ID NO: 533550 - RNA, 22 nt, Human
cuccuggcccuuaccuuccauc

SEQ ID NO: 533551 - RNA, 24 nt, Human
cucugcaccaccgaguaccgcgac

SEQ ID NO: 533552 - RNA, 18 nt, Human
cucugcugcuaacugagc

SEQ ID NO: 533553 - RNA, 18 nt, Human
cugcccucugcugcuaac

SEQ ID NO: 533554 - RNA, 19 nt, Human
cugcccucugcugcuaacu

SEQ ID NO: 533555 - RNA, 18 nt, Human
cuggccucggcagccucc

SEQ ID NO: 533556 - RNA, 21 nt, Human
gacugugccugaugcugcccc

SEQ ID NO: 533557 - RNA, 23 nt, Human
gaggaaacagccccgugaaccug

SEQ ID NO: 533558 - RNA, 24 nt, Human
gagguuccagaauccacccauuua

SEQ ID NO: 533559 - RNA, 18 nt, Human
gagugccaccuucugaaa

SEQ ID NO: 533560 - RNA, 20 nt, Human
gcaccaccgaguaccgcgac

SEQ ID NO: 533561 - RNA, 21 nt, Human
gcagaggagaugagggugagc

SEQ ID NO: 533562 - RNA, 20 nt, Human
gcggccagacagcugaagaa

SEQ ID NO: 533563 - RNA, 22 nt, Human
gcuuggagggccugggcggagg

SEQ ID NO: 533564 - RNA, 22 nt, Human
ggagaugagggugagcugcccg

SEQ ID NO: 533565 - RNA, 21 nt, Human
ggcaaggccgugaggggacac

SEQ ID NO: 533566 - RNA, 20 nt, Human
gggaccuguuugcccagcuc

SEQ ID NO: 533567 - RNA, 21 nt, Human
gggauggucugaguuuacuga

SEQ ID NO: 533568 - RNA, 21 nt, Human
gggccuacaaccauaccccga

SEQ ID NO: 533569 - RNA, 25 nt, Human
gggggaacuccggguggcagcaguc

SEQ ID NO: 533570 - RNA, 20 nt, Human
gucugaguuuacugaggccc

SEQ ID NO: 533571 - RNA, 18 nt, Human
uaaaaccagcagcaaaac

SEQ ID NO: 533572 - RNA, 27 nt, Human
uagggcagaggagaugagggugagccg

SEQ ID NO: 533573 - RNA, 18 nt, Human
ucacaguccccaguggga

SEQ ID NO: 533574 - RNA, 18 nt, Human
ucaggggagcccagggcc

SEQ ID NO: 533575 - RNA, 20 nt, Human
uccacaggcccuggccucgg

SEQ ID NO: 533576 - RNA, 20 nt, Human
ucuagggcagaggagaugag

SEQ ID NO: 533577 - RNA, 20 nt, Human
ucugguccauaaauaugaca

SEQ ID NO: 533578 - RNA, 21 nt, Human
ucugguccauaaauaugacag

SEQ ID NO: 533579 - RNA, 22 nt, Human
ucugguccauaaauaugacagg

SEQ ID NO: 533580 - RNA, 26 nt, Human
ucugguccauaaauaugacagguguu

SEQ ID NO: 533581 - RNA, 19 nt, Human
ugaccugcaggaggggaga

SEQ ID NO: 533582 - RNA, 19 nt, Human
ugauugaacaaacagcucu

SEQ ID NO: 533583 - RNA, 18 nt, Human
ugcaagcccucggucacc

SEQ ID NO: 533584 - RNA, 21 nt, Human
ugccagacuuagcucagaaac

SEQ ID NO: 533585 - RNA, 21 nt, Human
ugcccggugacaggggggaca

SEQ ID NO: 533586 - RNA, 23 nt, Human
uggaagcccaggcaccaaagaca

SEQ ID NO: 533587 - RNA, 19 nt, Human
uggagggccugggcggagg

SEQ ID NO: 533588 - RNA, 20 nt, Human
uggagggccugggcggaggu

SEQ ID NO: 533589 - RNA, 19 nt, Human
uggaugcccacauuaagcc

SEQ ID NO: 533590 - RNA, 21 nt, Human
uggcagcagucgugguggcag

SEQ ID NO: 533591 - RNA, 20 nt, Human
ugggagggacucuggaagcc

SEQ ID NO: 533592 - RNA, 26 nt, Human
uggggauuugggcagccuuugcuaug

SEQ ID NO: 533593 - RNA, 20 nt, Human
ugggggaggaggaggaaaca

SEQ ID NO: 533594 - RNA, 23 nt, Human
ugucaggggagcccagggccugc

SEQ ID NO: 533595 - RNA, 19 nt, Human
uugcccagcucucaauccu

SEQ ID NO: 533596 - RNA, 18 nt, Human
cagcagccugugggugcc

SEQ ID NO: 533597 - RNA, 22 nt, Human
cagccugugggugccuccuccu

SEQ ID NO: 533598 - RNA, 23 nt, Human
ccagcagccugugggugccuccu

SEQ ID NO: 533599 - RNA, 21 nt, Human
cccagcagccugugggugccu

SEQ ID NO: 533600 - RNA, 19 nt, Human
ccuccuccuuccucagcca

SEQ ID NO: 533601 - RNA, 22 nt, Human
cucagccacgccggaguucacu

SEQ ID NO: 533602 - RNA, 24 nt, Human
cuguuuuuaccauuuuauuuuugu

SEQ ID NO: 533603 - RNA, 19 nt, Human
gcucuccucccagcagccu

SEQ ID NO: 533604 - RNA, 21 nt, Human
ucuguuuuuaccauuuuauuu

SEQ ID NO: 533605 - RNA, 21 nt, Human
ugggugccuccuccuuccuca

SEQ ID NO: 533606 - RNA, 18 nt, Human
uuuuuuuuuuuuuuucug

SEQ ID NO: 533607 - RNA, 25 nt, Human
uuuuuuuuuuuuuuuuuucuguuuu

SEQ ID NO: 533608 - RNA, 26 nt, Human
uuuuuuuuuuuuuuuuuucuguuuuu

SEQ ID NO: 533609 - RNA, 26 nt, Human
uuuuuuuuuuuuuuuuuuucuguuuu

SEQ ID NO: 533610 - RNA, 24 nt, Human
uuuuuuuuuuuuuuuuuuuuucuu

SEQ ID NO: 533611 - RNA, 21 nt, Human
aaaaaauagcaaaucucacaa

SEQ ID NO: 533612 - RNA, 27 nt, Human
aaagagaaaucccuccgcccugucaag

SEQ ID NO: 533613 - RNA, 19 nt, Human
aagcaguaagugaaaacga

SEQ ID NO: 533614 - RNA, 23 nt, Human
aagcaguaagugaaaacgauccg

SEQ ID NO: 533615 - RNA, 20 nt, Human
acagcagcacaaucucugcg

SEQ ID NO: 533616 - RNA, 21 nt, Human
aggaaagagaaaucccuccgc

SEQ ID NO: 533617 - RNA, 21 nt, Human
caacaaggccuaggccuccag

SEQ ID NO: 533618 - RNA, 21 nt, Human
caagaaagcaaacuacauuuc

SEQ ID NO: 533619 - RNA, 20 nt, Human
caagacgcaauaagcgggug

SEQ ID NO: 533620 - RNA, 24 nt, Human
cagcgagucacauuuacuaaaagc

SEQ ID NO: 533621 - RNA, 18 nt, Human
cauugcuuccccuguccu

SEQ ID NO: 533622 - RNA, 20 nt, Human
cauuucaaguauaaucccau

SEQ ID NO: 533623 - RNA, 19 nt, Human
cuggaaaaguaaagacugc

SEQ ID NO: 533624 - RNA, 25 nt, Human
gaugaagccuucaacaaggccuagg

SEQ ID NO: 533625 - RNA, 19 nt, Human
gccugugcaucaacagcuu

SEQ ID NO: 533626 - RNA, 19 nt, Human
gcuacuggauuuggcugga

SEQ ID NO: 533627 - RNA, 21 nt, Human
gcucugugacccaggagcaag

SEQ ID NO: 533628 - RNA, 18 nt, Human
gcuuccccuguccuuccu

SEQ ID NO: 533629 - RNA, 20 nt, Human
ggaaaugcaguacccuuucc

SEQ ID NO: 533630 - RNA, 19 nt, Human
uaaaaaauagcaaaucuca

SEQ ID NO: 533631 - RNA, 22 nt, Human
uaaaaaauagcaaaucucacaa

SEQ ID NO: 533632 - RNA, 20 nt, Human
uaucacuggccauuggaaaa

SEQ ID NO: 533633 - RNA, 23 nt, Human
uauggugaauuacagcgagucac

SEQ ID NO: 533634 - RNA, 21 nt, Human
ucaacaaggccuaggccucca

SEQ ID NO: 533635 - RNA, 21 nt, Human
ucaaguauaaucccauaaggc

SEQ ID NO: 533636 - RNA, 23 nt, Human
uccccuguccuuccuuuagcugu

SEQ ID NO: 533637 - RNA, 20 nt, Human
uccuuuagcuguaacuccgg

SEQ ID NO: 533638 - RNA, 27 nt, Human
ucucacaaauacuuauuuaauuucuua

SEQ ID NO: 533639 - RNA, 21 nt, Human
ugaagcugggcuugccacaag

SEQ ID NO: 533640 - RNA, 21 nt, Human
ugacccaggagcaagacgcaa

SEQ ID NO: 533641 - RNA, 23 nt, Human
ugcaguggagguagaaacgggaa

SEQ ID NO: 533642 - RNA, 27 nt, Human
uggaagaugauucugcuacuggauuug

SEQ ID NO: 533643 - RNA, 22 nt, Human
uggcuggaaaaguaaagacugc

SEQ ID NO: 533644 - RNA, 25 nt, Human
uguggaagaugauucugcuacugga

SEQ ID NO: 533645 - RNA, 21 nt, Human
uuaaaaaauagcaaaucucac

SEQ ID NO: 533646 - RNA, 23 nt, Human
uuaaaaaauagcaaaucucacaa

SEQ ID NO: 533647 - RNA, 22 nt, Human
uucaacaaggccuaggccucca

SEQ ID NO: 533648 - RNA, 25 nt, Human
uuuaaaacaauuacuuuauuaaaaa

SEQ ID NO: 533649 - RNA, 19 nt, Human
aaacauuucauagaaucuc

SEQ ID NO: 533650 - RNA, 18 nt, Human
aguaguacuagaaagaag

SEQ ID NO: 533651 - RNA, 19 nt, Human
auagaaucucaaauaugac

SEQ ID NO: 533652 - RNA, 22 nt, Human
cagguaccacauuuuacaggga

SEQ ID NO: 533653 - RNA, 20 nt, Human
gaaacaguuggcucccuguu

SEQ ID NO: 533654 - RNA, 19 nt, Human
uacagauuucaaaaggcuu

SEQ ID NO: 533655 - RNA, 23 nt, Human
uaguaguacuagaaagaagaaaa

SEQ ID NO: 533656 - RNA, 19 nt, Human
ucaguagaaauaguaguac

SEQ ID NO: 533657 - RNA, 23 nt, Human
ugagaggaauuuuauguuuacag

SEQ ID NO: 533658 - RNA, 19 nt, Human
ugauuugguucauuaauaa

SEQ ID NO: 533659 - RNA, 18 nt, Human
uuacagauuucaaaaggc

SEQ ID NO: 533660 - RNA, 21 nt, Human
aaaacaauaaaauguggacaa

SEQ ID NO: 533661 - RNA, 23 nt, Human
aaacuccugggcuugagcaauuc

SEQ ID NO: 533662 - RNA, 24 nt, Human
aaagcgcuaggauuacagguguga

SEQ ID NO: 533663 - RNA, 24 nt, Human
aaaguguuggaauuacagguguga

SEQ ID NO: 533664 - RNA, 24 nt, Human
aaccauguuggccaggcuggucuc

SEQ ID NO: 533665 - RNA, 22 nt, Human
aacccucggccucaagcaaucc

SEQ ID NO: 533666 - RNA, 26 nt, Human
aagcgcuaggauuacaggugugagcc

SEQ ID NO: 533667 - RNA, 26 nt, Human
aaguagcuaggaucacaggugcacac

SEQ ID NO: 533668 - RNA, 26 nt, Human
aaguguuggaauuacaggugugagcc

SEQ ID NO: 533669 - RNA, 23 nt, Human
aaugcaguggugaaaucauagcu

SEQ ID NO: 533670 - RNA, 18 nt, Human
aauuacaggugugagcca

SEQ ID NO: 533671 - RNA, 22 nt, Human
aauuacaggugugagccauugc

SEQ ID NO: 533672 - RNA, 23 nt, Human
aauuacaggugugagccauugca

SEQ ID NO: 533673 - RNA, 20 nt, Human
accauguuggccaggcuggu

SEQ ID NO: 533674 - RNA, 23 nt, Human
accauguuggccaggcuggucuc

SEQ ID NO: 533675 - RNA, 24 nt, Human
accauguuggccaggcuggucucg

SEQ ID NO: 533676 - RNA, 24 nt, Human
acccaggcugaagugcaguggcau

SEQ ID NO: 533677 - RNA, 18 nt, Human
acgggguuuaaccauguu

SEQ ID NO: 533678 - RNA, 20 nt, Human
acgggguuuaaccauguugg

SEQ ID NO: 533679 - RNA, 24 nt, Human
acgggguuuaaccauguuggccag

SEQ ID NO: 533680 - RNA, 25 nt, Human
acucuguugcccaggcuagaaugca

SEQ ID NO: 533681 - RNA, 22 nt, Human
agcaauccucccgccucugccu

SEQ ID NO: 533682 - RNA, 25 nt, Human
agcaauccucccgccucugccuccc

SEQ ID NO: 533683 - RNA, 24 nt, Human
agcgauucuccugccucagccucu

SEQ ID NO: 533684 - RNA, 24 nt, Human
aggcugaagugcaguggcauaauc

SEQ ID NO: 533685 - RNA, 24 nt, Human
aggugauccacccaccgcggccuc

SEQ ID NO: 533686 - RNA, 25 nt, Human
aguaauauacccaaaauuugaaucc

SEQ ID NO: 533687 - RNA, 18 nt, Human
aguaccugggauuaccag

SEQ ID NO: 533688 - RNA, 20 nt, Human
agugcaguggcauaaucuug

SEQ ID NO: 533689 - RNA, 23 nt, Human
agugcaguggcauaaucuuggcu

SEQ ID NO: 533690 - RNA, 24 nt, Human
agugcaguggcauaaucuuggcuc

SEQ ID NO: 533691 - RNA, 19 nt, Human
agugcccaccaccacgccc

SEQ ID NO: 533692 - RNA, 18 nt, Human
auagcucauugcaacuuc

SEQ ID NO: 533693 - RNA, 24 nt, Human
auccaugggauggaaauaaaagga

SEQ ID NO: 533694 - RNA, 20 nt, Human
aucucacucuguugcccagg

SEQ ID NO: 533695 - RNA, 19 nt, Human
auguugcccaggcuagucu

SEQ ID NO: 533696 - RNA, 23 nt, Human
caaagaaucgccaucaucagcac

SEQ ID NO: 533697 - RNA, 24 nt, Human
caaagcgcuaggauuacaggugug

SEQ ID NO: 533698 - RNA, 24 nt, Human
caaaguguuggaauuacaggugug

SEQ ID NO: 533699 - RNA, 24 nt, Human
caacuucaaacuccugggcuugag

SEQ ID NO: 533700 - RNA, 28 nt, Human
caagcaauccucccgccucugccuccca

SEQ ID NO: 533701 - RNA, 20 nt, Human
caagcgauucuccugccuca

SEQ ID NO: 533702 - RNA, 22 nt, Human
caagcgauucuccugccucagc

SEQ ID NO: 533703 - RNA, 24 nt, Human
caccacgcccggcuaauuuuugua

SEQ ID NO: 533704 - RNA, 23 nt, Human
cacccaccgcggccucccaaagc

SEQ ID NO: 533705 - RNA, 23 nt, Human
cacccaggcugaagugcaguggc

SEQ ID NO: 533706 - RNA, 24 nt, Human
caccucagccucccaaguagcuag

SEQ ID NO: 533707 - RNA, 24 nt, Human
cacucuguugcccaggcuagaaug

SEQ ID NO: 533708 - RNA, 18 nt, Human
cacugcaaccucugccuc

SEQ ID NO: 533709 - RNA, 21 nt, Human
cacugcaaccucugccuccca

SEQ ID NO: 533710 - RNA, 20 nt, Human
cagccucuugaguaccuggg

SEQ ID NO: 533711 - RNA, 24 nt, Human
caggaucucacucuguugcccagg

SEQ ID NO: 533712 - RNA, 20 nt, Human
caggugauccacccaccgcg

SEQ ID NO: 533713 - RNA, 21 nt, Human
caggugcacaccauuacaccu

SEQ ID NO: 533714 - RNA, 22 nt, Human
cagucucgcuauguugcccagg

SEQ ID NO: 533715 - RNA, 21 nt, Human
cauccaaagaaucgccaucau

SEQ ID NO: 533716 - RNA, 24 nt, Human
cauguuggccaggcuggucucgaa

SEQ ID NO: 533717 - RNA, 21 nt, Human
cauugcaacuucaaacuccug

SEQ ID NO: 533718 - RNA, 21 nt, Human
ccaaagcgcuaggauuacagg

SEQ ID NO: 533719 - RNA, 24 nt, Human
ccaaagcgcuaggauuacaggugu

SEQ ID NO: 533720 - RNA, 21 nt, Human
ccaaaguguuggaauuacagg

SEQ ID NO: 533721 - RNA, 24 nt, Human
ccaaaguguuggaauuacaggugu

SEQ ID NO: 533722 - RNA, 19 nt, Human
ccacagucauugguuaggu

SEQ ID NO: 533723 - RNA, 24 nt, Human
ccagugcccaccaccacgcccggc

SEQ ID NO: 533724 - RNA, 23 nt, Human
cccaccucagccucccaaguagc

SEQ ID NO: 533725 - RNA, 20 nt, Human
cccagguucaagcgauucuc

SEQ ID NO: 533726 - RNA, 23 nt, Human
cccagguucaagcgauucuccug

SEQ ID NO: 533727 - RNA, 24 nt, Human
ccgccucugccucccaaaguguug

SEQ ID NO: 533728 - RNA, 24 nt, Human
ccucccagguucaagcgauucucc

SEQ ID NO: 533729 - RNA, 19 nt, Human
ccucccgccucugccuccc

SEQ ID NO: 533730 - RNA, 22 nt, Human
ccucccgccucugccucccaaa

SEQ ID NO: 533731 - RNA, 24 nt, Human
ccugaccucaggugauccacccac

SEQ ID NO: 533732 - RNA, 24 nt, Human
cgcuaggauuacaggugugagcca

SEQ ID NO: 533733 - RNA, 20 nt, Human
cgcuauguugcccaggcuag

SEQ ID NO: 533734 - RNA, 27 nt, Human
cgcuauguugcccaggcuagucuugaa

SEQ ID NO: 533735 - RNA, 20 nt, Human
cggccucaagcaauccuccc

SEQ ID NO: 533736 - RNA, 24 nt, Human
cggccucaagcaauccucccgccu

SEQ ID NO: 533737 - RNA, 24 nt, Human
cgggguuuaaccauguuggccagg

SEQ ID NO: 533738 - RNA, 25 nt, Human
cuagagguccuuucaaggucucuuc

SEQ ID NO: 533739 - RNA, 24 nt, Human
cucaagcaauccucccgccucugc

SEQ ID NO: 533740 - RNA, 24 nt, Human
cucacugcaaccucugccucccag

SEQ ID NO: 533741 - RNA, 24 nt, Human
cucacugcaaccucugccucccag

SEQ ID NO: 533742 - RNA, 24 nt, Human
cucccaaguagcuaggaucacagg

SEQ ID NO: 533743 - RNA, 21 nt, Human
cuccugggcuugagcaauucu

SEQ ID NO: 533744 - RNA, 23 nt, Human
cuccugggcuugagcaauucucc

SEQ ID NO: 533745 - RNA, 23 nt, Human
cugcaaccucugccucccagguu

SEQ ID NO: 533746 - RNA, 24 nt, Human
cugcaaccucugccucccagguuc

SEQ ID NO: 533747 - RNA, 23 nt, Human
cugccucagccucuugaguaccu

SEQ ID NO: 533748 - RNA, 20 nt, Human
cuucuuauuuauuuauuugg

SEQ ID NO: 533749 - RNA, 24 nt, Human
cuugagcaauucucccaccucagc

SEQ ID NO: 533750 - RNA, 23 nt, Human
cuugaguaccugggauuaccagu

SEQ ID NO: 533751 - RNA, 22 nt, Human
gaccucaggugauccacccacc

SEQ ID NO: 533752 - RNA, 25 nt, Human
gagcaauucucccaccucagccucc

SEQ ID NO: 533753 - RNA, 18 nt, Human
gauuacaggugugagcca

SEQ ID NO: 533754 - RNA, 22 nt, Human
gauuacaggugugagccacggc

SEQ ID NO: 533755 - RNA, 22 nt, Human
gcaaccucugccucccagguuc

SEQ ID NO: 533756 - RNA, 20 nt, Human
gcaacuucaaacuccugggc

SEQ ID NO: 533757 - RNA, 23 nt, Human
gccucugccucccaaaguguugg

SEQ ID NO: 533758 - RNA, 22 nt, Human
gcgauucuccugccucagccuc

SEQ ID NO: 533759 - RNA, 21 nt, Human
gcucacugcaaccucugccuc

SEQ ID NO: 533760 - RNA, 25 nt, Human
gcucugucacccaggcugaagugca

SEQ ID NO: 533761 - RNA, 19 nt, Human
gcugaagugcaguggcaua

SEQ ID NO: 533762 - RNA, 23 nt, Human
gcuggucucgaacuccugaccuc

SEQ ID NO: 533763 - RNA, 19 nt, Human
ggaucacaggugcacacca

SEQ ID NO: 533764 - RNA, 24 nt, Human
ggauuacaggugugagccacggcg

SEQ ID NO: 533765 - RNA, 19 nt, Human
ggcaacugcucuucuuauu

SEQ ID NO: 533766 - RNA, 24 nt, Human
ggcuggucucgaacuccugaccuc

SEQ ID NO: 533767 - RNA, 18 nt, Human
gggauggaaauaaaagga

SEQ ID NO: 533768 - RNA, 23 nt, Human
gggguuuaaccauguuggccagg

SEQ ID NO: 533769 - RNA, 19 nt, Human
ggucucgaacuccugaccu

SEQ ID NO: 533770 - RNA, 23 nt, Human
guagagacgggguuuaaccaugu

SEQ ID NO: 533771 - RNA, 24 nt, Human
gugauccacccaccgcggccuccc

SEQ ID NO: 533772 - RNA, 23 nt, Human
guggugaaaucauagcucauugc

SEQ ID NO: 533773 - RNA, 26 nt, Human
uaauuuuuguacuauuuuaguagaga

SEQ ID NO: 533774 - RNA, 24 nt, Human
uacaggugugagccacggcgccca

SEQ ID NO: 533775 - RNA, 19 nt, Human
uacaggugugagccauugc

SEQ ID NO: 533776 - RNA, 24 nt, Human
uaccacaaaacaguaauauuauca

SEQ ID NO: 533777 - RNA, 18 nt, Human
uaggauuacaggugugag

SEQ ID NO: 533778 - RNA, 19 nt, Human
uaggauuacaggugugagc

SEQ ID NO: 533779 - RNA, 21 nt, Human
uaggauuacaggugugagcca

SEQ ID NO: 533780 - RNA, 22 nt, Human
uaggauuacaggugugagccac

SEQ ID NO: 533781 - RNA, 22 nt, Human
uaggauuacaggugugagccac

SEQ ID NO: 533782 - RNA, 24 nt, Human
uaguagagacgggguuuaaccaug

SEQ ID NO: 533783 - RNA, 20 nt, Human
uauguugcccaggcuagucu

SEQ ID NO: 533784 - RNA, 24 nt, Human
uauguugcccaggcuagucuugaa

SEQ ID NO: 533785 - RNA, 19 nt, Human
ucacugcaaccucugccuc

SEQ ID NO: 533786 - RNA, 24 nt, Human
ucacugcaaccucugccucccagg

SEQ ID NO: 533787 - RNA, 25 nt, Human
ucacugcaaccucugccucccaggu

SEQ ID NO: 533788 - RNA, 20 nt, Human
ucagccucccaaguagcuag

SEQ ID NO: 533789 - RNA, 24 nt, Human
ucauugcaacuucaaacuccuggg

SEQ ID NO: 533790 - RNA, 23 nt, Human
ucccaaagcgcuaggauuacagg

SEQ ID NO: 533791 - RNA, 23 nt, Human
ucccaaaguguuggaauuacagg

SEQ ID NO: 533792 - RNA, 21 nt, Human
ucccagguucaagcgauucuc

SEQ ID NO: 533793 - RNA, 24 nt, Human
ucccagguucaagcgauucuccug

SEQ ID NO: 533794 - RNA, 23 nt, Human
uccucccgccucugccucccaaa

SEQ ID NO: 533795 - RNA, 21 nt, Human
uccugggcuugagcaauucuc

SEQ ID NO: 533796 - RNA, 23 nt, Human
uccugggcuugagcaauucuccc

SEQ ID NO: 533797 - RNA, 18 nt, Human
ucggccucaagcaauccu

SEQ ID NO: 533798 - RNA, 19 nt, Human
ucucacucuguugcccagg

SEQ ID NO: 533799 - RNA, 21 nt, Human
ucucacucuguugcccaggcu

SEQ ID NO: 533800 - RNA, 23 nt, Human
ucucacucuguugcccaggcuag

SEQ ID NO: 533801 - RNA, 24 nt, Human
ucucacucuguugcccaggcuaga

SEQ ID NO: 533802 - RNA, 26 nt, Human
ucucacucuguugcccaggcuagaau

SEQ ID NO: 533803 - RNA, 27 nt, Human
ucucacucuguugcccaggcuagaaug

SEQ ID NO: 533804 - RNA, 23 nt, Human
ucucccaccucagccucccaagu

SEQ ID NO: 533805 - RNA, 26 nt, Human
ucucccaccucagccucccaaguagc

SEQ ID NO: 533806 - RNA, 23 nt, Human
ucucgaacuccugaccucaggug

SEQ ID NO: 533807 - RNA, 19 nt, Human
ucucgcuauguugcccagg

SEQ ID NO: 533808 - RNA, 26 nt, Human
ucucgcuauguugcccaggcuagucu

SEQ ID NO: 533809 - RNA, 27 nt, Human
ucucgcuauguugcccaggcuagucuu

SEQ ID NO: 533810 - RNA, 23 nt, Human
ucugcauaaccaagaaggaaacu

SEQ ID NO: 533811 - RNA, 24 nt, Human
ucugucacccaggcugaagugcag

SEQ ID NO: 533812 - RNA, 18 nt, Human
ucuguugcccaggcuaga

SEQ ID NO: 533813 - RNA, 24 nt, Human
ucuguugcccaggcuagaaugcag

SEQ ID NO: 533814 - RNA, 23 nt, Human
ucuuauuuauuuauuugagucag

SEQ ID NO: 533815 - RNA, 24 nt, Human
ucuugaguaccugggauuaccagu

SEQ ID NO: 533816 - RNA, 19 nt, Human
ucuugcucugucacccagg

SEQ ID NO: 533817 - RNA, 23 nt, Human
ucuugcucugucacccaggcuga

SEQ ID NO: 533818 - RNA, 24 nt, Human
ucuugcucugucacccaggcugaa

SEQ ID NO: 533819 - RNA, 21 nt, Human
ugaaaucauagcucauugcaa

SEQ ID NO: 533820 - RNA, 24 nt, Human
ugaacccucggccucaagcaaucc

SEQ ID NO: 533821 - RNA, 24 nt, Human
ugaagugcaguggcauaaucuugg

SEQ ID NO: 533822 - RNA, 20 nt, Human
ugaauaaguacuauguggua

SEQ ID NO: 533823 - RNA, 19 nt, Human
ugaccucaggugauccacc

SEQ ID NO: 533824 - RNA, 21 nt, Human
ugaccucaggugauccaccca

SEQ ID NO: 533825 - RNA, 23 nt, Human
ugagauaagagucuugcucuguc

SEQ ID NO: 533826 - RNA, 27 nt, Human
ugagcaauucucccaccucagccuccc

SEQ ID NO: 533827 - RNA, 21 nt, Human
ugagccacggcgcccaaccca

SEQ ID NO: 533828 - RNA, 21 nt, Human
ugauaauacuacaauauccuc

SEQ ID NO: 533829 - RNA, 20 nt, Human
ugauguauguaauuucccuc

SEQ ID NO: 533830 - RNA, 24 nt, Human
ugcagucucgcuauguugcccagg

SEQ ID NO: 533831 - RNA, 22 nt, Human
ugcaguggcauaaucuuggcuc

SEQ ID NO: 533832 - RNA, 21 nt, Human
ugcccaggcuagaaugcagug

SEQ ID NO: 533833 - RNA, 24 nt, Human
ugcccaggcuagaaugcaguggug

SEQ ID NO: 533834 - RNA, 23 nt, Human
ugcccaggcuagucuugaacccu

SEQ ID NO: 533835 - RNA, 24 nt, Human
ugccucagccucuugaguaccugg

SEQ ID NO: 533836 - RNA, 24 nt, Human
ugcucugucacccaggcugaagug

SEQ ID NO: 533837 - RNA, 18 nt, Human
uggaaugauuuaaguggg

SEQ ID NO: 533838 - RNA, 19 nt, Human
uggaauuacaggugugagc

SEQ ID NO: 533839 - RNA, 21 nt, Human
uggaauuacaggugugagcca

SEQ ID NO: 533840 - RNA, 21 nt, Human
uggaauuacaggugugagcca

SEQ ID NO: 533841 - RNA, 22 nt, Human
uggaauuacaggugugagccau

SEQ ID NO: 533842 - RNA, 24 nt, Human
uggaauuacaggugugagccauug

SEQ ID NO: 533843 - RNA, 24 nt, Human
uggaauuacaggugugagccauug

SEQ ID NO: 533844 - RNA, 24 nt, Human
uggccaggcuggucucgaacuccu

SEQ ID NO: 533845 - RNA, 24 nt, Human
ugggauuaccagugcccaccacca

SEQ ID NO: 533846 - RNA, 21 nt, Human
ugugagccauugcacagggcc

SEQ ID NO: 533847 - RNA, 19 nt, Human
ugugcagaaguagcauuac

SEQ ID NO: 533848 - RNA, 18 nt, Human
uuaguagagacgggguuu

SEQ ID NO: 533849 - RNA, 24 nt, Human
uuaguagagacgggguuuaaccau

SEQ ID NO: 533850 - RNA, 21 nt, Human
uucaagcgauucuccugccuc

SEQ ID NO: 533851 - RNA, 23 nt, Human
uucaagcgauucuccugccucag

SEQ ID NO: 533852 - RNA, 24 nt, Human
uucaagcgauucuccugccucagc

SEQ ID NO: 533853 - RNA, 23 nt, Human
uucccauccaaagaaucgccauc

SEQ ID NO: 533854 - RNA, 24 nt, Human
uuguagagaugcagucucgcuaug

SEQ ID NO: 533855 - RNA, 24 nt, Human
uuuaaccauguuggccaggcuggu

SEQ ID NO: 533856 - RNA, 21 nt, Human
uuucaaggucucuucccaucc

SEQ ID NO: 533857 - RNA, 24 nt, Human
uuuguagagaugcagucucgcuau

SEQ ID NO: 533858 - RNA, 22 nt, Human
uuuuuguacuauuuuaguagag

SEQ ID NO: 533859 - RNA, 25 nt, Human
uuuuuguacuauuuuaguagagacg

SEQ ID NO: 533860 - RNA, 24 nt, Human
uuuuuuguagagaugcagucucgc

SEQ ID NO: 533861 - RNA, 22 nt, Human
uuuuuuuuuuuuaaauguucuc

SEQ ID NO: 533862 - RNA, 23 nt, Human
uuuuuuuuuuuuuuuuuuaaaug

SEQ ID NO: 533863 - RNA, 22 nt, Human
aagacaauuucuaaggauuuau

SEQ ID NO: 533864 - RNA, 19 nt, Human
aagcugauuucuuuuucuc

SEQ ID NO: 533865 - RNA, 24 nt, Human
agaauugcaaggccuuuagccuuc

SEQ ID NO: 533866 - RNA, 25 nt, Human
agacagaauugcaaggccuuuagcc

SEQ ID NO: 533867 - RNA, 25 nt, Human
agcacaauuuguccuuccagucacu

SEQ ID NO: 533868 - RNA, 25 nt, Human
agcaggaaugaucuuaucaggucca

SEQ ID NO: 533869 - RNA, 20 nt, Human
aguaaaaggauggagaaaga

SEQ ID NO: 533870 - RNA, 18 nt, Human
auggaaggcagccagggc

SEQ ID NO: 533871 - RNA, 27 nt, Human
caagauucucaaauuaaaacacagcua

SEQ ID NO: 533872 - RNA, 25 nt, Human
cagccagggcaaugcucagagggaa

SEQ ID NO: 533873 - RNA, 21 nt, Human
ccacuacaaucccgcugccuc

SEQ ID NO: 533874 - RNA, 18 nt, Human
ccgcugccuccucuggca

SEQ ID NO: 533875 - RNA, 19 nt, Human
ccgcugccuccucuggcag

SEQ ID NO: 533876 - RNA, 19 nt, Human
ccuacaacucuaaacauua

SEQ ID NO: 533877 - RNA, 23 nt, Human
cuaguaaauccugucaguguaga

SEQ ID NO: 533878 - RNA, 21 nt, Human
cugagacucaaauugcugcac

SEQ ID NO: 533879 - RNA, 22 nt, Human
cuguaaaugugucucaauuccu

SEQ ID NO: 533880 - RNA, 22 nt, Human
cuuagcgauguuugaaguguuc

SEQ ID NO: 533881 - RNA, 18 nt, Human
gaauugaaauuuguggcu

SEQ ID NO: 533882 - RNA, 24 nt, Human
gauugacaguaaaaggauggagaa

SEQ ID NO: 533883 - RNA, 18 nt, Human
gcagccuuuuuugcuucu

SEQ ID NO: 533884 - RNA, 21 nt, Human
gcuggaguggcacuccacacu

SEQ ID NO: 533885 - RNA, 19 nt, Human
ggcagccuuuuuugcuucu

SEQ ID NO: 533886 - RNA, 23 nt, Human
gguauaaagacaauuucuaagga

SEQ ID NO: 533887 - RNA, 21 nt, Human
uaaauccugucaguguagaaa

SEQ ID NO: 533888 - RNA, 19 nt, Human
uaagaaagcuggaguggca

SEQ ID NO: 533889 - RNA, 18 nt, Human
uacauacggaauggaaau

SEQ ID NO: 533890 - RNA, 18 nt, Human
uacccucaagauucucaa

SEQ ID NO: 533891 - RNA, 24 nt, Human
uaccuacaacucuaaacauuacuu

SEQ ID NO: 533892 - RNA, 24 nt, Human
uacugagacucaaauugcugcaca

SEQ ID NO: 533893 - RNA, 22 nt, Human
uagccccauaaggaagaaaagu

SEQ ID NO: 533894 - RNA, 22 nt, Human
uauuucugugaauucucuuaau

SEQ ID NO: 533895 - RNA, 26 nt, Human
ucaauuccuauuucaaauccuccacc

SEQ ID NO: 533896 - RNA, 26 nt, Human
ucacuguugauagacaauuggguugu

SEQ ID NO: 533897 - RNA, 21 nt, Human
ucuaugacacaguaaguguga

SEQ ID NO: 533898 - RNA, 23 nt, Human
ucucaaauuaaaacacagcuacc

SEQ ID NO: 533899 - RNA, 23 nt, Human
ucuuuuacauacggaauggaaau

SEQ ID NO: 533900 - RNA, 19 nt, Human
ugacacaguaagugugaua

SEQ ID NO: 533901 - RNA, 20 nt, Human
ugccauauguuuaaagacau

SEQ ID NO: 533902 - RNA, 18 nt, Human
uggaaggcagccagggca

SEQ ID NO: 533903 - RNA, 21 nt, Human
uggacauagcacaauuugucc

SEQ ID NO: 533904 - RNA, 19 nt, Human
uggcaaccuaagaaagcug

SEQ ID NO: 533905 - RNA, 23 nt, Human
uuaauauuuuggcagccuuuuuu

SEQ ID NO: 533906 - RNA, 24 nt, Human
uugacaguaaaaggauggagaaag

SEQ ID NO: 533907 - RNA, 22 nt, Human
uuggcagccuuuuuugcuucug

SEQ ID NO: 533908 - RNA, 25 nt, Human
aaacaggcacaugcccuaccagggg

SEQ ID NO: 533909 - RNA, 18 nt, Human
accaggggggcagcuccc

SEQ ID NO: 533910 - RNA, 25 nt, Human
accccuccccacaaaaagaacccca

SEQ ID NO: 533911 - RNA, 22 nt, Human
agaaggggagccugagacucug

SEQ ID NO: 533912 - RNA, 19 nt, Human
agacucugggagcagaaau

SEQ ID NO: 533913 - RNA, 20 nt, Human
agacucugggagcagaaaug

SEQ ID NO: 533914 - RNA, 18 nt, Human
agaguuguucuucccggu

SEQ ID NO: 533915 - RNA, 19 nt, Human
agcgcccgcccggcugcug

SEQ ID NO: 533916 - RNA, 21 nt, Human
aggaaaagaaauccuaagaau

SEQ ID NO: 533917 - RNA, 18 nt, Human
agggcuggcacacccauu

SEQ ID NO: 533918 - RNA, 19 nt, Human
aggggagccugagacucug

SEQ ID NO: 533919 - RNA, 25 nt, Human
cacaaaaagaaccccacaaucaaau

SEQ ID NO: 533920 - RNA, 23 nt, Human
cacccccgccaacuagcugagag

SEQ ID NO: 533921 - RNA, 25 nt, Human
caccccuccccacaaaaagaacccc

SEQ ID NO: 533922 - RNA, 24 nt, Human
cacugcaguggcggaggaaaagaa

SEQ ID NO: 533923 - RNA, 23 nt, Human
cagccuccaggcugagagggaaa

SEQ ID NO: 533924 - RNA, 20 nt, Human
cagugcuaagagccaggcca

SEQ ID NO: 533925 - RNA, 20 nt, Human
caucucuggcucuuggaaau

SEQ ID NO: 533926 - RNA, 22 nt, Human
caucucuggcucuuggaaaucu

SEQ ID NO: 533927 - RNA, 21 nt, Human
ccacaaucaaauuaagagacc

SEQ ID NO: 533928 - RNA, 19 nt, Human
ccaguccagcacccccgcc

SEQ ID NO: 533929 - RNA, 26 nt, Human
cccuccccacaaaaagaaccccacaa

SEQ ID NO: 533930 - RNA, 20 nt, Human
ccuccccacaaaaagaaccc

SEQ ID NO: 533931 - RNA, 18 nt, Human
ccucccuccucuccuggg

SEQ ID NO: 533932 - RNA, 19 nt, Human
ccugagacucugggagcag

SEQ ID NO: 533933 - RNA, 20 nt, Human
ccugagacucugggagcaga

SEQ ID NO: 533934 - RNA, 21 nt, Human
cuccgacccugacacuggccu

SEQ ID NO: 533935 - RNA, 19 nt, Human
cuggaugcuuggcagaguc

SEQ ID NO: 533936 - RNA, 23 nt, Human
cuuggaggugucccacauggguc

SEQ ID NO: 533937 - RNA, 18 nt, Human
gacuggcuugccucccuc

SEQ ID NO: 533938 - RNA, 23 nt, Human
gagaggcacagugacccuaggag

SEQ ID NO: 533939 - RNA, 21 nt, Human
gaggaggccagccuuggaggu

SEQ ID NO: 533940 - RNA, 24 nt, Human
gaugcagcacaauucaucucuggg

SEQ ID NO: 533941 - RNA, 20 nt, Human
gcaaggguggccaagcgugc

SEQ ID NO: 533942 - RNA, 20 nt, Human
gcuccucagccaaauuccug

SEQ ID NO: 533943 - RNA, 21 nt, Human
ggagauguccagccagccucc

SEQ ID NO: 533944 - RNA, 18 nt, Human
ggccacuccgacccugac

SEQ ID NO: 533945 - RNA, 19 nt, Human
guccagcacccccgccaac

SEQ ID NO: 533946 - RNA, 18 nt, Human
uaaagugaacaagagucc

SEQ ID NO: 533947 - RNA, 21 nt, Human
uaagagacccacuguggccca

SEQ ID NO: 533948 - RNA, 21 nt, Human
uaccaccccuccccacaaaaa

SEQ ID NO: 533949 - RNA, 18 nt, Human
uagcuugacuuagucauc

SEQ ID NO: 533950 - RNA, 24 nt, Human
uaugaggaggccagccuuggaggu

SEQ ID NO: 533951 - RNA, 18 nt, Human
ucacugcaguggcggagg

SEQ ID NO: 533952 - RNA, 18 nt, Human
uccaggcugagagggaaa

SEQ ID NO: 533953 - RNA, 20 nt, Human
ucuccugggccuagcgaggc

SEQ ID NO: 533954 - RNA, 20 nt, Human
ugagagaagcucaggaagua

SEQ ID NO: 533955 - RNA, 24 nt, Human
ugagaggcacagugacccuaggag

SEQ ID NO: 533956 - RNA, 24 nt, Human
uggcagaagguaaagugaacaaga

SEQ ID NO: 533957 - RNA, 21 nt, Human
uggcggaggaaaagaaauccu

SEQ ID NO: 533958 - RNA, 21 nt, Human
uggggagagaagaguucugca

SEQ ID NO: 533959 - RNA, 20 nt, Human
uuauaccaccccuccccaca

SEQ ID NO: 533960 - RNA, 18 nt, Human
uuggaggugucccacaug

SEQ ID NO: 533961 - RNA, 23 nt, Human
aaacaaaaaggagaaacuccugg

SEQ ID NO: 533962 - RNA, 24 nt, Human
aaacaaaaaggagaaacuccugga

SEQ ID NO: 533963 - RNA, 23 nt, Human
aaagacccucucgggccggagcc

SEQ ID NO: 533964 - RNA, 22 nt, Human
acaaaaaggagaaacuccugga

SEQ ID NO: 533965 - RNA, 23 nt, Human
acaaaaaggagaaacuccuggau

SEQ ID NO: 533966 - RNA, 19 nt, Human
agagcugcuucucucugcc

SEQ ID NO: 533967 - RNA, 25 nt, Human
agccuuggcggucagcccagagcug

SEQ ID NO: 533968 - RNA, 19 nt, Human
ccccagcagguccagggcu

SEQ ID NO: 533969 - RNA, 24 nt, Human
cuaaagcaucuauuggagcaauua

SEQ ID NO: 533970 - RNA, 22 nt, Human
cuccuggauuuguugcagaaaa

SEQ ID NO: 533971 - RNA, 22 nt, Human
ggagcggggucuugaagacugg

SEQ ID NO: 533972 - RNA, 21 nt, Human
gggcauugucucucacggaug

SEQ ID NO: 533973 - RNA, 19 nt, Human
uacuccacuuaaagacccu

SEQ ID NO: 533974 - RNA, 21 nt, Human
uauaaaacaaaaaggagaaac

SEQ ID NO: 533975 - RNA, 22 nt, Human
uauucuucaauauuuucugaga

SEQ ID NO: 533976 - RNA, 23 nt, Human
ugccuggaaacugggccauggag

SEQ ID NO: 533977 - RNA, 23 nt, Human
ugggagcggggucuugaagacug

SEQ ID NO: 533978 - RNA, 19 nt, Human
uuggcggucagcccagagc

SEQ ID NO: 533979 - RNA, 21 nt, Human
uuucgugguugcacaccuggg

SEQ ID NO: 533980 - RNA, 26 nt, Human
aagccccccucccccgcuaccccucc

SEQ ID NO: 533981 - RNA, 19 nt, Human
aagggcuggauggacaugg

SEQ ID NO: 533982 - RNA, 22 nt, Human
accguggguggggggccugggu

SEQ ID NO: 533983 - RNA, 19 nt, Human
agagggaaaggcagggggc

SEQ ID NO: 533984 - RNA, 22 nt, Human
aggcagggggcgggguucccug

SEQ ID NO: 533985 - RNA, 20 nt, Human
agggagugccgggaggaggg

SEQ ID NO: 533986 - RNA, 19 nt, Human
aggggagagggaaaggcag

SEQ ID NO: 533987 - RNA, 24 nt, Human
aggggaggaccguggguggggggc

SEQ ID NO: 533988 - RNA, 24 nt, Human
agggggggugucuccaagggggcu

SEQ ID NO: 533989 - RNA, 19 nt, Human
auggaacccggacuaggga

SEQ ID NO: 533990 - RNA, 22 nt, Human
auuucugucccccccggacccc

SEQ ID NO: 533991 - RNA, 20 nt, Human
caggaucccgccugcucccc

SEQ ID NO: 533992 - RNA, 18 nt, Human
caugcuggggacccaggc

SEQ ID NO: 533993 - RNA, 20 nt, Human
ccaagugccggagaugcccc

SEQ ID NO: 533994 - RNA, 19 nt, Human
cccaggaucccgccugcuc

SEQ ID NO: 533995 - RNA, 20 nt, Human
cccccccggaccccgaccuc

SEQ ID NO: 533996 - RNA, 23 nt, Human
cccccgcuaccccuccccuuucc

SEQ ID NO: 533997 - RNA, 20 nt, Human
cccccggaccccgaccaugg

SEQ ID NO: 533998 - RNA, 21 nt, Human
cccccuacggaggacgggggu

SEQ ID NO: 533999 - RNA, 23 nt, Human
cccccuucugaagccccccuccu

SEQ ID NO: 534000 - RNA, 22 nt, Human
ccccuccccuuuccuggaaccc

SEQ ID NO: 534001 - RNA, 21 nt, Human
cccgcuaccccuccccuuucc

SEQ ID NO: 534002 - RNA, 19 nt, Human
cccucccccgcuaccccuc

SEQ ID NO: 534003 - RNA, 24 nt, Human
cccugcaaugggcccggcuagacc

SEQ ID NO: 534004 - RNA, 23 nt, Human
ccggaccccgaccauggcuugug

SEQ ID NO: 534005 - RNA, 20 nt, Human
ccuccccuuuccuggaaccc

SEQ ID NO: 534006 - RNA, 21 nt, Human
ccuggaaccccguaucucggg

SEQ ID NO: 534007 - RNA, 26 nt, Human
ccuggggcuagggcauggugcggggc

SEQ ID NO: 534008 - RNA, 20 nt, Human
cgagggaaaggucuauggug

SEQ ID NO: 534009 - RNA, 22 nt, Human
cgcccgggguuccgcgucgcuc

SEQ ID NO: 534010 - RNA, 21 nt, Human
cgcuaccccuccccuuuccug

SEQ ID NO: 534011 - RNA, 24 nt, Human
cgggggugggggagaggugucaca

SEQ ID NO: 534012 - RNA, 21 nt, Human
cucccgggucggcggcugaag

SEQ ID NO: 534013 - RNA, 23 nt, Human
cucgggguggggggggggaagga

SEQ ID NO: 534014 - RNA, 20 nt, Human
gaaaaaggggaggaccgugg

SEQ ID NO: 534015 - RNA, 18 nt, Human
gaaaccacggagucgggg

SEQ ID NO: 534016 - RNA, 20 nt, Human
gaccauggcuugugaacccc

SEQ ID NO: 534017 - RNA, 18 nt, Human
gagggacccaggaucccg

SEQ ID NO: 534018 - RNA, 19 nt, Human
gaucugggguguucccccc

SEQ ID NO: 534019 - RNA, 22 nt, Human
gcacagugagguugcaggcggu

SEQ ID NO: 534020 - RNA, 19 nt, Human
gcaguggaggugacuggug

SEQ ID NO: 534021 - RNA, 18 nt, Human
gccaagaaaauccauuuc

SEQ ID NO: 534022 - RNA, 23 nt, Human
gcuuuugggagggggggugucuc

SEQ ID NO: 534023 - RNA, 20 nt, Human
ggaggugacuggugggaggg

SEQ ID NO: 534024 - RNA, 20 nt, Human
ggagguggggaguugaaugg

SEQ ID NO: 534025 - RNA, 24 nt, Human
ggagguggggaguugaaugggagg

SEQ ID NO: 534026 - RNA, 22 nt, Human
ggagugccgggaggaggggcgg

SEQ ID NO: 534027 - RNA, 24 nt, Human
ggcgaugggugcuggugaaaagaa

SEQ ID NO: 534028 - RNA, 18 nt, Human
ggcucgggggugagacgg

SEQ ID NO: 534029 - RNA, 22 nt, Human
gggaagggcgggggcgaggcuu

SEQ ID NO: 534030 - RNA, 19 nt, Human
gggaaggggaagaccagug

SEQ ID NO: 534031 - RNA, 22 nt, Human
gggggccuggguugcuacauuu

SEQ ID NO: 534032 - RNA, 21 nt, Human
gggggugagacggcccccccu

SEQ ID NO: 534033 - RNA, 22 nt, Human
ggguagggagccggagucccag

SEQ ID NO: 534034 - RNA, 22 nt, Human
ggugaaaagaauggaacccgga

SEQ ID NO: 534035 - RNA, 20 nt, Human
gugucuccaagggggcucgg

SEQ ID NO: 534036 - RNA, 23 nt, Human
guguucccccccuucugaagccc

SEQ ID NO: 534037 - RNA, 22 nt, Human
uagggagugccgggaggagggg

SEQ ID NO: 534038 - RNA, 20 nt, Human
uaggggagagggaaaggcag

SEQ ID NO: 534039 - RNA, 23 nt, Human
uauugucagggagaggaaaaagg

SEQ ID NO: 534040 - RNA, 22 nt, Human
uccuuggucccacccaagugcc

SEQ ID NO: 534041 - RNA, 22 nt, Human
ucggcgaauccugcgaagggga

SEQ ID NO: 534042 - RNA, 23 nt, Human
ucuaggggagagggaaaggcagg

SEQ ID NO: 534043 - RNA, 24 nt, Human
ucuccaagggggcucgggggugag

SEQ ID NO: 534044 - RNA, 21 nt, Human
ucugaagccccccucccccgc

SEQ ID NO: 534045 - RNA, 24 nt, Human
ucugaagccccccucccccgcuac

SEQ ID NO: 534046 - RNA, 18 nt, Human
ugaaugggagggguucag

SEQ ID NO: 534047 - RNA, 20 nt, Human
ugacgauacggaaaccacgg

SEQ ID NO: 534048 - RNA, 21 nt, Human
ugagacggcccccccuuuucu

SEQ ID NO: 534049 - RNA, 21 nt, Human
ugaugggaaggggaagaccag

SEQ ID NO: 534050 - RNA, 21 nt, Human
ugcaaugggcccggcuagacc

SEQ ID NO: 534051 - RNA, 18 nt, Human
ugcaguggaggugacugg

SEQ ID NO: 534052 - RNA, 18 nt, Human
ugccggagaugcccccaa

SEQ ID NO: 534053 - RNA, 21 nt, Human
ugccguagcagaggcaggggc

SEQ ID NO: 534054 - RNA, 21 nt, Human
uggcaucuccuuggucccacc

SEQ ID NO: 534055 - RNA, 20 nt, Human
ugggaaggggaagaccagug

SEQ ID NO: 534056 - RNA, 20 nt, Human
ugggagcccggacgccuggg

SEQ ID NO: 534057 - RNA, 19 nt, Human
ugggaggggacagccauga

SEQ ID NO: 534058 - RNA, 20 nt, Human
ugggagggguucaggguuga

SEQ ID NO: 534059 - RNA, 22 nt, Human
ugggagggguucaggguugagg

SEQ ID NO: 534060 - RNA, 18 nt, Human
uggggaguugaaugggag

SEQ ID NO: 534061 - RNA, 19 nt, Human
uggggggggggaaggagag

SEQ ID NO: 534062 - RNA, 19 nt, Human
ugugaaccccguuuugugc

SEQ ID NO: 534063 - RNA, 19 nt, Human
uucacggaagcgcuucagu

SEQ ID NO: 534064 - RNA, 18 nt, Human
uugcucacaguuuugcgg

SEQ ID NO: 534065 - RNA, 23 nt, Human
uugggguagggagccggaguccc

SEQ ID NO: 534066 - RNA, 21 nt, Human
uuggucccacccaagugccgg

SEQ ID NO: 534067 - RNA, 23 nt, Human
accaccauccuucccagccgugc

SEQ ID NO: 534068 - RNA, 21 nt, Human
caccaccauccuucccagccg

SEQ ID NO: 534069 - RNA, 26 nt, Human
cagggccagcaccgccaugaucuccu

SEQ ID NO: 534070 - RNA, 24 nt, Human
cgccugccgguaauggcccuucuc

SEQ ID NO: 534071 - RNA, 22 nt, Human
cugcagcaaggagaaucacauc

SEQ ID NO: 534072 - RNA, 20 nt, Human
cuggccaccaccauccuucc

SEQ ID NO: 534073 - RNA, 24 nt, Human
cuguccgucagggccagcaccgcc

SEQ ID NO: 534074 - RNA, 18 nt, Human
gccgguaauggcccuucu

SEQ ID NO: 534075 - RNA, 25 nt, Human
guaauggcccuucucuguguuuccc

SEQ ID NO: 534076 - RNA, 21 nt, Human
uaauggcccuucucuguguuu

SEQ ID NO: 534077 - RNA, 23 nt, Human
uccaauacucucugccacgugau

SEQ ID NO: 534078 - RNA, 23 nt, Human
ucggucauuuguauccaauacuc

SEQ ID NO: 534079 - RNA, 19 nt, Human
ugaucucgcuggccacugc

SEQ ID NO: 534080 - RNA, 22 nt, Human
ugccgguaauggcccuucucug

SEQ ID NO: 534081 - RNA, 22 nt, Human
ugucacaggcugcccgcuuuug

SEQ ID NO: 534082 - RNA, 21 nt, Human
aaaagccccaagaggacuucu

SEQ ID NO: 534083 - RNA, 18 nt, Human
aaacaugaagggcuggca

SEQ ID NO: 534084 - RNA, 18 nt, Human
aaacuaaaaagccccaag

SEQ ID NO: 534085 - RNA, 19 nt, Human
aaacugucaacacucuugu

SEQ ID NO: 534086 - RNA, 23 nt, Human
aaagcaaaagguaaacaugaagg

SEQ ID NO: 534087 - RNA, 20 nt, Human
aaagguaaacaugaagggcu

SEQ ID NO: 534088 - RNA, 20 nt, Human
aaaucaccugggguugugac

SEQ ID NO: 534089 - RNA, 19 nt, Human
aacacucuuguuauccuag

SEQ ID NO: 534090 - RNA, 21 nt, Human
aagcagggcuugugcugggcc

SEQ ID NO: 534091 - RNA, 22 nt, Human
acagagaacagaagcugugcag

SEQ ID NO: 534092 - RNA, 25 nt, Human
acagcgguaaaaacagcugacagca

SEQ ID NO: 534093 - RNA, 20 nt, Human
acaggggcccugccucccuu

SEQ ID NO: 534094 - RNA, 19 nt, Human
accaggcagaccccagccc

SEQ ID NO: 534095 - RNA, 21 nt, Human
accaggcagaccccagccccu

SEQ ID NO: 534096 - RNA, 24 nt, Human
acuacaguugugaugaugguggga

SEQ ID NO: 534097 - RNA, 23 nt, Human
agaccccagccccugaaucaaga

SEQ ID NO: 534098 - RNA, 19 nt, Human
agcacaggggccgccucuc

SEQ ID NO: 534099 - RNA, 19 nt, Human
agcauuucuaguuuggagg

SEQ ID NO: 534100 - RNA, 21 nt, Human
agccccugaaucaagagcccu

SEQ ID NO: 534101 - RNA, 25 nt, Human
aggggcucaaggaccaggcagaccc

SEQ ID NO: 534102 - RNA, 23 nt, Human
agguaguaacauuuuacagaugc

SEQ ID NO: 534103 - RNA, 18 nt, Human
auaauaacagcgguaaaa

SEQ ID NO: 534104 - RNA, 25 nt, Human
auagagggccacuucuaaagcuaca

SEQ ID NO: 534105 - RNA, 23 nt, Human
aucaagagcccucuucacccuga

SEQ ID NO: 534106 - RNA, 19 nt, Human
auccauauuggauguggaa

SEQ ID NO: 534107 - RNA, 20 nt, Human
augaggucagaggcaggcac

SEQ ID NO: 534108 - RNA, 23 nt, Human
caagcacaggggccgccucucuu

SEQ ID NO: 534109 - RNA, 18 nt, Human
caaguuuagggauuugcu

SEQ ID NO: 534110 - RNA, 19 nt, Human
caauccaauuauagaguuc

SEQ ID NO: 534111 - RNA, 22 nt, Human
cacagcauucuagaaauccaua

SEQ ID NO: 534112 - RNA, 22 nt, Human
cacagccucugcugagcugagg

SEQ ID NO: 534113 - RNA, 21 nt, Human
cacucagcaaaagcaucagcc

SEQ ID NO: 534114 - RNA, 25 nt, Human
cagaccccagccccugaaucaagag

SEQ ID NO: 534115 - RNA, 21 nt, Human
cagccccugaaucaagagccc

SEQ ID NO: 534116 - RNA, 22 nt, Human
caucgauacuaaaagcugcccc

SEQ ID NO: 534117 - RNA, 23 nt, Human
caugcacaaccacacuuaagccu

SEQ ID NO: 534118 - RNA, 21 nt, Human
cauugccacacacuaugcuaa

SEQ ID NO: 534119 - RNA, 21 nt, Human
ccagccccugaaucaagagcc

SEQ ID NO: 534120 - RNA, 18 nt, Human
ccauuucugaaucagugg

SEQ ID NO: 534121 - RNA, 22 nt, Human
cccaacaccaccaacuuuggau

SEQ ID NO: 534122 - RNA, 23 nt, Human
cccaacaccaccaacuuuggauu

SEQ ID NO: 534123 - RNA, 22 nt, Human
ccccaaacaggcaaauuuuacc

SEQ ID NO: 534124 - RNA, 24 nt, Human
ccccagccccugaaucaagagccc

SEQ ID NO: 534125 - RNA, 23 nt, Human
cccccugcuuucccaacaccacc

SEQ ID NO: 534126 - RNA, 19 nt, Human
ccccugcuuucccaacacc

SEQ ID NO: 534127 - RNA, 19 nt, Human
cccuuagcgcacucagcaa

SEQ ID NO: 534128 - RNA, 21 nt, Human
ccucuguuccucuuuugaggc

SEQ ID NO: 534129 - RNA, 22 nt, Human
ccucuguuccucuuuugaggcc

SEQ ID NO: 534130 - RNA, 24 nt, Human
ccuggaucacagaccuaaugaccg

SEQ ID NO: 534131 - RNA, 20 nt, Human
ccuguggggccucuuguggg

SEQ ID NO: 534132 - RNA, 19 nt, Human
cucgcagcaccucuguucc

SEQ ID NO: 534133 - RNA, 23 nt, Human
cucugcucccuguggggccucuu

SEQ ID NO: 534134 - RNA, 18 nt, Human
cugaaccauuuggccagc

SEQ ID NO: 534135 - RNA, 22 nt, Human
cugcaauguuccccccaggacg

SEQ ID NO: 534136 - RNA, 23 nt, Human
cugcucccuguggggccucuugu

SEQ ID NO: 534137 - RNA, 24 nt, Human
cuggaggcccucuaggagucugag

SEQ ID NO: 534138 - RNA, 18 nt, Human
cugguggaagccauagau

SEQ ID NO: 534139 - RNA, 18 nt, Human
cuuugaccggaccaaauc

SEQ ID NO: 534140 - RNA, 25 nt, Human
cuuuuggguggccuaggcuaccuug

SEQ ID NO: 534141 - RNA, 22 nt, Human
gaagggcuggcauggagcuggg

SEQ ID NO: 534142 - RNA, 23 nt, Human
gacacugggaucaacacguaagc

SEQ ID NO: 534143 - RNA, 19 nt, Human
gaccauguuguaccacagc

SEQ ID NO: 534144 - RNA, 23 nt, Human
gagacucaacacuaauuggaaug

SEQ ID NO: 534145 - RNA, 20 nt, Human
gagaucugccagcaucucaa

SEQ ID NO: 534146 - RNA, 23 nt, Human
gaguucuguaugagaacuagaac

SEQ ID NO: 534147 - RNA, 24 nt, Human
gcaauguuccccccaggacggcag

SEQ ID NO: 534148 - RNA, 22 nt, Human
gcguugcaagcacaggggccgc

SEQ ID NO: 534149 - RNA, 20 nt, Human
ggacacaugucccccugcuu

SEQ ID NO: 534150 - RNA, 23 nt, Human
ggcagaaacuaaaaagccccaag

SEQ ID NO: 534151 - RNA, 19 nt, Human
ggcaggcacuuugcccaca

SEQ ID NO: 534152 - RNA, 19 nt, Human
ggccucuugugggauaugc

SEQ ID NO: 534153 - RNA, 18 nt, Human
ggcuggcauggagcuggg

SEQ ID NO: 534154 - RNA, 19 nt, Human
gggcucaaggaccaggcag

SEQ ID NO: 534155 - RNA, 22 nt, Human
ggggugcaggucuucaccaagg

SEQ ID NO: 534156 - RNA, 21 nt, Human
gucuaggggggcucccucuuc

SEQ ID NO: 534157 - RNA, 22 nt, Human
guggaaugugauuuccauuucu

SEQ ID NO: 534158 - RNA, 21 nt, Human
guuugucccucccucccccaa

SEQ ID NO: 534159 - RNA, 25 nt, Human
uaaaagcugccccaaacaggcaaau

SEQ ID NO: 534160 - RNA, 22 nt, Human
uaacugcaauguuccccccagg

SEQ ID NO: 534161 - RNA, 25 nt, Human
uaggagagccaucugagggcugguc

SEQ ID NO: 534162 - RNA, 24 nt, Human
uagugcccacaggggcccugccuc

SEQ ID NO: 534163 - RNA, 18 nt, Human
ucaaaggcagauucgugg

SEQ ID NO: 534164 - RNA, 18 nt, Human
ucaccugggguugugaca

SEQ ID NO: 534165 - RNA, 19 nt, Human
ucccaacaccaccaacuuu

SEQ ID NO: 534166 - RNA, 18 nt, Human
uccuggaggccuccagac

SEQ ID NO: 534167 - RNA, 24 nt, Human
ucuccacugcaaaugagacuacag

SEQ ID NO: 534168 - RNA, 19 nt, Human
ucucugcucccuguggggc

SEQ ID NO: 534169 - RNA, 21 nt, Human
ucugcagugagugccagaccc

SEQ ID NO: 534170 - RNA, 23 nt, Human
ugaaacacugcccuguaaagcug

SEQ ID NO: 534171 - RNA, 21 nt, Human
ugaaauggaggcucagagaag

SEQ ID NO: 534172 - RNA, 21 nt, Human
ugaagggcuggcauggagcug

SEQ ID NO: 534173 - RNA, 22 nt, Human
ugaagggcuggcauggagcugg

SEQ ID NO: 534174 - RNA, 21 nt, Human
ugacaaaguugaaaaggcucu

SEQ ID NO: 534175 - RNA, 18 nt, Human
ugacugguggaugauugg

SEQ ID NO: 534176 - RNA, 18 nt, Human
ugagaacuagaaccauga

SEQ ID NO: 534177 - RNA, 18 nt, Human
ugagugccagacccuggg

SEQ ID NO: 534178 - RNA, 21 nt, Human
ugagugccagacccugggggg

SEQ ID NO: 534179 - RNA, 23 nt, Human
ugcaaaugagacuacaguuguga

SEQ ID NO: 534180 - RNA, 22 nt, Human
ugcagacagguggccaaagcag

SEQ ID NO: 534181 - RNA, 18 nt, Human
ugccaaggggacaugagg

SEQ ID NO: 534182 - RNA, 18 nt, Human
ugccagacccuggggggc

SEQ ID NO: 534183 - RNA, 22 nt, Human
uggaagccauagauuguggaau

SEQ ID NO: 534184 - RNA, 22 nt, Human
uggccaaagcagggcuugugcu

SEQ ID NO: 534185 - RNA, 20 nt, Human
uggccagcaccuuuuacacc

SEQ ID NO: 534186 - RNA, 23 nt, Human
ugggaaaacacaguaauauaaua

SEQ ID NO: 534187 - RNA, 18 nt, Human
uggguguauaucuggcug

SEQ ID NO: 534188 - RNA, 19 nt, Human
ugugggacgucggguucuu

SEQ ID NO: 534189 - RNA, 21 nt, Human
uguuugucccucccuccccca

SEQ ID NO: 534190 - RNA, 23 nt, Human
uuccugggcuagcugguggaagc

SEQ ID NO: 534191 - RNA, 21 nt, Human
uugacauuucaaauacccaga

SEQ ID NO: 534192 - RNA, 26 nt, Human
uugcauuuuucuuuuuaaaaggcaca

SEQ ID NO: 534193 - RNA, 24 nt, Human
uugcccacaguugauccuggaggc

SEQ ID NO: 534194 - RNA, 22 nt, Human
uugugccuggagagugcuaaaa

SEQ ID NO: 534195 - RNA, 27 nt, Human
uuuuuuuuuuuuuuuucaaguuuaggg

SEQ ID NO: 534196 - RNA, 21 nt, Human
uuuuuuuuuuuuuuuuucaag

SEQ ID NO: 534197 - RNA, 25 nt, Human
aacuuacuucuugcaagcccuggca

SEQ ID NO: 534198 - RNA, 22 nt, Human
aagaaacuuacuucuugcaagc

SEQ ID NO: 534199 - RNA, 23 nt, Human
aaggggccucaugaagcccagau

SEQ ID NO: 534200 - RNA, 18 nt, Human
acaggcagcucucuagaa

SEQ ID NO: 534201 - RNA, 23 nt, Human
agacggauauacagaaacacuuc

SEQ ID NO: 534202 - RNA, 25 nt, Human
agacggauauacagaaacacuucuc

SEQ ID NO: 534203 - RNA, 21 nt, Human
agagauggggaaggaaaagga

SEQ ID NO: 534204 - RNA, 18 nt, Human
agagguuuuguauauggu

SEQ ID NO: 534205 - RNA, 24 nt, Human
agcugauggcauucguauaacuga

SEQ ID NO: 534206 - RNA, 19 nt, Human
aggagugcaugagcauggu

SEQ ID NO: 534207 - RNA, 19 nt, Human
aggucuacucacccuucac

SEQ ID NO: 534208 - RNA, 21 nt, Human
augcaccacaucccagcucug

SEQ ID NO: 534209 - RNA, 19 nt, Human
auguacacaaaggcaugca

SEQ ID NO: 534210 - RNA, 24 nt, Human
cagaagcccuggcacagcccaagu

SEQ ID NO: 534211 - RNA, 21 nt, Human
cagcccaaguucacaggccaa

SEQ ID NO: 534212 - RNA, 19 nt, Human
cagcucugcugcccugggc

SEQ ID NO: 534213 - RNA, 18 nt, Human
caucccagcucugcugcc

SEQ ID NO: 534214 - RNA, 24 nt, Human
caugcaccacaucccagcucugcu

SEQ ID NO: 534215 - RNA, 25 nt, Human
cauucguauaacugaaaguugggga

SEQ ID NO: 534216 - RNA, 18 nt, Human
cccacacugcuucacgca

SEQ ID NO: 534217 - RNA, 19 nt, Human
ggcaucagccuaccagcaa

SEQ ID NO: 534218 - RNA, 18 nt, Human
guacagacggauauacag

SEQ ID NO: 534219 - RNA, 20 nt, Human
gucaguggaguggagagguu

SEQ ID NO: 534220 - RNA, 18 nt, Human
uagaacuugagagccuca

SEQ ID NO: 534221 - RNA, 20 nt, Human
ucagaagccaacccuuauuu

SEQ ID NO: 534222 - RNA, 22 nt, Human
ucaggcccacacugcuucacgc

SEQ ID NO: 534223 - RNA, 23 nt, Human
ucccagcucugcugcccugggcu

SEQ ID NO: 534224 - RNA, 19 nt, Human
ucccugaagucagaagccc

SEQ ID NO: 534225 - RNA, 22 nt, Human
ucccugaagucagaagcccugg

SEQ ID NO: 534226 - RNA, 22 nt, Human
ucucuagaacuugagagccuca

SEQ ID NO: 534227 - RNA, 24 nt, Human
ugaguuuugucccugaagucagaa

SEQ ID NO: 534228 - RNA, 22 nt, Human
ugcccugggcugucccacaggc

SEQ ID NO: 534229 - RNA, 18 nt, Human
uggaguggagagguuuug

SEQ ID NO: 534230 - RNA, 31 nt, Human
uucguauaacugaaaguuggggaagaccacc

SEQ ID NO: 534231 - RNA, 21 nt, Human
uuugaagaaacuuacuucuug

SEQ ID NO: 534232 - RNA, 21 nt, Human
aaacugccccaugccccccca

SEQ ID NO: 534233 - RNA, 22 nt, Human
aaccaggagguaaccaaaucua

SEQ ID NO: 534234 - RNA, 21 nt, Human
aacugccccaugcccccccac

SEQ ID NO: 534235 - RNA, 23 nt, Human
aacugccccaugcccccccacuc

SEQ ID NO: 534236 - RNA, 19 nt, Human
aagaaagaaauauuauuga

SEQ ID NO: 534237 - RNA, 20 nt, Human
aagaaagaaauauuauugaa

SEQ ID NO: 534238 - RNA, 20 nt, Human
acaggcugggcuccagcagg

SEQ ID NO: 534239 - RNA, 19 nt, Human
agaagcgguuguagcgggc

SEQ ID NO: 534240 - RNA, 19 nt, Human
agagaggggcugggcagca

SEQ ID NO: 534241 - RNA, 18 nt, Human
agcaggugggcaggggag

SEQ ID NO: 534242 - RNA, 19 nt, Human
agcauuuauuucaaccagg

SEQ ID NO: 534243 - RNA, 26 nt, Human
agccagugccugugcacagcgcggcc

SEQ ID NO: 534244 - RNA, 21 nt, Human
aggcucgccgagcaugggacg

SEQ ID NO: 534245 - RNA, 22 nt, Human
aggcugggcuccagcagguggg

SEQ ID NO: 534246 - RNA, 18 nt, Human
aggcuguguugugugguc

SEQ ID NO: 534247 - RNA, 23 nt, Human
caaccucaaggccacacacagcc

SEQ ID NO: 534248 - RNA, 19 nt, Human
cacagccuggccuggaucc

SEQ ID NO: 534249 - RNA, 18 nt, Human
cacagguggaaggcuggg

SEQ ID NO: 534250 - RNA, 24 nt, Human
caggaaacagaggugccuggcuca

SEQ ID NO: 534251 - RNA, 22 nt, Human
ccagagaaacaaaaagguauaa

SEQ ID NO: 534252 - RNA, 24 nt, Human
ccagagccuguccaccuaugccca

SEQ ID NO: 534253 - RNA, 23 nt, Human
ccagcagcuugggugugacgagu

SEQ ID NO: 534254 - RNA, 24 nt, Human
ccagcuguccccccaggccucucc

SEQ ID NO: 534255 - RNA, 19 nt, Human
ccaggccucuccucagagg

SEQ ID NO: 534256 - RNA, 18 nt, Human
ccauguggccagccuggc

SEQ ID NO: 534257 - RNA, 18 nt, Human
ccccaggccucuccucag

SEQ ID NO: 534258 - RNA, 21 nt, Human
ccccaugcccccccacucaca

SEQ ID NO: 534259 - RNA, 19 nt, Human
ccccccacucacagcagcc

SEQ ID NO: 534260 - RNA, 21 nt, Human
ccccccacucacagcagccag

SEQ ID NO: 534261 - RNA, 19 nt, Human
ccccccggagaagcgguug

SEQ ID NO: 534262 - RNA, 21 nt, Human
ccccuuccugcugucucaccc

SEQ ID NO: 534263 - RNA, 19 nt, Human
cccucccuuuuccucucuc

SEQ ID NO: 534264 - RNA, 19 nt, Human
cccuuuuccucucuccucc

SEQ ID NO: 534265 - RNA, 24 nt, Human
ccgaaguccugggguccaccaaag

SEQ ID NO: 534266 - RNA, 20 nt, Human
ccggagaagcgguuguagcg

SEQ ID NO: 534267 - RNA, 24 nt, Human
ccucaaggccacacacagcccccu

SEQ ID NO: 534268 - RNA, 26 nt, Human
ccucaaggccacacacagcccccuug

SEQ ID NO: 534269 - RNA, 18 nt, Human
ccucccuuuuccucucuc

SEQ ID NO: 534270 - RNA, 19 nt, Human
ccuccggccagaguggagg

SEQ ID NO: 534271 - RNA, 21 nt, Human
ccuccugcccccuccaagaag

SEQ ID NO: 534272 - RNA, 22 nt, Human
ccucugagggugugccuggccc

SEQ ID NO: 534273 - RNA, 18 nt, Human
ccugcugucucaccccgu

SEQ ID NO: 534274 - RNA, 20 nt, Human
ccugugcacaccaaccucaa

SEQ ID NO: 534275 - RNA, 22 nt, Human
cgaagucuagcuccggacaaaa

SEQ ID NO: 534276 - RNA, 19 nt, Human
cggcugucaauaaacagca

SEQ ID NO: 534277 - RNA, 22 nt, Human
cggggcaggcagaaaccccgag

SEQ ID NO: 534278 - RNA, 19 nt, Human
cuaggguggggauggaggg

SEQ ID NO: 534279 - RNA, 26 nt, Human
cuaugcccacggggcaggcagaaacc

SEQ ID NO: 534280 - RNA, 22 nt, Human
cuccaagaaguacugacugguc

SEQ ID NO: 534281 - RNA, 25 nt, Human
cuccaagaaguacugacuggucucc

SEQ ID NO: 534282 - RNA, 24 nt, Human
cuccaggggcugugcaggcagccc

SEQ ID NO: 534283 - RNA, 19 nt, Human
cuccuccgugcuucucucc

SEQ ID NO: 534284 - RNA, 25 nt, Human
cugccagagccuguccaccuaugcc

SEQ ID NO: 534285 - RNA, 23 nt, Human
cugccccaugcccccccacucac

SEQ ID NO: 534286 - RNA, 18 nt, Human
cuguccccacucacagcc

SEQ ID NO: 534287 - RNA, 25 nt, Human
cuugcagcuccucugagggugugcc

SEQ ID NO: 534288 - RNA, 25 nt, Human
gaaacugccccaugcccccccacuc

SEQ ID NO: 534289 - RNA, 19 nt, Human
gaaggcuggggcccggggg

SEQ ID NO: 534290 - RNA, 24 nt, Human
gacaaaagcuguuagaggcccagg

SEQ ID NO: 534291 - RNA, 19 nt, Human
gagcaugggacggggaggg

SEQ ID NO: 534292 - RNA, 20 nt, Human
gauggaggguggggauggag

SEQ ID NO: 534293 - RNA, 19 nt, Human
gcccauccaccccagugga

SEQ ID NO: 534294 - RNA, 19 nt, Human
gcggcuggcggagguggcg

SEQ ID NO: 534295 - RNA, 21 nt, Human
gcucacuuuuugggggcacau

SEQ ID NO: 534296 - RNA, 18 nt, Human
gcuuguaggugcuggucc

SEQ ID NO: 534297 - RNA, 22 nt, Human
ggaaacagaggugccuggcuca

SEQ ID NO: 534298 - RNA, 19 nt, Human
ggaaaccacagccuggccu

SEQ ID NO: 534299 - RNA, 18 nt, Human
ggagguaaccaaaucuac

SEQ ID NO: 534300 - RNA, 18 nt, Human
ggauggagggugggccgg

SEQ ID NO: 534301 - RNA, 20 nt, Human
ggccacgggcuugcagcucc

SEQ ID NO: 534302 - RNA, 24 nt, Human
ggccaggccacgggcuugcagcuc

SEQ ID NO: 534303 - RNA, 26 nt, Human
ggccccuuccugcugucucaccccgu

SEQ ID NO: 534304 - RNA, 21 nt, Human
ggcgucccggcgugcagggcc

SEQ ID NO: 534305 - RNA, 21 nt, Human
ggcugggcuccagcagguggg

SEQ ID NO: 534306 - RNA, 19 nt, Human
ggcuggggcccgggggcgg

SEQ ID NO: 534307 - RNA, 21 nt, Human
gggcaggcagaaaccccgaga

SEQ ID NO: 534308 - RNA, 18 nt, Human
gggcggcacaggcugggc

SEQ ID NO: 534309 - RNA, 24 nt, Human
gggcgggugcucugccgggggccg

SEQ ID NO: 534310 - RNA, 20 nt, Human
ggggagaugggacuggaggc

SEQ ID NO: 534311 - RNA, 18 nt, Human
ggggauggagggugggga

SEQ ID NO: 534312 - RNA, 19 nt, Human
gggugugucagcguggcag

SEQ ID NO: 534313 - RNA, 18 nt, Human
ggugggcaggggaggucu

SEQ ID NO: 534314 - RNA, 24 nt, Human
gguucaggggaaaccacagccugg

SEQ ID NO: 534315 - RNA, 21 nt, Human
guagcgggcacucuugccuga

SEQ ID NO: 534316 - RNA, 20 nt, Human
gucagcuuuugugauggugg

SEQ ID NO: 534317 - RNA, 20 nt, Human
guccuuccuccggccagagu

SEQ ID NO: 534318 - RNA, 20 nt, Human
gugcugcuuguaggugcugg

SEQ ID NO: 534319 - RNA, 22 nt, Human
guggaggccccaggcugcuagc

SEQ ID NO: 534320 - RNA, 21 nt, Human
gugggugugucagcguggcag

SEQ ID NO: 534321 - RNA, 22 nt, Human
uaaaaaaugccgaaaaccagcg

SEQ ID NO: 534322 - RNA, 25 nt, Human
uaaccaaaucuacauacagucuaaa

SEQ ID NO: 534323 - RNA, 22 nt, Human
uagaaaaccauuuaccaacuga

SEQ ID NO: 534324 - RNA, 20 nt, Human
uagcagggaggggaggcccc

SEQ ID NO: 534325 - RNA, 20 nt, Human
uaggguggggauggagggug

SEQ ID NO: 534326 - RNA, 23 nt, Human
uauagaaaaccauuuaccaacug

SEQ ID NO: 534327 - RNA, 19 nt, Human
ucacagcagccagugccug

SEQ ID NO: 534328 - RNA, 19 nt, Human
ucagaaagguccagggcug

SEQ ID NO: 534329 - RNA, 24 nt, Human
uccagggcugguucaggggaaacc

SEQ ID NO: 534330 - RNA, 19 nt, Human
uccccagagaaacaaaaag

SEQ ID NO: 534331 - RNA, 21 nt, Human
uccuccggccagaguggaggc

SEQ ID NO: 534332 - RNA, 18 nt, Human
uccucugagggugugccu

SEQ ID NO: 534333 - RNA, 20 nt, Human
ucggcggccguguccuccuc

SEQ ID NO: 534334 - RNA, 19 nt, Human
ucguaccuggcacccagag

SEQ ID NO: 534335 - RNA, 25 nt, Human
ucuaggguggggauggagggugggg

SEQ ID NO: 534336 - RNA, 23 nt, Human
ucucaccccguguuucccugcga

SEQ ID NO: 534337 - RNA, 23 nt, Human
ucuccuaaguucucugcgcccca

SEQ ID NO: 534338 - RNA, 21 nt, Human
ucugccugcgguccuuccucc

SEQ ID NO: 534339 - RNA, 23 nt, Human
ugaguaaaaaggcccucgcucca

SEQ ID NO: 534340 - RNA, 24 nt, Human
ugauccacaguguugggcacaacu

SEQ ID NO: 534341 - RNA, 22 nt, Human
ugcccagcuguccccccaggcc

SEQ ID NO: 534342 - RNA, 29 nt, Human
ugccccaugcccccccacucacagcagcc

SEQ ID NO: 534343 - RNA, 18 nt, Human
ugcccccccacucacagc

SEQ ID NO: 534344 - RNA, 21 nt, Human
ugcccggcugccagagccugu

SEQ ID NO: 534345 - RNA, 18 nt, Human
ugccugcgguccuuccuc

SEQ ID NO: 534346 - RNA, 23 nt, Human
ugccuggcccccucuccaggggc

SEQ ID NO: 534347 - RNA, 19 nt, Human
ugccuggcucacuuuuugg

SEQ ID NO: 534348 - RNA, 23 nt, Human
ugccuggcucacuuuuugggggc

SEQ ID NO: 534349 - RNA, 21 nt, Human
ugcugggccccccggagaagc

SEQ ID NO: 534350 - RNA, 21 nt, Human
uggaaggcuggggcccggggg

SEQ ID NO: 534351 - RNA, 20 nt, Human
uggaggcggcuggcggaggu

SEQ ID NO: 534352 - RNA, 18 nt, Human
uggaggguggggauggag

SEQ ID NO: 534353 - RNA, 25 nt, Human
uggaggguggggauggagggugggc

SEQ ID NO: 534354 - RNA, 20 nt, Human
uggcagccacguggaagcag

SEQ ID NO: 534355 - RNA, 22 nt, Human
uggggauggaggguggggaugg

SEQ ID NO: 534356 - RNA, 22 nt, Human
ugggggagaugggacuggagaa

SEQ ID NO: 534357 - RNA, 22 nt, Human
uggggugggaagauugcugggc

SEQ ID NO: 534358 - RNA, 23 nt, Human
uggggugggaagauugcugggcc

SEQ ID NO: 534359 - RNA, 22 nt, Human
ugggugugucagcguggcagcc

SEQ ID NO: 534360 - RNA, 18 nt, Human
uguagcgggcacucuugc

SEQ ID NO: 534361 - RNA, 18 nt, Human
ugucucaccccguguuuc

SEQ ID NO: 534362 - RNA, 20 nt, Human
ugugccuggcccccucucca

SEQ ID NO: 534363 - RNA, 21 nt, Human
uguggggcggguggaggcggc

SEQ ID NO: 534364 - RNA, 20 nt, Human
uuaaaaaaugccgaaaacca

SEQ ID NO: 534365 - RNA, 20 nt, Human
uuucuuuuuuuuuuuuuuau

SEQ ID NO: 534366 - RNA, 24 nt, Human
uuucuuuuuuuuuuuuuuaucaag

SEQ ID NO: 534367 - RNA, 24 nt, Human
uuuuugggggcacauguguugggg

SEQ ID NO: 534368 - RNA, 25 nt, Human
aaacagagacccugagcgcacauag

SEQ ID NO: 534369 - RNA, 25 nt, Human
aaacagagacccugagcgcacauag

SEQ ID NO: 534370 - RNA, 23 nt, Human
aaauggccccagaaugguagggc

SEQ ID NO: 534371 - RNA, 23 nt, Human
aaauggccccagaaugguagggc

SEQ ID NO: 534372 - RNA, 22 nt, Human
aacaagaagaaaucgagaagaa

SEQ ID NO: 534373 - RNA, 21 nt, Human
aagaagaaaucgagaagaaga

SEQ ID NO: 534374 - RNA, 21 nt, Human
aagaagaaaucgagaagaaga

SEQ ID NO: 534375 - RNA, 23 nt, Human
aagaagaaaucgagaagaagagc

SEQ ID NO: 534376 - RNA, 18 nt, Human
aagaagagcagucagaca

SEQ ID NO: 534377 - RNA, 19 nt, Human
aagauggggaaguagcaga

SEQ ID NO: 534378 - RNA, 19 nt, Human
aagccaagacugagggaga

SEQ ID NO: 534379 - RNA, 19 nt, Human
aagccaagacugagggaga

SEQ ID NO: 534380 - RNA, 19 nt, Human
aaggaagggcucgcugggg

SEQ ID NO: 534381 - RNA, 20 nt, Human
aaggugccccggccagcccc

SEQ ID NO: 534382 - RNA, 20 nt, Human
aaggugccccggccagcccc

SEQ ID NO: 534383 - RNA, 25 nt, Human
aagucacaguuacaaugacaggaac

SEQ ID NO: 534384 - RNA, 21 nt, Human
aagugcagagacuacagagac

SEQ ID NO: 534385 - RNA, 18 nt, Human
acaaggaaggaagggcuc

SEQ ID NO: 534386 - RNA, 22 nt, Human
acagggacagaagcccucucca

SEQ ID NO: 534387 - RNA, 22 nt, Human
acagggacagaagcccucucca

SEQ ID NO: 534388 - RNA, 19 nt, Human
accccagagcccuggagaa

SEQ ID NO: 534389 - RNA, 19 nt, Human
accccagagcccuggagaa

SEQ ID NO: 534390 - RNA, 23 nt, Human
accccagagcccuggagaagcca

SEQ ID NO: 534391 - RNA, 23 nt, Human
accccagagcccuggagaagcca

SEQ ID NO: 534392 - RNA, 24 nt, Human
accgcaucuccccagcuucuccag

SEQ ID NO: 534393 - RNA, 24 nt, Human
accgcaucuccccagcuucuccag

SEQ ID NO: 534394 - RNA, 18 nt, Human
acuccucuucccaccuuc

SEQ ID NO: 534395 - RNA, 30 nt, Human
agaaaucgagaagaagagcagucagacaaa

SEQ ID NO: 534396 - RNA, 24 nt, Human
agaacaagaagaaaucgagaagaa

SEQ ID NO: 534397 - RNA, 21 nt, Human
agaaggcagaacaagaagaaa

SEQ ID NO: 534398 - RNA, 18 nt, Human
agacaagugcagagacua

SEQ ID NO: 534399 - RNA, 22 nt, Human
agcaagagcucccaccucccuu

SEQ ID NO: 534400 - RNA, 22 nt, Human
agcaagagcucccaccucccuu

SEQ ID NO: 534401 - RNA, 21 nt, Human
agcacaucuuuagcugauacu

SEQ ID NO: 534402 - RNA, 21 nt, Human
agcacaucuuuagcugauacu

SEQ ID NO: 534403 - RNA, 18 nt, Human
aggaacagaaacacggac

SEQ ID NO: 534404 - RNA, 24 nt, Human
aggaacagaaacacggacagucac

SEQ ID NO: 534405 - RNA, 26 nt, Human
aggaacagaaacacggacagucacca

SEQ ID NO: 534406 - RNA, 23 nt, Human
aggaagggcucgcuggggcugca

SEQ ID NO: 534407 - RNA, 19 nt, Human
aggagaaagggcgggagcg

SEQ ID NO: 534408 - RNA, 21 nt, Human
aggcagaacaagaagaaaucg

SEQ ID NO: 534409 - RNA, 19 nt, Human
agugcagagacuacagaga

SEQ ID NO: 534410 - RNA, 21 nt, Human
agugcagagacuacagagacg

SEQ ID NO: 534411 - RNA, 20 nt, Human
auccgcaccguguacuccuc

SEQ ID NO: 534412 - RNA, 19 nt, Human
auggaggaaaggucccaca

SEQ ID NO: 534413 - RNA, 19 nt, Human
auggaggaaaggucccaca

SEQ ID NO: 534414 - RNA, 19 nt, Human
caaaccgagaaggcagaac

SEQ ID NO: 534415 - RNA, 21 nt, Human
caaggugccccggccagcccc

SEQ ID NO: 534416 - RNA, 21 nt, Human
caccagaacagagcucgucga

SEQ ID NO: 534417 - RNA, 22 nt, Human
cacccucugccucgcugagcuc

SEQ ID NO: 534418 - RNA, 22 nt, Human
cacccucugccucgcugagcuc

SEQ ID NO: 534419 - RNA, 20 nt, Human
caccucccuucaaaacacug

SEQ ID NO: 534420 - RNA, 19 nt, Human
cacugugcccaucccgggc

SEQ ID NO: 534421 - RNA, 19 nt, Human
cacugugcccaucccgggc

SEQ ID NO: 534422 - RNA, 25 nt, Human
cagaacagagcucgucgagcccgcu

SEQ ID NO: 534423 - RNA, 21 nt, Human
cagccuccugggcuuccuccu

SEQ ID NO: 534424 - RNA, 19 nt, Human
cagcucagccuucaacugu

SEQ ID NO: 534425 - RNA, 18 nt, Human
caggagagcaagagcucc

SEQ ID NO: 534426 - RNA, 18 nt, Human
caggagagcaagagcucc

SEQ ID NO: 534427 - RNA, 22 nt, Human
caggagagccccaacuguggug

SEQ ID NO: 534428 - RNA, 23 nt, Human
cagucaccaagggccagacacac

SEQ ID NO: 534429 - RNA, 27 nt, Human
cauacacccgcgcacacaugcauggug

SEQ ID NO: 534430 - RNA, 23 nt, Human
caugcauggagcuucaccuucuc

SEQ ID NO: 534431 - RNA, 19 nt, Human
cauggagcuucaccuucuc

SEQ ID NO: 534432 - RNA, 19 nt, Human
cauggagcuucaccuucuc

SEQ ID NO: 534433 - RNA, 22 nt, Human
ccacagccacauacacuccacc

SEQ ID NO: 534434 - RNA, 23 nt, Human
ccaggccgcgcuucaugcugcac

SEQ ID NO: 534435 - RNA, 19 nt, Human
ccaguccccagggaccggc

SEQ ID NO: 534436 - RNA, 19 nt, Human
ccaguccccagggaccggc

SEQ ID NO: 534437 - RNA, 22 nt, Human
cccaccucccuucaaaacacug

SEQ ID NO: 534438 - RNA, 22 nt, Human
cccaccucccuucaaaacacug

SEQ ID NO: 534439 - RNA, 21 nt, Human
cccauggaugggaccuggaac

SEQ ID NO: 534440 - RNA, 22 nt, Human
ccccagaaugguagggccaagc

SEQ ID NO: 534441 - RNA, 22 nt, Human
ccccagaaugguagggccaagc

SEQ ID NO: 534442 - RNA, 23 nt, Human
ccccagagcccuggagaagccaa

SEQ ID NO: 534443 - RNA, 23 nt, Human
ccccagagcccuggagaagccaa

SEQ ID NO: 534444 - RNA, 24 nt, Human
ccccagagcccuggagaagccaag

SEQ ID NO: 534445 - RNA, 24 nt, Human
ccccagagcccuggagaagccaag

SEQ ID NO: 534446 - RNA, 25 nt, Human
ccccaucgggcuggcggggccccuc

SEQ ID NO: 534447 - RNA, 18 nt, Human
cccgcaccagaacagagc

SEQ ID NO: 534448 - RNA, 18 nt, Human
cccgccuccugcccgcac

SEQ ID NO: 534449 - RNA, 19 nt, Human
cccgcgcacacaugcaugg

SEQ ID NO: 534450 - RNA, 19 nt, Human
cccgcgcacacaugcaugg

SEQ ID NO: 534451 - RNA, 23 nt, Human
cccgcugcccugccucuuguggu

SEQ ID NO: 534452 - RNA, 23 nt, Human
cccggccagccccaacgcccucu

SEQ ID NO: 534453 - RNA, 23 nt, Human
cccggccagccccaacgcccucu

SEQ ID NO: 534454 - RNA, 18 nt, Human
cccucugccgcugacagg

SEQ ID NO: 534455 - RNA, 18 nt, Human
cccucugccgcugacagg

SEQ ID NO: 534456 - RNA, 21 nt, Human
ccgcaccagaacagagcucgu

SEQ ID NO: 534457 - RNA, 19 nt, Human
ccggguuuugaacagggac

SEQ ID NO: 534458 - RNA, 22 nt, Human
ccuauaccgaggcauugugaac

SEQ ID NO: 534459 - RNA, 22 nt, Human
ccuauaccgaggcauugugaac

SEQ ID NO: 534460 - RNA, 20 nt, Human
ccucagucuccucccaaguc

SEQ ID NO: 534461 - RNA, 20 nt, Human
ccucauccccaucgggcugg

SEQ ID NO: 534462 - RNA, 21 nt, Human
ccuccugggcuuccuccugga

SEQ ID NO: 534463 - RNA, 21 nt, Human
ccucgcuuggcggcggcggcg

SEQ ID NO: 534464 - RNA, 26 nt, Human
ccucugccgcugacagggacagaagc

SEQ ID NO: 534465 - RNA, 18 nt, Human
ccucugugcagccccacc

SEQ ID NO: 534466 - RNA, 18 nt, Human
ccucugugcagccccacc

SEQ ID NO: 534467 - RNA, 22 nt, Human
ccugcccgcaccagaacagagc

SEQ ID NO: 534468 - RNA, 18 nt, Human
ccugggcuuccuccugga

SEQ ID NO: 534469 - RNA, 21 nt, Human
ccuucaaaacacugugcccau

SEQ ID NO: 534470 - RNA, 21 nt, Human
ccuucaaaacacugugcccau

SEQ ID NO: 534471 - RNA, 25 nt, Human
ccuugcgcucccgcuuccgcccccc

SEQ ID NO: 534472 - RNA, 20 nt, Human
cgagaagaagagcagucaga

SEQ ID NO: 534473 - RNA, 18 nt, Human
cgcacacaugcauggagc

SEQ ID NO: 534474 - RNA, 22 nt, Human
cgccccaguccccagggaccgg

SEQ ID NO: 534475 - RNA, 19 nt, Human
cgcgaucggaguccucagc

SEQ ID NO: 534476 - RNA, 19 nt, Human
cgcucccgcuuccgccccc

SEQ ID NO: 534477 - RNA, 19 nt, Human
cggcaccuccacgagggag

SEQ ID NO: 534478 - RNA, 19 nt, Human
cggcaccuccacgagggag

SEQ ID NO: 534479 - RNA, 21 nt, Human
cguaucuuuaaucaccuucuc

SEQ ID NO: 534480 - RNA, 24 nt, Human
cgugugcugcagaggccaugcgua

SEQ ID NO: 534481 - RNA, 24 nt, Human
cgugugcugcagaggccaugcgua

SEQ ID NO: 534482 - RNA, 25 nt, Human
cuacagagacgaggccgggugcaug

SEQ ID NO: 534483 - RNA, 19 nt, Human
cucaacacagccuccuaua

SEQ ID NO: 534484 - RNA, 19 nt, Human
cucaacacagccuccuaua

SEQ ID NO: 534485 - RNA, 21 nt, Human
cuccacgagggagggccacag

SEQ ID NO: 534486 - RNA, 21 nt, Human
cuccacgagggagggccacag

SEQ ID NO: 534487 - RNA, 21 nt, Human
cucccaccucccuucaaaaca

SEQ ID NO: 534488 - RNA, 21 nt, Human
cucccaccucccuucaaaaca

SEQ ID NO: 534489 - RNA, 20 nt, Human
cuccucauccccaucgggcu

SEQ ID NO: 534490 - RNA, 21 nt, Human
cugagggagaaagccugaggg

SEQ ID NO: 534491 - RNA, 21 nt, Human
cugcccgcaccagaacagagc

SEQ ID NO: 534492 - RNA, 20 nt, Human
cuggugcagagcugcagcug

SEQ ID NO: 534493 - RNA, 20 nt, Human
cuggugcagagcugcagcug

SEQ ID NO: 534494 - RNA, 18 nt, Human
cugugcagccccacccuc

SEQ ID NO: 534495 - RNA, 18 nt, Human
cugugcagccccacccuc

SEQ ID NO: 534496 - RNA, 23 nt, Human
cuucccaccuucagucgcacaga

SEQ ID NO: 534497 - RNA, 20 nt, Human
gaacaagaagaaaucgagaa

SEQ ID NO: 534498 - RNA, 24 nt, Human
gaaccgcaucuccccagcuucucc

SEQ ID NO: 534499 - RNA, 24 nt, Human
gaaccgcaucuccccagcuucucc

SEQ ID NO: 534500 - RNA, 22 nt, Human
gaagaccaccagcucagccuuc

SEQ ID NO: 534501 - RNA, 21 nt, Human
gacaccccagagcccuggaga

SEQ ID NO: 534502 - RNA, 21 nt, Human
gacaccccagagcccuggaga

SEQ ID NO: 534503 - RNA, 25 nt, Human
gagaagaagagcagucagacaagga

SEQ ID NO: 534504 - RNA, 25 nt, Human
gagacgaggccgggugcaugaggag

SEQ ID NO: 534505 - RNA, 23 nt, Human
gagccccaacugugguggaaaug

SEQ ID NO: 534506 - RNA, 23 nt, Human
gagccccaacugugguggaaaug

SEQ ID NO: 534507 - RNA, 21 nt, Human
gaggagaaagggcgggagcgg

SEQ ID NO: 534508 - RNA, 20 nt, Human
gagggccucgggugcaaggg

SEQ ID NO: 534509 - RNA, 20 nt, Human
gagggccucgggugcaaggg

SEQ ID NO: 534510 - RNA, 18 nt, Human
gagggugggaauggggga

SEQ ID NO: 534511 - RNA, 22 nt, Human
gcaagagcucccaccucccuuc

SEQ ID NO: 534512 - RNA, 22 nt, Human
gcaagagcucccaccucccuuc

SEQ ID NO: 534513 - RNA, 25 nt, Human
gcacagauccgggcucccgccuccu

SEQ ID NO: 534514 - RNA, 19 nt, Human
gcacuaaggccucuuuaaa

SEQ ID NO: 534515 - RNA, 19 nt, Human
gcacuaaggccucuuuaaa

SEQ ID NO: 534516 - RNA, 21 nt, Human
gcagagagggugggaaugggg

SEQ ID NO: 534517 - RNA, 22 nt, Human
gcagagcugcagcugauguucc

SEQ ID NO: 534518 - RNA, 22 nt, Human
gcagagcugcagcugauguucc

SEQ ID NO: 534519 - RNA, 18 nt, Human
gcagccccacccucugcc

SEQ ID NO: 534520 - RNA, 18 nt, Human
gcagccccacccucugcc

SEQ ID NO: 534521 - RNA, 23 nt, Human
gccacagccacauacacuccacc

SEQ ID NO: 534522 - RNA, 23 nt, Human
gccacagccacauacacuccacc

SEQ ID NO: 534523 - RNA, 19 nt, Human
gccccaacgcccucugccg

SEQ ID NO: 534524 - RNA, 19 nt, Human
gccccaacgcccucugccg

SEQ ID NO: 534525 - RNA, 21 nt, Human
gccccaguccccagggaccgg

SEQ ID NO: 534526 - RNA, 21 nt, Human
gccccaguccccagggaccgg

SEQ ID NO: 534527 - RNA, 18 nt, Human
gcgaucggaguccucagc

SEQ ID NO: 534528 - RNA, 21 nt, Human
gcgggagcgggaggccgggca

SEQ ID NO: 534529 - RNA, 22 nt, Human
gcucccgccuccugcccgcacc

SEQ ID NO: 534530 - RNA, 21 nt, Human
gcuggggcugcagucagaugu

SEQ ID NO: 534531 - RNA, 21 nt, Human
ggaagcacaucuuuagcugau

SEQ ID NO: 534532 - RNA, 19 nt, Human
ggaaggaagggcucgcugg

SEQ ID NO: 534533 - RNA, 19 nt, Human
ggacaacagggauggagga

SEQ ID NO: 534534 - RNA, 19 nt, Human
ggacaacagggauggagga

SEQ ID NO: 534535 - RNA, 22 nt, Human
ggcagagagggugggaaugggg

SEQ ID NO: 534536 - RNA, 24 nt, Human
ggcuggcggggccccucacucucc

SEQ ID NO: 534537 - RNA, 23 nt, Human
gggccaagccuagcuccagacac

SEQ ID NO: 534538 - RNA, 23 nt, Human
gggccaagccuagcuccagacac

SEQ ID NO: 534539 - RNA, 21 nt, Human
gggugggaaugggggagaagc

SEQ ID NO: 534540 - RNA, 19 nt, Human
ggugggaaugggggagaag

SEQ ID NO: 534541 - RNA, 22 nt, Human
guaggaagggggggcagacaga

SEQ ID NO: 534542 - RNA, 23 nt, Human
gugugcugcagaggccaugcgua

SEQ ID NO: 534543 - RNA, 25 nt, Human
uaaacagagacccugagcgcacaua

SEQ ID NO: 534544 - RNA, 25 nt, Human
uaaacagagacccugagcgcacaua

SEQ ID NO: 534545 - RNA, 18 nt, Human
uaaggccucuuuaaagca

SEQ ID NO: 534546 - RNA, 18 nt, Human
uaaggccucuuuaaagca

SEQ ID NO: 534547 - RNA, 22 nt, Human
uacaaugacaggaacagaaaca

SEQ ID NO: 534548 - RNA, 23 nt, Human
uacaaugacaggaacagaaacac

SEQ ID NO: 534549 - RNA, 21 nt, Human
uagcugauacuuaaacagaga

SEQ ID NO: 534550 - RNA, 21 nt, Human
uagcugauacuuaaacagaga

SEQ ID NO: 534551 - RNA, 25 nt, Human
ucaauggucuccugauacuccuucu

SEQ ID NO: 534552 - RNA, 21 nt, Human
ucacaguuacaaugacaggaa

SEQ ID NO: 534553 - RNA, 19 nt, Human
ucagcucaacacagccucc

SEQ ID NO: 534554 - RNA, 19 nt, Human
ucagcucaacacagccucc

SEQ ID NO: 534555 - RNA, 23 nt, Human
ucaugucguucuuggccguggcc

SEQ ID NO: 534556 - RNA, 23 nt, Human
uccccagcuucuccaggcuuuuc

SEQ ID NO: 534557 - RNA, 23 nt, Human
uccccagcuucuccaggcuuuuc

SEQ ID NO: 534558 - RNA, 19 nt, Human
uccucguugaugcugaggg

SEQ ID NO: 534559 - RNA, 22 nt, Human
uccucuucccaccuucagucgc

SEQ ID NO: 534560 - RNA, 20 nt, Human
uccugcugcucucccugggc

SEQ ID NO: 534561 - RNA, 18 nt, Human
ucuccucagucuccuccc

SEQ ID NO: 534562 - RNA, 21 nt, Human
ucuuccugcugcucucccugg

SEQ ID NO: 534563 - RNA, 21 nt, Human
ugacaggaacagaaacacgga

SEQ ID NO: 534564 - RNA, 22 nt, Human
ugacaggaacagaaacacggac

SEQ ID NO: 534565 - RNA, 19 nt, Human
ugaccaggagagcaagagc

SEQ ID NO: 534566 - RNA, 19 nt, Human
ugaccaggagagcaagagc

SEQ ID NO: 534567 - RNA, 19 nt, Human
ugagaaauccucccaaagc

SEQ ID NO: 534568 - RNA, 22 nt, Human
ugagcauguggaccauagcagg

SEQ ID NO: 534569 - RNA, 22 nt, Human
ugagcauguggaccauagcagg

SEQ ID NO: 534570 - RNA, 28 nt, Human
ugagcgcacauacacccgcgcacacaug

SEQ ID NO: 534571 - RNA, 28 nt, Human
ugagcgcacauacacccgcgcacacaug

SEQ ID NO: 534572 - RNA, 20 nt, Human
ugagggagaaagccugaggg

SEQ ID NO: 534573 - RNA, 18 nt, Human
ugagggaggagcgcccca

SEQ ID NO: 534574 - RNA, 18 nt, Human
ugagggaggagcgcccca

SEQ ID NO: 534575 - RNA, 27 nt, Human
ugcagugaccaggagagcaagagcucc

SEQ ID NO: 534576 - RNA, 18 nt, Human
ugccagcuccuccuggca

SEQ ID NO: 534577 - RNA, 23 nt, Human
ugccagcuccuccuggcaggcau

SEQ ID NO: 534578 - RNA, 22 nt, Human
ugccugggccaguuagcaccag

SEQ ID NO: 534579 - RNA, 22 nt, Human
ugccugggccaguuagcaccag

SEQ ID NO: 534580 - RNA, 23 nt, Human
uggaacaucuggaucauguccuc

SEQ ID NO: 534581 - RNA, 18 nt, Human
uggcaggcaucagccucc

SEQ ID NO: 534582 - RNA, 19 nt, Human
uggcaggcaucagccuccu

SEQ ID NO: 534583 - RNA, 20 nt, Human
uggccguggccaacuccagc

SEQ ID NO: 534584 - RNA, 19 nt, Human
uggcggcggcggcgggucg

SEQ ID NO: 534585 - RNA, 19 nt, Human
ugggaaugggggagaagca

SEQ ID NO: 534586 - RNA, 19 nt, Human
uggugcagagcugcagcug

SEQ ID NO: 534587 - RNA, 19 nt, Human
uggugcagagcugcagcug

SEQ ID NO: 534588 - RNA, 22 nt, Human
uguuccccucugugcagcccca

SEQ ID NO: 534589 - RNA, 27 nt, Human
uuaaucaccuucuccaggcuaucuucc

SEQ ID NO: 534590 - RNA, 22 nt, Human
uucucugucauucugcagugac

SEQ ID NO: 534591 - RNA, 22 nt, Human
uugcagcuggauccgcaccgug

SEQ ID NO: 534592 - RNA, 23 nt, Human
uugcgcugcugagccacaucgca

SEQ ID NO: 534593 - RNA, 20 nt, Human
uuuacacggucuugcagcug

SEQ ID NO: 534594 - RNA, 18 nt, Human
uuuuuuuuuuuuugaggg

SEQ ID NO: 534595 - RNA, 22 nt, Human
uuuuuuuuuuuuuuuuugaggg

SEQ ID NO: 534596 - RNA, 27 nt, Human
uuuuuuuuuuuuuuuuugaggguaggg

SEQ ID NO: 534597 - RNA, 18 nt, Human
acagaaggcagucccaca

SEQ ID NO: 534598 - RNA, 23 nt, Human
aggaagcagcucaggugguucug

SEQ ID NO: 534599 - RNA, 19 nt, Human
aggaaggagauggcugcug

SEQ ID NO: 534600 - RNA, 22 nt, Human
aggaaggagauggcugcugggg

SEQ ID NO: 534601 - RNA, 23 nt, Human
aggaaggagauggcugcuggggc

SEQ ID NO: 534602 - RNA, 20 nt, Human
aggcagccagauggcgggag

SEQ ID NO: 534603 - RNA, 21 nt, Human
aggcagucccacagcgccccc

SEQ ID NO: 534604 - RNA, 23 nt, Human
aggggcaaggagccggcugagcu

SEQ ID NO: 534605 - RNA, 21 nt, Human
augaaggcagccagauggcgg

SEQ ID NO: 534606 - RNA, 21 nt, Human
cagcagcuccagcaggcccag

SEQ ID NO: 534607 - RNA, 19 nt, Human
cagcccaggccaugcccgg

SEQ ID NO: 534608 - RNA, 20 nt, Human
caggaaggagauggcugcug

SEQ ID NO: 534609 - RNA, 24 nt, Human
caggaucucgggucuccccccgag

SEQ ID NO: 534610 - RNA, 20 nt, Human
caguacaugaacgugggcag

SEQ ID NO: 534611 - RNA, 20 nt, Human
ccaccucaaaguccuggcug

SEQ ID NO: 534612 - RNA, 21 nt, Human
ccaccucaaaguccuggcugc

SEQ ID NO: 534613 - RNA, 20 nt, Human
ccaggccucggucgguccug

SEQ ID NO: 534614 - RNA, 24 nt, Human
cccaggccaugcccggggggaucc

SEQ ID NO: 534615 - RNA, 22 nt, Human
ccccagggcucggaguauugcu

SEQ ID NO: 534616 - RNA, 21 nt, Human
cccuccaccguuuggccccgg

SEQ ID NO: 534617 - RNA, 19 nt, Human
ccgccgccgccacccggcc

SEQ ID NO: 534618 - RNA, 23 nt, Human
ccggcggcugcggcgucaccucu

SEQ ID NO: 534619 - RNA, 20 nt, Human
ccuccucggacagaccagcu

SEQ ID NO: 534620 - RNA, 23 nt, Human
ccucggagaucugcgcgcugggg

SEQ ID NO: 534621 - RNA, 21 nt, Human
cgcagggccaggcugaaggcg

SEQ ID NO: 534622 - RNA, 21 nt, Human
cgcgaccggagcgccgccgcc

SEQ ID NO: 534623 - RNA, 23 nt, Human
cggcggcugcggcgucaccucug

SEQ ID NO: 534624 - RNA, 19 nt, Human
cucaaaguccuggcugccc

SEQ ID NO: 534625 - RNA, 21 nt, Human
cuccagcagaucuggcguggg

SEQ ID NO: 534626 - RNA, 21 nt, Human
cuccucggacagaccagcaac

SEQ ID NO: 534627 - RNA, 25 nt, Human
cuccucggacagaccagcaacgccc

SEQ ID NO: 534628 - RNA, 19 nt, Human
cuccugggccugccuggcc

SEQ ID NO: 534629 - RNA, 19 nt, Human
cuccugggccugccuggcc

SEQ ID NO: 534630 - RNA, 23 nt, Human
cucgcggcucccggcggcugcgg

SEQ ID NO: 534631 - RNA, 20 nt, Human
cucggcgcccucaccuccuc

SEQ ID NO: 534632 - RNA, 18 nt, Human
cugcaaugcuggggcugu

SEQ ID NO: 534633 - RNA, 18 nt, Human
cuuggaggggggucggcu

SEQ ID NO: 534634 - RNA, 21 nt, Human
gagaagaagcucaggaucucg

SEQ ID NO: 534635 - RNA, 18 nt, Human
gagagcguacucaggcag

SEQ ID NO: 534636 - RNA, 21 nt, Human
gaggauccccggggacgggac

SEQ ID NO: 534637 - RNA, 20 nt, Human
gcaggaagcagcucaggugg

SEQ ID NO: 534638 - RNA, 22 nt, Human
gcauggagcgcagggccaggcu

SEQ ID NO: 534639 - RNA, 23 nt, Human
gccccgucccucgcggcucccgg

SEQ ID NO: 534640 - RNA, 20 nt, Human
ggagauggcugcuggggcau

SEQ ID NO: 534641 - RNA, 21 nt, Human
ggcugagcucuccuccucgcc

SEQ ID NO: 534642 - RNA, 18 nt, Human
ggcuuggaggggggucgg

SEQ ID NO: 534643 - RNA, 21 nt, Human
gggacgggacgggccggggcu

SEQ ID NO: 534644 - RNA, 18 nt, Human
gggcaaggagccggcuga

SEQ ID NO: 534645 - RNA, 19 nt, Human
ggugaacagggagacgcug

SEQ ID NO: 534646 - RNA, 20 nt, Human
guccaggccucggucggucc

SEQ ID NO: 534647 - RNA, 21 nt, Human
gucccugcugggcaggcugag

SEQ ID NO: 534648 - RNA, 24 nt, Human
uagguaauguacuuauggaugaac

SEQ ID NO: 534649 - RNA, 22 nt, Human
ucaaaaccagcccaggccaugc

SEQ ID NO: 534650 - RNA, 22 nt, Human
ucaccaggucacuguugucgac

SEQ ID NO: 534651 - RNA, 20 nt, Human
ucagggccucggagaucugc

SEQ ID NO: 534652 - RNA, 25 nt, Human
uccaccguuuggccccgggaaagcc

SEQ ID NO: 534653 - RNA, 23 nt, Human
ucccggcggcugcggcgucaccu

SEQ ID NO: 534654 - RNA, 20 nt, Human
ucccugcugggcaggcugag

SEQ ID NO: 534655 - RNA, 23 nt, Human
uccucagggccucggagaucugc

SEQ ID NO: 534656 - RNA, 19 nt, Human
uccugggccugccuggccu

SEQ ID NO: 534657 - RNA, 20 nt, Human
ucggcgcccucaccuccucg

SEQ ID NO: 534658 - RNA, 23 nt, Human
ucuggcgugggugaagcagggcc

SEQ ID NO: 534659 - RNA, 23 nt, Human
ugaacugcacaaacuuguugaug

SEQ ID NO: 534660 - RNA, 18 nt, Human
ugaaggcagccagauggc

SEQ ID NO: 534661 - RNA, 25 nt, Human
ugaccaggggcaaggagccggcuga

SEQ ID NO: 534662 - RNA, 25 nt, Human
ugaugaaggcagccagauggcggga

SEQ ID NO: 534663 - RNA, 22 nt, Human
ugcaaggagggauuucagcauc

SEQ ID NO: 534664 - RNA, 18 nt, Human
ugcaccaccucaaagucc

SEQ ID NO: 534665 - RNA, 18 nt, Human
ugcccaccaggaaggccc

SEQ ID NO: 534666 - RNA, 23 nt, Human
ugcccaggcaguacaugaacgug

SEQ ID NO: 534667 - RNA, 22 nt, Human
ugccucgaggauccccggggac

SEQ ID NO: 534668 - RNA, 19 nt, Human
ugcggccgugcaggagcgc

SEQ ID NO: 534669 - RNA, 21 nt, Human
ugcugggcaggcugagcccug

SEQ ID NO: 534670 - RNA, 20 nt, Human
uggccucagggcucggcgcc

SEQ ID NO: 534671 - RNA, 23 nt, Human
uucaaaaccagcccaggccaugc

SEQ ID NO: 534672 - RNA, 22 nt, Human
uucauguagggggccaucucgg

SEQ ID NO: 534673 - RNA, 25 nt, Human
uuguagguaauguacuuauggauga

SEQ ID NO: 534674 - RNA, 20 nt, Human
aaaacccagggcccagcccc

SEQ ID NO: 534675 - RNA, 21 nt, Human
aaagcugaacucaacagcagc

SEQ ID NO: 534676 - RNA, 20 nt, Human
aagcugaacucaacagcagc

SEQ ID NO: 534677 - RNA, 21 nt, Human
acagacccagagacucggcca

SEQ ID NO: 534678 - RNA, 21 nt, Human
acagccaggugcccucagacc

SEQ ID NO: 534679 - RNA, 18 nt, Human
acccagagacucggccag

SEQ ID NO: 534680 - RNA, 20 nt, Human
agaccccuggcucugcacaa

SEQ ID NO: 534681 - RNA, 21 nt, Human
agccaggugcccucagacccc

SEQ ID NO: 534682 - RNA, 18 nt, Human
agcccggcccccgcccca

SEQ ID NO: 534683 - RNA, 21 nt, Human
aggagcaggccccacccagag

SEQ ID NO: 534684 - RNA, 19 nt, Human
aggccugugugcugggaug

SEQ ID NO: 534685 - RNA, 19 nt, Human
aggccugugugcugggaug

SEQ ID NO: 534686 - RNA, 18 nt, Human
aggcggcccagccccagg

SEQ ID NO: 534687 - RNA, 18 nt, Human
agggagggggugggcagg

SEQ ID NO: 534688 - RNA, 18 nt, Human
agggagggggugggcagg

SEQ ID NO: 534689 - RNA, 22 nt, Human
agggagggggugggcagggagg

SEQ ID NO: 534690 - RNA, 21 nt, Human
aggucccggugcagagggagu

SEQ ID NO: 534691 - RNA, 22 nt, Human
augaaccccauggagggaugcc

SEQ ID NO: 534692 - RNA, 23 nt, Human
augugggcugcugggcugcuggg

SEQ ID NO: 534693 - RNA, 22 nt, Human
caaaacccagggcccagcccca

SEQ ID NO: 534694 - RNA, 23 nt, Human
caaaggcccgagggguggggcca

SEQ ID NO: 534695 - RNA, 22 nt, Human
cacagccaggugcccucagacc

SEQ ID NO: 534696 - RNA, 18 nt, Human
cacagggcgggauccucc

SEQ ID NO: 534697 - RNA, 20 nt, Human
cagacagucggagacucggc

SEQ ID NO: 534698 - RNA, 18 nt, Human
cagcagcaaugagagugc

SEQ ID NO: 534699 - RNA, 18 nt, Human
cagccccagcugggcccc

SEQ ID NO: 534700 - RNA, 19 nt, Human
cagcgaguuucucaaaacc

SEQ ID NO: 534701 - RNA, 21 nt, Human
cagcugggcacauccggggca

SEQ ID NO: 534702 - RNA, 21 nt, Human
cagcugggccccugccaagcc

SEQ ID NO: 534703 - RNA, 19 nt, Human
caggagccagcugggcaca

SEQ ID NO: 534704 - RNA, 23 nt, Human
caggcagagguggcugguccagc

SEQ ID NO: 534705 - RNA, 18 nt, Human
ccacccagagccuccucu

SEQ ID NO: 534706 - RNA, 21 nt, Human
ccagagccuccucugaaggaa

SEQ ID NO: 534707 - RNA, 22 nt, Human
ccagcugcgcggccggguccag

SEQ ID NO: 534708 - RNA, 20 nt, Human
ccaggagccagcugggcaca

SEQ ID NO: 534709 - RNA, 22 nt, Human
ccaggcgaggcauggcagguca

SEQ ID NO: 534710 - RNA, 26 nt, Human
cccacagcugagccuccaggcgaggc

SEQ ID NO: 534711 - RNA, 19 nt, Human
ccccagcugggccccugcc

SEQ ID NO: 534712 - RNA, 20 nt, Human
ccccagggacugcagccucu

SEQ ID NO: 534713 - RNA, 22 nt, Human
cccccagggacugcagccucug

SEQ ID NO: 534714 - RNA, 25 nt, Human
cccccgccccagcccucccucagcu

SEQ ID NO: 534715 - RNA, 19 nt, Human
ccccgccccagcccucccu

SEQ ID NO: 534716 - RNA, 20 nt, Human
ccccgccccagcccucccuc

SEQ ID NO: 534717 - RNA, 27 nt, Human
cccggcccccgccccagcccucccuca

SEQ ID NO: 534718 - RNA, 18 nt, Human
cccuacaguccaccagcu

SEQ ID NO: 534719 - RNA, 19 nt, Human
cccucagaccccuggcucu

SEQ ID NO: 534720 - RNA, 19 nt, Human
ccugcugcccagacugccc

SEQ ID NO: 534721 - RNA, 19 nt, Human
ccuggcucugcacaagggg

SEQ ID NO: 534722 - RNA, 23 nt, Human
cgccccagcccucccucagcugg

SEQ ID NO: 534723 - RNA, 21 nt, Human
cggcccccgccccagcccucc

SEQ ID NO: 534724 - RNA, 18 nt, Human
cuaaguaagcagggaugg

SEQ ID NO: 534725 - RNA, 20 nt, Human
cuacacuguaacuagcagca

SEQ ID NO: 534726 - RNA, 19 nt, Human
cugggcggaggccucugcc

SEQ ID NO: 534727 - RNA, 21 nt, Human
cuuggggggaugaggagcagg

SEQ ID NO: 534728 - RNA, 21 nt, Human
gaaagcacagacagucggaga

SEQ ID NO: 534729 - RNA, 18 nt, Human
gagagugcugggugggcu

SEQ ID NO: 534730 - RNA, 18 nt, Human
gaucgauacggcagggag

SEQ ID NO: 534731 - RNA, 20 nt, Human
gcagcccggcgacgcuggcc

SEQ ID NO: 534732 - RNA, 23 nt, Human
gcagggaggguccugaacacaug

SEQ ID NO: 534733 - RNA, 22 nt, Human
gcccacagcugagccuccagga

SEQ ID NO: 534734 - RNA, 19 nt, Human
gcccacagcugagccuccg

SEQ ID NO: 534735 - RNA, 25 nt, Human
gcccccgccccagcccucccucagc

SEQ ID NO: 534736 - RNA, 19 nt, Human
gccccugccaagccccagg

SEQ ID NO: 534737 - RNA, 21 nt, Human
ggaacacagccaggugcccuc

SEQ ID NO: 534738 - RNA, 21 nt, Human
ggaccggaacccacaggggga

SEQ ID NO: 534739 - RNA, 21 nt, Human
ggacugcagccucugcggcca

SEQ ID NO: 534740 - RNA, 24 nt, Human
ggcagggaggguccugaacacaug

SEQ ID NO: 534741 - RNA, 21 nt, Human
gggcagggaggguccugaaca

SEQ ID NO: 534742 - RNA, 20 nt, Human
gggcugcugggcugcugggc

SEQ ID NO: 534743 - RNA, 20 nt, Human
ggggagcacgaggcggccca

SEQ ID NO: 534744 - RNA, 21 nt, Human
gggguggggccaggagccagc

SEQ ID NO: 534745 - RNA, 24 nt, Human
gggugggcuuggggggaugaggag

SEQ ID NO: 534746 - RNA, 18 nt, Human
ggguggggccaggagcca

SEQ ID NO: 534747 - RNA, 24 nt, Human
ggguggggccaggagccagcuggg

SEQ ID NO: 534748 - RNA, 20 nt, Human
gugcagagggaguggccuga

SEQ ID NO: 534749 - RNA, 19 nt, Human
uacacagucccggggagca

SEQ ID NO: 534750 - RNA, 18 nt, Human
uacaguccaccagcugcg

SEQ ID NO: 534751 - RNA, 19 nt, Human
uacggcagggagggggugg

SEQ ID NO: 534752 - RNA, 20 nt, Human
uagacagacccagagacucg

SEQ ID NO: 534753 - RNA, 20 nt, Human
uaugaaccccauggagggau

SEQ ID NO: 534754 - RNA, 23 nt, Human
ucagugccuggccgcugagcauc

SEQ ID NO: 534755 - RNA, 22 nt, Human
uccacacugaggcugguaaaag

SEQ ID NO: 534756 - RNA, 20 nt, Human
uccacgggccacagggcggg

SEQ ID NO: 534757 - RNA, 24 nt, Human
uccagcuucuugcggcgaccggag

SEQ ID NO: 534758 - RNA, 20 nt, Human
ucucaaaacccagggcccag

SEQ ID NO: 534759 - RNA, 23 nt, Human
ucucaaaacccagggcccagccc

SEQ ID NO: 534760 - RNA, 23 nt, Human
ugaaagcacagacagucggagac

SEQ ID NO: 534761 - RNA, 25 nt, Human
ugcccagacugccccuaccgggucc

SEQ ID NO: 534762 - RNA, 25 nt, Human
ugcccucagaccccuggcucugcac

SEQ ID NO: 534763 - RNA, 20 nt, Human
ugcugggauggagccuccac

SEQ ID NO: 534764 - RNA, 21 nt, Human
ugcugggcugcugggccgggg

SEQ ID NO: 534765 - RNA, 19 nt, Human
uggacaaaagcugggagcu

SEQ ID NO: 534766 - RNA, 23 nt, Human
uggacaaaagcugggagcuccug

SEQ ID NO: 534767 - RNA, 23 nt, Human
uggcaagaggaguguaagugaaa

SEQ ID NO: 534768 - RNA, 18 nt, Human
uggccguggacaaaagcu

SEQ ID NO: 534769 - RNA, 19 nt, Human
uggccguggacaaaagcug

SEQ ID NO: 534770 - RNA, 24 nt, Human
uggccugauggugacugggcggag

SEQ ID NO: 534771 - RNA, 24 nt, Human
uggccugauggugacugggcggag

SEQ ID NO: 534772 - RNA, 25 nt, Human
uggccugauggugacugggcggagg

SEQ ID NO: 534773 - RNA, 18 nt, Human
ugggaacacagccaggug

SEQ ID NO: 534774 - RNA, 19 nt, Human
ugggccccugccaagcccc

SEQ ID NO: 534775 - RNA, 24 nt, Human
ugggccccugccaagccccaggcc

SEQ ID NO: 534776 - RNA, 21 nt, Human
ugggcuuggggggaugaggag

SEQ ID NO: 534777 - RNA, 20 nt, Human
uggggccaggagccagcugg

SEQ ID NO: 534778 - RNA, 21 nt, Human
uggggccaggagccagcuggg

SEQ ID NO: 534779 - RNA, 20 nt, Human
ugggggguggcaagaggagu

SEQ ID NO: 534780 - RNA, 24 nt, Human
ugguaaaagcugaacucaacagca

SEQ ID NO: 534781 - RNA, 21 nt, Human
ugugcugggauggagccucca

SEQ ID NO: 534782 - RNA, 18 nt, Human
uguuucggggguguagaa

SEQ ID NO: 534783 - RNA, 19 nt, Human
aaacgcggcgaucaacagc

SEQ ID NO: 534784 - RNA, 21 nt, Human
acuccaaucccaggaaggccc

SEQ ID NO: 534785 - RNA, 22 nt, Human
agaaagcucgagacuccaaucc

SEQ ID NO: 534786 - RNA, 18 nt, Human
caaccccuuccccagccu

SEQ ID NO: 534787 - RNA, 19 nt, Human
cagccccgaggcgcgagaa

SEQ ID NO: 534788 - RNA, 18 nt, Human
ccagccucgcagccccga

SEQ ID NO: 534789 - RNA, 24 nt, Human
cccacgcguccgcccacgcguccg

SEQ ID NO: 534790 - RNA, 24 nt, Human
ccccuccaaccccuuccccagccu

SEQ ID NO: 534791 - RNA, 18 nt, Human
cccuuccccagccucgca

SEQ ID NO: 534792 - RNA, 21 nt, Human
cgagaagggcgcgaacccgcc

SEQ ID NO: 534793 - RNA, 24 nt, Human
cgagaagggcgcgaacccgccggc

SEQ ID NO: 534794 - RNA, 20 nt, Human
cgcagccccgaggcgcgaga

SEQ ID NO: 534795 - RNA, 23 nt, Human
cgcggcgaucaacagcccccucc

SEQ ID NO: 534796 - RNA, 20 nt, Human
cggcgaacgaacgaagaaag

SEQ ID NO: 534797 - RNA, 18 nt, Human
cuccaaucccaggaaggc

SEQ ID NO: 534798 - RNA, 19 nt, Human
cucgagacuccaaucccag

SEQ ID NO: 534799 - RNA, 24 nt, Human
cuuaaacgcggcgaucaacagccc

SEQ ID NO: 534800 - RNA, 27 nt, Human
gcccccuccaaccccuuccccagccuc

SEQ ID NO: 534801 - RNA, 26 nt, Human
guaaauuucuuaaacauuauccagaa

SEQ ID NO: 534802 - RNA, 23 nt, Human
guacuaauauacacaaaaggcca

SEQ ID NO: 534803 - RNA, 22 nt, Human
uaauauacacaaaaggccaaaa

SEQ ID NO: 534804 - RNA, 18 nt, Human
uacacaaaaggccaaaac

SEQ ID NO: 534805 - RNA, 25 nt, Human
ucaacagcccccuccaaccccuucc

SEQ ID NO: 534806 - RNA, 20 nt, Human
uccagaaaaauaacaagagg

SEQ ID NO: 534807 - RNA, 23 nt, Human
uggaaaaaaaguuaacuuuucau

SEQ ID NO: 534808 - RNA, 23 nt, Human
uucauacuaacaaacagaacaag

SEQ ID NO: 534809 - RNA, 20 nt, Human
uuccccagccucgcagcccc

SEQ ID NO: 534810 - RNA, 23 nt, Human
uuuggaaaaaaaguuaacuuuuc

SEQ ID NO: 534811 - RNA, 23 nt, Human
uuuucauacuaacaaacagaaca

SEQ ID NO: 534812 - RNA, 21 nt, Human
aaaccugcaguccuaccccgg

SEQ ID NO: 534813 - RNA, 18 nt, Human
aacagguucaugugaaac

SEQ ID NO: 534814 - RNA, 20 nt, Human
aauguccacagccuagaaca

SEQ ID NO: 534815 - RNA, 22 nt, Human
accaauguccacagccuagaac

SEQ ID NO: 534816 - RNA, 21 nt, Human
agaaccucuccacaccaaugu

SEQ ID NO: 534817 - RNA, 22 nt, Human
agaaccucuccacaccaauguc

SEQ ID NO: 534818 - RNA, 22 nt, Human
cacaccaauguccacagccuag

SEQ ID NO: 534819 - RNA, 18 nt, Human
uccacaccaauguccaca

SEQ ID NO: 534820 - RNA, 21 nt, Human
ugccuggaugaagcaagaguu

SEQ ID NO: 534821 - RNA, 23 nt, Human
uuacauauuuuuaaaaaauugca

SEQ ID NO: 534822 - RNA, 19 nt, Human
uucacauaaaagagcuuua

SEQ ID NO: 534823 - RNA, 24 nt, Human
aaaaaaaaaaagcguuuuucuggg

SEQ ID NO: 534824 - RNA, 18 nt, Human
aacaacacauacccaccu

SEQ ID NO: 534825 - RNA, 23 nt, Human
acacacacgugcgcgcacacaca

SEQ ID NO: 534826 - RNA, 33 nt, Human
acacauacccaccuacacacacgugcgcgcagu

SEQ ID NO: 534827 - RNA, 24 nt, Human
acauagcacuucuuucuugccucu

SEQ ID NO: 534828 - RNA, 25 nt, Human
acgugcgcgcacacacauacacaca

SEQ ID NO: 534829 - RNA, 22 nt, Human
acuggggaggaugagaccagca

SEQ ID NO: 534830 - RNA, 18 nt, Human
agcugaucuucaaucagc

SEQ ID NO: 534831 - RNA, 23 nt, Human
augacagugggcugggaggccgg

SEQ ID NO: 534832 - RNA, 30 nt, Human
caacacauacccaccuacacacacgugcgg

SEQ ID NO: 534833 - RNA, 21 nt, Human
caccgcugaaaaacucaucuu

SEQ ID NO: 534834 - RNA, 25 nt, Human
ccuccugcaagacccagaugaagaa

SEQ ID NO: 534835 - RNA, 24 nt, Human
ccugccuccugcaagacccagaug

SEQ ID NO: 534836 - RNA, 22 nt, Human
cuagugaccccucugugcuucu

SEQ ID NO: 534837 - RNA, 20 nt, Human
cucagguggaccugccucug

SEQ ID NO: 534838 - RNA, 20 nt, Human
cucucagguggaccugccuc

SEQ ID NO: 534839 - RNA, 18 nt, Human
cuggaggggcugaaggcu

SEQ ID NO: 534840 - RNA, 23 nt, Human
ggaggggcugaaggcuugaagga

SEQ ID NO: 534841 - RNA, 20 nt, Human
uaaaaaaauagacccaaauu

SEQ ID NO: 534842 - RNA, 23 nt, Human
uacaauccauauaaaaaaauaga

SEQ ID NO: 534843 - RNA, 24 nt, Human
uauuaaaaaaaaaaagcguuuuuc

SEQ ID NO: 534844 - RNA, 21 nt, Human
ucaauggucgagaucugagac

SEQ ID NO: 534845 - RNA, 24 nt, Human
ucauucucuucuucagagaccuug

SEQ ID NO: 534846 - RNA, 23 nt, Human
uccugcaagacccagaugaagaa

SEQ ID NO: 534847 - RNA, 21 nt, Human
ucugcuuguggggacaagggu

SEQ ID NO: 534848 - RNA, 18 nt, Human
ucuuucuugccucuuuca

SEQ ID NO: 534849 - RNA, 21 nt, Human
ugaaggcuugaaggaaggugg

SEQ ID NO: 534850 - RNA, 21 nt, Human
ugacagugggcugggaggccg

SEQ ID NO: 534851 - RNA, 27 nt, Human
ugcgcgcacacacauacacacaaggug

SEQ ID NO: 534852 - RNA, 18 nt, Human
uggauugaucuacaaucc

SEQ ID NO: 534853 - RNA, 21 nt, Human
uuaaacaacacauacccaccu

SEQ ID NO: 534854 - RNA, 18 nt, Human
aaggguccuuggagcugg

SEQ ID NO: 534855 - RNA, 21 nt, Human
ccaagagacguuccacucacc

SEQ ID NO: 534856 - RNA, 20 nt, Human
ccacugcuuucaggcccaag

SEQ ID NO: 534857 - RNA, 22 nt, Human
cccaagagacguuccacucacc

SEQ ID NO: 534858 - RNA, 21 nt, Human
uggagcugggcagauggugcc

SEQ ID NO: 534859 - RNA, 23 nt, Human
uggauuccagucuccugguccuc

SEQ ID NO: 534860 - RNA, 23 nt, Human
ugggcagauggugccgggguagc

SEQ ID NO: 534861 - RNA, 22 nt, Human
aaaaaagcagcauaguaaauaa

SEQ ID NO: 534862 - RNA, 22 nt, Human
aaaaacaaggggaaaauauagc

SEQ ID NO: 534863 - RNA, 24 nt, Human
aaaaagcagcauaguaaauaaagc

SEQ ID NO: 534864 - RNA, 21 nt, Human
aaaaauguuaagguucccuca

SEQ ID NO: 534865 - RNA, 23 nt, Human
aaacaacaacaaauuaucugauc

SEQ ID NO: 534866 - RNA, 29 nt, Human
aaacaacaacaaauuaucugaucccuuuc

SEQ ID NO: 534867 - RNA, 19 nt, Human
aaacaaggggaaaauauag

SEQ ID NO: 534868 - RNA, 20 nt, Human
aaaccuuuuaaaaacaaggg

SEQ ID NO: 534869 - RNA, 22 nt, Human
aagcagcauaguaaauaaagcu

SEQ ID NO: 534870 - RNA, 24 nt, Human
aaucacugaugacauaugccugag

SEQ ID NO: 534871 - RNA, 18 nt, Human
aaugauaugaauuauuca

SEQ ID NO: 534872 - RNA, 24 nt, Human
acaauucacauuuugcuaacugaa

SEQ ID NO: 534873 - RNA, 21 nt, Human
agaauauauuuccccaaagaa

SEQ ID NO: 534874 - RNA, 19 nt, Human
agaauccuuaccaccaccu

SEQ ID NO: 534875 - RNA, 21 nt, Human
agauggaugcucuaauaaagg

SEQ ID NO: 534876 - RNA, 23 nt, Human
caaccuccagaaaccuccugagg

SEQ ID NO: 534877 - RNA, 21 nt, Human
caagaguaaagacuguaacaa

SEQ ID NO: 534878 - RNA, 22 nt, Human
cacaaaaaagcagcauaguaaa

SEQ ID NO: 534879 - RNA, 23 nt, Human
caccuguugagaagcaaagaaaa

SEQ ID NO: 534880 - RNA, 21 nt, Human
cacuaaaaaccaaagcauaau

SEQ ID NO: 534881 - RNA, 24 nt, Human
cagcauaguaaauaaagcugaaga

SEQ ID NO: 534882 - RNA, 20 nt, Human
cagucaguuacagagcccua

SEQ ID NO: 534883 - RNA, 19 nt, Human
caucauucaaaugaaaagc

SEQ ID NO: 534884 - RNA, 18 nt, Human
ccaauagguaggcaccug

SEQ ID NO: 534885 - RNA, 23 nt, Human
cccaaggaaaguuggcaaaauac

SEQ ID NO: 534886 - RNA, 24 nt, Human
ccuccagaaaccuccugaggcaaa

SEQ ID NO: 534887 - RNA, 18 nt, Human
ccuccugaggcaaagcca

SEQ ID NO: 534888 - RNA, 24 nt, Human
ccuguccugcugccaacucaaaag

SEQ ID NO: 534889 - RNA, 19 nt, Human
ccuuuagaaucacugauga

SEQ ID NO: 534890 - RNA, 18 nt, Human
gaaggaugcagcuguuuc

SEQ ID NO: 534891 - RNA, 23 nt, Human
gacacacuaauucacuuuaacac

SEQ ID NO: 534892 - RNA, 19 nt, Human
gaggucuccuuucaccaaa

SEQ ID NO: 534893 - RNA, 19 nt, Human
gcaccuguugagaagcaaa

SEQ ID NO: 534894 - RNA, 21 nt, Human
ggcggcccaauagguaggcac

SEQ ID NO: 534895 - RNA, 26 nt, Human
gucuccuuucaccaaaaguuguaucc

SEQ ID NO: 534896 - RNA, 18 nt, Human
guucauacaauucacauu

SEQ ID NO: 534897 - RNA, 19 nt, Human
uaaaaacaaggggaaaaua

SEQ ID NO: 534898 - RNA, 21 nt, Human
uaaaacauaaucuguaaacaa

SEQ ID NO: 534899 - RNA, 21 nt, Human
uaaaaucagugaacuguagaa

SEQ ID NO: 534900 - RNA, 20 nt, Human
uaaauaaagcugaagaggua

SEQ ID NO: 534901 - RNA, 19 nt, Human
uaacugaaaacucaaggua

SEQ ID NO: 534902 - RNA, 18 nt, Human
uaagagcaaaugugugua

SEQ ID NO: 534903 - RNA, 19 nt, Human
uagaaaaugcaaaugccau

SEQ ID NO: 534904 - RNA, 21 nt, Human
uagaaaaugcaaaugccauga

SEQ ID NO: 534905 - RNA, 24 nt, Human
uagaaaaugcaaaugccaugaaga

SEQ ID NO: 534906 - RNA, 18 nt, Human
uauccuaaaagugcgaga

SEQ ID NO: 534907 - RNA, 19 nt, Human
uauuucacagcccuggcug

SEQ ID NO: 534908 - RNA, 23 nt, Human
ucaaccuccagaaaccuccugag

SEQ ID NO: 534909 - RNA, 21 nt, Human
ucauucacuaaaaaccaaagc

SEQ ID NO: 534910 - RNA, 21 nt, Human
ucccuccagcuccuguggccu

SEQ ID NO: 534911 - RNA, 19 nt, Human
ugagaagcaaagaaaacaa

SEQ ID NO: 534912 - RNA, 24 nt, Human
ugaucccuguccugcugccaacuc

SEQ ID NO: 534913 - RNA, 23 nt, Human
ugccagggucaccagauggaugc

SEQ ID NO: 534914 - RNA, 21 nt, Human
ugccugacaaauaaaauaaga

SEQ ID NO: 534915 - RNA, 22 nt, Human
uuccaguacuucuguuguaauu

SEQ ID NO: 534916 - RNA, 27 nt, Human
uuccaguacuucuguuguaauuccuuu

SEQ ID NO: 534917 - RNA, 21 nt, Human
uucuuaauuuuuucauucacu

SEQ ID NO: 534918 - RNA, 21 nt, Human
uuucuaaggaucuuacccacu

SEQ ID NO: 534919 - RNA, 24 nt, Human
uuucuuuuuaucaagaguaaagac

SEQ ID NO: 534920 - RNA, 21 nt, Human
uuugcaaucccuccagcuccu

SEQ ID NO: 534921 - RNA, 21 nt, Human
uuuucauucacuaaaaaccaa

SEQ ID NO: 534922 - RNA, 21 nt, Human
uuuuuugucuuugcuaaguug

SEQ ID NO: 534923 - RNA, 18 nt, Human
uuuuuuuuuuuuuuuuug

SEQ ID NO: 534924 - RNA, 23 nt, Human
uuuuuuuuuuuuuuuuuggagau

SEQ ID NO: 534925 - RNA, 21 nt, Human
aaggucccagcaaaccucccc

SEQ ID NO: 534926 - RNA, 23 nt, Human
acacacacacacacacacacaca

SEQ ID NO: 534927 - RNA, 23 nt, Human
acacacacacacacacacacaca

SEQ ID NO: 534928 - RNA, 23 nt, Human
acacacacacacacacacacaca

SEQ ID NO: 534929 - RNA, 23 nt, Human
acacacacacacacacacacaca

SEQ ID NO: 534930 - RNA, 23 nt, Human
acacacacacacacacacacaca

SEQ ID NO: 534931 - RNA, 23 nt, Human
acacacacacacacacacacaca

SEQ ID NO: 534932 - RNA, 23 nt, Human
acacacacacacacacacacaca

SEQ ID NO: 534933 - RNA, 22 nt, Human
acacugggucccagggcccagc

SEQ ID NO: 534934 - RNA, 19 nt, Human
agccaaggucccagcaaac

SEQ ID NO: 534935 - RNA, 23 nt, Human
agggcccagccccaagggucccc

SEQ ID NO: 534936 - RNA, 19 nt, Human
agggggcucgaagggcugg

SEQ ID NO: 534937 - RNA, 19 nt, Human
agggucccccaccagccac

SEQ ID NO: 534938 - RNA, 20 nt, Human
aucuagacgcagcacugagg

SEQ ID NO: 534939 - RNA, 24 nt, Human
augacaguacagaagagcaugggc

SEQ ID NO: 534940 - RNA, 18 nt, Human
cacacacacacacacaca

SEQ ID NO: 534941 - RNA, 20 nt, Human
cacacacacacacacacaca

SEQ ID NO: 534942 - RNA, 20 nt, Human
cacacacacacacacacaca

SEQ ID NO: 534943 - RNA, 20 nt, Human
cacacacacacacacacaca

SEQ ID NO: 534944 - RNA, 20 nt, Human
cacacacacacacacacaca

SEQ ID NO: 534945 - RNA, 20 nt, Human
cacacacacacacacacaca

SEQ ID NO: 534946 - RNA, 20 nt, Human
cacacacacacacacacaca

SEQ ID NO: 534947 - RNA, 20 nt, Human
cacacacacacacacacaca

SEQ ID NO: 534948 - RNA, 20 nt, Human
cacacacacacacacacaca

SEQ ID NO: 534949 - RNA, 20 nt, Human
cacacacacacacacacaca

SEQ ID NO: 534950 - RNA, 20 nt, Human
cacacacacacacacacaca

SEQ ID NO: 534951 - RNA, 20 nt, Human
cacacacacacacacacaca

SEQ ID NO: 534952 - RNA, 22 nt, Human
cacacacacacacacacacaca

SEQ ID NO: 534953 - RNA, 22 nt, Human
cacacacacacacacacacaca

SEQ ID NO: 534954 - RNA, 22 nt, Human
cacacacacacacacacacaca

SEQ ID NO: 534955 - RNA, 22 nt, Human
cacacacacacacacacacaca

SEQ ID NO: 534956 - RNA, 26 nt, Human
cacacacacacacacacacacacaca

SEQ ID NO: 534957 - RNA, 26 nt, Human
cacacacacacacacacacacacaca

SEQ ID NO: 534958 - RNA, 26 nt, Human
cacacacacacacacacacacacaca

SEQ ID NO: 534959 - RNA, 26 nt, Human
cacacacacacacacacacacacaca

SEQ ID NO: 534960 - RNA, 28 nt, Human
cacacacacacacacacacacacaggca

SEQ ID NO: 534961 - RNA, 26 nt, Human
cacacacacacacacacaggcagcca

SEQ ID NO: 534962 - RNA, 22 nt, Human
cacacacacacacaggcagcca

SEQ ID NO: 534963 - RNA, 24 nt, Human
cacacugggucccagggcccagcc

SEQ ID NO: 534964 - RNA, 23 nt, Human
cacugggucccagggcccagccc

SEQ ID NO: 534965 - RNA, 22 nt, Human
cagcaaaccuccccugcagaau

SEQ ID NO: 534966 - RNA, 20 nt, Human
cagccacaccccucuagcgg

SEQ ID NO: 534967 - RNA, 18 nt, Human
caguacagaagagcaugg

SEQ ID NO: 534968 - RNA, 21 nt, Human
caugggcugcgcuacccccuc

SEQ ID NO: 534969 - RNA, 22 nt, Human
cccagccccaagggucccccac

SEQ ID NO: 534970 - RNA, 19 nt, Human
ccccaccagccacaccccu

SEQ ID NO: 534971 - RNA, 20 nt, Human
ccccaccagccacaccccuc

SEQ ID NO: 534972 - RNA, 21 nt, Human
ccccaccagccacaccccucu

SEQ ID NO: 534973 - RNA, 23 nt, Human
ccccgcggcguccgcgacuccgg

SEQ ID NO: 534974 - RNA, 19 nt, Human
ccccucagcugacagggcu

SEQ ID NO: 534975 - RNA, 19 nt, Human
ccucagcugacagggcugu

SEQ ID NO: 534976 - RNA, 18 nt, Human
ccucugcgaccgcagcuc

SEQ ID NO: 534977 - RNA, 21 nt, Human
cgacuccggcuccgucggccu

SEQ ID NO: 534978 - RNA, 25 nt, Human
cgcacacacacacacacacacacac

SEQ ID NO: 534979 - RNA, 25 nt, Human
cgcgcacacacacacacacacacac

SEQ ID NO: 534980 - RNA, 18 nt, Human
cgcgcgcgcgcgcgcgca

SEQ ID NO: 534981 - RNA, 24 nt, Human
cgcgcgcgcgcgcgcgcgcacaca

SEQ ID NO: 534982 - RNA, 24 nt, Human
cgcgcgcgcgcgcgcgcgcgcaca

SEQ ID NO: 534983 - RNA, 24 nt, Human
cgcgcgcgcgcgcgcgcgcgcgcg

SEQ ID NO: 534984 - RNA, 23 nt, Human
cggccucugcgaccgcagcuccc

SEQ ID NO: 534985 - RNA, 19 nt, Human
cggcuccgucggccucugc

SEQ ID NO: 534986 - RNA, 20 nt, Human
cugcgaccgcagcucccggg

SEQ ID NO: 534987 - RNA, 21 nt, Human
gagccaaggucccagcaaacc

SEQ ID NO: 534988 - RNA, 23 nt, Human
gcgcgcacacacacacacacaca

SEQ ID NO: 534989 - RNA, 21 nt, Human
gcgcgcgcgcgcgcgcgcgcg

SEQ ID NO: 534990 - RNA, 23 nt, Human
gcgcgcgcgcgcgcgcgcgcgca

SEQ ID NO: 534991 - RNA, 20 nt, Human
gcggcguccgcgacuccggc

SEQ ID NO: 534992 - RNA, 20 nt, Human
ggagggggcucgaagggcug

SEQ ID NO: 534993 - RNA, 18 nt, Human
ggcuggggcaggcucugg

SEQ ID NO: 534994 - RNA, 21 nt, Human
gggagggggcucgaagggcug

SEQ ID NO: 534995 - RNA, 22 nt, Human
gggcuggggcaggcucugggag

SEQ ID NO: 534996 - RNA, 23 nt, Human
ggggagggggcucgaagggcugg

SEQ ID NO: 534997 - RNA, 19 nt, Human
ucccagcaaaccuccccug

SEQ ID NO: 534998 - RNA, 20 nt, Human
uccgucggccucugcgaccg

SEQ ID NO: 534999 - RNA, 22 nt, Human
uccgucggccucugcgaccgca

SEQ ID NO: 535000 - RNA, 24 nt, Human
uccgucggccucugcgaccgcagc

SEQ ID NO: 535001 - RNA, 22 nt, Human
uccugucccggagaccccgcgg

SEQ ID NO: 535002 - RNA, 18 nt, Human
ucggccucugcgaccgca

SEQ ID NO: 535003 - RNA, 23 nt, Human
uggagccaaggucccagcaaacc

SEQ ID NO: 535004 - RNA, 19 nt, Human
uggggagggggcucgaagg

SEQ ID NO: 535005 - RNA, 24 nt, Human
uggggagggggcucgaagggcugg

SEQ ID NO: 535006 - RNA, 20 nt, Human
uuggggagggggcucgaagg

SEQ ID NO: 535007 - RNA, 19 nt, Human
uuuuuuuuuuuggaggaug

SEQ ID NO: 535008 - RNA, 19 nt, Human
uuuuuuuuuuuuuuuuugg

SEQ ID NO: 535009 - RNA, 23 nt, Human
aaacacauguaugugcuguucuc

SEQ ID NO: 535010 - RNA, 20 nt, Human
aaacucgacaagugcuucuc

SEQ ID NO: 535011 - RNA, 24 nt, Human
aaagaccacccaucuugacccucc

SEQ ID NO: 535012 - RNA, 24 nt, Human
aaagugcugggauuacaggcguga

SEQ ID NO: 535013 - RNA, 20 nt, Human
aacacacacacacacagcca

SEQ ID NO: 535014 - RNA, 24 nt, Human
aagaccaggaggagcggaaggcag

SEQ ID NO: 535015 - RNA, 25 nt, Human
aagcgauccucccgccucagccucu

SEQ ID NO: 535016 - RNA, 21 nt, Human
aagcucuguuuuccgcuucuc

SEQ ID NO: 535017 - RNA, 22 nt, Human
aaggcugggagcugcugccuca

SEQ ID NO: 535018 - RNA, 19 nt, Human
aagugcugggauuacaggc

SEQ ID NO: 535019 - RNA, 19 nt, Human
aagugcugggauuacaggc

SEQ ID NO: 535020 - RNA, 18 nt, Human
acaaaacaguacuuacaa

SEQ ID NO: 535021 - RNA, 21 nt, Human
acaaaacaguacuuacaaggg

SEQ ID NO: 535022 - RNA, 22 nt, Human
acaagggugcugcuggaaucac

SEQ ID NO: 535023 - RNA, 23 nt, Human
acaccacuucagacucccagccu

SEQ ID NO: 535024 - RNA, 19 nt, Human
acacuuguccuggucuuac

SEQ ID NO: 535025 - RNA, 20 nt, Human
acauguaugugcuguucucg

SEQ ID NO: 535026 - RNA, 19 nt, Human
accaggccaucauuguucu

SEQ ID NO: 535027 - RNA, 24 nt, Human
acuccuagucucaagcgauucuuc

SEQ ID NO: 535028 - RNA, 19 nt, Human
acugcagccucaaacuccu

SEQ ID NO: 535029 - RNA, 24 nt, Human
acugcagccucaaacuccuagucu

SEQ ID NO: 535030 - RNA, 19 nt, Human
acuuagugcugaguugcag

SEQ ID NO: 535031 - RNA, 23 nt, Human
agagcaaaagguacuccucaaaa

SEQ ID NO: 535032 - RNA, 18 nt, Human
agagggagcugcccuuuc

SEQ ID NO: 535033 - RNA, 23 nt, Human
agagguuggagcuggggaaagca

SEQ ID NO: 535034 - RNA, 22 nt, Human
agaguugauucuggucaccagc

SEQ ID NO: 535035 - RNA, 18 nt, Human
aggaaugcuggcaccucu

SEQ ID NO: 535036 - RNA, 23 nt, Human
aggauuacuggugugugccacca

SEQ ID NO: 535037 - RNA, 23 nt, Human
agggacugugagccccaggaggg

SEQ ID NO: 535038 - RNA, 22 nt, Human
agggagcugcccuuucucuccu

SEQ ID NO: 535039 - RNA, 23 nt, Human
aggggcugcaaggugggcagggg

SEQ ID NO: 535040 - RNA, 20 nt, Human
agugucuuccacgugggggu

SEQ ID NO: 535041 - RNA, 19 nt, Human
augacaccaacuuagggug

SEQ ID NO: 535042 - RNA, 19 nt, Human
augacccucaccagguuuu

SEQ ID NO: 535043 - RNA, 21 nt, Human
auggagcgcuccccucgcccc

SEQ ID NO: 535044 - RNA, 27 nt, Human
augucgccacauuccagguuguccagu

SEQ ID NO: 535045 - RNA, 22 nt, Human
caaaaaccucuccccacugacu

SEQ ID NO: 535046 - RNA, 21 nt, Human
caaagugcugggauuacaggc

SEQ ID NO: 535047 - RNA, 25 nt, Human
caaccauauuaacucccucaccauc

SEQ ID NO: 535048 - RNA, 23 nt, Human
caacuuagggugaauccuggcuu

SEQ ID NO: 535049 - RNA, 22 nt, Human
caagaaagcuacagccugccac

SEQ ID NO: 535050 - RNA, 24 nt, Human
cacaccacuucagacucccagccu

SEQ ID NO: 535051 - RNA, 19 nt, Human
cacacucuucucucccucc

SEQ ID NO: 535052 - RNA, 22 nt, Human
cacagccaacccccucuccuuu

SEQ ID NO: 535053 - RNA, 20 nt, Human
cacauggguucugggaaaug

SEQ ID NO: 535054 - RNA, 18 nt, Human
cacccugugcauuuggca

SEQ ID NO: 535055 - RNA, 23 nt, Human
caccgcacuggcucaucccccug

SEQ ID NO: 535056 - RNA, 19 nt, Human
cacguuuucccugaugaua

SEQ ID NO: 535057 - RNA, 20 nt, Human
cacucccaacagcccucagc

SEQ ID NO: 535058 - RNA, 22 nt, Human
cacucuguugcccaggcuggag

SEQ ID NO: 535059 - RNA, 20 nt, Human
cacugacuuccaggauaggg

SEQ ID NO: 535060 - RNA, 20 nt, Human
cacuuggcccagccacagca

SEQ ID NO: 535061 - RNA, 24 nt, Human
cagaagaaugagcucaccucucau

SEQ ID NO: 535062 - RNA, 20 nt, Human
cagagcaaaagguacuccuc

SEQ ID NO: 535063 - RNA, 24 nt, Human
cagcacagagcaaaagguacuccu

SEQ ID NO: 535064 - RNA, 24 nt, Human
cagcagcauccgaugagguucaau

SEQ ID NO: 535065 - RNA, 20 nt, Human
cagcauaaagaccacccauc

SEQ ID NO: 535066 - RNA, 24 nt, Human
cagccucaaacuccuagucucaag

SEQ ID NO: 535067 - RNA, 21 nt, Human
cagccucccgcgcaugggcag

SEQ ID NO: 535068 - RNA, 25 nt, Human
cagcugcaucgccagauucuggcac

SEQ ID NO: 535069 - RNA, 20 nt, Human
caggaacacuuguccugguc

SEQ ID NO: 535070 - RNA, 20 nt, Human
caggagccacagcaauggag

SEQ ID NO: 535071 - RNA, 24 nt, Human
caggccuucuggcccucuuuuagg

SEQ ID NO: 535072 - RNA, 22 nt, Human
cagggaaaucagggaaagacca

SEQ ID NO: 535073 - RNA, 24 nt, Human
cagguaggacagauuguugcccuc

SEQ ID NO: 535074 - RNA, 23 nt, Human
caguaauacaaguaggauggcac

SEQ ID NO: 535075 - RNA, 19 nt, Human
caucaccuccagggaaaca

SEQ ID NO: 535076 - RNA, 21 nt, Human
caugcugcagccucccgcgca

SEQ ID NO: 535077 - RNA, 23 nt, Human
cauuguucugagggucgggaaac

SEQ ID NO: 535078 - RNA, 22 nt, Human
ccaacacacacacacacagcca

SEQ ID NO: 535079 - RNA, 23 nt, Human
ccaacacacacacacacagccaa

SEQ ID NO: 535080 - RNA, 19 nt, Human
ccacagggcugcugcuagc

SEQ ID NO: 535081 - RNA, 20 nt, Human
ccaccacaccuggcuaauuu

SEQ ID NO: 535082 - RNA, 19 nt, Human
ccagcccuccucagcuucu

SEQ ID NO: 535083 - RNA, 21 nt, Human
ccaggugaucccaccuguacc

SEQ ID NO: 535084 - RNA, 20 nt, Human
ccccagacuggguguucucc

SEQ ID NO: 535085 - RNA, 21 nt, Human
cccccagcucacuccaugugc

SEQ ID NO: 535086 - RNA, 22 nt, Human
ccccucuccuuuggguuuccca

SEQ ID NO: 535087 - RNA, 20 nt, Human
ccccugccaucacacucuuc

SEQ ID NO: 535088 - RNA, 25 nt, Human
ccccuguaccuggccaggaaugcug

SEQ ID NO: 535089 - RNA, 22 nt, Human
ccccuuaccugccugcccaaca

SEQ ID NO: 535090 - RNA, 29 nt, Human
cccugccaucacacucuucucucccuccc

SEQ ID NO: 535091 - RNA, 22 nt, Human
cccugggaacgcacacaaaaca

SEQ ID NO: 535092 - RNA, 20 nt, Human
cccugggccuuccucgacuc

SEQ ID NO: 535093 - RNA, 22 nt, Human
ccuauguugcccaggcuggucu

SEQ ID NO: 535094 - RNA, 22 nt, Human
ccuauguugcccaggcuggucu

SEQ ID NO: 535095 - RNA, 21 nt, Human
ccuccagcccugacucugccc

SEQ ID NO: 535096 - RNA, 22 nt, Human
ccucuagaacuuaguccccguc

SEQ ID NO: 535097 - RNA, 21 nt, Human
ccugccugcccaacacacaca

SEQ ID NO: 535098 - RNA, 18 nt, Human
ccuggcugcuugcccucc

SEQ ID NO: 535099 - RNA, 23 nt, Human
ccuucagcauaaagaccacccau

SEQ ID NO: 535100 - RNA, 23 nt, Human
ccuucuggcccucuuuuagggaa

SEQ ID NO: 535101 - RNA, 20 nt, Human
ccuuggcucaagcgauccuc

SEQ ID NO: 535102 - RNA, 19 nt, Human
cgacucccugccccugccc

SEQ ID NO: 535103 - RNA, 24 nt, Human
cgccucagccucucaaagugcugg

SEQ ID NO: 535104 - RNA, 22 nt, Human
cgggacaagcccaggggcucug

SEQ ID NO: 535105 - RNA, 20 nt, Human
cucaagcgauccucccgccu

SEQ ID NO: 535106 - RNA, 24 nt, Human
cucaagcgauccucccgccucagc

SEQ ID NO: 535107 - RNA, 24 nt, Human
cucaagcgauucuucuaccucggc

SEQ ID NO: 535108 - RNA, 22 nt, Human
cucacaagcuccgaacccuggg

SEQ ID NO: 535109 - RNA, 23 nt, Human
cucacucccaacagcccucagca

SEQ ID NO: 535110 - RNA, 24 nt, Human
cuccagcugggccugcaucagguu

SEQ ID NO: 535111 - RNA, 28 nt, Human
cuccaggggcugcaagguggggcaaauc

SEQ ID NO: 535112 - RNA, 22 nt, Human
cuccuuggcucaagcgauccuc

SEQ ID NO: 535113 - RNA, 24 nt, Human
cucggccccugccaucacacucuu

SEQ ID NO: 535114 - RNA, 20 nt, Human
cugaggugucacuugacgug

SEQ ID NO: 535115 - RNA, 18 nt, Human
cugcaggcugcaaugcgg

SEQ ID NO: 535116 - RNA, 23 nt, Human
cuggcacuugugcccagggccca

SEQ ID NO: 535117 - RNA, 20 nt, Human
cuggcccuuggcucucucca

SEQ ID NO: 535118 - RNA, 21 nt, Human
cuggcucaucccccuguaccu

SEQ ID NO: 535119 - RNA, 19 nt, Human
cugggagccuacugcaaac

SEQ ID NO: 535120 - RNA, 18 nt, Human
cugggagcugcugccuca

SEQ ID NO: 535121 - RNA, 19 nt, Human
cugugagguggcccuggga

SEQ ID NO: 535122 - RNA, 27 nt, Human
cuguuaauauugcuccugggaugacac

SEQ ID NO: 535123 - RNA, 23 nt, Human
cuuagugcugaguugcagccucc

SEQ ID NO: 535124 - RNA, 22 nt, Human
cuuugccuuuagaguacccgga

SEQ ID NO: 535125 - RNA, 18 nt, Human
gaacccugggccuuccuc

SEQ ID NO: 535126 - RNA, 22 nt, Human
gaacugaccccucugcucucuc

SEQ ID NO: 535127 - RNA, 20 nt, Human
gacacucaggucucuaccuc

SEQ ID NO: 535128 - RNA, 18 nt, Human
gacagugcaggauggcug

SEQ ID NO: 535129 - RNA, 18 nt, Human
gacggcgggagacagacu

SEQ ID NO: 535130 - RNA, 27 nt, Human
gacucccugccccugccccacaccucc

SEQ ID NO: 535131 - RNA, 23 nt, Human
gagauggggucucccuauguugc

SEQ ID NO: 535132 - RNA, 22 nt, Human
gaggcccucaguaggagcgggc

SEQ ID NO: 535133 - RNA, 20 nt, Human
gagggcaggaccacagggcu

SEQ ID NO: 535134 - RNA, 20 nt, Human
gagguuccuccgagccacac

SEQ ID NO: 535135 - RNA, 22 nt, Human
gagugccccacucccaucugcu

SEQ ID NO: 535136 - RNA, 18 nt, Human
gauuacaggcgugagcca

SEQ ID NO: 535137 - RNA, 21 nt, Human
gauuacaggcgugagccacug

SEQ ID NO: 535138 - RNA, 22 nt, Human
gauuacaggcgugagccacugc

SEQ ID NO: 535139 - RNA, 24 nt, Human
gcaaccagcuccucuaaucacaga

SEQ ID NO: 535140 - RNA, 20 nt, Human
gcccagccacagcagcaucc

SEQ ID NO: 535141 - RNA, 24 nt, Human
gcccaggcuggagugcaauggcau

SEQ ID NO: 535142 - RNA, 22 nt, Human
gccccgaguuaagcaaaggccc

SEQ ID NO: 535143 - RNA, 24 nt, Human
gccccuggcacugugcgcugcuuc

SEQ ID NO: 535144 - RNA, 22 nt, Human
gcccuuggcucucuccaccgca

SEQ ID NO: 535145 - RNA, 22 nt, Human
gccuuaccuccagcugcuccac

SEQ ID NO: 535146 - RNA, 24 nt, Human
gcgauccucccgccucagccucuc

SEQ ID NO: 535147 - RNA, 21 nt, Human
gcgccugcucguccuccagcu

SEQ ID NO: 535148 - RNA, 18 nt, Human
gcugcuugcccuccuugg

SEQ ID NO: 535149 - RNA, 25 nt, Human
gcuggagcacagcaguuugccccag

SEQ ID NO: 535150 - RNA, 19 nt, Human
gcuggggcuggugcuaugu

SEQ ID NO: 535151 - RNA, 25 nt, Human
ggaaagcagcagaguuuuacacaac

SEQ ID NO: 535152 - RNA, 24 nt, Human
ggaagaaugguguuggggaucgcg

SEQ ID NO: 535153 - RNA, 22 nt, Human
ggagcacagcaguuugccccau

SEQ ID NO: 535154 - RNA, 23 nt, Human
ggcaggcugggguucccggggcc

SEQ ID NO: 535155 - RNA, 21 nt, Human
ggcagggguggaaucuauagg

SEQ ID NO: 535156 - RNA, 20 nt, Human
ggccaugcuccgauguuggc

SEQ ID NO: 535157 - RNA, 21 nt, Human
ggcccggcgcgucccugaugc

SEQ ID NO: 535158 - RNA, 19 nt, Human
ggcccgggaggagcaggcc

SEQ ID NO: 535159 - RNA, 21 nt, Human
ggccugagccucugauggccu

SEQ ID NO: 535160 - RNA, 25 nt, Human
ggccuucuggcccucuuuuagggaa

SEQ ID NO: 535161 - RNA, 23 nt, Human
ggcugcaaggugggcaggggugg

SEQ ID NO: 535162 - RNA, 18 nt, Human
ggcuggucuugaacuccu

SEQ ID NO: 535163 - RNA, 20 nt, Human
gggaaggaggacaacaggac

SEQ ID NO: 535164 - RNA, 18 nt, Human
gggacaguguguggaaga

SEQ ID NO: 535165 - RNA, 22 nt, Human
gggucucccuauguugcccagg

SEQ ID NO: 535166 - RNA, 23 nt, Human
ggucaguauucccagcuccagca

SEQ ID NO: 535167 - RNA, 20 nt, Human
ggugaauccuggcuuggccu

SEQ ID NO: 535168 - RNA, 18 nt, Human
guagagauggggucuccc

SEQ ID NO: 535169 - RNA, 18 nt, Human
guccagaggccgggacaa

SEQ ID NO: 535170 - RNA, 21 nt, Human
guccuuguaggucucaaggag

SEQ ID NO: 535171 - RNA, 22 nt, Human
gugccugaaaaggcugggagcu

SEQ ID NO: 535172 - RNA, 19 nt, Human
guuaacaugcauauuuaga

SEQ ID NO: 535173 - RNA, 23 nt, Human
uaagcaaaggcccgggaggagca

SEQ ID NO: 535174 - RNA, 25 nt, Human
uaagcaaaggcccgggaggagcagg

SEQ ID NO: 535175 - RNA, 18 nt, Human
uacaacuugucucccuga

SEQ ID NO: 535176 - RNA, 20 nt, Human
uacaggcgugagccacugcu

SEQ ID NO: 535177 - RNA, 24 nt, Human
uacaggcgugagccacugcuccca

SEQ ID NO: 535178 - RNA, 18 nt, Human
uaccuccagcccugacuc

SEQ ID NO: 535179 - RNA, 21 nt, Human
uaccucggccuugugaguagc

SEQ ID NO: 535180 - RNA, 24 nt, Human
uacuggugugugccaccacaccug

SEQ ID NO: 535181 - RNA, 22 nt, Human
uagaacuuaguccccguccccc

SEQ ID NO: 535182 - RNA, 19 nt, Human
uagauguccagcacagagc

SEQ ID NO: 535183 - RNA, 23 nt, Human
uagccaggauuacuggugugugc

SEQ ID NO: 535184 - RNA, 18 nt, Human
uagggcuggucacgaggg

SEQ ID NO: 535185 - RNA, 18 nt, Human
uaggugcuaucacuuggc

SEQ ID NO: 535186 - RNA, 19 nt, Human
uagugucuuccacgugggg

SEQ ID NO: 535187 - RNA, 24 nt, Human
uaguucacugcagccucaaacucc

SEQ ID NO: 535188 - RNA, 20 nt, Human
uauguugcccaggcuggucu

SEQ ID NO: 535189 - RNA, 23 nt, Human
uauguugcccaggcuggucuuga

SEQ ID NO: 535190 - RNA, 24 nt, Human
uauguugcccaggcuggucuugaa

SEQ ID NO: 535191 - RNA, 22 nt, Human
ucaaaaaccucuccccacugac

SEQ ID NO: 535192 - RNA, 22 nt, Human
ucaaagugcugggauuacaggc

SEQ ID NO: 535193 - RNA, 24 nt, Human
ucaaagugcugggauuacaggcgu

SEQ ID NO: 535194 - RNA, 19 nt, Human
ucaacggaguggccuccuc

SEQ ID NO: 535195 - RNA, 21 nt, Human
ucacagauaacagauccagaa

SEQ ID NO: 535196 - RNA, 20 nt, Human
ucacgcagaugaugacaaac

SEQ ID NO: 535197 - RNA, 20 nt, Human
ucacuacuuagugcugaguu

SEQ ID NO: 535198 - RNA, 21 nt, Human
ucacucuguugcccaggcugg

SEQ ID NO: 535199 - RNA, 22 nt, Human
ucacucuguugcccaggcugga

SEQ ID NO: 535200 - RNA, 23 nt, Human
ucacucuguugcccaggcuggag

SEQ ID NO: 535201 - RNA, 24 nt, Human
ucacucuguugcccaggcuggagu

SEQ ID NO: 535202 - RNA, 20 nt, Human
ucacugcagccucaaacucc

SEQ ID NO: 535203 - RNA, 20 nt, Human
ucagacccuguggaacauuc

SEQ ID NO: 535204 - RNA, 18 nt, Human
ucagcaggccuucuggcc

SEQ ID NO: 535205 - RNA, 21 nt, Human
ucauaugagaacaaucaugcu

SEQ ID NO: 535206 - RNA, 23 nt, Human
ucauuuuccacaagaaucacuuc

SEQ ID NO: 535207 - RNA, 24 nt, Human
uccaaccauauuaacucccucacc

SEQ ID NO: 535208 - RNA, 20 nt, Human
uccacaagaaucacuuccaa

SEQ ID NO: 535209 - RNA, 20 nt, Human
uccaccgcacuggcucaucc

SEQ ID NO: 535210 - RNA, 21 nt, Human
uccccaagugggggugcgcuu

SEQ ID NO: 535211 - RNA, 20 nt, Human
uccgcaagcuuuuucugacc

SEQ ID NO: 535212 - RNA, 21 nt, Human
uccgugccugaaaaggcuggg

SEQ ID NO: 535213 - RNA, 21 nt, Human
uccuagucucaagcgauucuu

SEQ ID NO: 535214 - RNA, 19 nt, Human
uccucaaaauuuagcaacc

SEQ ID NO: 535215 - RNA, 18 nt, Human
uccucgacucccugcccc

SEQ ID NO: 535216 - RNA, 24 nt, Human
uccuuggcucaagcgauccucccg

SEQ ID NO: 535217 - RNA, 23 nt, Human
uccuuguaggucucaaggagcuc

SEQ ID NO: 535218 - RNA, 22 nt, Human
ucuacuuuuggaaguuuuucca

SEQ ID NO: 535219 - RNA, 24 nt, Human
ucucaaagugcugggauuacaggc

SEQ ID NO: 535220 - RNA, 19 nt, Human
ucuccaggccugccacucu

SEQ ID NO: 535221 - RNA, 22 nt, Human
ucuccagggugcugauagagau

SEQ ID NO: 535222 - RNA, 23 nt, Human
ucucccuauguugcccaggcugg

SEQ ID NO: 535223 - RNA, 24 nt, Human
ucucccuauguugcccaggcuggu

SEQ ID NO: 535224 - RNA, 19 nt, Human
ucuccuaguugugggcagg

SEQ ID NO: 535225 - RNA, 18 nt, Human
ucucucccuccugcaugg

SEQ ID NO: 535226 - RNA, 20 nt, Human
ucugcagugccugugcucuc

SEQ ID NO: 535227 - RNA, 23 nt, Human
ucugccaugccgccucugccaug

SEQ ID NO: 535228 - RNA, 24 nt, Human
ucuguugcccaggcuggagugcaa

SEQ ID NO: 535229 - RNA, 23 nt, Human
ucuugaacuccuuggcucaagcg

SEQ ID NO: 535230 - RNA, 18 nt, Human
ugaccagggaacgggagu

SEQ ID NO: 535231 - RNA, 19 nt, Human
ugagccccaggagggcagg

SEQ ID NO: 535232 - RNA, 21 nt, Human
ugagggacugugagccccagg

SEQ ID NO: 535233 - RNA, 25 nt, Human
ugagguggcccugggacagugugug

SEQ ID NO: 535234 - RNA, 19 nt, Human
ugagguuaaaugagucacu

SEQ ID NO: 535235 - RNA, 22 nt, Human
ugaugagcaagaaagcuacagc

SEQ ID NO: 535236 - RNA, 23 nt, Human
ugaugagcaagaaagcuacagcc

SEQ ID NO: 535237 - RNA, 18 nt, Human
ugcccaggcuggagugca

SEQ ID NO: 535238 - RNA, 21 nt, Human
ugcccaggcuggagugcaaug

SEQ ID NO: 535239 - RNA, 24 nt, Human
ugcccaggcuggagugcaauggca

SEQ ID NO: 535240 - RNA, 24 nt, Human
ugcccaggcuggucuugaacuccu

SEQ ID NO: 535241 - RNA, 23 nt, Human
ugcccuccuugggccuccucaac

SEQ ID NO: 535242 - RNA, 20 nt, Human
ugccugaaaaggcugggagc

SEQ ID NO: 535243 - RNA, 21 nt, Human
ugcgccugcucguccuccagc

SEQ ID NO: 535244 - RNA, 23 nt, Human
ugcuagcuggagcacagcaguuu

SEQ ID NO: 535245 - RNA, 24 nt, Human
ugcugggauuacaggcgugagcca

SEQ ID NO: 535246 - RNA, 21 nt, Human
uggaagaggccuggccccugg

SEQ ID NO: 535247 - RNA, 25 nt, Human
uggaagaugugaucuccaggccucc

SEQ ID NO: 535248 - RNA, 23 nt, Human
uggagugcaauggcaucuucuua

SEQ ID NO: 535249 - RNA, 22 nt, Human
uggcaggcugggguucccggga

SEQ ID NO: 535250 - RNA, 24 nt, Human
uggccugguucccucuggagcuca

SEQ ID NO: 535251 - RNA, 21 nt, Human
uggcguuguggugagguuaaa

SEQ ID NO: 535252 - RNA, 21 nt, Human
uggcugacauucaucuagucu

SEQ ID NO: 535253 - RNA, 21 nt, Human
ugggaugacaccaacuuaggg

SEQ ID NO: 535254 - RNA, 19 nt, Human
ugggauuacaggcgugagc

SEQ ID NO: 535255 - RNA, 22 nt, Human
ugggauuacaggcgugagccac

SEQ ID NO: 535256 - RNA, 22 nt, Human
ugggauuacaggcgugagccac

SEQ ID NO: 535257 - RNA, 23 nt, Human
ugggauuacaggcgugagccacu

SEQ ID NO: 535258 - RNA, 24 nt, Human
ugggauuacaggcgugagccacug

SEQ ID NO: 535259 - RNA, 24 nt, Human
uggggaaggucaucacagaaagga

SEQ ID NO: 535260 - RNA, 24 nt, Human
ugggggaagaaugguguuggggau

SEQ ID NO: 535261 - RNA, 24 nt, Human
uggggucucccuauguugcccagg

SEQ ID NO: 535262 - RNA, 24 nt, Human
uggguuaacugcuucucacccugu

SEQ ID NO: 535263 - RNA, 20 nt, Human
uggguucugggaaauguuug

SEQ ID NO: 535264 - RNA, 24 nt, Human
uggugugugccaccacaccuggcu

SEQ ID NO: 535265 - RNA, 22 nt, Human
uguagagauggggucucccuau

SEQ ID NO: 535266 - RNA, 24 nt, Human
uguagagauggggucucccuaugu

SEQ ID NO: 535267 - RNA, 19 nt, Human
ugugaaagccaugaggucu

SEQ ID NO: 535268 - RNA, 18 nt, Human
ugugcgcugcuucugcag

SEQ ID NO: 535269 - RNA, 21 nt, Human
uguggaagaggccuggccccu

SEQ ID NO: 535270 - RNA, 21 nt, Human
uguuaaagaacacaguuaaca

SEQ ID NO: 535271 - RNA, 20 nt, Human
uguucugagggucgggaaac

SEQ ID NO: 535272 - RNA, 20 nt, Human
uguugcccaggcuggagugc

SEQ ID NO: 535273 - RNA, 21 nt, Human
uuaccagagguuccuccgagc

SEQ ID NO: 535274 - RNA, 19 nt, Human
uucaaacacauguaugugc

SEQ ID NO: 535275 - RNA, 20 nt, Human
uucaggccauacucaaaaau

SEQ ID NO: 535276 - RNA, 22 nt, Human
uuccagguuguccaguucgcuc

SEQ ID NO: 535277 - RNA, 18 nt, Human
uucuccuggcuggggcug

SEQ ID NO: 535278 - RNA, 24 nt, Human
uucuucaucuggaaaacuagacag

SEQ ID NO: 535279 - RNA, 20 nt, Human
uugaaaagcaugauugcgcu

SEQ ID NO: 535280 - RNA, 26 nt, Human
uugcaaggugccugacagagaggagg

SEQ ID NO: 535281 - RNA, 18 nt, Human
uugcccaggcuggagugc

SEQ ID NO: 535282 - RNA, 24 nt, Human
uuggcaccacuuguugccucuaca

SEQ ID NO: 535283 - RNA, 20 nt, Human
uuguggugagguuaaaugag

SEQ ID NO: 535284 - RNA, 22 nt, Human
uuuagggaaggaggacaacagg

SEQ ID NO: 535285 - RNA, 22 nt, Human
uuucacucuguugcccaggcug

SEQ ID NO: 535286 - RNA, 24 nt, Human
uuucacucuguugcccaggcugga

SEQ ID NO: 535287 - RNA, 24 nt, Human
uuuucacucuguugcccaggcugg

SEQ ID NO: 535288 - RNA, 23 nt, Human
aaaugcagguuccugggccccac

SEQ ID NO: 535289 - RNA, 24 nt, Human
acuccccaguuaauucugagaauc

SEQ ID NO: 535290 - RNA, 22 nt, Human
aggaaacucguaauagcagcug

SEQ ID NO: 535291 - RNA, 20 nt, Human
caacccagaacaagucaugg

SEQ ID NO: 535292 - RNA, 20 nt, Human
cagguuccugggccccaccc

SEQ ID NO: 535293 - RNA, 21 nt, Human
caugcaugcuuuaugugcaau

SEQ ID NO: 535294 - RNA, 21 nt, Human
cauuaaaaauaaaacucccca

SEQ ID NO: 535295 - RNA, 21 nt, Human
ccagaacaagucaugggacau

SEQ ID NO: 535296 - RNA, 22 nt, Human
cccacccuagaucuccugaauc

SEQ ID NO: 535297 - RNA, 24 nt, Human
ccugggccccacccuagaucuccu

SEQ ID NO: 535298 - RNA, 20 nt, Human
cuccugaaucagauagggaa

SEQ ID NO: 535299 - RNA, 24 nt, Human
cucuuccugggugcauguacugcc

SEQ ID NO: 535300 - RNA, 22 nt, Human
gugcaugcaugcuuuaugugca

SEQ ID NO: 535301 - RNA, 19 nt, Human
uccugggugcauguacugc

SEQ ID NO: 535302 - RNA, 20 nt, Human
ugaguaucuugggaagggcg

SEQ ID NO: 535303 - RNA, 19 nt, Human
ugggaaccugcaauguaac

SEQ ID NO: 535304 - RNA, 24 nt, Human
uuaaaaauaaaacuccccaguuaa

SEQ ID NO: 535305 - RNA, 24 nt, Human
uugaaaaugcagguuccugggccc

SEQ ID NO: 535306 - RNA, 23 nt, Human
aaaaaaaaaaaauacaacacaga

SEQ ID NO: 535307 - RNA, 24 nt, Human
aaaaacaccagaauacuagaguau

SEQ ID NO: 535308 - RNA, 20 nt, Human
aaaaagccacuacacccucc

SEQ ID NO: 535309 - RNA, 24 nt, Human
aaaaagccacuacacccuccacca

SEQ ID NO: 535310 - RNA, 22 nt, Human
aaaacaccagaauacuagagua

SEQ ID NO: 535311 - RNA, 18 nt, Human
aagaagcgagguggggag

SEQ ID NO: 535312 - RNA, 19 nt, Human
aaggcuucuuggauagaug

SEQ ID NO: 535313 - RNA, 22 nt, Human
aaguuagaaaaaucuaaaacac

SEQ ID NO: 535314 - RNA, 20 nt, Human
acacagacaacauaaggaca

SEQ ID NO: 535315 - RNA, 22 nt, Human
acuuacaagaggaagagaggga

SEQ ID NO: 535316 - RNA, 24 nt, Human
agaaaaauaaacaaacuaagcaca

SEQ ID NO: 535317 - RNA, 22 nt, Human
agaaaaaucuaaaacacuauaa

SEQ ID NO: 535318 - RNA, 18 nt, Human
agagagggaaugagagga

SEQ ID NO: 535319 - RNA, 22 nt, Human
agaggaagagagggaaugagag

SEQ ID NO: 535320 - RNA, 20 nt, Human
agcacaagcugcaaagugaa

SEQ ID NO: 535321 - RNA, 18 nt, Human
agcccagggcaggggcaa

SEQ ID NO: 535322 - RNA, 27 nt, Human
agcccaucaucuccccaccaucaccuc

SEQ ID NO: 535323 - RNA, 19 nt, Human
agccgaguugcaacagcag

SEQ ID NO: 535324 - RNA, 24 nt, Human
agcgagguggggaggggagagagg

SEQ ID NO: 535325 - RNA, 21 nt, Human
aggacaauggagacgucugcc

SEQ ID NO: 535326 - RNA, 21 nt, Human
agguggggaggggagagagga

SEQ ID NO: 535327 - RNA, 19 nt, Human
aguuagaaaaaucuaaaac

SEQ ID NO: 535328 - RNA, 23 nt, Human
auaaauauaaaaacaccagaaua

SEQ ID NO: 535329 - RNA, 22 nt, Human
caacacagacaacauaaggaca

SEQ ID NO: 535330 - RNA, 22 nt, Human
caacagcagcagugaaggugag

SEQ ID NO: 535331 - RNA, 22 nt, Human
caccaucaccuccccaugggag

SEQ ID NO: 535332 - RNA, 25 nt, Human
caccauggucaauaaaaaaaaaaaa

SEQ ID NO: 535333 - RNA, 22 nt, Human
cacccuccaccaacauucagaa

SEQ ID NO: 535334 - RNA, 22 nt, Human
cacccuccaccaacauucagaa

SEQ ID NO: 535335 - RNA, 19 nt, Human
cagcagcagugaaggugag

SEQ ID NO: 535336 - RNA, 23 nt, Human
cagcagcagugaaggugagugaa

SEQ ID NO: 535337 - RNA, 23 nt, Human
cagccugccaggaagguggccaa

SEQ ID NO: 535338 - RNA, 18 nt, Human
caggaagguggccaacug

SEQ ID NO: 535339 - RNA, 21 nt, Human
ccaacucuuccagccacuguc

SEQ ID NO: 535340 - RNA, 27 nt, Human
ccacuacacccuccaccaacauucaga

SEQ ID NO: 535341 - RNA, 23 nt, Human
ccagcacuccucuagaacugccc

SEQ ID NO: 535342 - RNA, 19 nt, Human
ccccaccaucaccucccca

SEQ ID NO: 535343 - RNA, 26 nt, Human
ccccaucccuccacacacaucagagu

SEQ ID NO: 535344 - RNA, 19 nt, Human
ccccuagcaagggaguggg

SEQ ID NO: 535345 - RNA, 19 nt, Human
ccucaugugugcucuuccu

SEQ ID NO: 535346 - RNA, 21 nt, Human
ccucuagaacugcccugguuu

SEQ ID NO: 535347 - RNA, 23 nt, Human
ccucuugcccuuuucaacugucc

SEQ ID NO: 535348 - RNA, 18 nt, Human
ccuuuuuuuuuuuuuuuu

SEQ ID NO: 535349 - RNA, 21 nt, Human
cucuugcccuuuucaacuguc

SEQ ID NO: 535350 - RNA, 23 nt, Human
cuuucuguagucuugaguaaaag

SEQ ID NO: 535351 - RNA, 18 nt, Human
gagaauuucucaauccag

SEQ ID NO: 535352 - RNA, 19 nt, Human
gcccaucaucuccccacca

SEQ ID NO: 535353 - RNA, 18 nt, Human
gcugggguagcuaccuac

SEQ ID NO: 535354 - RNA, 19 nt, Human
gcuugguucagaggacccu

SEQ ID NO: 535355 - RNA, 21 nt, Human
ggaagaagcgagguggggagg

SEQ ID NO: 535356 - RNA, 19 nt, Human
ggaggggagagaggaaagg

SEQ ID NO: 535357 - RNA, 21 nt, Human
ggcccagauuugacucagagc

SEQ ID NO: 535358 - RNA, 23 nt, Human
gggaagaagcgagguggggaggg

SEQ ID NO: 535359 - RNA, 18 nt, Human
ggggagcccagggcaggg

SEQ ID NO: 535360 - RNA, 20 nt, Human
ggucaauaaaaaaaaaaaaa

SEQ ID NO: 535361 - RNA, 20 nt, Human
gucaauguucuauuccccau

SEQ ID NO: 535362 - RNA, 21 nt, Human
guccaaacucuaggaagccaa

SEQ ID NO: 535363 - RNA, 20 nt, Human
guuuuugaaaaguugccugu

SEQ ID NO: 535364 - RNA, 27 nt, Human
uaaucaccauggucaauaaaaaaaaaa

SEQ ID NO: 535365 - RNA, 18 nt, Human
uacaacacagacaacaua

SEQ ID NO: 535366 - RNA, 18 nt, Human
uacaugaggcaaguuucu

SEQ ID NO: 535367 - RNA, 20 nt, Human
uagaagggcacuuacaagag

SEQ ID NO: 535368 - RNA, 19 nt, Human
ucaccuccccaugggagau

SEQ ID NO: 535369 - RNA, 19 nt, Human
ucagaacuggcugugcccc

SEQ ID NO: 535370 - RNA, 21 nt, Human
ucagaguccagaacagccgag

SEQ ID NO: 535371 - RNA, 21 nt, Human
ucaggucuacagccugccagg

SEQ ID NO: 535372 - RNA, 20 nt, Human
uccacacacaucagagucca

SEQ ID NO: 535373 - RNA, 22 nt, Human
uccaccaacauucagaacuggc

SEQ ID NO: 535374 - RNA, 19 nt, Human
uccagcacaggccuguaau

SEQ ID NO: 535375 - RNA, 18 nt, Human
uccccaccaucaccuccc

SEQ ID NO: 535376 - RNA, 21 nt, Human
uccccaugggagaugcuucau

SEQ ID NO: 535377 - RNA, 25 nt, Human
ucccuccacacacaucagaguccag

SEQ ID NO: 535378 - RNA, 22 nt, Human
ucuaaaacacuauaaauacaua

SEQ ID NO: 535379 - RNA, 20 nt, Human
ucuaggaagccaaggggaga

SEQ ID NO: 535380 - RNA, 19 nt, Human
ucuccccaccaucaccucc

SEQ ID NO: 535381 - RNA, 18 nt, Human
ucugccagcagccuugcc

SEQ ID NO: 535382 - RNA, 18 nt, Human
ucuuccagccacuguccu

SEQ ID NO: 535383 - RNA, 19 nt, Human
ugcaacagcagcagugaag

SEQ ID NO: 535384 - RNA, 19 nt, Human
ugcccugguuuccucuugc

SEQ ID NO: 535385 - RNA, 26 nt, Human
ugcccugguuuccucuugcccuuuuc

SEQ ID NO: 535386 - RNA, 19 nt, Human
ugcugaagacaaggaucug

SEQ ID NO: 535387 - RNA, 23 nt, Human
ugcuucaucaucauuuuggaucc

SEQ ID NO: 535388 - RNA, 25 nt, Human
uggaaggugcugaagacaaggaucu

SEQ ID NO: 535389 - RNA, 23 nt, Human
uggggaggggagagaggaaaggg

SEQ ID NO: 535390 - RNA, 24 nt, Human
uggggaggggagagaggaaaggga

SEQ ID NO: 535391 - RNA, 19 nt, Human
uguccaaacucuaggaagc

SEQ ID NO: 535392 - RNA, 19 nt, Human
uguccaaacucuaggaagc

SEQ ID NO: 535393 - RNA, 24 nt, Human
uguccaaacucuaggaagccaagg

SEQ ID NO: 535394 - RNA, 19 nt, Human
ugucugaaugguuuuaaga

SEQ ID NO: 535395 - RNA, 21 nt, Human
uguucuauuccccaucccucc

SEQ ID NO: 535396 - RNA, 20 nt, Human
uucagaacuggcugugcccc

SEQ ID NO: 535397 - RNA, 19 nt, Human
uugcguacguuuuucugcu

SEQ ID NO: 535398 - RNA, 19 nt, Human
uuuaagaaauuauuacaua

SEQ ID NO: 535399 - RNA, 24 nt, Human
uuugacucagagcugucuguuuuu

SEQ ID NO: 535400 - RNA, 20 nt, Human
uuuuuuuuuuuuuuuuccau

SEQ ID NO: 535401 - RNA, 24 nt, Human
uuuuuuuuuuuuuuuuuuuccaug

SEQ ID NO: 535402 - RNA, 18 nt, Human
cacaaccugccccgaacc

SEQ ID NO: 535403 - RNA, 21 nt, Human
cagcucauaucugcaacuguu

SEQ ID NO: 535404 - RNA, 18 nt, Human
ccccgaaccaggcugccc

SEQ ID NO: 535405 - RNA, 20 nt, Human
cccgaaccaggcugcccagc

SEQ ID NO: 535406 - RNA, 25 nt, Human
cguugugcuggcaggacuuuggugg

SEQ ID NO: 535407 - RNA, 21 nt, Human
cucacaaccugccccgaaccu

SEQ ID NO: 535408 - RNA, 19 nt, Human
ggaguccagagggagugug

SEQ ID NO: 535409 - RNA, 20 nt, Human
ggcaggacuuugguggggcc

SEQ ID NO: 535410 - RNA, 19 nt, Human
guccagagggagugugagg

SEQ ID NO: 535411 - RNA, 19 nt, Human
ugagguuccacacacuugg

SEQ ID NO: 535412 - RNA, 23 nt, Human
ugguggggcccggaguccagagg

SEQ ID NO: 535413 - RNA, 21 nt, Human
uugaggguaaugcaacuucuu

SEQ ID NO: 535414 - RNA, 20 nt, Human
uugugcuggcaggacuuugg

SEQ ID NO: 535415 - RNA, 24 nt, Human
uugugcuggcaggacuuugguggg

SEQ ID NO: 535416 - RNA, 23 nt, Human
aaaaaggagcugaaauucuggca

SEQ ID NO: 535417 - RNA, 20 nt, Human
aagcugcuugcgaaucccug

SEQ ID NO: 535418 - RNA, 22 nt, Human
aaggacacuggggggcguuucu

SEQ ID NO: 535419 - RNA, 23 nt, Human
acagcauaaaaauaauuuguauc

SEQ ID NO: 535420 - RNA, 19 nt, Human
accacagaaaaaaggagcu

SEQ ID NO: 535421 - RNA, 22 nt, Human
agauaaaaaguuugaaggaagu

SEQ ID NO: 535422 - RNA, 27 nt, Human
agcugaaauucuggcaaguggacacug

SEQ ID NO: 535423 - RNA, 18 nt, Human
agcugacuugcaacacca

SEQ ID NO: 535424 - RNA, 18 nt, Human
aucugggagggugguggc

SEQ ID NO: 535425 - RNA, 20 nt, Human
caagauggucccuacagcuc

SEQ ID NO: 535426 - RNA, 25 nt, Human
caugucccuccuccccaacuuuuaa

SEQ ID NO: 535427 - RNA, 21 nt, Human
ccagggucuaggcugcuggca

SEQ ID NO: 535428 - RNA, 18 nt, Human
ccccuuccucuccuaauu

SEQ ID NO: 535429 - RNA, 21 nt, Human
ccuccugcaagcuggacaaag

SEQ ID NO: 535430 - RNA, 18 nt, Human
ccugagcaucugggaggg

SEQ ID NO: 535431 - RNA, 19 nt, Human
ccugcaagcuggacaaagc

SEQ ID NO: 535432 - RNA, 19 nt, Human
ccuggugccuccugcaagc

SEQ ID NO: 535433 - RNA, 23 nt, Human
ccuuugccucaccacagaaaaaa

SEQ ID NO: 535434 - RNA, 20 nt, Human
cuccuggugcugugagaugg

SEQ ID NO: 535435 - RNA, 18 nt, Human
cuccuuccccccagcccc

SEQ ID NO: 535436 - RNA, 19 nt, Human
cugaagaugcagggauuca

SEQ ID NO: 535437 - RNA, 21 nt, Human
cugaaggagccagaccuggug

SEQ ID NO: 535438 - RNA, 23 nt, Human
cugcacaugcucuucauggcgug

SEQ ID NO: 535439 - RNA, 24 nt, Human
cuuugccucaccacagaaaaaagg

SEQ ID NO: 535440 - RNA, 22 nt, Human
gaacaaugaccuucagagcugg

SEQ ID NO: 535441 - RNA, 20 nt, Human
gaacucaaagcugcuugcga

SEQ ID NO: 535442 - RNA, 25 nt, Human
gagcaucugggagggugguggccuu

SEQ ID NO: 535443 - RNA, 19 nt, Human
gcccuaggauuuccuugac

SEQ ID NO: 535444 - RNA, 21 nt, Human
ggaaguaccucugaaucugau

SEQ ID NO: 535445 - RNA, 18 nt, Human
ggauacacuggcucccag

SEQ ID NO: 535446 - RNA, 18 nt, Human
ggauucaugaaaccggcg

SEQ ID NO: 535447 - RNA, 21 nt, Human
gggcacuccuccagucugggc

SEQ ID NO: 535448 - RNA, 23 nt, Human
ggggcacuccuccagucugggcu

SEQ ID NO: 535449 - RNA, 20 nt, Human
gggugggcucaugccagcag

SEQ ID NO: 535450 - RNA, 22 nt, Human
gggugguggccuuguugcuucu

SEQ ID NO: 535451 - RNA, 20 nt, Human
guccugcaucuucaggcaga

SEQ ID NO: 535452 - RNA, 21 nt, Human
uaaguuaaaagcaugguuaau

SEQ ID NO: 535453 - RNA, 23 nt, Human
uaccucugaaucugaucaagcuc

SEQ ID NO: 535454 - RNA, 19 nt, Human
uaggcugcuggcaccuggc

SEQ ID NO: 535455 - RNA, 26 nt, Human
uaugcacaaugcacacaaucuacaug

SEQ ID NO: 535456 - RNA, 19 nt, Human
ucaaacacaggcaagaaca

SEQ ID NO: 535457 - RNA, 24 nt, Human
ucacauggcaagggugccucuccc

SEQ ID NO: 535458 - RNA, 22 nt, Human
ucagaauggagguuugggagga

SEQ ID NO: 535459 - RNA, 23 nt, Human
ucagauaaaaaguuugaaggaag

SEQ ID NO: 535460 - RNA, 23 nt, Human
ucccagggucuaggcugcuggca

SEQ ID NO: 535461 - RNA, 25 nt, Human
uccccaacuuuuaaggcaaaaauug

SEQ ID NO: 535462 - RNA, 20 nt, Human
uccccccagccccucaggcu

SEQ ID NO: 535463 - RNA, 24 nt, Human
ucccuggugauagucugcagaucu

SEQ ID NO: 535464 - RNA, 20 nt, Human
uccuggcucggugagaacuc

SEQ ID NO: 535465 - RNA, 21 nt, Human
ucuacaugucccuccucccca

SEQ ID NO: 535466 - RNA, 24 nt, Human
ucuacaugucccuccuccccaacu

SEQ ID NO: 535467 - RNA, 23 nt, Human
ucucccugaagaugcagggauug

SEQ ID NO: 535468 - RNA, 19 nt, Human
ucugggagggugguggccu

SEQ ID NO: 535469 - RNA, 19 nt, Human
ucugugauuaaggagcuga

SEQ ID NO: 535470 - RNA, 22 nt, Human
ugagagaagucagaauggaggu

SEQ ID NO: 535471 - RNA, 22 nt, Human
ugcaagcuggacaaagcugacg

SEQ ID NO: 535472 - RNA, 23 nt, Human
ugcagggauucaugaaaccggcg

SEQ ID NO: 535473 - RNA, 18 nt, Human
ugccugcuugggucccac

SEQ ID NO: 535474 - RNA, 22 nt, Human
uggacaaagcugacggagggug

SEQ ID NO: 535475 - RNA, 18 nt, Human
uggcaagggugccucucc

SEQ ID NO: 535476 - RNA, 22 nt, Human
uggcaagggugccucucccuga

SEQ ID NO: 535477 - RNA, 24 nt, Human
uggcgugaugcuuggcuucuugug

SEQ ID NO: 535478 - RNA, 19 nt, Human
ugggaggacaaaggugaug

SEQ ID NO: 535479 - RNA, 19 nt, Human
ugggaggacaaaggugaug

SEQ ID NO: 535480 - RNA, 19 nt, Human
ugggagggugguggccuug

SEQ ID NO: 535481 - RNA, 21 nt, Human
uguccugagcaucugggaggg

SEQ ID NO: 535482 - RNA, 19 nt, Human
uguucccacacaaaugaac

SEQ ID NO: 535483 - RNA, 19 nt, Human
uuaaggcaaaaaugguccu

SEQ ID NO: 535484 - RNA, 18 nt, Human
uucagagcuggguaaaaa

SEQ ID NO: 535485 - RNA, 22 nt, Human
uucaggcagagggugggcucau

SEQ ID NO: 535486 - RNA, 18 nt, Human
acccaguaggagauaauu

SEQ ID NO: 535487 - RNA, 19 nt, Human
auccauaggccauuuccuu

SEQ ID NO: 535488 - RNA, 18 nt, Human
caaaauucucaguccuuc

SEQ ID NO: 535489 - RNA, 23 nt, Human
caaauaaccgcccuuucagacac

SEQ ID NO: 535490 - RNA, 24 nt, Human
caccaguggcccuuccugggugcc

SEQ ID NO: 535491 - RNA, 18 nt, Human
cacccaaaucucaucuug

SEQ ID NO: 535492 - RNA, 19 nt, Human
caguggcccuuccugggug

SEQ ID NO: 535493 - RNA, 20 nt, Human
ccaguggcccuuccugggug

SEQ ID NO: 535494 - RNA, 18 nt, Human
cucacuuuuacuccuccc

SEQ ID NO: 535495 - RNA, 21 nt, Human
cucacuuuuacuccucccaaa

SEQ ID NO: 535496 - RNA, 21 nt, Human
cucccaaaacugucaggccaa

SEQ ID NO: 535497 - RNA, 22 nt, Human
cuuagcaccaguggcccuuccu

SEQ ID NO: 535498 - RNA, 24 nt, Human
cuuccugggugcccagugcaaaua

SEQ ID NO: 535499 - RNA, 23 nt, Human
gacacucacuuuuacuccuccca

SEQ ID NO: 535500 - RNA, 26 nt, Human
gacacucacuuuuacuccucccaaaa

SEQ ID NO: 535501 - RNA, 19 nt, Human
gaguauucugauugcaguu

SEQ ID NO: 535502 - RNA, 21 nt, Human
gcccagugcaaauaaccgccc

SEQ ID NO: 535503 - RNA, 19 nt, Human
ucccaaaacugucaggcca

SEQ ID NO: 535504 - RNA, 22 nt, Human
ucccaaaacugucaggccaagu

SEQ ID NO: 535505 - RNA, 25 nt, Human
uccccacccaaaucucaucuugaau

SEQ ID NO: 535506 - RNA, 18 nt, Human
ugcaaauaaccgcccuuu

SEQ ID NO: 535507 - RNA, 22 nt, Human
ugcccagugcaaauaaccgccc

SEQ ID NO: 535508 - RNA, 18 nt, Human
ugggagggacccaguagg

SEQ ID NO: 535509 - RNA, 23 nt, Human
aaacuccuggccucaagcaaucc

SEQ ID NO: 535510 - RNA, 24 nt, Human
aaagugccgggauuauaggcauga

SEQ ID NO: 535511 - RNA, 19 nt, Human
aaaguugccaaccccugcc

SEQ ID NO: 535512 - RNA, 23 nt, Human
aaccuaacaccucuuuggcccca

SEQ ID NO: 535513 - RNA, 19 nt, Human
aacucccagcaucccccuc

SEQ ID NO: 535514 - RNA, 25 nt, Human
aagcaauccuccugccacagacucc

SEQ ID NO: 535515 - RNA, 21 nt, Human
aaggagcugcccuccuccuuc

SEQ ID NO: 535516 - RNA, 21 nt, Human
aaugcaguggugcgaucauag

SEQ ID NO: 535517 - RNA, 23 nt, Human
aaugcaguggugcgaucauagcu

SEQ ID NO: 535518 - RNA, 24 nt, Human
aaugcaguggugcgaucauagcuc

SEQ ID NO: 535519 - RNA, 22 nt, Human
acauccagcaaacguaaaaaug

SEQ ID NO: 535520 - RNA, 20 nt, Human
acccaccugccuccucugcu

SEQ ID NO: 535521 - RNA, 22 nt, Human
acccugggcccuucuuggcccc

SEQ ID NO: 535522 - RNA, 22 nt, Human
accucuuuggccccagcugcug

SEQ ID NO: 535523 - RNA, 21 nt, Human
acucccagcaucccccuccac

SEQ ID NO: 535524 - RNA, 21 nt, Human
agaagcgauggagaaugugga

SEQ ID NO: 535525 - RNA, 20 nt, Human
agccacccacaaaaagcaag

SEQ ID NO: 535526 - RNA, 22 nt, Human
agcggcggugguggcagcagcc

SEQ ID NO: 535527 - RNA, 19 nt, Human
aggcaugagccacugcgcc

SEQ ID NO: 535528 - RNA, 22 nt, Human
aggccuggaggccgccguugcu

SEQ ID NO: 535529 - RNA, 24 nt, Human
agggauccucccaccucagccucc

SEQ ID NO: 535530 - RNA, 24 nt, Human
auagcucacugcagacucaaacuc

SEQ ID NO: 535531 - RNA, 26 nt, Human
auauagcagcggcggugguggcagca

SEQ ID NO: 535532 - RNA, 24 nt, Human
augagccacugcgccuggcagagc

SEQ ID NO: 535533 - RNA, 24 nt, Human
caaagugccgggauuauaggcaug

SEQ ID NO: 535534 - RNA, 21 nt, Human
cacccaccugccuccucugcu

SEQ ID NO: 535535 - RNA, 22 nt, Human
cacccugggcccuucuuggccc

SEQ ID NO: 535536 - RNA, 23 nt, Human
caccucagccuccugaguagcua

SEQ ID NO: 535537 - RNA, 27 nt, Human
caccucagccuccugaguagcuacguu

SEQ ID NO: 535538 - RNA, 18 nt, Human
caccucccacggacagcu

SEQ ID NO: 535539 - RNA, 21 nt, Human
caccugccuccucugcuucug

SEQ ID NO: 535540 - RNA, 24 nt, Human
caccugccuccucugcuucugaga

SEQ ID NO: 535541 - RNA, 19 nt, Human
cacggacagcucugccucc

SEQ ID NO: 535542 - RNA, 18 nt, Human
cacugcgccuggcagagc

SEQ ID NO: 535543 - RNA, 24 nt, Human
cacuugcagacccuccugcaagcu

SEQ ID NO: 535544 - RNA, 19 nt, Human
cagagccugguuuuuuuuu

SEQ ID NO: 535545 - RNA, 25 nt, Human
cagcaaacguaaaaaugucagugcu

SEQ ID NO: 535546 - RNA, 20 nt, Human
cagccuccugaguagcuacg

SEQ ID NO: 535547 - RNA, 20 nt, Human
cagcucugccuccuuccugc

SEQ ID NO: 535548 - RNA, 23 nt, Human
caggaaaauguccucggccucca

SEQ ID NO: 535549 - RNA, 23 nt, Human
caggacaggcucacaaaccucag

SEQ ID NO: 535550 - RNA, 19 nt, Human
caguccaaggggggccggg

SEQ ID NO: 535551 - RNA, 22 nt, Human
caucccccuccacccaccugcc

SEQ ID NO: 535552 - RNA, 25 nt, Human
caugagccacugcgccuggcagagc

SEQ ID NO: 535553 - RNA, 18 nt, Human
ccaaagugccgggauuau

SEQ ID NO: 535554 - RNA, 24 nt, Human
ccaaagugccgggauuauaggcau

SEQ ID NO: 535555 - RNA, 19 nt, Human
ccacaaaaagcaagaggca

SEQ ID NO: 535556 - RNA, 23 nt, Human
ccacccacaaaaagcaagaggca

SEQ ID NO: 535557 - RNA, 23 nt, Human
ccaccucagccuccugaguagcu

SEQ ID NO: 535558 - RNA, 22 nt, Human
cccacaaaaagcaagaggcagg

SEQ ID NO: 535559 - RNA, 23 nt, Human
cccaccucagccuccugaguagc

SEQ ID NO: 535560 - RNA, 18 nt, Human
cccccuccacccaccugc

SEQ ID NO: 535561 - RNA, 18 nt, Human
cccccuccacccaccugc

SEQ ID NO: 535562 - RNA, 20 nt, Human
cccuccccacucccucucaa

SEQ ID NO: 535563 - RNA, 20 nt, Human
cccugggcccuucuuggccc

SEQ ID NO: 535564 - RNA, 21 nt, Human
cccugggcccuucuuggcccc

SEQ ID NO: 535565 - RNA, 20 nt, Human
cccuguacuaccgccggggg

SEQ ID NO: 535566 - RNA, 27 nt, Human
cccugugccaguccaaggggggccggg

SEQ ID NO: 535567 - RNA, 18 nt, Human
cccuucuuggccccaaga

SEQ ID NO: 535568 - RNA, 23 nt, Human
ccuccaccucccacggacagcuc

SEQ ID NO: 535569 - RNA, 21 nt, Human
ccuccccacucccucucaccc

SEQ ID NO: 535570 - RNA, 20 nt, Human
ccuccuccuccuccacuucc

SEQ ID NO: 535571 - RNA, 18 nt, Human
ccuccuucuccuccuccu

SEQ ID NO: 535572 - RNA, 20 nt, Human
ccuccuucuccuccuccucc

SEQ ID NO: 535573 - RNA, 21 nt, Human
ccuccuucuccuccuccuccu

SEQ ID NO: 535574 - RNA, 20 nt, Human
ccucggcucaagggauccuc

SEQ ID NO: 535575 - RNA, 22 nt, Human
ccucucccuccccacucccucu

SEQ ID NO: 535576 - RNA, 18 nt, Human
ccucugacucuguaggac

SEQ ID NO: 535577 - RNA, 25 nt, Human
ccugacccacccugggcccuucuug

SEQ ID NO: 535578 - RNA, 23 nt, Human
ccugcaagcucacccuguacuac

SEQ ID NO: 535579 - RNA, 27 nt, Human
ccuggccucaagcaauccuccugccac

SEQ ID NO: 535580 - RNA, 23 nt, Human
ccugggcccuucuuggccccaag

SEQ ID NO: 535581 - RNA, 21 nt, Human
ccuguggcuggcagaagaggc

SEQ ID NO: 535582 - RNA, 21 nt, Human
ccuuccugcccucucccuccc

SEQ ID NO: 535583 - RNA, 21 nt, Human
ccuucuccuccuccuccucca

SEQ ID NO: 535584 - RNA, 22 nt, Human
cgagauggggucuggaaugcag

SEQ ID NO: 535585 - RNA, 24 nt, Human
cgcuauguugcccaggcuggucuc

SEQ ID NO: 535586 - RNA, 21 nt, Human
cgggauuauaggcaugagcca

SEQ ID NO: 535587 - RNA, 22 nt, Human
cgggauuauaggcaugagccac

SEQ ID NO: 535588 - RNA, 24 nt, Human
cgggauuauaggcaugagccacug

SEQ ID NO: 535589 - RNA, 24 nt, Human
cguugcugggugccuggaaaagaa

SEQ ID NO: 535590 - RNA, 21 nt, Human
cucaagcaauccuccugccac

SEQ ID NO: 535591 - RNA, 19 nt, Human
cucaagggauccucccacc

SEQ ID NO: 535592 - RNA, 24 nt, Human
cucaagggauccucccaccucagc

SEQ ID NO: 535593 - RNA, 23 nt, Human
cucacaaaccucagaaaccuaaa

SEQ ID NO: 535594 - RNA, 18 nt, Human
cucccucucacccuaguc

SEQ ID NO: 535595 - RNA, 22 nt, Human
cuccuccuccuccuccacuucc

SEQ ID NO: 535596 - RNA, 24 nt, Human
cuggccucaagcaauccuccugcc

SEQ ID NO: 535597 - RNA, 22 nt, Human
gaacuagccagagcugaucuug

SEQ ID NO: 535598 - RNA, 18 nt, Human
gagaagcgauggagaaug

SEQ ID NO: 535599 - RNA, 20 nt, Human
gagcauccugccuguggcuc

SEQ ID NO: 535600 - RNA, 18 nt, Human
gagcugcccuccuccuuc

SEQ ID NO: 535601 - RNA, 22 nt, Human
gauuauaggcaugagccacugc

SEQ ID NO: 535602 - RNA, 22 nt, Human
gauuauaggcaugagccacugc

SEQ ID NO: 535603 - RNA, 18 nt, Human
gcagcggcggugguggca

SEQ ID NO: 535604 - RNA, 23 nt, Human
gccaaaaggcugagaagcgaugg

SEQ ID NO: 535605 - RNA, 25 nt, Human
gcuauguugcccaggcuggucucaa

SEQ ID NO: 535606 - RNA, 24 nt, Human
gcuggcagaagaggccauucacug

SEQ ID NO: 535607 - RNA, 23 nt, Human
gcuggucucaaacuccuggccuc

SEQ ID NO: 535608 - RNA, 19 nt, Human
ggacaggcucacaaaccuc

SEQ ID NO: 535609 - RNA, 24 nt, Human
ggcuggucucaaacuccuggccuc

SEQ ID NO: 535610 - RNA, 21 nt, Human
gggauuauaggcaugagccac

SEQ ID NO: 535611 - RNA, 23 nt, Human
gggauuauaggcaugagccacug

SEQ ID NO: 535612 - RNA, 23 nt, Human
gggauuauaggcaugagccacug

SEQ ID NO: 535613 - RNA, 22 nt, Human
ggggucucgcuauguugcccag

SEQ ID NO: 535614 - RNA, 22 nt, Human
gggucucgcuauguugcccagg

SEQ ID NO: 535615 - RNA, 23 nt, Human
ggugagggggccugaggccugga

SEQ ID NO: 535616 - RNA, 21 nt, Human
gugccuggaaaagaaacaaaa

SEQ ID NO: 535617 - RNA, 22 nt, Human
gugguggcagcagccacccaca

SEQ ID NO: 535618 - RNA, 22 nt, Human
uagagauggggucucgcuaugu

SEQ ID NO: 535619 - RNA, 23 nt, Human
uauguugcccaggcuggucucaa

SEQ ID NO: 535620 - RNA, 24 nt, Human
uauguugcccaggcuggucucaaa

SEQ ID NO: 535621 - RNA, 20 nt, Human
ucaaggagcauccugccugu

SEQ ID NO: 535622 - RNA, 23 nt, Human
ucauagcucacugcagacucaaa

SEQ ID NO: 535623 - RNA, 23 nt, Human
uccacagugcacacgccugaccc

SEQ ID NO: 535624 - RNA, 24 nt, Human
ucccaaagugccgggauuauaggc

SEQ ID NO: 535625 - RNA, 24 nt, Human
ucccacggacagcucugccuccuu

SEQ ID NO: 535626 - RNA, 18 nt, Human
ucccagcaucccccucca

SEQ ID NO: 535627 - RNA, 19 nt, Human
uccccacucccucucaccc

SEQ ID NO: 535628 - RNA, 26 nt, Human
uccucccaccucagccuccugaguag

SEQ ID NO: 535629 - RNA, 24 nt, Human
uccucggcucaagggauccuccca

SEQ ID NO: 535630 - RNA, 20 nt, Human
uccugcccucucccucccca

SEQ ID NO: 535631 - RNA, 22 nt, Human
uccugcccucucccuccccacu

SEQ ID NO: 535632 - RNA, 19 nt, Human
uccuuccugcccucucccu

SEQ ID NO: 535633 - RNA, 24 nt, Human
ucucacacacuagaagacggguua

SEQ ID NO: 535634 - RNA, 24 nt, Human
ucuccuccuccuccuccacuuccc

SEQ ID NO: 535635 - RNA, 19 nt, Human
ucucgcuauguugcccagg

SEQ ID NO: 535636 - RNA, 23 nt, Human
ucucgcuauguugcccaggcugg

SEQ ID NO: 535637 - RNA, 24 nt, Human
ucucgcuauguugcccaggcuggu

SEQ ID NO: 535638 - RNA, 26 nt, Human
ucucgcuauguugcccaggcuggucu

SEQ ID NO: 535639 - RNA, 27 nt, Human
ucucgcuauguugcccaggcuggucuc

SEQ ID NO: 535640 - RNA, 22 nt, Human
ucugccuccuuccugcccucuc

SEQ ID NO: 535641 - RNA, 23 nt, Human
ucugcuucugagaguuaagguca

SEQ ID NO: 535642 - RNA, 19 nt, Human
ucuguaggacccugugcca

SEQ ID NO: 535643 - RNA, 19 nt, Human
ucuguuggguuugguuuuc

SEQ ID NO: 535644 - RNA, 22 nt, Human
ucuucugaggccuugggccacu

SEQ ID NO: 535645 - RNA, 23 nt, Human
ugagaagcgauggagaaugugga

SEQ ID NO: 535646 - RNA, 26 nt, Human
ugccacagacucccaaagugccggga

SEQ ID NO: 535647 - RNA, 24 nt, Human
ugcccaggcuggucucaaacuccu

SEQ ID NO: 535648 - RNA, 19 nt, Human
uggaaugcaguggugcgau

SEQ ID NO: 535649 - RNA, 19 nt, Human
uggcagaagaggccauuca

SEQ ID NO: 535650 - RNA, 18 nt, Human
uggccccaagacucuccc

SEQ ID NO: 535651 - RNA, 20 nt, Human
uggccucaagcaauccuccu

SEQ ID NO: 535652 - RNA, 21 nt, Human
uggccucaagcaauccuccug

SEQ ID NO: 535653 - RNA, 24 nt, Human
uggggucucgcuauguugcccagg

SEQ ID NO: 535654 - RNA, 24 nt, Human
uggugcgaucauagcucacugcag

SEQ ID NO: 535655 - RNA, 24 nt, Human
ugguggcagcagccacccacaaaa

SEQ ID NO: 535656 - RNA, 24 nt, Human
uguagagauggggucucgcuaugu

SEQ ID NO: 535657 - RNA, 18 nt, Human
uuccacagugcacacgcc

SEQ ID NO: 535658 - RNA, 24 nt, Human
uuccacagugcacacgccugaccc

SEQ ID NO: 535659 - RNA, 22 nt, Human
uugcagacccuccugcaagcuc

SEQ ID NO: 535660 - RNA, 24 nt, Human
uuguagagauggggucucgcuaug

SEQ ID NO: 535661 - RNA, 18 nt, Human
uuuguagagauggggucu

SEQ ID NO: 535662 - RNA, 24 nt, Human
uuuguagagauggggucucgcuau

SEQ ID NO: 535663 - RNA, 21 nt, Human
agagcagcgguccucaggagg

SEQ ID NO: 535664 - RNA, 22 nt, Human
cagcgguccucaggagguccuu

SEQ ID NO: 535665 - RNA, 20 nt, Human
ccccgcacacacagcuaacc

SEQ ID NO: 535666 - RNA, 18 nt, Human
ccccgcgggccggccggg

SEQ ID NO: 535667 - RNA, 21 nt, Human
gcuccgcgccccgcgggccgg

SEQ ID NO: 535668 - RNA, 25 nt, Human
uaagcccccgcacacacagcuaacc

SEQ ID NO: 535669 - RNA, 25 nt, Human
uaagcccccgcacacacagcuaacc

SEQ ID NO: 535670 - RNA, 24 nt, Human
uccuuaagcccccgcacacacagc

SEQ ID NO: 535671 - RNA, 24 nt, Human
aaaaaaaaaaaaaaucacacaggg

SEQ ID NO: 535672 - RNA, 25 nt, Human
aaaaaaaaaaaaaaucacacaggga

SEQ ID NO: 535673 - RNA, 24 nt, Human
aaaaaaagagucuucuccccccuc

SEQ ID NO: 535674 - RNA, 23 nt, Human
aaaaacugugaaaauuuccggca

SEQ ID NO: 535675 - RNA, 19 nt, Human
aaaaccccaaccauuaagc

SEQ ID NO: 535676 - RNA, 18 nt, Human
aaaauuaaaacaagaaaa

SEQ ID NO: 535677 - RNA, 26 nt, Human
aaacaaaaacaaaacaaaaauuaaaa

SEQ ID NO: 535678 - RNA, 24 nt, Human
aaacaagaaaaaaaaauaccaaag

SEQ ID NO: 535679 - RNA, 24 nt, Human
aaacauggaaacaaaaacaaaaca

SEQ ID NO: 535680 - RNA, 22 nt, Human
aaacgcagagauuucugaagcu

SEQ ID NO: 535681 - RNA, 22 nt, Human
aacaaaacaaaaauuaaaacaa

SEQ ID NO: 535682 - RNA, 24 nt, Human
aacaaugggaaccacagcuaggaa

SEQ ID NO: 535683 - RNA, 18 nt, Human
aacagagaagggugaagg

SEQ ID NO: 535684 - RNA, 22 nt, Human
aaccaaggggacccagccagga

SEQ ID NO: 535685 - RNA, 18 nt, Human
aaccugagcagccacagc

SEQ ID NO: 535686 - RNA, 20 nt, Human
aagaaaaaaaaauaccaaag

SEQ ID NO: 535687 - RNA, 24 nt, Human
aagaaaacauggaaacaaaaacaa

SEQ ID NO: 535688 - RNA, 25 nt, Human
aagcaggaaaagaaaauauuuacaa

SEQ ID NO: 535689 - RNA, 22 nt, Human
aaggaaacauggcaaagugaau

SEQ ID NO: 535690 - RNA, 20 nt, Human
aaggggagcgugaaagacca

SEQ ID NO: 535691 - RNA, 24 nt, Human
aauguugaaaauugugaaaaaacc

SEQ ID NO: 535692 - RNA, 22 nt, Human
acaaaauggccaaaaaaaaaga

SEQ ID NO: 535693 - RNA, 22 nt, Human
acaagaaaacauggaaacaaaa

SEQ ID NO: 535694 - RNA, 18 nt, Human
acuagucugugcuuugcg

SEQ ID NO: 535695 - RNA, 21 nt, Human
agaaaugagcaagaagucuua

SEQ ID NO: 535696 - RNA, 21 nt, Human
agcagacagggaaggguacca

SEQ ID NO: 535697 - RNA, 20 nt, Human
agcagccacagccagguuac

SEQ ID NO: 535698 - RNA, 22 nt, Human
agccacagccagguuacugcag

SEQ ID NO: 535699 - RNA, 24 nt, Human
agcuccacggccccuuacugccuc

SEQ ID NO: 535700 - RNA, 23 nt, Human
aggaaaagaaaauauuuacaaaa

SEQ ID NO: 535701 - RNA, 19 nt, Human
aggaagugcucaggugugu

SEQ ID NO: 535702 - RNA, 19 nt, Human
aggagggccacagcagagc

SEQ ID NO: 535703 - RNA, 26 nt, Human
aggcaaggggagcgugaaagaccaag

SEQ ID NO: 535704 - RNA, 21 nt, Human
aggccagcagggucucauccu

SEQ ID NO: 535705 - RNA, 21 nt, Human
aggccaugcuaaacuguagcc

SEQ ID NO: 535706 - RNA, 22 nt, Human
aggggaaccugagcagccacag

SEQ ID NO: 535707 - RNA, 21 nt, Human
aggggcaugaggaggggaacc

SEQ ID NO: 535708 - RNA, 25 nt, Human
aucagagggaaaaaaaaaaaaaauc

SEQ ID NO: 535709 - RNA, 20 nt, Human
auuccuuaaguucacuaaaa

SEQ ID NO: 535710 - RNA, 19 nt, Human
caaaauggccaaaaaaaaa

SEQ ID NO: 535711 - RNA, 20 nt, Human
caaagugaaucagagggaaa

SEQ ID NO: 535712 - RNA, 25 nt, Human
caaaugcagaugaaacaaaaaauca

SEQ ID NO: 535713 - RNA, 21 nt, Human
caaccauuaagcaguugucua

SEQ ID NO: 535714 - RNA, 18 nt, Human
caaggggacccagccagg

SEQ ID NO: 535715 - RNA, 23 nt, Human
caaugcuaaaaggguuauucaga

SEQ ID NO: 535716 - RNA, 22 nt, Human
cacagcagagccaagccacaga

SEQ ID NO: 535717 - RNA, 20 nt, Human
cacagcuccaaagcaggaaa

SEQ ID NO: 535718 - RNA, 21 nt, Human
cacccugccccauuccacccu

SEQ ID NO: 535719 - RNA, 26 nt, Human
cacgaaaaaccaaggggacccagcca

SEQ ID NO: 535720 - RNA, 22 nt, Human
cagagaagaccaaaugcagaug

SEQ ID NO: 535721 - RNA, 26 nt, Human
cagaugaaacaaaaaaucagucucuu

SEQ ID NO: 535722 - RNA, 18 nt, Human
cagcacagagagacagga

SEQ ID NO: 535723 - RNA, 25 nt, Human
cagcacgaaaaaccaaggggaccca

SEQ ID NO: 535724 - RNA, 22 nt, Human
cagcuucucugaagaaaagcau

SEQ ID NO: 535725 - RNA, 22 nt, Human
ccaaccauuaagcaguugucua

SEQ ID NO: 535726 - RNA, 26 nt, Human
ccacagcuaggaccagaccggggucc

SEQ ID NO: 535727 - RNA, 26 nt, Human
cccugccccauuccacccuagcucaa

SEQ ID NO: 535728 - RNA, 21 nt, Human
cccuuacugccuccccagaga

SEQ ID NO: 535729 - RNA, 22 nt, Human
ccgccaggcuguucugcccugc

SEQ ID NO: 535730 - RNA, 19 nt, Human
cuauagaacaaagacagcu

SEQ ID NO: 535731 - RNA, 19 nt, Human
cucacuucccacaaccccc

SEQ ID NO: 535732 - RNA, 21 nt, Human
cuccacggccccuuacugccu

SEQ ID NO: 535733 - RNA, 21 nt, Human
cugaagcuuuaaugccaauag

SEQ ID NO: 535734 - RNA, 19 nt, Human
cugagcagccacagccagg

SEQ ID NO: 535735 - RNA, 18 nt, Human
cugcucacuucccacaac

SEQ ID NO: 535736 - RNA, 25 nt, Human
cuggcaguuauggcagagaggcucu

SEQ ID NO: 535737 - RNA, 20 nt, Human
gacaagaaaacauggaaaca

SEQ ID NO: 535738 - RNA, 21 nt, Human
gaccaaaugcagaugaaacaa

SEQ ID NO: 535739 - RNA, 18 nt, Human
gagagcagcuggcaguua

SEQ ID NO: 535740 - RNA, 22 nt, Human
gagcagcuggcaguuauggcag

SEQ ID NO: 535741 - RNA, 23 nt, Human
gauauaaagacaauacucagaaa

SEQ ID NO: 535742 - RNA, 22 nt, Human
gcacgaaaaaccaaggggaccc

SEQ ID NO: 535743 - RNA, 19 nt, Human
gccagcagggucucauccu

SEQ ID NO: 535744 - RNA, 25 nt, Human
ggaaaagaaaauauuuacaaaauac

SEQ ID NO: 535745 - RNA, 22 nt, Human
ggaggggguaagaguccagagc

SEQ ID NO: 535746 - RNA, 21 nt, Human
ggcagagaggcucuggugggg

SEQ ID NO: 535747 - RNA, 20 nt, Human
gggagagcagacagggaagg

SEQ ID NO: 535748 - RNA, 19 nt, Human
gggagcgugaaagaccaag

SEQ ID NO: 535749 - RNA, 21 nt, Human
gggaggggaggggguaagagu

SEQ ID NO: 535750 - RNA, 21 nt, Human
gggucucauccugaacuucug

SEQ ID NO: 535751 - RNA, 22 nt, Human
gugaaucagagggaaaaaaaaa

SEQ ID NO: 535752 - RNA, 23 nt, Human
uaaaacaagaaaaaaaaauacca

SEQ ID NO: 535753 - RNA, 21 nt, Human
uaaagaaacaaugacaaaccc

SEQ ID NO: 535754 - RNA, 18 nt, Human
uaacuugcaaacagaaaa

SEQ ID NO: 535755 - RNA, 19 nt, Human
uaagaggcauccaaguagc

SEQ ID NO: 535756 - RNA, 23 nt, Human
uacaaaauggccaaaaaaaaaga

SEQ ID NO: 535757 - RNA, 20 nt, Human
uaggaccagacaauguucca

SEQ ID NO: 535758 - RNA, 24 nt, Human
uauaaagacaauacucagaaauga

SEQ ID NO: 535759 - RNA, 24 nt, Human
uauucagaauuuucaaccuuauaa

SEQ ID NO: 535760 - RNA, 24 nt, Human
uauuuuuuuuuaaagaaacaauga

SEQ ID NO: 535761 - RNA, 19 nt, Human
ucaauuuuuccuucuuuuu

SEQ ID NO: 535762 - RNA, 22 nt, Human
ucagagggaaaaaaaaaaaaaa

SEQ ID NO: 535763 - RNA, 22 nt, Human
ucagagggaaaaaaaaaaaaaa

SEQ ID NO: 535764 - RNA, 23 nt, Human
ucagucucuuaaguucuggguga

SEQ ID NO: 535765 - RNA, 18 nt, Human
uccacaggcaaggggagc

SEQ ID NO: 535766 - RNA, 23 nt, Human
uccacggccccuuacugccuccc

SEQ ID NO: 535767 - RNA, 23 nt, Human
uccagagcacccugccccauucc

SEQ ID NO: 535768 - RNA, 23 nt, Human
ucccacaacccccaguuugcagg

SEQ ID NO: 535769 - RNA, 18 nt, Human
uccccagagaacagacuu

SEQ ID NO: 535770 - RNA, 26 nt, Human
uccccagagaacagacuuaagaggcu

SEQ ID NO: 535771 - RNA, 23 nt, Human
ucgcugccauuacacagcuccaa

SEQ ID NO: 535772 - RNA, 22 nt, Human
ucugggugagaaaggaaaggug

SEQ ID NO: 535773 - RNA, 21 nt, Human
ugaaaaaaccccaaccauuaa

SEQ ID NO: 535774 - RNA, 23 nt, Human
ugaaaaaaccccaaccauuaagc

SEQ ID NO: 535775 - RNA, 19 nt, Human
ugaagggggaacaauggga

SEQ ID NO: 535776 - RNA, 19 nt, Human
ugagggaggggguggucau

SEQ ID NO: 535777 - RNA, 20 nt, Human
ugcaaacagaaaaaaaaauc

SEQ ID NO: 535778 - RNA, 22 nt, Human
ugccccauuccacccuagcuca

SEQ ID NO: 535779 - RNA, 19 nt, Human
ugccgaggccgaggccagc

SEQ ID NO: 535780 - RNA, 21 nt, Human
uggaaacaaaaacaaaacaaa

SEQ ID NO: 535781 - RNA, 25 nt, Human
uggcagagaggcucugguggggaug

SEQ ID NO: 535782 - RNA, 22 nt, Human
ugggagagcagacagggaaggg

SEQ ID NO: 535783 - RNA, 18 nt, Human
uggugcauuauuguauuu

SEQ ID NO: 535784 - RNA, 18 nt, Human
ugugaaaaaaccccaacc

SEQ ID NO: 535785 - RNA, 20 nt, Human
ugugaaaaaaccccaaccau

SEQ ID NO: 535786 - RNA, 18 nt, Human
ugugaaggaaacauggca

SEQ ID NO: 535787 - RNA, 21 nt, Human
uguuccacaggcaaggggagc

SEQ ID NO: 535788 - RNA, 26 nt, Human
uguuucgcugccauuacacagcucca

SEQ ID NO: 535789 - RNA, 24 nt, Human
uuaaaacaagaaaaaaaaauacca

SEQ ID NO: 535790 - RNA, 22 nt, Human
uuccacaggcaaggggagcgug

SEQ ID NO: 535791 - RNA, 26 nt, Human
uuccuuaaguucacuaaaaacuguga

SEQ ID NO: 535792 - RNA, 23 nt, Human
uucugggugagaaaggaaaggug

SEQ ID NO: 535793 - RNA, 25 nt, Human
uuucaauuuuuccuucuuuuuuuuu

SEQ ID NO: 535794 - RNA, 24 nt, Human
uuuuuuuuuccauuuuuuguuuuu

SEQ ID NO: 535795 - RNA, 21 nt, Human
aaaaggcacugugggagcuga

SEQ ID NO: 535796 - RNA, 21 nt, Human
aaacugacacuuccucucccg

SEQ ID NO: 535797 - RNA, 24 nt, Human
aacagauaaacagaguuugagggg

SEQ ID NO: 535798 - RNA, 27 nt, Human
aacagauaaacagaguuugagggggug

SEQ ID NO: 535799 - RNA, 18 nt, Human
aacuggggacaaagaccu

SEQ ID NO: 535800 - RNA, 27 nt, Human
aaggcacuuuuguccauuuuccaauca

SEQ ID NO: 535801 - RNA, 20 nt, Human
aaguaugugcggggcccugg

SEQ ID NO: 535802 - RNA, 18 nt, Human
aagucccuccacaugcuc

SEQ ID NO: 535803 - RNA, 21 nt, Human
aagucccuccacaugcucucc

SEQ ID NO: 535804 - RNA, 21 nt, Human
acacagccucucucuuucccc

SEQ ID NO: 535805 - RNA, 22 nt, Human
acacuggcuccaagucccucca

SEQ ID NO: 535806 - RNA, 21 nt, Human
acaggaggugaggucccccuu

SEQ ID NO: 535807 - RNA, 21 nt, Human
acauguggauggaagcuugug

SEQ ID NO: 535808 - RNA, 24 nt, Human
accaccccccacccccguccccca

SEQ ID NO: 535809 - RNA, 24 nt, Human
accagaaacagguuuagcaagaca

SEQ ID NO: 535810 - RNA, 19 nt, Human
acgaccuucuccaccccca

SEQ ID NO: 535811 - RNA, 30 nt, Human
acugacacuuccucucccgcugcgccucuu

SEQ ID NO: 535812 - RNA, 18 nt, Human
agaacagauaaacagagu

SEQ ID NO: 535813 - RNA, 19 nt, Human
agcagcaguuggcaaggcu

SEQ ID NO: 535814 - RNA, 24 nt, Human
agccuggagaaagcuggggagccu

SEQ ID NO: 535815 - RNA, 20 nt, Human
aggagccagcaggcccagag

SEQ ID NO: 535816 - RNA, 20 nt, Human
aggaggcccuggaacagagc

SEQ ID NO: 535817 - RNA, 24 nt, Human
aggcaggcagggcauucugccagg

SEQ ID NO: 535818 - RNA, 20 nt, Human
aggccaggcccagcucuaug

SEQ ID NO: 535819 - RNA, 18 nt, Human
agggaagguccagaugua

SEQ ID NO: 535820 - RNA, 19 nt, Human
agguagagaggggucaggc

SEQ ID NO: 535821 - RNA, 22 nt, Human
aguggcaggaaaguggaagaga

SEQ ID NO: 535822 - RNA, 18 nt, Human
aucccaccaccucucucc

SEQ ID NO: 535823 - RNA, 22 nt, Human
aucccaguucccacagcacccc

SEQ ID NO: 535824 - RNA, 19 nt, Human
auggaaaaacagcuccugc

SEQ ID NO: 535825 - RNA, 20 nt, Human
auugucugcugugugguguc

SEQ ID NO: 535826 - RNA, 20 nt, Human
cacacaggaugugcgaacac

SEQ ID NO: 535827 - RNA, 21 nt, Human
caccacuaccaccccccaccc

SEQ ID NO: 535828 - RNA, 22 nt, Human
caccacuaccaccccccacccc

SEQ ID NO: 535829 - RNA, 22 nt, Human
caccccagccuggagaaagcug

SEQ ID NO: 535830 - RNA, 21 nt, Human
cacgucaaggcacuuuugucc

SEQ ID NO: 535831 - RNA, 26 nt, Human
cacuugggcauguggugguguggccg

SEQ ID NO: 535832 - RNA, 18 nt, Human
cagcaguuggcaaggcug

SEQ ID NO: 535833 - RNA, 21 nt, Human
cagcucgucuaugccugggcu

SEQ ID NO: 535834 - RNA, 22 nt, Human
caguuggcaaggcugguccccc

SEQ ID NO: 535835 - RNA, 22 nt, Human
caguuucuaauaucucuggaag

SEQ ID NO: 535836 - RNA, 24 nt, Human
caucccaccaccucucuccgaggg

SEQ ID NO: 535837 - RNA, 21 nt, Human
caucuaaacuaucucagggac

SEQ ID NO: 535838 - RNA, 20 nt, Human
caugcucuccacuacagcca

SEQ ID NO: 535839 - RNA, 18 nt, Human
cauuccagcaaggccagg

SEQ ID NO: 535840 - RNA, 20 nt, Human
cauuucagggcagggcaagg

SEQ ID NO: 535841 - RNA, 23 nt, Human
ccaaaaauucucuuucaaacccc

SEQ ID NO: 535842 - RNA, 19 nt, Human
ccaagcuggaggccacagc

SEQ ID NO: 535843 - RNA, 24 nt, Human
ccacacacagccucucucuuuccc

SEQ ID NO: 535844 - RNA, 21 nt, Human
ccacuggcaagggcuucccuu

SEQ ID NO: 535845 - RNA, 27 nt, Human
ccagaugguggcguggccacgaccuuc

SEQ ID NO: 535846 - RNA, 20 nt, Human
ccagguggugcagacacccc

SEQ ID NO: 535847 - RNA, 23 nt, Human
ccaguucccacagcaccccuggg

SEQ ID NO: 535848 - RNA, 19 nt, Human
cccacagcaccccugggcu

SEQ ID NO: 535849 - RNA, 21 nt, Human
cccacagcaccccugggcuag

SEQ ID NO: 535850 - RNA, 22 nt, Human
cccaccacuaccaccccccacc

SEQ ID NO: 535851 - RNA, 23 nt, Human
cccaccacuaccaccccccaccc

SEQ ID NO: 535852 - RNA, 24 nt, Human
cccaccacuaccaccccccacccc

SEQ ID NO: 535853 - RNA, 21 nt, Human
cccacucccaucuccuuuuuc

SEQ ID NO: 535854 - RNA, 21 nt, Human
ccccacucccaucuccuuuuu

SEQ ID NO: 535855 - RNA, 21 nt, Human
ccccacucccaucuccuuuuu

SEQ ID NO: 535856 - RNA, 18 nt, Human
ccccagagcccagguagg

SEQ ID NO: 535857 - RNA, 23 nt, Human
ccccagguuuggaaggaugccuc

SEQ ID NO: 535858 - RNA, 22 nt, Human
ccccaucuggugcccacccucc

SEQ ID NO: 535859 - RNA, 19 nt, Human
cccccacccccguccccca

SEQ ID NO: 535860 - RNA, 23 nt, Human
cccccacccccgucccccagguu

SEQ ID NO: 535861 - RNA, 20 nt, Human
cccccuuaaaaggcacugug

SEQ ID NO: 535862 - RNA, 23 nt, Human
ccccucccuccuuuucccucucc

SEQ ID NO: 535863 - RNA, 22 nt, Human
ccccugggcuagggguuggcuu

SEQ ID NO: 535864 - RNA, 25 nt, Human
ccccuguggcagcagcuguggggcu

SEQ ID NO: 535865 - RNA, 21 nt, Human
cccgucccccagguuuggaag

SEQ ID NO: 535866 - RNA, 19 nt, Human
cccucccuccuuuucccuc

SEQ ID NO: 535867 - RNA, 19 nt, Human
cccuccuuuucccucucca

SEQ ID NO: 535868 - RNA, 24 nt, Human
cccuccuuuucccucuccaggccc

SEQ ID NO: 535869 - RNA, 19 nt, Human
ccgcacccgccuccacccu

SEQ ID NO: 535870 - RNA, 19 nt, Human
ccgccagugccucuugcug

SEQ ID NO: 535871 - RNA, 24 nt, Human
ccgcccgcccggccaggggccagg

SEQ ID NO: 535872 - RNA, 21 nt, Human
ccuccacaugcucuccacuac

SEQ ID NO: 535873 - RNA, 22 nt, Human
ccucccaccacuaccacccccc

SEQ ID NO: 535874 - RNA, 24 nt, Human
ccucucccgcugcgccucuaggag

SEQ ID NO: 535875 - RNA, 19 nt, Human
ccugcaaaaccagccaagc

SEQ ID NO: 535876 - RNA, 20 nt, Human
ccugcuuccuucucccaccc

SEQ ID NO: 535877 - RNA, 26 nt, Human
ccugggcccuggaagugggccaaggg

SEQ ID NO: 535878 - RNA, 23 nt, Human
ccugggcccuggugcuggugccu

SEQ ID NO: 535879 - RNA, 21 nt, Human
ccugggcugugccagggaagc

SEQ ID NO: 535880 - RNA, 22 nt, Human
ccuucucccaugcucucucaaa

SEQ ID NO: 535881 - RNA, 21 nt, Human
ccuuuucccucuccaggccca

SEQ ID NO: 535882 - RNA, 23 nt, Human
cgaccuucuccacccccacuccc

SEQ ID NO: 535883 - RNA, 22 nt, Human
cgagagaggucaaggcacacaa

SEQ ID NO: 535884 - RNA, 22 nt, Human
cgcccggcgcugcgaggucccc

SEQ ID NO: 535885 - RNA, 19 nt, Human
cggggcccuggggcgagcc

SEQ ID NO: 535886 - RNA, 21 nt, Human
cuaaacuaucucagggacccc

SEQ ID NO: 535887 - RNA, 23 nt, Human
cuaccaccccccacccccguccc

SEQ ID NO: 535888 - RNA, 21 nt, Human
cuaucuucccagguggugcag

SEQ ID NO: 535889 - RNA, 21 nt, Human
cucccaccccagccuggagaa

SEQ ID NO: 535890 - RNA, 23 nt, Human
cucccaucccaccaccucucucc

SEQ ID NO: 535891 - RNA, 19 nt, Human
cuccugcaggccugcugcc

SEQ ID NO: 535892 - RNA, 27 nt, Human
cugggcccuggugcuggugccuucuga

SEQ ID NO: 535893 - RNA, 19 nt, Human
cuggugggucuggggaugg

SEQ ID NO: 535894 - RNA, 21 nt, Human
cugguugaugggcugaaagaa

SEQ ID NO: 535895 - RNA, 22 nt, Human
cugugcacacacaggaugugcg

SEQ ID NO: 535896 - RNA, 18 nt, Human
cuguucacagggagagag

SEQ ID NO: 535897 - RNA, 24 nt, Human
cuucccagguggugcagacacccc

SEQ ID NO: 535898 - RNA, 26 nt, Human
cuucugggaccuccaaagcugacauu

SEQ ID NO: 535899 - RNA, 23 nt, Human
cuuugguuuucaggaccccuggc

SEQ ID NO: 535900 - RNA, 22 nt, Human
gaccugggccucaggaggaagg

SEQ ID NO: 535901 - RNA, 18 nt, Human
gaggccagagaacagaag

SEQ ID NO: 535902 - RNA, 23 nt, Human
gagggggugaggccagagaacag

SEQ ID NO: 535903 - RNA, 23 nt, Human
gagucaguuucuaauaucucugg

SEQ ID NO: 535904 - RNA, 22 nt, Human
gauccaguggagggacagcugu

SEQ ID NO: 535905 - RNA, 19 nt, Human
gcaccagaaacagguuuag

SEQ ID NO: 535906 - RNA, 18 nt, Human
gcaggccuuggccuggca

SEQ ID NO: 535907 - RNA, 23 nt, Human
gccacgaccuucuccacccccac

SEQ ID NO: 535908 - RNA, 21 nt, Human
gcccuggaacagagcugguac

SEQ ID NO: 535909 - RNA, 18 nt, Human
gcccuggugcuggugccu

SEQ ID NO: 535910 - RNA, 22 nt, Human
gcuccccagaugguggcguggc

SEQ ID NO: 535911 - RNA, 19 nt, Human
gcugguccccaucuggugc

SEQ ID NO: 535912 - RNA, 20 nt, Human
gcuuccuucucccaccccag

SEQ ID NO: 535913 - RNA, 21 nt, Human
ggaggagccagcaggcccaga

SEQ ID NO: 535914 - RNA, 18 nt, Human
ggaguggcaggaaagugg

SEQ ID NO: 535915 - RNA, 22 nt, Human
ggcaagggcuucccuuugaggg

SEQ ID NO: 535916 - RNA, 20 nt, Human
ggcauguggugguguggccg

SEQ ID NO: 535917 - RNA, 21 nt, Human
ggccaggccggggccgcugca

SEQ ID NO: 535918 - RNA, 22 nt, Human
ggcuagggguuggcuucucagg

SEQ ID NO: 535919 - RNA, 18 nt, Human
gggcugaaaagggggaag

SEQ ID NO: 535920 - RNA, 19 nt, Human
ggggauccaguggagggac

SEQ ID NO: 535921 - RNA, 19 nt, Human
guacaacacauguggaugg

SEQ ID NO: 535922 - RNA, 19 nt, Human
gucuggugggucuggggau

SEQ ID NO: 535923 - RNA, 20 nt, Human
gucuggugggucuggggaug

SEQ ID NO: 535924 - RNA, 21 nt, Human
gugcagaggguuauaagguca

SEQ ID NO: 535925 - RNA, 18 nt, Human
gugccagggaagcagagg

SEQ ID NO: 535926 - RNA, 18 nt, Human
guggagggacagcuguga

SEQ ID NO: 535927 - RNA, 21 nt, Human
guggagggacagcugugcaca

SEQ ID NO: 535928 - RNA, 22 nt, Human
uaaaaggcacugugggagcuga

SEQ ID NO: 535929 - RNA, 25 nt, Human
uaacaggauugcucaucccaggcuu

SEQ ID NO: 535930 - RNA, 24 nt, Human
uaccaccccccacccccguccccc

SEQ ID NO: 535931 - RNA, 22 nt, Human
uagagcugaaaguacaacacau

SEQ ID NO: 535932 - RNA, 21 nt, Human
uagggaagguccagauguacu

SEQ ID NO: 535933 - RNA, 19 nt, Human
uaugaaagagggugagucc

SEQ ID NO: 535934 - RNA, 22 nt, Human
ucaaacccccacuggcaagggc

SEQ ID NO: 535935 - RNA, 18 nt, Human
ucacaggcuuucacaggg

SEQ ID NO: 535936 - RNA, 23 nt, Human
ucagcuccccuuccaccuggccc

SEQ ID NO: 535937 - RNA, 19 nt, Human
ucagggguccucuuccccc

SEQ ID NO: 535938 - RNA, 24 nt, Human
uccaccuggcccuaguuggccccc

SEQ ID NO: 535939 - RNA, 19 nt, Human
uccacuacagccacacaca

SEQ ID NO: 535940 - RNA, 19 nt, Human
uccaguggagggacagcug

SEQ ID NO: 535941 - RNA, 20 nt, Human
ucccaguucccacagcaccc

SEQ ID NO: 535942 - RNA, 22 nt, Human
ucccaucuccuuuuucuccagc

SEQ ID NO: 535943 - RNA, 22 nt, Human
ucccuccuuuucccucuccagg

SEQ ID NO: 535944 - RNA, 19 nt, Human
ucccugggaggacuggcug

SEQ ID NO: 535945 - RNA, 21 nt, Human
ucuccacccccacucccaucu

SEQ ID NO: 535946 - RNA, 22 nt, Human
ucuccacuacagccacacacag

SEQ ID NO: 535947 - RNA, 25 nt, Human
ucucccaccccagccuggagaaagc

SEQ ID NO: 535948 - RNA, 24 nt, Human
ucugcuguguggugucuggugggu

SEQ ID NO: 535949 - RNA, 21 nt, Human
ucuguguggugcgugugugua

SEQ ID NO: 535950 - RNA, 18 nt, Human
ucuuauccaccuucuccc

SEQ ID NO: 535951 - RNA, 19 nt, Human
ugaaagagggugagucccc

SEQ ID NO: 535952 - RNA, 22 nt, Human
ugaaaugcugggguggggaguc

SEQ ID NO: 535953 - RNA, 18 nt, Human
ugagggggugaggccaga

SEQ ID NO: 535954 - RNA, 23 nt, Human
ugaugggcugaaagaaggagcgg

SEQ ID NO: 535955 - RNA, 28 nt, Human
ugcaaaaccagccaagcuggaggccaca

SEQ ID NO: 535956 - RNA, 26 nt, Human
ugcaggccugcugccccgccagugcc

SEQ ID NO: 535957 - RNA, 22 nt, Human
ugcagguucacaaacugacacu

SEQ ID NO: 535958 - RNA, 25 nt, Human
ugccaggcacuugcagcucuguccu

SEQ ID NO: 535959 - RNA, 19 nt, Human
ugccagggagugugugaag

SEQ ID NO: 535960 - RNA, 21 nt, Human
ugccccgccagugccucuugc

SEQ ID NO: 535961 - RNA, 18 nt, Human
ugccugggcugugccagg

SEQ ID NO: 535962 - RNA, 23 nt, Human
ugccugggcugugccagggaagc

SEQ ID NO: 535963 - RNA, 21 nt, Human
uggaaaaacagcuccugcagg

SEQ ID NO: 535964 - RNA, 21 nt, Human
uggaaagcaggccuagaaggu

SEQ ID NO: 535965 - RNA, 19 nt, Human
uggaacagagcugguacag

SEQ ID NO: 535966 - RNA, 19 nt, Human
uggaagagaaaagcacuga

SEQ ID NO: 535967 - RNA, 25 nt, Human
uggagggacagcugugcacacacag

SEQ ID NO: 535968 - RNA, 20 nt, Human
uggauggaagcuugugcgag

SEQ ID NO: 535969 - RNA, 25 nt, Human
uggcaggcaggcaggcagggcauuc

SEQ ID NO: 535970 - RNA, 21 nt, Human
uggcccuaguuggccccugug

SEQ ID NO: 535971 - RNA, 18 nt, Human
uggcuucucagcuccccu

SEQ ID NO: 535972 - RNA, 21 nt, Human
ugggaccuccaaagcugacau

SEQ ID NO: 535973 - RNA, 20 nt, Human
ugggcccuggugcuggugcc

SEQ ID NO: 535974 - RNA, 18 nt, Human
ugggcuagggguuggcuu

SEQ ID NO: 535975 - RNA, 19 nt, Human
uggugcguguguguacucc

SEQ ID NO: 535976 - RNA, 21 nt, Human
ugguguggccgugugggguug

SEQ ID NO: 535977 - RNA, 21 nt, Human
uguagagacacaggcacaggg

SEQ ID NO: 535978 - RNA, 19 nt, Human
uguccugcuuccuucuccc

SEQ ID NO: 535979 - RNA, 21 nt, Human
ugugcacacacaggaugugcg

SEQ ID NO: 535980 - RNA, 22 nt, Human
uguggccauggcgcugggcacc

SEQ ID NO: 535981 - RNA, 23 nt, Human
ugugggagcugaggucuaagaug

SEQ ID NO: 535982 - RNA, 23 nt, Human
uguggugcguguguguacuccug

SEQ ID NO: 535983 - RNA, 20 nt, Human
uguguacacuugggcaugug

SEQ ID NO: 535984 - RNA, 18 nt, Human
uguguggugcgugugugu

SEQ ID NO: 535985 - RNA, 19 nt, Human
uuccccugacacuggcucc

SEQ ID NO: 535986 - RNA, 22 nt, Human
uucccucccaccacuaccaccc

SEQ ID NO: 535987 - RNA, 26 nt, Human
uucccucccaccacuaccacccccca

SEQ ID NO: 535988 - RNA, 19 nt, Human
uugcugggcucucugaagc

SEQ ID NO: 535989 - RNA, 24 nt, Human
aaguaacugggacugcaggcaugu

SEQ ID NO: 535990 - RNA, 22 nt, Human
accauguuggccaggcuggucu

SEQ ID NO: 535991 - RNA, 20 nt, Human
acgcuguugcccaggcugga

SEQ ID NO: 535992 - RNA, 25 nt, Human
acgcuguugcccaggcuggaaugca

SEQ ID NO: 535993 - RNA, 22 nt, Human
agguuucuauuuuuaguagaga

SEQ ID NO: 535994 - RNA, 22 nt, Human
aguagagaugggguuucaccau

SEQ ID NO: 535995 - RNA, 18 nt, Human
agugggauuaucucagcu

SEQ ID NO: 535996 - RNA, 24 nt, Human
aucucugccuuccugguuuaagag

SEQ ID NO: 535997 - RNA, 19 nt, Human
augagaucagguuuugcua

SEQ ID NO: 535998 - RNA, 22 nt, Human
augggguuucaccauguuggcc

SEQ ID NO: 535999 - RNA, 23 nt, Human
augggguuucaccauguuggcca

SEQ ID NO: 536000 - RNA, 24 nt, Human
augggguuucaccauguuggccag

SEQ ID NO: 536001 - RNA, 21 nt, Human
caccauguuggccaggcuggu

SEQ ID NO: 536002 - RNA, 24 nt, Human
caccauguuggccaggcuggucuu

SEQ ID NO: 536003 - RNA, 27 nt, Human
caccauguuggccaggcuggucuugaa

SEQ ID NO: 536004 - RNA, 24 nt, Human
cacgcuguugcccaggcuggaaug

SEQ ID NO: 536005 - RNA, 20 nt, Human
caggcaugugccaccacgcc

SEQ ID NO: 536006 - RNA, 24 nt, Human
cauguuggccaggcuggucuugaa

SEQ ID NO: 536007 - RNA, 24 nt, Human
ccaccacaccuggcuauacacaga

SEQ ID NO: 536008 - RNA, 18 nt, Human
ccacugcugggauuacag

SEQ ID NO: 536009 - RNA, 20 nt, Human
ccacugcugggauuacaggc

SEQ ID NO: 536010 - RNA, 22 nt, Human
ccacugcugggauuacaggcgu

SEQ ID NO: 536011 - RNA, 24 nt, Human
cccaaguaacugggacugcaggca

SEQ ID NO: 536012 - RNA, 21 nt, Human
cccacugcugggauuacaggc

SEQ ID NO: 536013 - RNA, 21 nt, Human
cccacugcugggauuacaggc

SEQ ID NO: 536014 - RNA, 22 nt, Human
ccucaggcacccaaguaacugg

SEQ ID NO: 536015 - RNA, 24 nt, Human
ccuuccugguuuaagagauucucc

SEQ ID NO: 536016 - RNA, 24 nt, Human
cucaagugaucugcccaccucggu

SEQ ID NO: 536017 - RNA, 25 nt, Human
cucacugcaaucucugccuuccugg

SEQ ID NO: 536018 - RNA, 21 nt, Human
cucccacugcugggauuacag

SEQ ID NO: 536019 - RNA, 23 nt, Human
cugcaaucucugccuuccugguu

SEQ ID NO: 536020 - RNA, 24 nt, Human
gaacucaagugaucugcccaccuc

SEQ ID NO: 536021 - RNA, 18 nt, Human
gagaugggguuucaccau

SEQ ID NO: 536022 - RNA, 24 nt, Human
gagaugggguuucaccauguuggc

SEQ ID NO: 536023 - RNA, 18 nt, Human
gauuacaggcguaagcca

SEQ ID NO: 536024 - RNA, 21 nt, Human
gauuacaggcguaagccacca

SEQ ID NO: 536025 - RNA, 19 nt, Human
ggacugcaggcaugugcca

SEQ ID NO: 536026 - RNA, 19 nt, Human
ggauuacaggcguaagcca

SEQ ID NO: 536027 - RNA, 18 nt, Human
gggacugcaggcaugugc

SEQ ID NO: 536028 - RNA, 20 nt, Human
gggggacagcgcuugccacc

SEQ ID NO: 536029 - RNA, 22 nt, Human
gggguuucaccauguuggccag

SEQ ID NO: 536030 - RNA, 23 nt, Human
gggguuucaccauguuggccagg

SEQ ID NO: 536031 - RNA, 23 nt, Human
gguuucuauuuuuaguagagaug

SEQ ID NO: 536032 - RNA, 23 nt, Human
guagagaugggguuucaccaugu

SEQ ID NO: 536033 - RNA, 24 nt, Human
gugaucugcccaccucggucuccc

SEQ ID NO: 536034 - RNA, 22 nt, Human
uacaggcguaagccaccacacc

SEQ ID NO: 536035 - RNA, 22 nt, Human
uagagaugggguuucaccaugu

SEQ ID NO: 536036 - RNA, 24 nt, Human
uaguagagaugggguuucaccaug

SEQ ID NO: 536037 - RNA, 26 nt, Human
uaguagagaugggguuucaccauguu

SEQ ID NO: 536038 - RNA, 24 nt, Human
uauccagggacaccucugcugggg

SEQ ID NO: 536039 - RNA, 24 nt, Human
ucacgcuguugcccaggcuggaau

SEQ ID NO: 536040 - RNA, 18 nt, Human
ucacugcaaucucugccu

SEQ ID NO: 536041 - RNA, 24 nt, Human
ucacugcaaucucugccuuccugg

SEQ ID NO: 536042 - RNA, 24 nt, Human
ucacugcaaucucugccuuccugg

SEQ ID NO: 536043 - RNA, 25 nt, Human
ucacugcaaucucugccuuccuggu

SEQ ID NO: 536044 - RNA, 22 nt, Human
ucccacugcugggauuacaggc

SEQ ID NO: 536045 - RNA, 22 nt, Human
ucccacugcugggauuacaggc

SEQ ID NO: 536046 - RNA, 24 nt, Human
ucccacugcugggauuacaggcgu

SEQ ID NO: 536047 - RNA, 23 nt, Human
uccugguuuaagagauucuccug

SEQ ID NO: 536048 - RNA, 22 nt, Human
ucucacgcuguugcccaggcug

SEQ ID NO: 536049 - RNA, 23 nt, Human
ucucacgcuguugcccaggcugg

SEQ ID NO: 536050 - RNA, 24 nt, Human
ucucacgcuguugcccaggcugga

SEQ ID NO: 536051 - RNA, 24 nt, Human
ucucccacugcugggauuacaggc

SEQ ID NO: 536052 - RNA, 18 nt, Human
ugaacucaagugaucugc

SEQ ID NO: 536053 - RNA, 22 nt, Human
ugagaugaagucucacgcuguu

SEQ ID NO: 536054 - RNA, 24 nt, Human
ugaucugcccaccucggucuccca

SEQ ID NO: 536055 - RNA, 22 nt, Human
ugcagugggauuaucucagcuc

SEQ ID NO: 536056 - RNA, 21 nt, Human
ugccucaggcacccaaguaac

SEQ ID NO: 536057 - RNA, 23 nt, Human
ugcuauccuguauccagggacac

SEQ ID NO: 536058 - RNA, 27 nt, Human
ugcugggauuacaggcguaagccacca

SEQ ID NO: 536059 - RNA, 21 nt, Human
ugcugggggacagcgcuugcc

SEQ ID NO: 536060 - RNA, 23 nt, Human
uggccaggcuggucuugaacuca

SEQ ID NO: 536061 - RNA, 18 nt, Human
ugggacugcaggcaugug

SEQ ID NO: 536062 - RNA, 21 nt, Human
ugggacugcaggcaugugcca

SEQ ID NO: 536063 - RNA, 24 nt, Human
ugggacugcaggcaugugccacca

SEQ ID NO: 536064 - RNA, 18 nt, Human
ugggauuacaggcguaag

SEQ ID NO: 536065 - RNA, 19 nt, Human
ugggauuacaggcguaagc

SEQ ID NO: 536066 - RNA, 22 nt, Human
ugggauuacaggcguaagccac

SEQ ID NO: 536067 - RNA, 24 nt, Human
ugggauuacaggcguaagccacca

SEQ ID NO: 536068 - RNA, 24 nt, Human
ugggauuaucucagcucacugcaa

SEQ ID NO: 536069 - RNA, 24 nt, Human
ugggguuucaccauguuggccagg

SEQ ID NO: 536070 - RNA, 18 nt, Human
uuaguagagaugggguuu

SEQ ID NO: 536071 - RNA, 22 nt, Human
uuaguagagaugggguuucacc

SEQ ID NO: 536072 - RNA, 24 nt, Human
uuaguagagaugggguuucaccau

SEQ ID NO: 536073 - RNA, 20 nt, Human
uucagguuccaggaacuggc

SEQ ID NO: 536074 - RNA, 23 nt, Human
uugcccaggcuggaaugcagugg

SEQ ID NO: 536075 - RNA, 23 nt, Human
uuuaagagauucuccugccucag

SEQ ID NO: 536076 - RNA, 24 nt, Human
uuucaccauguuggccaggcuggu

SEQ ID NO: 536077 - RNA, 18 nt, Human
uuucuauuuuuaguagag

SEQ ID NO: 536078 - RNA, 19 nt, Human
uuucuauuuuuaguagaga

SEQ ID NO: 536079 - RNA, 24 nt, Human
uuuuuaguagagaugggguuucac

SEQ ID NO: 536080 - RNA, 26 nt, Human
uuuuuuuuuuuugagaugaagucuca

SEQ ID NO: 536081 - RNA, 21 nt, Human
aagggaccaaagcugggggca

SEQ ID NO: 536082 - RNA, 20 nt, Human
acagaccuucagaagcccca

SEQ ID NO: 536083 - RNA, 22 nt, Human
accagccugggcccugcugaug

SEQ ID NO: 536084 - RNA, 25 nt, Human
accagcugcacugcuggggcugcac

SEQ ID NO: 536085 - RNA, 21 nt, Human
agcacagaccuucagaagccc

SEQ ID NO: 536086 - RNA, 20 nt, Human
agcagggaaagcaacaccac

SEQ ID NO: 536087 - RNA, 25 nt, Human
aggaagaggaaaccagcauccaaaa

SEQ ID NO: 536088 - RNA, 24 nt, Human
aggagcuccucaucuccaggagcc

SEQ ID NO: 536089 - RNA, 20 nt, Human
aggggucacgggcaaugcca

SEQ ID NO: 536090 - RNA, 22 nt, Human
agggguugggaguuagguaaga

SEQ ID NO: 536091 - RNA, 22 nt, Human
agguccuggguaugucaccucc

SEQ ID NO: 536092 - RNA, 19 nt, Human
aguggccagggcugggccu

SEQ ID NO: 536093 - RNA, 22 nt, Human
aucagccgagggcacuccagga

SEQ ID NO: 536094 - RNA, 24 nt, Human
augcacaacuauagcauucauaug

SEQ ID NO: 536095 - RNA, 24 nt, Human
augguggugcagacccaggugggu

SEQ ID NO: 536096 - RNA, 20 nt, Human
caaccaagcuggggucaagc

SEQ ID NO: 536097 - RNA, 30 nt, Human
caacguacccaucuuuccaucuauaucaaa

SEQ ID NO: 536098 - RNA, 20 nt, Human
caacuggugggcaagaacuc

SEQ ID NO: 536099 - RNA, 18 nt, Human
caaugccagagcuggggc

SEQ ID NO: 536100 - RNA, 20 nt, Human
caccgcagguccuggguaug

SEQ ID NO: 536101 - RNA, 21 nt, Human
cacggcacccucuggugggcc

SEQ ID NO: 536102 - RNA, 24 nt, Human
cagcaggcugguagccaggagccc

SEQ ID NO: 536103 - RNA, 18 nt, Human
cagccucucuucuggguc

SEQ ID NO: 536104 - RNA, 19 nt, Human
cagccucucuucugggucc

SEQ ID NO: 536105 - RNA, 22 nt, Human
cagcuccuguagggaauacccc

SEQ ID NO: 536106 - RNA, 24 nt, Human
cagcuucuugaucccugagccccu

SEQ ID NO: 536107 - RNA, 18 nt, Human
caggagccaccagcagag

SEQ ID NO: 536108 - RNA, 19 nt, Human
caggagccaccagcagagc

SEQ ID NO: 536109 - RNA, 21 nt, Human
caggagccccuugaugacauc

SEQ ID NO: 536110 - RNA, 23 nt, Human
caguggccagggcugggccuggc

SEQ ID NO: 536111 - RNA, 19 nt, Human
ccaacaucaccacaucccg

SEQ ID NO: 536112 - RNA, 18 nt, Human
ccacucugucauccaagg

SEQ ID NO: 536113 - RNA, 18 nt, Human
ccagauaucaggauguaa

SEQ ID NO: 536114 - RNA, 21 nt, Human
ccagcacguagcgcagccgag

SEQ ID NO: 536115 - RNA, 19 nt, Human
ccagcagagcccgaagagc

SEQ ID NO: 536116 - RNA, 27 nt, Human
ccagcugccuccccaguacgacucucu

SEQ ID NO: 536117 - RNA, 18 nt, Human
cccagggcagggguuggg

SEQ ID NO: 536118 - RNA, 24 nt, Human
cccauccacucugucauccaagga

SEQ ID NO: 536119 - RNA, 23 nt, Human
ccccaaacucaccagccugggcc

SEQ ID NO: 536120 - RNA, 25 nt, Human
ccccaaacucaccagccugggcccu

SEQ ID NO: 536121 - RNA, 18 nt, Human
ccccuugaugacaucaug

SEQ ID NO: 536122 - RNA, 23 nt, Human
cccgaugguccuggagugcguca

SEQ ID NO: 536123 - RNA, 23 nt, Human
cccugagccccuucccugugacc

SEQ ID NO: 536124 - RNA, 23 nt, Human
cccugcccccacaggagaccaac

SEQ ID NO: 536125 - RNA, 18 nt, Human
ccucagaggcugucucuc

SEQ ID NO: 536126 - RNA, 20 nt, Human
ccucagcccagggcaggggu

SEQ ID NO: 536127 - RNA, 20 nt, Human
ccucauccuccuuguccucc

SEQ ID NO: 536128 - RNA, 24 nt, Human
ccugcaggaucuccucaggagcca

SEQ ID NO: 536129 - RNA, 23 nt, Human
ccugcagucuugcuauguucucu

SEQ ID NO: 536130 - RNA, 21 nt, Human
ccuuguggcugauuccaggga

SEQ ID NO: 536131 - RNA, 19 nt, Human
ccuuuuugcuuuuccugcu

SEQ ID NO: 536132 - RNA, 22 nt, Human
cgaaggaacacagcagggaaag

SEQ ID NO: 536133 - RNA, 22 nt, Human
cgaugguccuggagcggaggcc

SEQ ID NO: 536134 - RNA, 19 nt, Human
cucaaacaaccugcuccca

SEQ ID NO: 536135 - RNA, 24 nt, Human
cuccaggagccaccagcagagccc

SEQ ID NO: 536136 - RNA, 23 nt, Human
cuccaggccugucugggcgccgc

SEQ ID NO: 536137 - RNA, 26 nt, Human
cucccagcacagaccuucagaagccc

SEQ ID NO: 536138 - RNA, 25 nt, Human
cucuaaaacagcucaaacaaccugc

SEQ ID NO: 536139 - RNA, 18 nt, Human
cugcuccagcugccuccc

SEQ ID NO: 536140 - RNA, 19 nt, Human
cuggggcugcaccagcugc

SEQ ID NO: 536141 - RNA, 18 nt, Human
cuggguccucauccucag

SEQ ID NO: 536142 - RNA, 26 nt, Human
gaaggugcugucgaggagcuccucau

SEQ ID NO: 536143 - RNA, 22 nt, Human
gacagcaucuugcugcuccagc

SEQ ID NO: 536144 - RNA, 23 nt, Human
gagcgaaggaacacagcagggaa

SEQ ID NO: 536145 - RNA, 19 nt, Human
gcacaggcagauucacggc

SEQ ID NO: 536146 - RNA, 20 nt, Human
gcagcccugguuccuaggag

SEQ ID NO: 536147 - RNA, 23 nt, Human
gccagggcugggccuggcucucu

SEQ ID NO: 536148 - RNA, 24 nt, Human
gcccugcccccacaggagaccaac

SEQ ID NO: 536149 - RNA, 27 nt, Human
gccuccucuccaugguggugcagaccc

SEQ ID NO: 536150 - RNA, 22 nt, Human
gcucucucugccuccucuccau

SEQ ID NO: 536151 - RNA, 25 nt, Human
gcuggauacaggacaacguacccag

SEQ ID NO: 536152 - RNA, 18 nt, Human
gcuggcagcccugguucc

SEQ ID NO: 536153 - RNA, 21 nt, Human
gcuggggcuucuggcuccagc

SEQ ID NO: 536154 - RNA, 20 nt, Human
gcuucagcuauccuccuugc

SEQ ID NO: 536155 - RNA, 20 nt, Human
gcuucggucucgacagcauc

SEQ ID NO: 536156 - RNA, 21 nt, Human
ggaaaccuggcugcgggucag

SEQ ID NO: 536157 - RNA, 19 nt, Human
ggaacacagcagggaaagc

SEQ ID NO: 536158 - RNA, 18 nt, Human
ggagaagggaccaaagcu

SEQ ID NO: 536159 - RNA, 21 nt, Human
ggagcggaggccggucugagu

SEQ ID NO: 536160 - RNA, 19 nt, Human
ggagcuucuccagcucgac

SEQ ID NO: 536161 - RNA, 18 nt, Human
ggcaaugccagagcuggg

SEQ ID NO: 536162 - RNA, 19 nt, Human
ggcagguccacgucagggg

SEQ ID NO: 536163 - RNA, 20 nt, Human
ggcuccagcuugucucucuu

SEQ ID NO: 536164 - RNA, 19 nt, Human
gggcaaguccuggguccag

SEQ ID NO: 536165 - RNA, 20 nt, Human
gggcaaguccuggguccagu

SEQ ID NO: 536166 - RNA, 21 nt, Human
gggcacaggcagauucacggc

SEQ ID NO: 536167 - RNA, 19 nt, Human
gggcauucuucauccuugu

SEQ ID NO: 536168 - RNA, 19 nt, Human
gggcugcaccagcugcgag

SEQ ID NO: 536169 - RNA, 19 nt, Human
ggggucacgggcaaugcca

SEQ ID NO: 536170 - RNA, 21 nt, Human
ggguccuccuggccucugcuc

SEQ ID NO: 536171 - RNA, 22 nt, Human
ggugacauuagcagaggguccu

SEQ ID NO: 536172 - RNA, 18 nt, Human
ggugcagacccagguggg

SEQ ID NO: 536173 - RNA, 18 nt, Human
guccuggguccaguggag

SEQ ID NO: 536174 - RNA, 19 nt, Human
gucugggcuuccugcucag

SEQ ID NO: 536175 - RNA, 18 nt, Human
guggcugugagaucucaa

SEQ ID NO: 536176 - RNA, 19 nt, Human
uaagacacugccugcuagc

SEQ ID NO: 536177 - RNA, 24 nt, Human
uaggacacaauguucuucgucugg

SEQ ID NO: 536178 - RNA, 18 nt, Human
ucacggccacugaacuug

SEQ ID NO: 536179 - RNA, 20 nt, Human
ucaugccuccucagccucuc

SEQ ID NO: 536180 - RNA, 22 nt, Human
uccaacaucaccacaucccgau

SEQ ID NO: 536181 - RNA, 25 nt, Human
uccaacaucaccacaucccgauggu

SEQ ID NO: 536182 - RNA, 20 nt, Human
uccagcacguagcgcagccg

SEQ ID NO: 536183 - RNA, 18 nt, Human
uccaggagauaaaaaaca

SEQ ID NO: 536184 - RNA, 26 nt, Human
uccagggaaugccgggccaggcggau

SEQ ID NO: 536185 - RNA, 20 nt, Human
uccaguggagcuucuccagc

SEQ ID NO: 536186 - RNA, 25 nt, Human
ucccugugaccagauugggucccug

SEQ ID NO: 536187 - RNA, 21 nt, Human
uccuggagcggaggccggucu

SEQ ID NO: 536188 - RNA, 26 nt, Human
ucuaucagccgagggcacuccaggac

SEQ ID NO: 536189 - RNA, 21 nt, Human
ucucaagaaagcaaccaagcu

SEQ ID NO: 536190 - RNA, 21 nt, Human
ucuccagcagugucuccgugu

SEQ ID NO: 536191 - RNA, 25 nt, Human
ucuccaggagccaccagcagagccc

SEQ ID NO: 536192 - RNA, 22 nt, Human
ucucgacagcaucuugcugcuc

SEQ ID NO: 536193 - RNA, 19 nt, Human
ucuuauucauccgugcucc

SEQ ID NO: 536194 - RNA, 20 nt, Human
ugaucccugagccccuuccc

SEQ ID NO: 536195 - RNA, 21 nt, Human
ugaucccugagccccuucccu

SEQ ID NO: 536196 - RNA, 21 nt, Human
ugccagagcuggggcuucugg

SEQ ID NO: 536197 - RNA, 20 nt, Human
ugccuccucagccucucuuc

SEQ ID NO: 536198 - RNA, 23 nt, Human
ugcuccagcugccuccccaguac

SEQ ID NO: 536199 - RNA, 19 nt, Human
ugcugggaaaccuggcugc

SEQ ID NO: 536200 - RNA, 19 nt, Human
ugcugucgaggagcuccuc

SEQ ID NO: 536201 - RNA, 20 nt, Human
uggauacaggacaacguacc

SEQ ID NO: 536202 - RNA, 21 nt, Human
uggcaaaagcugacaugaggg

SEQ ID NO: 536203 - RNA, 24 nt, Human
uggcagcccugguuccuaggagug

SEQ ID NO: 536204 - RNA, 21 nt, Human
ugggcacaggcagauucacgg

SEQ ID NO: 536205 - RNA, 23 nt, Human
ugggcauucuucauccuuguccu

SEQ ID NO: 536206 - RNA, 18 nt, Human
ugggcccugcugaugacc

SEQ ID NO: 536207 - RNA, 22 nt, Human
ugggcuaacacaugcagugcca

SEQ ID NO: 536208 - RNA, 23 nt, Human
ugggcucacuggcaaaagcugac

SEQ ID NO: 536209 - RNA, 20 nt, Human
uggggcugcaccagcugcga

SEQ ID NO: 536210 - RNA, 23 nt, Human
ugucgaggagcuccucaucucca

SEQ ID NO: 536211 - RNA, 19 nt, Human
uguggcugugagaucucaa

SEQ ID NO: 536212 - RNA, 24 nt, Human
uuaguuugcccuguccccaaagag

SEQ ID NO: 536213 - RNA, 23 nt, Human
uucacucccagcacagaccuuca

SEQ ID NO: 536214 - RNA, 21 nt, Human
uuccagggaaugccgggccag

SEQ ID NO: 536215 - RNA, 22 nt, Human
uuccugggcaaagaugcuucuc

SEQ ID NO: 536216 - RNA, 19 nt, Human
uucuggcuccagcuugucu

SEQ ID NO: 536217 - RNA, 20 nt, Human
uucuggcuccagcuugucuc

SEQ ID NO: 536218 - RNA, 22 nt, Human
uuguccaacaucaccacauccc

SEQ ID NO: 536219 - RNA, 21 nt, Human
uuuuuuuuuuuuuuuuuccag

SEQ ID NO: 536220 - RNA, 23 nt, Human
uuuuuuuuuuuuuuuuuuccagg

SEQ ID NO: 536221 - RNA, 22 nt, Human
aacccggaugagggggcuagug

SEQ ID NO: 536222 - RNA, 19 nt, Human
acccggcgcggggcacgcc

SEQ ID NO: 536223 - RNA, 18 nt, Human
acugccgaguacccccca

SEQ ID NO: 536224 - RNA, 22 nt, Human
agaacccggaugagggggcuag

SEQ ID NO: 536225 - RNA, 24 nt, Human
aggcggcggcggcggcggcggcgg

SEQ ID NO: 536226 - RNA, 24 nt, Human
caaguuuauugcuacgcuuguucc

SEQ ID NO: 536227 - RNA, 18 nt, Human
ccccaacaaacccggcgc

SEQ ID NO: 536228 - RNA, 22 nt, Human
ccgaguaccccccaacaaaccc

SEQ ID NO: 536229 - RNA, 20 nt, Human
cggauguaaaguccaagauu

SEQ ID NO: 536230 - RNA, 19 nt, Human
cucuccaaguccagcaagu

SEQ ID NO: 536231 - RNA, 23 nt, Human
gcggaggcggcggcggcggcggc

SEQ ID NO: 536232 - RNA, 19 nt, Human
gcggcggcggcggcggcgg

SEQ ID NO: 536233 - RNA, 20 nt, Human
gcggcggcggcggcggcggc

SEQ ID NO: 536234 - RNA, 20 nt, Human
gcggcggcggcggcggcggc

SEQ ID NO: 536235 - RNA, 20 nt, Human
gcggcggcggcggcggcggc

SEQ ID NO: 536236 - RNA, 23 nt, Human
gcggcggcggcggcggcggcggc

SEQ ID NO: 536237 - RNA, 24 nt, Human
gcggcggcggcggcggcggcggug

SEQ ID NO: 536238 - RNA, 20 nt, Human
gcggcggcggcggcggcggu

SEQ ID NO: 536239 - RNA, 24 nt, Human
gcggcggcggcggcggcgguggcg

SEQ ID NO: 536240 - RNA, 20 nt, Human
gcggcggcggcggcgguggc

SEQ ID NO: 536241 - RNA, 23 nt, Human
gcggcggcggcggcgguggcggc

SEQ ID NO: 536242 - RNA, 19 nt, Human
gcggcggcgguggcggcgc

SEQ ID NO: 536243 - RNA, 18 nt, Human
gcggcgguggcggcgcgc

SEQ ID NO: 536244 - RNA, 20 nt, Human
gcggcgguggcggcgcgcga

SEQ ID NO: 536245 - RNA, 18 nt, Human
gcuacgcuuguuccggcc

SEQ ID NO: 536246 - RNA, 23 nt, Human
ggaggcggcggcggcggcggcgg

SEQ ID NO: 536247 - RNA, 23 nt, Human
ggcgcggggcacgccgggagaga

SEQ ID NO: 536248 - RNA, 23 nt, Human
ggcggaggcggcggcggcggcgg

SEQ ID NO: 536249 - RNA, 20 nt, Human
ggcggcggcggcggcggcgg

SEQ ID NO: 536250 - RNA, 23 nt, Human
ggcggcggcggcggcggcggcgg

SEQ ID NO: 536251 - RNA, 19 nt, Human
ggcggcggcggcggcggug

SEQ ID NO: 536252 - RNA, 23 nt, Human
ggcggcggcggcggcgguggcgg

SEQ ID NO: 536253 - RNA, 24 nt, Human
gggcacgccgggagagaacccgga

SEQ ID NO: 536254 - RNA, 19 nt, Human
uaccccccaacaaacccgg

SEQ ID NO: 536255 - RNA, 19 nt, Human
ugagggggcuaguguagug

SEQ ID NO: 536256 - RNA, 20 nt, Human
ugcuacgcuuguuccggccu

SEQ ID NO: 536257 - RNA, 21 nt, Human
uuugucuuagccuucucucca

SEQ ID NO: 536258 - RNA, 19 nt, Human
aagcagaggagaagcaggg

SEQ ID NO: 536259 - RNA, 20 nt, Human
aaggcgccaccgcccugccc

SEQ ID NO: 536260 - RNA, 19 nt, Human
acaagcagaggagaagcag

SEQ ID NO: 536261 - RNA, 21 nt, Human
accauccaagaauuccuccug

SEQ ID NO: 536262 - RNA, 23 nt, Human
acccgcugucccugggugauggc

SEQ ID NO: 536263 - RNA, 20 nt, Human
acuggugaagccacacucug

SEQ ID NO: 536264 - RNA, 21 nt, Human
agagcggggccucgccaggug

SEQ ID NO: 536265 - RNA, 24 nt, Human
aggacaccauccaagaauuccucc

SEQ ID NO: 536266 - RNA, 20 nt, Human
agugaaggaccucgcggcug

SEQ ID NO: 536267 - RNA, 18 nt, Human
caacuugccaggggacag

SEQ ID NO: 536268 - RNA, 18 nt, Human
caagcagaggagaagcag

SEQ ID NO: 536269 - RNA, 18 nt, Human
caagcgccagcucugagc

SEQ ID NO: 536270 - RNA, 18 nt, Human
caccgugcugagcagagc

SEQ ID NO: 536271 - RNA, 19 nt, Human
cacuuugcaccgugcugag

SEQ ID NO: 536272 - RNA, 19 nt, Human
cagcaggcggccagagacc

SEQ ID NO: 536273 - RNA, 22 nt, Human
cagcaggcggccagagaccagg

SEQ ID NO: 536274 - RNA, 18 nt, Human
cagcugcgucugcaagcg

SEQ ID NO: 536275 - RNA, 22 nt, Human
caggaagcugcccccguagcac

SEQ ID NO: 536276 - RNA, 19 nt, Human
caggaaggccuacccagca

SEQ ID NO: 536277 - RNA, 18 nt, Human
caggaaggccuacccagg

SEQ ID NO: 536278 - RNA, 22 nt, Human
ccagggcacgugugcccagcgc

SEQ ID NO: 536279 - RNA, 18 nt, Human
cccaggaugccgcuggcc

SEQ ID NO: 536280 - RNA, 19 nt, Human
cccaggauggaccugggcc

SEQ ID NO: 536281 - RNA, 24 nt, Human
cccccacaauuacagggugggagu

SEQ ID NO: 536282 - RNA, 25 nt, Human
ccccccacaauuacagggugggagu

SEQ ID NO: 536283 - RNA, 20 nt, Human
ccccuggacuggcucccauc

SEQ ID NO: 536284 - RNA, 23 nt, Human
ccuacccagcaccuguccagaaa

SEQ ID NO: 536285 - RNA, 21 nt, Human
ccuccugaggagacgcgaaga

SEQ ID NO: 536286 - RNA, 22 nt, Human
ccucugguuuggccggcuccgg

SEQ ID NO: 536287 - RNA, 24 nt, Human
ccugggugauggcccggcuccggc

SEQ ID NO: 536288 - RNA, 18 nt, Human
cgcuggccucagccaggg

SEQ ID NO: 536289 - RNA, 23 nt, Human
cggacugcucccucugacuggug

SEQ ID NO: 536290 - RNA, 21 nt, Human
cgguggggucaucuugccucu

SEQ ID NO: 536291 - RNA, 24 nt, Human
cguacaagcagaggagaagcaggg

SEQ ID NO: 536292 - RNA, 25 nt, Human
cguacaagcagaggagaagcagggg

SEQ ID NO: 536293 - RNA, 21 nt, Human
cuccaagacagcagcauucac

SEQ ID NO: 536294 - RNA, 22 nt, Human
cugaccccuggacuggcuccca

SEQ ID NO: 536295 - RNA, 19 nt, Human
cuggggauggccacacccu

SEQ ID NO: 536296 - RNA, 18 nt, Human
cuuugcugcccaggaugg

SEQ ID NO: 536297 - RNA, 21 nt, Human
gaccugggccacccaggaugc

SEQ ID NO: 536298 - RNA, 23 nt, Human
gagaagcaggggugcccaggcug

SEQ ID NO: 536299 - RNA, 19 nt, Human
gaggagacgcgaagaccau

SEQ ID NO: 536300 - RNA, 22 nt, Human
gaggagacgcgaagaccaucga

SEQ ID NO: 536301 - RNA, 23 nt, Human
gcagucccgguggggucaucuug

SEQ ID NO: 536302 - RNA, 23 nt, Human
gccucugguuuggccggcuccgg

SEQ ID NO: 536303 - RNA, 21 nt, Human
gcggcugcggacagguccuug

SEQ ID NO: 536304 - RNA, 20 nt, Human
ggagaagcaggggugcccag

SEQ ID NO: 536305 - RNA, 21 nt, Human
ggagaagcaggggugcccagg

SEQ ID NO: 536306 - RNA, 18 nt, Human
ggagcuccucugcccaca

SEQ ID NO: 536307 - RNA, 19 nt, Human
ggagcuccucugcccacau

SEQ ID NO: 536308 - RNA, 22 nt, Human
ggccagagaccaggaaggccua

SEQ ID NO: 536309 - RNA, 26 nt, Human
ggggugcccaggcugucacagccuug

SEQ ID NO: 536310 - RNA, 23 nt, Human
guccuuguuaguaaggaggaggc

SEQ ID NO: 536311 - RNA, 19 nt, Human
gugcagcgcguggucccgg

SEQ ID NO: 536312 - RNA, 20 nt, Human
gugcagcgcguggucccggc

SEQ ID NO: 536313 - RNA, 19 nt, Human
guggaugggaagugccugu

SEQ ID NO: 536314 - RNA, 23 nt, Human
guguggguugaccuggccuaugc

SEQ ID NO: 536315 - RNA, 24 nt, Human
uccaaaggucaggaaggcgccacc

SEQ ID NO: 536316 - RNA, 18 nt, Human
uccccaaacgugcccagg

SEQ ID NO: 536317 - RNA, 22 nt, Human
uccccaaacgugcccaggcucu

SEQ ID NO: 536318 - RNA, 22 nt, Human
ucccugggugauggcccggcuc

SEQ ID NO: 536319 - RNA, 26 nt, Human
uccggacugcucccucugacugguga

SEQ ID NO: 536320 - RNA, 18 nt, Human
ucgccagguggaaagccc

SEQ ID NO: 536321 - RNA, 20 nt, Human
ugaccccuggacuggcuccc

SEQ ID NO: 536322 - RNA, 19 nt, Human
ugaccuggccuaugcgggg

SEQ ID NO: 536323 - RNA, 20 nt, Human
ugacuggugaagccacacuc

SEQ ID NO: 536324 - RNA, 24 nt, Human
ugacuggugaagccacacucugug

SEQ ID NO: 536325 - RNA, 18 nt, Human
ugccaggggacaggccug

SEQ ID NO: 536326 - RNA, 19 nt, Human
ugcccaggcuccaagacag

SEQ ID NO: 536327 - RNA, 20 nt, Human
ugcccaggcuccaagacagc

SEQ ID NO: 536328 - RNA, 19 nt, Human
ugccgcuggccucagccag

SEQ ID NO: 536329 - RNA, 19 nt, Human
ugccuguguggaugugaag

SEQ ID NO: 536330 - RNA, 20 nt, Human
ugcuaagccaaaccuaggug

SEQ ID NO: 536331 - RNA, 18 nt, Human
ugcucugcaaacccaggg

SEQ ID NO: 536332 - RNA, 25 nt, Human
uggaagaaugaaaagaaguuucugc

SEQ ID NO: 536333 - RNA, 20 nt, Human
uggaaggagcacagaaagga

SEQ ID NO: 536334 - RNA, 21 nt, Human
uggaaggagcacagaaaggaa

SEQ ID NO: 536335 - RNA, 18 nt, Human
uggaccugggccacccag

SEQ ID NO: 536336 - RNA, 18 nt, Human
uggcagcaggcggccaga

SEQ ID NO: 536337 - RNA, 18 nt, Human
uggccucagccagggcac

SEQ ID NO: 536338 - RNA, 20 nt, Human
ugggcggcucggagcuccuc

SEQ ID NO: 536339 - RNA, 22 nt, Human
uggggucaucuugccucuccgg

SEQ ID NO: 536340 - RNA, 23 nt, Human
uggugaagccacacucugugaag

SEQ ID NO: 536341 - RNA, 21 nt, Human
ugguguggguugaccuggccu

SEQ ID NO: 536342 - RNA, 22 nt, Human
ugugaagccaccuugggugggc

SEQ ID NO: 536343 - RNA, 20 nt, Human
uguugcuggcacucccccca

SEQ ID NO: 536344 - RNA, 23 nt, Human
uguugcuggcacuccccccacaa

SEQ ID NO: 536345 - RNA, 22 nt, Human
uuccaaaggucaggaaggcgcc

SEQ ID NO: 536346 - RNA, 21 nt, Human
uuguagaggaacgacucgugu

SEQ ID NO: 536347 - RNA, 20 nt, Human
uuuuuuuuuuuuuugaugga

SEQ ID NO: 536348 - RNA, 18 nt, Human
uuuuuuuuuuuuuuuuug

SEQ ID NO: 536349 - RNA, 22 nt, Human
uuuuuuuuuuuuuuuuugaugg

SEQ ID NO: 536350 - RNA, 21 nt, Human
aagaggccaccucuggagcuc

SEQ ID NO: 536351 - RNA, 20 nt, Human
aagagggaaaaacagggcaa

SEQ ID NO: 536352 - RNA, 20 nt, Human
aaggagaucaacgccacaaa

SEQ ID NO: 536353 - RNA, 23 nt, Human
acaacagcccuuccagcuucucc

SEQ ID NO: 536354 - RNA, 24 nt, Human
acaagcaucuuugggcuuguugac

SEQ ID NO: 536355 - RNA, 18 nt, Human
acacacaaaaaagaugag

SEQ ID NO: 536356 - RNA, 18 nt, Human
acaggcuuucugcacccc

SEQ ID NO: 536357 - RNA, 21 nt, Human
acauacucaauagccccuugc

SEQ ID NO: 536358 - RNA, 21 nt, Human
acggcaucuccaucuccuggg

SEQ ID NO: 536359 - RNA, 20 nt, Human
acugaaugugccaucacccc

SEQ ID NO: 536360 - RNA, 23 nt, Human
acugaccccgaaacucacagaac

SEQ ID NO: 536361 - RNA, 22 nt, Human
acugccucccccuucccuccua

SEQ ID NO: 536362 - RNA, 28 nt, Human
agaaauagcgacagaaaaaccgguaccc

SEQ ID NO: 536363 - RNA, 24 nt, Human
agaacuuuugaggcagcaugggga

SEQ ID NO: 536364 - RNA, 22 nt, Human
agacagagugucuuuuauuccu

SEQ ID NO: 536365 - RNA, 19 nt, Human
agaccuggcagcaccaaca

SEQ ID NO: 536366 - RNA, 18 nt, Human
agagcuccuggcucugcu

SEQ ID NO: 536367 - RNA, 21 nt, Human
agaggaaggaggaggagaaag

SEQ ID NO: 536368 - RNA, 20 nt, Human
agaugguuugggucuaaaac

SEQ ID NO: 536369 - RNA, 22 nt, Human
aggaaggaggaggagaaagggu

SEQ ID NO: 536370 - RNA, 23 nt, Human
aggaaugccagggggccaggugc

SEQ ID NO: 536371 - RNA, 24 nt, Human
aggaggaggagaaagggugggguu

SEQ ID NO: 536372 - RNA, 21 nt, Human
agucacaggucagcuggaaga

SEQ ID NO: 536373 - RNA, 22 nt, Human
aucuguccacagcugccagagc

SEQ ID NO: 536374 - RNA, 24 nt, Human
caaacggcaucuccaucuccuggg

SEQ ID NO: 536375 - RNA, 21 nt, Human
caaauauaaacagggccgugg

SEQ ID NO: 536376 - RNA, 21 nt, Human
caaauuccuggccaaacuaca

SEQ ID NO: 536377 - RNA, 20 nt, Human
caacauaaagacccaaauau

SEQ ID NO: 536378 - RNA, 19 nt, Human
caagaggccaccucuggag

SEQ ID NO: 536379 - RNA, 20 nt, Human
caagcagccauuugcgagac

SEQ ID NO: 536380 - RNA, 20 nt, Human
cacaggcuuucugcaccccu

SEQ ID NO: 536381 - RNA, 20 nt, Human
caccuuuucccacaaccaag

SEQ ID NO: 536382 - RNA, 21 nt, Human
cacugaaugugccaucacccc

SEQ ID NO: 536383 - RNA, 20 nt, Human
cagaacuuuugaggcagcau

SEQ ID NO: 536384 - RNA, 23 nt, Human
cagagcuccuggcucugcucucc

SEQ ID NO: 536385 - RNA, 30 nt, Human
cagcaccaacauaaagacccaaauauaaaa

SEQ ID NO: 536386 - RNA, 19 nt, Human
caugugauggagucagcuu

SEQ ID NO: 536387 - RNA, 19 nt, Human
ccacaaacggcaucuccau

SEQ ID NO: 536388 - RNA, 24 nt, Human
ccacaaacggcaucuccaucuccu

SEQ ID NO: 536389 - RNA, 22 nt, Human
ccacaggcuuucugcaccccuc

SEQ ID NO: 536390 - RNA, 23 nt, Human
ccacaggcuuucugcaccccucu

SEQ ID NO: 536391 - RNA, 21 nt, Human
ccacuggagacaucugcccac

SEQ ID NO: 536392 - RNA, 18 nt, Human
cccaaauauaaacagggc

SEQ ID NO: 536393 - RNA, 24 nt, Human
ccccacuggagacaucugcccacc

SEQ ID NO: 536394 - RNA, 19 nt, Human
ccgccgcggguccggccuc

SEQ ID NO: 536395 - RNA, 22 nt, Human
ccgcgcccgcccgcgucccuuc

SEQ ID NO: 536396 - RNA, 20 nt, Human
ccggagccgcgauguggaga

SEQ ID NO: 536397 - RNA, 20 nt, Human
ccuagagucaagaccugccc

SEQ ID NO: 536398 - RNA, 25 nt, Human
ccuggcuuauuuuauuaacuaagug

SEQ ID NO: 536399 - RNA, 22 nt, Human
cgcugcugguccccgccgcggg

SEQ ID NO: 536400 - RNA, 22 nt, Human
cggagcugcccgcgcccgcccg

SEQ ID NO: 536401 - RNA, 19 nt, Human
cggggccaucggaggccgc

SEQ ID NO: 536402 - RNA, 22 nt, Human
cgucaaguggcaaauuucucca

SEQ ID NO: 536403 - RNA, 21 nt, Human
cuauagcaguagaucugucca

SEQ ID NO: 536404 - RNA, 18 nt, Human
cuccucuagaccgcugcu

SEQ ID NO: 536405 - RNA, 25 nt, Human
cuccuggcucugcucuccacucacc

SEQ ID NO: 536406 - RNA, 18 nt, Human
cuccugggcccacaggcu

SEQ ID NO: 536407 - RNA, 19 nt, Human
cucuagcugcccaucaacu

SEQ ID NO: 536408 - RNA, 18 nt, Human
cugcugguccccgccgcg

SEQ ID NO: 536409 - RNA, 19 nt, Human
cuggcucugcucuccacuc

SEQ ID NO: 536410 - RNA, 19 nt, Human
cuucauagccacacugaau

SEQ ID NO: 536411 - RNA, 24 nt, Human
cuucauagccacacugaaugugcc

SEQ ID NO: 536412 - RNA, 19 nt, Human
cuuuuguggugccacaugg

SEQ ID NO: 536413 - RNA, 19 nt, Human
gaaggaggaggagaaaggg

SEQ ID NO: 536414 - RNA, 21 nt, Human
gaaugccagggggccaggugc

SEQ ID NO: 536415 - RNA, 23 nt, Human
gacaucugcccacccuggggucu

SEQ ID NO: 536416 - RNA, 26 nt, Human
gaggaggagaaagggugggguuccag

SEQ ID NO: 536417 - RNA, 19 nt, Human
gaggauucgcucuucauag

SEQ ID NO: 536418 - RNA, 25 nt, Human
gagucagcuuuacacugaaagggca

SEQ ID NO: 536419 - RNA, 24 nt, Human
gcaguagaucuguccaagaggcca

SEQ ID NO: 536420 - RNA, 19 nt, Human
gccacauggcguuuucaau

SEQ ID NO: 536421 - RNA, 23 nt, Human
gccccuggcuggaauugugcucc

SEQ ID NO: 536422 - RNA, 18 nt, Human
gcugcugggaggagagga

SEQ ID NO: 536423 - RNA, 18 nt, Human
ggaaaguacagagagcuc

SEQ ID NO: 536424 - RNA, 19 nt, Human
ggaagcacaucuguccaca

SEQ ID NO: 536425 - RNA, 21 nt, Human
ggagaggagcuugaugagaaa

SEQ ID NO: 536426 - RNA, 18 nt, Human
ggaggagaggauggugcu

SEQ ID NO: 536427 - RNA, 22 nt, Human
ggaggaggagaaaggguggggu

SEQ ID NO: 536428 - RNA, 25 nt, Human
ggcacaacccaugcucaggaagcac

SEQ ID NO: 536429 - RNA, 19 nt, Human
ggccaccucuggagcucag

SEQ ID NO: 536430 - RNA, 19 nt, Human
ggccaggugcagccauccu

SEQ ID NO: 536431 - RNA, 24 nt, Human
gggguuccagcugagaccuagagu

SEQ ID NO: 536432 - RNA, 19 nt, Human
gguggucggcagaccugcu

SEQ ID NO: 536433 - RNA, 24 nt, Human
uagagucaagaccugcccucacac

SEQ ID NO: 536434 - RNA, 22 nt, Human
uagauuuauuuucaucucaucu

SEQ ID NO: 536435 - RNA, 23 nt, Human
uaguacaguaguacauguauaua

SEQ ID NO: 536436 - RNA, 23 nt, Human
uauagcaguagaucuguccaaga

SEQ ID NO: 536437 - RNA, 20 nt, Human
uauugugaugugaggcagga

SEQ ID NO: 536438 - RNA, 24 nt, Human
ucaagaccugcccucacacacaaa

SEQ ID NO: 536439 - RNA, 22 nt, Human
ucauagccacacugaaugugcc

SEQ ID NO: 536440 - RNA, 19 nt, Human
uccaagaggccaccucugg

SEQ ID NO: 536441 - RNA, 24 nt, Human
uccaaguggccccuggcuggaauu

SEQ ID NO: 536442 - RNA, 22 nt, Human
uccacagcugccagagcuccug

SEQ ID NO: 536443 - RNA, 20 nt, Human
uccaccuuuucccacaacca

SEQ ID NO: 536444 - RNA, 21 nt, Human
uccaccuuuucccacaaccaa

SEQ ID NO: 536445 - RNA, 21 nt, Human
ucccagauguggccuuggcua

SEQ ID NO: 536446 - RNA, 19 nt, Human
ucccauccgacucacaccc

SEQ ID NO: 536447 - RNA, 20 nt, Human
ucccccuucccuccuagagc

SEQ ID NO: 536448 - RNA, 19 nt, Human
ucccgccccgccgccgccg

SEQ ID NO: 536449 - RNA, 21 nt, Human
ucccgccccgccgccgccggu

SEQ ID NO: 536450 - RNA, 22 nt, Human
ucccgccccgccgccgccgguc

SEQ ID NO: 536451 - RNA, 25 nt, Human
uccgccuguccuggcugcuccuggu

SEQ ID NO: 536452 - RNA, 18 nt, Human
uccuggcugcuccuggga

SEQ ID NO: 536453 - RNA, 18 nt, Human
uccugggcccacaggcuu

SEQ ID NO: 536454 - RNA, 19 nt, Human
ucuccaucuccugggccca

SEQ ID NO: 536455 - RNA, 21 nt, Human
ucuccaucuccugggcccaca

SEQ ID NO: 536456 - RNA, 23 nt, Human
ucugcccacccuggggucugcaa

SEQ ID NO: 536457 - RNA, 23 nt, Human
ugaccccacuggagacaucugcc

SEQ ID NO: 536458 - RNA, 19 nt, Human
ugagaagagaaagaccugg

SEQ ID NO: 536459 - RNA, 20 nt, Human
ugaggagaggagcuugauga

SEQ ID NO: 536460 - RNA, 22 nt, Human
ugaggcaggagaccugggcaug

SEQ ID NO: 536461 - RNA, 22 nt, Human
ugagugggccuguaaaguuaga

SEQ ID NO: 536462 - RNA, 19 nt, Human
ugcccggagaugcccaagg

SEQ ID NO: 536463 - RNA, 24 nt, Human
ugccucaaaugugagugggccugu

SEQ ID NO: 536464 - RNA, 19 nt, Human
ugcugggaggagaggaugg

SEQ ID NO: 536465 - RNA, 21 nt, Human
uggagaaaugcagggcuuaaa

SEQ ID NO: 536466 - RNA, 23 nt, Human
uggaugcacaugugauggaguca

SEQ ID NO: 536467 - RNA, 21 nt, Human
uggcguuuucaauuucauuua

SEQ ID NO: 536468 - RNA, 19 nt, Human
ugggacacugaccccgaaa

SEQ ID NO: 536469 - RNA, 19 nt, Human
ugggaggagaggauggugc

SEQ ID NO: 536470 - RNA, 22 nt, Human
ugggaggagaggauggugcugg

SEQ ID NO: 536471 - RNA, 20 nt, Human
ugguggagaggaaaacaagg

SEQ ID NO: 536472 - RNA, 20 nt, Human
ugugcucacugaccccacug

SEQ ID NO: 536473 - RNA, 23 nt, Human
uuaagugaacauuuacuuccucu

SEQ ID NO: 536474 - RNA, 23 nt, Human
uuccaguuccaaaaccaucuuuc

SEQ ID NO: 536475 - RNA, 24 nt, Human
uuggagaaaugcagggcuuaaagg

SEQ ID NO: 536476 - RNA, 22 nt, Human
uuuaaaucacuacaucucucca

SEQ ID NO: 536477 - RNA, 23 nt, Human
uuuaagugaacauuuacuuccuc

SEQ ID NO: 536478 - RNA, 18 nt, Human
uuuuggaacuuugacuua

SEQ ID NO: 536479 - RNA, 24 nt, Human
uuuuuuuuuuuuuuuuggaacuuu

SEQ ID NO: 536480 - RNA, 19 nt, Human
uuuuuuuuuuuuuuuuugg

SEQ ID NO: 536481 - RNA, 19 nt, Human
aaaaaaaccgaaacuuaag

SEQ ID NO: 536482 - RNA, 24 nt, Human
aaaaacaccaaaaaguacagugua

SEQ ID NO: 536483 - RNA, 23 nt, Human
aaaacaccaaaaaguacagugua

SEQ ID NO: 536484 - RNA, 23 nt, Human
aaaacaccuuuauaccauauuuu

SEQ ID NO: 536485 - RNA, 21 nt, Human
aaagaucagauuuaauucuuu

SEQ ID NO: 536486 - RNA, 23 nt, Human
aaaguuuucccaaaaaauggcau

SEQ ID NO: 536487 - RNA, 22 nt, Human
aacauuuuauuuguuaaaaaug

SEQ ID NO: 536488 - RNA, 19 nt, Human
aaccaaagaagucaaacag

SEQ ID NO: 536489 - RNA, 20 nt, Human
aacuugcuacuuacuuccuc

SEQ ID NO: 536490 - RNA, 20 nt, Human
aacuugcuacuuacuuccuc

SEQ ID NO: 536491 - RNA, 22 nt, Human
aagaaaucagugaaagguaaac

SEQ ID NO: 536492 - RNA, 23 nt, Human
aagcaugagagacaacaaugaaa

SEQ ID NO: 536493 - RNA, 25 nt, Human
aagggcaagugacagcaaccaaggg

SEQ ID NO: 536494 - RNA, 21 nt, Human
aaguacaguguaaagcaccuc

SEQ ID NO: 536495 - RNA, 24 nt, Human
aaugccugaacuuuaauuuauacc

SEQ ID NO: 536496 - RNA, 24 nt, Human
acaaugcagggcaggccaagaacc

SEQ ID NO: 536497 - RNA, 24 nt, Human
acuaaagcuguguaauuccagggg

SEQ ID NO: 536498 - RNA, 23 nt, Human
agaaaucagugaaagguaaacaa

SEQ ID NO: 536499 - RNA, 20 nt, Human
agacagcaaacuugagcuca

SEQ ID NO: 536500 - RNA, 22 nt, Human
agacagcaaacuugagcucagc

SEQ ID NO: 536501 - RNA, 26 nt, Human
agauauuaaagaucagauucgagucc

SEQ ID NO: 536502 - RNA, 23 nt, Human
aggcauucauccuugcaaaaaug

SEQ ID NO: 536503 - RNA, 19 nt, Human
aggccggagucgcaggccu

SEQ ID NO: 536504 - RNA, 18 nt, Human
augaagcaacucaagaag

SEQ ID NO: 536505 - RNA, 19 nt, Human
caaaggugaugagauccug

SEQ ID NO: 536506 - RNA, 23 nt, Human
caaccacauuccaauaaagaaaa

SEQ ID NO: 536507 - RNA, 20 nt, Human
cagcuucagaauagaucuaa

SEQ ID NO: 536508 - RNA, 22 nt, Human
ccaaaaaguacaguguaaagca

SEQ ID NO: 536509 - RNA, 18 nt, Human
ccaaagaagucaaacaga

SEQ ID NO: 536510 - RNA, 21 nt, Human
ccaaccaugaaaucuuuaaga

SEQ ID NO: 536511 - RNA, 22 nt, Human
ccuguccuucaacuugcuacuu

SEQ ID NO: 536512 - RNA, 19 nt, Human
cgcgccgagagcgggcgcg

SEQ ID NO: 536513 - RNA, 23 nt, Human
cgucugaaagaggaagcacguuc

SEQ ID NO: 536514 - RNA, 24 nt, Human
cucaguacuaucuuagcacagacu

SEQ ID NO: 536515 - RNA, 20 nt, Human
cugaacuuuaauuuauacca

SEQ ID NO: 536516 - RNA, 19 nt, Human
gaaacuguuacugauagcu

SEQ ID NO: 536517 - RNA, 19 nt, Human
gaacucuucaagcaauuca

SEQ ID NO: 536518 - RNA, 21 nt, Human
gcaagugacagcaaccaaggg

SEQ ID NO: 536519 - RNA, 21 nt, Human
gcgagcauaaaccaugaagca

SEQ ID NO: 536520 - RNA, 19 nt, Human
guggcgggucgguggggag

SEQ ID NO: 536521 - RNA, 19 nt, Human
uaaaaugucaagcuucaaa

SEQ ID NO: 536522 - RNA, 21 nt, Human
uaaagcuguguaauuccaggg

SEQ ID NO: 536523 - RNA, 25 nt, Human
uaagaaaucagugaaagguaaacaa

SEQ ID NO: 536524 - RNA, 21 nt, Human
uaagaacagacagguauaauc

SEQ ID NO: 536525 - RNA, 23 nt, Human
uaagaacaggaaaaugaaaacac

SEQ ID NO: 536526 - RNA, 27 nt, Human
uaauggcaaacuaaaaugucaagcuuc

SEQ ID NO: 536527 - RNA, 25 nt, Human
uacaauaauagguaagaacaggaaa

SEQ ID NO: 536528 - RNA, 21 nt, Human
uagcacagacuaacuucuccc

SEQ ID NO: 536529 - RNA, 22 nt, Human
uaugaaaagcaucaaauagcua

SEQ ID NO: 536530 - RNA, 25 nt, Human
uaugaaaagcaucaaauagcuaagg

SEQ ID NO: 536531 - RNA, 20 nt, Human
ucaaauagcuaaggagagac

SEQ ID NO: 536532 - RNA, 21 nt, Human
ucaacacuaacaaucuacucc

SEQ ID NO: 536533 - RNA, 18 nt, Human
ucaacacuauuaaagggc

SEQ ID NO: 536534 - RNA, 21 nt, Human
ucaagcuucaaaaugaccaaa

SEQ ID NO: 536535 - RNA, 18 nt, Human
ucagagguggcagguggc

SEQ ID NO: 536536 - RNA, 22 nt, Human
uccaaaaaacaccaaaaaguac

SEQ ID NO: 536537 - RNA, 18 nt, Human
uccccauaaaugccugaa

SEQ ID NO: 536538 - RNA, 21 nt, Human
ucccccuaagucuucaaaccc

SEQ ID NO: 536539 - RNA, 21 nt, Human
ugaaaagcaucaaauagcuaa

SEQ ID NO: 536540 - RNA, 22 nt, Human
ugaacaaggauuacaaccacau

SEQ ID NO: 536541 - RNA, 19 nt, Human
ugacaaagucuaaaacacg

SEQ ID NO: 536542 - RNA, 25 nt, Human
ugacuacaucaacacuauuaaaggg

SEQ ID NO: 536543 - RNA, 25 nt, Human
ugacugacuuccaauaaucccuuau

SEQ ID NO: 536544 - RNA, 19 nt, Human
ugacuuccaauaaucccuu

SEQ ID NO: 536545 - RNA, 18 nt, Human
ugagauccugaauaccgc

SEQ ID NO: 536546 - RNA, 18 nt, Human
ugcaaagaaaaguuuaag

SEQ ID NO: 536547 - RNA, 23 nt, Human
ugcuacauccaaacaguacaucu

SEQ ID NO: 536548 - RNA, 21 nt, Human
uggaagauuuugcugcauuug

SEQ ID NO: 536549 - RNA, 19 nt, Human
uggaugucccccuaagucu

SEQ ID NO: 536550 - RNA, 19 nt, Human
uggcagguggcgggucggu

SEQ ID NO: 536551 - RNA, 23 nt, Human
uggccuauaugaaaagcaucaaa

SEQ ID NO: 536552 - RNA, 21 nt, Human
uggggcaauuuuuaaaguuuu

SEQ ID NO: 536553 - RNA, 22 nt, Human
ugucaagcuucaaaaugaccaa

SEQ ID NO: 536554 - RNA, 24 nt, Human
ugugaauaugcauuuacagucucu

SEQ ID NO: 536555 - RNA, 19 nt, Human
uguuaaaagcucagcacua

SEQ ID NO: 536556 - RNA, 21 nt, Human
uguuucaucucaacuaccugu

SEQ ID NO: 536557 - RNA, 21 nt, Human
uguuuuguuuauauacaauau

SEQ ID NO: 536558 - RNA, 22 nt, Human
uuacagaugcaugaagaauaaa

SEQ ID NO: 536559 - RNA, 20 nt, Human
uucaaaaauaaaaauaagag

SEQ ID NO: 536560 - RNA, 21 nt, Human
uucaaacccacagcuggaaau

SEQ ID NO: 536561 - RNA, 30 nt, Human
uucacaaaccauucuaaagacagcaaacuu

SEQ ID NO: 536562 - RNA, 23 nt, Human
uucuaaaucagacuaaaauguac

SEQ ID NO: 536563 - RNA, 19 nt, Human
uucuugaauuuccgugaug

SEQ ID NO: 536564 - RNA, 24 nt, Human
uucuuggccuauaugaaaagcauc

SEQ ID NO: 536565 - RNA, 21 nt, Human
uuuacaggaaaagucaacacu

SEQ ID NO: 536566 - RNA, 21 nt, Human
uuuugcauuuuuuuucucugu

SEQ ID NO: 536567 - RNA, 22 nt, Human
uuuuuuuuuaaaaaaaaaaacc

SEQ ID NO: 536568 - RNA, 21 nt, Human
aaaaaaacauuaaugaaagua

SEQ ID NO: 536569 - RNA, 20 nt, Human
aaguaccaaugcaaacugaa

SEQ ID NO: 536570 - RNA, 19 nt, Human
acauuaaugaaaguagaau

SEQ ID NO: 536571 - RNA, 24 nt, Human
agaacaaaaaaacauuaaugaaag

SEQ ID NO: 536572 - RNA, 23 nt, Human
agcuaugaaguccacaguaagua

SEQ ID NO: 536573 - RNA, 20 nt, Human
caaaaaaacauuaaugaaag

SEQ ID NO: 536574 - RNA, 25 nt, Human
caaacugaacagauuuagaaaguca

SEQ ID NO: 536575 - RNA, 19 nt, Human
caguaaguaccaaugcaaa

SEQ ID NO: 536576 - RNA, 19 nt, Human
ccaaugcaaacugaacaga

SEQ ID NO: 536577 - RNA, 19 nt, Human
cuggaaaaagucagaagcc

SEQ ID NO: 536578 - RNA, 20 nt, Human
ggaaaaagucagaagcccau

SEQ ID NO: 536579 - RNA, 19 nt, Human
uaaguaccaaugcaaacug

SEQ ID NO: 536580 - RNA, 21 nt, Human
uacacccuggaaaaagucaga

SEQ ID NO: 536581 - RNA, 21 nt, Human
uguacaauauaauaucacuuu

SEQ ID NO: 536582 - RNA, 19 nt, Human
ugucaguaagcuaugaagu

SEQ ID NO: 536583 - RNA, 24 nt, Human
uuacaggacauuacauuuuuauuu

SEQ ID NO: 536584 - RNA, 25 nt, Human
uucagaacaaaaaaacauuaaugaa

SEQ ID NO: 536585 - RNA, 21 nt, Human
uuuagaaagucaauccauacu

SEQ ID NO: 536586 - RNA, 18 nt, Human
uuuuuuuuuuuuacagga

SEQ ID NO: 536587 - RNA, 22 nt, Human
uuuuuuuuuuuuuuuuacagga

SEQ ID NO: 536588 - RNA, 24 nt, Human
uuuuuuuuuuuuuuuuuuuacagg

SEQ ID NO: 536589 - RNA, 19 nt, Human
aaaaagcaaaaacaaaaag

SEQ ID NO: 536590 - RNA, 21 nt, Human
aaacaaaaagaaaauuucaca

SEQ ID NO: 536591 - RNA, 25 nt, Human
aaacaaaaagaaaauuucacaucug

SEQ ID NO: 536592 - RNA, 26 nt, Human
aaacaaaaagaaaauuucacaucuga

SEQ ID NO: 536593 - RNA, 19 nt, Human
aaacaguguaagcugccuu

SEQ ID NO: 536594 - RNA, 18 nt, Human
aaacugccaugaaacuuc

SEQ ID NO: 536595 - RNA, 19 nt, Human
aacaugcuacauuuuccuu

SEQ ID NO: 536596 - RNA, 24 nt, Human
aagaaauaauguucaacacagccc

SEQ ID NO: 536597 - RNA, 23 nt, Human
aagcaaaaacaaaaagaaaauuu

SEQ ID NO: 536598 - RNA, 24 nt, Human
aagcugccuuuuuucuuaagaccu

SEQ ID NO: 536599 - RNA, 23 nt, Human
aagucccccaaaaaauccucuuc

SEQ ID NO: 536600 - RNA, 22 nt, Human
aauaaguuuucucacaagacuc

SEQ ID NO: 536601 - RNA, 26 nt, Human
acaaaaagaaaauuucacaucugaaa

SEQ ID NO: 536602 - RNA, 19 nt, Human
acacuaagauuucuaaagc

SEQ ID NO: 536603 - RNA, 23 nt, Human
accaaaauacugaagaaaugcug

SEQ ID NO: 536604 - RNA, 18 nt, Human
acucagugaaacaaggcu

SEQ ID NO: 536605 - RNA, 21 nt, Human
acucagugaaacaaggcuuca

SEQ ID NO: 536606 - RNA, 20 nt, Human
acuucagcaauacucaguca

SEQ ID NO: 536607 - RNA, 22 nt, Human
agccaaaaagcaaaaacaaaaa

SEQ ID NO: 536608 - RNA, 28 nt, Human
agccaaaaagcaaaaacaaaagggaccc

SEQ ID NO: 536609 - RNA, 18 nt, Human
aggugccccuggccuggg

SEQ ID NO: 536610 - RNA, 23 nt, Human
auaaaagauaaaaggaaaaaaac

SEQ ID NO: 536611 - RNA, 21 nt, Human
auauugaagucccccaaaaaa

SEQ ID NO: 536612 - RNA, 23 nt, Human
aucaaagucuucuuuauuauucc

SEQ ID NO: 536613 - RNA, 25 nt, Human
aucaguuuuucugcguguguaauaa

SEQ ID NO: 536614 - RNA, 18 nt, Human
auggccacuuaaaauauc

SEQ ID NO: 536615 - RNA, 24 nt, Human
caaaaacaaaaagaaaauuucaca

SEQ ID NO: 536616 - RNA, 26 nt, Human
caaaaagaaaauuucacaucugaaga

SEQ ID NO: 536617 - RNA, 24 nt, Human
caaaaagcaaaaacaaaaagaaaa

SEQ ID NO: 536618 - RNA, 22 nt, Human
caacacagcccaacaaaacauu

SEQ ID NO: 536619 - RNA, 23 nt, Human
caacacagcccaacaaaacauuc

SEQ ID NO: 536620 - RNA, 23 nt, Human
caacaccucauggcaaguccaaa

SEQ ID NO: 536621 - RNA, 19 nt, Human
caacaggacugcacaggaa

SEQ ID NO: 536622 - RNA, 24 nt, Human
caauuuacgagccaaaaagcaaaa

SEQ ID NO: 536623 - RNA, 25 nt, Human
caccuucugccccaccagaggugcc

SEQ ID NO: 536624 - RNA, 19 nt, Human
cacguaaauaaaagauaaa

SEQ ID NO: 536625 - RNA, 21 nt, Human
cagcaauacucagucauuuga

SEQ ID NO: 536626 - RNA, 25 nt, Human
cagugaaacaaggcuucaacaccuc

SEQ ID NO: 536627 - RNA, 21 nt, Human
cauauacagagacacacauag

SEQ ID NO: 536628 - RNA, 20 nt, Human
caucgucacauugcuaguca

SEQ ID NO: 536629 - RNA, 24 nt, Human
caucugaagagcauuccuaaacau

SEQ ID NO: 536630 - RNA, 22 nt, Human
ccaaaauacugaagaaaugcug

SEQ ID NO: 536631 - RNA, 23 nt, Human
ccaaaauacugaagaaaugcugc

SEQ ID NO: 536632 - RNA, 20 nt, Human
ccaccagcugaaauacugua

SEQ ID NO: 536633 - RNA, 22 nt, Human
cccaaaauggcgccgacccgau

SEQ ID NO: 536634 - RNA, 24 nt, Human
ccucauggcaaguccaaauuccaa

SEQ ID NO: 536635 - RNA, 24 nt, Human
cgagccaaaaagcaaaaacaaaaa

SEQ ID NO: 536636 - RNA, 23 nt, Human
cuaaaacuuucaauaaagguaaa

SEQ ID NO: 536637 - RNA, 24 nt, Human
cuccagaugaaauauccaauuuac

SEQ ID NO: 536638 - RNA, 21 nt, Human
cugccccaccagaggugcccc

SEQ ID NO: 536639 - RNA, 18 nt, Human
gaagaaccccaacaacgg

SEQ ID NO: 536640 - RNA, 23 nt, Human
gcccaacaaaacauucuugguuu

SEQ ID NO: 536641 - RNA, 20 nt, Human
gcugaagucaaaaauuccua

SEQ ID NO: 536642 - RNA, 21 nt, Human
gggcaaaauuauccaaaaaca

SEQ ID NO: 536643 - RNA, 19 nt, Human
ggugccccuggccuggggg

SEQ ID NO: 536644 - RNA, 19 nt, Human
gguuuuuguuuuguuguug

SEQ ID NO: 536645 - RNA, 18 nt, Human
guuguacuuguccacucc

SEQ ID NO: 536646 - RNA, 24 nt, Human
uaaaauauccagggccuuuuacac

SEQ ID NO: 536647 - RNA, 18 nt, Human
uaaaugagaaaaucucau

SEQ ID NO: 536648 - RNA, 18 nt, Human
uaagacagaagcuuugca

SEQ ID NO: 536649 - RNA, 21 nt, Human
uacaauucaccccaaacugua

SEQ ID NO: 536650 - RNA, 21 nt, Human
uacacaauuuuuuauuauuaa

SEQ ID NO: 536651 - RNA, 21 nt, Human
uacuucaagucagcuacccau

SEQ ID NO: 536652 - RNA, 24 nt, Human
uauacagagacacacauagcuauc

SEQ ID NO: 536653 - RNA, 21 nt, Human
uauuuuguauccucugaaaua

SEQ ID NO: 536654 - RNA, 22 nt, Human
ucaacacagcccaacaaaacau

SEQ ID NO: 536655 - RNA, 23 nt, Human
ucaacaccucauggcaaguccaa

SEQ ID NO: 536656 - RNA, 20 nt, Human
ucaagucagcuacccauacu

SEQ ID NO: 536657 - RNA, 18 nt, Human
ucaaucucuucauucaga

SEQ ID NO: 536658 - RNA, 20 nt, Human
ucacuacuaucaauucacuu

SEQ ID NO: 536659 - RNA, 20 nt, Human
ucagaaaaagugucccauug

SEQ ID NO: 536660 - RNA, 20 nt, Human
ucagugaaacaaggcuucaa

SEQ ID NO: 536661 - RNA, 19 nt, Human
uccaaaaacacuguaaauc

SEQ ID NO: 536662 - RNA, 24 nt, Human
uccaaaaacacuguaaauccaaaa

SEQ ID NO: 536663 - RNA, 24 nt, Human
uccaaaauggccacuuaaaauauc

SEQ ID NO: 536664 - RNA, 21 nt, Human
uccaacucagugaaacaaggc

SEQ ID NO: 536665 - RNA, 20 nt, Human
uccaugucguggacagaucc

SEQ ID NO: 536666 - RNA, 18 nt, Human
ucccccaaaaaauccucu

SEQ ID NO: 536667 - RNA, 23 nt, Human
uccgcaauguucugggccaaguc

SEQ ID NO: 536668 - RNA, 23 nt, Human
uccucauuccuacaacauucauu

SEQ ID NO: 536669 - RNA, 21 nt, Human
ucucuuuuuaaguagcuugcu

SEQ ID NO: 536670 - RNA, 18 nt, Human
ucugaagagcauuccuaa

SEQ ID NO: 536671 - RNA, 23 nt, Human
ucugcaagcaaaacaguguaagc

SEQ ID NO: 536672 - RNA, 18 nt, Human
ucuggggcaaaauuaucc

SEQ ID NO: 536673 - RNA, 21 nt, Human
ucuuaaauuuccacguaaaua

SEQ ID NO: 536674 - RNA, 20 nt, Human
ucuugguuuucuucauauug

SEQ ID NO: 536675 - RNA, 19 nt, Human
ugaaagagcugaagucaaa

SEQ ID NO: 536676 - RNA, 24 nt, Human
ugaaagagcugaagucaaaaauuc

SEQ ID NO: 536677 - RNA, 20 nt, Human
ugaagaaagucaauguugga

SEQ ID NO: 536678 - RNA, 25 nt, Human
ugacaacauaccccaauaaagcuuu

SEQ ID NO: 536679 - RNA, 18 nt, Human
ugcagugaugaagaaagu

SEQ ID NO: 536680 - RNA, 27 nt, Human
ugcagugaugaagaaagucaauguugg

SEQ ID NO: 536681 - RNA, 24 nt, Human
ugccugggucucuuuuuaaguagc

SEQ ID NO: 536682 - RNA, 24 nt, Human
uggcgccgacccgauccgcaaggc

SEQ ID NO: 536683 - RNA, 19 nt, Human
uggcuaaagagcaauuuau

SEQ ID NO: 536684 - RNA, 18 nt, Human
ugggggaaggagagggag

SEQ ID NO: 536685 - RNA, 18 nt, Human
ugugccaagucuuuuccu

SEQ ID NO: 536686 - RNA, 21 nt, Human
uguuuuaaaguuuucauaugg

SEQ ID NO: 536687 - RNA, 20 nt, Human
uucaacacagcccaacaaaa

SEQ ID NO: 536688 - RNA, 19 nt, Human
uucggcugaagaaccccaa

SEQ ID NO: 536689 - RNA, 22 nt, Human
uuggaccaacccaaguccucau

SEQ ID NO: 536690 - RNA, 21 nt, Human
uuguuguuuuuugggggaagg

SEQ ID NO: 536691 - RNA, 23 nt, Human
uuguuuuguuguuguuguuuuuu

SEQ ID NO: 536692 - RNA, 25 nt, Human
uuuaaaguuuucauauggcuaucuc

SEQ ID NO: 536693 - RNA, 22 nt, Human
uuucacaucugaagagcauucc

SEQ ID NO: 536694 - RNA, 20 nt, Human
uuuccacguaaauaaaagau

SEQ ID NO: 536695 - RNA, 20 nt, Human
uuugaaacugcugaaacuac

SEQ ID NO: 536696 - RNA, 25 nt, Human
uuugaauaauccccuuuugccgcuu

SEQ ID NO: 536697 - RNA, 23 nt, Human
uuuuccuuuuugguuuuuguuuu

SEQ ID NO: 536698 - RNA, 25 nt, Human
uuuugggggaaggagagggagaccg

SEQ ID NO: 536699 - RNA, 24 nt, Human
aaaaauguuuauucugcuuucuuc

SEQ ID NO: 536700 - RNA, 18 nt, Human
aaacacgcauuccacagc

SEQ ID NO: 536701 - RNA, 21 nt, Human
aaacacgcauuccacagccag

SEQ ID NO: 536702 - RNA, 24 nt, Human
acaccacuaaggacaccugugagc

SEQ ID NO: 536703 - RNA, 24 nt, Human
acagagcagcuccagugucuacug

SEQ ID NO: 536704 - RNA, 19 nt, Human
agacccagggaagggccca

SEQ ID NO: 536705 - RNA, 20 nt, Human
agcacaggagggaaaagggg

SEQ ID NO: 536706 - RNA, 24 nt, Human
aggaaccaagucacaccccccaug

SEQ ID NO: 536707 - RNA, 18 nt, Human
agggaagggcccacuucc

SEQ ID NO: 536708 - RNA, 24 nt, Human
auccugcugggggagacccuugcu

SEQ ID NO: 536709 - RNA, 21 nt, Human
augacuccuugggggacagag

SEQ ID NO: 536710 - RNA, 19 nt, Human
auucugcuuucuuccuugg

SEQ ID NO: 536711 - RNA, 20 nt, Human
caaggcacagaggugagucc

SEQ ID NO: 536712 - RNA, 20 nt, Human
caagucacaccccccaugcu

SEQ ID NO: 536713 - RNA, 25 nt, Human
cacaccccccaugcuagaggauccc

SEQ ID NO: 536714 - RNA, 22 nt, Human
cacagcacaugcagccaguaga

SEQ ID NO: 536715 - RNA, 19 nt, Human
cacaggagggaaaagggga

SEQ ID NO: 536716 - RNA, 20 nt, Human
caccagggucaggagugggg

SEQ ID NO: 536717 - RNA, 25 nt, Human
cagcucugcccaagguggccaggga

SEQ ID NO: 536718 - RNA, 21 nt, Human
caggagcagcaaggcacagag

SEQ ID NO: 536719 - RNA, 20 nt, Human
ccaguagacagcugcaacac

SEQ ID NO: 536720 - RNA, 22 nt, Human
cccaagguggccagggagaccc

SEQ ID NO: 536721 - RNA, 24 nt, Human
ccccuguagcuccgggaagggcug

SEQ ID NO: 536722 - RNA, 19 nt, Human
cccguugaggcccaguacc

SEQ ID NO: 536723 - RNA, 18 nt, Human
cccugaguuccaugacuc

SEQ ID NO: 536724 - RNA, 21 nt, Human
cccuugggccucaggagcagc

SEQ ID NO: 536725 - RNA, 26 nt, Human
ccugugagcggccacgggcucagcuc

SEQ ID NO: 536726 - RNA, 21 nt, Human
ccuugggccucaggagcagca

SEQ ID NO: 536727 - RNA, 20 nt, Human
cggcgugggcgugugagcac

SEQ ID NO: 536728 - RNA, 19 nt, Human
cucagggaggaugcugggc

SEQ ID NO: 536729 - RNA, 18 nt, Human
cuccuugggggacagagc

SEQ ID NO: 536730 - RNA, 21 nt, Human
cugacccaaacacgcauucca

SEQ ID NO: 536731 - RNA, 18 nt, Human
cuggucacuggucguggg

SEQ ID NO: 536732 - RNA, 21 nt, Human
gaaccaagucacaccccccau

SEQ ID NO: 536733 - RNA, 24 nt, Human
gacccaaacacgcauuccacagcc

SEQ ID NO: 536734 - RNA, 24 nt, Human
gacccagcucugcccaagguggcc

SEQ ID NO: 536735 - RNA, 25 nt, Human
gacccagcucugcccaagguggcca

SEQ ID NO: 536736 - RNA, 22 nt, Human
gagcagcuccagugucuacuga

SEQ ID NO: 536737 - RNA, 24 nt, Human
gaggcccuguguggggacucaggg

SEQ ID NO: 536738 - RNA, 20 nt, Human
gcacggcgugggcgugugag

SEQ ID NO: 536739 - RNA, 25 nt, Human
gcugcaacaccacuaaggacaccug

SEQ ID NO: 536740 - RNA, 21 nt, Human
gcugcaugacccagcucugcc

SEQ ID NO: 536741 - RNA, 18 nt, Human
ggacagagcacaggaggg

SEQ ID NO: 536742 - RNA, 21 nt, Human
ggacccugguggggugcagag

SEQ ID NO: 536743 - RNA, 27 nt, Human
ggaggaugcugggcgggagagaggccc

SEQ ID NO: 536744 - RNA, 21 nt, Human
ggauauucacagcacaugcag

SEQ ID NO: 536745 - RNA, 18 nt, Human
ggcugcgaagcuggaagc

SEQ ID NO: 536746 - RNA, 22 nt, Human
gggaagggcccacuucccagga

SEQ ID NO: 536747 - RNA, 22 nt, Human
ggggagaggcaggcgcuugcca

SEQ ID NO: 536748 - RNA, 24 nt, Human
ggggugcagagugaggcccugugu

SEQ ID NO: 536749 - RNA, 20 nt, Human
gggugcagagugaggcccug

SEQ ID NO: 536750 - RNA, 26 nt, Human
gggugggucaucaggcugcuuuggcu

SEQ ID NO: 536751 - RNA, 18 nt, Human
gugcagagugaggcccug

SEQ ID NO: 536752 - RNA, 20 nt, Human
guggggugcagagugaggcc

SEQ ID NO: 536753 - RNA, 22 nt, Human
guggggugcagagugaggcccu

SEQ ID NO: 536754 - RNA, 21 nt, Human
uagaggaucccccuguagcuc

SEQ ID NO: 536755 - RNA, 19 nt, Human
ucaggagcagcaaggcaca

SEQ ID NO: 536756 - RNA, 21 nt, Human
ucagguucccguugaggccca

SEQ ID NO: 536757 - RNA, 19 nt, Human
ucaucaggcugcuuuggcu

SEQ ID NO: 536758 - RNA, 18 nt, Human
uccacaggcucuggcugg

SEQ ID NO: 536759 - RNA, 25 nt, Human
ucccaaaguuuaacuccuggucacu

SEQ ID NO: 536760 - RNA, 20 nt, Human
ucccccuguagcuccgggaa

SEQ ID NO: 536761 - RNA, 19 nt, Human
ucccugggugugaucaugg

SEQ ID NO: 536762 - RNA, 22 nt, Human
uccgggaagggcugcgaagcug

SEQ ID NO: 536763 - RNA, 23 nt, Human
ugacccaaacacgcauuccacag

SEQ ID NO: 536764 - RNA, 20 nt, Human
ugacccagcucugcccaagg

SEQ ID NO: 536765 - RNA, 23 nt, Human
ugacccagcucugcccaaggugg

SEQ ID NO: 536766 - RNA, 22 nt, Human
ugcaacaccacuaaggacaccu

SEQ ID NO: 536767 - RNA, 24 nt, Human
ugcaacaccacuaaggacaccugu

SEQ ID NO: 536768 - RNA, 24 nt, Human
ugcccaagguggccagggagacca

SEQ ID NO: 536769 - RNA, 23 nt, Human
ugcccuugggccucaggagcagc

SEQ ID NO: 536770 - RNA, 18 nt, Human
ugcugcugcccaguggcg

SEQ ID NO: 536771 - RNA, 18 nt, Human
uggcaaggagagggcacc

SEQ ID NO: 536772 - RNA, 19 nt, Human
uggcaaggagagggcaccg

SEQ ID NO: 536773 - RNA, 22 nt, Human
ugggcgggagagaggcccaggg

SEQ ID NO: 536774 - RNA, 19 nt, Human
uggggugggggacggccug

SEQ ID NO: 536775 - RNA, 22 nt, Human
ugguggggugcagagugaggcc

SEQ ID NO: 536776 - RNA, 22 nt, Human
uuuuuuuuuuuuuuuuuuuagg

SEQ ID NO: 536777 - RNA, 23 nt, Human
aaaaacagagcacaaauaaauaa

SEQ ID NO: 536778 - RNA, 24 nt, Human
aaaaauucucuaguuauuuaugga

SEQ ID NO: 536779 - RNA, 19 nt, Human
aaaaggaaggacguaaaaa

SEQ ID NO: 536780 - RNA, 22 nt, Human
aaaaugaaacaaaaccaggaug

SEQ ID NO: 536781 - RNA, 21 nt, Human
aaacagagcaaaaugaaacaa

SEQ ID NO: 536782 - RNA, 20 nt, Human
aaauagccuagcccagaaag

SEQ ID NO: 536783 - RNA, 22 nt, Human
aaauagccuagcccagaaagau

SEQ ID NO: 536784 - RNA, 21 nt, Human
aaauggcacuaucaaaauccc

SEQ ID NO: 536785 - RNA, 23 nt, Human
aacacaauuuuuccaugagucau

SEQ ID NO: 536786 - RNA, 26 nt, Human
aaccaaaaacagagcacaaauaaaua

SEQ ID NO: 536787 - RNA, 19 nt, Human
aaguguuuugagacagaaa

SEQ ID NO: 536788 - RNA, 20 nt, Human
aaguguuuugagacagaaac

SEQ ID NO: 536789 - RNA, 27 nt, Human
aaugaaacaaaaccaggaugccuuuaa

SEQ ID NO: 536790 - RNA, 19 nt, Human
acaagcacaucauuaaaca

SEQ ID NO: 536791 - RNA, 21 nt, Human
acaugcuaauaaaacugcuuc

SEQ ID NO: 536792 - RNA, 24 nt, Human
accacuauaugaaaauauggcuac

SEQ ID NO: 536793 - RNA, 24 nt, Human
agauuuguacaaaaaaggaaggac

SEQ ID NO: 536794 - RNA, 22 nt, Human
agcaaaaugaaacaaaaccagg

SEQ ID NO: 536795 - RNA, 20 nt, Human
agcacaaauaaauaaaggca

SEQ ID NO: 536796 - RNA, 20 nt, Human
agcagugcuagcaguguaca

SEQ ID NO: 536797 - RNA, 20 nt, Human
agcaguguaagagagaagca

SEQ ID NO: 536798 - RNA, 23 nt, Human
augaaacaaaaccaggaugccuu

SEQ ID NO: 536799 - RNA, 24 nt, Human
caacagauaacaaaaauucucuag

SEQ ID NO: 536800 - RNA, 25 nt, Human
caacuauaccauaaauucauucuuc

SEQ ID NO: 536801 - RNA, 18 nt, Human
cauacagacaaaaauaug

SEQ ID NO: 536802 - RNA, 25 nt, Human
cauccagaaauuaauacaauacaga

SEQ ID NO: 536803 - RNA, 24 nt, Human
ccaagccaacacaauuuuuccaug

SEQ ID NO: 536804 - RNA, 21 nt, Human
ccacuggguucaacuauacca

SEQ ID NO: 536805 - RNA, 20 nt, Human
cccaaauggaagagcagaau

SEQ ID NO: 536806 - RNA, 19 nt, Human
ccuuugcugaacauacuuc

SEQ ID NO: 536807 - RNA, 22 nt, Human
cuaaucauacagacaaaaauau

SEQ ID NO: 536808 - RNA, 22 nt, Human
cuaguucaagcaguguaagaga

SEQ ID NO: 536809 - RNA, 23 nt, Human
cuaguucaagcaguguaagagag

SEQ ID NO: 536810 - RNA, 20 nt, Human
cugaacauacuucauauuug

SEQ ID NO: 536811 - RNA, 21 nt, Human
gaaaaacaaacauuuuggcca

SEQ ID NO: 536812 - RNA, 20 nt, Human
gaacuguuggagaacaagcu

SEQ ID NO: 536813 - RNA, 21 nt, Human
gagcaaaaugaaacaaaacca

SEQ ID NO: 536814 - RNA, 22 nt, Human
gagcaaaaugaaacaaaaccag

SEQ ID NO: 536815 - RNA, 21 nt, Human
gcaaauauaacuucagaguuu

SEQ ID NO: 536816 - RNA, 23 nt, Human
gcuguguacacaucuaaaacccu

SEQ ID NO: 536817 - RNA, 18 nt, Human
ggagaaugauaaagugcu

SEQ ID NO: 536818 - RNA, 18 nt, Human
guccacgguaacauugca

SEQ ID NO: 536819 - RNA, 21 nt, Human
uaaaaaaaacauuuacugucu

SEQ ID NO: 536820 - RNA, 23 nt, Human
uaaaaaauacugauaaauacugu

SEQ ID NO: 536821 - RNA, 19 nt, Human
uaaaagcaguuauauucuu

SEQ ID NO: 536822 - RNA, 20 nt, Human
uaaacaugcagaccaagcca

SEQ ID NO: 536823 - RNA, 19 nt, Human
uaaaccaaaaacagagcac

SEQ ID NO: 536824 - RNA, 19 nt, Human
uaaauuaauaaaauguaac

SEQ ID NO: 536825 - RNA, 20 nt, Human
uaacaacagauaacaaaaag

SEQ ID NO: 536826 - RNA, 22 nt, Human
uaacaugcuaauaaaacugcuu

SEQ ID NO: 536827 - RNA, 22 nt, Human
uaacucucuuaggcuuuccaag

SEQ ID NO: 536828 - RNA, 20 nt, Human
uacacaucuaaaacccugaa

SEQ ID NO: 536829 - RNA, 19 nt, Human
uacauuuuauuuaaaacac

SEQ ID NO: 536830 - RNA, 25 nt, Human
uaggucccaagccaguauaucaaaa

SEQ ID NO: 536831 - RNA, 26 nt, Human
uaggucccaagccaguauaucaaaaa

SEQ ID NO: 536832 - RNA, 23 nt, Human
uaguaaacaaagugaccccuuuu

SEQ ID NO: 536833 - RNA, 26 nt, Human
uagucugaaaauacucuuguacaauc

SEQ ID NO: 536834 - RNA, 22 nt, Human
uaugaaccauaugcugguacua

SEQ ID NO: 536835 - RNA, 24 nt, Human
uauguaaaaaaaguaacuacauga

SEQ ID NO: 536836 - RNA, 19 nt, Human
ucaagcaguguaagagaga

SEQ ID NO: 536837 - RNA, 19 nt, Human
ucaucuaaaaauuuggcuu

SEQ ID NO: 536838 - RNA, 23 nt, Human
uccagaaauuaauacaauacaga

SEQ ID NO: 536839 - RNA, 20 nt, Human
ugaaaaacaaacauuuuggc

SEQ ID NO: 536840 - RNA, 25 nt, Human
ugaaaaacaaacauuuuggccaaaa

SEQ ID NO: 536841 - RNA, 19 nt, Human
ugacauacuucaucaauga

SEQ ID NO: 536842 - RNA, 22 nt, Human
ugacauacuucaucaaugauua

SEQ ID NO: 536843 - RNA, 23 nt, Human
ugagacagaaacaugaaaaggcu

SEQ ID NO: 536844 - RNA, 21 nt, Human
ugcaauuuagugauaaaugau

SEQ ID NO: 536845 - RNA, 19 nt, Human
ugcugaacauacuucauau

SEQ ID NO: 536846 - RNA, 22 nt, Human
ugcugaacauacuucauauuug

SEQ ID NO: 536847 - RNA, 18 nt, Human
ugcuuugcuacugugugc

SEQ ID NO: 536848 - RNA, 20 nt, Human
uggaagagcagaaucacuuc

SEQ ID NO: 536849 - RNA, 22 nt, Human
uggacuucgucaucuaaaaauu

SEQ ID NO: 536850 - RNA, 22 nt, Human
uggcaauauuuguaacaugcua

SEQ ID NO: 536851 - RNA, 20 nt, Human
uggggaaaguauuauuugca

SEQ ID NO: 536852 - RNA, 22 nt, Human
uggguuggcuucagaacuguug

SEQ ID NO: 536853 - RNA, 23 nt, Human
uggguuggcuucagaacuguugg

SEQ ID NO: 536854 - RNA, 24 nt, Human
ugguagagaagucuugguuuggca

SEQ ID NO: 536855 - RNA, 18 nt, Human
uguaaaccaaaaacagag

SEQ ID NO: 536856 - RNA, 22 nt, Human
uguaacugacauacuucaucaa

SEQ ID NO: 536857 - RNA, 18 nt, Human
uguacacaucuaaaaccc

SEQ ID NO: 536858 - RNA, 20 nt, Human
ugucaaaguguuuugagaca

SEQ ID NO: 536859 - RNA, 20 nt, Human
uguggagaaugauaaagugc

SEQ ID NO: 536860 - RNA, 22 nt, Human
uguggagaaugauaaagugcua

SEQ ID NO: 536861 - RNA, 19 nt, Human
uguggcagauacaaaaauc

SEQ ID NO: 536862 - RNA, 19 nt, Human
uguguguuuuuagaaaauu

SEQ ID NO: 536863 - RNA, 27 nt, Human
uuaacaauaaauggcacuaucaaaauc

SEQ ID NO: 536864 - RNA, 23 nt, Human
uucagaauccagugaaaaacaaa

SEQ ID NO: 536865 - RNA, 24 nt, Human
uucagaauccagugaaaaacaaac

SEQ ID NO: 536866 - RNA, 21 nt, Human
uucccaguggaaugccuguga

SEQ ID NO: 536867 - RNA, 22 nt, Human
uuguauaccacuauaugaaaau

SEQ ID NO: 536868 - RNA, 18 nt, Human
uuugacacaaguguuauu

SEQ ID NO: 536869 - RNA, 22 nt, Human
uuugcuguaaauuaaaaaaaac

SEQ ID NO: 536870 - RNA, 18 nt, Human
uuuuauuuuuauacuaag

SEQ ID NO: 536871 - RNA, 22 nt, Human
uuuucaaaaauuaguguuuugg

SEQ ID NO: 536872 - RNA, 19 nt, Human
aaaaauacaguaaaaugau

SEQ ID NO: 536873 - RNA, 24 nt, Human
aaacaaaaagaccacaaaauucua

SEQ ID NO: 536874 - RNA, 20 nt, Human
aaacugaaucagggaaauaa

SEQ ID NO: 536875 - RNA, 21 nt, Human
aaagcagguggcuuaaugcaa

SEQ ID NO: 536876 - RNA, 20 nt, Human
aaagugauccugggaccuuu

SEQ ID NO: 536877 - RNA, 20 nt, Human
aaguagcugcagucacucca

SEQ ID NO: 536878 - RNA, 19 nt, Human
aauguaagcagauaucuua

SEQ ID NO: 536879 - RNA, 19 nt, Human
accaccugcaucugauuua

SEQ ID NO: 536880 - RNA, 24 nt, Human
aggaaaaagauaaaugcaaucaga

SEQ ID NO: 536881 - RNA, 25 nt, Human
aggaaaaagauaaaugcaaucagaa

SEQ ID NO: 536882 - RNA, 23 nt, Human
aggaaaaggauacaccaagaaaa

SEQ ID NO: 536883 - RNA, 18 nt, Human
aggaugggaaugagaggg

SEQ ID NO: 536884 - RNA, 23 nt, Human
auaaaacaagagacauguagauu

SEQ ID NO: 536885 - RNA, 25 nt, Human
auccuccuuagggucucuuuuuuau

SEQ ID NO: 536886 - RNA, 18 nt, Human
caagagacauguagauuc

SEQ ID NO: 536887 - RNA, 25 nt, Human
caaggaaccaugcaaaaauacagua

SEQ ID NO: 536888 - RNA, 18 nt, Human
caauacaaggaaccaugc

SEQ ID NO: 536889 - RNA, 24 nt, Human
cagauaccugccagugacuuaaau

SEQ ID NO: 536890 - RNA, 23 nt, Human
cagcaaaaacugaaucagggaaa

SEQ ID NO: 536891 - RNA, 21 nt, Human
cagcagcaaaaacugaaucag

SEQ ID NO: 536892 - RNA, 23 nt, Human
cagcagucuaaauguaugauauc

SEQ ID NO: 536893 - RNA, 18 nt, Human
caucugauuuauaugggu

SEQ ID NO: 536894 - RNA, 22 nt, Human
ccagcacucuaaguucaaugcu

SEQ ID NO: 536895 - RNA, 18 nt, Human
ccagcuucaauucccagu

SEQ ID NO: 536896 - RNA, 21 nt, Human
ccaucuuugguugacugcagu

SEQ ID NO: 536897 - RNA, 18 nt, Human
gacaacaaauucuacaug

SEQ ID NO: 536898 - RNA, 22 nt, Human
gcaagaguucugaaacauggug

SEQ ID NO: 536899 - RNA, 22 nt, Human
gcagaagacaacaaauucuaca

SEQ ID NO: 536900 - RNA, 21 nt, Human
ggaugggaaugagagggaggg

SEQ ID NO: 536901 - RNA, 22 nt, Human
guaaaaaacaaaaagaccacaa

SEQ ID NO: 536902 - RNA, 21 nt, Human
uaaaugcaaucagaacagcag

SEQ ID NO: 536903 - RNA, 25 nt, Human
uaauacacaauauuaucauuuucua

SEQ ID NO: 536904 - RNA, 28 nt, Human
uacaaggaaccaugcaaaaauacaguag

SEQ ID NO: 536905 - RNA, 23 nt, Human
uacacaauauuaucauuuucuag

SEQ ID NO: 536906 - RNA, 24 nt, Human
uacagaaaaaugucaaaucuagaa

SEQ ID NO: 536907 - RNA, 21 nt, Human
uauguaaaaaacaaaaagacc

SEQ ID NO: 536908 - RNA, 19 nt, Human
ucccuaacgaaaggaugag

SEQ ID NO: 536909 - RNA, 22 nt, Human
ucccuaacgaaaggaugagaac

SEQ ID NO: 536910 - RNA, 18 nt, Human
ucuacuuacuaaagcagc

SEQ ID NO: 536911 - RNA, 19 nt, Human
ugaaaguaucuugauaauu

SEQ ID NO: 536912 - RNA, 21 nt, Human
ugaagugggaguauauaaccc

SEQ ID NO: 536913 - RNA, 21 nt, Human
ugacaucuucacauaugaucc

SEQ ID NO: 536914 - RNA, 22 nt, Human
ugauccaugggaacauguccuc

SEQ ID NO: 536915 - RNA, 19 nt, Human
ugaucgacucuugguaaug

SEQ ID NO: 536916 - RNA, 26 nt, Human
ugcacuguguugaaaggaaaaggaua

SEQ ID NO: 536917 - RNA, 20 nt, Human
ugcaguaccaggaaggaugg

SEQ ID NO: 536918 - RNA, 22 nt, Human
uguaaaaaacaaaaagaccaca

SEQ ID NO: 536919 - RNA, 24 nt, Human
uguaaaaaacaaaaagaccacaaa

SEQ ID NO: 536920 - RNA, 22 nt, Human
ugucaaaucuagaaaaaaaagc

SEQ ID NO: 536921 - RNA, 18 nt, Human
ugugcaaagaaaugcaau

SEQ ID NO: 536922 - RNA, 22 nt, Human
uucacauaugauccaugggaac

SEQ ID NO: 536923 - RNA, 25 nt, Human
uucuaugaaugcacagauaccugcc

SEQ ID NO: 536924 - RNA, 23 nt, Human
uugauaauaauaugcauccugaa

SEQ ID NO: 536925 - RNA, 24 nt, Human
uuuagagagaaauaaaacaagaga

SEQ ID NO: 536926 - RNA, 20 nt, Human
uuuauaaguucuaugaaugc

SEQ ID NO: 536927 - RNA, 24 nt, Human
aaaaaagcaucaaccaacuaugaa

SEQ ID NO: 536928 - RNA, 25 nt, Human
aaaaacugccccaccccuaaucccc

SEQ ID NO: 536929 - RNA, 22 nt, Human
aaaagaaguaaaugccaaaaag

SEQ ID NO: 536930 - RNA, 20 nt, Human
aaaaugccagauuuaagaug

SEQ ID NO: 536931 - RNA, 18 nt, Human
aaagaccuaaaaaccuaa

SEQ ID NO: 536932 - RNA, 21 nt, Human
aaaugccaaaaagaccuaaaa

SEQ ID NO: 536933 - RNA, 22 nt, Human
aacaagcuuuguguuugucagu

SEQ ID NO: 536934 - RNA, 26 nt, Human
aaccaacuaugaacuaauuagauuuu

SEQ ID NO: 536935 - RNA, 23 nt, Human
aaccaaggcagcaaaaagcugcc

SEQ ID NO: 536936 - RNA, 19 nt, Human
aauacccaucauacucagc

SEQ ID NO: 536937 - RNA, 20 nt, Human
aauggaaacaaaauaaauau

SEQ ID NO: 536938 - RNA, 18 nt, Human
acaaugcagaaacuuaaa

SEQ ID NO: 536939 - RNA, 18 nt, Human
acagcagacaaaaacugc

SEQ ID NO: 536940 - RNA, 22 nt, Human
acugccccaccccuaauccccu

SEQ ID NO: 536941 - RNA, 19 nt, Human
acuuacagagaaauagacc

SEQ ID NO: 536942 - RNA, 21 nt, Human
acuuacagcagacaaaaacug

SEQ ID NO: 536943 - RNA, 25 nt, Human
agacaaaaacugccccaccccuaau

SEQ ID NO: 536944 - RNA, 19 nt, Human
agcagacaaaaacugcccc

SEQ ID NO: 536945 - RNA, 23 nt, Human
aguguugaguguaaugagaacaa

SEQ ID NO: 536946 - RNA, 19 nt, Human
augaggccuugauuuacua

SEQ ID NO: 536947 - RNA, 21 nt, Human
auuucacuuuucucaggggaa

SEQ ID NO: 536948 - RNA, 24 nt, Human
auuucacuuuucucaggggaauag

SEQ ID NO: 536949 - RNA, 22 nt, Human
caaaaagcugccucuguaacac

SEQ ID NO: 536950 - RNA, 22 nt, Human
caaaaccaaggcagcaaaaagc

SEQ ID NO: 536951 - RNA, 21 nt, Human
caaaucacugcacagcccuua

SEQ ID NO: 536952 - RNA, 20 nt, Human
cacuuacagcagacaaaaac

SEQ ID NO: 536953 - RNA, 18 nt, Human
cagaagaugcaauaguau

SEQ ID NO: 536954 - RNA, 20 nt, Human
cagcagacaaaaacugcccc

SEQ ID NO: 536955 - RNA, 23 nt, Human
ccaaaagcaaauuuccuuagcug

SEQ ID NO: 536956 - RNA, 22 nt, Human
ccuagguuaagacacuuacagc

SEQ ID NO: 536957 - RNA, 21 nt, Human
ccucuguaacaccccuaauuc

SEQ ID NO: 536958 - RNA, 25 nt, Human
cuaguaaauauauauauauauauau

SEQ ID NO: 536959 - RNA, 19 nt, Human
cuauaauauaaaaacaaga

SEQ ID NO: 536960 - RNA, 27 nt, Human
cucaaagauagguuacuauacugaugg

SEQ ID NO: 536961 - RNA, 20 nt, Human
gacacuuacagcagacaaaa

SEQ ID NO: 536962 - RNA, 22 nt, Human
gacuagucaaccacuuuauuua

SEQ ID NO: 536963 - RNA, 22 nt, Human
gcaaaaagcugccucuguaaca

SEQ ID NO: 536964 - RNA, 18 nt, Human
gccagauuuaagauggua

SEQ ID NO: 536965 - RNA, 23 nt, Human
gcuuggugagcuguuacauagac

SEQ ID NO: 536966 - RNA, 18 nt, Human
ggaauuaaaagaaaggug

SEQ ID NO: 536967 - RNA, 21 nt, Human
guaaugagaacaaugcagaaa

SEQ ID NO: 536968 - RNA, 22 nt, Human
uaaaaaguuagaaaagccaaug

SEQ ID NO: 536969 - RNA, 18 nt, Human
uaaaagaaguaaaugcca

SEQ ID NO: 536970 - RNA, 19 nt, Human
uaaaugccaaaaagaccua

SEQ ID NO: 536971 - RNA, 22 nt, Human
uaacaaugugcuaugaggccuu

SEQ ID NO: 536972 - RNA, 23 nt, Human
uaaguguauagaauccugugugg

SEQ ID NO: 536973 - RNA, 18 nt, Human
uacaaaacaaaucacugc

SEQ ID NO: 536974 - RNA, 25 nt, Human
uacaacacaaugaauugaugguaaa

SEQ ID NO: 536975 - RNA, 21 nt, Human
uacccaugauguaccuuaaac

SEQ ID NO: 536976 - RNA, 19 nt, Human
uacugugacuacuuuccug

SEQ ID NO: 536977 - RNA, 18 nt, Human
uagaccaaaggaugaagg

SEQ ID NO: 536978 - RNA, 18 nt, Human
uagcauuguaaacauaag

SEQ ID NO: 536979 - RNA, 24 nt, Human
uauagaaaggaaaaaauuaguuuc

SEQ ID NO: 536980 - RNA, 28 nt, Human
uauauauauauauauauguaucauaaua

SEQ ID NO: 536981 - RNA, 26 nt, Human
uaucuaguaaauauauauauauauau

SEQ ID NO: 536982 - RNA, 20 nt, Human
uauggucgagucucuaaaac

SEQ ID NO: 536983 - RNA, 21 nt, Human
uauggucgagucucuaaaacc

SEQ ID NO: 536984 - RNA, 30 nt, Human
ucuaguaaauauauauauauauauauguaa

SEQ ID NO: 536985 - RNA, 21 nt, Human
ucugaaugauaaaugucugug

SEQ ID NO: 536986 - RNA, 18 nt, Human
ucugcaauagaaaugcug

SEQ ID NO: 536987 - RNA, 25 nt, Human
ugaaaaaaaaaugccagauuuaaga

SEQ ID NO: 536988 - RNA, 20 nt, Human
ugaaaauagaggucugcaau

SEQ ID NO: 536989 - RNA, 26 nt, Human
ugaagcaggcaaguuucucaagguca

SEQ ID NO: 536990 - RNA, 21 nt, Human
ugaaucucauucugacucuga

SEQ ID NO: 536991 - RNA, 23 nt, Human
ugacagucauaauacacuuuagc

SEQ ID NO: 536992 - RNA, 18 nt, Human
ugagauuaauagcaugac

SEQ ID NO: 536993 - RNA, 21 nt, Human
ugagauuaauagcaugacccc

SEQ ID NO: 536994 - RNA, 21 nt, Human
ugccaaaaagaccuaaaaacc

SEQ ID NO: 536995 - RNA, 24 nt, Human
ugccaaaaagaccuaaaaaccuaa

SEQ ID NO: 536996 - RNA, 21 nt, Human
ugccauggcaagaaccaugcu

SEQ ID NO: 536997 - RNA, 18 nt, Human
ugccucuguaacaccccu

SEQ ID NO: 536998 - RNA, 22 nt, Human
uggaaacaaaauaaauauaaau

SEQ ID NO: 536999 - RNA, 20 nt, Human
ugggaaaaacaucacuacaa

SEQ ID NO: 537000 - RNA, 24 nt, Human
uguaaaagaaguaaaugccaaaaa

SEQ ID NO: 537001 - RNA, 21 nt, Human
uguauagaauccuguguggga

SEQ ID NO: 537002 - RNA, 23 nt, Human
uguguuauuuauuucuuuccuug

SEQ ID NO: 537003 - RNA, 22 nt, Human
uuaagcaccacaaaauuuugcc

SEQ ID NO: 537004 - RNA, 24 nt, Human
uuaagcaccacaaaauuuugccug

SEQ ID NO: 537005 - RNA, 20 nt, Human
uuagcaccauuuauuuagcc

SEQ ID NO: 537006 - RNA, 21 nt, Human
uuuagcaccauuuauuuagcc

SEQ ID NO: 537007 - RNA, 20 nt, Human
uuuuuuucauuuuucuguuc

SEQ ID NO: 537008 - RNA, 23 nt, Human
uuuuuuucauuuuucuguucucu

SEQ ID NO: 537009 - RNA, 25 nt, Human
aaaaacacaggaggauaccgguacc

SEQ ID NO: 537010 - RNA, 24 nt, Human
aaacucuccuucuggaucuaaaca

SEQ ID NO: 537011 - RNA, 19 nt, Human
aagcuuauuuuuucauucu

SEQ ID NO: 537012 - RNA, 20 nt, Human
aaugagaguacaauuuacaa

SEQ ID NO: 537013 - RNA, 20 nt, Human
acacaaguuauaaaaauaag

SEQ ID NO: 537014 - RNA, 23 nt, Human
acaucuucuuuacucuugauuau

SEQ ID NO: 537015 - RNA, 24 nt, Human
accauuaacaauauuacaccuaga

SEQ ID NO: 537016 - RNA, 18 nt, Human
acgugagguaucauuccc

SEQ ID NO: 537017 - RNA, 24 nt, Human
agaaauugguuuauguuuaaauaa

SEQ ID NO: 537018 - RNA, 21 nt, Human
agcaagcacugauagaggagu

SEQ ID NO: 537019 - RNA, 22 nt, Human
aguaagaucaucuauucagagu

SEQ ID NO: 537020 - RNA, 23 nt, Human
aguaaguuuguuucuuuuucuuc

SEQ ID NO: 537021 - RNA, 18 nt, Human
aucaucuauucagaguaa

SEQ ID NO: 537022 - RNA, 18 nt, Human
auuacuuaaaaacacauu

SEQ ID NO: 537023 - RNA, 20 nt, Human
auuuaugaagcuuauuuuuu

SEQ ID NO: 537024 - RNA, 23 nt, Human
caacugagacucccgaagaaguu

SEQ ID NO: 537025 - RNA, 23 nt, Human
cacaaucucauuuuagaaguaaa

SEQ ID NO: 537026 - RNA, 26 nt, Human
cagcaauccccacauuugcgaaacug

SEQ ID NO: 537027 - RNA, 21 nt, Human
caggaggauacgauuccaggu

SEQ ID NO: 537028 - RNA, 20 nt, Human
caguucaacuacggaaaguc

SEQ ID NO: 537029 - RNA, 19 nt, Human
caguuuuauacaaugaauc

SEQ ID NO: 537030 - RNA, 22 nt, Human
ccagacugcuguagggggccaa

SEQ ID NO: 537031 - RNA, 20 nt, Human
cccauacuggaugaguaaga

SEQ ID NO: 537032 - RNA, 19 nt, Human
cccgaagaaguuugucuuu

SEQ ID NO: 537033 - RNA, 21 nt, Human
cucagcguuuugauuccugug

SEQ ID NO: 537034 - RNA, 19 nt, Human
cugaaaaaacacaggagga

SEQ ID NO: 537035 - RNA, 19 nt, Human
gaaaucacagaugaaaguc

SEQ ID NO: 537036 - RNA, 20 nt, Human
gacuuaaaggaagacuaaca

SEQ ID NO: 537037 - RNA, 20 nt, Human
ggaaagucuugaaaucuuaa

SEQ ID NO: 537038 - RNA, 24 nt, Human
guaguuaagacuucaacaucuucu

SEQ ID NO: 537039 - RNA, 21 nt, Human
guuuuauacaaugaauccuaa

SEQ ID NO: 537040 - RNA, 21 nt, Human
uaaaaugcuaaaacucaagug

SEQ ID NO: 537041 - RNA, 19 nt, Human
uaaguucuaugacuuaaaa

SEQ ID NO: 537042 - RNA, 19 nt, Human
uaauauguggcacccccuu

SEQ ID NO: 537043 - RNA, 19 nt, Human
uacaaugaauccuaaucau

SEQ ID NO: 537044 - RNA, 20 nt, Human
uacauuuuugauaacucucc

SEQ ID NO: 537045 - RNA, 18 nt, Human
uacucuccauugauuuug

SEQ ID NO: 537046 - RNA, 24 nt, Human
uauaaacaauugccagucacaauc

SEQ ID NO: 537047 - RNA, 19 nt, Human
uauucagaguaacuaagca

SEQ ID NO: 537048 - RNA, 19 nt, Human
ucaggaaugguaaaaugcu

SEQ ID NO: 537049 - RNA, 24 nt, Human
ucauccaaaaggaaauuuauuaca

SEQ ID NO: 537050 - RNA, 18 nt, Human
uccaagaauggcaaagau

SEQ ID NO: 537051 - RNA, 20 nt, Human
uccaaggagucugaaaaaac

SEQ ID NO: 537052 - RNA, 22 nt, Human
ugagguaucauucccccauacu

SEQ ID NO: 537053 - RNA, 22 nt, Human
ugaguaagaucaucuauucaga

SEQ ID NO: 537054 - RNA, 19 nt, Human
ugcagauauugguuuguuu

SEQ ID NO: 537055 - RNA, 23 nt, Human
ugcuguagggggccaacugagag

SEQ ID NO: 537056 - RNA, 21 nt, Human
uggaauuuagaauuuugcauu

SEQ ID NO: 537057 - RNA, 22 nt, Human
uggcagggccagauugaauaau

SEQ ID NO: 537058 - RNA, 23 nt, Human
ugguaaaacaaaucauuuuggac

SEQ ID NO: 537059 - RNA, 18 nt, Human
ugguuuuagucugacuga

SEQ ID NO: 537060 - RNA, 26 nt, Human
ugucauaaauuccauguuucauggaa

SEQ ID NO: 537061 - RNA, 22 nt, Human
uuaaaacucuccuucuggaucu

SEQ ID NO: 537062 - RNA, 18 nt, Human
uuacacaaguuauaaaaa

SEQ ID NO: 537063 - RNA, 22 nt, Human
uucuauuuugguuucaaaauca

SEQ ID NO: 537064 - RNA, 23 nt, Human
uucucauacaucaguucuccauu

SEQ ID NO: 537065 - RNA, 19 nt, Human
uuguuucuuuuucuucugg

SEQ ID NO: 537066 - RNA, 18 nt, Human
aauuauaggaaaaguacu

SEQ ID NO: 537067 - RNA, 19 nt, Human
acagaucuguauguagccu

SEQ ID NO: 537068 - RNA, 26 nt, Human
auaggacaauagaaauugcaucaaag

SEQ ID NO: 537069 - RNA, 19 nt, Human
aucacaguguacaucagga

SEQ ID NO: 537070 - RNA, 18 nt, Human
caaagcaaugcugccuaa

SEQ ID NO: 537071 - RNA, 24 nt, Human
caaagcaaugcugccuaacagaca

SEQ ID NO: 537072 - RNA, 18 nt, Human
cagaacaccugcccagca

SEQ ID NO: 537073 - RNA, 20 nt, Human
cagaacaccugcccagcagc

SEQ ID NO: 537074 - RNA, 24 nt, Human
caggcaucacucagaggaaguccc

SEQ ID NO: 537075 - RNA, 23 nt, Human
cccgcgccuccucccggggcccu

SEQ ID NO: 537076 - RNA, 22 nt, Human
ccggcgcgcccgcgccuccucc

SEQ ID NO: 537077 - RNA, 23 nt, Human
ccuguagcagggaagaccggggc

SEQ ID NO: 537078 - RNA, 20 nt, Human
ccuguagcagggaagacuca

SEQ ID NO: 537079 - RNA, 18 nt, Human
cggaagucacacggagcc

SEQ ID NO: 537080 - RNA, 25 nt, Human
cugggaauggagaaaguugcaggcc

SEQ ID NO: 537081 - RNA, 19 nt, Human
gaacaccugcccagcagca

SEQ ID NO: 537082 - RNA, 20 nt, Human
gaagcggggggcgcugcggg

SEQ ID NO: 537083 - RNA, 21 nt, Human
gcccagcagcagugcauccuc

SEQ ID NO: 537084 - RNA, 18 nt, Human
uaguauauuuucucauua

SEQ ID NO: 537085 - RNA, 20 nt, Human
uccuguagcagggaagacuc

SEQ ID NO: 537086 - RNA, 18 nt, Human
ugcagagauaaggcuaca

SEQ ID NO: 537087 - RNA, 21 nt, Human
aaaacaaacaaacaaacaaac

SEQ ID NO: 537088 - RNA, 19 nt, Human
aaacaaaagaaaagaaaac

SEQ ID NO: 537089 - RNA, 21 nt, Human
aaacaaacaaacgaacgaaca

SEQ ID NO: 537090 - RNA, 24 nt, Human
aaagaaaaaauauccaaaauaagc

SEQ ID NO: 537091 - RNA, 23 nt, Human
aacaagaccccaucuuuaaaaac

SEQ ID NO: 537092 - RNA, 20 nt, Human
aaccugaagcagggggaaaa

SEQ ID NO: 537093 - RNA, 21 nt, Human
aaccugaagcagggggaaaaa

SEQ ID NO: 537094 - RNA, 21 nt, Human
aaguguggaaagcugaacgcc

SEQ ID NO: 537095 - RNA, 24 nt, Human
aaugugcugggauuacaggcauga

SEQ ID NO: 537096 - RNA, 22 nt, Human
acaaacaaacgaacgaacaaac

SEQ ID NO: 537097 - RNA, 21 nt, Human
acugcauuccagccuaggcaa

SEQ ID NO: 537098 - RNA, 23 nt, Human
agaaaagaaaacacacauauuag

SEQ ID NO: 537099 - RNA, 22 nt, Human
agaaaggaaaaaagagcucuag

SEQ ID NO: 537100 - RNA, 20 nt, Human
agcaaaucagcagaaaggaa

SEQ ID NO: 537101 - RNA, 23 nt, Human
aggaccagagacagccaaaaaca

SEQ ID NO: 537102 - RNA, 19 nt, Human
aggauggcuugaggccagg

SEQ ID NO: 537103 - RNA, 22 nt, Human
aggccugggauauggccugagc

SEQ ID NO: 537104 - RNA, 25 nt, Human
agucccaucuauuugggaggauggc

SEQ ID NO: 537105 - RNA, 22 nt, Human
augcacuguauuuccuuguuac

SEQ ID NO: 537106 - RNA, 24 nt, Human
auggagccuggacugcaucagcuu

SEQ ID NO: 537107 - RNA, 24 nt, Human
caaaaacaaaagaaaagaaaacac

SEQ ID NO: 537108 - RNA, 18 nt, Human
caaaaagaaaaaucacug

SEQ ID NO: 537109 - RNA, 19 nt, Human
caaaaagaaaaaucacuga

SEQ ID NO: 537110 - RNA, 24 nt, Human
caagaccccaucuuuaaaaacaaa

SEQ ID NO: 537111 - RNA, 22 nt, Human
caagugaucuucccaaugugcu

SEQ ID NO: 537112 - RNA, 24 nt, Human
caaugugcugggauuacaggcaug

SEQ ID NO: 537113 - RNA, 19 nt, Human
cacugcauuccagccuagg

SEQ ID NO: 537114 - RNA, 21 nt, Human
cacugcauuccagccuaggca

SEQ ID NO: 537115 - RNA, 22 nt, Human
cacugcauuccagccuaggcaa

SEQ ID NO: 537116 - RNA, 23 nt, Human
cacugcauuccagccuaggcaau

SEQ ID NO: 537117 - RNA, 27 nt, Human
cacugcauuccagccuaggcaauauaa

SEQ ID NO: 537118 - RNA, 20 nt, Human
cagaguacuggaauguuguc

SEQ ID NO: 537119 - RNA, 18 nt, Human
cagccaaaaacaaaagaa

SEQ ID NO: 537120 - RNA, 26 nt, Human
cagugcccgggggcugagcggccggg

SEQ ID NO: 537121 - RNA, 25 nt, Human
caucuuuaaaaacaaacaaacaaac

SEQ ID NO: 537122 - RNA, 26 nt, Human
caucuuuaaaaacaaacaaacaaacc

SEQ ID NO: 537123 - RNA, 24 nt, Human
caugagccaccaugcccagccuau

SEQ ID NO: 537124 - RNA, 27 nt, Human
ccaaaaacaaaagaaaagaaaacacaa

SEQ ID NO: 537125 - RNA, 25 nt, Human
ccaaugccugugacccgucaccaaa

SEQ ID NO: 537126 - RNA, 19 nt, Human
ccaaugugcugggauuaca

SEQ ID NO: 537127 - RNA, 24 nt, Human
ccaaugugcugggauuacaggcau

SEQ ID NO: 537128 - RNA, 21 nt, Human
ccaccaugcccagccuauguc

SEQ ID NO: 537129 - RNA, 19 nt, Human
ccacugcauuccagccuag

SEQ ID NO: 537130 - RNA, 20 nt, Human
ccacugcauuccagccuagg

SEQ ID NO: 537131 - RNA, 20 nt, Human
ccacugcauuccagccuagg

SEQ ID NO: 537132 - RNA, 21 nt, Human
ccacugcauuccagccuaggc

SEQ ID NO: 537133 - RNA, 24 nt, Human
ccacugcauuccagccuaggcaau

SEQ ID NO: 537134 - RNA, 27 nt, Human
ccagagacagccaaaaacaaaagaaaa

SEQ ID NO: 537135 - RNA, 24 nt, Human
cccaaugugcugggauuacaggca

SEQ ID NO: 537136 - RNA, 19 nt, Human
ccccacagcagugcccggg

SEQ ID NO: 537137 - RNA, 23 nt, Human
ccccacagcagugcccgggggcu

SEQ ID NO: 537138 - RNA, 22 nt, Human
cccuuggaugaaucaaaauaca

SEQ ID NO: 537139 - RNA, 24 nt, Human
ccgccggcagccacagcuuccucc

SEQ ID NO: 537140 - RNA, 21 nt, Human
ccggcagccacagcuuccucc

SEQ ID NO: 537141 - RNA, 28 nt, Human
ccugugaauaaccacugcauuccagccu

SEQ ID NO: 537142 - RNA, 21 nt, Human
ccuuggguuuuaacaagccuu

SEQ ID NO: 537143 - RNA, 24 nt, Human
cgcccgggaccucuggccggaagc

SEQ ID NO: 537144 - RNA, 22 nt, Human
cuaaagcuagaccagugguuuu

SEQ ID NO: 537145 - RNA, 25 nt, Human
cuaaugaacucucuaaugauccucu

SEQ ID NO: 537146 - RNA, 23 nt, Human
cuaaugauccucucacccuuucu

SEQ ID NO: 537147 - RNA, 25 nt, Human
cucaaacuccuugccucaagugauc

SEQ ID NO: 537148 - RNA, 23 nt, Human
cucaagugaucuucccaaugugc

SEQ ID NO: 537149 - RNA, 25 nt, Human
cugagcuacuacaaaaagaaaaauc

SEQ ID NO: 537150 - RNA, 18 nt, Human
cuguauguucucccccau

SEQ ID NO: 537151 - RNA, 22 nt, Human
cugugguugguucaguuuucaa

SEQ ID NO: 537152 - RNA, 20 nt, Human
cuucaaaacuaccaaugccu

SEQ ID NO: 537153 - RNA, 25 nt, Human
cuugaaucaaggaccagagacagcc

SEQ ID NO: 537154 - RNA, 25 nt, Human
gacagccaaaaacaaaagaaaagaa

SEQ ID NO: 537155 - RNA, 21 nt, Human
gaccagagacagccaaaaaca

SEQ ID NO: 537156 - RNA, 24 nt, Human
gagccaccaugcccagccuauguc

SEQ ID NO: 537157 - RNA, 18 nt, Human
gauuacaggcaugagcca

SEQ ID NO: 537158 - RNA, 21 nt, Human
gauuacaggcaugagccacca

SEQ ID NO: 537159 - RNA, 24 nt, Human
gauuacaggcaugagccaccaugc

SEQ ID NO: 537160 - RNA, 23 nt, Human
gccaggaguuagagagaguagug

SEQ ID NO: 537161 - RNA, 22 nt, Human
gcggcuugcuuugccccaagug

SEQ ID NO: 537162 - RNA, 27 nt, Human
ggaccagagacagccaaaaacaaaaga

SEQ ID NO: 537163 - RNA, 23 nt, Human
ggaccucuggccggaagcagucc

SEQ ID NO: 537164 - RNA, 21 nt, Human
ggagagcuucaaaacuaccaa

SEQ ID NO: 537165 - RNA, 24 nt, Human
ggauuacaggcaugagccaccaug

SEQ ID NO: 537166 - RNA, 25 nt, Human
ggcacgcugggcuguauguucuccc

SEQ ID NO: 537167 - RNA, 18 nt, Human
gggccuagcagccuuggg

SEQ ID NO: 537168 - RNA, 22 nt, Human
ggggucucgcuguguuggccag

SEQ ID NO: 537169 - RNA, 24 nt, Human
ggggugggccuagcagccuugggu

SEQ ID NO: 537170 - RNA, 24 nt, Human
gggugggccuagcagccuuggguu

SEQ ID NO: 537171 - RNA, 21 nt, Human
ggugggccuagcagccuuggg

SEQ ID NO: 537172 - RNA, 24 nt, Human
guaagcuaaauuuggaagccccug

SEQ ID NO: 537173 - RNA, 18 nt, Human
gugcugggauuacaggca

SEQ ID NO: 537174 - RNA, 21 nt, Human
gugcugggauuacaggcauga

SEQ ID NO: 537175 - RNA, 21 nt, Human
gugcuuccagcaaaucagcag

SEQ ID NO: 537176 - RNA, 22 nt, Human
guggaaagcugaacgccccaca

SEQ ID NO: 537177 - RNA, 18 nt, Human
guggaagcaacauuuucu

SEQ ID NO: 537178 - RNA, 19 nt, Human
uaaauuggcucaauauccu

SEQ ID NO: 537179 - RNA, 24 nt, Human
uaaccacugcauuccagccuaggc

SEQ ID NO: 537180 - RNA, 23 nt, Human
uacaaaaagaaaaaucacugaau

SEQ ID NO: 537181 - RNA, 24 nt, Human
uacaggcaugagccaccaugccca

SEQ ID NO: 537182 - RNA, 22 nt, Human
uacucucuaaugaacucucuaa

SEQ ID NO: 537183 - RNA, 25 nt, Human
uagaaaugcaaauuuuuggguccca

SEQ ID NO: 537184 - RNA, 21 nt, Human
uaggcaauauaacaagacccc

SEQ ID NO: 537185 - RNA, 22 nt, Human
uaggcaauauaacaagacccca

SEQ ID NO: 537186 - RNA, 18 nt, Human
uaggccugggauauggcc

SEQ ID NO: 537187 - RNA, 24 nt, Human
uauaacaagaccccaucuuuaaaa

SEQ ID NO: 537188 - RNA, 24 nt, Human
uauaacaagaccccaucuuuaaaa

SEQ ID NO: 537189 - RNA, 18 nt, Human
uauuaggaauaaauacuc

SEQ ID NO: 537190 - RNA, 20 nt, Human
uauuaggaauaaauacucuc

SEQ ID NO: 537191 - RNA, 18 nt, Human
ucaaagaaguuuccuggc

SEQ ID NO: 537192 - RNA, 24 nt, Human
ucagauggccagcuaaagagagaa

SEQ ID NO: 537193 - RNA, 24 nt, Human
ucccaaugugcugggauuacaggc

SEQ ID NO: 537194 - RNA, 21 nt, Human
ucccaccgccggcagccacag

SEQ ID NO: 537195 - RNA, 25 nt, Human
ucgcuguguuggccagucuggucuc

SEQ ID NO: 537196 - RNA, 21 nt, Human
ucuagaguaagaacaguugau

SEQ ID NO: 537197 - RNA, 23 nt, Human
ucucgcuguguuggccagucugg

SEQ ID NO: 537198 - RNA, 21 nt, Human
ugaaacuucuaaaaaugaaac

SEQ ID NO: 537199 - RNA, 27 nt, Human
ugacugagcuacuacaaaaagaaaaau

SEQ ID NO: 537200 - RNA, 20 nt, Human
ugagauacacuuacuggaaa

SEQ ID NO: 537201 - RNA, 23 nt, Human
ugagauacacuuacuggaaagaa

SEQ ID NO: 537202 - RNA, 18 nt, Human
ugcccgggggcugagcgg

SEQ ID NO: 537203 - RNA, 24 nt, Human
ugcuguuaccuguuuugacugagc

SEQ ID NO: 537204 - RNA, 18 nt, Human
ugcuuccagcaaaucagc

SEQ ID NO: 537205 - RNA, 23 nt, Human
uggaaagaagcuggacccaggcc

SEQ ID NO: 537206 - RNA, 25 nt, Human
uggaaagaagcuggacccaggccca

SEQ ID NO: 537207 - RNA, 19 nt, Human
uggagccuggacugcauca

SEQ ID NO: 537208 - RNA, 24 nt, Human
uggccagucuggucucaaacuccu

SEQ ID NO: 537209 - RNA, 18 nt, Human
ugggauuacaggcaugag

SEQ ID NO: 537210 - RNA, 22 nt, Human
ugggauuacaggcaugagccac

SEQ ID NO: 537211 - RNA, 23 nt, Human
ugggauuacaggcaugagccacc

SEQ ID NO: 537212 - RNA, 24 nt, Human
ugggauuacaggcaugagccacca

SEQ ID NO: 537213 - RNA, 25 nt, Human
ugggauuacaggcaugagccaccau

SEQ ID NO: 537214 - RNA, 24 nt, Human
ugggggucucgcuguguuggccag

SEQ ID NO: 537215 - RNA, 21 nt, Human
uggguuucugaaauauccaaa

SEQ ID NO: 537216 - RNA, 24 nt, Human
ugguuuucaaagcauggagccugg

SEQ ID NO: 537217 - RNA, 24 nt, Human
uguguuggccagucuggucucaaa

SEQ ID NO: 537218 - RNA, 19 nt, Human
uguuaccuguuuugacuga

SEQ ID NO: 537219 - RNA, 19 nt, Human
uguuggccagucuggucuc

SEQ ID NO: 537220 - RNA, 24 nt, Human
uucuaugauuaaucugcuguuacc

SEQ ID NO: 537221 - RNA, 23 nt, Human
uugguucaguuuucaaauuuguc

SEQ ID NO: 537222 - RNA, 23 nt, Human
uuuaacaagccuuccaagugauu

SEQ ID NO: 537223 - RNA, 22 nt, Human
uuuaauaggccugggauauggc

SEQ ID NO: 537224 - RNA, 22 nt, Human
uuuggaagccccugagauacac

SEQ ID NO: 537225 - RNA, 20 nt, Human
uuuucugaaauaaauuccug

SEQ ID NO: 537226 - RNA, 21 nt, Human
uuuuuuuuuuagagauggggg

SEQ ID NO: 537227 - RNA, 27 nt, Human
uuuuuuuuuuuuagagaugggggucuc

SEQ ID NO: 537228 - RNA, 24 nt, Human
uuuuuuuuuuuuuuagagaugggg

SEQ ID NO: 537229 - RNA, 18 nt, Human
uuuuuuuuuuuuuuuuug

SEQ ID NO: 537230 - RNA, 22 nt, Human
aaaagagcacagcgaaauccua

SEQ ID NO: 537231 - RNA, 23 nt, Human
aaaccaggugcuuggguagcaaa

SEQ ID NO: 537232 - RNA, 24 nt, Human
aaagaaacccaguaaaugcucaag

SEQ ID NO: 537233 - RNA, 20 nt, Human
aaaucucaaccccagccucc

SEQ ID NO: 537234 - RNA, 18 nt, Human
aagaugguggaaacaguc

SEQ ID NO: 537235 - RNA, 23 nt, Human
aaucaaaagagcacagcgaaauc

SEQ ID NO: 537236 - RNA, 21 nt, Human
aauguccacgucauucucugc

SEQ ID NO: 537237 - RNA, 21 nt, Human
acauggauuucuaagagacca

SEQ ID NO: 537238 - RNA, 25 nt, Human
accaccuucuccuccaucccucucc

SEQ ID NO: 537239 - RNA, 20 nt, Human
acccaugagauaccaauagc

SEQ ID NO: 537240 - RNA, 18 nt, Human
agaaaaugacaacagcag

SEQ ID NO: 537241 - RNA, 23 nt, Human
agaaagacagccagugagacaga

SEQ ID NO: 537242 - RNA, 21 nt, Human
agaaucagagauaggauggcc

SEQ ID NO: 537243 - RNA, 28 nt, Human
agauaccaauagcaguccccaccaagcu

SEQ ID NO: 537244 - RNA, 20 nt, Human
agcacaacccaccucggggc

SEQ ID NO: 537245 - RNA, 23 nt, Human
agcgggccgauggcagcugcagg

SEQ ID NO: 537246 - RNA, 18 nt, Human
aggcaggaaaucagcuug

SEQ ID NO: 537247 - RNA, 21 nt, Human
agggugccucuagagcugaca

SEQ ID NO: 537248 - RNA, 18 nt, Human
agucuggggguccccaca

SEQ ID NO: 537249 - RNA, 24 nt, Human
auaguaagguuucugcaaaagauu

SEQ ID NO: 537250 - RNA, 23 nt, Human
auauagagcccuugucagaacca

SEQ ID NO: 537251 - RNA, 27 nt, Human
augacaacagcagcaacgcuaacaaag

SEQ ID NO: 537252 - RNA, 25 nt, Human
caaaaagaaacccaguaaaugcuca

SEQ ID NO: 537253 - RNA, 21 nt, Human
caaaccuccucuuggggaggc

SEQ ID NO: 537254 - RNA, 19 nt, Human
caaccucacaaagcaguaa

SEQ ID NO: 537255 - RNA, 23 nt, Human
caacgugcuggaccacggacccc

SEQ ID NO: 537256 - RNA, 19 nt, Human
caagccucucagagauuca

SEQ ID NO: 537257 - RNA, 22 nt, Human
cacaaccucacaaagcaguaag

SEQ ID NO: 537258 - RNA, 24 nt, Human
cacaaguccucuuaagacaggccu

SEQ ID NO: 537259 - RNA, 18 nt, Human
cacacggccucagcugcu

SEQ ID NO: 537260 - RNA, 26 nt, Human
caccccauuccuaagcucuuccccaa

SEQ ID NO: 537261 - RNA, 21 nt, Human
cagaauccccggggaccgcac

SEQ ID NO: 537262 - RNA, 18 nt, Human
cagagauucauuuuccuc

SEQ ID NO: 537263 - RNA, 23 nt, Human
cagccuccgaggccucauauccc

SEQ ID NO: 537264 - RNA, 20 nt, Human
cagcucagcccaacccuggc

SEQ ID NO: 537265 - RNA, 21 nt, Human
caggaccaaaucucaaccccg

SEQ ID NO: 537266 - RNA, 21 nt, Human
caggggccuguggagugggcc

SEQ ID NO: 537267 - RNA, 28 nt, Human
cauaucccgagaugguccaucccagggg

SEQ ID NO: 537268 - RNA, 21 nt, Human
cauccagaauccccggggacc

SEQ ID NO: 537269 - RNA, 19 nt, Human
cauggugaaaccaggugcu

SEQ ID NO: 537270 - RNA, 20 nt, Human
cauucaggaucuggcuguuc

SEQ ID NO: 537271 - RNA, 24 nt, Human
ccaaggcagaauggggcucaaacc

SEQ ID NO: 537272 - RNA, 23 nt, Human
ccacacggccucagcugcucucc

SEQ ID NO: 537273 - RNA, 24 nt, Human
cccaacccuggcacuugcucgggg

SEQ ID NO: 537274 - RNA, 28 nt, Human
cccagcagucccaugcccaccccauucc

SEQ ID NO: 537275 - RNA, 19 nt, Human
cccaugcccaccccauucc

SEQ ID NO: 537276 - RNA, 18 nt, Human
ccccacacucccauccac

SEQ ID NO: 537277 - RNA, 19 nt, Human
ccccggggaccgcaccacc

SEQ ID NO: 537278 - RNA, 19 nt, Human
cccuggaggucccagagac

SEQ ID NO: 537279 - RNA, 21 nt, Human
ccgccugccccuuuccuggac

SEQ ID NO: 537280 - RNA, 25 nt, Human
ccucuggguucucaguacucaguuc

SEQ ID NO: 537281 - RNA, 20 nt, Human
ccucuuaagacaggccuggc

SEQ ID NO: 537282 - RNA, 23 nt, Human
ccucuuccucaaaaagaaaccca

SEQ ID NO: 537283 - RNA, 23 nt, Human
ccucuuggggaggcaggaaauca

SEQ ID NO: 537284 - RNA, 23 nt, Human
ccugaccucggcacuauuggccg

SEQ ID NO: 537285 - RNA, 20 nt, Human
ccugcaaauucccugcaaau

SEQ ID NO: 537286 - RNA, 21 nt, Human
ccuggcacuugcucggggaca

SEQ ID NO: 537287 - RNA, 18 nt, Human
ccugggcucaagaccccu

SEQ ID NO: 537288 - RNA, 22 nt, Human
ccuucugccagcauauagagcc

SEQ ID NO: 537289 - RNA, 19 nt, Human
cgacuggccucaugaaagc

SEQ ID NO: 537290 - RNA, 21 nt, Human
cgcauggugaaaccaggugcu

SEQ ID NO: 537291 - RNA, 22 nt, Human
cgcauggugaaaccaggugcuu

SEQ ID NO: 537292 - RNA, 22 nt, Human
cggaccccugggccaggagccc

SEQ ID NO: 537293 - RNA, 23 nt, Human
cggucaaaagaccagcauccaga

SEQ ID NO: 537294 - RNA, 22 nt, Human
cgugcuggaccacggaccccug

SEQ ID NO: 537295 - RNA, 21 nt, Human
cucaaccccagccuccgaggc

SEQ ID NO: 537296 - RNA, 19 nt, Human
cucagcccaacccuggcac

SEQ ID NO: 537297 - RNA, 22 nt, Human
cuccagacauugcugauggccc

SEQ ID NO: 537298 - RNA, 21 nt, Human
cucccugagcagaacucccug

SEQ ID NO: 537299 - RNA, 19 nt, Human
cuccgugagugaccauggu

SEQ ID NO: 537300 - RNA, 18 nt, Human
cucuucucaaagaccuuc

SEQ ID NO: 537301 - RNA, 27 nt, Human
cugcuacccagcagucccaugcccacc

SEQ ID NO: 537302 - RNA, 28 nt, Human
cuggcuacagcagcgucuggccucuucu

SEQ ID NO: 537303 - RNA, 20 nt, Human
cugggaguugcagaucacug

SEQ ID NO: 537304 - RNA, 22 nt, Human
cuuacauuuacaaguugaucau

SEQ ID NO: 537305 - RNA, 20 nt, Human
gaaagacagccagugagaca

SEQ ID NO: 537306 - RNA, 19 nt, Human
gaagcugugggcucugucc

SEQ ID NO: 537307 - RNA, 19 nt, Human
gaccagcauccagaauccc

SEQ ID NO: 537308 - RNA, 20 nt, Human
gaccauggucaggggccugg

SEQ ID NO: 537309 - RNA, 21 nt, Human
gacucagaacacaucauacac

SEQ ID NO: 537310 - RNA, 19 nt, Human
gagcagaacucccugggcc

SEQ ID NO: 537311 - RNA, 19 nt, Human
gauacaggggacacagggg

SEQ ID NO: 537312 - RNA, 19 nt, Human
gauuagaugcucucuaaag

SEQ ID NO: 537313 - RNA, 19 nt, Human
gcagaugacagccuugcca

SEQ ID NO: 537314 - RNA, 19 nt, Human
gcagccucuccgaggacca

SEQ ID NO: 537315 - RNA, 22 nt, Human
gcaugaagaauugguaucugga

SEQ ID NO: 537316 - RNA, 20 nt, Human
gccacggucaaaagaccagc

SEQ ID NO: 537317 - RNA, 23 nt, Human
gccacucacaaccucacaaagca

SEQ ID NO: 537318 - RNA, 23 nt, Human
gccaggguggguggggcuggggc

SEQ ID NO: 537319 - RNA, 20 nt, Human
gcuugaaaaagggacccaag

SEQ ID NO: 537320 - RNA, 20 nt, Human
gcuuggaagcugugggcucu

SEQ ID NO: 537321 - RNA, 20 nt, Human
ggaacugauaaaucccuggu

SEQ ID NO: 537322 - RNA, 23 nt, Human
ggaccccugggccaggagcccag

SEQ ID NO: 537323 - RNA, 19 nt, Human
ggaggcaggaaaucagcuu

SEQ ID NO: 537324 - RNA, 18 nt, Human
ggaucacccuggugggca

SEQ ID NO: 537325 - RNA, 19 nt, Human
ggcaucccuggccuccacc

SEQ ID NO: 537326 - RNA, 22 nt, Human
ggcuggggcagguaaucccggg

SEQ ID NO: 537327 - RNA, 24 nt, Human
gggaggcaggaaaucagcuugaaa

SEQ ID NO: 537328 - RNA, 22 nt, Human
gggccaggguggguggggcugg

SEQ ID NO: 537329 - RNA, 19 nt, Human
gggcuggggcaggugaaca

SEQ ID NO: 537330 - RNA, 19 nt, Human
ggugaaaccaggugcuugg

SEQ ID NO: 537331 - RNA, 24 nt, Human
gguuauccagauuuuucagagagg

SEQ ID NO: 537332 - RNA, 21 nt, Human
gucagcucuccacuaauuuuc

SEQ ID NO: 537333 - RNA, 21 nt, Human
guccugggcucaagaccccug

SEQ ID NO: 537334 - RNA, 21 nt, Human
gugcacugccgccugccccuu

SEQ ID NO: 537335 - RNA, 21 nt, Human
guggaaugggcucugauuccc

SEQ ID NO: 537336 - RNA, 18 nt, Human
gugguucuuuaagaaacu

SEQ ID NO: 537337 - RNA, 24 nt, Human
uaaagaauauuaguaugccuucaa

SEQ ID NO: 537338 - RNA, 22 nt, Human
uaacaaagugagauuucacaga

SEQ ID NO: 537339 - RNA, 22 nt, Human
uaagacacaaaaacauuuccga

SEQ ID NO: 537340 - RNA, 22 nt, Human
uacccagcagucccaugcccac

SEQ ID NO: 537341 - RNA, 21 nt, Human
uagaaaaugacaacagcagca

SEQ ID NO: 537342 - RNA, 19 nt, Human
uagaacauucaggaucugg

SEQ ID NO: 537343 - RNA, 23 nt, Human
uagcagcucagcccaacccuggc

SEQ ID NO: 537344 - RNA, 20 nt, Human
ucaggaccaaaucucaaccc

SEQ ID NO: 537345 - RNA, 20 nt, Human
ucaguacucaguucaaccac

SEQ ID NO: 537346 - RNA, 24 nt, Human
ucauguuuucuucuuuucucuuuu

SEQ ID NO: 537347 - RNA, 20 nt, Human
uccacagaaaaaugcgacag

SEQ ID NO: 537348 - RNA, 22 nt, Human
uccacuuuguagggcuuucucc

SEQ ID NO: 537349 - RNA, 19 nt, Human
ucccagggggaucacccug

SEQ ID NO: 537350 - RNA, 19 nt, Human
uccccacaaaugcccaaga

SEQ ID NO: 537351 - RNA, 22 nt, Human
ucccucuuccucaaaaagaaac

SEQ ID NO: 537352 - RNA, 18 nt, Human
ucccugagcagaacuccc

SEQ ID NO: 537353 - RNA, 22 nt, Human
ucccugagcagaacucccuggg

SEQ ID NO: 537354 - RNA, 23 nt, Human
ucccugagcagaacucccugggc

SEQ ID NO: 537355 - RNA, 19 nt, Human
ucccuggaggucccagaga

SEQ ID NO: 537356 - RNA, 23 nt, Human
ucccuggaggucccagagacaca

SEQ ID NO: 537357 - RNA, 27 nt, Human
uccgugagugaccauggucaggggccu

SEQ ID NO: 537358 - RNA, 19 nt, Human
uccuccaucccucuccgug

SEQ ID NO: 537359 - RNA, 23 nt, Human
ucgauaguuaguuguccugggcu

SEQ ID NO: 537360 - RNA, 24 nt, Human
ucucgauuagaugcucucuaaagc

SEQ ID NO: 537361 - RNA, 18 nt, Human
ucugcucuuuucuaucuu

SEQ ID NO: 537362 - RNA, 23 nt, Human
ucuuuuaagguuagauauuuuua

SEQ ID NO: 537363 - RNA, 18 nt, Human
ugaaaccaggugcuuggg

SEQ ID NO: 537364 - RNA, 22 nt, Human
ugaacgcacaacgugcuggacc

SEQ ID NO: 537365 - RNA, 22 nt, Human
ugaagucaacugcuuacauuua

SEQ ID NO: 537366 - RNA, 26 nt, Human
ugacaacagcagcaacgcuaacaaag

SEQ ID NO: 537367 - RNA, 20 nt, Human
ugacagccuugccaaauguc

SEQ ID NO: 537368 - RNA, 21 nt, Human
ugaccucggcacuauuggcau

SEQ ID NO: 537369 - RNA, 22 nt, Human
ugagauaccaauagcagucccc

SEQ ID NO: 537370 - RNA, 20 nt, Human
ugcccugugcauuguaggau

SEQ ID NO: 537371 - RNA, 18 nt, Human
ugccugggucccuggaag

SEQ ID NO: 537372 - RNA, 19 nt, Human
ugccugggucccuggaagc

SEQ ID NO: 537373 - RNA, 21 nt, Human
ugcuacccagcagucccaugc

SEQ ID NO: 537374 - RNA, 25 nt, Human
uggaagcacaaguccucuuaagaca

SEQ ID NO: 537375 - RNA, 19 nt, Human
uggaaugggcucugauucc

SEQ ID NO: 537376 - RNA, 21 nt, Human
uggagugggccagggugggug

SEQ ID NO: 537377 - RNA, 21 nt, Human
uggauuucuaagagaccacau

SEQ ID NO: 537378 - RNA, 23 nt, Human
uggcagaaauaggacugggcacg

SEQ ID NO: 537379 - RNA, 19 nt, Human
uggcagcugcagggagcac

SEQ ID NO: 537380 - RNA, 18 nt, Human
uggcaguaacuguuuucu

SEQ ID NO: 537381 - RNA, 20 nt, Human
uggcaguaacuguuuucucg

SEQ ID NO: 537382 - RNA, 24 nt, Human
uggcaguaacuguuuucucgcucc

SEQ ID NO: 537383 - RNA, 22 nt, Human
uggcucccugagcagaacuccc

SEQ ID NO: 537384 - RNA, 18 nt, Human
ugggcacguggaaaaagg

SEQ ID NO: 537385 - RNA, 23 nt, Human
uggggcucaaaccuccucuuggg

SEQ ID NO: 537386 - RNA, 21 nt, Human
uggggggcugcccugugcauu

SEQ ID NO: 537387 - RNA, 23 nt, Human
ugggucccuggaagcacaagucc

SEQ ID NO: 537388 - RNA, 19 nt, Human
uggguggggcuggggcagg

SEQ ID NO: 537389 - RNA, 20 nt, Human
uggguggggcuggggcaggu

SEQ ID NO: 537390 - RNA, 20 nt, Human
ugguaucuggagaguagcaa

SEQ ID NO: 537391 - RNA, 24 nt, Human
uggucaggggccuguggagugggc

SEQ ID NO: 537392 - RNA, 21 nt, Human
ugguggaaacagucacaugga

SEQ ID NO: 537393 - RNA, 22 nt, Human
uguccucuggguucucaguacu

SEQ ID NO: 537394 - RNA, 26 nt, Human
uguggaaugggcucugauucccccaa

SEQ ID NO: 537395 - RNA, 19 nt, Human
uguggagugggccagggug

SEQ ID NO: 537396 - RNA, 26 nt, Human
uuaaaggucucgauuagaugcucucu

SEQ ID NO: 537397 - RNA, 23 nt, Human
uuaagaaagagucuucacuguag

SEQ ID NO: 537398 - RNA, 19 nt, Human
uuaauuuacucaaugacuc

SEQ ID NO: 537399 - RNA, 19 nt, Human
uucaaccaccuucuccucc

SEQ ID NO: 537400 - RNA, 23 nt, Human
uucagccccacacucccauccac

SEQ ID NO: 537401 - RNA, 22 nt, Human
uucccuuuggcucccugagcag

SEQ ID NO: 537402 - RNA, 18 nt, Human
uugcucaaaggcugcuac

SEQ ID NO: 537403 - RNA, 22 nt, Human
uuggaagcugugggcucugucc

SEQ ID NO: 537404 - RNA, 26 nt, Human
uuuaaucaaaagagcacagcgaaauc

SEQ ID NO: 537405 - RNA, 23 nt, Human
uuucagagaggucccuuuuccug

SEQ ID NO: 537406 - RNA, 23 nt, Human
aaaacaaaaacucuuacaacccu

SEQ ID NO: 537407 - RNA, 20 nt, Human
aaacaaaaacucuuacaacc

SEQ ID NO: 537408 - RNA, 26 nt, Human
aaauagcugcauguacgaaaccucuu

SEQ ID NO: 537409 - RNA, 18 nt, Human
aagaagaagagauuggaa

SEQ ID NO: 537410 - RNA, 20 nt, Human
aagaagagauuggaauggcu

SEQ ID NO: 537411 - RNA, 22 nt, Human
aagcagucugaugacccauggc

SEQ ID NO: 537412 - RNA, 23 nt, Human
aagcuuggccgugugagugcccc

SEQ ID NO: 537413 - RNA, 19 nt, Human
aauacagcuaaugaagugg

SEQ ID NO: 537414 - RNA, 23 nt, Human
aaugcgugauuaaaaacaaaaac

SEQ ID NO: 537415 - RNA, 21 nt, Human
acaauuacucagcaaacaaga

SEQ ID NO: 537416 - RNA, 19 nt, Human
acccauggcaggccgauca

SEQ ID NO: 537417 - RNA, 21 nt, Human
acucucauuuuuacuuauagu

SEQ ID NO: 537418 - RNA, 23 nt, Human
acugguggaagagcagggaaggg

SEQ ID NO: 537419 - RNA, 24 nt, Human
agaagcacccagccuuccuaaagg

SEQ ID NO: 537420 - RNA, 21 nt, Human
agacucuaccaaaugcgugau

SEQ ID NO: 537421 - RNA, 21 nt, Human
agcaagaagcacccagccuuc

SEQ ID NO: 537422 - RNA, 19 nt, Human
agcagggaagggcccuugu

SEQ ID NO: 537423 - RNA, 21 nt, Human
agcagggaagggcccuuguug

SEQ ID NO: 537424 - RNA, 18 nt, Human
agcugcauguacgaaacc

SEQ ID NO: 537425 - RNA, 21 nt, Human
aggcagaagaguggaaaucug

SEQ ID NO: 537426 - RNA, 22 nt, Human
aggcagaagaguggaaaucuga

SEQ ID NO: 537427 - RNA, 22 nt, Human
agugguggcagaagcuuggccg

SEQ ID NO: 537428 - RNA, 20 nt, Human
caacguaagagucaucuccc

SEQ ID NO: 537429 - RNA, 18 nt, Human
caaggccaccauccccuu

SEQ ID NO: 537430 - RNA, 19 nt, Human
cacccagccuuccuaaagg

SEQ ID NO: 537431 - RNA, 22 nt, Human
cagaaguucacagcgucuugga

SEQ ID NO: 537432 - RNA, 20 nt, Human
cagagacauuagaaacaauu

SEQ ID NO: 537433 - RNA, 18 nt, Human
cagcgcguggggucugac

SEQ ID NO: 537434 - RNA, 24 nt, Human
caggguaaaagucucucuucuguc

SEQ ID NO: 537435 - RNA, 22 nt, Human
cauacuauggagaauacagcua

SEQ ID NO: 537436 - RNA, 21 nt, Human
cauuagaaacaauuacucagc

SEQ ID NO: 537437 - RNA, 21 nt, Human
cauuagaaacaauuacucagc

SEQ ID NO: 537438 - RNA, 22 nt, Human
cauuagaaacaauuacucagca

SEQ ID NO: 537439 - RNA, 27 nt, Human
ccaaagauguggccagugaggugccag

SEQ ID NO: 537440 - RNA, 26 nt, Human
ccacccaguugacuucuuaaucacac

SEQ ID NO: 537441 - RNA, 18 nt, Human
ccaguagguaaggaggug

SEQ ID NO: 537442 - RNA, 26 nt, Human
ccccagacuggcugucagagcaagaa

SEQ ID NO: 537443 - RNA, 19 nt, Human
cccccguggacagcagccu

SEQ ID NO: 537444 - RNA, 21 nt, Human
ccuaaaggcagaagaguggaa

SEQ ID NO: 537445 - RNA, 20 nt, Human
ccuggacuggggagcuggga

SEQ ID NO: 537446 - RNA, 25 nt, Human
cgugauuaaaaacaaaaacucuuac

SEQ ID NO: 537447 - RNA, 21 nt, Human
cucaguuucucucaauuuagg

SEQ ID NO: 537448 - RNA, 27 nt, Human
cucuccccagucagggcucuuucuggg

SEQ ID NO: 537449 - RNA, 21 nt, Human
cugaugagaggccaggagccu

SEQ ID NO: 537450 - RNA, 24 nt, Human
cugccaccaagacucaagcaacgu

SEQ ID NO: 537451 - RNA, 23 nt, Human
cuggaaugagcccuuugggagcc

SEQ ID NO: 537452 - RNA, 23 nt, Human
cuggggucaggccaggaaggggc

SEQ ID NO: 537453 - RNA, 21 nt, Human
gcagauccugaugagaggcca

SEQ ID NO: 537454 - RNA, 18 nt, Human
gccaccaagacucaagca

SEQ ID NO: 537455 - RNA, 21 nt, Human
gccaccaagacucaagcaacg

SEQ ID NO: 537456 - RNA, 18 nt, Human
gccaggcacugcgucugg

SEQ ID NO: 537457 - RNA, 22 nt, Human
ggagugaggucaggucacguga

SEQ ID NO: 537458 - RNA, 24 nt, Human
ggcaggccgaucaaggcaguugcc

SEQ ID NO: 537459 - RNA, 20 nt, Human
ggccaccauccccuuccaaa

SEQ ID NO: 537460 - RNA, 19 nt, Human
ggcggcggcggggagcccg

SEQ ID NO: 537461 - RNA, 22 nt, Human
ggggcgcacggggcggcggcgg

SEQ ID NO: 537462 - RNA, 19 nt, Human
gggucucuggggggcagau

SEQ ID NO: 537463 - RNA, 19 nt, Human
gguggcagaagcuuggccg

SEQ ID NO: 537464 - RNA, 23 nt, Human
gucugggggggucucuggggggc

SEQ ID NO: 537465 - RNA, 19 nt, Human
gugcacugacguacacgua

SEQ ID NO: 537466 - RNA, 23 nt, Human
gugcuuuggugguguaaggaacu

SEQ ID NO: 537467 - RNA, 20 nt, Human
guggccagugaggugccagc

SEQ ID NO: 537468 - RNA, 22 nt, Human
gugucugggggggucucugggg

SEQ ID NO: 537469 - RNA, 18 nt, Human
uaaaggcagaagagugga

SEQ ID NO: 537470 - RNA, 18 nt, Human
uaacccagaaaaggccac

SEQ ID NO: 537471 - RNA, 25 nt, Human
uauagcaguggcugagagauugcuc

SEQ ID NO: 537472 - RNA, 19 nt, Human
uauaguagugucuuaaaaa

SEQ ID NO: 537473 - RNA, 22 nt, Human
uauuuauuggaaaagcagaaca

SEQ ID NO: 537474 - RNA, 24 nt, Human
uauuucaccauacuauggagaaua

SEQ ID NO: 537475 - RNA, 20 nt, Human
ucagggcucuuucugggcug

SEQ ID NO: 537476 - RNA, 23 nt, Human
ucuuguuuaauuaccugcugccc

SEQ ID NO: 537477 - RNA, 21 nt, Human
ucuuucugggcugcucugcag

SEQ ID NO: 537478 - RNA, 18 nt, Human
ugaagugcuuugguggug

SEQ ID NO: 537479 - RNA, 21 nt, Human
ugaagugguggcagaagcuug

SEQ ID NO: 537480 - RNA, 21 nt, Human
ugaauacucucauuuuuacuu

SEQ ID NO: 537481 - RNA, 21 nt, Human
ugacguaaggacaagugcacu

SEQ ID NO: 537482 - RNA, 18 nt, Human
ugaggaaauguccccagg

SEQ ID NO: 537483 - RNA, 21 nt, Human
ugaggucaggucacgugaucc

SEQ ID NO: 537484 - RNA, 24 nt, Human
ugagugccccaggguaaaagucuc

SEQ ID NO: 537485 - RNA, 25 nt, Human
ugauuaaaaacaaaaacucuuacaa

SEQ ID NO: 537486 - RNA, 21 nt, Human
ugccucuggacugccaggcac

SEQ ID NO: 537487 - RNA, 22 nt, Human
uggaaaucugacagugccugcc

SEQ ID NO: 537488 - RNA, 18 nt, Human
uggaagagcagggaaggg

SEQ ID NO: 537489 - RNA, 21 nt, Human
uggaaggaaaaugcuggcugg

SEQ ID NO: 537490 - RNA, 18 nt, Human
uggaauggcuggaaugag

SEQ ID NO: 537491 - RNA, 18 nt, Human
uggagcaccucacuuuga

SEQ ID NO: 537492 - RNA, 21 nt, Human
uggcugggagugaggucaggu

SEQ ID NO: 537493 - RNA, 20 nt, Human
ugggcugcucugcaggcgaa

SEQ ID NO: 537494 - RNA, 19 nt, Human
uggguugaaaggccaugau

SEQ ID NO: 537495 - RNA, 23 nt, Human
uuccagcaccagcgucagcucac

SEQ ID NO: 537496 - RNA, 20 nt, Human
uuccaugguucuccaagcac

SEQ ID NO: 537497 - RNA, 24 nt, Human
uuccaugguucuccaagcacgggc

SEQ ID NO: 537498 - RNA, 18 nt, Human
uucccuugcgggggcgca

SEQ ID NO: 537499 - RNA, 22 nt, Human
uuccuaaaggcagaagagugga

SEQ ID NO: 537500 - RNA, 18 nt, Human
uugcagaaguucacagcg

SEQ ID NO: 537501 - RNA, 25 nt, Human
uuugcagaaguucacagcgucuugg

SEQ ID NO: 537502 - RNA, 21 nt, Human
uuuuuuuuuuuuuuuucgugg

SEQ ID NO: 537503 - RNA, 23 nt, Human
uuuuuuuuuuuuuuuucgugguu

SEQ ID NO: 537504 - RNA, 20 nt, Human
uuuuuuuuuuuuuuuuucgu

SEQ ID NO: 537505 - RNA, 23 nt, Human
uuuuuuuuuuuuuuuuuuucggg

SEQ ID NO: 537506 - RNA, 21 nt, Human
aaccccugggcgcccggcacc

SEQ ID NO: 537507 - RNA, 26 nt, Human
aagaagccaaaauaucugcaguggga

SEQ ID NO: 537508 - RNA, 18 nt, Human
aagccaaaauaucugcau

SEQ ID NO: 537509 - RNA, 23 nt, Human
aagcuggagggucucgggacaca

SEQ ID NO: 537510 - RNA, 22 nt, Human
aagugucuuuguaaguucuucc

SEQ ID NO: 537511 - RNA, 28 nt, Human
aauacaaagaaagcuccaacuaaucaaa

SEQ ID NO: 537512 - RNA, 23 nt, Human
acaaaaugaaaaugcugauguua

SEQ ID NO: 537513 - RNA, 19 nt, Human
acaaugcugaaagcaaaac

SEQ ID NO: 537514 - RNA, 21 nt, Human
acacugguuuucuuucgaugu

SEQ ID NO: 537515 - RNA, 24 nt, Human
acccuggaaacucugggguuucuu

SEQ ID NO: 537516 - RNA, 21 nt, Human
acucuauuagccagaggcaag

SEQ ID NO: 537517 - RNA, 22 nt, Human
acugggaggaguuccacaaucu

SEQ ID NO: 537518 - RNA, 18 nt, Human
acuuuuuacaaaccaucc

SEQ ID NO: 537519 - RNA, 23 nt, Human
agaaaggaaacccagggauagaa

SEQ ID NO: 537520 - RNA, 23 nt, Human
agaagauuccugaggagcaacug

SEQ ID NO: 537521 - RNA, 22 nt, Human
agaauaucugcauugcuugaaa

SEQ ID NO: 537522 - RNA, 18 nt, Human
agaauuaaaaaaacagga

SEQ ID NO: 537523 - RNA, 23 nt, Human
agauauuuuuccaauuuaagaac

SEQ ID NO: 537524 - RNA, 18 nt, Human
agcaacugauaggggcaa

SEQ ID NO: 537525 - RNA, 25 nt, Human
aggaaaaaaaauuuuuaauuuugaa

SEQ ID NO: 537526 - RNA, 24 nt, Human
aggcagccagagcuacaccccuga

SEQ ID NO: 537527 - RNA, 21 nt, Human
auacugauacaguggaaacca

SEQ ID NO: 537528 - RNA, 20 nt, Human
caaaaucagaaaauuucaac

SEQ ID NO: 537529 - RNA, 24 nt, Human
caaaccauccgcacaaccaaaaua

SEQ ID NO: 537530 - RNA, 20 nt, Human
caaauauacacauauacaca

SEQ ID NO: 537531 - RNA, 20 nt, Human
caauuugcccaccauaaaaa

SEQ ID NO: 537532 - RNA, 23 nt, Human
caccgccuggaacgccuccucca

SEQ ID NO: 537533 - RNA, 25 nt, Human
cagaagauuccugaggagcaacuga

SEQ ID NO: 537534 - RNA, 21 nt, Human
cagcacuuccagaagcagcca

SEQ ID NO: 537535 - RNA, 18 nt, Human
cagcaggcugggaaccaa

SEQ ID NO: 537536 - RNA, 23 nt, Human
cagcaggcugggaaccaagcuga

SEQ ID NO: 537537 - RNA, 25 nt, Human
cagcaggcugggaaccaagcugagg

SEQ ID NO: 537538 - RNA, 20 nt, Human
cagcccaagucaaucagcag

SEQ ID NO: 537539 - RNA, 19 nt, Human
ccagagcuacaccccugac

SEQ ID NO: 537540 - RNA, 22 nt, Human
ccagccuagccuuauuaaguaa

SEQ ID NO: 537541 - RNA, 18 nt, Human
ccagugccaauagagaga

SEQ ID NO: 537542 - RNA, 20 nt, Human
ccaugaaauuacugaaccuu

SEQ ID NO: 537543 - RNA, 23 nt, Human
cccagcgcggcaaccccugggcg

SEQ ID NO: 537544 - RNA, 21 nt, Human
cccauagcuaagaaaggaaac

SEQ ID NO: 537545 - RNA, 20 nt, Human
ccccaccgcccucucaggcg

SEQ ID NO: 537546 - RNA, 23 nt, Human
ccccaccgcccucucaggcgcug

SEQ ID NO: 537547 - RNA, 23 nt, Human
ccccgccaccccaccgcccucuc

SEQ ID NO: 537548 - RNA, 24 nt, Human
ccccugggcgcccggcaccggcuu

SEQ ID NO: 537549 - RNA, 23 nt, Human
ccgccaccccaccgcccucucag

SEQ ID NO: 537550 - RNA, 21 nt, Human
ccuaccacuuuggaauguggg

SEQ ID NO: 537551 - RNA, 19 nt, Human
ccuccuaucuuccacccca

SEQ ID NO: 537552 - RNA, 28 nt, Human
ccuuugcuucuuagggggaaucuggggc

SEQ ID NO: 537553 - RNA, 20 nt, Human
cuaaugaaucaucuguggga

SEQ ID NO: 537554 - RNA, 21 nt, Human
cucccugauggcuagaaacag

SEQ ID NO: 537555 - RNA, 21 nt, Human
cucccugauggcuagaaacag

SEQ ID NO: 537556 - RNA, 24 nt, Human
cuggacacaaaaugaaaaugcuga

SEQ ID NO: 537557 - RNA, 18 nt, Human
cuuccagaagcagccaca

SEQ ID NO: 537558 - RNA, 20 nt, Human
cuuccagcacuuccagaagc

SEQ ID NO: 537559 - RNA, 19 nt, Human
gaaacucauuuucuucauu

SEQ ID NO: 537560 - RNA, 23 nt, Human
gaaccccgccaccccaccgcccu

SEQ ID NO: 537561 - RNA, 19 nt, Human
gacacaaaaugaaaaugcu

SEQ ID NO: 537562 - RNA, 18 nt, Human
gacucaaggcaccagcag

SEQ ID NO: 537563 - RNA, 19 nt, Human
gagcuacaccccugacucu

SEQ ID NO: 537564 - RNA, 23 nt, Human
gaucucccccuccuaucuuccac

SEQ ID NO: 537565 - RNA, 22 nt, Human
gauguugucuuucaugaaaucu

SEQ ID NO: 537566 - RNA, 22 nt, Human
gcacuuccagaagcagccacag

SEQ ID NO: 537567 - RNA, 22 nt, Human
gcgcaggaaccccgccacccca

SEQ ID NO: 537568 - RNA, 20 nt, Human
gcugaaagcaaaacaaacaa

SEQ ID NO: 537569 - RNA, 18 nt, Human
gcugcccucccgcccagc

SEQ ID NO: 537570 - RNA, 21 nt, Human
ggcaccagcagcccaagucaa

SEQ ID NO: 537571 - RNA, 24 nt, Human
gggaguuugggucagauuugcuug

SEQ ID NO: 537572 - RNA, 21 nt, Human
ggucagauuugcuuggaguuu

SEQ ID NO: 537573 - RNA, 24 nt, Human
uaaaaaaacaggauacuuuuuaca

SEQ ID NO: 537574 - RNA, 23 nt, Human
uaaaaauaacaauuacaaaggua

SEQ ID NO: 537575 - RNA, 19 nt, Human
uaaacaguaguagagaugg

SEQ ID NO: 537576 - RNA, 22 nt, Human
uaaacagugucucagaaacuca

SEQ ID NO: 537577 - RNA, 18 nt, Human
uaacaaguauugguuuua

SEQ ID NO: 537578 - RNA, 24 nt, Human
uaacugcccucuacuuaaagcuuu

SEQ ID NO: 537579 - RNA, 25 nt, Human
uaagaaaggaaacccagggauagaa

SEQ ID NO: 537580 - RNA, 19 nt, Human
uaagugucuuuguaaguuc

SEQ ID NO: 537581 - RNA, 24 nt, Human
uaauauuuacuagguucuuacugu

SEQ ID NO: 537582 - RNA, 20 nt, Human
uacaaaccauccgcacaacc

SEQ ID NO: 537583 - RNA, 18 nt, Human
uacaaaccauccgcacac

SEQ ID NO: 537584 - RNA, 23 nt, Human
uacacauauacacauucucuaca

SEQ ID NO: 537585 - RNA, 19 nt, Human
uacugggaggaguuccaca

SEQ ID NO: 537586 - RNA, 26 nt, Human
uaguagaaauggaaauucugaaaaca

SEQ ID NO: 537587 - RNA, 20 nt, Human
uaucaaagauaauuucauuu

SEQ ID NO: 537588 - RNA, 22 nt, Human
uaucaaagauaauuucauuuuc

SEQ ID NO: 537589 - RNA, 26 nt, Human
uaugaagagcccaacuaauaaucaag

SEQ ID NO: 537590 - RNA, 20 nt, Human
ucaaaaggagaaaauuuuga

SEQ ID NO: 537591 - RNA, 25 nt, Human
ucaaggcaccagcagcccaagucaa

SEQ ID NO: 537592 - RNA, 21 nt, Human
ucacugggaaagugaccuaaa

SEQ ID NO: 537593 - RNA, 20 nt, Human
ucagaaacucauuuucuuca

SEQ ID NO: 537594 - RNA, 20 nt, Human
ucauuuacuaugcaugauuu

SEQ ID NO: 537595 - RNA, 23 nt, Human
uccaagagguuaguagaaaugga

SEQ ID NO: 537596 - RNA, 21 nt, Human
ucccuggacacaaaaugaaaa

SEQ ID NO: 537597 - RNA, 24 nt, Human
uccgcacaaccaaaauuccugugg

SEQ ID NO: 537598 - RNA, 23 nt, Human
ucuauuuuuacaacucucuuagg

SEQ ID NO: 537599 - RNA, 25 nt, Human
ucuuaaauauuguccaaaucccuca

SEQ ID NO: 537600 - RNA, 21 nt, Human
ucuuccucucuuccuauucug

SEQ ID NO: 537601 - RNA, 23 nt, Human
ugaaagcaaaacaaacaaaaauu

SEQ ID NO: 537602 - RNA, 22 nt, Human
ugaaauaagcaacugauggcca

SEQ ID NO: 537603 - RNA, 23 nt, Human
ugaaauaagcaacugauggcccc

SEQ ID NO: 537604 - RNA, 20 nt, Human
ugaaaucucuagaaacaaau

SEQ ID NO: 537605 - RNA, 20 nt, Human
ugaauagaauuaaaaaaaca

SEQ ID NO: 537606 - RNA, 21 nt, Human
ugaccucugggugcuuuuccc

SEQ ID NO: 537607 - RNA, 23 nt, Human
ugauguugucuuucaugaaaucu

SEQ ID NO: 537608 - RNA, 23 nt, Human
ugcaugauuuugaaguacuagaa

SEQ ID NO: 537609 - RNA, 24 nt, Human
ugcccucccgcccagcgcggcaac

SEQ ID NO: 537610 - RNA, 19 nt, Human
ugccuaagcuuguugacuc

SEQ ID NO: 537611 - RNA, 23 nt, Human
ugcugaaagcaaaacaaacaaaa

SEQ ID NO: 537612 - RNA, 18 nt, Human
uggaaauucugaaaacac

SEQ ID NO: 537613 - RNA, 19 nt, Human
uggaacaaagucauaacac

SEQ ID NO: 537614 - RNA, 21 nt, Human
uggaacgccuccuccaccucc

SEQ ID NO: 537615 - RNA, 22 nt, Human
uggcuagaaacaguaauauuua

SEQ ID NO: 537616 - RNA, 28 nt, Human
ugggacucaaggcaccagcagcccaagu

SEQ ID NO: 537617 - RNA, 18 nt, Human
ugggcgcccggcaccggc

SEQ ID NO: 537618 - RNA, 20 nt, Human
uuaacaacuauucucucaau

SEQ ID NO: 537619 - RNA, 24 nt, Human
uuaccuaaacagugucucagaaac

SEQ ID NO: 537620 - RNA, 22 nt, Human
uuacugggcugugguuguaacu

SEQ ID NO: 537621 - RNA, 21 nt, Human
uuaggaaaucaaauacaagau

SEQ ID NO: 537622 - RNA, 23 nt, Human
uuauuacauucacaagaagccaa

SEQ ID NO: 537623 - RNA, 24 nt, Human
uucaaauuguagaucucccccucc

SEQ ID NO: 537624 - RNA, 18 nt, Human
uucaacaugguuucuuuc

SEQ ID NO: 537625 - RNA, 23 nt, Human
uuccagcacuuccagaagcagcc

SEQ ID NO: 537626 - RNA, 20 nt, Human
uucuauuuaccucuaauuca

SEQ ID NO: 537627 - RNA, 24 nt, Human
uugagaaggggucuauuuuccaga

SEQ ID NO: 537628 - RNA, 19 nt, Human
uuuaagaauaacuuuuaag

SEQ ID NO: 537629 - RNA, 20 nt, Human
uuugccucauuuuguuuauu

SEQ ID NO: 537630 - RNA, 22 nt, Human
uuugggucagauuugcuuggag

SEQ ID NO: 537631 - RNA, 25 nt, Human
uuuuaagugucuuuguaaguucuuc

SEQ ID NO: 537632 - RNA, 19 nt, Human
uuuuguuuauuugcucauu

SEQ ID NO: 537633 - RNA, 18 nt, Human
aaaaaagccucugucucc

SEQ ID NO: 537634 - RNA, 18 nt, Human
aaaaaagccucugucuuu

SEQ ID NO: 537635 - RNA, 20 nt, Human
aaaaagccaguggaaacgga

SEQ ID NO: 537636 - RNA, 22 nt, Human
aaaaagccaguggaaacggaua

SEQ ID NO: 537637 - RNA, 19 nt, Human
aaagggcaggggaggcagg

SEQ ID NO: 537638 - RNA, 24 nt, Human
aaagugcugggauuacaggcauga

SEQ ID NO: 537639 - RNA, 21 nt, Human
aacccagucaaccccaggcuc

SEQ ID NO: 537640 - RNA, 22 nt, Human
aagcagcaggaggcagacaagg

SEQ ID NO: 537641 - RNA, 18 nt, Human
aaggaaaggcacagcaca

SEQ ID NO: 537642 - RNA, 19 nt, Human
aaguagcugggauuacagg

SEQ ID NO: 537643 - RNA, 25 nt, Human
aaguagcugggauuacagguguuca

SEQ ID NO: 537644 - RNA, 19 nt, Human
aagugcugggauuacaggc

SEQ ID NO: 537645 - RNA, 21 nt, Human
aagugcugggauuacaggcau

SEQ ID NO: 537646 - RNA, 26 nt, Human
aagugcugggauuacaggcaugagcc

SEQ ID NO: 537647 - RNA, 22 nt, Human
acaacccccaucucccagguuc

SEQ ID NO: 537648 - RNA, 20 nt, Human
acaaggaaaggcacagcaca

SEQ ID NO: 537649 - RNA, 19 nt, Human
acaaggacagcagucagca

SEQ ID NO: 537650 - RNA, 22 nt, Human
acacacacacacgcaaggcuca

SEQ ID NO: 537651 - RNA, 20 nt, Human
acaggaaaaaauagcucuca

SEQ ID NO: 537652 - RNA, 22 nt, Human
acccagucaaccccaggcucaa

SEQ ID NO: 537653 - RNA, 23 nt, Human
accucagccucccaaagugcugg

SEQ ID NO: 537654 - RNA, 30 nt, Human
acuccuucacccaggcuggaguccgauggg

SEQ ID NO: 537655 - RNA, 22 nt, Human
agaaaucagaaagaaugcugaa

SEQ ID NO: 537656 - RNA, 28 nt, Human
agaagcagcaggaggcagaccgguaccc

SEQ ID NO: 537657 - RNA, 19 nt, Human
agagauggggauaggaaga

SEQ ID NO: 537658 - RNA, 21 nt, Human
agcccccguuccccacacgcc

SEQ ID NO: 537659 - RNA, 23 nt, Human
agcccucuccuuuccuucugagg

SEQ ID NO: 537660 - RNA, 19 nt, Human
aggaggcagacaaggaaag

SEQ ID NO: 537661 - RNA, 20 nt, Human
agguuccuaucuguggucuu

SEQ ID NO: 537662 - RNA, 19 nt, Human
agugauccacccaccucag

SEQ ID NO: 537663 - RNA, 18 nt, Human
agugcugggauuacaggc

SEQ ID NO: 537664 - RNA, 23 nt, Human
aguuguguuuggggugguauugg

SEQ ID NO: 537665 - RNA, 23 nt, Human
augggacagcaggggucagggag

SEQ ID NO: 537666 - RNA, 24 nt, Human
augggguuuugccauauuacccag

SEQ ID NO: 537667 - RNA, 25 nt, Human
auuuuuguauuuuuuaguagagaug

SEQ ID NO: 537668 - RNA, 24 nt, Human
caaagugcugggauuacaggcaug

SEQ ID NO: 537669 - RNA, 23 nt, Human
caacccccaucucccagguucaa

SEQ ID NO: 537670 - RNA, 20 nt, Human
caacuccuaugccucagccu

SEQ ID NO: 537671 - RNA, 19 nt, Human
caagagcccccguucccca

SEQ ID NO: 537672 - RNA, 27 nt, Human
caagcaacuccuaugccucagccuucc

SEQ ID NO: 537673 - RNA, 28 nt, Human
caagcaggcaccccauuguuguaaugac

SEQ ID NO: 537674 - RNA, 21 nt, Human
cacagcacaagacccaggaaa

SEQ ID NO: 537675 - RNA, 21 nt, Human
cacagugaauucaaaaaagcc

SEQ ID NO: 537676 - RNA, 24 nt, Human
caccauaccuggcuaauuuuugua

SEQ ID NO: 537677 - RNA, 22 nt, Human
cacccaccucagccucccaaag

SEQ ID NO: 537678 - RNA, 23 nt, Human
cacccaccucagccucccaaagu

SEQ ID NO: 537679 - RNA, 23 nt, Human
cacccaggcuggaguccgauggc

SEQ ID NO: 537680 - RNA, 21 nt, Human
cacuacaacccccaucuccca

SEQ ID NO: 537681 - RNA, 24 nt, Human
cagaauccuggcaucgugggcccu

SEQ ID NO: 537682 - RNA, 18 nt, Human
cagccagaaagacucuca

SEQ ID NO: 537683 - RNA, 23 nt, Human
cagcugcugagaagcagagagga

SEQ ID NO: 537684 - RNA, 24 nt, Human
cagguguucaccaccauaccuggc

SEQ ID NO: 537685 - RNA, 20 nt, Human
caguuacagaagcagcagga

SEQ ID NO: 537686 - RNA, 24 nt, Human
cauauuacccaggcuggucucaaa

SEQ ID NO: 537687 - RNA, 23 nt, Human
ccaaagugcugggauuacaggca

SEQ ID NO: 537688 - RNA, 24 nt, Human
ccaaagugcugggauuacaggcau

SEQ ID NO: 537689 - RNA, 21 nt, Human
ccaaguagcugggauuacagg

SEQ ID NO: 537690 - RNA, 23 nt, Human
ccaaguagcugggauuacaggug

SEQ ID NO: 537691 - RNA, 24 nt, Human
ccaaguagcugggauuacaggugu

SEQ ID NO: 537692 - RNA, 26 nt, Human
ccacccaccucagccucccaaagugc

SEQ ID NO: 537693 - RNA, 20 nt, Human
ccagcccaagcaggcacccc

SEQ ID NO: 537694 - RNA, 22 nt, Human
ccaggcucaagacuguuucagc

SEQ ID NO: 537695 - RNA, 21 nt, Human
ccagucaaccccaggcucaag

SEQ ID NO: 537696 - RNA, 22 nt, Human
ccauauuacccaggcuggucuc

SEQ ID NO: 537697 - RNA, 25 nt, Human
cccaaacuuuaaaaaaaaaaaaaaa

SEQ ID NO: 537698 - RNA, 24 nt, Human
cccaaagugcugggauuacaggca

SEQ ID NO: 537699 - RNA, 20 nt, Human
cccagguucaagcaacuccu

SEQ ID NO: 537700 - RNA, 21 nt, Human
cccagguucaagcaacuccua

SEQ ID NO: 537701 - RNA, 25 nt, Human
ccuaugccucagccuuccaaguagc

SEQ ID NO: 537702 - RNA, 24 nt, Human
ccugaccucaagugauccacccac

SEQ ID NO: 537703 - RNA, 20 nt, Human
ccugccucuuucuuuacucc

SEQ ID NO: 537704 - RNA, 23 nt, Human
cuacaacccccaucucccagguu

SEQ ID NO: 537705 - RNA, 24 nt, Human
cucaagugauccacccaccucagc

SEQ ID NO: 537706 - RNA, 24 nt, Human
cucacuacaacccccaucucccag

SEQ ID NO: 537707 - RNA, 23 nt, Human
cucagccuuccaaguagcuggga

SEQ ID NO: 537708 - RNA, 22 nt, Human
cucccagguucaagcaacuccu

SEQ ID NO: 537709 - RNA, 19 nt, Human
cucuaacccagucaacccc

SEQ ID NO: 537710 - RNA, 25 nt, Human
cucuggggacugacugagacagcag

SEQ ID NO: 537711 - RNA, 23 nt, Human
cucuuccacacacacacacgcaa

SEQ ID NO: 537712 - RNA, 19 nt, Human
cugacagaccccaaacuuu

SEQ ID NO: 537713 - RNA, 19 nt, Human
cuguaccacugucuuucuc

SEQ ID NO: 537714 - RNA, 21 nt, Human
cuucaagagcccccguucccc

SEQ ID NO: 537715 - RNA, 21 nt, Human
cuuccacacacacacacgcaa

SEQ ID NO: 537716 - RNA, 24 nt, Human
cuuuaaaaaaaaaaaaaaagccuc

SEQ ID NO: 537717 - RNA, 22 nt, Human
cuuuuuuguuuguuuuuggaga

SEQ ID NO: 537718 - RNA, 23 nt, Human
gaaacggauaaauaccuauagcg

SEQ ID NO: 537719 - RNA, 24 nt, Human
gaccucaagugauccacccaccuc

SEQ ID NO: 537720 - RNA, 18 nt, Human
gagaugggguuuugccau

SEQ ID NO: 537721 - RNA, 24 nt, Human
gagcaaggcagugagggcgaggaa

SEQ ID NO: 537722 - RNA, 18 nt, Human
gauuacaggcaugagcca

SEQ ID NO: 537723 - RNA, 18 nt, Human
gauuacaggcaugagcca

SEQ ID NO: 537724 - RNA, 22 nt, Human
gauuacaggcaugagccauugc

SEQ ID NO: 537725 - RNA, 24 nt, Human
gauuacagguguucaccaccauac

SEQ ID NO: 537726 - RNA, 20 nt, Human
gcaauugggccuggggucug

SEQ ID NO: 537727 - RNA, 22 nt, Human
gcagaaguauguccaagguuuu

SEQ ID NO: 537728 - RNA, 21 nt, Human
gcagcugagaaagggcagggg

SEQ ID NO: 537729 - RNA, 23 nt, Human
gcccagaagguguggugagagac

SEQ ID NO: 537730 - RNA, 19 nt, Human
gccgagggcuugcaauugg

SEQ ID NO: 537731 - RNA, 18 nt, Human
gcuauggcacaagugaua

SEQ ID NO: 537732 - RNA, 23 nt, Human
gcuggucucaaacuccugaccuc

SEQ ID NO: 537733 - RNA, 22 nt, Human
ggauuacaggcaugagccauug

SEQ ID NO: 537734 - RNA, 20 nt, Human
ggcagugagggcgaggaaag

SEQ ID NO: 537735 - RNA, 24 nt, Human
ggcuggucucaaacuccugaccuc

SEQ ID NO: 537736 - RNA, 20 nt, Human
ggcuguuucuucccccacuc

SEQ ID NO: 537737 - RNA, 20 nt, Human
gggcagacaccauagucccc

SEQ ID NO: 537738 - RNA, 25 nt, Human
ggggaguaggacagcugcugagaag

SEQ ID NO: 537739 - RNA, 22 nt, Human
gggguuuugccauauuacccag

SEQ ID NO: 537740 - RNA, 23 nt, Human
gggguuuugccauauuacccagg

SEQ ID NO: 537741 - RNA, 22 nt, Human
ggguuuugccauauuacccagg

SEQ ID NO: 537742 - RNA, 21 nt, Human
guagagaugggguuuugccau

SEQ ID NO: 537743 - RNA, 20 nt, Human
guauuuuuuaguagagaugg

SEQ ID NO: 537744 - RNA, 18 nt, Human
gucucacuccuucaccca

SEQ ID NO: 537745 - RNA, 24 nt, Human
gugauccacccaccucagccuccc

SEQ ID NO: 537746 - RNA, 20 nt, Human
guugaguuguguuuggggug

SEQ ID NO: 537747 - RNA, 22 nt, Human
guuguauugaauucuggcuguu

SEQ ID NO: 537748 - RNA, 19 nt, Human
uaaaaaaaaaaaaaaagcc

SEQ ID NO: 537749 - RNA, 24 nt, Human
uaacccagucaaccccaggcucaa

SEQ ID NO: 537750 - RNA, 18 nt, Human
uaacucccgcucuuuguu

SEQ ID NO: 537751 - RNA, 23 nt, Human
uaauuuuuguauuuuuuaguaga

SEQ ID NO: 537752 - RNA, 25 nt, Human
uaauuuuuguauuuuuuaguagaga

SEQ ID NO: 537753 - RNA, 22 nt, Human
uacaggcaugagccauugcgcc

SEQ ID NO: 537754 - RNA, 20 nt, Human
uagagaugggguuuugccau

SEQ ID NO: 537755 - RNA, 18 nt, Human
uaggacagcugcugagaa

SEQ ID NO: 537756 - RNA, 23 nt, Human
uaguagagaugggguuuugccau

SEQ ID NO: 537757 - RNA, 24 nt, Human
uaguagagaugggguuuugccaua

SEQ ID NO: 537758 - RNA, 19 nt, Human
uaguucuagaaaucagaaa

SEQ ID NO: 537759 - RNA, 23 nt, Human
ucaaccccaggcucaagacuguu

SEQ ID NO: 537760 - RNA, 20 nt, Human
ucaagugauccacccaccuc

SEQ ID NO: 537761 - RNA, 24 nt, Human
ucacuacaacccccaucucccagg

SEQ ID NO: 537762 - RNA, 24 nt, Human
ucacuccuucacccaggcuggagu

SEQ ID NO: 537763 - RNA, 23 nt, Human
ucagcagagccuucgacccagcc

SEQ ID NO: 537764 - RNA, 22 nt, Human
uccaaguagcugggauuacagg

SEQ ID NO: 537765 - RNA, 23 nt, Human
uccaaguagcugggauuacaggu

SEQ ID NO: 537766 - RNA, 24 nt, Human
uccaaguagcugggauuacaggug

SEQ ID NO: 537767 - RNA, 21 nt, Human
uccacccaccucagccuccca

SEQ ID NO: 537768 - RNA, 24 nt, Human
ucccaaagugcugggauuacaggc

SEQ ID NO: 537769 - RNA, 19 nt, Human
ucccagguucaagcaacuc

SEQ ID NO: 537770 - RNA, 22 nt, Human
ucccagguucaagcaacuccua

SEQ ID NO: 537771 - RNA, 23 nt, Human
uccuuuuuuguuuguuuuuggag

SEQ ID NO: 537772 - RNA, 18 nt, Human
ucgguggguacaaaaagc

SEQ ID NO: 537773 - RNA, 24 nt, Human
ucucacuccuucacccaggcugga

SEQ ID NO: 537774 - RNA, 21 nt, Human
ucuccaauuucccgagauugc

SEQ ID NO: 537775 - RNA, 22 nt, Human
ucucccagguucaagcaacucc

SEQ ID NO: 537776 - RNA, 20 nt, Human
ucuggcuguuucuuccccca

SEQ ID NO: 537777 - RNA, 21 nt, Human
ugagccauugcgccugccucu

SEQ ID NO: 537778 - RNA, 18 nt, Human
ugagggcaggggaggcag

SEQ ID NO: 537779 - RNA, 20 nt, Human
ugagggcaggggaggcagcu

SEQ ID NO: 537780 - RNA, 24 nt, Human
ugagguggauaguucuagaaauca

SEQ ID NO: 537781 - RNA, 20 nt, Human
ugaguggugacaaccucacu

SEQ ID NO: 537782 - RNA, 24 nt, Human
ugauaagugagcccucuccuuucc

SEQ ID NO: 537783 - RNA, 26 nt, Human
ugauaagugagcccucuccuuuccuu

SEQ ID NO: 537784 - RNA, 24 nt, Human
ugauccacccaccucagccuccca

SEQ ID NO: 537785 - RNA, 27 nt, Human
ugccauauuacccaggcuggucucaaa

SEQ ID NO: 537786 - RNA, 22 nt, Human
ugccucagccuuccaaguagcu

SEQ ID NO: 537787 - RNA, 24 nt, Human
ugccucagccuuccaaguagcugg

SEQ ID NO: 537788 - RNA, 24 nt, Human
uggcacgaacuuggcucacuacaa

SEQ ID NO: 537789 - RNA, 21 nt, Human
uggcaggggguuagaaagcca

SEQ ID NO: 537790 - RNA, 22 nt, Human
uggcuuugcuuuucuugggagg

SEQ ID NO: 537791 - RNA, 18 nt, Human
ugggauuacaggcaugag

SEQ ID NO: 537792 - RNA, 19 nt, Human
ugggauuacaggcaugagc

SEQ ID NO: 537793 - RNA, 21 nt, Human
ugggauuacaggcaugagcca

SEQ ID NO: 537794 - RNA, 21 nt, Human
ugggauuacaggcaugagcca

SEQ ID NO: 537795 - RNA, 21 nt, Human
ugggauuacaggcaugagcca

SEQ ID NO: 537796 - RNA, 22 nt, Human
ugggauuacaggcaugagccau

SEQ ID NO: 537797 - RNA, 24 nt, Human
ugggauuacaggcaugagccauug

SEQ ID NO: 537798 - RNA, 24 nt, Human
ugggauuacaggcaugagccauug

SEQ ID NO: 537799 - RNA, 27 nt, Human
ugggauuacaggcaugagccauugcgc

SEQ ID NO: 537800 - RNA, 19 nt, Human
ugggauuacagguguucac

SEQ ID NO: 537801 - RNA, 21 nt, Human
ugggauuacagguguucacca

SEQ ID NO: 537802 - RNA, 24 nt, Human
ugggauuacagguguucaccacca

SEQ ID NO: 537803 - RNA, 25 nt, Human
ugggauuacagguguucaccaccau

SEQ ID NO: 537804 - RNA, 24 nt, Human
ugggguuuugccauauuacccagg

SEQ ID NO: 537805 - RNA, 18 nt, Human
uuaguagagaugggguuu

SEQ ID NO: 537806 - RNA, 22 nt, Human
uuaguagagaugggguuuugcc

SEQ ID NO: 537807 - RNA, 24 nt, Human
uuaguagagaugggguuuugccau

SEQ ID NO: 537808 - RNA, 24 nt, Human
uuccaaguagcugggauuacaggu

SEQ ID NO: 537809 - RNA, 28 nt, Human
uucuaaggcaaggucuuucccucugggg

SEQ ID NO: 537810 - RNA, 23 nt, Human
uucucuaacccagucaaccccag

SEQ ID NO: 537811 - RNA, 22 nt, Human
uugcaauugggccuggggucug

SEQ ID NO: 537812 - RNA, 22 nt, Human
uuuaaaaaaaaaaaaaaagccu

SEQ ID NO: 537813 - RNA, 21 nt, Human
uuuuuaguagagaugggguuu

SEQ ID NO: 537814 - RNA, 21 nt, Human
uuuuuguauuuuuuaguagag

SEQ ID NO: 537815 - RNA, 22 nt, Human
uuuuuuaguagagaugggguuu

SEQ ID NO: 537816 - RNA, 21 nt, Human
aaaaccuguccaaagaugucc

SEQ ID NO: 537817 - RNA, 25 nt, Human
aaacaagaauccucgaccagguccg

SEQ ID NO: 537818 - RNA, 18 nt, Human
aaccacaaguacagaauu

SEQ ID NO: 537819 - RNA, 20 nt, Human
aacccgaucaguccaaccag

SEQ ID NO: 537820 - RNA, 19 nt, Human
aaccgccuccccaccaaac

SEQ ID NO: 537821 - RNA, 18 nt, Human
aaccuggggcacagaggc

SEQ ID NO: 537822 - RNA, 23 nt, Human
aauaaauaggaaaaccgccuccc

SEQ ID NO: 537823 - RNA, 18 nt, Human
acacacucagacacagga

SEQ ID NO: 537824 - RNA, 18 nt, Human
acacagccugcuguuaga

SEQ ID NO: 537825 - RNA, 22 nt, Human
acagcccgguguaccucaaagc

SEQ ID NO: 537826 - RNA, 23 nt, Human
acaggacaugcccagccuugccc

SEQ ID NO: 537827 - RNA, 19 nt, Human
acagggcauugcagcccca

SEQ ID NO: 537828 - RNA, 22 nt, Human
accaagcuucccaagccccaac

SEQ ID NO: 537829 - RNA, 24 nt, Human
accacaggacagcgugagccccac

SEQ ID NO: 537830 - RNA, 19 nt, Human
acccaacaaaaggacagcu

SEQ ID NO: 537831 - RNA, 24 nt, Human
acccauucccaggcacuucuccag

SEQ ID NO: 537832 - RNA, 18 nt, Human
agaauaaauaggaaaacc

SEQ ID NO: 537833 - RNA, 22 nt, Human
agaaucccaaacaagaauccuc

SEQ ID NO: 537834 - RNA, 18 nt, Human
agaggcagggggaggaau

SEQ ID NO: 537835 - RNA, 25 nt, Human
agcaagugccagagaacuuggcuca

SEQ ID NO: 537836 - RNA, 19 nt, Human
agccccaacccccagcagc

SEQ ID NO: 537837 - RNA, 20 nt, Human
agcuggacauccaguaacuc

SEQ ID NO: 537838 - RNA, 18 nt, Human
agcuuccaacccacagcc

SEQ ID NO: 537839 - RNA, 20 nt, Human
aggacagcuccugcugccaa

SEQ ID NO: 537840 - RNA, 23 nt, Human
aggcagugcccuggcacagugcc

SEQ ID NO: 537841 - RNA, 23 nt, Human
aggcuggaggcccuuuccuggca

SEQ ID NO: 537842 - RNA, 23 nt, Human
aggggaaagggcugccccuguga

SEQ ID NO: 537843 - RNA, 21 nt, Human
aggggggaaaagggagaggcc

SEQ ID NO: 537844 - RNA, 21 nt, Human
agggucccugcuggaccaagc

SEQ ID NO: 537845 - RNA, 19 nt, Human
auaaagcagcaccguuccc

SEQ ID NO: 537846 - RNA, 21 nt, Human
augccaccuggguggggguca

SEQ ID NO: 537847 - RNA, 23 nt, Human
caaaaggacagcuccugcugcca

SEQ ID NO: 537848 - RNA, 27 nt, Human
caaagcagaaucccaaacaagaaucuu

SEQ ID NO: 537849 - RNA, 22 nt, Human
caagaagaaguagccacacuug

SEQ ID NO: 537850 - RNA, 18 nt, Human
cacagcguuuacaaaguu

SEQ ID NO: 537851 - RNA, 24 nt, Human
cacaggacagcgugagccccaccc

SEQ ID NO: 537852 - RNA, 25 nt, Human
caccccuuccccuccacugacaacc

SEQ ID NO: 537853 - RNA, 18 nt, Human
cacccucucuucccaccc

SEQ ID NO: 537854 - RNA, 20 nt, Human
cacccucucuucccacccaa

SEQ ID NO: 537855 - RNA, 21 nt, Human
cacggggccaccccaggaggg

SEQ ID NO: 537856 - RNA, 23 nt, Human
cacucugugccugccuaccccug

SEQ ID NO: 537857 - RNA, 20 nt, Human
cacugguugaaaaccugucc

SEQ ID NO: 537858 - RNA, 22 nt, Human
cagaauaaauaacuuaaaagcg

SEQ ID NO: 537859 - RNA, 22 nt, Human
cagagaacuuggcucaggguca

SEQ ID NO: 537860 - RNA, 19 nt, Human
cagcccacuccccagacug

SEQ ID NO: 537861 - RNA, 23 nt, Human
cagccucccgggucgccacauug

SEQ ID NO: 537862 - RNA, 23 nt, Human
cagccuugccccucagcuccaag

SEQ ID NO: 537863 - RNA, 20 nt, Human
cagcgugagccccacccccc

SEQ ID NO: 537864 - RNA, 22 nt, Human
cagcgugagccccaccccccuc

SEQ ID NO: 537865 - RNA, 18 nt, Human
cagcuccugcugccaagg

SEQ ID NO: 537866 - RNA, 23 nt, Human
cagcuuccaacccacagccuccc

SEQ ID NO: 537867 - RNA, 24 nt, Human
caggauacaggguggacgacaccu

SEQ ID NO: 537868 - RNA, 19 nt, Human
cagugacaccccuuccccu

SEQ ID NO: 537869 - RNA, 20 nt, Human
caguucccaagcuacuuccc

SEQ ID NO: 537870 - RNA, 18 nt, Human
caguuccugggguggggg

SEQ ID NO: 537871 - RNA, 18 nt, Human
cauaaucggauccucugc

SEQ ID NO: 537872 - RNA, 18 nt, Human
ccacagaggggcagugac

SEQ ID NO: 537873 - RNA, 21 nt, Human
ccacaggacagcgugagcccc

SEQ ID NO: 537874 - RNA, 19 nt, Human
ccaccaagcuucccaagcc

SEQ ID NO: 537875 - RNA, 24 nt, Human
ccaccccccucccccaaugacccc

SEQ ID NO: 537876 - RNA, 19 nt, Human
ccagcccaggucgcggucc

SEQ ID NO: 537877 - RNA, 23 nt, Human
ccaggcucagcuuccaacccaca

SEQ ID NO: 537878 - RNA, 19 nt, Human
ccaggucaggccccuggcc

SEQ ID NO: 537879 - RNA, 22 nt, Human
cccaagccccaacccccagcag

SEQ ID NO: 537880 - RNA, 20 nt, Human
cccacacacacucagacaca

SEQ ID NO: 537881 - RNA, 18 nt, Human
cccacagccuuccucccu

SEQ ID NO: 537882 - RNA, 24 nt, Human
cccacagccuuccucccuucaccu

SEQ ID NO: 537883 - RNA, 19 nt, Human
cccaccaagcuucccaagc

SEQ ID NO: 537884 - RNA, 24 nt, Human
cccaucucuuacccagccugggca

SEQ ID NO: 537885 - RNA, 20 nt, Human
cccaugucagucagcucugc

SEQ ID NO: 537886 - RNA, 22 nt, Human
cccauucacauugcugagggcg

SEQ ID NO: 537887 - RNA, 26 nt, Human
cccauucacauugcugagggcggccg

SEQ ID NO: 537888 - RNA, 23 nt, Human
ccccaaaccacaaguacagaaua

SEQ ID NO: 537889 - RNA, 29 nt, Human
ccccaccccccucccccaaugaccccagg

SEQ ID NO: 537890 - RNA, 24 nt, Human
ccccccacacacacucagacacag

SEQ ID NO: 537891 - RNA, 21 nt, Human
cccccccacacacacucagac

SEQ ID NO: 537892 - RNA, 21 nt, Human
ccccucagcagggcuuagucc

SEQ ID NO: 537893 - RNA, 23 nt, Human
ccccugugaggggcagggaaggu

SEQ ID NO: 537894 - RNA, 21 nt, Human
ccccuuccccuccacugacaa

SEQ ID NO: 537895 - RNA, 19 nt, Human
cccuccaggcucagcuucc

SEQ ID NO: 537896 - RNA, 20 nt, Human
cccuccaggcucagcuucca

SEQ ID NO: 537897 - RNA, 23 nt, Human
cccucccuuucccauuccuugaa

SEQ ID NO: 537898 - RNA, 18 nt, Human
cccucucuucccacccaa

SEQ ID NO: 537899 - RNA, 18 nt, Human
cccucuuccuacccuccc

SEQ ID NO: 537900 - RNA, 21 nt, Human
cccugagggcgggccaaggaa

SEQ ID NO: 537901 - RNA, 19 nt, Human
ccuaccccugggacugggg

SEQ ID NO: 537902 - RNA, 18 nt, Human
ccucagagccccaaacca

SEQ ID NO: 537903 - RNA, 26 nt, Human
ccucagcuccaagcaccggacccauu

SEQ ID NO: 537904 - RNA, 23 nt, Human
ccucagggucccugcuggaccaa

SEQ ID NO: 537905 - RNA, 18 nt, Human
ccuccaaccagaaggggg

SEQ ID NO: 537906 - RNA, 23 nt, Human
ccuccacccaugucagucagcuc

SEQ ID NO: 537907 - RNA, 23 nt, Human
ccuccagcuuggcuccugggagu

SEQ ID NO: 537908 - RNA, 18 nt, Human
ccuccaggcucagcuucc

SEQ ID NO: 537909 - RNA, 21 nt, Human
ccuccucucccucuggccucc

SEQ ID NO: 537910 - RNA, 19 nt, Human
ccucuagggucccuaaccc

SEQ ID NO: 537911 - RNA, 19 nt, Human
ccugagcgauggccucuag

SEQ ID NO: 537912 - RNA, 22 nt, Human
ccugcugagauccuccucuccc

SEQ ID NO: 537913 - RNA, 21 nt, Human
ccugggucagggaggagaggc

SEQ ID NO: 537914 - RNA, 23 nt, Human
ccuguccaaagauguccaagccc

SEQ ID NO: 537915 - RNA, 22 nt, Human
ccuugcucuuccacugguugaa

SEQ ID NO: 537916 - RNA, 19 nt, Human
ccuuggggccccacuccuc

SEQ ID NO: 537917 - RNA, 19 nt, Human
cgcgguccuccagcuuggc

SEQ ID NO: 537918 - RNA, 19 nt, Human
cgcuaaggaagggaaacag

SEQ ID NO: 537919 - RNA, 21 nt, Human
cgguuggcgauucggcugcug

SEQ ID NO: 537920 - RNA, 22 nt, Human
cgguuggcgauucggcugcugu

SEQ ID NO: 537921 - RNA, 22 nt, Human
cucaaagcagaaucccaaacaa

SEQ ID NO: 537922 - RNA, 21 nt, Human
cucacagaauaaauaggaaaa

SEQ ID NO: 537923 - RNA, 18 nt, Human
cucagagccccaaaccac

SEQ ID NO: 537924 - RNA, 24 nt, Human
cuccaggcucagcuuccaacccac

SEQ ID NO: 537925 - RNA, 18 nt, Human
cucccccaaugaccccag

SEQ ID NO: 537926 - RNA, 22 nt, Human
cucccucuggccuccucucgga

SEQ ID NO: 537927 - RNA, 19 nt, Human
cucccucuuccuacccucc

SEQ ID NO: 537928 - RNA, 20 nt, Human
cucucaccuuggggccccac

SEQ ID NO: 537929 - RNA, 20 nt, Human
cucuuacccagccugggcag

SEQ ID NO: 537930 - RNA, 18 nt, Human
cucuucccacccaacucc

SEQ ID NO: 537931 - RNA, 20 nt, Human
cucuugggaagaggguaggg

SEQ ID NO: 537932 - RNA, 20 nt, Human
cugaguccugcacgccgagg

SEQ ID NO: 537933 - RNA, 21 nt, Human
cugcaauuggggcaaacacac

SEQ ID NO: 537934 - RNA, 23 nt, Human
cugcaauuggggcaaaccggggc

SEQ ID NO: 537935 - RNA, 23 nt, Human
cugcuguuagagggaggggagug

SEQ ID NO: 537936 - RNA, 25 nt, Human
cugggugggggucaggagagagggc

SEQ ID NO: 537937 - RNA, 21 nt, Human
cugugccugccuaccccuggg

SEQ ID NO: 537938 - RNA, 22 nt, Human
cuucaccuucagcccacucccc

SEQ ID NO: 537939 - RNA, 21 nt, Human
cuuccaacccacagccucccg

SEQ ID NO: 537940 - RNA, 18 nt, Human
cuuccuggggcagggaau

SEQ ID NO: 537941 - RNA, 21 nt, Human
cuuggcuccugggaguggugg

SEQ ID NO: 537942 - RNA, 23 nt, Human
gaagcagcaguugggaaccuggg

SEQ ID NO: 537943 - RNA, 19 nt, Human
gacaccccuuccccuccac

SEQ ID NO: 537944 - RNA, 21 nt, Human
gacagcgugagccccaccccc

SEQ ID NO: 537945 - RNA, 22 nt, Human
gaggaacacggggccaccccag

SEQ ID NO: 537946 - RNA, 24 nt, Human
gaggcuggaggcccuuuccuggcc

SEQ ID NO: 537947 - RNA, 22 nt, Human
gaggggcagggaagguggcggc

SEQ ID NO: 537948 - RNA, 22 nt, Human
gagggugaggcugggucccuuc

SEQ ID NO: 537949 - RNA, 24 nt, Human
gaguuccagacagggcauugcagc

SEQ ID NO: 537950 - RNA, 27 nt, Human
gcacccaacaaaaggacagccgguuuc

SEQ ID NO: 537951 - RNA, 25 nt, Human
gcaggcccccuccaggcucagcuuc

SEQ ID NO: 537952 - RNA, 25 nt, Human
gccccaacccccagcagccguccau

SEQ ID NO: 537953 - RNA, 19 nt, Human
gcugccccugugaggggca

SEQ ID NO: 537954 - RNA, 19 nt, Human
gcuggaccaagcccaucuc

SEQ ID NO: 537955 - RNA, 19 nt, Human
ggaaaaccgccuccccacc

SEQ ID NO: 537956 - RNA, 20 nt, Human
ggacaaaccaguucccaagg

SEQ ID NO: 537957 - RNA, 20 nt, Human
ggacugaggggaaagggcug

SEQ ID NO: 537958 - RNA, 18 nt, Human
ggacuuugacacccccca

SEQ ID NO: 537959 - RNA, 18 nt, Human
ggagugguggugcccgca

SEQ ID NO: 537960 - RNA, 22 nt, Human
ggcaaacacacuccuugcucuu

SEQ ID NO: 537961 - RNA, 23 nt, Human
ggcacucucuccccagaaggaaa

SEQ ID NO: 537962 - RNA, 19 nt, Human
ggcagggaagguggcggca

SEQ ID NO: 537963 - RNA, 20 nt, Human
ggcagggaagguggcggcag

SEQ ID NO: 537964 - RNA, 24 nt, Human
ggccauggaaauuaguacagaacc

SEQ ID NO: 537965 - RNA, 19 nt, Human
ggccccuggccuagcugga

SEQ ID NO: 537966 - RNA, 20 nt, Human
ggccgaggcaggcccccucc

SEQ ID NO: 537967 - RNA, 18 nt, Human
gggagcuccuagccccug

SEQ ID NO: 537968 - RNA, 23 nt, Human
gggcaaacacacuccuugcucuu

SEQ ID NO: 537969 - RNA, 26 nt, Human
gggcaguggggcagggugggcaggag

SEQ ID NO: 537970 - RNA, 21 nt, Human
gggcucugcccugagggcggg

SEQ ID NO: 537971 - RNA, 21 nt, Human
ggguggggggcaggcagugcc

SEQ ID NO: 537972 - RNA, 18 nt, Human
gugaggcugggucccuuc

SEQ ID NO: 537973 - RNA, 18 nt, Human
gugaggggcagggaaggu

SEQ ID NO: 537974 - RNA, 18 nt, Human
guggugcccgcauggagg

SEQ ID NO: 537975 - RNA, 20 nt, Human
guuagagggaggggaguggg

SEQ ID NO: 537976 - RNA, 23 nt, Human
guuccugggguggggggcaggca

SEQ ID NO: 537977 - RNA, 19 nt, Human
guuggcgauucggcugcug

SEQ ID NO: 537978 - RNA, 20 nt, Human
uaaaaaauaaucacaauuug

SEQ ID NO: 537979 - RNA, 21 nt, Human
uaaauaggaaaaccgccuccc

SEQ ID NO: 537980 - RNA, 31 nt, Human
uaacucacagaauaaauaggaaaaccgccuu

SEQ ID NO: 537981 - RNA, 22 nt, Human
uacacagcguuuacaaaguuag

SEQ ID NO: 537982 - RNA, 20 nt, Human
uacaccagcagccauggggg

SEQ ID NO: 537983 - RNA, 24 nt, Human
uaccuguacagaauggauuacaua

SEQ ID NO: 537984 - RNA, 24 nt, Human
uaggaaaaccgccuccccaccaaa

SEQ ID NO: 537985 - RNA, 25 nt, Human
uagggcaguggggcagggugggcag

SEQ ID NO: 537986 - RNA, 21 nt, Human
ucaccuuggggccccacuccu

SEQ ID NO: 537987 - RNA, 21 nt, Human
ucagaaccaccccagcgggag

SEQ ID NO: 537988 - RNA, 22 nt, Human
ucagaagggagaguggcccaca

SEQ ID NO: 537989 - RNA, 19 nt, Human
ucagcccacuccccagacu

SEQ ID NO: 537990 - RNA, 19 nt, Human
uccagauggggagcaaagc

SEQ ID NO: 537991 - RNA, 20 nt, Human
uccaggccagacaaagacau

SEQ ID NO: 537992 - RNA, 23 nt, Human
uccaguuccugggguggggggca

SEQ ID NO: 537993 - RNA, 19 nt, Human
ucccaagccccaaccccca

SEQ ID NO: 537994 - RNA, 25 nt, Human
ucccaagccccaacccccagcagcc

SEQ ID NO: 537995 - RNA, 20 nt, Human
ucccacuucucccuccucca

SEQ ID NO: 537996 - RNA, 22 nt, Human
uccccagacugcaucuggaagc

SEQ ID NO: 537997 - RNA, 21 nt, Human
ucccgggucgccacauugccc

SEQ ID NO: 537998 - RNA, 23 nt, Human
ucccucagggucccugcuggacc

SEQ ID NO: 537999 - RNA, 20 nt, Human
uccuccagcuuggcuccugg

SEQ ID NO: 538000 - RNA, 20 nt, Human
ucgcgguccuccagcuuggc

SEQ ID NO: 538001 - RNA, 22 nt, Human
ucguccaagaagaaguagccac

SEQ ID NO: 538002 - RNA, 19 nt, Human
ucucaaaauccuucaugcu

SEQ ID NO: 538003 - RNA, 21 nt, Human
ucucccucuuccuacccuccc

SEQ ID NO: 538004 - RNA, 21 nt, Human
ucuccugagcgauggccucua

SEQ ID NO: 538005 - RNA, 21 nt, Human
ucucuuacccagccugggcag

SEQ ID NO: 538006 - RNA, 24 nt, Human
ucugugccugccuaccccugggac

SEQ ID NO: 538007 - RNA, 19 nt, Human
ucuuacccagccugggcag

SEQ ID NO: 538008 - RNA, 24 nt, Human
ucuucccacccaacuccuagcaaa

SEQ ID NO: 538009 - RNA, 24 nt, Human
ugaaacccacacagccugcuguua

SEQ ID NO: 538010 - RNA, 19 nt, Human
ugacacuucucccucuucc

SEQ ID NO: 538011 - RNA, 22 nt, Human
ugaccccagcaugcgguaaugc

SEQ ID NO: 538012 - RNA, 19 nt, Human
ugagccccaccccccuccc

SEQ ID NO: 538013 - RNA, 23 nt, Human
ugaggcugggucccuuccugggg

SEQ ID NO: 538014 - RNA, 18 nt, Human
ugcagcugccucucagaa

SEQ ID NO: 538015 - RNA, 28 nt, Human
ugcagcugccucucagaagggagagugg

SEQ ID NO: 538016 - RNA, 23 nt, Human
ugccaggcggguggccccugggc

SEQ ID NO: 538017 - RNA, 24 nt, Human
ugcgacugcaauuggggcaaacac

SEQ ID NO: 538018 - RNA, 20 nt, Human
ugcgggggggagugaugcau

SEQ ID NO: 538019 - RNA, 24 nt, Human
uggaagcagcaguugggaaccugg

SEQ ID NO: 538020 - RNA, 22 nt, Human
uggaaggaaaagccaccggcca

SEQ ID NO: 538021 - RNA, 23 nt, Human
uggcccacagccuuccucccuuc

SEQ ID NO: 538022 - RNA, 21 nt, Human
ugggcugccccgguagggcag

SEQ ID NO: 538023 - RNA, 21 nt, Human
uggggcagggugggcaggagg

SEQ ID NO: 538024 - RNA, 20 nt, Human
ugggguggggggcaggcagu

SEQ ID NO: 538025 - RNA, 19 nt, Human
ugguagggggggcacucuc

SEQ ID NO: 538026 - RNA, 19 nt, Human
uguccaaagauguccaagc

SEQ ID NO: 538027 - RNA, 21 nt, Human
uguccaagcccggcuggucca

SEQ ID NO: 538028 - RNA, 20 nt, Human
uguccaggucugaguccugg

SEQ ID NO: 538029 - RNA, 24 nt, Human
uuaaaaaccaauuugcaaccaggc

SEQ ID NO: 538030 - RNA, 22 nt, Human
uucacauugcugagggcggccg

SEQ ID NO: 538031 - RNA, 22 nt, Human
uucaccuucagcccacucccca

SEQ ID NO: 538032 - RNA, 24 nt, Human
uuccaacccacagccucccggguc

SEQ ID NO: 538033 - RNA, 22 nt, Human
uucccaagccccaacccccagc

SEQ ID NO: 538034 - RNA, 24 nt, Human
uucccacuucucccuccuccaacc

SEQ ID NO: 538035 - RNA, 25 nt, Human
uugcagccccaucucuguuguuccc

SEQ ID NO: 538036 - RNA, 18 nt, Human
uugccccucagcuccaag

SEQ ID NO: 538037 - RNA, 21 nt, Human
uugccccucagcuccaagcac

SEQ ID NO: 538038 - RNA, 25 nt, Human
uuuaaaaaauaaucacaauuugugg

SEQ ID NO: 538039 - RNA, 22 nt, Human
uuugcuguuauccaggccagac

SEQ ID NO: 538040 - RNA, 21 nt, Human
uuuguaaacucuuguggagac

SEQ ID NO: 538041 - RNA, 26 nt, Human
agcucugcagccucaaagaccagcuc

SEQ ID NO: 538042 - RNA, 23 nt, Human
cagcacaucauaccuugcacuuu

SEQ ID NO: 538043 - RNA, 23 nt, Human
cagccccccaagcucugcagccu

SEQ ID NO: 538044 - RNA, 26 nt, Human
cccccaagcucugcagccucaaagac

SEQ ID NO: 538045 - RNA, 23 nt, Human
ccucaaagaccagcucagucccc

SEQ ID NO: 538046 - RNA, 23 nt, Human
uaccuugcacuuucaggcagcca

SEQ ID NO: 538047 - RNA, 21 nt, Human
ucagugccccaguuggggccu

SEQ ID NO: 538048 - RNA, 19 nt, Human
ucccugacagcacaucaua

SEQ ID NO: 538049 - RNA, 23 nt, Human
ugccagccccccaagcucugcag

SEQ ID NO: 538050 - RNA, 23 nt, Human
uuaagguggcgauugccuuuucc

SEQ ID NO: 538051 - RNA, 22 nt, Human
aaaagccgggagggaagugaag

SEQ ID NO: 538052 - RNA, 21 nt, Human
aaacagaagucucuggaccug

SEQ ID NO: 538053 - RNA, 23 nt, Human
aagcuaugcaauuuucccucuaa

SEQ ID NO: 538054 - RNA, 25 nt, Human
aauuuugguuauaaauuccuagaag

SEQ ID NO: 538055 - RNA, 23 nt, Human
acaaaacauaccucaagccauau

SEQ ID NO: 538056 - RNA, 25 nt, Human
acaaaacauaccucaagccauauaa

SEQ ID NO: 538057 - RNA, 20 nt, Human
acaccuggauuuacaaaaca

SEQ ID NO: 538058 - RNA, 20 nt, Human
acuagaguacaggugaccug

SEQ ID NO: 538059 - RNA, 20 nt, Human
agaacuccuccauacgucuu

SEQ ID NO: 538060 - RNA, 21 nt, Human
agacgccccuaaaguggauaa

SEQ ID NO: 538061 - RNA, 18 nt, Human
agccaggggaggcagugg

SEQ ID NO: 538062 - RNA, 23 nt, Human
agccauauaaauauauccuguuu

SEQ ID NO: 538063 - RNA, 18 nt, Human
aggaacaaccugaccaaa

SEQ ID NO: 538064 - RNA, 22 nt, Human
aggaacaaccugaccaaagacg

SEQ ID NO: 538065 - RNA, 18 nt, Human
aggaggaggggguggggg

SEQ ID NO: 538066 - RNA, 18 nt, Human
aucuagaaauauaggcua

SEQ ID NO: 538067 - RNA, 20 nt, Human
augaagccaguagcuacacu

SEQ ID NO: 538068 - RNA, 24 nt, Human
caaaagcaccaaucuuaacaaggu

SEQ ID NO: 538069 - RNA, 19 nt, Human
caacaggaggagggggugg

SEQ ID NO: 538070 - RNA, 24 nt, Human
caacaguaggagcuacaucuucag

SEQ ID NO: 538071 - RNA, 22 nt, Human
caacuggccaucagacugaaca

SEQ ID NO: 538072 - RNA, 23 nt, Human
caaggaacaaccugaccaaagac

SEQ ID NO: 538073 - RNA, 24 nt, Human
caccaagaggcucaaguuuuggaa

SEQ ID NO: 538074 - RNA, 22 nt, Human
cagauuccccgaauucuuauuc

SEQ ID NO: 538075 - RNA, 21 nt, Human
caucacuggaauccacaacaa

SEQ ID NO: 538076 - RNA, 24 nt, Human
cauuggauauaaagguuuguuuuc

SEQ ID NO: 538077 - RNA, 28 nt, Human
ccaccucccaagucaaagauggugacuu

SEQ ID NO: 538078 - RNA, 18 nt, Human
ccagauuccccgaauucu

SEQ ID NO: 538079 - RNA, 23 nt, Human
ccaggggaggcaguggcuccggg

SEQ ID NO: 538080 - RNA, 21 nt, Human
cccauguacaaacuccaagaa

SEQ ID NO: 538081 - RNA, 19 nt, Human
ccccgcucuuccccggggg

SEQ ID NO: 538082 - RNA, 22 nt, Human
cccucuaaaauccuuuucaaag

SEQ ID NO: 538083 - RNA, 22 nt, Human
ccucccaccacuucccauccga

SEQ ID NO: 538084 - RNA, 25 nt, Human
ccucccaccacuucccauccgagcc

SEQ ID NO: 538085 - RNA, 23 nt, Human
cgcgacgacugcccucuuagcca

SEQ ID NO: 538086 - RNA, 22 nt, Human
cgcuugaaccagccgcagcaac

SEQ ID NO: 538087 - RNA, 20 nt, Human
cggcacuccgagacgccccu

SEQ ID NO: 538088 - RNA, 24 nt, Human
cggcacuccgagacgccccuaaag

SEQ ID NO: 538089 - RNA, 22 nt, Human
cuagugacuuuagggguucccc

SEQ ID NO: 538090 - RNA, 18 nt, Human
cuccucccaccacuuccc

SEQ ID NO: 538091 - RNA, 22 nt, Human
cuccucccaccacuucccaucc

SEQ ID NO: 538092 - RNA, 23 nt, Human
cucuucaucacuggaauccacaa

SEQ ID NO: 538093 - RNA, 24 nt, Human
cugauauuaagagaacuccuccau

SEQ ID NO: 538094 - RNA, 18 nt, Human
cuuaagugcaagagaagu

SEQ ID NO: 538095 - RNA, 18 nt, Human
cuuuagggguuccccagc

SEQ ID NO: 538096 - RNA, 24 nt, Human
cuuuuuuuuuuuuuuuuuuucggg

SEQ ID NO: 538097 - RNA, 22 nt, Human
gaaaacacaaauuuuaaaaaca

SEQ ID NO: 538098 - RNA, 19 nt, Human
gagaagugcuaucauuuua

SEQ ID NO: 538099 - RNA, 20 nt, Human
gagcccggagcggacaccgg

SEQ ID NO: 538100 - RNA, 20 nt, Human
gaggaggggguggggguggc

SEQ ID NO: 538101 - RNA, 21 nt, Human
gcaacuggccaucagacugaa

SEQ ID NO: 538102 - RNA, 23 nt, Human
gcacuaagccuugcuaaccgcgu

SEQ ID NO: 538103 - RNA, 23 nt, Human
gcuaugcaauuuucccucuaaaa

SEQ ID NO: 538104 - RNA, 23 nt, Human
gcucccgccaccgcuugaaccag

SEQ ID NO: 538105 - RNA, 22 nt, Human
gcucuuuuuguaaaguuuuccu

SEQ ID NO: 538106 - RNA, 24 nt, Human
ggaauccacaacaaauauuacccc

SEQ ID NO: 538107 - RNA, 18 nt, Human
ggaggagggggugggggu

SEQ ID NO: 538108 - RNA, 25 nt, Human
ggggguggggguggcguuggacucu

SEQ ID NO: 538109 - RNA, 25 nt, Human
gggguggcguuggacucucaggagc

SEQ ID NO: 538110 - RNA, 19 nt, Human
gggguggggguggcguugg

SEQ ID NO: 538111 - RNA, 18 nt, Human
guaaaguuuuccuucaga

SEQ ID NO: 538112 - RNA, 20 nt, Human
guaaaguuuuccuucagaag

SEQ ID NO: 538113 - RNA, 23 nt, Human
guaauucuuccagauuccccgaa

SEQ ID NO: 538114 - RNA, 22 nt, Human
uaaaaagauagcaaaaguauga

SEQ ID NO: 538115 - RNA, 21 nt, Human
uaaaacagaagucucuggacc

SEQ ID NO: 538116 - RNA, 25 nt, Human
uaaacagauagaaaacacaaauuuu

SEQ ID NO: 538117 - RNA, 23 nt, Human
uaaagaacaacgcuauuacaaaa

SEQ ID NO: 538118 - RNA, 21 nt, Human
uaacauauaacaaaauaggca

SEQ ID NO: 538119 - RNA, 19 nt, Human
uaagagaacuccuccauac

SEQ ID NO: 538120 - RNA, 23 nt, Human
uaaguaaauguuacaaaaagcua

SEQ ID NO: 538121 - RNA, 21 nt, Human
uaauuuaaacaaaucaucuau

SEQ ID NO: 538122 - RNA, 19 nt, Human
uaccucaagccauauaaau

SEQ ID NO: 538123 - RNA, 24 nt, Human
uagaaaacacaaauuuuaaaaaca

SEQ ID NO: 538124 - RNA, 25 nt, Human
uagaauaaagaucugagaaucuacu

SEQ ID NO: 538125 - RNA, 26 nt, Human
uagccaaggaacaaccugaccaaaga

SEQ ID NO: 538126 - RNA, 20 nt, Human
uaguaaacagauagaaaaca

SEQ ID NO: 538127 - RNA, 19 nt, Human
ucacugcagcuucugaugg

SEQ ID NO: 538128 - RNA, 28 nt, Human
ucacugcagcuucugaugggggcccucc

SEQ ID NO: 538129 - RNA, 20 nt, Human
ucagauacuagcacaugucu

SEQ ID NO: 538130 - RNA, 19 nt, Human
ucagugugguugcuaaguc

SEQ ID NO: 538131 - RNA, 26 nt, Human
uccccgaauucuuauuccaccuccua

SEQ ID NO: 538132 - RNA, 21 nt, Human
ucccgggucgcuccucccacc

SEQ ID NO: 538133 - RNA, 22 nt, Human
ucccucuaaaauccuuuucaaa

SEQ ID NO: 538134 - RNA, 20 nt, Human
ucgauauaaauuauuuuuau

SEQ ID NO: 538135 - RNA, 19 nt, Human
ucugucucaucuucauucu

SEQ ID NO: 538136 - RNA, 19 nt, Human
ucuuaagugcaagagaagu

SEQ ID NO: 538137 - RNA, 23 nt, Human
ucuuccagauuccccgaauucuu

SEQ ID NO: 538138 - RNA, 19 nt, Human
ugaaaaugucaaaauucag

SEQ ID NO: 538139 - RNA, 19 nt, Human
ugaaaucaaaugcuuuuac

SEQ ID NO: 538140 - RNA, 18 nt, Human
ugagaucacaucaugagc

SEQ ID NO: 538141 - RNA, 18 nt, Human
ugcaauuuucccucuaaa

SEQ ID NO: 538142 - RNA, 23 nt, Human
ugcuaagucccauguacaaacuc

SEQ ID NO: 538143 - RNA, 21 nt, Human
uguuaaaauacaccuggauuu

SEQ ID NO: 538144 - RNA, 23 nt, Human
uuaaugccuccuuauaauuuucu

SEQ ID NO: 538145 - RNA, 25 nt, Human
uucaaaguuuacauugucuuuucgu

SEQ ID NO: 538146 - RNA, 18 nt, Human
uuccaaugauggccgggg

SEQ ID NO: 538147 - RNA, 22 nt, Human
uuccaccucccaagucaaagag

SEQ ID NO: 538148 - RNA, 21 nt, Human
uuggaagucuagugacuuuag

SEQ ID NO: 538149 - RNA, 20 nt, Human
uuuaaccaugaaaaacacaa

SEQ ID NO: 538150 - RNA, 19 nt, Human
uuuccaguuuuucugccuu

SEQ ID NO: 538151 - RNA, 21 nt, Human
aaaaaaauagaaucuaugaaa

SEQ ID NO: 538152 - RNA, 23 nt, Human
aaagagguuguauuuacauguuu

SEQ ID NO: 538153 - RNA, 21 nt, Human
aaauauaaagugcauuuccau

SEQ ID NO: 538154 - RNA, 24 nt, Human
aacaggaggcuuuauuggacagaa

SEQ ID NO: 538155 - RNA, 19 nt, Human
aaccauuguaaacagagca

SEQ ID NO: 538156 - RNA, 23 nt, Human
accccacuuuucacagacaugaa

SEQ ID NO: 538157 - RNA, 27 nt, Human
agaaaaaccaccccaggugguaauggg

SEQ ID NO: 538158 - RNA, 18 nt, Human
agaaaacagcuguuggca

SEQ ID NO: 538159 - RNA, 25 nt, Human
agaaggacggacaggaguggcuaaa

SEQ ID NO: 538160 - RNA, 18 nt, Human
agaagguaauauugccgu

SEQ ID NO: 538161 - RNA, 21 nt, Human
agccugugaaaauuaaaucug

SEQ ID NO: 538162 - RNA, 23 nt, Human
aucaauucuaucauaaaaauaua

SEQ ID NO: 538163 - RNA, 21 nt, Human
auccagauggcaggauuugau

SEQ ID NO: 538164 - RNA, 18 nt, Human
auccugguuuccaaaagu

SEQ ID NO: 538165 - RNA, 19 nt, Human
auguauccacaaaacacaa

SEQ ID NO: 538166 - RNA, 19 nt, Human
auugaaugcuaaaccagcu

SEQ ID NO: 538167 - RNA, 24 nt, Human
caaaacacaaaccauuguaaacag

SEQ ID NO: 538168 - RNA, 23 nt, Human
caacacaaacacacagauguccc

SEQ ID NO: 538169 - RNA, 23 nt, Human
caacacaaacacacagauguccc

SEQ ID NO: 538170 - RNA, 22 nt, Human
caacagaaaacagcuguuggca

SEQ ID NO: 538171 - RNA, 26 nt, Human
cacacaaacauucacccauaugcaua

SEQ ID NO: 538172 - RNA, 21 nt, Human
cacacagacuuaugggagcac

SEQ ID NO: 538173 - RNA, 23 nt, Human
caccuuuuuaauuugugcuguuu

SEQ ID NO: 538174 - RNA, 24 nt, Human
caccuuuuuaauuugugcuguuug

SEQ ID NO: 538175 - RNA, 21 nt, Human
cagaaaacagcuguuggcaag

SEQ ID NO: 538176 - RNA, 20 nt, Human
cagagcaggcagcauuggcc

SEQ ID NO: 538177 - RNA, 18 nt, Human
cagcuguuggcaagugga

SEQ ID NO: 538178 - RNA, 20 nt, Human
caggaggacugaggauagca

SEQ ID NO: 538179 - RNA, 22 nt, Human
cauuacuaggagccuccaggag

SEQ ID NO: 538180 - RNA, 20 nt, Human
cauucacuccaacacaaaca

SEQ ID NO: 538181 - RNA, 21 nt, Human
cauuuagccagcuguccucuc

SEQ ID NO: 538182 - RNA, 21 nt, Human
cauuugcaggucacuuugucc

SEQ ID NO: 538183 - RNA, 26 nt, Human
ccaacacaaacacacagaugucccac

SEQ ID NO: 538184 - RNA, 24 nt, Human
ccagcauuaauaaugcacauccag

SEQ ID NO: 538185 - RNA, 22 nt, Human
cccacccauuuuccuaagaguc

SEQ ID NO: 538186 - RNA, 21 nt, Human
ccgcaaauguuucugcacucc

SEQ ID NO: 538187 - RNA, 23 nt, Human
cgacauacuauggcagaaggaga

SEQ ID NO: 538188 - RNA, 22 nt, Human
cucauuacuaggagccuccagg

SEQ ID NO: 538189 - RNA, 18 nt, Human
gagcacaggguuaugggc

SEQ ID NO: 538190 - RNA, 21 nt, Human
gaguuccccaccccacuuuuc

SEQ ID NO: 538191 - RNA, 21 nt, Human
gaucacgggcacacagacuua

SEQ ID NO: 538192 - RNA, 22 nt, Human
gcaggucacuuuguccccagga

SEQ ID NO: 538193 - RNA, 19 nt, Human
ggcaaguggauuacacaga

SEQ ID NO: 538194 - RNA, 19 nt, Human
ggcagaaggagagaucuau

SEQ ID NO: 538195 - RNA, 18 nt, Human
gggcacauucacuccaac

SEQ ID NO: 538196 - RNA, 19 nt, Human
gugaguuccccaccccacu

SEQ ID NO: 538197 - RNA, 19 nt, Human
guucucccauuggacacug

SEQ ID NO: 538198 - RNA, 23 nt, Human
uaacuggacucccuucuaucauc

SEQ ID NO: 538199 - RNA, 23 nt, Human
uagaagaaaguaaauguaaaacu

SEQ ID NO: 538200 - RNA, 20 nt, Human
ucaccuauaugcauaaaauc

SEQ ID NO: 538201 - RNA, 19 nt, Human
ucacgggcacacagacuua

SEQ ID NO: 538202 - RNA, 25 nt, Human
uccaacacaaacacacagauguccc

SEQ ID NO: 538203 - RNA, 19 nt, Human
uccacaaaacacaaaccau

SEQ ID NO: 538204 - RNA, 24 nt, Human
uccacaaaacacaaaccauuguaa

SEQ ID NO: 538205 - RNA, 22 nt, Human
uccagauggcaggauuugaucc

SEQ ID NO: 538206 - RNA, 19 nt, Human
uccccuggggaaauccuga

SEQ ID NO: 538207 - RNA, 25 nt, Human
uccccuggggaaauccugaugggga

SEQ ID NO: 538208 - RNA, 24 nt, Human
ugaaaaaaauagaaucuaugaaaa

SEQ ID NO: 538209 - RNA, 21 nt, Human
ugaagaaggacggacaggagu

SEQ ID NO: 538210 - RNA, 19 nt, Human
ugacacacaugagaggaug

SEQ ID NO: 538211 - RNA, 21 nt, Human
ugagaggaugcuaaacuuuug

SEQ ID NO: 538212 - RNA, 20 nt, Human
ugauauguauccacaaaaca

SEQ ID NO: 538213 - RNA, 24 nt, Human
uggaacaauuucagcuugcaaggg

SEQ ID NO: 538214 - RNA, 19 nt, Human
uggaugccccaagcuaugg

SEQ ID NO: 538215 - RNA, 27 nt, Human
uggcaggauuugauccuuucccugucg

SEQ ID NO: 538216 - RNA, 24 nt, Human
uggcuaaaguugucuacuggcauu

SEQ ID NO: 538217 - RNA, 20 nt, Human
ugggcacacaaacauucacc

SEQ ID NO: 538218 - RNA, 26 nt, Human
ugggcacacaaacauucacccauaug

SEQ ID NO: 538219 - RNA, 21 nt, Human
ugggcacauucacuccaacac

SEQ ID NO: 538220 - RNA, 23 nt, Human
ugggcacauucacuccaacacaa

SEQ ID NO: 538221 - RNA, 21 nt, Human
uguaaaacuacaauguugaca

SEQ ID NO: 538222 - RNA, 22 nt, Human
uguggcgaaaugaguguguucc

SEQ ID NO: 538223 - RNA, 22 nt, Human
uucacagacaugaaaaaaauag

SEQ ID NO: 538224 - RNA, 19 nt, Human
uugaaugcuaaaccagcug

SEQ ID NO: 538225 - RNA, 20 nt, Human
uuucugcacuccaaaagagg

SEQ ID NO: 538226 - RNA, 23 nt, Human
uuuuuuuuuuuuuuuauaacagg

SEQ ID NO: 538227 - RNA, 22 nt, Human
aaaccagccuuagauugguuug

SEQ ID NO: 538228 - RNA, 19 nt, Human
aaucuucgaaaccagacaa

SEQ ID NO: 538229 - RNA, 23 nt, Human
agacaaugcucggagaacaguac

SEQ ID NO: 538230 - RNA, 19 nt, Human
aguccccgugaaucuauga

SEQ ID NO: 538231 - RNA, 19 nt, Human
cgaaaccagacaaugcucg

SEQ ID NO: 538232 - RNA, 27 nt, Human
cugcaucaucucauuuaauccucacaa

SEQ ID NO: 538233 - RNA, 20 nt, Human
cuggaaaaucuucgaaacca

SEQ ID NO: 538234 - RNA, 24 nt, Human
gaaaaucuucgaaaccagacaaug

SEQ ID NO: 538235 - RNA, 27 nt, Human
gagaacaguacagagagaccgguaccc

SEQ ID NO: 538236 - RNA, 18 nt, Human
gaggaaaccagccuuaga

SEQ ID NO: 538237 - RNA, 25 nt, Human
uaugaucgaaccuuuaauauuugcc

SEQ ID NO: 538238 - RNA, 21 nt, Human
ugaaauuaauagaaauaagac

SEQ ID NO: 538239 - RNA, 20 nt, Human
ugagcacuggagaaagcaau

SEQ ID NO: 538240 - RNA, 18 nt, Human
ugcacagaugaggaaacc

SEQ ID NO: 538241 - RNA, 20 nt, Human
ugcaucaucucauuuaaucc

SEQ ID NO: 538242 - RNA, 24 nt, Human
uggaaaccucaccuuuuauaagaa

SEQ ID NO: 538243 - RNA, 19 nt, Human
uguagaugcuauuauuagc

SEQ ID NO: 538244 - RNA, 18 nt, Human
aagcaggcuggguggggg

SEQ ID NO: 538245 - RNA, 23 nt, Human
aagcaggcugggugggggcaggc

SEQ ID NO: 538246 - RNA, 22 nt, Human
acacuauguacauuguugugcu

SEQ ID NO: 538247 - RNA, 23 nt, Human
accccgaggccucugcuugaagc

SEQ ID NO: 538248 - RNA, 24 nt, Human
acuggagccaaaggcccaggggac

SEQ ID NO: 538249 - RNA, 24 nt, Human
agagccagcccugccagaugcccc

SEQ ID NO: 538250 - RNA, 23 nt, Human
agagcccacccacccaccuuggc

SEQ ID NO: 538251 - RNA, 23 nt, Human
agagggagguggcaagggcugcc

SEQ ID NO: 538252 - RNA, 21 nt, Human
agaucaggcaagaagggagac

SEQ ID NO: 538253 - RNA, 21 nt, Human
agcaaaaaccguucugcagca

SEQ ID NO: 538254 - RNA, 23 nt, Human
agcaaaaaccguucugcagcagc

SEQ ID NO: 538255 - RNA, 19 nt, Human
agcaggcuuggcagaggga

SEQ ID NO: 538256 - RNA, 24 nt, Human
agccgcaacucgucacaaggcccg

SEQ ID NO: 538257 - RNA, 23 nt, Human
agcgcagcccgcuagagaaucuu

SEQ ID NO: 538258 - RNA, 20 nt, Human
agcuccaggcccccaagagg

SEQ ID NO: 538259 - RNA, 21 nt, Human
agcuccaggcccccaagaggc

SEQ ID NO: 538260 - RNA, 23 nt, Human
agcucccccaccccgaggccucu

SEQ ID NO: 538261 - RNA, 20 nt, Human
agcuggaagacaugguugcu

SEQ ID NO: 538262 - RNA, 21 nt, Human
aggaucaaugcuggacaagaa

SEQ ID NO: 538263 - RNA, 20 nt, Human
aggcaagaagggagacuuga

SEQ ID NO: 538264 - RNA, 19 nt, Human
aggggccacuggagccaaa

SEQ ID NO: 538265 - RNA, 23 nt, Human
aggugugaggcugugagaccagg

SEQ ID NO: 538266 - RNA, 18 nt, Human
agguguguuuugggggag

SEQ ID NO: 538267 - RNA, 26 nt, Human
agguguguuuugggggagguuuggga

SEQ ID NO: 538268 - RNA, 18 nt, Human
caaaaaccguucugcagc

SEQ ID NO: 538269 - RNA, 20 nt, Human
caccccaucgcgcacaggga

SEQ ID NO: 538270 - RNA, 20 nt, Human
cagagcaggggaacuuggga

SEQ ID NO: 538271 - RNA, 19 nt, Human
cagcuggcuccccucuccu

SEQ ID NO: 538272 - RNA, 18 nt, Human
caggcuuggcagagggag

SEQ ID NO: 538273 - RNA, 22 nt, Human
ccacccacccaccuuggccagg

SEQ ID NO: 538274 - RNA, 19 nt, Human
ccacuggagccaaaggccc

SEQ ID NO: 538275 - RNA, 21 nt, Human
ccaggcacggacagggacugg

SEQ ID NO: 538276 - RNA, 21 nt, Human
ccgaagcucacugucccccac

SEQ ID NO: 538277 - RNA, 18 nt, Human
ccgggcuugggguaaaca

SEQ ID NO: 538278 - RNA, 21 nt, Human
ccucccaucgagcacagggcu

SEQ ID NO: 538279 - RNA, 23 nt, Human
ccucugcuugaagcugggguggg

SEQ ID NO: 538280 - RNA, 19 nt, Human
ccugccagaugcccagcuc

SEQ ID NO: 538281 - RNA, 19 nt, Human
ccugggagccccucccauc

SEQ ID NO: 538282 - RNA, 20 nt, Human
ccugggagccccucccaucg

SEQ ID NO: 538283 - RNA, 20 nt, Human
ccuuggccaggccgaagcuc

SEQ ID NO: 538284 - RNA, 22 nt, Human
cgaagcucacugucccccaccc

SEQ ID NO: 538285 - RNA, 23 nt, Human
cgcuagagaaucuuuacacagag

SEQ ID NO: 538286 - RNA, 18 nt, Human
cggcugggcugccagagc

SEQ ID NO: 538287 - RNA, 19 nt, Human
cgggugucccauggggcug

SEQ ID NO: 538288 - RNA, 21 nt, Human
cgggugucccauggggcuggg

SEQ ID NO: 538289 - RNA, 18 nt, Human
cucccccaccccgaggcc

SEQ ID NO: 538290 - RNA, 23 nt, Human
cucguggugguagcacuugaauu

SEQ ID NO: 538291 - RNA, 23 nt, Human
cugcagcagcaggcuuggcagag

SEQ ID NO: 538292 - RNA, 22 nt, Human
cugggcaugaagggcagggcug

SEQ ID NO: 538293 - RNA, 20 nt, Human
cugugagcguguccccgccu

SEQ ID NO: 538294 - RNA, 19 nt, Human
gacaagaagcaggcugggu

SEQ ID NO: 538295 - RNA, 18 nt, Human
gacagagccagcccugcc

SEQ ID NO: 538296 - RNA, 22 nt, Human
gacaugguugcuuacagccagg

SEQ ID NO: 538297 - RNA, 26 nt, Human
gagccaaaggcccaggggacagagcc

SEQ ID NO: 538298 - RNA, 22 nt, Human
gagccccucccaucgagcacag

SEQ ID NO: 538299 - RNA, 19 nt, Human
gagcgcagcccgcuagaga

SEQ ID NO: 538300 - RNA, 20 nt, Human
gagcguguccccgccgggcc

SEQ ID NO: 538301 - RNA, 23 nt, Human
gagcguguccccgccgggcuugg

SEQ ID NO: 538302 - RNA, 18 nt, Human
gagguugggcuugagauc

SEQ ID NO: 538303 - RNA, 22 nt, Human
gcagucccguggggccaggcac

SEQ ID NO: 538304 - RNA, 22 nt, Human
gcaugaagggcagggcuguggu

SEQ ID NO: 538305 - RNA, 22 nt, Human
gcccacucaggccagguuggcu

SEQ ID NO: 538306 - RNA, 18 nt, Human
gcccaggggacagagcca

SEQ ID NO: 538307 - RNA, 21 nt, Human
gcccaguggaggaguuguuga

SEQ ID NO: 538308 - RNA, 24 nt, Human
gcccccaagaggcugccauucagc

SEQ ID NO: 538309 - RNA, 20 nt, Human
gcggcagaaggcucuggcuc

SEQ ID NO: 538310 - RNA, 22 nt, Human
gcgugggguucccuggcagugg

SEQ ID NO: 538311 - RNA, 24 nt, Human
ggacaagaagcaggcugggugggg

SEQ ID NO: 538312 - RNA, 18 nt, Human
ggacaaggugugaggcug

SEQ ID NO: 538313 - RNA, 24 nt, Human
ggagacuugaccucuugguuuggu

SEQ ID NO: 538314 - RNA, 18 nt, Human
gggcagggcuguggugac

SEQ ID NO: 538315 - RNA, 22 nt, Human
ggggaacuugggagcgcagccc

SEQ ID NO: 538316 - RNA, 21 nt, Human
ggggacagagccagcccugcc

SEQ ID NO: 538317 - RNA, 23 nt, Human
gggggagguuugggaaagaccac

SEQ ID NO: 538318 - RNA, 20 nt, Human
gggucauggguggcgugggg

SEQ ID NO: 538319 - RNA, 20 nt, Human
ggugucccauggggcugggc

SEQ ID NO: 538320 - RNA, 19 nt, Human
guccccgccgggcuugggg

SEQ ID NO: 538321 - RNA, 19 nt, Human
guuuugggggagguuuggg

SEQ ID NO: 538322 - RNA, 18 nt, Human
uagcccgggauggaacgg

SEQ ID NO: 538323 - RNA, 19 nt, Human
ucagcaaaaaccguucugc

SEQ ID NO: 538324 - RNA, 23 nt, Human
ucagcaaaaaccguucugcagca

SEQ ID NO: 538325 - RNA, 24 nt, Human
ucgagcacagggcugcuuccaauu

SEQ ID NO: 538326 - RNA, 20 nt, Human
ugacauguaagggacgcugc

SEQ ID NO: 538327 - RNA, 21 nt, Human
ugagauguguguguggacaag

SEQ ID NO: 538328 - RNA, 22 nt, Human
ugagguugggcuugagaucagg

SEQ ID NO: 538329 - RNA, 21 nt, Human
ugagugcaaggaguugagguu

SEQ ID NO: 538330 - RNA, 24 nt, Human
ugcaggcggaagggcuccaggacc

SEQ ID NO: 538331 - RNA, 20 nt, Human
ugcccagcucugcccagugg

SEQ ID NO: 538332 - RNA, 24 nt, Human
uggaacggguaggcccacucaggc

SEQ ID NO: 538333 - RNA, 21 nt, Human
uggaagacaugguugcuuaca

SEQ ID NO: 538334 - RNA, 20 nt, Human
uggaaggacaaggugugagg

SEQ ID NO: 538335 - RNA, 21 nt, Human
uggcaagggcugccggccugg

SEQ ID NO: 538336 - RNA, 24 nt, Human
uggcagagggagguggcaagggcu

SEQ ID NO: 538337 - RNA, 25 nt, Human
uggcagagggagguggcaagggcug

SEQ ID NO: 538338 - RNA, 21 nt, Human
uggcgugggguucccuggcag

SEQ ID NO: 538339 - RNA, 19 nt, Human
ugggaaagaccaccgggug

SEQ ID NO: 538340 - RNA, 23 nt, Human
uggggccaggcacggacagggac

SEQ ID NO: 538341 - RNA, 22 nt, Human
ugggggcaggcagggguggaag

SEQ ID NO: 538342 - RNA, 24 nt, Human
ugggggcaggcagggguggaagga

SEQ ID NO: 538343 - RNA, 21 nt, Human
uguguggacaaggcuggacag

SEQ ID NO: 538344 - RNA, 23 nt, Human
uguguggacaaggcuggacaggg

SEQ ID NO: 538345 - RNA, 18 nt, Human
uguguguggacaaggcug

SEQ ID NO: 538346 - RNA, 22 nt, Human
uuaaaaaacacagcuguacuaa

SEQ ID NO: 538347 - RNA, 22 nt, Human
uuccaagagcuggacugcuggg

SEQ ID NO: 538348 - RNA, 22 nt, Human
uucccuggcaguggggaacugg

SEQ ID NO: 538349 - RNA, 22 nt, Human
uucuucacuuucacagagcagg

SEQ ID NO: 538350 - RNA, 18 nt, Human
uugggaaagaccaccggg

SEQ ID NO: 538351 - RNA, 19 nt, Human
uuucacagagcaggggaac

SEQ ID NO: 538352 - RNA, 20 nt, Human
uuuuuuuuuuuuuuggcuuu

SEQ ID NO: 538353 - RNA, 18 nt, Human
uuuuuuuuuuuuuuuuug

SEQ ID NO: 538354 - RNA, 24 nt, Human
uuuuuuuuuuuuuuuuuuggcuuu

SEQ ID NO: 538355 - RNA, 22 nt, Human
uuuuuuuuuuuuuuuuuuuggc

SEQ ID NO: 538356 - RNA, 22 nt, Human
aaaaaaaaaaaaaaaggucaag

SEQ ID NO: 538357 - RNA, 20 nt, Human
aaaacaacaaaacuaaagag

SEQ ID NO: 538358 - RNA, 18 nt, Human
aaaauuagcugggcgugg

SEQ ID NO: 538359 - RNA, 23 nt, Human
aaacaacaaaacuaaagagacau

SEQ ID NO: 538360 - RNA, 18 nt, Human
aaacuaaaacaaaaacca

SEQ ID NO: 538361 - RNA, 19 nt, Human
aaacuaaaacaaaaaccaa

SEQ ID NO: 538362 - RNA, 25 nt, Human
aaacuaaaacaaaaaccaaaucccu

SEQ ID NO: 538363 - RNA, 24 nt, Human
aaagugcugggauuacaggcguga

SEQ ID NO: 538364 - RNA, 28 nt, Human
aacaacaaaaacaacaaaacuaaagaga

SEQ ID NO: 538365 - RNA, 23 nt, Human
aacagaaagaccccuuccacaga

SEQ ID NO: 538366 - RNA, 19 nt, Human
aacauggucaaaccccauc

SEQ ID NO: 538367 - RNA, 20 nt, Human
aacauggucaaaccccaucu

SEQ ID NO: 538368 - RNA, 21 nt, Human
aacauggucaaaccccaucuc

SEQ ID NO: 538369 - RNA, 20 nt, Human
aaccucugccgccagggcuc

SEQ ID NO: 538370 - RNA, 23 nt, Human
aagagcaaaacucugucucaaaa

SEQ ID NO: 538371 - RNA, 21 nt, Human
aagcggcccacccacaggcgg

SEQ ID NO: 538372 - RNA, 24 nt, Human
aagcugaggcaggagaaucgcuug

SEQ ID NO: 538373 - RNA, 24 nt, Human
aaggccagguggaucacaagguca

SEQ ID NO: 538374 - RNA, 19 nt, Human
aagggguuucaccauguug

SEQ ID NO: 538375 - RNA, 24 nt, Human
aagggguuucaccauguugcccag

SEQ ID NO: 538376 - RNA, 19 nt, Human
aagugcugggauuacaggc

SEQ ID NO: 538377 - RNA, 19 nt, Human
aagugcugggauuacaggc

SEQ ID NO: 538378 - RNA, 26 nt, Human
aagugcugggauuacaggcgugagcc

SEQ ID NO: 538379 - RNA, 23 nt, Human
aauagcugggauuacaggcgcgu

SEQ ID NO: 538380 - RNA, 24 nt, Human
aaucgcuugaacucaagaggugga

SEQ ID NO: 538381 - RNA, 19 nt, Human
acaaaaaaaauuuuuacag

SEQ ID NO: 538382 - RNA, 21 nt, Human
acaaaaacaacaaaacuaaag

SEQ ID NO: 538383 - RNA, 25 nt, Human
acaaaaacaacaaaacuaaagagac

SEQ ID NO: 538384 - RNA, 19 nt, Human
acaaaacuaaagagacaug

SEQ ID NO: 538385 - RNA, 21 nt, Human
acaaaacuaaagagacaugcu

SEQ ID NO: 538386 - RNA, 19 nt, Human
acaaucagguauacaacua

SEQ ID NO: 538387 - RNA, 24 nt, Human
acacaaccacgaaacggcccaacc

SEQ ID NO: 538388 - RNA, 19 nt, Human
acauaaaucuaccacuuac

SEQ ID NO: 538389 - RNA, 21 nt, Human
accagcaucccuggcaacccc

SEQ ID NO: 538390 - RNA, 19 nt, Human
accauguugcccagggugg

SEQ ID NO: 538391 - RNA, 24 nt, Human
accccaucucuacuaaaaauacaa

SEQ ID NO: 538392 - RNA, 18 nt, Human
acugcacuccagccuggg

SEQ ID NO: 538393 - RNA, 25 nt, Human
acugcacuccagccugggugacaag

SEQ ID NO: 538394 - RNA, 21 nt, Human
agaaaagagugauauugaugc

SEQ ID NO: 538395 - RNA, 22 nt, Human
agacagaauaaagaaaauuguu

SEQ ID NO: 538396 - RNA, 20 nt, Human
agagaagggguuucaccaug

SEQ ID NO: 538397 - RNA, 18 nt, Human
agagcaaaacucugucuc

SEQ ID NO: 538398 - RNA, 18 nt, Human
agccucccgaauagcugg

SEQ ID NO: 538399 - RNA, 20 nt, Human
agcugggcgugguggcgcac

SEQ ID NO: 538400 - RNA, 21 nt, Human
aggcaggagaaucgcuugaac

SEQ ID NO: 538401 - RNA, 23 nt, Human
aggcaggagaaucgcuugaacuc

SEQ ID NO: 538402 - RNA, 24 nt, Human
aggccaaggccagguggaucacaa

SEQ ID NO: 538403 - RNA, 24 nt, Human
aggccagguggaucacaaggucag

SEQ ID NO: 538404 - RNA, 24 nt, Human
agggguuucaccauguugcccagg

SEQ ID NO: 538405 - RNA, 24 nt, Human
agguggacguugcagugagcugag

SEQ ID NO: 538406 - RNA, 19 nt, Human
agguggaucacaaggucag

SEQ ID NO: 538407 - RNA, 22 nt, Human
agguggaucacaaggucaggau

SEQ ID NO: 538408 - RNA, 22 nt, Human
aguagagaagggguuucaccau

SEQ ID NO: 538409 - RNA, 22 nt, Human
agugcagugggcgaucuuggcu

SEQ ID NO: 538410 - RNA, 23 nt, Human
agugcagugggcgaucuuggcuc

SEQ ID NO: 538411 - RNA, 18 nt, Human
agugcugggauuacaggc

SEQ ID NO: 538412 - RNA, 24 nt, Human
auagacagaauaaagaaaauuguu

SEQ ID NO: 538413 - RNA, 18 nt, Human
auagcugggauuacaggc

SEQ ID NO: 538414 - RNA, 20 nt, Human
auauaaaucagauaguaaua

SEQ ID NO: 538415 - RNA, 30 nt, Human
aucuuauucuuuucuucaauuuucuccaag

SEQ ID NO: 538416 - RNA, 22 nt, Human
augagaacauucagccauaauc

SEQ ID NO: 538417 - RNA, 19 nt, Human
auuacaggcgcgugccacc

SEQ ID NO: 538418 - RNA, 24 nt, Human
auugcgccacugcacuccagccug

SEQ ID NO: 538419 - RNA, 24 nt, Human
auuuuaguagagaagggguuucac

SEQ ID NO: 538420 - RNA, 21 nt, Human
caaaaacaacaaaacuaaaga

SEQ ID NO: 538421 - RNA, 28 nt, Human
caaaaacaacaaaacuaaagagacaugc

SEQ ID NO: 538422 - RNA, 24 nt, Human
caaagugcugggauuacaggcgug

SEQ ID NO: 538423 - RNA, 18 nt, Human
caacaaaaacaacaaaac

SEQ ID NO: 538424 - RNA, 22 nt, Human
caacaaaaacaacaaaacuaaa

SEQ ID NO: 538425 - RNA, 26 nt, Human
caacaaaaacaacaaaacuaaagaga

SEQ ID NO: 538426 - RNA, 24 nt, Human
caaggccagguggaucacaagguc

SEQ ID NO: 538427 - RNA, 23 nt, Human
caagucccacagcuacuuucucc

SEQ ID NO: 538428 - RNA, 19 nt, Human
cacacaaccacgaaacggc

SEQ ID NO: 538429 - RNA, 19 nt, Human
cacaugcuacauaacauuu

SEQ ID NO: 538430 - RNA, 24 nt, Human
caccaccugggaagcugaggcagg

SEQ ID NO: 538431 - RNA, 18 nt, Human
caccauguugcccagggu

SEQ ID NO: 538432 - RNA, 24 nt, Human
caccauguugcccaggguggucuc

SEQ ID NO: 538433 - RNA, 27 nt, Human
caccauguugcccaggguggucucgaa

SEQ ID NO: 538434 - RNA, 19 nt, Human
caccgcgcuaccgcgcagc

SEQ ID NO: 538435 - RNA, 19 nt, Human
caccucaccgcgcuaccgc

SEQ ID NO: 538436 - RNA, 24 nt, Human
cacgccuguaaucccagcacuuug

SEQ ID NO: 538437 - RNA, 20 nt, Human
cacuccagccugggugacaa

SEQ ID NO: 538438 - RNA, 21 nt, Human
cacuccagccugggugacaag

SEQ ID NO: 538439 - RNA, 24 nt, Human
cacuccagccugggugacaagagc

SEQ ID NO: 538440 - RNA, 24 nt, Human
cacucuguagcccaaccuggagug

SEQ ID NO: 538441 - RNA, 19 nt, Human
cacugcacuccagccuggg

SEQ ID NO: 538442 - RNA, 21 nt, Human
cacugcacuccagccugggug

SEQ ID NO: 538443 - RNA, 22 nt, Human
cacugcacuccagccuggguga

SEQ ID NO: 538444 - RNA, 23 nt, Human
cacugcacuccagccugggugac

SEQ ID NO: 538445 - RNA, 24 nt, Human
cacugcacuccagccugggugaca

SEQ ID NO: 538446 - RNA, 25 nt, Human
cacugcacuccagccugggugacaa

SEQ ID NO: 538447 - RNA, 21 nt, Human
cacuuuaccagcgcacucuuc

SEQ ID NO: 538448 - RNA, 20 nt, Human
cagcacuuugggaggccaag

SEQ ID NO: 538449 - RNA, 23 nt, Human
cagcacuuugggaggccaaggcc

SEQ ID NO: 538450 - RNA, 24 nt, Human
cagcagccggagcccaacagcuga

SEQ ID NO: 538451 - RNA, 20 nt, Human
cagcgcacucuucgcugaag

SEQ ID NO: 538452 - RNA, 21 nt, Human
cagcuacuuucucccaaucuu

SEQ ID NO: 538453 - RNA, 19 nt, Human
cagcucagggacccagcgg

SEQ ID NO: 538454 - RNA, 18 nt, Human
caggaugaucccgggcuu

SEQ ID NO: 538455 - RNA, 23 nt, Human
cauauacaagcauaaugcuuaca

SEQ ID NO: 538456 - RNA, 23 nt, Human
caucaacaacaaaaacaacaaaa

SEQ ID NO: 538457 - RNA, 20 nt, Human
caucccuggcaaccccccaa

SEQ ID NO: 538458 - RNA, 18 nt, Human
cauggucaaaccccaucu

SEQ ID NO: 538459 - RNA, 21 nt, Human
cauguugcccaggguggucuc

SEQ ID NO: 538460 - RNA, 24 nt, Human
cauguugcccaggguggucucgaa

SEQ ID NO: 538461 - RNA, 22 nt, Human
ccaaagugcugggauuacaggc

SEQ ID NO: 538462 - RNA, 22 nt, Human
ccaaagugcugggauuacaggc

SEQ ID NO: 538463 - RNA, 24 nt, Human
ccaaagugcugggauuacaggcgu

SEQ ID NO: 538464 - RNA, 21 nt, Human
ccacaccaguuaaaaaaggug

SEQ ID NO: 538465 - RNA, 20 nt, Human
ccaccacgcccagcuaauuu

SEQ ID NO: 538466 - RNA, 20 nt, Human
ccacugcacuccagccuggg

SEQ ID NO: 538467 - RNA, 20 nt, Human
ccacugcacuccagccuggg

SEQ ID NO: 538468 - RNA, 21 nt, Human
ccacugcacuccagccugggu

SEQ ID NO: 538469 - RNA, 21 nt, Human
ccacugcacuccagccugggu

SEQ ID NO: 538470 - RNA, 23 nt, Human
ccacugcacuccagccuggguga

SEQ ID NO: 538471 - RNA, 24 nt, Human
ccacugcacuccagccugggugac

SEQ ID NO: 538472 - RNA, 22 nt, Human
ccagccagcucagggacccagc

SEQ ID NO: 538473 - RNA, 20 nt, Human
ccagggcucaagcgauucuc

SEQ ID NO: 538474 - RNA, 19 nt, Human
ccaugcguaagugcccuau

SEQ ID NO: 538475 - RNA, 21 nt, Human
cccacagcuacuuucucccaa

SEQ ID NO: 538476 - RNA, 21 nt, Human
ccccagagcagccgaguuggc

SEQ ID NO: 538477 - RNA, 25 nt, Human
ccccagcagccggagcccaacagcu

SEQ ID NO: 538478 - RNA, 19 nt, Human
ccccccaagucucagcucc

SEQ ID NO: 538479 - RNA, 20 nt, Human
ccccuagacagcccgcgcuc

SEQ ID NO: 538480 - RNA, 23 nt, Human
cccgaauagcugggauuacaggc

SEQ ID NO: 538481 - RNA, 24 nt, Human
cccgaauagcugggauuacaggcg

SEQ ID NO: 538482 - RNA, 24 nt, Human
cccgcgcuccagccagcucaggga

SEQ ID NO: 538483 - RNA, 24 nt, Human
ccgccucgaccucccaaagugcug

SEQ ID NO: 538484 - RNA, 22 nt, Human
ccgcgcccggccuaaauuauca

SEQ ID NO: 538485 - RNA, 23 nt, Human
ccuaucuccaagucccacagcua

SEQ ID NO: 538486 - RNA, 22 nt, Human
ccucaccucaccgcgcuaccgc

SEQ ID NO: 538487 - RNA, 24 nt, Human
ccuggccaacauggucaaacccca

SEQ ID NO: 538488 - RNA, 22 nt, Human
ccuguaaucccagcacuuuggg

SEQ ID NO: 538489 - RNA, 24 nt, Human
cgaaacggcccaaccauuucucau

SEQ ID NO: 538490 - RNA, 24 nt, Human
cgagaccauccuggccaacauggu

SEQ ID NO: 538491 - RNA, 26 nt, Human
cgccacugcacuccagccugggugac

SEQ ID NO: 538492 - RNA, 24 nt, Human
cgccucgaccucccaaagugcugg

SEQ ID NO: 538493 - RNA, 21 nt, Human
cgcgugccaccacgcccagcu

SEQ ID NO: 538494 - RNA, 23 nt, Human
cuaacauaaaucuaccacuuacc

SEQ ID NO: 538495 - RNA, 24 nt, Human
cucaaaaaaaaaaaaaaaggucaa

SEQ ID NO: 538496 - RNA, 22 nt, Human
cucacgccuguaaucccagcac

SEQ ID NO: 538497 - RNA, 24 nt, Human
cucacgccuguaaucccagcacuu

SEQ ID NO: 538498 - RNA, 18 nt, Human
cucacugcaaccucugcc

SEQ ID NO: 538499 - RNA, 18 nt, Human
cuccaugcguaagugccc

SEQ ID NO: 538500 - RNA, 24 nt, Human
cucccgaauagcugggauuacagg

SEQ ID NO: 538501 - RNA, 19 nt, Human
cuccgucucaaaaaaaaaa

SEQ ID NO: 538502 - RNA, 25 nt, Human
cucgggccucagccucccgaauagc

SEQ ID NO: 538503 - RNA, 22 nt, Human
cucuuguagucccagcuacagg

SEQ ID NO: 538504 - RNA, 20 nt, Human
cugaggucgccgccccuaga

SEQ ID NO: 538505 - RNA, 20 nt, Human
cugcaaccucugccgccagg

SEQ ID NO: 538506 - RNA, 24 nt, Human
cugcaaccucugccgccagggcuc

SEQ ID NO: 538507 - RNA, 23 nt, Human
cuggccaacauggucaaacccca

SEQ ID NO: 538508 - RNA, 25 nt, Human
cuuaccgcgcacgaaucccccagaa

SEQ ID NO: 538509 - RNA, 24 nt, Human
cuuaguuuauaacaacaaaaaaaa

SEQ ID NO: 538510 - RNA, 22 nt, Human
gaagggguuucaccauguugcc

SEQ ID NO: 538511 - RNA, 26 nt, Human
gaauagcugggauuacaggcgcgugc

SEQ ID NO: 538512 - RNA, 23 nt, Human
gacguugcagugagcugagauug

SEQ ID NO: 538513 - RNA, 23 nt, Human
gagauugcgccacugcacuccag

SEQ ID NO: 538514 - RNA, 24 nt, Human
gagcagccgaguuggcgagccggg

SEQ ID NO: 538515 - RNA, 25 nt, Human
gagccaagaaaacaauauaaccaaa

SEQ ID NO: 538516 - RNA, 22 nt, Human
gaucugcccgccucgaccuccc

SEQ ID NO: 538517 - RNA, 18 nt, Human
gauguggaggaagaaaag

SEQ ID NO: 538518 - RNA, 18 nt, Human
gauuacaggcgcgugcca

SEQ ID NO: 538519 - RNA, 18 nt, Human
gauuacaggcgugagcca

SEQ ID NO: 538520 - RNA, 22 nt, Human
gauuacaggcgugagccaccgc

SEQ ID NO: 538521 - RNA, 22 nt, Human
gauuacaggcgugagccaccgc

SEQ ID NO: 538522 - RNA, 21 nt, Human
gauucucgggccucagccucc

SEQ ID NO: 538523 - RNA, 24 nt, Human
gccaacauggucaaaccccaucuc

SEQ ID NO: 538524 - RNA, 19 nt, Human
gccaagcggcccacccaca

SEQ ID NO: 538525 - RNA, 19 nt, Human
gccacugcacuccagccug

SEQ ID NO: 538526 - RNA, 24 nt, Human
gccacugcacuccagccuggguga

SEQ ID NO: 538527 - RNA, 23 nt, Human
gcccagcuaauuuuuuguauuuu

SEQ ID NO: 538528 - RNA, 23 nt, Human
gccucagccucccgaauagcugg

SEQ ID NO: 538529 - RNA, 24 nt, Human
gcgauucucgggccucagccuccc

SEQ ID NO: 538530 - RNA, 18 nt, Human
gcgugccaccacgcccag

SEQ ID NO: 538531 - RNA, 21 nt, Human
gcuaccgacagcccugcaagc

SEQ ID NO: 538532 - RNA, 21 nt, Human
ggaagaaaagagugauauuga

SEQ ID NO: 538533 - RNA, 22 nt, Human
ggaccgaagcuguucaaaagga

SEQ ID NO: 538534 - RNA, 18 nt, Human
ggacguugcagugagcug

SEQ ID NO: 538535 - RNA, 24 nt, Human
ggacguugcagugagcugagauug

SEQ ID NO: 538536 - RNA, 24 nt, Human
ggagaucugcccgccucgaccucc

SEQ ID NO: 538537 - RNA, 24 nt, Human
ggccagguggaucacaaggucagg

SEQ ID NO: 538538 - RNA, 19 nt, Human
ggcccacccacaggcggau

SEQ ID NO: 538539 - RNA, 19 nt, Human
ggcuccaacauaaaaugga

SEQ ID NO: 538540 - RNA, 20 nt, Human
ggcucuggguuaucaagagg

SEQ ID NO: 538541 - RNA, 22 nt, Human
gggguuucaccauguugcccag

SEQ ID NO: 538542 - RNA, 23 nt, Human
gggguuucaccauguugcccagg

SEQ ID NO: 538543 - RNA, 23 nt, Human
gguaugguggcucacgccuguaa

SEQ ID NO: 538544 - RNA, 20 nt, Human
ggucucgaacuccugagcuc

SEQ ID NO: 538545 - RNA, 24 nt, Human
gguggcucacgccuguaaucccag

SEQ ID NO: 538546 - RNA, 23 nt, Human
gguggucucgaacuccugagcuc

SEQ ID NO: 538547 - RNA, 31 nt, Human
gguuauuaccuuauuuuuaauaaacuuagaa

SEQ ID NO: 538548 - RNA, 22 nt, Human
guaaacaaaccugggaugccag

SEQ ID NO: 538549 - RNA, 18 nt, Human
gucacuuacauacuaccu

SEQ ID NO: 538550 - RNA, 21 nt, Human
gucucaaaaaaaaaaaaaaag

SEQ ID NO: 538551 - RNA, 19 nt, Human
gugcagugggcgaucuugg

SEQ ID NO: 538552 - RNA, 20 nt, Human
guggacguugcagugagcug

SEQ ID NO: 538553 - RNA, 24 nt, Human
gugggccggguaugguggcucacg

SEQ ID NO: 538554 - RNA, 21 nt, Human
guuaugucuaaguucugucuc

SEQ ID NO: 538555 - RNA, 22 nt, Human
uaaaacaaaaaccaaaucccug

SEQ ID NO: 538556 - RNA, 24 nt, Human
uaaaacaaaaaccaaaucccuguu

SEQ ID NO: 538557 - RNA, 24 nt, Human
uaaaauggaaaaaaguuuugguca

SEQ ID NO: 538558 - RNA, 19 nt, Human
uaaccaaaaauucauuugu

SEQ ID NO: 538559 - RNA, 19 nt, Human
uaacucgugaagcgggccu

SEQ ID NO: 538560 - RNA, 22 nt, Human
uaagauauauuucacaccaaaa

SEQ ID NO: 538561 - RNA, 23 nt, Human
uaauuuuuuguauuuuaguagag

SEQ ID NO: 538562 - RNA, 24 nt, Human
uaauuuuuuguauuuuaguagaga

SEQ ID NO: 538563 - RNA, 24 nt, Human
uacaggcgcgugccaccacgccca

SEQ ID NO: 538564 - RNA, 23 nt, Human
uacaggcgugagccaccgcgccc

SEQ ID NO: 538565 - RNA, 21 nt, Human
uacuuucucccaaucuucuug

SEQ ID NO: 538566 - RNA, 22 nt, Human
uagagaagggguuucaccaugu

SEQ ID NO: 538567 - RNA, 20 nt, Human
uagauacacaccauccuuuu

SEQ ID NO: 538568 - RNA, 25 nt, Human
uagccaucaacaacaaaaacaacaa

SEQ ID NO: 538569 - RNA, 19 nt, Human
uaggagaugacagcuccau

SEQ ID NO: 538570 - RNA, 26 nt, Human
uaguaacagaaagaccccuuccacag

SEQ ID NO: 538571 - RNA, 24 nt, Human
uaguagagaagggguuucaccaug

SEQ ID NO: 538572 - RNA, 19 nt, Human
uaguguacaguaauacccu

SEQ ID NO: 538573 - RNA, 21 nt, Human
uaucaccuuuuaagaccagca

SEQ ID NO: 538574 - RNA, 21 nt, Human
uaucuccaagucccacagcua

SEQ ID NO: 538575 - RNA, 19 nt, Human
ucaaaaaaaaaaaaaaagg

SEQ ID NO: 538576 - RNA, 20 nt, Human
ucaaaaaaaaaaaaaaaggu

SEQ ID NO: 538577 - RNA, 24 nt, Human
ucacaaggucaggauaucgagacc

SEQ ID NO: 538578 - RNA, 22 nt, Human
ucacaccaaaaucuguaucuug

SEQ ID NO: 538579 - RNA, 18 nt, Human
ucacugcaaccucugccg

SEQ ID NO: 538580 - RNA, 23 nt, Human
ucacugcaaccucugccgccagg

SEQ ID NO: 538581 - RNA, 24 nt, Human
ucacugcaaccucugccgccaggg

SEQ ID NO: 538582 - RNA, 18 nt, Human
ucagaaauaacuuuucau

SEQ ID NO: 538583 - RNA, 20 nt, Human
ucagccucccgaauagcugg

SEQ ID NO: 538584 - RNA, 19 nt, Human
uccagccugggugacaaga

SEQ ID NO: 538585 - RNA, 21 nt, Human
uccauucauguuacugccccu

SEQ ID NO: 538586 - RNA, 24 nt, Human
ucccaaagugcugggauuacaggc

SEQ ID NO: 538587 - RNA, 23 nt, Human
ucccacagcuacuuucucccaau

SEQ ID NO: 538588 - RNA, 24 nt, Human
ucccgaauagcugggauuacaggc

SEQ ID NO: 538589 - RNA, 23 nt, Human
uccgucucaaaaaaaaaaaaaaa

SEQ ID NO: 538590 - RNA, 20 nt, Human
uccuaguaacagaaagaccc

SEQ ID NO: 538591 - RNA, 19 nt, Human
ucuacaguaguguacagua

SEQ ID NO: 538592 - RNA, 24 nt, Human
ucucacucuguagcccaaccugga

SEQ ID NO: 538593 - RNA, 23 nt, Human
ucucgaacuccugagcucaggag

SEQ ID NO: 538594 - RNA, 21 nt, Human
ucucuacuaaaaauacaaaaa

SEQ ID NO: 538595 - RNA, 24 nt, Human
ucuguagcccaaccuggagugcag

SEQ ID NO: 538596 - RNA, 24 nt, Human
ugaaaaacuaucuuaagaaaccaa

SEQ ID NO: 538597 - RNA, 21 nt, Human
ugacuugaaucauaagauaua

SEQ ID NO: 538598 - RNA, 22 nt, Human
ugagcugagauugcgccacugc

SEQ ID NO: 538599 - RNA, 20 nt, Human
ugaggcaggagaaucgcuug

SEQ ID NO: 538600 - RNA, 23 nt, Human
ugaggcaggagaaucgcuugaac

SEQ ID NO: 538601 - RNA, 24 nt, Human
ugaggcaggagaaucgcuugaacu

SEQ ID NO: 538602 - RNA, 25 nt, Human
ugaggcaggagaaucgcuugaacuc

SEQ ID NO: 538603 - RNA, 21 nt, Human
ugcagugggcgaucuuggcuc

SEQ ID NO: 538604 - RNA, 24 nt, Human
ugcccaggguggucucgaacuccu

SEQ ID NO: 538605 - RNA, 28 nt, Human
ugcccaggguggucucgaacuccugagc

SEQ ID NO: 538606 - RNA, 21 nt, Human
ugcccgccucgaccucccaaa

SEQ ID NO: 538607 - RNA, 24 nt, Human
ugcugggauuacaggcgugagcca

SEQ ID NO: 538608 - RNA, 18 nt, Human
ugcugguguaaacaaacc

SEQ ID NO: 538609 - RNA, 18 nt, Human
ugcuucgucugccauuuc

SEQ ID NO: 538610 - RNA, 19 nt, Human
uggaggauauuuuuuuccu

SEQ ID NO: 538611 - RNA, 21 nt, Human
uggagugcagugggcgaucuu

SEQ ID NO: 538612 - RNA, 23 nt, Human
uggagugcagugggcgaucuugg

SEQ ID NO: 538613 - RNA, 22 nt, Human
uggcaaccccccaagucucagc

SEQ ID NO: 538614 - RNA, 21 nt, Human
uggcgagccggggaagaccgc

SEQ ID NO: 538615 - RNA, 24 nt, Human
uggcucacgccuguaaucccagca

SEQ ID NO: 538616 - RNA, 23 nt, Human
ugggaagggggaggcucuggguu

SEQ ID NO: 538617 - RNA, 25 nt, Human
ugggaggccaaggccagguggauca

SEQ ID NO: 538618 - RNA, 18 nt, Human
ugggauuacaggcgcgug

SEQ ID NO: 538619 - RNA, 21 nt, Human
ugggauuacaggcgcgugcca

SEQ ID NO: 538620 - RNA, 22 nt, Human
ugggauuacaggcgcgugccac

SEQ ID NO: 538621 - RNA, 24 nt, Human
ugggauuacaggcgcgugccacca

SEQ ID NO: 538622 - RNA, 18 nt, Human
ugggauuacaggcgugag

SEQ ID NO: 538623 - RNA, 19 nt, Human
ugggauuacaggcgugagc

SEQ ID NO: 538624 - RNA, 21 nt, Human
ugggauuacaggcgugagcca

SEQ ID NO: 538625 - RNA, 22 nt, Human
ugggauuacaggcgugagccac

SEQ ID NO: 538626 - RNA, 23 nt, Human
ugggauuacaggcgugagccacc

SEQ ID NO: 538627 - RNA, 24 nt, Human
ugggauuacaggcgugagccaccg

SEQ ID NO: 538628 - RNA, 24 nt, Human
ugguggcucacgccuguaauccca

SEQ ID NO: 538629 - RNA, 20 nt, Human
ugguggcugagaaccucacc

SEQ ID NO: 538630 - RNA, 20 nt, Human
ugucauaguggggaccgaag

SEQ ID NO: 538631 - RNA, 20 nt, Human
ugucugugguaaugcuggug

SEQ ID NO: 538632 - RNA, 21 nt, Human
uuaaacuuuuaauuauuaaaa

SEQ ID NO: 538633 - RNA, 22 nt, Human
uuaagacaagcaugggugguua

SEQ ID NO: 538634 - RNA, 24 nt, Human
uuacauacuaccuagugauuugga

SEQ ID NO: 538635 - RNA, 24 nt, Human
uuacuaaguauacagaaaucaugu

SEQ ID NO: 538636 - RNA, 19 nt, Human
uuacuaaucaagguauaag

SEQ ID NO: 538637 - RNA, 18 nt, Human
uuagccaucaacaacaaa

SEQ ID NO: 538638 - RNA, 27 nt, Human
uuagccaucaacaacaaaaacaacaaa

SEQ ID NO: 538639 - RNA, 18 nt, Human
uuagcugggcgugguggc

SEQ ID NO: 538640 - RNA, 20 nt, Human
uuagcugggcgugguggcgc

SEQ ID NO: 538641 - RNA, 18 nt, Human
uuaguagagaagggguuu

SEQ ID NO: 538642 - RNA, 22 nt, Human
uuaguagagaagggguuucacc

SEQ ID NO: 538643 - RNA, 24 nt, Human
uuaguagagaagggguuucaccau

SEQ ID NO: 538644 - RNA, 24 nt, Human
uucaaaacuaaaacaaaaaccaaa

SEQ ID NO: 538645 - RNA, 24 nt, Human
uucaauucuauuuaaauuaugacu

SEQ ID NO: 538646 - RNA, 23 nt, Human
uucacacaaccacgaaacggccc

SEQ ID NO: 538647 - RNA, 19 nt, Human
uugcagugagcugagauug

SEQ ID NO: 538648 - RNA, 20 nt, Human
uugcagugagcugagauugc

SEQ ID NO: 538649 - RNA, 22 nt, Human
uugcagugagcugagauugcgc

SEQ ID NO: 538650 - RNA, 23 nt, Human
uugcgccacugcacuccagccug

SEQ ID NO: 538651 - RNA, 26 nt, Human
uuuaagaccagcaucccuggcaaccc

SEQ ID NO: 538652 - RNA, 19 nt, Human
uuucaccauguugcccagg

SEQ ID NO: 538653 - RNA, 19 nt, Human
uuuccugcaaugaaugaga

SEQ ID NO: 538654 - RNA, 25 nt, Human
uuuuacauuuaugcauaauuuugcu

SEQ ID NO: 538655 - RNA, 19 nt, Human
uuuuagagaauucauuuaa

SEQ ID NO: 538656 - RNA, 20 nt, Human
uuuuuguauuuuaguagaga

SEQ ID NO: 538657 - RNA, 21 nt, Human
agaaacaaaggucaggaaaga

SEQ ID NO: 538658 - RNA, 20 nt, Human
agaaagaaacaaaggucagg

SEQ ID NO: 538659 - RNA, 19 nt, Human
agagggaacuggccgagug

SEQ ID NO: 538660 - RNA, 21 nt, Human
agaugaccucacugccccugg

SEQ ID NO: 538661 - RNA, 23 nt, Human
agcaaggcccacacugaugggag

SEQ ID NO: 538662 - RNA, 20 nt, Human
aggggcugcugccggagacc

SEQ ID NO: 538663 - RNA, 22 nt, Human
cagagcuggcugagugccccuc

SEQ ID NO: 538664 - RNA, 23 nt, Human
caggguuggcuucggaaguagaa

SEQ ID NO: 538665 - RNA, 19 nt, Human
caguaguucccugcggguc

SEQ ID NO: 538666 - RNA, 21 nt, Human
ccgcuuccgggguuuugauuu

SEQ ID NO: 538667 - RNA, 23 nt, Human
ccucacugccccuggcuuggggc

SEQ ID NO: 538668 - RNA, 19 nt, Human
cggaaguagaagcacuuuc

SEQ ID NO: 538669 - RNA, 23 nt, Human
cggagaaagccgugagcuggaag

SEQ ID NO: 538670 - RNA, 19 nt, Human
gacagggacaaggagugcg

SEQ ID NO: 538671 - RNA, 19 nt, Human
gccccuggcuuggggccuc

SEQ ID NO: 538672 - RNA, 19 nt, Human
gcuuggggccuccuuggcu

SEQ ID NO: 538673 - RNA, 21 nt, Human
ggccuuuggcgcuccuucuga

SEQ ID NO: 538674 - RNA, 20 nt, Human
gggacugaugguuccugaac

SEQ ID NO: 538675 - RNA, 22 nt, Human
uaaaagccacauuuuguugaga

SEQ ID NO: 538676 - RNA, 24 nt, Human
uaaaccuccauaagaaaacuaaag

SEQ ID NO: 538677 - RNA, 20 nt, Human
uaagaaaacuaaagauggca

SEQ ID NO: 538678 - RNA, 22 nt, Human
uaccaccuuuauuacaagggga

SEQ ID NO: 538679 - RNA, 18 nt, Human
uagaagcacuuuccaagg

SEQ ID NO: 538680 - RNA, 23 nt, Human
uagaagcacuuuccaaggagccu

SEQ ID NO: 538681 - RNA, 20 nt, Human
uagaucacugacaggcuaaa

SEQ ID NO: 538682 - RNA, 20 nt, Human
ucaaaguuucaaucuaaaac

SEQ ID NO: 538683 - RNA, 21 nt, Human
ucuccaugcgagacagggacu

SEQ ID NO: 538684 - RNA, 20 nt, Human
ugagcuggaaggggcugcug

SEQ ID NO: 538685 - RNA, 20 nt, Human
ugagugccccucaggguugg

SEQ ID NO: 538686 - RNA, 24 nt, Human
ugagugccccucaggguuggcuuc

SEQ ID NO: 538687 - RNA, 18 nt, Human
ugaugaccuuggagacua

SEQ ID NO: 538688 - RNA, 19 nt, Human
ugcuagaugaccucacugc

SEQ ID NO: 538689 - RNA, 22 nt, Human
ugcuauuucuuugaucuccaug

SEQ ID NO: 538690 - RNA, 21 nt, Human
uggcuuggggccuccuuggcu

SEQ ID NO: 538691 - RNA, 22 nt, Human
uggcuuucuucuaaccgcuucc

SEQ ID NO: 538692 - RNA, 20 nt, Human
ugggaguggguggggugaug

SEQ ID NO: 538693 - RNA, 22 nt, Human
uggggugaugaccuuggagacu

SEQ ID NO: 538694 - RNA, 19 nt, Human
uucccugcggguccugcuu

SEQ ID NO: 538695 - RNA, 23 nt, Human
uuuggccuuuggcgcuccuucug

SEQ ID NO: 538696 - RNA, 21 nt, Human
uuuuuuuuuuuuuuuuuuaag

SEQ ID NO: 538697 - RNA, 24 nt, Human
aaaaguaucuuaacagcauuaaaa

SEQ ID NO: 538698 - RNA, 24 nt, Human
aaaaugaaacguuuugcuucuccu

SEQ ID NO: 538699 - RNA, 22 nt, Human
aaaaugaugcacaccagcuucu

SEQ ID NO: 538700 - RNA, 24 nt, Human
aaacugcuaaugccgacaguuucg

SEQ ID NO: 538701 - RNA, 24 nt, Human
aaagaagaccaccacaaacgccau

SEQ ID NO: 538702 - RNA, 21 nt, Human
aaaugaugcacaccagcuucu

SEQ ID NO: 538703 - RNA, 20 nt, Human
aacacacucagucacugcuu

SEQ ID NO: 538704 - RNA, 19 nt, Human
aagaaccaauuaggaaaaa

SEQ ID NO: 538705 - RNA, 18 nt, Human
aagaagaccaccacaaac

SEQ ID NO: 538706 - RNA, 21 nt, Human
aagcugcuaagcuagcacuug

SEQ ID NO: 538707 - RNA, 22 nt, Human
acaaaauauccccaacuuauaa

SEQ ID NO: 538708 - RNA, 19 nt, Human
acaacaacaaaaaaaugcc

SEQ ID NO: 538709 - RNA, 22 nt, Human
accccacaauucaaacucucug

SEQ ID NO: 538710 - RNA, 23 nt, Human
accuuggaaaaugaugcacacca

SEQ ID NO: 538711 - RNA, 21 nt, Human
acucagucacucucggaguug

SEQ ID NO: 538712 - RNA, 19 nt, Human
acuuauaaaaacacaggaa

SEQ ID NO: 538713 - RNA, 19 nt, Human
acuuuacuguccccuaagc

SEQ ID NO: 538714 - RNA, 24 nt, Human
agaaauggguuccuaaagcuugag

SEQ ID NO: 538715 - RNA, 21 nt, Human
agaugcuggagagcugcugcu

SEQ ID NO: 538716 - RNA, 19 nt, Human
agcuucugggacuucaccc

SEQ ID NO: 538717 - RNA, 25 nt, Human
aggaaaaaugauauauuugcaaaaa

SEQ ID NO: 538718 - RNA, 26 nt, Human
aggaaaaaugauauauuugcaaaaaa

SEQ ID NO: 538719 - RNA, 22 nt, Human
aggaauugaaguuagggugcuu

SEQ ID NO: 538720 - RNA, 22 nt, Human
aggggacauauggcaccaggac

SEQ ID NO: 538721 - RNA, 22 nt, Human
auccccaacuuauaaaaacaca

SEQ ID NO: 538722 - RNA, 23 nt, Human
caaaagacacugcacucagccac

SEQ ID NO: 538723 - RNA, 18 nt, Human
caacaaaauauccccaac

SEQ ID NO: 538724 - RNA, 26 nt, Human
caaccacuuuacuguccccuaagcuc

SEQ ID NO: 538725 - RNA, 22 nt, Human
caacuuauaaaaacacaggaac

SEQ ID NO: 538726 - RNA, 24 nt, Human
caaggcugacaauauaaauucucc

SEQ ID NO: 538727 - RNA, 18 nt, Human
cacaagaaagaaugugau

SEQ ID NO: 538728 - RNA, 30 nt, Human
cacacucagucacugcuuuaaauauaccaa

SEQ ID NO: 538729 - RNA, 19 nt, Human
cacccccucuguucaucac

SEQ ID NO: 538730 - RNA, 25 nt, Human
cacgucaagaaccaauuaggaaaaa

SEQ ID NO: 538731 - RNA, 19 nt, Human
caugucaacuuuucuccuu

SEQ ID NO: 538732 - RNA, 23 nt, Human
cauuuacauguaucauauacaua

SEQ ID NO: 538733 - RNA, 19 nt, Human
ccaccacaaacgccaucgu

SEQ ID NO: 538734 - RNA, 23 nt, Human
ccacccccucuguucaucaccuc

SEQ ID NO: 538735 - RNA, 25 nt, Human
ccucaaguguaacuaccaaccauug

SEQ ID NO: 538736 - RNA, 22 nt, Human
cgcaaaacuaagacccugccaa

SEQ ID NO: 538737 - RNA, 25 nt, Human
cgcaaaacuaagacccugccaauca

SEQ ID NO: 538738 - RNA, 21 nt, Human
cgccagcuuacccaaaacugc

SEQ ID NO: 538739 - RNA, 23 nt, Human
cguaaaacaacaaaauaucccca

SEQ ID NO: 538740 - RNA, 21 nt, Human
cucagccacucacucaaacac

SEQ ID NO: 538741 - RNA, 23 nt, Human
cucccaccccacaauucaaacuc

SEQ ID NO: 538742 - RNA, 22 nt, Human
cugcaauagaacugaaaugauu

SEQ ID NO: 538743 - RNA, 18 nt, Human
cugggacuucacccaggc

SEQ ID NO: 538744 - RNA, 18 nt, Human
gaaucaaauggcuguuuc

SEQ ID NO: 538745 - RNA, 24 nt, Human
gagaugcuggagagcugcugcuug

SEQ ID NO: 538746 - RNA, 21 nt, Human
gaggugguuaggccuuuaccu

SEQ ID NO: 538747 - RNA, 22 nt, Human
gcucugccaccuuggaaaauga

SEQ ID NO: 538748 - RNA, 21 nt, Human
gcuucaauuuggucuaauuac

SEQ ID NO: 538749 - RNA, 23 nt, Human
guaccgccagcuuacccaaaacu

SEQ ID NO: 538750 - RNA, 19 nt, Human
gugaauauaacucaguuau

SEQ ID NO: 538751 - RNA, 23 nt, Human
guugccguaaaacaacaaaauau

SEQ ID NO: 538752 - RNA, 21 nt, Human
uaaaacauucacugugugugc

SEQ ID NO: 538753 - RNA, 22 nt, Human
uaacaacaacaaaaaaaugccu

SEQ ID NO: 538754 - RNA, 19 nt, Human
uaauuaacaacaacaaaaa

SEQ ID NO: 538755 - RNA, 19 nt, Human
uaauugucaaaauauucuu

SEQ ID NO: 538756 - RNA, 19 nt, Human
uacauuuacauguaucaua

SEQ ID NO: 538757 - RNA, 22 nt, Human
uacucuuguuccuacaguuuua

SEQ ID NO: 538758 - RNA, 21 nt, Human
uaggccuuuaccuaacagcuc

SEQ ID NO: 538759 - RNA, 27 nt, Human
uauguuuguauaacuuaaaacauucac

SEQ ID NO: 538760 - RNA, 24 nt, Human
ucaaaugguuaaggcccaaaaaug

SEQ ID NO: 538761 - RNA, 20 nt, Human
ucacucaaacacacucaguc

SEQ ID NO: 538762 - RNA, 22 nt, Human
ucacugugugugcaugugugca

SEQ ID NO: 538763 - RNA, 20 nt, Human
ucacuugucuacaagguuua

SEQ ID NO: 538764 - RNA, 23 nt, Human
ucacuugucuacaagguuuagau

SEQ ID NO: 538765 - RNA, 21 nt, Human
ucagaggucccagacauguca

SEQ ID NO: 538766 - RNA, 23 nt, Human
ucaggaggagaggacuaaccaca

SEQ ID NO: 538767 - RNA, 22 nt, Human
ucauauacauauuuuaaauccu

SEQ ID NO: 538768 - RNA, 18 nt, Human
ucaugugccacgcucagu

SEQ ID NO: 538769 - RNA, 21 nt, Human
uccacacaaauuacuguuccu

SEQ ID NO: 538770 - RNA, 21 nt, Human
uccacugcacgucaagaacca

SEQ ID NO: 538771 - RNA, 18 nt, Human
uccguccguaguuagaac

SEQ ID NO: 538772 - RNA, 24 nt, Human
ucucuuaccaguaaagcucagagg

SEQ ID NO: 538773 - RNA, 24 nt, Human
ugagauauaagagacugcagggag

SEQ ID NO: 538774 - RNA, 19 nt, Human
ugaggaacagguuuccagu

SEQ ID NO: 538775 - RNA, 21 nt, Human
ugcaaagguaaaauacguggu

SEQ ID NO: 538776 - RNA, 24 nt, Human
uggauuuauuucuuucuaaaguuu

SEQ ID NO: 538777 - RNA, 24 nt, Human
ugguucugaaucucaggaggagag

SEQ ID NO: 538778 - RNA, 21 nt, Human
uguacauuuacauguaucaua

SEQ ID NO: 538779 - RNA, 28 nt, Human
ugucacuaauuacuuucacaauuugcag

SEQ ID NO: 538780 - RNA, 19 nt, Human
ugugcaagcauguguacac

SEQ ID NO: 538781 - RNA, 19 nt, Human
ugugcauauauauacucuc

SEQ ID NO: 538782 - RNA, 24 nt, Human
ugugugcaagcauguguacacaug

SEQ ID NO: 538783 - RNA, 18 nt, Human
ugugugugcaugugugca

SEQ ID NO: 538784 - RNA, 27 nt, Human
uguuucuucacuuguacuccucucuca

SEQ ID NO: 538785 - RNA, 23 nt, Human
uuuacuguccccuaagcuucaau

SEQ ID NO: 538786 - RNA, 21 nt, Human
uuucaaaugguuaaggcccaa

SEQ ID NO: 538787 - RNA, 18 nt, Human
uuuuuuuuuuuuuuuuug

SEQ ID NO: 538788 - RNA, 22 nt, Human
aaaaacucuuaaccgaaaacuc

SEQ ID NO: 538789 - RNA, 19 nt, Human
aaaaauugaugauaaauug

SEQ ID NO: 538790 - RNA, 19 nt, Human
aaaagcagccaaaaugacc

SEQ ID NO: 538791 - RNA, 19 nt, Human
aaaggggaggaaggggaag

SEQ ID NO: 538792 - RNA, 20 nt, Human
aagagaaaggggaggaaggg

SEQ ID NO: 538793 - RNA, 22 nt, Human
aagcagccaaaaugaccaucug

SEQ ID NO: 538794 - RNA, 19 nt, Human
aauaccuucauaauauccu

SEQ ID NO: 538795 - RNA, 22 nt, Human
acacaacauucucuuaaccucu

SEQ ID NO: 538796 - RNA, 19 nt, Human
acagcuagacauaaccaaa

SEQ ID NO: 538797 - RNA, 21 nt, Human
acuaagaaaagugacaaccag

SEQ ID NO: 538798 - RNA, 22 nt, Human
acucucaagagaaagagaaagg

SEQ ID NO: 538799 - RNA, 18 nt, Human
agaaaggggaggaagggg

SEQ ID NO: 538800 - RNA, 18 nt, Human
agacaaaccacacuggcu

SEQ ID NO: 538801 - RNA, 19 nt, Human
agacaaaccacacuggcuc

SEQ ID NO: 538802 - RNA, 20 nt, Human
agagaaaggggaggaagggg

SEQ ID NO: 538803 - RNA, 24 nt, Human
aggaguugcuaauuaggaauucau

SEQ ID NO: 538804 - RNA, 18 nt, Human
aggggaggaaggggaagg

SEQ ID NO: 538805 - RNA, 19 nt, Human
aggggaggaaggggaaggg

SEQ ID NO: 538806 - RNA, 20 nt, Human
agucuaccaccuccugcuuc

SEQ ID NO: 538807 - RNA, 18 nt, Human
agugacaaccagaauccc

SEQ ID NO: 538808 - RNA, 22 nt, Human
caaaagcagccaaaaugaccau

SEQ ID NO: 538809 - RNA, 19 nt, Human
caaacucucaagagaaaga

SEQ ID NO: 538810 - RNA, 22 nt, Human
caaccagaaucccuagugaauu

SEQ ID NO: 538811 - RNA, 19 nt, Human
cacagcuagacauaaccaa

SEQ ID NO: 538812 - RNA, 19 nt, Human
cauuaugugacagcaaaag

SEQ ID NO: 538813 - RNA, 25 nt, Human
cucaagagaaagagaaaggggagga

SEQ ID NO: 538814 - RNA, 18 nt, Human
gaaauacacaacauucuc

SEQ ID NO: 538815 - RNA, 21 nt, Human
gaauucauuauuuuuccccac

SEQ ID NO: 538816 - RNA, 22 nt, Human
gaguugcuaauuaggaauucau

SEQ ID NO: 538817 - RNA, 22 nt, Human
gcagccaaaaugaccaucugaa

SEQ ID NO: 538818 - RNA, 19 nt, Human
ggaagagaaaacauguccu

SEQ ID NO: 538819 - RNA, 22 nt, Human
uaaaauaaucaaaagcagccaa

SEQ ID NO: 538820 - RNA, 19 nt, Human
uaacuaagaaaagugacaa

SEQ ID NO: 538821 - RNA, 21 nt, Human
uaagcuaaggaagagaaaaca

SEQ ID NO: 538822 - RNA, 21 nt, Human
uaccaccuccugcuuccccca

SEQ ID NO: 538823 - RNA, 25 nt, Human
ucaaaaaacucuuaaccgaaaacuc

SEQ ID NO: 538824 - RNA, 19 nt, Human
ucaauuagacaaaccacac

SEQ ID NO: 538825 - RNA, 19 nt, Human
ucagguacuacacauugcu

SEQ ID NO: 538826 - RNA, 19 nt, Human
uccacaguggagaagaaaa

SEQ ID NO: 538827 - RNA, 19 nt, Human
ucccccacaacacuuucua

SEQ ID NO: 538828 - RNA, 19 nt, Human
ucucaagagaaagagaaag

SEQ ID NO: 538829 - RNA, 22 nt, Human
ucuugcgcucaaacucucaaga

SEQ ID NO: 538830 - RNA, 22 nt, Human
ugaaagaaguucgcagaaauac

SEQ ID NO: 538831 - RNA, 18 nt, Human
uggcugccuuaauaacua

SEQ ID NO: 538832 - RNA, 21 nt, Human
ugggagagauuauuguaaaau

SEQ ID NO: 538833 - RNA, 27 nt, Human
uuagucuaccaccuccugcuuccccca

SEQ ID NO: 538834 - RNA, 21 nt, Human
uucagguacuacacauugcug

SEQ ID NO: 538835 - RNA, 18 nt, Human
uucgcagaaauacacaac

SEQ ID NO: 538836 - RNA, 23 nt, Human
uuuagucuaccaccuccugcuuc

SEQ ID NO: 538837 - RNA, 21 nt, Human
uuucagguacuacacauugcu

SEQ ID NO: 538838 - RNA, 22 nt, Human
uuuuuuuuuuuuuuuuuuuggg

SEQ ID NO: 538839 - RNA, 21 nt, Human
aaaacaaaagaagggguuaga

SEQ ID NO: 538840 - RNA, 22 nt, Human
aaaagaaaaaaaaaaaaaaaag

SEQ ID NO: 538841 - RNA, 28 nt, Human
aaaagaaagaaaagaagcaagcaaagaa

SEQ ID NO: 538842 - RNA, 18 nt, Human
aaaagaagcaagcaaaga

SEQ ID NO: 538843 - RNA, 21 nt, Human
aaaauaguuuuauacaaaaca

SEQ ID NO: 538844 - RNA, 18 nt, Human
aaaauccacaaugcaaga

SEQ ID NO: 538845 - RNA, 20 nt, Human
aaaccaaacaaaacgaacga

SEQ ID NO: 538846 - RNA, 22 nt, Human
aaagaaaaccaaacaaaacgaa

SEQ ID NO: 538847 - RNA, 23 nt, Human
aaagaaaagaagcaagcaaagaa

SEQ ID NO: 538848 - RNA, 19 nt, Human
aacacaugcuuacugcauu

SEQ ID NO: 538849 - RNA, 23 nt, Human
aagaaaaccaaacaaaacgaacg

SEQ ID NO: 538850 - RNA, 21 nt, Human
aagaaaagaagcaagcaaaga

SEQ ID NO: 538851 - RNA, 24 nt, Human
aagaaagaaaagaagcaagcaaag

SEQ ID NO: 538852 - RNA, 28 nt, Human
aagaaagaaaagaagcaagcaaagaaaa

SEQ ID NO: 538853 - RNA, 20 nt, Human
aagcuaaauaacacuaaaau

SEQ ID NO: 538854 - RNA, 27 nt, Human
aauugccuucuacacauuaucuuuagg

SEQ ID NO: 538855 - RNA, 19 nt, Human
acgccaaagaaaacaacua

SEQ ID NO: 538856 - RNA, 25 nt, Human
acgccaaagaaaacaacuagagaau

SEQ ID NO: 538857 - RNA, 19 nt, Human
acuagcuugcuugggcuag

SEQ ID NO: 538858 - RNA, 21 nt, Human
agaaaaaaaaaaaaaaaagga

SEQ ID NO: 538859 - RNA, 18 nt, Human
agaaaacaaaagaagggg

SEQ ID NO: 538860 - RNA, 23 nt, Human
agaaaacaaaagaagggguuaga

SEQ ID NO: 538861 - RNA, 24 nt, Human
agaaaacaacuagagaaucucaac

SEQ ID NO: 538862 - RNA, 21 nt, Human
agaaagaaaagaagcaagcaa

SEQ ID NO: 538863 - RNA, 18 nt, Human
agcaagcaaagaaaacua

SEQ ID NO: 538864 - RNA, 21 nt, Human
aggaaaaaagaaagaaaagaa

SEQ ID NO: 538865 - RNA, 22 nt, Human
aggaaggaaaaaagaaagaaaa

SEQ ID NO: 538866 - RNA, 20 nt, Human
caaaaacacucuagcugugc

SEQ ID NO: 538867 - RNA, 20 nt, Human
caaaaacacucuagcugugc

SEQ ID NO: 538868 - RNA, 22 nt, Human
caacuagguaaaaagaaaacca

SEQ ID NO: 538869 - RNA, 23 nt, Human
caacuagguaaaaagaaaaccaa

SEQ ID NO: 538870 - RNA, 24 nt, Human
caacuagguaaaaagaaaaccaaa

SEQ ID NO: 538871 - RNA, 30 nt, Human
cacuauagcaacuagguaaaaagaaaacca

SEQ ID NO: 538872 - RNA, 18 nt, Human
caguauuuuuaugucuau

SEQ ID NO: 538873 - RNA, 24 nt, Human
ccagaaccucuuucuguaacacau

SEQ ID NO: 538874 - RNA, 22 nt, Human
cgaacgagcuuuacugaaaucu

SEQ ID NO: 538875 - RNA, 25 nt, Human
cgccaaagaaaacaacuagagaauc

SEQ ID NO: 538876 - RNA, 19 nt, Human
cuuccauuucugccggucc

SEQ ID NO: 538877 - RNA, 18 nt, Human
gacaaaaauagaaaucug

SEQ ID NO: 538878 - RNA, 19 nt, Human
gcagugcaauagguuugau

SEQ ID NO: 538879 - RNA, 23 nt, Human
gguaaaaagaaaaccaaacaaaa

SEQ ID NO: 538880 - RNA, 22 nt, Human
guuaaaaaagaaaaaaaaaaaa

SEQ ID NO: 538881 - RNA, 24 nt, Human
uaaaauccacaaugcaagagcgug

SEQ ID NO: 538882 - RNA, 21 nt, Human
uaaaauucuggaaucauacau

SEQ ID NO: 538883 - RNA, 24 nt, Human
uaacacuaaaauaaaaggaaauau

SEQ ID NO: 538884 - RNA, 26 nt, Human
uagcaacuagguaaaaagaaaaccaa

SEQ ID NO: 538885 - RNA, 20 nt, Human
uaugugcugucacauacagu

SEQ ID NO: 538886 - RNA, 27 nt, Human
ucucaacauguuaaaaaagaaaaaaaa

SEQ ID NO: 538887 - RNA, 19 nt, Human
ugaaaggaaccaugaaguu

SEQ ID NO: 538888 - RNA, 25 nt, Human
ugacaaaaauagaaaucuguaauaa

SEQ ID NO: 538889 - RNA, 23 nt, Human
uggauacuuccauuucugccggu

SEQ ID NO: 538890 - RNA, 24 nt, Human
uggcaaaaaagaucuugaaaggaa

SEQ ID NO: 538891 - RNA, 18 nt, Human
ugggaaaacuacucuaug

SEQ ID NO: 538892 - RNA, 26 nt, Human
ugucucacacgcaccuuucucuccca

SEQ ID NO: 538893 - RNA, 23 nt, Human
uuacaaaaacacucuagcugugc

SEQ ID NO: 538894 - RNA, 18 nt, Human
uucuguauauuacaugac

SEQ ID NO: 538895 - RNA, 22 nt, Human
uuuacugaaaucuauuaaucca

SEQ ID NO: 538896 - RNA, 20 nt, Human
uuuagcacauauuuagcauu

SEQ ID NO: 538897 - RNA, 24 nt, Human
uuugacaaaaauagaaaucuguaa

SEQ ID NO: 538898 - RNA, 21 nt, Human
uuuuacaauuuguauagucac

SEQ ID NO: 538899 - RNA, 19 nt, Human
uuuuaugucuauguauauu

SEQ ID NO: 538900 - RNA, 20 nt, Human
aaaauugcacauucuccucc

SEQ ID NO: 538901 - RNA, 20 nt, Human
aaacaacagcaaaaaucauc

SEQ ID NO: 538902 - RNA, 23 nt, Human
aacacaaaccacgcguggcuuug

SEQ ID NO: 538903 - RNA, 24 nt, Human
aacuaguauggaauucacagcccu

SEQ ID NO: 538904 - RNA, 22 nt, Human
aagacgcgggcagagucagagg

SEQ ID NO: 538905 - RNA, 23 nt, Human
aagcaagagguugaaaaagggac

SEQ ID NO: 538906 - RNA, 19 nt, Human
acaauggugugaaaugguu

SEQ ID NO: 538907 - RNA, 20 nt, Human
acacugauuggaaaucugca

SEQ ID NO: 538908 - RNA, 21 nt, Human
agacaacaaaucugggaugga

SEQ ID NO: 538909 - RNA, 21 nt, Human
aggaagcugguugugccagag

SEQ ID NO: 538910 - RNA, 19 nt, Human
aggcaggcuugcagcucgg

SEQ ID NO: 538911 - RNA, 18 nt, Human
aucagacacagagugacu

SEQ ID NO: 538912 - RNA, 21 nt, Human
caacagcaaaaaucaucaaca

SEQ ID NO: 538913 - RNA, 23 nt, Human
caaguccaaaacaacaguuaagg

SEQ ID NO: 538914 - RNA, 23 nt, Human
caaguccaaaacaacaguuaagg

SEQ ID NO: 538915 - RNA, 20 nt, Human
caccccucaggcccuaguaa

SEQ ID NO: 538916 - RNA, 23 nt, Human
caccuuugaccuuaaaguuugga

SEQ ID NO: 538917 - RNA, 23 nt, Human
cacuccauuuucaaggcuagaga

SEQ ID NO: 538918 - RNA, 23 nt, Human
cacucggcacauucaugaaacaa

SEQ ID NO: 538919 - RNA, 21 nt, Human
cagagugacugagccaaucaa

SEQ ID NO: 538920 - RNA, 23 nt, Human
cagugaacagagggauucuuugu

SEQ ID NO: 538921 - RNA, 24 nt, Human
cauaaccccaucauaagucaaaga

SEQ ID NO: 538922 - RNA, 19 nt, Human
ccaccacagugaacagagg

SEQ ID NO: 538923 - RNA, 21 nt, Human
ccacgcguggcuuugccuccu

SEQ ID NO: 538924 - RNA, 22 nt, Human
ccaggaagcugguugugccaga

SEQ ID NO: 538925 - RNA, 18 nt, Human
ccaggagucaaaguuaau

SEQ ID NO: 538926 - RNA, 22 nt, Human
ccccauaucagaguauaaagca

SEQ ID NO: 538927 - RNA, 21 nt, Human
ccccucaggcccuaguaaucc

SEQ ID NO: 538928 - RNA, 18 nt, Human
ccgcucuccagccccggc

SEQ ID NO: 538929 - RNA, 21 nt, Human
ccuuccuucucaccuuugacc

SEQ ID NO: 538930 - RNA, 24 nt, Human
cggcacauucaugaaacaacagca

SEQ ID NO: 538931 - RNA, 24 nt, Human
cgucagaauguucaagauaacuga

SEQ ID NO: 538932 - RNA, 19 nt, Human
cuagugcagccuucacugc

SEQ ID NO: 538933 - RNA, 20 nt, Human
cucucuguaaacucauuacc

SEQ ID NO: 538934 - RNA, 23 nt, Human
cugcugagguaacuccaggaagc

SEQ ID NO: 538935 - RNA, 24 nt, Human
cuuccgagauccgcaguggucgcc

SEQ ID NO: 538936 - RNA, 22 nt, Human
gaacauaccaccaacacaaacc

SEQ ID NO: 538937 - RNA, 23 nt, Human
gaacggacaccccucaggcccua

SEQ ID NO: 538938 - RNA, 24 nt, Human
gaagauauauauacucuacauuuu

SEQ ID NO: 538939 - RNA, 19 nt, Human
ggcccuaguaauccauuca

SEQ ID NO: 538940 - RNA, 23 nt, Human
gguccuuuacacgucagaauguu

SEQ ID NO: 538941 - RNA, 23 nt, Human
gugaucuuucccaccacagugaa

SEQ ID NO: 538942 - RNA, 26 nt, Human
uaaaccucaauaggccaagacccguc

SEQ ID NO: 538943 - RNA, 22 nt, Human
uaaaugauguaccuuauggucc

SEQ ID NO: 538944 - RNA, 18 nt, Human
uaacugauguaccuuaug

SEQ ID NO: 538945 - RNA, 26 nt, Human
uagaagaaaaggucuuucccuuuucu

SEQ ID NO: 538946 - RNA, 23 nt, Human
uaucagaguauaaagcaagaggu

SEQ ID NO: 538947 - RNA, 20 nt, Human
uauggaauucacagcccuga

SEQ ID NO: 538948 - RNA, 22 nt, Human
uaugguccuuuacacgucagaa

SEQ ID NO: 538949 - RNA, 24 nt, Human
uauucaacacucgauuauaaaaua

SEQ ID NO: 538950 - RNA, 18 nt, Human
ucaaagaugacccacucu

SEQ ID NO: 538951 - RNA, 21 nt, Human
ucaccuuugaccuuaaaguuu

SEQ ID NO: 538952 - RNA, 22 nt, Human
ucacuccauuuucaaggcuaga

SEQ ID NO: 538953 - RNA, 18 nt, Human
ucaguaaaugagcaauac

SEQ ID NO: 538954 - RNA, 21 nt, Human
ucccaccacagugaacagagg

SEQ ID NO: 538955 - RNA, 18 nt, Human
uccuugaaaggaagacuc

SEQ ID NO: 538956 - RNA, 24 nt, Human
ucguauuuucccuuuuugucagua

SEQ ID NO: 538957 - RNA, 22 nt, Human
ucuaaaaauagacuaagcagau

SEQ ID NO: 538958 - RNA, 24 nt, Human
ugaaacaacagcaaaaaucaucaa

SEQ ID NO: 538959 - RNA, 25 nt, Human
ugaaacaacagcaaaaaucaucaac

SEQ ID NO: 538960 - RNA, 24 nt, Human
ugaaaggaagacucaauacuucca

SEQ ID NO: 538961 - RNA, 23 nt, Human
ugacugagccaaucaacaggcau

SEQ ID NO: 538962 - RNA, 18 nt, Human
ugagccaaucaacaggca

SEQ ID NO: 538963 - RNA, 21 nt, Human
ugagugauuuacaucauuucc

SEQ ID NO: 538964 - RNA, 24 nt, Human
ugcauuugacuuccaauggguuag

SEQ ID NO: 538965 - RNA, 20 nt, Human
uggacgaggcuaagcugugg

SEQ ID NO: 538966 - RNA, 22 nt, Human
uggacgaggcuaagcuguggug

SEQ ID NO: 538967 - RNA, 27 nt, Human
uuacaucauuucuuccuuccgagaucc

SEQ ID NO: 538968 - RNA, 19 nt, Human
uucacuccauuuucaaggc

SEQ ID NO: 538969 - RNA, 23 nt, Human
uucacuccauuuucaaggcuaga

SEQ ID NO: 538970 - RNA, 18 nt, Human
uucccagacaacaaaucu

SEQ ID NO: 538971 - RNA, 20 nt, Human
uucccagacaacaaaucugg

SEQ ID NO: 538972 - RNA, 20 nt, Human
uugacacuuacuagaagaaa

SEQ ID NO: 538973 - RNA, 20 nt, Human
uuuacugggacauaacccca

SEQ ID NO: 538974 - RNA, 22 nt, Human
uuucccuuuuugucaguaaaug

SEQ ID NO: 538975 - RNA, 21 nt, Human
uuuuuuuuuuuuuuuuucauu

SEQ ID NO: 538976 - RNA, 25 nt, Human
aaaaauacaaaaaauuagcugugcg

SEQ ID NO: 538977 - RNA, 22 nt, Human
aaaacaaaaacaaaaacaaaaa

SEQ ID NO: 538978 - RNA, 24 nt, Human
aaaacaaaaacaaaaacaaaaaaa

SEQ ID NO: 538979 - RNA, 24 nt, Human
aaacaaaaacaaaaaaagauguaa

SEQ ID NO: 538980 - RNA, 20 nt, Human
aaauguaauugauuuaauua

SEQ ID NO: 538981 - RNA, 24 nt, Human
aacaaaaacaaaaacaaaaaaaga

SEQ ID NO: 538982 - RNA, 22 nt, Human
aacaaauuagucacaaucaacu

SEQ ID NO: 538983 - RNA, 19 nt, Human
aacacggugaaaucccguc

SEQ ID NO: 538984 - RNA, 20 nt, Human
aacacggugaaaucccgucu

SEQ ID NO: 538985 - RNA, 21 nt, Human
aacacggugaaaucccgucuc

SEQ ID NO: 538986 - RNA, 24 nt, Human
aacagagugagacucugucucaaa

SEQ ID NO: 538987 - RNA, 24 nt, Human
aacauccauuucauucuccugggc

SEQ ID NO: 538988 - RNA, 20 nt, Human
aaccaugaucacuuaauuuu

SEQ ID NO: 538989 - RNA, 22 nt, Human
aagaaccuuuuagugucaggcg

SEQ ID NO: 538990 - RNA, 24 nt, Human
aagaagauaacuugagaagccagg

SEQ ID NO: 538991 - RNA, 24 nt, Human
acaaaaacaaaaaaagauguaaaa

SEQ ID NO: 538992 - RNA, 26 nt, Human
acaagaaaaauacaacugcuuuuuca

SEQ ID NO: 538993 - RNA, 21 nt, Human
acagagugagacucugucuca

SEQ ID NO: 538994 - RNA, 24 nt, Human
acagagugagacucugucucaaaa

SEQ ID NO: 538995 - RNA, 18 nt, Human
accacaagaaaaauacaa

SEQ ID NO: 538996 - RNA, 23 nt, Human
accaccacccagcuuucugaaac

SEQ ID NO: 538997 - RNA, 22 nt, Human
accaggacucaauuuaauuucc

SEQ ID NO: 538998 - RNA, 19 nt, Human
acccagcuuucugaaacag

SEQ ID NO: 538999 - RNA, 18 nt, Human
acgccacugcauuccagc

SEQ ID NO: 539000 - RNA, 23 nt, Human
acgccacugcauuccagccuggc

SEQ ID NO: 539001 - RNA, 23 nt, Human
acugcauuccagccuggcaacag

SEQ ID NO: 539002 - RNA, 23 nt, Human
acugcauuccagccuggcaacag

SEQ ID NO: 539003 - RNA, 22 nt, Human
agaaucgcuugaaacugggagg

SEQ ID NO: 539004 - RNA, 24 nt, Human
agacgggcagaucaugaggucagg

SEQ ID NO: 539005 - RNA, 21 nt, Human
agagcgccuccaccaccaccc

SEQ ID NO: 539006 - RNA, 24 nt, Human
agagcgccuccaccaccacccagc

SEQ ID NO: 539007 - RNA, 24 nt, Human
agcacuuugggaggccgagacggg

SEQ ID NO: 539008 - RNA, 21 nt, Human
agccuggcaacagagugagac

SEQ ID NO: 539009 - RNA, 23 nt, Human
agccuggcaacagagugagacuc

SEQ ID NO: 539010 - RNA, 21 nt, Human
agcuauugaugucugcagcag

SEQ ID NO: 539011 - RNA, 20 nt, Human
aggcaggagaaucgcuugaa

SEQ ID NO: 539012 - RNA, 24 nt, Human
aggcaggagaaucgcuugaaacug

SEQ ID NO: 539013 - RNA, 21 nt, Human
aggccgagacgggcagaucau

SEQ ID NO: 539014 - RNA, 23 nt, Human
aggccgagacgggcagaucauga

SEQ ID NO: 539015 - RNA, 25 nt, Human
aggcggagguugcagugacaacggu

SEQ ID NO: 539016 - RNA, 21 nt, Human
aggcggagguugcagugagcc

SEQ ID NO: 539017 - RNA, 24 nt, Human
aggcggagguugcagugagccgag

SEQ ID NO: 539018 - RNA, 20 nt, Human
aggcugaggcaggagaaucg

SEQ ID NO: 539019 - RNA, 24 nt, Human
aggcugaggcaggagaaucgcuug

SEQ ID NO: 539020 - RNA, 19 nt, Human
agugaaaagcacgaaaauc

SEQ ID NO: 539021 - RNA, 24 nt, Human
aguggcucacgccuguaaucccag

SEQ ID NO: 539022 - RNA, 22 nt, Human
aucauauauaguaauuccacca

SEQ ID NO: 539023 - RNA, 24 nt, Human
augacgccacugcauuccagccug

SEQ ID NO: 539024 - RNA, 19 nt, Human
augguccaugcaugaggug

SEQ ID NO: 539025 - RNA, 24 nt, Human
caagaccauccuggcuaacacggu

SEQ ID NO: 539026 - RNA, 24 nt, Human
cacgccuguaaucccagcacuuug

SEQ ID NO: 539027 - RNA, 18 nt, Human
cacugcauuccagccugg

SEQ ID NO: 539028 - RNA, 20 nt, Human
cacugcauuccagccuggca

SEQ ID NO: 539029 - RNA, 24 nt, Human
cacugcauuccagccuggcaacag

SEQ ID NO: 539030 - RNA, 24 nt, Human
cagcacuuugggaggccgagacgg

SEQ ID NO: 539031 - RNA, 19 nt, Human
cagccuggcaacagaguga

SEQ ID NO: 539032 - RNA, 24 nt, Human
cagcuacuugggaggcugaggcag

SEQ ID NO: 539033 - RNA, 20 nt, Human
caggacugaucccugucuaa

SEQ ID NO: 539034 - RNA, 23 nt, Human
cauuccagccuggcaacagagug

SEQ ID NO: 539035 - RNA, 21 nt, Human
ccacaagaaaaauacaacugc

SEQ ID NO: 539036 - RNA, 23 nt, Human
ccaccaggcugauuucaagcuac

SEQ ID NO: 539037 - RNA, 19 nt, Human
ccacugcauuccagccugg

SEQ ID NO: 539038 - RNA, 19 nt, Human
ccacugcauuccagccugg

SEQ ID NO: 539039 - RNA, 20 nt, Human
ccacugcauuccagccuggc

SEQ ID NO: 539040 - RNA, 23 nt, Human
ccacugcauuccagccuggcaac

SEQ ID NO: 539041 - RNA, 24 nt, Human
ccaguuagccuugauuacuagcag

SEQ ID NO: 539042 - RNA, 22 nt, Human
cccgucucuacuaaaaauacaa

SEQ ID NO: 539043 - RNA, 19 nt, Human
ccucaguaaccugcccagg

SEQ ID NO: 539044 - RNA, 23 nt, Human
ccugcccagggccacacagcuag

SEQ ID NO: 539045 - RNA, 21 nt, Human
ccuggcaacagagugagacuc

SEQ ID NO: 539046 - RNA, 23 nt, Human
ccuggcuaacacggugaaauccc

SEQ ID NO: 539047 - RNA, 24 nt, Human
ccuggcuaacacggugaaaucccg

SEQ ID NO: 539048 - RNA, 22 nt, Human
ccuguaaucccagcacuuuggg

SEQ ID NO: 539049 - RNA, 21 nt, Human
ccuguagucacagcuacuugg

SEQ ID NO: 539050 - RNA, 22 nt, Human
ccuguagucacagcuacuuggg

SEQ ID NO: 539051 - RNA, 24 nt, Human
cgagacgggcagaucaugagguca

SEQ ID NO: 539052 - RNA, 21 nt, Human
cgccuguagucacagcuacuu

SEQ ID NO: 539053 - RNA, 23 nt, Human
cgccuguagucacagcuacuugg

SEQ ID NO: 539054 - RNA, 24 nt, Human
cgccuguagucacagcuacuuggg

SEQ ID NO: 539055 - RNA, 18 nt, Human
cgcggcugucuccuuccu

SEQ ID NO: 539056 - RNA, 22 nt, Human
cgggcagaucaugaggucagga

SEQ ID NO: 539057 - RNA, 22 nt, Human
cucaaaaacaaaaacaaaaaca

SEQ ID NO: 539058 - RNA, 22 nt, Human
cucacgccuguaaucccagcac

SEQ ID NO: 539059 - RNA, 24 nt, Human
cucacgccuguaaucccagcacuu

SEQ ID NO: 539060 - RNA, 20 nt, Human
cucgggucccugccccgucc

SEQ ID NO: 539061 - RNA, 19 nt, Human
cugcccagggccacacagc

SEQ ID NO: 539062 - RNA, 18 nt, Human
cuggcuaacacggugaaa

SEQ ID NO: 539063 - RNA, 21 nt, Human
cugucaaaaugaaaauuuuac

SEQ ID NO: 539064 - RNA, 23 nt, Human
cugucucaaaaacaaaaacaaaa

SEQ ID NO: 539065 - RNA, 27 nt, Human
cugucucaaaaacaaaaacaaaaacaa

SEQ ID NO: 539066 - RNA, 21 nt, Human
gaaaugccauuuuacauguga

SEQ ID NO: 539067 - RNA, 24 nt, Human
gaauauuuauuaccuuuguuuuaa

SEQ ID NO: 539068 - RNA, 23 nt, Human
gacgggcagaucaugaggucagg

SEQ ID NO: 539069 - RNA, 18 nt, Human
gagagagcgccuccacca

SEQ ID NO: 539070 - RNA, 23 nt, Human
gagaugacgccacugcauuccag

SEQ ID NO: 539071 - RNA, 21 nt, Human
gagccucaguaaccugcccag

SEQ ID NO: 539072 - RNA, 20 nt, Human
gagcgccuccaccaccaccc

SEQ ID NO: 539073 - RNA, 21 nt, Human
gagguugcagugagccgagau

SEQ ID NO: 539074 - RNA, 20 nt, Human
gcaaaaccauuauacaguua

SEQ ID NO: 539075 - RNA, 24 nt, Human
gcaacagagugagacucugucuca

SEQ ID NO: 539076 - RNA, 25 nt, Human
gcacgaaaauccuuugagcaugcca

SEQ ID NO: 539077 - RNA, 23 nt, Human
gcauuccagccuggcaacagagu

SEQ ID NO: 539078 - RNA, 24 nt, Human
gcuaacacggugaaaucccgucuc

SEQ ID NO: 539079 - RNA, 24 nt, Human
gcugugcugcugguggucacagcu

SEQ ID NO: 539080 - RNA, 18 nt, Human
ggacacucgggucccugc

SEQ ID NO: 539081 - RNA, 18 nt, Human
ggagguugcagugagccg

SEQ ID NO: 539082 - RNA, 20 nt, Human
ggagguugcagugagccgag

SEQ ID NO: 539083 - RNA, 22 nt, Human
ggagguugcagugagccgagau

SEQ ID NO: 539084 - RNA, 23 nt, Human
ggagguugcagugagccgagaug

SEQ ID NO: 539085 - RNA, 19 nt, Human
ggcaacagagugagacucu

SEQ ID NO: 539086 - RNA, 21 nt, Human
ggcagaucaugaggucaggag

SEQ ID NO: 539087 - RNA, 19 nt, Human
ggcugggugcaguggcuca

SEQ ID NO: 539088 - RNA, 21 nt, Human
ggcugggugcaguggcucacg

SEQ ID NO: 539089 - RNA, 23 nt, Human
ggugcaguggcucacgccuguaa

SEQ ID NO: 539090 - RNA, 19 nt, Human
guaaaauuuucauuaggua

SEQ ID NO: 539091 - RNA, 21 nt, Human
gugaagcgcgcggcugucucc

SEQ ID NO: 539092 - RNA, 24 nt, Human
guugcagugagccgagaugacgcc

SEQ ID NO: 539093 - RNA, 22 nt, Human
uaacacggugaaaucccgucuc

SEQ ID NO: 539094 - RNA, 24 nt, Human
uaacacggugaaaucccgucucua

SEQ ID NO: 539095 - RNA, 21 nt, Human
uaaugauuuugaccagguacc

SEQ ID NO: 539096 - RNA, 19 nt, Human
uacaguuacucuaauagcc

SEQ ID NO: 539097 - RNA, 18 nt, Human
uacauguacauuuguaua

SEQ ID NO: 539098 - RNA, 18 nt, Human
uacauuuguauauacaua

SEQ ID NO: 539099 - RNA, 21 nt, Human
uaccaaagagagcaagauuca

SEQ ID NO: 539100 - RNA, 23 nt, Human
uaccaaagagagcaagauucaac

SEQ ID NO: 539101 - RNA, 18 nt, Human
uaccaacagucugaacca

SEQ ID NO: 539102 - RNA, 25 nt, Human
uaccauggacguaaauuaccucaag

SEQ ID NO: 539103 - RNA, 22 nt, Human
uagcauaccacuacauuaguau

SEQ ID NO: 539104 - RNA, 22 nt, Human
uagccauuugcuacugccagca

SEQ ID NO: 539105 - RNA, 21 nt, Human
uagguacuuuuagaaaugcca

SEQ ID NO: 539106 - RNA, 21 nt, Human
uagguauuuucagaaagucuu

SEQ ID NO: 539107 - RNA, 21 nt, Human
uauauacauagagaaagugca

SEQ ID NO: 539108 - RNA, 19 nt, Human
uauuuuauuuuaggaaagg

SEQ ID NO: 539109 - RNA, 20 nt, Human
uauuuuauuuuaggaaaggu

SEQ ID NO: 539110 - RNA, 21 nt, Human
ucaaaaacaaaaacaaaaaca

SEQ ID NO: 539111 - RNA, 23 nt, Human
ucaaaaugaaaauuuuacaauca

SEQ ID NO: 539112 - RNA, 23 nt, Human
ucacagcuggcugacuggaccag

SEQ ID NO: 539113 - RNA, 19 nt, Human
ucagcacucagcugugcug

SEQ ID NO: 539114 - RNA, 18 nt, Human
ucaugaggucaggagauc

SEQ ID NO: 539115 - RNA, 24 nt, Human
ucaugaggucaggagaucaagacc

SEQ ID NO: 539116 - RNA, 23 nt, Human
uccaccacacagguaccauggac

SEQ ID NO: 539117 - RNA, 18 nt, Human
uccagccuggcaacagag

SEQ ID NO: 539118 - RNA, 22 nt, Human
uccagccuggcaacagagugag

SEQ ID NO: 539119 - RNA, 23 nt, Human
uccagccuggcaacagagugaga

SEQ ID NO: 539120 - RNA, 25 nt, Human
uccuuccuucccaucuggguaucug

SEQ ID NO: 539121 - RNA, 24 nt, Human
ucgcuugaaacugggaggcggagg

SEQ ID NO: 539122 - RNA, 19 nt, Human
ucuccugggcgauuucugg

SEQ ID NO: 539123 - RNA, 22 nt, Human
ucucuacuaaaaauacaaaaaa

SEQ ID NO: 539124 - RNA, 22 nt, Human
ucucuugccuucuucacccagu

SEQ ID NO: 539125 - RNA, 23 nt, Human
ucugcagcaggaauuuaagagac

SEQ ID NO: 539126 - RNA, 21 nt, Human
ugaaagaaaaggccuugccau

SEQ ID NO: 539127 - RNA, 18 nt, Human
ugaccagguaccaggacu

SEQ ID NO: 539128 - RNA, 27 nt, Human
ugacuggaccaggaagaaccuuuuagu

SEQ ID NO: 539129 - RNA, 21 nt, Human
ugagagagcgccuccaccacc

SEQ ID NO: 539130 - RNA, 24 nt, Human
ugaggcaggagaaucgcuugaaac

SEQ ID NO: 539131 - RNA, 20 nt, Human
ugccccguccuuuggaguca

SEQ ID NO: 539132 - RNA, 22 nt, Human
ugcugcugguggucacagcugg

SEQ ID NO: 539133 - RNA, 21 nt, Human
ugcuuuauacaaauucacuua

SEQ ID NO: 539134 - RNA, 21 nt, Human
uggaacauccauuucauucuc

SEQ ID NO: 539135 - RNA, 22 nt, Human
uggagugaagcgcgcggcuguc

SEQ ID NO: 539136 - RNA, 22 nt, Human
uggcucacgccuguaaucccag

SEQ ID NO: 539137 - RNA, 24 nt, Human
uggcucacgccuguaaucccagca

SEQ ID NO: 539138 - RNA, 20 nt, Human
ugggaggccgagacgggcag

SEQ ID NO: 539139 - RNA, 24 nt, Human
ugggaggccgagacgggcagauca

SEQ ID NO: 539140 - RNA, 24 nt, Human
ugggaggcggagguugcagugagc

SEQ ID NO: 539141 - RNA, 19 nt, Human
ugggaggcugaggcaggag

SEQ ID NO: 539142 - RNA, 23 nt, Human
ugggaggcugaggcaggagaauc

SEQ ID NO: 539143 - RNA, 18 nt, Human
ugguaaauguuuaaccac

SEQ ID NO: 539144 - RNA, 24 nt, Human
uguauuaacaaauuagucacaauc

SEQ ID NO: 539145 - RNA, 18 nt, Human
ugugaaagaaaaggccuu

SEQ ID NO: 539146 - RNA, 22 nt, Human
uuagcugugcgugauggcaugc

SEQ ID NO: 539147 - RNA, 21 nt, Human
uuagugcuguuucuauaccuu

SEQ ID NO: 539148 - RNA, 22 nt, Human
uucauugcccaggucaguuacu

SEQ ID NO: 539149 - RNA, 24 nt, Human
uugaaacugggaggcggagguugc

SEQ ID NO: 539150 - RNA, 23 nt, Human
uugauucuucuuucuaaaucugu

SEQ ID NO: 539151 - RNA, 18 nt, Human
uugcagcuuguuuugcuu

SEQ ID NO: 539152 - RNA, 18 nt, Human
uugcagugagccgagaug

SEQ ID NO: 539153 - RNA, 20 nt, Human
uugcagugagccgagaugac

SEQ ID NO: 539154 - RNA, 24 nt, Human
uugggaggcugaggcaggagaauc

SEQ ID NO: 539155 - RNA, 21 nt, Human
uuuacaaacuucaaugaagaa

SEQ ID NO: 539156 - RNA, 22 nt, Human
uuuauacauguacauuuguaua

SEQ ID NO: 539157 - RNA, 19 nt, Human
uuuccagccagauucucag

SEQ ID NO: 539158 - RNA, 20 nt, Human
uuuucagaaagucuuagugc

SEQ ID NO: 539159 - RNA, 19 nt, Human
aaaaacgucauggucacag

SEQ ID NO: 539160 - RNA, 22 nt, Human
aaaaaugcaaaauuagcagggc

SEQ ID NO: 539161 - RNA, 19 nt, Human
aaaacaacaacaacaacaa

SEQ ID NO: 539162 - RNA, 22 nt, Human
aaaacaacaacaacaacaaaac

SEQ ID NO: 539163 - RNA, 22 nt, Human
aaacaacaacaacaacaacaaa

SEQ ID NO: 539164 - RNA, 25 nt, Human
aaacauagcuacuguaaaaauacac

SEQ ID NO: 539165 - RNA, 19 nt, Human
aaacucaaaaggacuaaug

SEQ ID NO: 539166 - RNA, 21 nt, Human
aacaacaacaacaacaacaaa

SEQ ID NO: 539167 - RNA, 20 nt, Human
aacauggagaaaccccgucu

SEQ ID NO: 539168 - RNA, 21 nt, Human
aacauggagaaaccccgucuc

SEQ ID NO: 539169 - RNA, 22 nt, Human
aagaagaaaaaauaagugguag

SEQ ID NO: 539170 - RNA, 24 nt, Human
aagaagaaaaaauaagugguagaa

SEQ ID NO: 539171 - RNA, 27 nt, Human
aagcaagaagaaaaaauaaggggaccc

SEQ ID NO: 539172 - RNA, 23 nt, Human
aagcaagaagaaaaaauaagugg

SEQ ID NO: 539173 - RNA, 18 nt, Human
aagcauguccuuaagucc

SEQ ID NO: 539174 - RNA, 23 nt, Human
aaggaagaaauauuaccugaaaa

SEQ ID NO: 539175 - RNA, 18 nt, Human
aauaagugguagaaauuu

SEQ ID NO: 539176 - RNA, 23 nt, Human
aaucagaaacaagcuuccagcaa

SEQ ID NO: 539177 - RNA, 22 nt, Human
acaacaacaacaacaaacaaua

SEQ ID NO: 539178 - RNA, 23 nt, Human
acaacaacaacaacaacaaacaa

SEQ ID NO: 539179 - RNA, 19 nt, Human
acaagagcgaaacuccauc

SEQ ID NO: 539180 - RNA, 20 nt, Human
acaagagcgaaacuccaucu

SEQ ID NO: 539181 - RNA, 21 nt, Human
acaagagcgaaacuccaucuc

SEQ ID NO: 539182 - RNA, 29 nt, Human
acagucagagcucuucugcacugguaccc

SEQ ID NO: 539183 - RNA, 21 nt, Human
accaaccaccaacuccaggac

SEQ ID NO: 539184 - RNA, 20 nt, Human
accaugagaccuguuugcac

SEQ ID NO: 539185 - RNA, 23 nt, Human
accuggugacacugcccacaguc

SEQ ID NO: 539186 - RNA, 18 nt, Human
acugcacucaagccuggg

SEQ ID NO: 539187 - RNA, 21 nt, Human
acugcacucaagccugggcaa

SEQ ID NO: 539188 - RNA, 20 nt, Human
agaacaccaaccaccaacuc

SEQ ID NO: 539189 - RNA, 24 nt, Human
agaagaaauagagagacccuuagu

SEQ ID NO: 539190 - RNA, 27 nt, Human
agcaagaagaaaaaauaagugguagaa

SEQ ID NO: 539191 - RNA, 20 nt, Human
agcaauacuggccgggcgcg

SEQ ID NO: 539192 - RNA, 23 nt, Human
agcagggcgugguggugcacgcc

SEQ ID NO: 539193 - RNA, 25 nt, Human
agcgaagugcaaagagagacucuag

SEQ ID NO: 539194 - RNA, 22 nt, Human
aggaagaaauauuaccugaaaa

SEQ ID NO: 539195 - RNA, 27 nt, Human
aggcaggagaacagccugaccccagga

SEQ ID NO: 539196 - RNA, 21 nt, Human
aggcauaaaagggguucuugg

SEQ ID NO: 539197 - RNA, 21 nt, Human
aggcauaaaagggguucuugg

SEQ ID NO: 539198 - RNA, 22 nt, Human
aggcauaaaagggguucuuggg

SEQ ID NO: 539199 - RNA, 21 nt, Human
aggccgaggcggguggaucac

SEQ ID NO: 539200 - RNA, 19 nt, Human
aggcggaggcugcggugag

SEQ ID NO: 539201 - RNA, 24 nt, Human
aggcggaggcugcggugagccaag

SEQ ID NO: 539202 - RNA, 20 nt, Human
aggcggguggaucacccgag

SEQ ID NO: 539203 - RNA, 24 nt, Human
aggcggguggaucacccgaguccg

SEQ ID NO: 539204 - RNA, 19 nt, Human
aguccgggaguucaagacc

SEQ ID NO: 539205 - RNA, 19 nt, Human
agugcaaagagagacucua

SEQ ID NO: 539206 - RNA, 19 nt, Human
aucaggauuuguaccaguc

SEQ ID NO: 539207 - RNA, 20 nt, Human
auggagaaaccccgucucca

SEQ ID NO: 539208 - RNA, 24 nt, Human
auugcaucacugcacucaagccug

SEQ ID NO: 539209 - RNA, 23 nt, Human
caaaaaugcaaaauuagcagggc

SEQ ID NO: 539210 - RNA, 25 nt, Human
caacaacaacaacaaacaauacuug

SEQ ID NO: 539211 - RNA, 23 nt, Human
caacaacaacaacaacaaacaag

SEQ ID NO: 539212 - RNA, 30 nt, Human
cacagucagagcucuucugcacugguaccc

SEQ ID NO: 539213 - RNA, 23 nt, Human
caccaaaaaugcaaaauuagcag

SEQ ID NO: 539214 - RNA, 21 nt, Human
caccaagacccuccuccccag

SEQ ID NO: 539215 - RNA, 19 nt, Human
cacgccuauaaucccagcc

SEQ ID NO: 539216 - RNA, 21 nt, Human
cacgccuauaaucccagccac

SEQ ID NO: 539217 - RNA, 21 nt, Human
cacgccuguaaaucucagcac

SEQ ID NO: 539218 - RNA, 19 nt, Human
cacugcacucaagccuggg

SEQ ID NO: 539219 - RNA, 22 nt, Human
cacugcacucaagccugggcaa

SEQ ID NO: 539220 - RNA, 23 nt, Human
cacugcacucaagccugggcaac

SEQ ID NO: 539221 - RNA, 24 nt, Human
cacugcacucaagccugggcaaca

SEQ ID NO: 539222 - RNA, 21 nt, Human
cacuuagugggaccuggugac

SEQ ID NO: 539223 - RNA, 22 nt, Human
cagcacaaguguugccacuuag

SEQ ID NO: 539224 - RNA, 22 nt, Human
cagcacucugggaggccgaggc

SEQ ID NO: 539225 - RNA, 24 nt, Human
cagcacucugggaggccgaggcgg

SEQ ID NO: 539226 - RNA, 24 nt, Human
cagccugaccaacauggagaaacc

SEQ ID NO: 539227 - RNA, 20 nt, Human
caggagaacagccugacccc

SEQ ID NO: 539228 - RNA, 20 nt, Human
caggaggcggaggcugcggu

SEQ ID NO: 539229 - RNA, 18 nt, Human
cagucuuuuccuuuuucc

SEQ ID NO: 539230 - RNA, 23 nt, Human
cagugcagggcuggguauaaguc

SEQ ID NO: 539231 - RNA, 21 nt, Human
caucgcauucaccaugagacc

SEQ ID NO: 539232 - RNA, 22 nt, Human
caucucaaaacaacaacaacaa

SEQ ID NO: 539233 - RNA, 23 nt, Human
caucucaaaacaacaacaacaac

SEQ ID NO: 539234 - RNA, 18 nt, Human
caucugcuuucuguuuuc

SEQ ID NO: 539235 - RNA, 19 nt, Human
ccaaaaaugcaaaauuagc

SEQ ID NO: 539236 - RNA, 18 nt, Human
ccaagacccuccucccca

SEQ ID NO: 539237 - RNA, 21 nt, Human
ccaaucagaaacaagcuucca

SEQ ID NO: 539238 - RNA, 21 nt, Human
ccacucgggagacccaggcag

SEQ ID NO: 539239 - RNA, 18 nt, Human
ccaucucaaaacaacaac

SEQ ID NO: 539240 - RNA, 22 nt, Human
ccuaggcugaggguagugagac

SEQ ID NO: 539241 - RNA, 19 nt, Human
ccuauaaucccagccacuc

SEQ ID NO: 539242 - RNA, 22 nt, Human
ccuauaaucccagccacucggg

SEQ ID NO: 539243 - RNA, 30 nt, Human
ccuauaaucccagccacucgggagacccaa

SEQ ID NO: 539244 - RNA, 21 nt, Human
ccuccuccccagcugagagac

SEQ ID NO: 539245 - RNA, 23 nt, Human
ccugaccaacauggagaaacccc

SEQ ID NO: 539246 - RNA, 24 nt, Human
ccugaccaacauggagaaaccccg

SEQ ID NO: 539247 - RNA, 22 nt, Human
cgaggcggguggaucacccgag

SEQ ID NO: 539248 - RNA, 19 nt, Human
cgccuauaaucccagccac

SEQ ID NO: 539249 - RNA, 19 nt, Human
cgccuguaaaucucagcac

SEQ ID NO: 539250 - RNA, 24 nt, Human
cggguggaucacccgaguccggga

SEQ ID NO: 539251 - RNA, 20 nt, Human
cucaaggaagaaauauuacc

SEQ ID NO: 539252 - RNA, 24 nt, Human
cucacgccuguaaaucucagcacu

SEQ ID NO: 539253 - RNA, 21 nt, Human
cugcggugagccaagauugca

SEQ ID NO: 539254 - RNA, 24 nt, Human
cuggguauaagucuaugcauuggu

SEQ ID NO: 539255 - RNA, 21 nt, Human
gaauccauuucaaauuaaagc

SEQ ID NO: 539256 - RNA, 20 nt, Human
gacccuccuccccagcugag

SEQ ID NO: 539257 - RNA, 21 nt, Human
gagaaaccccgucuccaccaa

SEQ ID NO: 539258 - RNA, 26 nt, Human
gagcaacccaucccuaauauaacauu

SEQ ID NO: 539259 - RNA, 20 nt, Human
gaggcggguggaucacccga

SEQ ID NO: 539260 - RNA, 23 nt, Human
gaggcugcggugagccaagauug

SEQ ID NO: 539261 - RNA, 24 nt, Human
gaucacccgaguccgggaguucaa

SEQ ID NO: 539262 - RNA, 22 nt, Human
gauuuguaccagucuuuuccuu

SEQ ID NO: 539263 - RNA, 22 nt, Human
ggaggcugcggugagccaagau

SEQ ID NO: 539264 - RNA, 24 nt, Human
ggaggcugcggugagccaagauug

SEQ ID NO: 539265 - RNA, 21 nt, Human
ggccgggcgcgguggcucacg

SEQ ID NO: 539266 - RNA, 24 nt, Human
ggccuaggcugaggguagugagac

SEQ ID NO: 539267 - RNA, 24 nt, Human
gggcgcgguggcucacgccuguaa

SEQ ID NO: 539268 - RNA, 24 nt, Human
gggcgugguggugcacgccuauaa

SEQ ID NO: 539269 - RNA, 22 nt, Human
ggguauaagucuaugcauuggu

SEQ ID NO: 539270 - RNA, 21 nt, Human
ggugcacgccuauaaucccag

SEQ ID NO: 539271 - RNA, 25 nt, Human
gguggcucacgccuguaaaucucag

SEQ ID NO: 539272 - RNA, 20 nt, Human
gugcucauuccuacaacugg

SEQ ID NO: 539273 - RNA, 23 nt, Human
guggugcacgccuauaaucccag

SEQ ID NO: 539274 - RNA, 22 nt, Human
guguugccacuuagugggaccu

SEQ ID NO: 539275 - RNA, 19 nt, Human
uaaaagggguucuugggca

SEQ ID NO: 539276 - RNA, 24 nt, Human
uaacaaacgugacaucugcuuucu

SEQ ID NO: 539277 - RNA, 28 nt, Human
uaaccaaaugagcaacccaucccuaaua

SEQ ID NO: 539278 - RNA, 22 nt, Human
uagauagaacaccaaccaccaa

SEQ ID NO: 539279 - RNA, 18 nt, Human
uagcagggcgugguggug

SEQ ID NO: 539280 - RNA, 18 nt, Human
uagcagggcgugguggug

SEQ ID NO: 539281 - RNA, 22 nt, Human
ucaccaaucagaaacaagcuuc

SEQ ID NO: 539282 - RNA, 21 nt, Human
ucacugcacucaagccugggc

SEQ ID NO: 539283 - RNA, 24 nt, Human
ucacugcacucaagccugggcaac

SEQ ID NO: 539284 - RNA, 20 nt, Human
ucagagcucuucugcacugg

SEQ ID NO: 539285 - RNA, 18 nt, Human
uccaggacgugaacauuc

SEQ ID NO: 539286 - RNA, 24 nt, Human
ucgccuagauagaacaccaaccac

SEQ ID NO: 539287 - RNA, 24 nt, Human
ucuucauauaaaauguagcgguca

SEQ ID NO: 539288 - RNA, 27 nt, Human
ugaacuguuaaaguguuuuccaaggga

SEQ ID NO: 539289 - RNA, 21 nt, Human
ugaccccaggaggcggaggcu

SEQ ID NO: 539290 - RNA, 23 nt, Human
ugaguuaaauucuuaauuugagc

SEQ ID NO: 539291 - RNA, 19 nt, Human
ugaguuuuaucuuccuguc

SEQ ID NO: 539292 - RNA, 21 nt, Human
ugauuaaccacuuccuugaaa

SEQ ID NO: 539293 - RNA, 26 nt, Human
ugcacugguaccuucucugcccuugu

SEQ ID NO: 539294 - RNA, 21 nt, Human
ugcuaccagauaaaugagcaa

SEQ ID NO: 539295 - RNA, 22 nt, Human
uggagaggugaguuaaauucuu

SEQ ID NO: 539296 - RNA, 24 nt, Human
uggaucacccgaguccgggaguuc

SEQ ID NO: 539297 - RNA, 23 nt, Human
uggcucacgccuguaaaucucag

SEQ ID NO: 539298 - RNA, 25 nt, Human
uggcucacgccuguaaaucucagca

SEQ ID NO: 539299 - RNA, 23 nt, Human
ugggaggccgaggcggguggauc

SEQ ID NO: 539300 - RNA, 24 nt, Human
ugggaggccgaggcggguggauca

SEQ ID NO: 539301 - RNA, 21 nt, Human
uggucaagagaagaaauagag

SEQ ID NO: 539302 - RNA, 22 nt, Human
uggugcacgccuauaaucccag

SEQ ID NO: 539303 - RNA, 21 nt, Human
uuaaauaucaggauuuguacc

SEQ ID NO: 539304 - RNA, 20 nt, Human
uuagcagggcgugguggugc

SEQ ID NO: 539305 - RNA, 22 nt, Human
uuagcagggcgugguggugcac

SEQ ID NO: 539306 - RNA, 24 nt, Human
uuagcagggcgugguggugcacgc

SEQ ID NO: 539307 - RNA, 18 nt, Human
uuagcauugaugaucuuu

SEQ ID NO: 539308 - RNA, 22 nt, Human
uuauacaucaagaugggucaag

SEQ ID NO: 539309 - RNA, 21 nt, Human
uuccacuggaaaaauuuuugg

SEQ ID NO: 539310 - RNA, 18 nt, Human
uuccuccagcgaagugca

SEQ ID NO: 539311 - RNA, 18 nt, Human
uugaaaucaauaaaacac

SEQ ID NO: 539312 - RNA, 23 nt, Human
uuuaagacuuuagggaagauaag

SEQ ID NO: 539313 - RNA, 21 nt, Human
uuuuaagacuuuagggaagau

SEQ ID NO: 539314 - RNA, 21 nt, Human
aaaagacagacacaguggagg

SEQ ID NO: 539315 - RNA, 19 nt, Human
aaacagcaaagagacagag

SEQ ID NO: 539316 - RNA, 23 nt, Human
aaacagcaaagagacagagacag

SEQ ID NO: 539317 - RNA, 20 nt, Human
aaagagacagagacagacag

SEQ ID NO: 539318 - RNA, 20 nt, Human
aaaggaaggaugggcaaagg

SEQ ID NO: 539319 - RNA, 23 nt, Human
aagaaaagacagacacaguggaa

SEQ ID NO: 539320 - RNA, 18 nt, Human
aagagggcagaaauuagg

SEQ ID NO: 539321 - RNA, 22 nt, Human
aaggaauuaggaguagacagac

SEQ ID NO: 539322 - RNA, 21 nt, Human
acaaacagcaaagagacagag

SEQ ID NO: 539323 - RNA, 23 nt, Human
acaaacagcaaagagacagagac

SEQ ID NO: 539324 - RNA, 20 nt, Human
acagagacagacagaggguu

SEQ ID NO: 539325 - RNA, 19 nt, Human
agaagggguggacacaggu

SEQ ID NO: 539326 - RNA, 23 nt, Human
agacaagagggcagaaauuaggg

SEQ ID NO: 539327 - RNA, 23 nt, Human
agacacaguggaggcugaaugac

SEQ ID NO: 539328 - RNA, 21 nt, Human
agacagaggguuuuggggggc

SEQ ID NO: 539329 - RNA, 23 nt, Human
agagauggagaagggcagugaag

SEQ ID NO: 539330 - RNA, 20 nt, Human
agaugggaaacagaauggga

SEQ ID NO: 539331 - RNA, 19 nt, Human
agcaccaacuacgcccuac

SEQ ID NO: 539332 - RNA, 20 nt, Human
agcagcagcaguggggggac

SEQ ID NO: 539333 - RNA, 21 nt, Human
agccugguccgaucccgggcc

SEQ ID NO: 539334 - RNA, 23 nt, Human
aggaaaggaugggguccugaggg

SEQ ID NO: 539335 - RNA, 23 nt, Human
aggaagagauggagaagggggac

SEQ ID NO: 539336 - RNA, 22 nt, Human
aggaaggaugggcaaaggggac

SEQ ID NO: 539337 - RNA, 19 nt, Human
aggaggaagagauggagaa

SEQ ID NO: 539338 - RNA, 24 nt, Human
agggagccugguccgaucccgggc

SEQ ID NO: 539339 - RNA, 24 nt, Human
agggauggagauucgaggaagaag

SEQ ID NO: 539340 - RNA, 19 nt, Human
aggguuuuggggggcaggg

SEQ ID NO: 539341 - RNA, 23 nt, Human
augagcagacaaggugccagcca

SEQ ID NO: 539342 - RNA, 18 nt, Human
augggaaacagaauggga

SEQ ID NO: 539343 - RNA, 25 nt, Human
cacaguggaggcugaaugaccccca

SEQ ID NO: 539344 - RNA, 21 nt, Human
caccaacuacgcccuacgugc

SEQ ID NO: 539345 - RNA, 20 nt, Human
cagcagagaacaagguccug

SEQ ID NO: 539346 - RNA, 22 nt, Human
cagcagagaacaagguccugga

SEQ ID NO: 539347 - RNA, 18 nt, Human
cagcagcaguggggggac

SEQ ID NO: 539348 - RNA, 21 nt, Human
cagcagcaguggggggaccgg

SEQ ID NO: 539349 - RNA, 23 nt, Human
cagggacaaaugaacaaggagga

SEQ ID NO: 539350 - RNA, 20 nt, Human
cauccagcaccaacuacgcc

SEQ ID NO: 539351 - RNA, 21 nt, Human
cauccagcaccaacuacgccc

SEQ ID NO: 539352 - RNA, 23 nt, Human
cauucaacaaacauccauccagc

SEQ ID NO: 539353 - RNA, 25 nt, Human
cauucaacaaacauccauccagcac

SEQ ID NO: 539354 - RNA, 21 nt, Human
cccagggaagaaaagacagac

SEQ ID NO: 539355 - RNA, 19 nt, Human
cccccagacaugcauggcc

SEQ ID NO: 539356 - RNA, 22 nt, Human
cucucgcuuccaggguuaggaa

SEQ ID NO: 539357 - RNA, 20 nt, Human
cugaaugacccccacccuga

SEQ ID NO: 539358 - RNA, 22 nt, Human
cugagucuuggacaaacagcaa

SEQ ID NO: 539359 - RNA, 22 nt, Human
gaaaagacagacacaguggagg

SEQ ID NO: 539360 - RNA, 22 nt, Human
gaaagagacaccgagaaaagga

SEQ ID NO: 539361 - RNA, 22 nt, Human
gaagaaggacaaggugacaggu

SEQ ID NO: 539362 - RNA, 23 nt, Human
gacaagagggcagaaauuaggga

SEQ ID NO: 539363 - RNA, 22 nt, Human
gagacagacagaggguuuuggg

SEQ ID NO: 539364 - RNA, 23 nt, Human
gaugaaggaacaggaguuaggga

SEQ ID NO: 539365 - RNA, 19 nt, Human
gaugggcaugaguggagua

SEQ ID NO: 539366 - RNA, 22 nt, Human
gcagcagcaguggggggaccgg

SEQ ID NO: 539367 - RNA, 19 nt, Human
gcaggaaaggauggggucc

SEQ ID NO: 539368 - RNA, 19 nt, Human
gcagggugggcaggugugg

SEQ ID NO: 539369 - RNA, 20 nt, Human
gccuagggccagggcugccc

SEQ ID NO: 539370 - RNA, 23 nt, Human
ggaaagagacaccgagaaaagga

SEQ ID NO: 539371 - RNA, 21 nt, Human
ggagauaaggguggaaagaga

SEQ ID NO: 539372 - RNA, 20 nt, Human
ggagccccagggaagaaaag

SEQ ID NO: 539373 - RNA, 22 nt, Human
ggauggagauaguagcagggac

SEQ ID NO: 539374 - RNA, 18 nt, Human
ggcaggaaaggauggggu

SEQ ID NO: 539375 - RNA, 23 nt, Human
ggcagugaaggggcuaagaauga

SEQ ID NO: 539376 - RNA, 20 nt, Human
gggaagaaaagacagacaca

SEQ ID NO: 539377 - RNA, 23 nt, Human
gggaagaaaagacagacacagug

SEQ ID NO: 539378 - RNA, 22 nt, Human
gggauggagauucgaggaagaa

SEQ ID NO: 539379 - RNA, 19 nt, Human
ggguccugagggagccugg

SEQ ID NO: 539380 - RNA, 22 nt, Human
gugggagggauggggcaagggu

SEQ ID NO: 539381 - RNA, 19 nt, Human
uagacagacaagagggcag

SEQ ID NO: 539382 - RNA, 23 nt, Human
uagcagcagcaguggggggaccg

SEQ ID NO: 539383 - RNA, 20 nt, Human
uagcagggacuggguaaguc

SEQ ID NO: 539384 - RNA, 20 nt, Human
ucaacaaacauccauccagc

SEQ ID NO: 539385 - RNA, 21 nt, Human
uccgggcaggaaaggaugggg

SEQ ID NO: 539386 - RNA, 26 nt, Human
ucgagggggagccccagggaaggaag

SEQ ID NO: 539387 - RNA, 21 nt, Human
ugaaagaaggagcugggccgg

SEQ ID NO: 539388 - RNA, 19 nt, Human
ugaaggaacaggaguuagg

SEQ ID NO: 539389 - RNA, 21 nt, Human
ugacagguauuagggauggac

SEQ ID NO: 539390 - RNA, 22 nt, Human
ugaccucccggugucacaaucc

SEQ ID NO: 539391 - RNA, 21 nt, Human
ugagucuuggacaaacagcaa

SEQ ID NO: 539392 - RNA, 23 nt, Human
ugagucuuggacaaacagcaaag

SEQ ID NO: 539393 - RNA, 19 nt, Human
uggaaagagacaccgagaa

SEQ ID NO: 539394 - RNA, 24 nt, Human
uggaaagagacaccgagaaaagga

SEQ ID NO: 539395 - RNA, 21 nt, Human
uggagauaaggguggaaagag

SEQ ID NO: 539396 - RNA, 20 nt, Human
uggagauaguagcagggacu

SEQ ID NO: 539397 - RNA, 25 nt, Human
uggagugagacccacagaguguguu

SEQ ID NO: 539398 - RNA, 19 nt, Human
ugggagugcagggugggca

SEQ ID NO: 539399 - RNA, 18 nt, Human
uggggggcaggggucccc

SEQ ID NO: 539400 - RNA, 24 nt, Human
ugggguccugagggagccuggucc

SEQ ID NO: 539401 - RNA, 22 nt, Human
ugucugaaaggacagagaggau

SEQ ID NO: 539402 - RNA, 18 nt, Human
uguggcgaacagaagggg

SEQ ID NO: 539403 - RNA, 25 nt, Human
uguggcgaacagaagggguggacac

SEQ ID NO: 539404 - RNA, 18 nt, Human
uuuuuuuuuuuuuuuuug

SEQ ID NO: 539405 - RNA, 22 nt, Human
uuuuuuuuuuuuuuuuuggagu

SEQ ID NO: 539406 - RNA, 24 nt, Human
aaaacuguaucauuacagaagaca

SEQ ID NO: 539407 - RNA, 21 nt, Human
aaacagccugugcacaaagau

SEQ ID NO: 539408 - RNA, 23 nt, Human
aaagcaucucccuucccccacuu

SEQ ID NO: 539409 - RNA, 25 nt, Human
aacagaacuuuccuucacaugcacu

SEQ ID NO: 539410 - RNA, 24 nt, Human
aacagcauuagugauuggcaacug

SEQ ID NO: 539411 - RNA, 19 nt, Human
aaccuucuccccuacucug

SEQ ID NO: 539412 - RNA, 23 nt, Human
aacucagguccccaagagacaga

SEQ ID NO: 539413 - RNA, 25 nt, Human
aagcaucucccuucccccacuuucg

SEQ ID NO: 539414 - RNA, 19 nt, Human
aaggacacugacaauccac

SEQ ID NO: 539415 - RNA, 23 nt, Human
acagaguugauggugagugggug

SEQ ID NO: 539416 - RNA, 24 nt, Human
acagcaacaaaacuauguuaaaac

SEQ ID NO: 539417 - RNA, 21 nt, Human
accccaaaauauguacaaagc

SEQ ID NO: 539418 - RNA, 18 nt, Human
accccaaccuucuccccu

SEQ ID NO: 539419 - RNA, 22 nt, Human
accccagcaaccacugaauguc

SEQ ID NO: 539420 - RNA, 24 nt, Human
accccagcaaccacugaauguccu

SEQ ID NO: 539421 - RNA, 25 nt, Human
acggaagugaggagcuggguuuccu

SEQ ID NO: 539422 - RNA, 18 nt, Human
acuccaaaauaaaauauu

SEQ ID NO: 539423 - RNA, 19 nt, Human
acuuucuggguuuuguuuu

SEQ ID NO: 539424 - RNA, 27 nt, Human
agaagucagugaaaugccaacugaaac

SEQ ID NO: 539425 - RNA, 21 nt, Human
agacagagacacaggggcugu

SEQ ID NO: 539426 - RNA, 20 nt, Human
agacccaccuugugccuacc

SEQ ID NO: 539427 - RNA, 19 nt, Human
agaccuaguagguuuggug

SEQ ID NO: 539428 - RNA, 21 nt, Human
agccacuccaaaauaaaauau

SEQ ID NO: 539429 - RNA, 26 nt, Human
agccuacuuaccaaaaggguaccaug

SEQ ID NO: 539430 - RNA, 21 nt, Human
aggggauacaaauauuuccgg

SEQ ID NO: 539431 - RNA, 20 nt, Human
aguggguggcaguagucugc

SEQ ID NO: 539432 - RNA, 25 nt, Human
auagagcaaaggacacugacaaucc

SEQ ID NO: 539433 - RNA, 22 nt, Human
aucgcagucacuuuucccagca

SEQ ID NO: 539434 - RNA, 23 nt, Human
augacaacaggagcgugugcguc

SEQ ID NO: 539435 - RNA, 18 nt, Human
augagaagaccuaguagg

SEQ ID NO: 539436 - RNA, 25 nt, Human
auuuaucuaacaugugguuuacaug

SEQ ID NO: 539437 - RNA, 21 nt, Human
caaaaugcuuuaggacauuaa

SEQ ID NO: 539438 - RNA, 24 nt, Human
caaagaaugucaaaaccauggaaa

SEQ ID NO: 539439 - RNA, 24 nt, Human
caaaggacacugacaauccacaaa

SEQ ID NO: 539440 - RNA, 21 nt, Human
caaaggacacugacaauccag

SEQ ID NO: 539441 - RNA, 19 nt, Human
caagauggacauguuuauc

SEQ ID NO: 539442 - RNA, 26 nt, Human
cacccaaacucagguccccaagagac

SEQ ID NO: 539443 - RNA, 20 nt, Human
cacccagagcucugccccca

SEQ ID NO: 539444 - RNA, 20 nt, Human
caccccacccaaacucaggu

SEQ ID NO: 539445 - RNA, 24 nt, Human
caccccuucacuaacucccaucuc

SEQ ID NO: 539446 - RNA, 19 nt, Human
cagcucagccaugucccuu

SEQ ID NO: 539447 - RNA, 21 nt, Human
cagguccccaagagacagaga

SEQ ID NO: 539448 - RNA, 18 nt, Human
cauccuccuuagcuggag

SEQ ID NO: 539449 - RNA, 23 nt, Human
caugacaacaggagcgugugcgu

SEQ ID NO: 539450 - RNA, 20 nt, Human
ccaaagaaugucaaaaccau

SEQ ID NO: 539451 - RNA, 23 nt, Human
ccaaagaaugucaaaaccaugga

SEQ ID NO: 539452 - RNA, 23 nt, Human
ccaacagucugcucuugcuuccc

SEQ ID NO: 539453 - RNA, 21 nt, Human
ccaagcagaggugccaugagc

SEQ ID NO: 539454 - RNA, 27 nt, Human
ccaccugaacagccuuggcuggagucc

SEQ ID NO: 539455 - RNA, 20 nt, Human
ccacugaauguccuugaccu

SEQ ID NO: 539456 - RNA, 24 nt, Human
ccccaaccuucuccccuacucucc

SEQ ID NO: 539457 - RNA, 19 nt, Human
ccccaagagacagagacac

SEQ ID NO: 539458 - RNA, 26 nt, Human
ccccagaagauagagcaaaggacacu

SEQ ID NO: 539459 - RNA, 18 nt, Human
ccccagcaaccacugaau

SEQ ID NO: 539460 - RNA, 20 nt, Human
cccuaagucaaccucagcac

SEQ ID NO: 539461 - RNA, 22 nt, Human
cccuacucuggggagcuucucc

SEQ ID NO: 539462 - RNA, 24 nt, Human
cccuacucuggggagcuucuccug

SEQ ID NO: 539463 - RNA, 20 nt, Human
ccggaaaccauuuugucaau

SEQ ID NO: 539464 - RNA, 19 nt, Human
ccucagcacaugcccagcu

SEQ ID NO: 539465 - RNA, 23 nt, Human
ccuucacuccccuacaggcugga

SEQ ID NO: 539466 - RNA, 26 nt, Human
ccuugcugguggcaguguaaggggau

SEQ ID NO: 539467 - RNA, 21 nt, Human
ccuuggcuggaguccagggga

SEQ ID NO: 539468 - RNA, 18 nt, Human
cgccucauccuccuuagc

SEQ ID NO: 539469 - RNA, 22 nt, Human
cgguucuucagaaucgcaguca

SEQ ID NO: 539470 - RNA, 23 nt, Human
cuaagugaaaacagcugcacaaa

SEQ ID NO: 539471 - RNA, 24 nt, Human
cucccuucccccacuuucguagcc

SEQ ID NO: 539472 - RNA, 23 nt, Human
cuccuguuggcccaacagucugc

SEQ ID NO: 539473 - RNA, 20 nt, Human
gacaacaggagcgugugcgu

SEQ ID NO: 539474 - RNA, 23 nt, Human
gaccccagcaaccacugaauguc

SEQ ID NO: 539475 - RNA, 21 nt, Human
gaggaaauacaaucgcuccac

SEQ ID NO: 539476 - RNA, 23 nt, Human
gcaaaggacacugacaauccaca

SEQ ID NO: 539477 - RNA, 19 nt, Human
gcacugaagccuacuuacc

SEQ ID NO: 539478 - RNA, 23 nt, Human
gcagggcaauugggcuaacagag

SEQ ID NO: 539479 - RNA, 21 nt, Human
gccaacugccaccccacccaa

SEQ ID NO: 539480 - RNA, 24 nt, Human
gccuuggcuggaguccaggggaac

SEQ ID NO: 539481 - RNA, 20 nt, Human
ggaaaacagaacuuuccuuc

SEQ ID NO: 539482 - RNA, 26 nt, Human
ggcaagauggacauguuuauccuugc

SEQ ID NO: 539483 - RNA, 22 nt, Human
gggaaagccugagagacaccaa

SEQ ID NO: 539484 - RNA, 19 nt, Human
guggaaggcccuacacccc

SEQ ID NO: 539485 - RNA, 19 nt, Human
guggaaggcccuacacccc

SEQ ID NO: 539486 - RNA, 20 nt, Human
guuuuauuuccuucuuuccu

SEQ ID NO: 539487 - RNA, 22 nt, Human
guuuuguuuuccacuccuccuc

SEQ ID NO: 539488 - RNA, 22 nt, Human
uaaccccaaaauauguacaaag

SEQ ID NO: 539489 - RNA, 22 nt, Human
uacaaagcaucucccuuccccc

SEQ ID NO: 539490 - RNA, 21 nt, Human
uacaccccaaccuucuccccu

SEQ ID NO: 539491 - RNA, 24 nt, Human
uacagaagacagcaacaaaacuag

SEQ ID NO: 539492 - RNA, 21 nt, Human
uaccaaaaggguaccaugugg

SEQ ID NO: 539493 - RNA, 23 nt, Human
uauaaccccaaaauauguacaaa

SEQ ID NO: 539494 - RNA, 24 nt, Human
uauuuuuucauuaucaaauuagca

SEQ ID NO: 539495 - RNA, 22 nt, Human
ucacaauacaguccaaagaaug

SEQ ID NO: 539496 - RNA, 22 nt, Human
ucaccccuucacuaacucccau

SEQ ID NO: 539497 - RNA, 20 nt, Human
ucacuccccuacaggcugga

SEQ ID NO: 539498 - RNA, 24 nt, Human
uccaaaauaaaauauuuaguaauc

SEQ ID NO: 539499 - RNA, 24 nt, Human
uccccuacaggcuggaacugccag

SEQ ID NO: 539500 - RNA, 20 nt, Human
ucccuaaaccagugcuuucc

SEQ ID NO: 539501 - RNA, 23 nt, Human
ucccuaaaccagugcuuuccaag

SEQ ID NO: 539502 - RNA, 25 nt, Human
ucccuaaaccagugcuuuccaagca

SEQ ID NO: 539503 - RNA, 19 nt, Human
ucccucuggggcugcgccu

SEQ ID NO: 539504 - RNA, 21 nt, Human
ucccucuggggcugcgccuca

SEQ ID NO: 539505 - RNA, 18 nt, Human
uccuucacaugcacuguu

SEQ ID NO: 539506 - RNA, 22 nt, Human
ucuaagucccuaaaccagugac

SEQ ID NO: 539507 - RNA, 29 nt, Human
ucuugcuucccuuacccaggagacccacc

SEQ ID NO: 539508 - RNA, 22 nt, Human
ugaaaacagcugcacaaaacug

SEQ ID NO: 539509 - RNA, 19 nt, Human
ugauggugaguggguggca

SEQ ID NO: 539510 - RNA, 22 nt, Human
ugauguuuuauuuccuucuuuc

SEQ ID NO: 539511 - RNA, 26 nt, Human
ugccaccccacccaaacucagguccc

SEQ ID NO: 539512 - RNA, 18 nt, Human
ugccaugagccuuacaac

SEQ ID NO: 539513 - RNA, 19 nt, Human
ugcugguggcaguguaagg

SEQ ID NO: 539514 - RNA, 24 nt, Human
uggcaguagucugcggaccccagc

SEQ ID NO: 539515 - RNA, 18 nt, Human
uggguuuccucccaucuc

SEQ ID NO: 539516 - RNA, 21 nt, Human
uggguuuuguuuuccacuccu

SEQ ID NO: 539517 - RNA, 19 nt, Human
uguaugcaaaggcaugagg

SEQ ID NO: 539518 - RNA, 18 nt, Human
ugucuguuccacguggaa

SEQ ID NO: 539519 - RNA, 19 nt, Human
uuaccaaaaggguaccaug

SEQ ID NO: 539520 - RNA, 20 nt, Human
uuagccagaugauaauuccc

SEQ ID NO: 539521 - RNA, 21 nt, Human
uuaggaucucuucccucuucc

SEQ ID NO: 539522 - RNA, 21 nt, Human
uucacuccccuacaggcugga

SEQ ID NO: 539523 - RNA, 19 nt, Human
uucccuaagucaaccucag

SEQ ID NO: 539524 - RNA, 22 nt, Human
uugaagaaucccaccuccugga

SEQ ID NO: 539525 - RNA, 18 nt, Human
uuggcuggaguccagggg

SEQ ID NO: 539526 - RNA, 21 nt, Human
uugggggggaaagccugagag

SEQ ID NO: 539527 - RNA, 21 nt, Human
uuuccucccaucucuaccgca

SEQ ID NO: 539528 - RNA, 20 nt, Human
uuucuggguuuuguuuucca

SEQ ID NO: 539529 - RNA, 18 nt, Human
uuuuuuuuuuuuuuuuug

SEQ ID NO: 539530 - RNA, 20 nt, Human
aaaggaagaucaagaaucca

SEQ ID NO: 539531 - RNA, 20 nt, Human
aaauacauacucaaaacgua

SEQ ID NO: 539532 - RNA, 18 nt, Human
aacacguuuauugagcgc

SEQ ID NO: 539533 - RNA, 22 nt, Human
aacucuuuuauuggauuucuau

SEQ ID NO: 539534 - RNA, 22 nt, Human
aauccaugucccauuucucccu

SEQ ID NO: 539535 - RNA, 21 nt, Human
acacacacacacacacacaca

SEQ ID NO: 539536 - RNA, 22 nt, Human
acacacacacacacacacacag

SEQ ID NO: 539537 - RNA, 20 nt, Human
acacacacacacacacagaa

SEQ ID NO: 539538 - RNA, 21 nt, Human
acagaauuuaccugucucaga

SEQ ID NO: 539539 - RNA, 23 nt, Human
accaccuuuucuugaaggaggug

SEQ ID NO: 539540 - RNA, 23 nt, Human
agaacaaccuugugaaaggucac

SEQ ID NO: 539541 - RNA, 19 nt, Human
agcaagaagaaccuuaaau

SEQ ID NO: 539542 - RNA, 21 nt, Human
aggacugggacagcagaagug

SEQ ID NO: 539543 - RNA, 18 nt, Human
aucacuuuuauuuguaca

SEQ ID NO: 539544 - RNA, 20 nt, Human
cacacacacacacacacaca

SEQ ID NO: 539545 - RNA, 20 nt, Human
cacacacacacacacacaca

SEQ ID NO: 539546 - RNA, 22 nt, Human
cacacacacacacacacacaga

SEQ ID NO: 539547 - RNA, 26 nt, Human
cacacacacacacagaauucuuuuca

SEQ ID NO: 539548 - RNA, 19 nt, Human
cacagggcuguccccuucc

SEQ ID NO: 539549 - RNA, 19 nt, Human
cagcagaagugagacugac

SEQ ID NO: 539550 - RNA, 19 nt, Human
caugccccaacaaauacug

SEQ ID NO: 539551 - RNA, 21 nt, Human
ccaaauuuucaucuagauaaa

SEQ ID NO: 539552 - RNA, 18 nt, Human
ccaccacuucuacccagg

SEQ ID NO: 539553 - RNA, 21 nt, Human
cccacauguagggcucaggac

SEQ ID NO: 539554 - RNA, 22 nt, Human
cccauuucucccuuuguguccc

SEQ ID NO: 539555 - RNA, 30 nt, Human
ccuauuuauugugcacacacacacacagug

SEQ ID NO: 539556 - RNA, 26 nt, Human
ccuccaaccccacauguagggcucag

SEQ ID NO: 539557 - RNA, 20 nt, Human
ccucggacgggagggaugag

SEQ ID NO: 539558 - RNA, 18 nt, Human
ccuuugcacagguccacc

SEQ ID NO: 539559 - RNA, 23 nt, Human
cguuauaguucuccuccaacccc

SEQ ID NO: 539560 - RNA, 24 nt, Human
cuaggcccacagagaaugcacaca

SEQ ID NO: 539561 - RNA, 33 nt, Human
cuauuuauugugcacacacacacacacacagug

SEQ ID NO: 539562 - RNA, 24 nt, Human
cucagaaucagauaaaaggggacc

SEQ ID NO: 539563 - RNA, 22 nt, Human
cuccaaccccacauguagggcu

SEQ ID NO: 539564 - RNA, 18 nt, Human
cugagcuacuaagccuuc

SEQ ID NO: 539565 - RNA, 18 nt, Human
cuguccccuucccugcua

SEQ ID NO: 539566 - RNA, 24 nt, Human
gaacaauacauguugaauguucuu

SEQ ID NO: 539567 - RNA, 19 nt, Human
gaacauauacucaugcaug

SEQ ID NO: 539568 - RNA, 19 nt, Human
gaauugauuccaagaacau

SEQ ID NO: 539569 - RNA, 20 nt, Human
ggccugcuacugcauuuccu

SEQ ID NO: 539570 - RNA, 19 nt, Human
uaaaaggagaaacacguuu

SEQ ID NO: 539571 - RNA, 26 nt, Human
uaacaaacagaauuuaccugucucag

SEQ ID NO: 539572 - RNA, 18 nt, Human
uaaggugaaacucagagg

SEQ ID NO: 539573 - RNA, 28 nt, Human
uaaggugaaacucagagguuuuuccguu

SEQ ID NO: 539574 - RNA, 23 nt, Human
uauaguucuccuccaaccccaca

SEQ ID NO: 539575 - RNA, 18 nt, Human
uauccccauuuacacaua

SEQ ID NO: 539576 - RNA, 25 nt, Human
uauccccauuuacacauaaagaauc

SEQ ID NO: 539577 - RNA, 22 nt, Human
ucaauccucagaacaaccuugu

SEQ ID NO: 539578 - RNA, 22 nt, Human
uccauaucuguaauccugagca

SEQ ID NO: 539579 - RNA, 23 nt, Human
ucccugggaaagaccauucucug

SEQ ID NO: 539580 - RNA, 25 nt, Human
ucccugggaaagaccauucucuguu

SEQ ID NO: 539581 - RNA, 19 nt, Human
ucccuucaacucuuuuauu

SEQ ID NO: 539582 - RNA, 23 nt, Human
uccuuagucuaaucggaacuagg

SEQ ID NO: 539583 - RNA, 22 nt, Human
ucuaaaaccuccuuugcacagg

SEQ ID NO: 539584 - RNA, 28 nt, Human
ucuaggacugggacagcagaagugagac

SEQ ID NO: 539585 - RNA, 22 nt, Human
ucuauaccuaaggugaaacuca

SEQ ID NO: 539586 - RNA, 20 nt, Human
ugcacacacacacacacaca

SEQ ID NO: 539587 - RNA, 19 nt, Human
ugcacacagcacagcugug

SEQ ID NO: 539588 - RNA, 26 nt, Human
ugccacagggcuguccccuucccugc

SEQ ID NO: 539589 - RNA, 22 nt, Human
ugccccaacaaauacugcagag

SEQ ID NO: 539590 - RNA, 22 nt, Human
ugggaaagaccauucucuguuc

SEQ ID NO: 539591 - RNA, 25 nt, Human
uguacaaauacauacucaaaacgua

SEQ ID NO: 539592 - RNA, 25 nt, Human
ugugcacacacacacacacacacac

SEQ ID NO: 539593 - RNA, 25 nt, Human
ugugcacacacacacacacacacag

SEQ ID NO: 539594 - RNA, 24 nt, Human
uguugguccauaucuguaauccug

SEQ ID NO: 539595 - RNA, 24 nt, Human
uucaacucuuuuauuggauuucua

SEQ ID NO: 539596 - RNA, 21 nt, Human
uuccguuauaguucuccucca

SEQ ID NO: 539597 - RNA, 21 nt, Human
uuucucccuuugugucccugg

SEQ ID NO: 539598 - RNA, 19 nt, Human
uuuuuuuuuuuuaaaagga

SEQ ID NO: 539599 - RNA, 21 nt, Human
uuuuuuuuuuuuuuaaaagga

SEQ ID NO: 539600 - RNA, 24 nt, Human
uuuuuuuuuuuuuuuuuuaaaagg

SEQ ID NO: 539601 - RNA, 21 nt, Human
aaagaaguuccacaugccuuu

SEQ ID NO: 539602 - RNA, 22 nt, Human
aagcaugaacaucacauucacc

SEQ ID NO: 539603 - RNA, 18 nt, Human
aagcccauuucacagaua

SEQ ID NO: 539604 - RNA, 20 nt, Human
acacgagguccucaaaggug

SEQ ID NO: 539605 - RNA, 19 nt, Human
accucacucuucaccugaa

SEQ ID NO: 539606 - RNA, 23 nt, Human
agaagucuaccgaguuuauauuc

SEQ ID NO: 539607 - RNA, 18 nt, Human
agaccagaccagggucag

SEQ ID NO: 539608 - RNA, 18 nt, Human
agaccagaccagggucag

SEQ ID NO: 539609 - RNA, 22 nt, Human
agcagaagugaggugaaaucca

SEQ ID NO: 539610 - RNA, 18 nt, Human
agcagguggagaagcgga

SEQ ID NO: 539611 - RNA, 21 nt, Human
agcuccccgggagcaggugga

SEQ ID NO: 539612 - RNA, 23 nt, Human
aggaagaacuuucaacaccaaaa

SEQ ID NO: 539613 - RNA, 23 nt, Human
aggaagaacuuucaacaccaaaa

SEQ ID NO: 539614 - RNA, 18 nt, Human
aggaggaauaucaagccc

SEQ ID NO: 539615 - RNA, 19 nt, Human
agggaccagaagucuaccg

SEQ ID NO: 539616 - RNA, 18 nt, Human
agucugugugauaucaau

SEQ ID NO: 539617 - RNA, 18 nt, Human
aguggcugggcugagacu

SEQ ID NO: 539618 - RNA, 18 nt, Human
aguggcugggcugagacu

SEQ ID NO: 539619 - RNA, 21 nt, Human
auggugcccuggaggaaggac

SEQ ID NO: 539620 - RNA, 21 nt, Human
caaaaccauccucggggcuga

SEQ ID NO: 539621 - RNA, 22 nt, Human
caaaguaaauaacuuauauccc

SEQ ID NO: 539622 - RNA, 22 nt, Human
caaaguaaauaacuuauauccc

SEQ ID NO: 539623 - RNA, 20 nt, Human
caaagucuuuugggacacga

SEQ ID NO: 539624 - RNA, 23 nt, Human
caagcaugaacaucacauucacc

SEQ ID NO: 539625 - RNA, 22 nt, Human
cacuucuguuuugaaauaaaga

SEQ ID NO: 539626 - RNA, 21 nt, Human
cagaaguggaguggaucuuca

SEQ ID NO: 539627 - RNA, 23 nt, Human
cagcgggugauucucuggauccc

SEQ ID NO: 539628 - RNA, 26 nt, Human
cagcgggugauucucuggggacuacu

SEQ ID NO: 539629 - RNA, 18 nt, Human
cagcuggcucccauggcc

SEQ ID NO: 539630 - RNA, 21 nt, Human
cagcuuaaccgucucucccag

SEQ ID NO: 539631 - RNA, 21 nt, Human
cagggagagcagaagugaggu

SEQ ID NO: 539632 - RNA, 23 nt, Human
caucucaauuuuacagaugggaa

SEQ ID NO: 539633 - RNA, 23 nt, Human
caucucaauuuuacagaugggaa

SEQ ID NO: 539634 - RNA, 21 nt, Human
caucuccccuggagucaaggg

SEQ ID NO: 539635 - RNA, 19 nt, Human
cauggcccuugggguggcc

SEQ ID NO: 539636 - RNA, 20 nt, Human
cauggcccuugggguggccu

SEQ ID NO: 539637 - RNA, 22 nt, Human
ccagagcccacgcguccgccca

SEQ ID NO: 539638 - RNA, 25 nt, Human
ccagagcccacgcguccgcccacgc

SEQ ID NO: 539639 - RNA, 18 nt, Human
cccagagcccacgcgucc

SEQ ID NO: 539640 - RNA, 23 nt, Human
cccuucuugaaaacauccccaaa

SEQ ID NO: 539641 - RNA, 23 nt, Human
cccuucuugaaaacauccccaaa

SEQ ID NO: 539642 - RNA, 19 nt, Human
ccuaaaaccuucuaggaca

SEQ ID NO: 539643 - RNA, 24 nt, Human
ccucggggcugaaaagugagggcu

SEQ ID NO: 539644 - RNA, 19 nt, Human
ccugaaaauuuaacccgug

SEQ ID NO: 539645 - RNA, 19 nt, Human
ccugaaaauuuaacccgug

SEQ ID NO: 539646 - RNA, 25 nt, Human
ccuggagucaagggucugccaaggc

SEQ ID NO: 539647 - RNA, 24 nt, Human
ccugucugcuccucuuuuucccag

SEQ ID NO: 539648 - RNA, 24 nt, Human
ccugucugcuccucuuuuucccag

SEQ ID NO: 539649 - RNA, 21 nt, Human
ccuugggguggccugacucug

SEQ ID NO: 539650 - RNA, 21 nt, Human
ccuugggguggccugacucug

SEQ ID NO: 539651 - RNA, 20 nt, Human
cgaauucugaauaccguccc

SEQ ID NO: 539652 - RNA, 23 nt, Human
cucccagagcccacgcguccgcc

SEQ ID NO: 539653 - RNA, 20 nt, Human
cuccugcgcucgaauucuga

SEQ ID NO: 539654 - RNA, 19 nt, Human
cucuggaucccaauagcuc

SEQ ID NO: 539655 - RNA, 24 nt, Human
cugugaguucucuagccaaggcug

SEQ ID NO: 539656 - RNA, 24 nt, Human
cugugaguucucuagccaaggcug

SEQ ID NO: 539657 - RNA, 21 nt, Human
cuuauaucccuucuugaaaac

SEQ ID NO: 539658 - RNA, 24 nt, Human
cuugggguggccugacucugucac

SEQ ID NO: 539659 - RNA, 28 nt, Human
cuuuauuuugugugugugugugugugug

SEQ ID NO: 539660 - RNA, 19 nt, Human
gcaagccaagcccuuccuu

SEQ ID NO: 539661 - RNA, 24 nt, Human
gcacucuugagggagagccaggaa

SEQ ID NO: 539662 - RNA, 24 nt, Human
gcacucuugagggagagccaggaa

SEQ ID NO: 539663 - RNA, 24 nt, Human
gcacuuggaaaauuccucuggcag

SEQ ID NO: 539664 - RNA, 21 nt, Human
gcccagggaacccugucugcu

SEQ ID NO: 539665 - RNA, 21 nt, Human
gcccagggaacccugucugcu

SEQ ID NO: 539666 - RNA, 24 nt, Human
gcuaagugcaaggagacacuucug

SEQ ID NO: 539667 - RNA, 20 nt, Human
ggagccaaacaggccuaaag

SEQ ID NO: 539668 - RNA, 20 nt, Human
ggagccaaacaggccuaaag

SEQ ID NO: 539669 - RNA, 19 nt, Human
ggccuggggaaaaaccauc

SEQ ID NO: 539670 - RNA, 20 nt, Human
ggcugggcugagacugggcc

SEQ ID NO: 539671 - RNA, 20 nt, Human
ggcugggcugagacugggcc

SEQ ID NO: 539672 - RNA, 19 nt, Human
ggguagaggaggaauauca

SEQ ID NO: 539673 - RNA, 21 nt, Human
gguggaagaugaacaaaacca

SEQ ID NO: 539674 - RNA, 22 nt, Human
gugaggugaaauccaggaauuc

SEQ ID NO: 539675 - RNA, 20 nt, Human
guggcagaggauccaggcac

SEQ ID NO: 539676 - RNA, 20 nt, Human
guggcagaggauccaggcac

SEQ ID NO: 539677 - RNA, 21 nt, Human
gugugugugugugugugugug

SEQ ID NO: 539678 - RNA, 21 nt, Human
gugugugugugugugugugug

SEQ ID NO: 539679 - RNA, 20 nt, Human
uaaaaccuucuaggacaucu

SEQ ID NO: 539680 - RNA, 20 nt, Human
uaaaaccuucuaggacaucu

SEQ ID NO: 539681 - RNA, 19 nt, Human
uaaaauuauucccgagaga

SEQ ID NO: 539682 - RNA, 19 nt, Human
uaaaauuauucccgagaga

SEQ ID NO: 539683 - RNA, 20 nt, Human
uaacccguggcagaggaucc

SEQ ID NO: 539684 - RNA, 20 nt, Human
uaacccguggcagaggaucc

SEQ ID NO: 539685 - RNA, 19 nt, Human
uaaccgucucucccaguuu

SEQ ID NO: 539686 - RNA, 19 nt, Human
uauaaaauuauucccgaga

SEQ ID NO: 539687 - RNA, 19 nt, Human
uauaaaauuauucccgaga

SEQ ID NO: 539688 - RNA, 18 nt, Human
uauuuugugugugugugu

SEQ ID NO: 539689 - RNA, 23 nt, Human
ucaacaccaaaauucaucucaau

SEQ ID NO: 539690 - RNA, 23 nt, Human
ucaacaccaaaauucaucucaau

SEQ ID NO: 539691 - RNA, 24 nt, Human
ucaaggucacaugggaaggaacac

SEQ ID NO: 539692 - RNA, 21 nt, Human
ucacaaucaagucugcuguuu

SEQ ID NO: 539693 - RNA, 22 nt, Human
ucaccugaugucacaaucaagu

SEQ ID NO: 539694 - RNA, 23 nt, Human
ucaccugcagggagagcagaagu

SEQ ID NO: 539695 - RNA, 22 nt, Human
uccaggaagaacuuucaacacc

SEQ ID NO: 539696 - RNA, 22 nt, Human
uccaggaagaacuuucaacacc

SEQ ID NO: 539697 - RNA, 24 nt, Human
uccaugaccaaugaagggaccaga

SEQ ID NO: 539698 - RNA, 25 nt, Human
uccaugaccaaugaagggaccagag

SEQ ID NO: 539699 - RNA, 18 nt, Human
ucccccaggucaucuccc

SEQ ID NO: 539700 - RNA, 18 nt, Human
ucccccaggucaucuccc

SEQ ID NO: 539701 - RNA, 22 nt, Human
uccccuggagucaagggucugc

SEQ ID NO: 539702 - RNA, 21 nt, Human
uccuugugugucuuuauuuug

SEQ ID NO: 539703 - RNA, 19 nt, Human
ucggggcugaaaagugagg

SEQ ID NO: 539704 - RNA, 19 nt, Human
ucucccaguuucacacucc

SEQ ID NO: 539705 - RNA, 20 nt, Human
ucucccaguuucacacuccc

SEQ ID NO: 539706 - RNA, 19 nt, Human
ucucugguuguuucaggcc

SEQ ID NO: 539707 - RNA, 23 nt, Human
ucucugguuguuucaggccuggg

SEQ ID NO: 539708 - RNA, 23 nt, Human
ucucugguuguuucaggccuggg

SEQ ID NO: 539709 - RNA, 19 nt, Human
ucugucacuauuccuaaaa

SEQ ID NO: 539710 - RNA, 19 nt, Human
ucugucacuauuccuaaaa

SEQ ID NO: 539711 - RNA, 18 nt, Human
ugaaaacauccccaaaga

SEQ ID NO: 539712 - RNA, 18 nt, Human
ugaaaacauccccaaaga

SEQ ID NO: 539713 - RNA, 18 nt, Human
ugaaaacauccccaaaga

SEQ ID NO: 539714 - RNA, 18 nt, Human
ugaaaacauccccaaaga

SEQ ID NO: 539715 - RNA, 20 nt, Human
ugaagggaccagaagucuac

SEQ ID NO: 539716 - RNA, 22 nt, Human
ugagaccagaccagggucaggc

SEQ ID NO: 539717 - RNA, 22 nt, Human
ugagaccagaccagggucaggc

SEQ ID NO: 539718 - RNA, 24 nt, Human
ugagaccagaccagggucaggcca

SEQ ID NO: 539719 - RNA, 24 nt, Human
ugagaccagaccagggucaggcca

SEQ ID NO: 539720 - RNA, 26 nt, Human
ugagacugggcccagggaacccuguc

SEQ ID NO: 539721 - RNA, 26 nt, Human
ugagacugggcccagggaacccuguc

SEQ ID NO: 539722 - RNA, 28 nt, Human
ugaggugaaauccaggaauucugaacaa

SEQ ID NO: 539723 - RNA, 18 nt, Human
ugauaucaaucugcuugg

SEQ ID NO: 539724 - RNA, 21 nt, Human
ugcaaggagacacuucuguuu

SEQ ID NO: 539725 - RNA, 24 nt, Human
ugccaaggcuaagugcaaggagac

SEQ ID NO: 539726 - RNA, 24 nt, Human
ugcccuggaggaaggacuuucagu

SEQ ID NO: 539727 - RNA, 23 nt, Human
uggcaagcaugaacaucacauuc

SEQ ID NO: 539728 - RNA, 24 nt, Human
uggcaagccaagcccuuccuuucc

SEQ ID NO: 539729 - RNA, 20 nt, Human
uggcugggcugagacugggc

SEQ ID NO: 539730 - RNA, 20 nt, Human
uggcugggcugagacugggc

SEQ ID NO: 539731 - RNA, 18 nt, Human
ugugugugugugugugug

SEQ ID NO: 539732 - RNA, 18 nt, Human
ugugugugugugugugug

SEQ ID NO: 539733 - RNA, 18 nt, Human
ugugugugugugugugug

SEQ ID NO: 539734 - RNA, 18 nt, Human
ugugugugugugugugug

SEQ ID NO: 539735 - RNA, 18 nt, Human
ugugugugugugugugug

SEQ ID NO: 539736 - RNA, 22 nt, Human
ugugugugugugugugugugag

SEQ ID NO: 539737 - RNA, 21 nt, Human
ugugugugugugugugugugu

SEQ ID NO: 539738 - RNA, 21 nt, Human
ugugugugugugugugugugu

SEQ ID NO: 539739 - RNA, 21 nt, Human
ugugugugugugugugugugu

SEQ ID NO: 539740 - RNA, 21 nt, Human
ugugugugugugugugugugu

SEQ ID NO: 539741 - RNA, 21 nt, Human
ugugugugugugugugugugu

SEQ ID NO: 539742 - RNA, 21 nt, Human
ugugugugugugugugugugu

SEQ ID NO: 539743 - RNA, 21 nt, Human
ugugugugugugugugugugu

SEQ ID NO: 539744 - RNA, 21 nt, Human
ugugugugugugugugugugu

SEQ ID NO: 539745 - RNA, 22 nt, Human
ugugugugugugugugugugug

SEQ ID NO: 539746 - RNA, 21 nt, Human
uguguguguguguguguuuug

SEQ ID NO: 539747 - RNA, 18 nt, Human
uguuuggucuugcuucuu

SEQ ID NO: 539748 - RNA, 19 nt, Human
uuacuaggucaccugaugu

SEQ ID NO: 539749 - RNA, 23 nt, Human
uucacacucccagagcccacgcg

SEQ ID NO: 539750 - RNA, 24 nt, Human
uucacagauaaagaaacagaggcc

SEQ ID NO: 539751 - RNA, 23 nt, Human
uugggguggccugacucugucac

SEQ ID NO: 539752 - RNA, 20 nt, Human
uuuacagaugggaaaaguga

SEQ ID NO: 539753 - RNA, 20 nt, Human
uuuacagaugggaaaaguga

SEQ ID NO: 539754 - RNA, 22 nt, Human
uuuacagaugggaaaagugauu

SEQ ID NO: 539755 - RNA, 22 nt, Human
uuuacagaugggaaaagugauu

SEQ ID NO: 539756 - RNA, 22 nt, Human
uuugagucugugugauaucaau

SEQ ID NO: 539757 - RNA, 18 nt, Human
uuuuuuuuuuuuuuuuug

SEQ ID NO: 539758 - RNA, 22 nt, Human
uuuuuuuuuuuuuuuuugccuu

SEQ ID NO: 539759 - RNA, 26 nt, Human
uuuuuuuuuuuuuuuuuuugccuuag

SEQ ID NO: 539760 - RNA, 23 nt, Human
aaauacaauauaaaugcuaugua

SEQ ID NO: 539761 - RNA, 18 nt, Human
aaggggccccccaccucc

SEQ ID NO: 539762 - RNA, 19 nt, Human
aaggggccccccaccuccc

SEQ ID NO: 539763 - RNA, 25 nt, Human
acaccacuucagaaagaggggaacc

SEQ ID NO: 539764 - RNA, 18 nt, Human
accgagguggucuggaac

SEQ ID NO: 539765 - RNA, 21 nt, Human
acgcggcugcagcccgggccu

SEQ ID NO: 539766 - RNA, 19 nt, Human
agcuaugccucaguaucca

SEQ ID NO: 539767 - RNA, 22 nt, Human
aggaagggucccccuuuucagg

SEQ ID NO: 539768 - RNA, 22 nt, Human
aggccccgggcuccccgcccag

SEQ ID NO: 539769 - RNA, 21 nt, Human
agguggucuggaacugaaccc

SEQ ID NO: 539770 - RNA, 23 nt, Human
augagaaggccccggggggagga

SEQ ID NO: 539771 - RNA, 18 nt, Human
caacccucagacaccgac

SEQ ID NO: 539772 - RNA, 21 nt, Human
caacucccaagccaccucuuc

SEQ ID NO: 539773 - RNA, 18 nt, Human
caauaugcaguaaacaug

SEQ ID NO: 539774 - RNA, 18 nt, Human
cacagcgguggccucucc

SEQ ID NO: 539775 - RNA, 24 nt, Human
cacccccuccccgguccuggccca

SEQ ID NO: 539776 - RNA, 18 nt, Human
caccccgccgcugucacc

SEQ ID NO: 539777 - RNA, 20 nt, Human
caccggggcccuggcuuggg

SEQ ID NO: 539778 - RNA, 19 nt, Human
cacguaaccuacgcacacc

SEQ ID NO: 539779 - RNA, 27 nt, Human
cacugcacagcgguggccucuccagcg

SEQ ID NO: 539780 - RNA, 21 nt, Human
cacuggggggccagucagagg

SEQ ID NO: 539781 - RNA, 23 nt, Human
cacuucagaaagagcaauacagg

SEQ ID NO: 539782 - RNA, 20 nt, Human
caggacugcaaccucaaccc

SEQ ID NO: 539783 - RNA, 22 nt, Human
caggccuugguggcggccccgg

SEQ ID NO: 539784 - RNA, 23 nt, Human
cauaaugcuauugcacauuuagu

SEQ ID NO: 539785 - RNA, 20 nt, Human
cauaccucauucuacuaugg

SEQ ID NO: 539786 - RNA, 22 nt, Human
caugggcugcuccaaggcccug

SEQ ID NO: 539787 - RNA, 23 nt, Human
ccaagccaccucuucagaaucac

SEQ ID NO: 539788 - RNA, 20 nt, Human
ccacgcgccgggccagcucc

SEQ ID NO: 539789 - RNA, 27 nt, Human
cccacaauaucuccgagauauaccugu

SEQ ID NO: 539790 - RNA, 19 nt, Human
ccccgcccagcuccccagc

SEQ ID NO: 539791 - RNA, 26 nt, Human
ccccgcccagcuccccagccccgcgg

SEQ ID NO: 539792 - RNA, 22 nt, Human
ccccgggcuccccgcccagcuc

SEQ ID NO: 539793 - RNA, 22 nt, Human
cccggcgcuggccccgcccucc

SEQ ID NO: 539794 - RNA, 18 nt, Human
cccuccgucccaccuucc

SEQ ID NO: 539795 - RNA, 24 nt, Human
cccuccgucccaccuuccggcugc

SEQ ID NO: 539796 - RNA, 19 nt, Human
cccuggcuuggguugcggg

SEQ ID NO: 539797 - RNA, 23 nt, Human
ccugagaccccaggaccugcagg

SEQ ID NO: 539798 - RNA, 19 nt, Human
ccugcagcaggugcucuga

SEQ ID NO: 539799 - RNA, 20 nt, Human
ccuggcccaccccgccgcug

SEQ ID NO: 539800 - RNA, 19 nt, Human
ccuuagggggagccggggg

SEQ ID NO: 539801 - RNA, 23 nt, Human
ccuuccggcugcgccgggccuuc

SEQ ID NO: 539802 - RNA, 23 nt, Human
cgcccggccuuagggggagccgg

SEQ ID NO: 539803 - RNA, 20 nt, Human
cgcccuccgucccaccuucc

SEQ ID NO: 539804 - RNA, 25 nt, Human
cgcccuccgucccaccuuccggcug

SEQ ID NO: 539805 - RNA, 20 nt, Human
cgggaagccacgcgccgggc

SEQ ID NO: 539806 - RNA, 20 nt, Human
cuaguuccuagaguuuuaag

SEQ ID NO: 539807 - RNA, 22 nt, Human
cucagcagacgccuccgaagcc

SEQ ID NO: 539808 - RNA, 20 nt, Human
cucccaagaugagaaggccc

SEQ ID NO: 539809 - RNA, 20 nt, Human
cuccgagcugcgcccggccu

SEQ ID NO: 539810 - RNA, 22 nt, Human
cugcaggggggugggauccagu

SEQ ID NO: 539811 - RNA, 22 nt, Human
cugcggcaggcaggccuuuacu

SEQ ID NO: 539812 - RNA, 21 nt, Human
gagaaggccccggggggagga

SEQ ID NO: 539813 - RNA, 18 nt, Human
gagcgugaucacuucccc

SEQ ID NO: 539814 - RNA, 22 nt, Human
gaggcccuggcagggcgagucu

SEQ ID NO: 539815 - RNA, 22 nt, Human
gcaaccucaacccucagacacc

SEQ ID NO: 539816 - RNA, 25 nt, Human
gcaauacaggcauaccucauucuac

SEQ ID NO: 539817 - RNA, 24 nt, Human
gccccggcgcuggccccgcccucc

SEQ ID NO: 539818 - RNA, 25 nt, Human
gcgcccggagaagaguccugggaac

SEQ ID NO: 539819 - RNA, 19 nt, Human
gcgccgggccagcuccugg

SEQ ID NO: 539820 - RNA, 23 nt, Human
gcgccgggccuuccgggaagcca

SEQ ID NO: 539821 - RNA, 22 nt, Human
gcuuuauugugauguuggcuuu

SEQ ID NO: 539822 - RNA, 21 nt, Human
ggagaaguucagagggacagu

SEQ ID NO: 539823 - RNA, 20 nt, Human
ggcaggcaggccuuuacucu

SEQ ID NO: 539824 - RNA, 19 nt, Human
ggccccgggcuccccgccc

SEQ ID NO: 539825 - RNA, 21 nt, Human
ggccuggcaggccccgggcuc

SEQ ID NO: 539826 - RNA, 20 nt, Human
ggccuugguggcggccccgg

SEQ ID NO: 539827 - RNA, 19 nt, Human
gggaggaugaagugugguc

SEQ ID NO: 539828 - RNA, 18 nt, Human
ggggaggaugaagugugg

SEQ ID NO: 539829 - RNA, 22 nt, Human
ggggccccccaccuccccggag

SEQ ID NO: 539830 - RNA, 18 nt, Human
gggggugggauccagucc

SEQ ID NO: 539831 - RNA, 22 nt, Human
ggugggauccaguccugcagca

SEQ ID NO: 539832 - RNA, 20 nt, Human
uaaccuacgcacaccuuccu

SEQ ID NO: 539833 - RNA, 23 nt, Human
uaagaguauuuccaucacaaugc

SEQ ID NO: 539834 - RNA, 21 nt, Human
uaauaccaaauacaauauaaa

SEQ ID NO: 539835 - RNA, 20 nt, Human
uacagcuaugccucaguauc

SEQ ID NO: 539836 - RNA, 22 nt, Human
uacgcacaccuuccuguauaau

SEQ ID NO: 539837 - RNA, 25 nt, Human
ucaaauauuuccuauccaaggcugg

SEQ ID NO: 539838 - RNA, 21 nt, Human
ucacaaugccacucuaguucc

SEQ ID NO: 539839 - RNA, 22 nt, Human
ucacaccacuucagaaagagca

SEQ ID NO: 539840 - RNA, 21 nt, Human
ucacuggggggccagucagag

SEQ ID NO: 539841 - RNA, 21 nt, Human
ucagcaggccgcccguccccu

SEQ ID NO: 539842 - RNA, 18 nt, Human
uccaugggggauggguuc

SEQ ID NO: 539843 - RNA, 18 nt, Human
ucccaagaugagaaggcc

SEQ ID NO: 539844 - RNA, 18 nt, Human
uccccagacccaugcggg

SEQ ID NO: 539845 - RNA, 18 nt, Human
uccccagggggcauccgc

SEQ ID NO: 539846 - RNA, 22 nt, Human
uccccagggggcauccgcuggg

SEQ ID NO: 539847 - RNA, 21 nt, Human
ucccccuuuucaggaaagcuc

SEQ ID NO: 539848 - RNA, 23 nt, Human
uccccgcccagcuccccagcccc

SEQ ID NO: 539849 - RNA, 19 nt, Human
uccccgguccuggcccacc

SEQ ID NO: 539850 - RNA, 21 nt, Human
uccccgguccuggcccacccc

SEQ ID NO: 539851 - RNA, 20 nt, Human
ucccuggguaggggacgguu

SEQ ID NO: 539852 - RNA, 20 nt, Human
ucuacuaugcuuugugaaua

SEQ ID NO: 539853 - RNA, 23 nt, Human
ugagaccccaggaccugcagggg

SEQ ID NO: 539854 - RNA, 19 nt, Human
ugcagccuagugggggccg

SEQ ID NO: 539855 - RNA, 19 nt, Human
ugcagccuagugggggccg

SEQ ID NO: 539856 - RNA, 19 nt, Human
ugcuauugcacauuuagug

SEQ ID NO: 539857 - RNA, 21 nt, Human
ugcuccaaggcccugagaccc

SEQ ID NO: 539858 - RNA, 20 nt, Human
uggcaccauuuuccaacagc

SEQ ID NO: 539859 - RNA, 21 nt, Human
uggcaggccccgggcuccccg

SEQ ID NO: 539860 - RNA, 25 nt, Human
uggcgggccuucgagggagaaguuc

SEQ ID NO: 539861 - RNA, 18 nt, Human
uggcuccgagcugcgccc

SEQ ID NO: 539862 - RNA, 22 nt, Human
ugggaagagcgaggcccuggca

SEQ ID NO: 539863 - RNA, 19 nt, Human
uggguuccaggacugcaac

SEQ ID NO: 539864 - RNA, 22 nt, Human
uggucagaccgucggcugagcg

SEQ ID NO: 539865 - RNA, 22 nt, Human
ugugauguuggcuuuaccgagg

SEQ ID NO: 539866 - RNA, 18 nt, Human
uucaaauauuuccuaucc

SEQ ID NO: 539867 - RNA, 23 nt, Human
uucucccaacucccaagccaccu

SEQ ID NO: 539868 - RNA, 22 nt, Human
uugaagguuuguagcagccuga

SEQ ID NO: 539869 - RNA, 23 nt, Human
uuuagggaauaauggcaagaaaa

SEQ ID NO: 539870 - RNA, 20 nt, Human
uuucaaauauuuccuaucca

SEQ ID NO: 539871 - RNA, 18 nt, Human
uuuucaggaaagcucagc

SEQ ID NO: 539872 - RNA, 23 nt, Human
aaaacaaaaauacaaacagagag

SEQ ID NO: 539873 - RNA, 18 nt, Human
aaaauacaaacagagagc

SEQ ID NO: 539874 - RNA, 23 nt, Human
aaacaaaaauacaaacagagagc

SEQ ID NO: 539875 - RNA, 22 nt, Human
aacaaaacaaaaauacaaacag

SEQ ID NO: 539876 - RNA, 18 nt, Human
aagaaucaaaaacaaaac

SEQ ID NO: 539877 - RNA, 23 nt, Human
acaaaacaaaaauacaaacagag

SEQ ID NO: 539878 - RNA, 24 nt, Human
acaaaacaaaaauacaaacagaga

SEQ ID NO: 539879 - RNA, 26 nt, Human
acaaaacaaaaauacaaacagagagc

SEQ ID NO: 539880 - RNA, 21 nt, Human
agcagcuggucgucuuccacg

SEQ ID NO: 539881 - RNA, 19 nt, Human
agcugcugcuacuggucuc

SEQ ID NO: 539882 - RNA, 22 nt, Human
aggcacugcaggugcuaaggcc

SEQ ID NO: 539883 - RNA, 22 nt, Human
aggcugcagcuugcacggagcc

SEQ ID NO: 539884 - RNA, 23 nt, Human
agggcagagaagucaaccaaguc

SEQ ID NO: 539885 - RNA, 18 nt, Human
aggugcuaaggcccaagc

SEQ ID NO: 539886 - RNA, 20 nt, Human
auucacauaauuucuacacc

SEQ ID NO: 539887 - RNA, 21 nt, Human
caaaaauacaaacagagagca

SEQ ID NO: 539888 - RNA, 18 nt, Human
caccccaaauucucaauc

SEQ ID NO: 539889 - RNA, 19 nt, Human
cacucaaaauacucugcac

SEQ ID NO: 539890 - RNA, 25 nt, Human
cccaaauucucaaucccuguggcgu

SEQ ID NO: 539891 - RNA, 23 nt, Human
ccuccauggcgcgcagcguaccc

SEQ ID NO: 539892 - RNA, 22 nt, Human
ccuuguagcaguauauccacuu

SEQ ID NO: 539893 - RNA, 18 nt, Human
cgccucuggaagcggcgg

SEQ ID NO: 539894 - RNA, 20 nt, Human
cggcucccaggacugugcgg

SEQ ID NO: 539895 - RNA, 23 nt, Human
cgggguguccucgaagggcuggu

SEQ ID NO: 539896 - RNA, 23 nt, Human
cguacaucccuuccagcucuguu

SEQ ID NO: 539897 - RNA, 19 nt, Human
cucaaaauacucugcaccu

SEQ ID NO: 539898 - RNA, 23 nt, Human
cucacagucucaagaaucaaaaa

SEQ ID NO: 539899 - RNA, 24 nt, Human
cucuccuuuguuucuuuccuuuuc

SEQ ID NO: 539900 - RNA, 22 nt, Human
cugcagcagcuggucgucuucc

SEQ ID NO: 539901 - RNA, 19 nt, Human
cuggcccugagcuucugca

SEQ ID NO: 539902 - RNA, 27 nt, Human
cuuaagaagcugcugcuacuggucucu

SEQ ID NO: 539903 - RNA, 19 nt, Human
cuuguagggagaggcuguc

SEQ ID NO: 539904 - RNA, 18 nt, Human
gaaggcagcggagucaca

SEQ ID NO: 539905 - RNA, 20 nt, Human
gagcuucugcagcagcuggu

SEQ ID NO: 539906 - RNA, 25 nt, Human
gcccaagcaacugacucuuccuggu

SEQ ID NO: 539907 - RNA, 18 nt, Human
gcccugagcuucugcagc

SEQ ID NO: 539908 - RNA, 21 nt, Human
gcccugagcuucugcagcagc

SEQ ID NO: 539909 - RNA, 22 nt, Human
gcuugcacggagccaucugucc

SEQ ID NO: 539910 - RNA, 21 nt, Human
ggcaggcacggcaggugaggc

SEQ ID NO: 539911 - RNA, 21 nt, Human
gggguguccucgaagggcugg

SEQ ID NO: 539912 - RNA, 18 nt, Human
guguccucgaagggcugg

SEQ ID NO: 539913 - RNA, 20 nt, Human
uacuaaggccaugucugugg

SEQ ID NO: 539914 - RNA, 23 nt, Human
uacucugcaccuuguagcaguau

SEQ ID NO: 539915 - RNA, 23 nt, Human
ucaagaaucaaaaacaaaacaaa

SEQ ID NO: 539916 - RNA, 26 nt, Human
ucgcugggucaccaggacucuuuccc

SEQ ID NO: 539917 - RNA, 26 nt, Human
ucgcugggucaccaggacucuuuccg

SEQ ID NO: 539918 - RNA, 20 nt, Human
ucucugggagaugaagcugg

SEQ ID NO: 539919 - RNA, 21 nt, Human
ucucuuguagggagaggcugu

SEQ ID NO: 539920 - RNA, 23 nt, Human
ucuguggaggaaggaugcaaagg

SEQ ID NO: 539921 - RNA, 19 nt, Human
ugcaguauccgggggcagg

SEQ ID NO: 539922 - RNA, 22 nt, Human
ugcaguauccgggggcaggcac

SEQ ID NO: 539923 - RNA, 24 nt, Human
uggcaucgaccucaccgcuuuuug

SEQ ID NO: 539924 - RNA, 20 nt, Human
uggcccugagcuucugcagc

SEQ ID NO: 539925 - RNA, 19 nt, Human
uguccuguccgcgggcuuc

SEQ ID NO: 539926 - RNA, 25 nt, Human
uguuucuuuccuuuauuagucuucc

SEQ ID NO: 539927 - RNA, 19 nt, Human
uuccacguccucgcccucc

SEQ ID NO: 539928 - RNA, 20 nt, Human
uucucuaucagccgcugcau

SEQ ID NO: 539929 - RNA, 21 nt, Human
uuugcaccaccgggguguccu

SEQ ID NO: 539930 - RNA, 23 nt, Human
uuuuuuuuuuuuuuuucuaauug

SEQ ID NO: 539931 - RNA, 23 nt, Human
uuuuuuuuuuuuuuuuucuaauu

SEQ ID NO: 539932 - RNA, 18 nt, Human
aaaaaaacaaaaaacaag

SEQ ID NO: 539933 - RNA, 18 nt, Human
aaaguacuuuggcugcuc

SEQ ID NO: 539934 - RNA, 23 nt, Human
aacuuuuuuuauccaccccccua

SEQ ID NO: 539935 - RNA, 22 nt, Human
aagaaucacaacaaacugagcc

SEQ ID NO: 539936 - RNA, 18 nt, Human
aagcacauggauggaaac

SEQ ID NO: 539937 - RNA, 22 nt, Human
aagcugcugucucccgaccugg

SEQ ID NO: 539938 - RNA, 18 nt, Human
acugcaaaaguagaucgg

SEQ ID NO: 539939 - RNA, 20 nt, Human
agcagcaccuaacgcucggc

SEQ ID NO: 539940 - RNA, 19 nt, Human
agcugcaguuuugcucagu

SEQ ID NO: 539941 - RNA, 20 nt, Human
auccaccccccuaucagccu

SEQ ID NO: 539942 - RNA, 21 nt, Human
auguacacacacaagcauaug

SEQ ID NO: 539943 - RNA, 19 nt, Human
caaggggaagaaaaggggg

SEQ ID NO: 539944 - RNA, 22 nt, Human
cagccuccuccuuggguccaag

SEQ ID NO: 539945 - RNA, 23 nt, Human
caggggcaccagcagagggaagc

SEQ ID NO: 539946 - RNA, 28 nt, Human
cauguacacacacaagcauaugccucca

SEQ ID NO: 539947 - RNA, 22 nt, Human
ccaaccugugcaccuggccugu

SEQ ID NO: 539948 - RNA, 23 nt, Human
ccaaccugugcaccuggccugug

SEQ ID NO: 539949 - RNA, 18 nt, Human
ccaggggcaccagcagag

SEQ ID NO: 539950 - RNA, 23 nt, Human
cccuaucagccuccuccuugggu

SEQ ID NO: 539951 - RNA, 28 nt, Human
cccugcuccaaacucagccugcucuccc

SEQ ID NO: 539952 - RNA, 20 nt, Human
ccuccuuggguccaaggauu

SEQ ID NO: 539953 - RNA, 22 nt, Human
ccuggggcaggaggggcugagg

SEQ ID NO: 539954 - RNA, 20 nt, Human
cgaccuggggcaggaggggc

SEQ ID NO: 539955 - RNA, 18 nt, Human
cgcaagcacauggaugga

SEQ ID NO: 539956 - RNA, 21 nt, Human
cgcagccgggaucugcauggc

SEQ ID NO: 539957 - RNA, 19 nt, Human
cucaaggggaagaaaaggg

SEQ ID NO: 539958 - RNA, 23 nt, Human
cucaaggggaagaaaagggggga

SEQ ID NO: 539959 - RNA, 19 nt, Human
cuccagccccaccuggagg

SEQ ID NO: 539960 - RNA, 19 nt, Human
cugccgcugccgccgcugc

SEQ ID NO: 539961 - RNA, 18 nt, Human
cugccggauggacccugc

SEQ ID NO: 539962 - RNA, 27 nt, Human
gaaaaucaggugaaaugaggccuggug

SEQ ID NO: 539963 - RNA, 21 nt, Human
gacacacacucacuccacacc

SEQ ID NO: 539964 - RNA, 19 nt, Human
gaccuggggcaggaggggc

SEQ ID NO: 539965 - RNA, 19 nt, Human
gaggggcucuggccggcuu

SEQ ID NO: 539966 - RNA, 21 nt, Human
gagggucaucauggggcagga

SEQ ID NO: 539967 - RNA, 19 nt, Human
gaucugugguugucuccuu

SEQ ID NO: 539968 - RNA, 22 nt, Human
gcaaaacgccgcgcagagagca

SEQ ID NO: 539969 - RNA, 20 nt, Human
gcucaaggggaagaaaaggg

SEQ ID NO: 539970 - RNA, 22 nt, Human
gcugggcugccgcugccgccgc

SEQ ID NO: 539971 - RNA, 20 nt, Human
ggcaugcugggcagaggggc

SEQ ID NO: 539972 - RNA, 21 nt, Human
ggcuguggauuggcaccugga

SEQ ID NO: 539973 - RNA, 19 nt, Human
gggcaggaggggcugagga

SEQ ID NO: 539974 - RNA, 24 nt, Human
gggugguuuuuguuuccuuuuuuu

SEQ ID NO: 539975 - RNA, 18 nt, Human
ggucaucauggggcagga

SEQ ID NO: 539976 - RNA, 24 nt, Human
gguugucuccuuuugacaaucuca

SEQ ID NO: 539977 - RNA, 21 nt, Human
gugaaaaucaggugaaaugag

SEQ ID NO: 539978 - RNA, 22 nt, Human
guuguggaucuuggggccucuc

SEQ ID NO: 539979 - RNA, 18 nt, Human
uagcaugucucaaagccu

SEQ ID NO: 539980 - RNA, 20 nt, Human
uaucaacaaaaagaaucaca

SEQ ID NO: 539981 - RNA, 25 nt, Human
ucaacaaaaagaaucacaacaaacc

SEQ ID NO: 539982 - RNA, 21 nt, Human
ucagccugcucuccuugugac

SEQ ID NO: 539983 - RNA, 21 nt, Human
ucauggggcaggagacagaca

SEQ ID NO: 539984 - RNA, 24 nt, Human
ucccaggacugccggauggacccu

SEQ ID NO: 539985 - RNA, 21 nt, Human
ucccgacggggcgaaaaaaac

SEQ ID NO: 539986 - RNA, 19 nt, Human
uccuccgggugucucccuc

SEQ ID NO: 539987 - RNA, 19 nt, Human
uccucgggcugggggaagu

SEQ ID NO: 539988 - RNA, 22 nt, Human
uccuugugacagcagagccuuu

SEQ ID NO: 539989 - RNA, 22 nt, Human
ucucggcugaagcagcuccugc

SEQ ID NO: 539990 - RNA, 18 nt, Human
ucuggccggcuucaucuu

SEQ ID NO: 539991 - RNA, 20 nt, Human
ucugucucuuuugugucucc

SEQ ID NO: 539992 - RNA, 18 nt, Human
ugaggccugguggggcug

SEQ ID NO: 539993 - RNA, 21 nt, Human
ugaggccugguggggcugugg

SEQ ID NO: 539994 - RNA, 21 nt, Human
ugcugggcagaggggcucugg

SEQ ID NO: 539995 - RNA, 18 nt, Human
ugggucaaaaaaacaaaa

SEQ ID NO: 539996 - RNA, 20 nt, Human
uguacacacacaagcauaug

SEQ ID NO: 539997 - RNA, 27 nt, Human
uguacacacacaagcauaugccuccag

SEQ ID NO: 539998 - RNA, 19 nt, Human
uucaucuucccaccugcuc

SEQ ID NO: 539999 - RNA, 18 nt, Human
uugcauuuuccuuccaca

SEQ ID NO: 540000 - RNA, 20 nt, Human
aaaaaaagaaacagccuauc

SEQ ID NO: 540001 - RNA, 22 nt, Human
aaaaagaacuucaaaugagaca

SEQ ID NO: 540002 - RNA, 26 nt, Human
aaaaguauggauauaacaacaacaac

SEQ ID NO: 540003 - RNA, 21 nt, Human
aaacaaaacacauggaacuca

SEQ ID NO: 540004 - RNA, 21 nt, Human
aaacagccuaucauugaaaau

SEQ ID NO: 540005 - RNA, 21 nt, Human
aaagaaacagccuaucauuga

SEQ ID NO: 540006 - RNA, 22 nt, Human
aaagaaacagccuaucauugaa

SEQ ID NO: 540007 - RNA, 21 nt, Human
aaagaaagauuuaauaaagag

SEQ ID NO: 540008 - RNA, 23 nt, Human
aaagaacuucaaaugagacaagc

SEQ ID NO: 540009 - RNA, 21 nt, Human
aacaaaaaaagaaacagccua

SEQ ID NO: 540010 - RNA, 22 nt, Human
aaccucuucuuuuacucuucug

SEQ ID NO: 540011 - RNA, 22 nt, Human
aacuacuauuuagagaggaaga

SEQ ID NO: 540012 - RNA, 23 nt, Human
aagaugcauccuaaaacucgaaa

SEQ ID NO: 540013 - RNA, 20 nt, Human
aagcaaaaacaagacauaag

SEQ ID NO: 540014 - RNA, 22 nt, Human
aagcaaaaacaagacauaagca

SEQ ID NO: 540015 - RNA, 21 nt, Human
aagcaaaagccgggagaggga

SEQ ID NO: 540016 - RNA, 20 nt, Human
aaggaauuaauccauggagc

SEQ ID NO: 540017 - RNA, 24 nt, Human
aauucaguuaguggcaaaaaguug

SEQ ID NO: 540018 - RNA, 18 nt, Human
acaaaauucaacagcgac

SEQ ID NO: 540019 - RNA, 24 nt, Human
acaacaacaacaauaacaacaaaa

SEQ ID NO: 540020 - RNA, 22 nt, Human
acaagcaaaaacaagacauaag

SEQ ID NO: 540021 - RNA, 24 nt, Human
acagucaauaucgugaaguauaac

SEQ ID NO: 540022 - RNA, 18 nt, Human
acauguaaaaaucuacac

SEQ ID NO: 540023 - RNA, 19 nt, Human
agaaacacaaagauaucca

SEQ ID NO: 540024 - RNA, 26 nt, Human
agacaagaugcauccuaaaacucgaa

SEQ ID NO: 540025 - RNA, 20 nt, Human
agagaggaagagaauuggag

SEQ ID NO: 540026 - RNA, 18 nt, Human
agcagaaacacaaagaua

SEQ ID NO: 540027 - RNA, 26 nt, Human
aguuuauuuauaaugauauuuacaua

SEQ ID NO: 540028 - RNA, 23 nt, Human
auaucuucaaagaucaggucagg

SEQ ID NO: 540029 - RNA, 21 nt, Human
augcacaagauuaggcagagu

SEQ ID NO: 540030 - RNA, 18 nt, Human
auguacaaggagguagua

SEQ ID NO: 540031 - RNA, 24 nt, Human
caaaaacaagacauaagcauuguc

SEQ ID NO: 540032 - RNA, 19 nt, Human
caacaaaaaaagaaacagc

SEQ ID NO: 540033 - RNA, 22 nt, Human
caacaaaaaaagaaacagccua

SEQ ID NO: 540034 - RNA, 22 nt, Human
caacaacaauaacaacaaaaaa

SEQ ID NO: 540035 - RNA, 19 nt, Human
caacaauaacaacaaaaaa

SEQ ID NO: 540036 - RNA, 26 nt, Human
caacaauaacaacaaaaaaagaaaca

SEQ ID NO: 540037 - RNA, 21 nt, Human
caagaugcauccuaaaacucg

SEQ ID NO: 540038 - RNA, 24 nt, Human
caaguuaaugaccuauuuccaugc

SEQ ID NO: 540039 - RNA, 24 nt, Human
caaguuaggaugcuuugaaaagca

SEQ ID NO: 540040 - RNA, 21 nt, Human
caccuugcagggaugggggcu

SEQ ID NO: 540041 - RNA, 22 nt, Human
cacuuugucacucacacugaau

SEQ ID NO: 540042 - RNA, 19 nt, Human
cagcaauauagacugacag

SEQ ID NO: 540043 - RNA, 21 nt, Human
caggcuagaaaaaugucacca

SEQ ID NO: 540044 - RNA, 22 nt, Human
caugcacaagauuaggcagagu

SEQ ID NO: 540045 - RNA, 20 nt, Human
cauguguggcauaacaaaau

SEQ ID NO: 540046 - RNA, 22 nt, Human
cuaaaacucgaaauuuuccaga

SEQ ID NO: 540047 - RNA, 24 nt, Human
cuaauccccauucagaaaacugcu

SEQ ID NO: 540048 - RNA, 22 nt, Human
cuccugcuucuccgacauugca

SEQ ID NO: 540049 - RNA, 24 nt, Human
cugggguuaagccgugaguucuca

SEQ ID NO: 540050 - RNA, 21 nt, Human
cuuuagaugaagucacauuca

SEQ ID NO: 540051 - RNA, 23 nt, Human
gaaaucaaugaaaacaugcacaa

SEQ ID NO: 540052 - RNA, 19 nt, Human
gaaccucuaagauauccag

SEQ ID NO: 540053 - RNA, 19 nt, Human
gaagucacauucagucugc

SEQ ID NO: 540054 - RNA, 20 nt, Human
gagguagaaauaauuacaaa

SEQ ID NO: 540055 - RNA, 21 nt, Human
gcugaugcauggagauguggc

SEQ ID NO: 540056 - RNA, 22 nt, Human
ggcacauguaaaaaucuacaca

SEQ ID NO: 540057 - RNA, 24 nt, Human
gggucguacuaccuagcaucuuag

SEQ ID NO: 540058 - RNA, 27 nt, Human
gucaggguuagccucacaauguguagg

SEQ ID NO: 540059 - RNA, 19 nt, Human
gucccuuggcuuauuaguu

SEQ ID NO: 540060 - RNA, 18 nt, Human
guggcuauaucugcuggc

SEQ ID NO: 540061 - RNA, 22 nt, Human
uaaaaaagaacuucaaaugaga

SEQ ID NO: 540062 - RNA, 23 nt, Human
uaaaaacaaaacacauggaacuc

SEQ ID NO: 540063 - RNA, 18 nt, Human
uaaauguucauaaacccc

SEQ ID NO: 540064 - RNA, 18 nt, Human
uaacaacaacaacaauaa

SEQ ID NO: 540065 - RNA, 26 nt, Human
uaacaacaacaacaauaacaacaaaa

SEQ ID NO: 540066 - RNA, 23 nt, Human
uaacauaauaaaaaagaacuuca

SEQ ID NO: 540067 - RNA, 24 nt, Human
uaacauaauaaaaaagaacuucaa

SEQ ID NO: 540068 - RNA, 21 nt, Human
uaagaguuucaaguuaaugac

SEQ ID NO: 540069 - RNA, 18 nt, Human
uacaaagaaacugaugua

SEQ ID NO: 540070 - RNA, 18 nt, Human
uacuacuaaacaugugug

SEQ ID NO: 540071 - RNA, 24 nt, Human
uagaaccucuaagauauccagcau

SEQ ID NO: 540072 - RNA, 20 nt, Human
uagaguugcuccugcuucuc

SEQ ID NO: 540073 - RNA, 21 nt, Human
uagcagaaacacaaagauauc

SEQ ID NO: 540074 - RNA, 25 nt, Human
uagcagaaacacaaagauauccaua

SEQ ID NO: 540075 - RNA, 20 nt, Human
uagcauauuuguuacaaaca

SEQ ID NO: 540076 - RNA, 26 nt, Human
uagcauggauucuucaaucgucccuu

SEQ ID NO: 540077 - RNA, 21 nt, Human
uagcuuuaaguaaucuguucu

SEQ ID NO: 540078 - RNA, 30 nt, Human
uauaacaacaacaacaauaacaacaaaaaa

SEQ ID NO: 540079 - RNA, 19 nt, Human
uauaacaacauuugcugaa

SEQ ID NO: 540080 - RNA, 21 nt, Human
uauuucacaggcccauugaug

SEQ ID NO: 540081 - RNA, 18 nt, Human
ucaaugaaaacaugcaca

SEQ ID NO: 540082 - RNA, 22 nt, Human
ucaauuagaugaauccuuucag

SEQ ID NO: 540083 - RNA, 19 nt, Human
ucacuggaaaacaacuuag

SEQ ID NO: 540084 - RNA, 30 nt, Human
ucacuguaagaguuuuauuugccuuccaaa

SEQ ID NO: 540085 - RNA, 18 nt, Human
ucacuucuaaauuucacu

SEQ ID NO: 540086 - RNA, 21 nt, Human
ucacuuugucacucacacuga

SEQ ID NO: 540087 - RNA, 21 nt, Human
uccagcaucaugguaaauugg

SEQ ID NO: 540088 - RNA, 19 nt, Human
uccuguucuaguuucaauu

SEQ ID NO: 540089 - RNA, 24 nt, Human
uccuugaguuuuucagcuguguaa

SEQ ID NO: 540090 - RNA, 24 nt, Human
ucuauacagcugcauucuuuaaca

SEQ ID NO: 540091 - RNA, 22 nt, Human
ucuguguuuuuuuccaaguuau

SEQ ID NO: 540092 - RNA, 22 nt, Human
ugaaaugaaauagcuuuaagua

SEQ ID NO: 540093 - RNA, 26 nt, Human
ugaauuggaauugaacaauggcucuc

SEQ ID NO: 540094 - RNA, 22 nt, Human
ugacauuggugaacaucugcuu

SEQ ID NO: 540095 - RNA, 23 nt, Human
ugacauuucuaaagcauuagcau

SEQ ID NO: 540096 - RNA, 24 nt, Human
ugagaauaaauggcuuuauaauuu

SEQ ID NO: 540097 - RNA, 20 nt, Human
ugauagcagaaacacaaaga

SEQ ID NO: 540098 - RNA, 18 nt, Human
ugauuggccauuuuccuc

SEQ ID NO: 540099 - RNA, 19 nt, Human
ugcuggcauacucccuuca

SEQ ID NO: 540100 - RNA, 23 nt, Human
uggaaaacaacuuagugccuagc

SEQ ID NO: 540101 - RNA, 18 nt, Human
uggaacucacaaguuaua

SEQ ID NO: 540102 - RNA, 23 nt, Human
uggccauuuuccucaacugcauc

SEQ ID NO: 540103 - RNA, 18 nt, Human
uggcuuauuaguuuuaua

SEQ ID NO: 540104 - RNA, 18 nt, Human
uggcuuauuaguuuuaua

SEQ ID NO: 540105 - RNA, 24 nt, Human
uggcuuauuaguuuuauaacuagu

SEQ ID NO: 540106 - RNA, 21 nt, Human
uuaaacucaucaauuagaugg

SEQ ID NO: 540107 - RNA, 24 nt, Human
uuaaauaucaaauagacaacuuca

SEQ ID NO: 540108 - RNA, 18 nt, Human
uuacaaaaauacugacau

SEQ ID NO: 540109 - RNA, 25 nt, Human
uuacaaacaaucaccaacuaauccc

SEQ ID NO: 540110 - RNA, 20 nt, Human
uucaaaugagacaagcaaaa

SEQ ID NO: 540111 - RNA, 19 nt, Human
uucaagagaagcaaaagcc

SEQ ID NO: 540112 - RNA, 22 nt, Human
uugcaugugcuauucucuccuu

SEQ ID NO: 540113 - RNA, 21 nt, Human
uuggagcagaagugacugggc

SEQ ID NO: 540114 - RNA, 18 nt, Human
uuucacuuugucacucac

SEQ ID NO: 540115 - RNA, 23 nt, Human
uuucacuuugucacucacacuga

SEQ ID NO: 540116 - RNA, 21 nt, Human
uuugaaaugaaauagcuuuaa

SEQ ID NO: 540117 - RNA, 21 nt, Human
uuuggguauagugauguacaa

SEQ ID NO: 540118 - RNA, 18 nt, Human
uuugucuuagaggaaaac

SEQ ID NO: 540119 - RNA, 19 nt, Human
aaaagacccaaacaaauga

SEQ ID NO: 540120 - RNA, 23 nt, Human
aaaagacccaaacaaaugaggca

SEQ ID NO: 540121 - RNA, 27 nt, Human
aaaagacccaaacaaaugaggcagccg

SEQ ID NO: 540122 - RNA, 23 nt, Human
aaacaaaugaggcagccgaggcc

SEQ ID NO: 540123 - RNA, 24 nt, Human
aaacaaaugaggcagccgaggccu

SEQ ID NO: 540124 - RNA, 20 nt, Human
aacugggagccacggcacaa

SEQ ID NO: 540125 - RNA, 18 nt, Human
aagccagagggaggggag

SEQ ID NO: 540126 - RNA, 23 nt, Human
aagcuaaagccagagggagggga

SEQ ID NO: 540127 - RNA, 20 nt, Human
aaucuuccccuugccgaggc

SEQ ID NO: 540128 - RNA, 20 nt, Human
agacagaagaucugaggcaa

SEQ ID NO: 540129 - RNA, 20 nt, Human
agacagaagaucugaggcag

SEQ ID NO: 540130 - RNA, 23 nt, Human
agacccuccgcgccgggcagcuc

SEQ ID NO: 540131 - RNA, 23 nt, Human
agagagacagcgagccagccuuc

SEQ ID NO: 540132 - RNA, 19 nt, Human
agauacaauuagugaagca

SEQ ID NO: 540133 - RNA, 20 nt, Human
agccacggcacaaaagaccc

SEQ ID NO: 540134 - RNA, 22 nt, Human
agccgcacggcccgcagucccc

SEQ ID NO: 540135 - RNA, 18 nt, Human
agccuggaagacgcaaug

SEQ ID NO: 540136 - RNA, 18 nt, Human
agcgugaaggcaauggga

SEQ ID NO: 540137 - RNA, 21 nt, Human
aggcagccgaggccuccgggg

SEQ ID NO: 540138 - RNA, 23 nt, Human
aggcggggagggggcgggcgggg

SEQ ID NO: 540139 - RNA, 24 nt, Human
aggcggggagggggcgggcggggu

SEQ ID NO: 540140 - RNA, 18 nt, Human
agggaggggaggccacgg

SEQ ID NO: 540141 - RNA, 18 nt, Human
aguccccgggagacaguc

SEQ ID NO: 540142 - RNA, 22 nt, Human
auaaaugugaaaagcaauacuc

SEQ ID NO: 540143 - RNA, 21 nt, Human
aucacagaggcucgagcgggg

SEQ ID NO: 540144 - RNA, 23 nt, Human
auuuucccagccccuccucgucg

SEQ ID NO: 540145 - RNA, 22 nt, Human
auuuuuuguuuuuuugcccuag

SEQ ID NO: 540146 - RNA, 21 nt, Human
caaccccaaaggaagcuaaag

SEQ ID NO: 540147 - RNA, 26 nt, Human
caaccccaaaggaagcuaaagccaga

SEQ ID NO: 540148 - RNA, 22 nt, Human
caacugggagccacggcacaaa

SEQ ID NO: 540149 - RNA, 19 nt, Human
caaguggccugcagcgcuu

SEQ ID NO: 540150 - RNA, 24 nt, Human
cacaaccgcacacgccggggcgcc

SEQ ID NO: 540151 - RNA, 18 nt, Human
cacauuuucccagccccu

SEQ ID NO: 540152 - RNA, 19 nt, Human
cacgcccccccacaccccc

SEQ ID NO: 540153 - RNA, 19 nt, Human
cacggcacaaaagacccaa

SEQ ID NO: 540154 - RNA, 20 nt, Human
cagagccauaaaugugaaaa

SEQ ID NO: 540155 - RNA, 21 nt, Human
cagcacaguuuaaguaaacac

SEQ ID NO: 540156 - RNA, 19 nt, Human
cagccgaggccuccggggc

SEQ ID NO: 540157 - RNA, 18 nt, Human
cagcgcaggagugcuugg

SEQ ID NO: 540158 - RNA, 18 nt, Human
caugacauugaaaaugcg

SEQ ID NO: 540159 - RNA, 23 nt, Human
ccaaccccaaaggaagcuaaagc

SEQ ID NO: 540160 - RNA, 30 nt, Human
ccaaccccaaaggaagcuaaagccagaggg

SEQ ID NO: 540161 - RNA, 21 nt, Human
ccacacccccacggcgaaggc

SEQ ID NO: 540162 - RNA, 24 nt, Human
ccacacccccacggcgaaggcucc

SEQ ID NO: 540163 - RNA, 18 nt, Human
ccaccugcgccaacccca

SEQ ID NO: 540164 - RNA, 21 nt, Human
ccacggcacaaaagacccaaa

SEQ ID NO: 540165 - RNA, 24 nt, Human
cccaaacaaaugaggcagccgagg

SEQ ID NO: 540166 - RNA, 23 nt, Human
cccacaaccgcacacgccggggc

SEQ ID NO: 540167 - RNA, 23 nt, Human
cccaccugcgccaaccccaaagg

SEQ ID NO: 540168 - RNA, 23 nt, Human
ccccacacccccacggcgaaggc

SEQ ID NO: 540169 - RNA, 23 nt, Human
cccccacggcgaaggcuccgauu

SEQ ID NO: 540170 - RNA, 23 nt, Human
ccccggcgcuggcuggcucugcc

SEQ ID NO: 540171 - RNA, 21 nt, Human
cccgauccucggggccucagc

SEQ ID NO: 540172 - RNA, 22 nt, Human
cccgcaguccccggcgcuggcu

SEQ ID NO: 540173 - RNA, 18 nt, Human
cccggcggcggcgcgggg

SEQ ID NO: 540174 - RNA, 20 nt, Human
ccgcacacgccggggcgccg

SEQ ID NO: 540175 - RNA, 21 nt, Human
ccgcacacgccggggcgccgg

SEQ ID NO: 540176 - RNA, 19 nt, Human
ccgccccgauccucggggc

SEQ ID NO: 540177 - RNA, 21 nt, Human
ccgcgggccuaucagccgcac

SEQ ID NO: 540178 - RNA, 20 nt, Human
ccgcgucguccccgcgacug

SEQ ID NO: 540179 - RNA, 21 nt, Human
ccgcucggagagagacagcga

SEQ ID NO: 540180 - RNA, 21 nt, Human
ccgcugcaguccccgggagac

SEQ ID NO: 540181 - RNA, 22 nt, Human
ccggcccuccccacgccccccc

SEQ ID NO: 540182 - RNA, 20 nt, Human
ccggggcugacccgggaucg

SEQ ID NO: 540183 - RNA, 23 nt, Human
ccuccccacgcccccccacaccc

SEQ ID NO: 540184 - RNA, 21 nt, Human
ccucggggccucagcgccggg

SEQ ID NO: 540185 - RNA, 21 nt, Human
ccucucucccucuggaguccc

SEQ ID NO: 540186 - RNA, 21 nt, Human
ccucucucccucuggaguccc

SEQ ID NO: 540187 - RNA, 20 nt, Human
ccuuggcagcugccccagcc

SEQ ID NO: 540188 - RNA, 21 nt, Human
cgagcucccccacaaccgcac

SEQ ID NO: 540189 - RNA, 21 nt, Human
cgccagcggcggguccggccc

SEQ ID NO: 540190 - RNA, 21 nt, Human
cggcacaaaagacccaaacaa

SEQ ID NO: 540191 - RNA, 19 nt, Human
cggcccuccccacgccccc

SEQ ID NO: 540192 - RNA, 20 nt, Human
cggcccuccccacgcccccc

SEQ ID NO: 540193 - RNA, 23 nt, Human
cggcggcggcgcggggaccuugg

SEQ ID NO: 540194 - RNA, 18 nt, Human
cggggagggggcgggcgg

SEQ ID NO: 540195 - RNA, 18 nt, Human
cuccgcgccgggcagcuc

SEQ ID NO: 540196 - RNA, 19 nt, Human
cugccuccgcugcaguccc

SEQ ID NO: 540197 - RNA, 22 nt, Human
cugcgcacauuuucccagcccc

SEQ ID NO: 540198 - RNA, 21 nt, Human
cugugcgugcgcgcgggugga

SEQ ID NO: 540199 - RNA, 24 nt, Human
cuuccucucucccucuggaguccc

SEQ ID NO: 540200 - RNA, 20 nt, Human
gacagcagcugcggcgggcg

SEQ ID NO: 540201 - RNA, 23 nt, Human
gaccugccgccccgauccucuuu

SEQ ID NO: 540202 - RNA, 22 nt, Human
gaggccacggcgagcuccccca

SEQ ID NO: 540203 - RNA, 22 nt, Human
gcaaaaguauacauaucacccc

SEQ ID NO: 540204 - RNA, 22 nt, Human
gcagcgugaaggcaaugggagc

SEQ ID NO: 540205 - RNA, 24 nt, Human
gcaugugcccccuacacaugcaug

SEQ ID NO: 540206 - RNA, 23 nt, Human
gccaaccccaaaggaagcuaaag

SEQ ID NO: 540207 - RNA, 23 nt, Human
gccaaccccaaaggaagcuaaag

SEQ ID NO: 540208 - RNA, 23 nt, Human
gccucgucaaucuuccccuugcc

SEQ ID NO: 540209 - RNA, 21 nt, Human
gcgcggguggauggcugggug

SEQ ID NO: 540210 - RNA, 19 nt, Human
gcggcgcggggaccuuggc

SEQ ID NO: 540211 - RNA, 18 nt, Human
gcgugcgggaggccggag

SEQ ID NO: 540212 - RNA, 19 nt, Human
ggagggggcgggcggggug

SEQ ID NO: 540213 - RNA, 18 nt, Human
ggcagccgaggccuccgg

SEQ ID NO: 540214 - RNA, 22 nt, Human
ggcagcucagcgcgaggcgugg

SEQ ID NO: 540215 - RNA, 25 nt, Human
ggccacggcgagcucccccacaacc

SEQ ID NO: 540216 - RNA, 20 nt, Human
ggcgagcucccccacaaccg

SEQ ID NO: 540217 - RNA, 23 nt, Human
ggcggcggcgcggggaccuuggc

SEQ ID NO: 540218 - RNA, 24 nt, Human
ggcggcggcgcggggaccuuggca

SEQ ID NO: 540219 - RNA, 18 nt, Human
gggaggccggaggggcgg

SEQ ID NO: 540220 - RNA, 19 nt, Human
gggcggcggcagacccucc

SEQ ID NO: 540221 - RNA, 19 nt, Human
ggggagggggcgggcgggg

SEQ ID NO: 540222 - RNA, 19 nt, Human
ggggcgggcgggguggggg

SEQ ID NO: 540223 - RNA, 27 nt, Human
gugaagcaaaaguauacauaucacccc

SEQ ID NO: 540224 - RNA, 23 nt, Human
uaaaugugaaaagcaauacucug

SEQ ID NO: 540225 - RNA, 21 nt, Human
uaaguuagaacgcgguuccca

SEQ ID NO: 540226 - RNA, 24 nt, Human
uagcagcacaguuuaaguaaacac

SEQ ID NO: 540227 - RNA, 20 nt, Human
ucccaucaggcuucucauuu

SEQ ID NO: 540228 - RNA, 22 nt, Human
uccccacgcccccccacacccc

SEQ ID NO: 540229 - RNA, 20 nt, Human
uccccgcgacugcagcgccu

SEQ ID NO: 540230 - RNA, 18 nt, Human
uccccggccgggaggagg

SEQ ID NO: 540231 - RNA, 19 nt, Human
uccccgggagacagucuuc

SEQ ID NO: 540232 - RNA, 20 nt, Human
uccccgggagacagucuuca

SEQ ID NO: 540233 - RNA, 19 nt, Human
ucccgguguaagucaccgc

SEQ ID NO: 540234 - RNA, 22 nt, Human
ucucaugcuaaucaccaggcug

SEQ ID NO: 540235 - RNA, 22 nt, Human
ugaaaagcaauacucugaaaua

SEQ ID NO: 540236 - RNA, 22 nt, Human
ugaaaaugcguauuacacuuac

SEQ ID NO: 540237 - RNA, 23 nt, Human
ugaagcaaaaguauacauaucac

SEQ ID NO: 540238 - RNA, 22 nt, Human
ugacccgggaucgggcgugcgg

SEQ ID NO: 540239 - RNA, 18 nt, Human
ugcagacagcagcugcgg

SEQ ID NO: 540240 - RNA, 23 nt, Human
ugcagcgcuuccucucucccucu

SEQ ID NO: 540241 - RNA, 20 nt, Human
ugccccagccuggagccagc

SEQ ID NO: 540242 - RNA, 22 nt, Human
ugcccuagcccuacuuagcagc

SEQ ID NO: 540243 - RNA, 19 nt, Human
ugccuggcccaccugcgcc

SEQ ID NO: 540244 - RNA, 19 nt, Human
ugccuggcccaccugcgcc

SEQ ID NO: 540245 - RNA, 20 nt, Human
ugcuuggccaacugggagcc

SEQ ID NO: 540246 - RNA, 21 nt, Human
uggagucccgguguaagucac

SEQ ID NO: 540247 - RNA, 22 nt, Human
uggagucccgguguaagucacc

SEQ ID NO: 540248 - RNA, 22 nt, Human
uggcagcugccccagccuggag

SEQ ID NO: 540249 - RNA, 18 nt, Human
uggccgaggcggcgccgg

SEQ ID NO: 540250 - RNA, 22 nt, Human
ugggagcaacacgcaucugugg

SEQ ID NO: 540251 - RNA, 19 nt, Human
ugggagccacggcacaaaa

SEQ ID NO: 540252 - RNA, 22 nt, Human
ugggagcgcagacaauggcccg

SEQ ID NO: 540253 - RNA, 21 nt, Human
uggggggaaaggcacguuagg

SEQ ID NO: 540254 - RNA, 22 nt, Human
ugggugcgccgacacgcaugug

SEQ ID NO: 540255 - RNA, 19 nt, Human
ugucaaggaucaguucugu

SEQ ID NO: 540256 - RNA, 20 nt, Human
ugucaaggaucaguucugug

SEQ ID NO: 540257 - RNA, 18 nt, Human
ugugcgugcgcgcgggug

SEQ ID NO: 540258 - RNA, 24 nt, Human
uguggcaccguuuaaccacagacu

SEQ ID NO: 540259 - RNA, 25 nt, Human
uguuuuguuuuguuuuuuuuuuuuu

SEQ ID NO: 540260 - RNA, 18 nt, Human
uguuuuuuuuuuuuugga

SEQ ID NO: 540261 - RNA, 22 nt, Human
uuguuuuguuuuguuuuuuuuu

SEQ ID NO: 540262 - RNA, 18 nt, Human
uuuguuuuguuuuguuuu

SEQ ID NO: 540263 - RNA, 25 nt, Human
aaaaaaaaaaaguacaucauaaaag

SEQ ID NO: 540264 - RNA, 19 nt, Human
aaaaccagaauguugaaug

SEQ ID NO: 540265 - RNA, 32 nt, Human
aaacagaccuacgagugcccuguguauagaag

SEQ ID NO: 540266 - RNA, 20 nt, Human
aaagguugcagugagccgag

SEQ ID NO: 540267 - RNA, 24 nt, Human
aaagguugcagugagccgagguug

SEQ ID NO: 540268 - RNA, 20 nt, Human
aacagaacaagacuccaucu

SEQ ID NO: 540269 - RNA, 24 nt, Human
aacuugaucauuaucauuaguagg

SEQ ID NO: 540270 - RNA, 20 nt, Human
aagaaaccaaacagaccuac

SEQ ID NO: 540271 - RNA, 25 nt, Human
aagaaaccaaacagaccuacgagug

SEQ ID NO: 540272 - RNA, 20 nt, Human
aagcagcaggccccagguga

SEQ ID NO: 540273 - RNA, 21 nt, Human
aaguccucuucggugauaucc

SEQ ID NO: 540274 - RNA, 24 nt, Human
aaucacuugaaccuaggaggcaaa

SEQ ID NO: 540275 - RNA, 23 nt, Human
aauugcagaucccacgacagggg

SEQ ID NO: 540276 - RNA, 19 nt, Human
acaagaaaccaaacagacc

SEQ ID NO: 540277 - RNA, 22 nt, Human
acacuggcauuccucuagccuc

SEQ ID NO: 540278 - RNA, 24 nt, Human
acagaacaagacuccaucucaaaa

SEQ ID NO: 540279 - RNA, 30 nt, Human
accacagcaacccugguuccgacacacugg

SEQ ID NO: 540280 - RNA, 18 nt, Human
acucccggcauuuccccc

SEQ ID NO: 540281 - RNA, 24 nt, Human
acugcacucccuccugggcaacag

SEQ ID NO: 540282 - RNA, 22 nt, Human
agaaccaaacugagaggcccca

SEQ ID NO: 540283 - RNA, 23 nt, Human
agaaccaaacugagaggccccag

SEQ ID NO: 540284 - RNA, 19 nt, Human
agacaagaaaccaaacaga

SEQ ID NO: 540285 - RNA, 21 nt, Human
agacaagaaaccaaacagacc

SEQ ID NO: 540286 - RNA, 22 nt, Human
agacagugaaguucucuagagc

SEQ ID NO: 540287 - RNA, 20 nt, Human
agcaaugcagccggaaagaa

SEQ ID NO: 540288 - RNA, 21 nt, Human
aggaggcaaagguugcaguga

SEQ ID NO: 540289 - RNA, 21 nt, Human
aggcaaagguugcagugagcc

SEQ ID NO: 540290 - RNA, 24 nt, Human
aggcaaagguugcagugagccgag

SEQ ID NO: 540291 - RNA, 18 nt, Human
agguaggagaaucacuug

SEQ ID NO: 540292 - RNA, 23 nt, Human
agguaggagaaucacuugaaccu

SEQ ID NO: 540293 - RNA, 22 nt, Human
caaauuaaauuauuagcccuua

SEQ ID NO: 540294 - RNA, 21 nt, Human
caacuugaucauuaucauuag

SEQ ID NO: 540295 - RNA, 22 nt, Human
caagaacgccccgcgcccgagc

SEQ ID NO: 540296 - RNA, 21 nt, Human
caagacuccaucucaaaaaaa

SEQ ID NO: 540297 - RNA, 24 nt, Human
cacagaacuguccucgcacaccac

SEQ ID NO: 540298 - RNA, 28 nt, Human
caccacagcaacccugguuccgacacac

SEQ ID NO: 540299 - RNA, 20 nt, Human
caccacggcccggcgcacca

SEQ ID NO: 540300 - RNA, 20 nt, Human
caccacugcacucccuccug

SEQ ID NO: 540301 - RNA, 24 nt, Human
caccacugcacucccuccugggca

SEQ ID NO: 540302 - RNA, 23 nt, Human
cacccccguggacagacaagaaa

SEQ ID NO: 540303 - RNA, 19 nt, Human
cacgacuguaaucccaguu

SEQ ID NO: 540304 - RNA, 23 nt, Human
cacugcacucccuccugggcaac

SEQ ID NO: 540305 - RNA, 24 nt, Human
cacugcacucccuccugggcaaca

SEQ ID NO: 540306 - RNA, 24 nt, Human
cacugucuuggugucgauggucuu

SEQ ID NO: 540307 - RNA, 19 nt, Human
cagaucccacgacaggggg

SEQ ID NO: 540308 - RNA, 24 nt, Human
cagcaggccccaggugaguccuga

SEQ ID NO: 540309 - RNA, 23 nt, Human
caggaaccauuguugaagcccgu

SEQ ID NO: 540310 - RNA, 24 nt, Human
caggccccaggugaguccugaagg

SEQ ID NO: 540311 - RNA, 23 nt, Human
caugcaaaagcaaugcagccgga

SEQ ID NO: 540312 - RNA, 24 nt, Human
ccacagcaacccugguuccgacac

SEQ ID NO: 540313 - RNA, 19 nt, Human
ccacgacaggggggacaca

SEQ ID NO: 540314 - RNA, 24 nt, Human
ccacugcacucccuccugggcaac

SEQ ID NO: 540315 - RNA, 19 nt, Human
ccacuggccgaaaagaaga

SEQ ID NO: 540316 - RNA, 23 nt, Human
ccaggugaguccugaaggaagag

SEQ ID NO: 540317 - RNA, 21 nt, Human
ccccagcuacaucuggaccuu

SEQ ID NO: 540318 - RNA, 20 nt, Human
ccgcgcacuccggguugggu

SEQ ID NO: 540319 - RNA, 20 nt, Human
ccucgcacaccacagcaacc

SEQ ID NO: 540320 - RNA, 25 nt, Human
ccuuuuguaagcucuccagauauuc

SEQ ID NO: 540321 - RNA, 25 nt, Human
cuccaucucaaaaaaaaaaaaguac

SEQ ID NO: 540322 - RNA, 19 nt, Human
cucccggcauuucccccca

SEQ ID NO: 540323 - RNA, 24 nt, Human
cugcacucccuccugggcaacaga

SEQ ID NO: 540324 - RNA, 19 nt, Human
cugcacuguucccaugcac

SEQ ID NO: 540325 - RNA, 18 nt, Human
cuggcuggaguggcucug

SEQ ID NO: 540326 - RNA, 18 nt, Human
cuguaaucccaguuacuc

SEQ ID NO: 540327 - RNA, 21 nt, Human
cuguaaucccaguuacucagg

SEQ ID NO: 540328 - RNA, 22 nt, Human
cuuagagugaaagucagaaaaa

SEQ ID NO: 540329 - RNA, 20 nt, Human
cuucucaggaggccgcgcac

SEQ ID NO: 540330 - RNA, 23 nt, Human
gagaaucacuugaaccuaggagg

SEQ ID NO: 540331 - RNA, 25 nt, Human
gcuggagugcagugaggauuuucua

SEQ ID NO: 540332 - RNA, 24 nt, Human
gcugguucuguuuguuuuccucuu

SEQ ID NO: 540333 - RNA, 19 nt, Human
ggaccuucaggcugaagag

SEQ ID NO: 540334 - RNA, 21 nt, Human
ggaggcaaagguugcagugag

SEQ ID NO: 540335 - RNA, 20 nt, Human
ggagguaggagaaucacuug

SEQ ID NO: 540336 - RNA, 24 nt, Human
ggagguaggagaaucacuugaacc

SEQ ID NO: 540337 - RNA, 25 nt, Human
ggcaugguccacagaacuguccucg

SEQ ID NO: 540338 - RNA, 20 nt, Human
ggcauuccucuagccucugc

SEQ ID NO: 540339 - RNA, 25 nt, Human
ggcuggaguggcucugcuucuagaa

SEQ ID NO: 540340 - RNA, 20 nt, Human
gggcuccagucuccucccag

SEQ ID NO: 540341 - RNA, 21 nt, Human
guccagcaaugccgaucugac

SEQ ID NO: 540342 - RNA, 26 nt, Human
guugaugguccccuuuuguucaguca

SEQ ID NO: 540343 - RNA, 24 nt, Human
guugcaccacugcacucccuccug

SEQ ID NO: 540344 - RNA, 19 nt, Human
guugcagugagccgagguu

SEQ ID NO: 540345 - RNA, 20 nt, Human
uaacucagggcugagcgugg

SEQ ID NO: 540346 - RNA, 23 nt, Human
uaagcucuccagauauuccuuaa

SEQ ID NO: 540347 - RNA, 23 nt, Human
uagaaacuaacucagggcugagc

SEQ ID NO: 540348 - RNA, 19 nt, Human
uagcaagcugccacacaau

SEQ ID NO: 540349 - RNA, 24 nt, Human
uaggaggcaaagguugcagugagc

SEQ ID NO: 540350 - RNA, 24 nt, Human
uccgcaaauuuagcggcugagaca

SEQ ID NO: 540351 - RNA, 21 nt, Human
uccuuaacauugucauaacca

SEQ ID NO: 540352 - RNA, 22 nt, Human
ucuaacuuuuuaguaacucaca

SEQ ID NO: 540353 - RNA, 24 nt, Human
ucuagaagcguaagguaacacugg

SEQ ID NO: 540354 - RNA, 20 nt, Human
ucuguaaggccuccaguguc

SEQ ID NO: 540355 - RNA, 20 nt, Human
ucuuccuucuucggaagcug

SEQ ID NO: 540356 - RNA, 21 nt, Human
ugaagagcgaagagaagacug

SEQ ID NO: 540357 - RNA, 22 nt, Human
ugagccgagguugcaccacugc

SEQ ID NO: 540358 - RNA, 19 nt, Human
ugccauaggcgcccgcugg

SEQ ID NO: 540359 - RNA, 22 nt, Human
uggacagacaagaaaccaaaca

SEQ ID NO: 540360 - RNA, 21 nt, Human
uggcacacgacuguaauccca

SEQ ID NO: 540361 - RNA, 22 nt, Human
uggcacacgacuguaaucccag

SEQ ID NO: 540362 - RNA, 25 nt, Human
ugggacacccaagcaggaagggagc

SEQ ID NO: 540363 - RNA, 21 nt, Human
uguacucccggcauuuccccc

SEQ ID NO: 540364 - RNA, 23 nt, Human
ugucauaaccauaaaacuuggcc

SEQ ID NO: 540365 - RNA, 25 nt, Human
uucaaaauauaaaagcagcaggccc

SEQ ID NO: 540366 - RNA, 19 nt, Human
uuccccccaauugucuucc

SEQ ID NO: 540367 - RNA, 18 nt, Human
uuccuucuucggaagcug

SEQ ID NO: 540368 - RNA, 21 nt, Human
uugcaaaagccacccccgugg

SEQ ID NO: 540369 - RNA, 23 nt, Human
uugcaaccgcuguguuuuugcca

SEQ ID NO: 540370 - RNA, 22 nt, Human
uugcagugagccgagguugcac

SEQ ID NO: 540371 - RNA, 25 nt, Human
aaaaaaaaaaaaaaaggcaguaaaa

SEQ ID NO: 540372 - RNA, 25 nt, Human
aaaaaaaggcaguaaaaucucagaa

SEQ ID NO: 540373 - RNA, 21 nt, Human
aaaccucggcuggaaggcugg

SEQ ID NO: 540374 - RNA, 20 nt, Human
aaagaacagcucgggccacc

SEQ ID NO: 540375 - RNA, 25 nt, Human
aaauucacuuauggaguccaacaaa

SEQ ID NO: 540376 - RNA, 21 nt, Human
aacaccaaaccaaccgaaagc

SEQ ID NO: 540377 - RNA, 21 nt, Human
aaggucuugugucuuuuccua

SEQ ID NO: 540378 - RNA, 25 nt, Human
acaccaaaccaaccgaaagcuaugc

SEQ ID NO: 540379 - RNA, 21 nt, Human
acagaacaccaaaccaaccga

SEQ ID NO: 540380 - RNA, 22 nt, Human
acagaacaccaaaccaaccgaa

SEQ ID NO: 540381 - RNA, 21 nt, Human
acggcaaaaaaaaaaaaaaau

SEQ ID NO: 540382 - RNA, 19 nt, Human
agacggaggaucagagccc

SEQ ID NO: 540383 - RNA, 20 nt, Human
agaggggaugggaggcagaa

SEQ ID NO: 540384 - RNA, 23 nt, Human
agcaccaaaggcucgcuaacacc

SEQ ID NO: 540385 - RNA, 22 nt, Human
agcggcuggaguuaucuggcca

SEQ ID NO: 540386 - RNA, 23 nt, Human
agcugaaagaacagcucgggcca

SEQ ID NO: 540387 - RNA, 18 nt, Human
aggcaagaacgagcaucu

SEQ ID NO: 540388 - RNA, 20 nt, Human
aggcagaguggccugcaguu

SEQ ID NO: 540389 - RNA, 22 nt, Human
aggcuucuagcaccaaaggcuc

SEQ ID NO: 540390 - RNA, 20 nt, Human
auaaaaauguacggucaccc

SEQ ID NO: 540391 - RNA, 20 nt, Human
aucucaggcaccacaaaauc

SEQ ID NO: 540392 - RNA, 20 nt, Human
augccgcagccggauuuccc

SEQ ID NO: 540393 - RNA, 20 nt, Human
caaauuccucacacauacag

SEQ ID NO: 540394 - RNA, 23 nt, Human
caaauuccucacacauacagcuc

SEQ ID NO: 540395 - RNA, 19 nt, Human
caaggcagaguggccugca

SEQ ID NO: 540396 - RNA, 22 nt, Human
caaguggcaggcugcccugggc

SEQ ID NO: 540397 - RNA, 21 nt, Human
cacaaugaaaucagaggccac

SEQ ID NO: 540398 - RNA, 21 nt, Human
caccaaaggcucgcuaacacc

SEQ ID NO: 540399 - RNA, 23 nt, Human
cacuccugauuucuguuuggaag

SEQ ID NO: 540400 - RNA, 23 nt, Human
cagaacaccaaaccaaccgaaag

SEQ ID NO: 540401 - RNA, 24 nt, Human
cagagcccugccugucugccaggg

SEQ ID NO: 540402 - RNA, 19 nt, Human
cagggacaccauuucccac

SEQ ID NO: 540403 - RNA, 21 nt, Human
cagggacaccauuucccaccu

SEQ ID NO: 540404 - RNA, 22 nt, Human
cauuucugugcucugugcuuug

SEQ ID NO: 540405 - RNA, 26 nt, Human
cauuucugugcucugugcuuugggag

SEQ ID NO: 540406 - RNA, 19 nt, Human
ccaaaggcucgcuaacacc

SEQ ID NO: 540407 - RNA, 18 nt, Human
cccacaaugaaaucagag

SEQ ID NO: 540408 - RNA, 20 nt, Human
cccacaaugaaaucagaggc

SEQ ID NO: 540409 - RNA, 20 nt, Human
ccccgcaggcuucuagcacc

SEQ ID NO: 540410 - RNA, 22 nt, Human
ccccgcaggcuucuagcaccaa

SEQ ID NO: 540411 - RNA, 23 nt, Human
ccccgcaggcuucuagcaccaaa

SEQ ID NO: 540412 - RNA, 21 nt, Human
ccccggucacugcuccuccua

SEQ ID NO: 540413 - RNA, 18 nt, Human
cccggagaaagacugucc

SEQ ID NO: 540414 - RNA, 18 nt, Human
cccugagucacgggaacc

SEQ ID NO: 540415 - RNA, 21 nt, Human
cccugcugcuguuugcugcug

SEQ ID NO: 540416 - RNA, 25 nt, Human
ccucggcugaguuaaaaccgggguc

SEQ ID NO: 540417 - RNA, 25 nt, Human
ccucuagguaacaaggcaaaggccu

SEQ ID NO: 540418 - RNA, 23 nt, Human
ccugagucacgggaaccugagac

SEQ ID NO: 540419 - RNA, 21 nt, Human
ccuuuuucaugaugacuuggg

SEQ ID NO: 540420 - RNA, 22 nt, Human
cgcuugcaaccugcccacuuau

SEQ ID NO: 540421 - RNA, 25 nt, Human
cggcaaaaaaaaaaaaaaauccaaa

SEQ ID NO: 540422 - RNA, 22 nt, Human
cuaacacggcaaaaaaaaaaaa

SEQ ID NO: 540423 - RNA, 19 nt, Human
cuauggcaaugcagaccca

SEQ ID NO: 540424 - RNA, 21 nt, Human
cucacacauacagcucacucc

SEQ ID NO: 540425 - RNA, 24 nt, Human
cucagcaggagaggggagagguga

SEQ ID NO: 540426 - RNA, 24 nt, Human
cucggcuggaaggcuggucuuggc

SEQ ID NO: 540427 - RNA, 23 nt, Human
cugaaagaacagcucgggccacc

SEQ ID NO: 540428 - RNA, 23 nt, Human
cugcuaugccgcagccggauuuc

SEQ ID NO: 540429 - RNA, 19 nt, Human
cugcuguuugcugcugucu

SEQ ID NO: 540430 - RNA, 21 nt, Human
cugggcagagcccugccuguc

SEQ ID NO: 540431 - RNA, 18 nt, Human
cuuaaaaaaaaaaaaaaa

SEQ ID NO: 540432 - RNA, 24 nt, Human
cuuaaaaaaaaaaaaaaaggcagu

SEQ ID NO: 540433 - RNA, 25 nt, Human
cuuaaaaaaaaaaaaaaaggcagua

SEQ ID NO: 540434 - RNA, 22 nt, Human
cuuacccugagucacgggaacc

SEQ ID NO: 540435 - RNA, 18 nt, Human
gagaggggagaggugagg

SEQ ID NO: 540436 - RNA, 18 nt, Human
gagaggggagaggugagg

SEQ ID NO: 540437 - RNA, 26 nt, Human
gagagguggucucauucccugaaaaa

SEQ ID NO: 540438 - RNA, 18 nt, Human
gcaaaaaaaaaaaaaaaa

SEQ ID NO: 540439 - RNA, 19 nt, Human
gcaaaggccucccuaaccc

SEQ ID NO: 540440 - RNA, 20 nt, Human
gcccugggcagagcccugcc

SEQ ID NO: 540441 - RNA, 21 nt, Human
gccucccuaacccaggcagac

SEQ ID NO: 540442 - RNA, 23 nt, Human
ggcaaaaaaaaaaaaaaauccaa

SEQ ID NO: 540443 - RNA, 23 nt, Human
ggcagacaggauguggggaaggu

SEQ ID NO: 540444 - RNA, 19 nt, Human
ggcaggcugcccugggcag

SEQ ID NO: 540445 - RNA, 22 nt, Human
ggcaggcugcccugggcagagc

SEQ ID NO: 540446 - RNA, 23 nt, Human
gggaaggaacgcaauggcuucag

SEQ ID NO: 540447 - RNA, 18 nt, Human
gggacggggagacggagg

SEQ ID NO: 540448 - RNA, 20 nt, Human
gggacuacgguggcacggga

SEQ ID NO: 540449 - RNA, 20 nt, Human
gucacuccugauuucuguuu

SEQ ID NO: 540450 - RNA, 18 nt, Human
uaaacagaacaccaaacc

SEQ ID NO: 540451 - RNA, 19 nt, Human
uaaacagaacaccaaacca

SEQ ID NO: 540452 - RNA, 24 nt, Human
uaaacagaacaccaaaccaaccga

SEQ ID NO: 540453 - RNA, 27 nt, Human
uaaacagaacaccaaaccaaccgaaag

SEQ ID NO: 540454 - RNA, 22 nt, Human
uaaauaaacagaacaccaaacc

SEQ ID NO: 540455 - RNA, 18 nt, Human
uaacacggcaaaaaaaaa

SEQ ID NO: 540456 - RNA, 23 nt, Human
uaacacggcaaaaaaaaaaaaaa

SEQ ID NO: 540457 - RNA, 20 nt, Human
uaacucgggcacuauggcaa

SEQ ID NO: 540458 - RNA, 23 nt, Human
uagcaccaaaggcucgcuaacac

SEQ ID NO: 540459 - RNA, 19 nt, Human
uagcagggaaggaacgcaa

SEQ ID NO: 540460 - RNA, 21 nt, Human
uagcagggaaggaacgcaaug

SEQ ID NO: 540461 - RNA, 23 nt, Human
uaucucgcucaccaaauuccuca

SEQ ID NO: 540462 - RNA, 23 nt, Human
uauuucuggacacccccggucac

SEQ ID NO: 540463 - RNA, 18 nt, Human
ucaacuucuuccuguguu

SEQ ID NO: 540464 - RNA, 23 nt, Human
uccaacaaacaacuuucuuaaaa

SEQ ID NO: 540465 - RNA, 20 nt, Human
ucccuaacccaggcagacag

SEQ ID NO: 540466 - RNA, 24 nt, Human
ucccugcugcuguuugcugcuguc

SEQ ID NO: 540467 - RNA, 24 nt, Human
uccuaacacuguauucagcggcug

SEQ ID NO: 540468 - RNA, 18 nt, Human
uccuaagggccuggccgu

SEQ ID NO: 540469 - RNA, 23 nt, Human
uccucaacuucuuccuguguuuc

SEQ ID NO: 540470 - RNA, 24 nt, Human
ucggcuggaaggcuggucuuggca

SEQ ID NO: 540471 - RNA, 24 nt, Human
ucgggccaccuguggaugcaccca

SEQ ID NO: 540472 - RNA, 26 nt, Human
ucucagcaggagaggggagaggugag

SEQ ID NO: 540473 - RNA, 22 nt, Human
ucuuugcuggguggcaaagugu

SEQ ID NO: 540474 - RNA, 21 nt, Human
ugaaagaacagcucgggccac

SEQ ID NO: 540475 - RNA, 21 nt, Human
ugaaaucagaggccacugcaa

SEQ ID NO: 540476 - RNA, 22 nt, Human
ugaccccgcaggcuucuagcac

SEQ ID NO: 540477 - RNA, 25 nt, Human
ugcaaguggcaggcugcccugggcc

SEQ ID NO: 540478 - RNA, 22 nt, Human
ugcagggaggaugcagugagaa

SEQ ID NO: 540479 - RNA, 23 nt, Human
ugcccugggcagagcccugccug

SEQ ID NO: 540480 - RNA, 18 nt, Human
ugccugaaggaggcaaga

SEQ ID NO: 540481 - RNA, 19 nt, Human
ugcuccuccuaagggccug

SEQ ID NO: 540482 - RNA, 24 nt, Human
ugcuggguggcaaaguguuuucag

SEQ ID NO: 540483 - RNA, 22 nt, Human
ugcuugaaauucacuuauggag

SEQ ID NO: 540484 - RNA, 21 nt, Human
uggagcagcugaaagaacagc

SEQ ID NO: 540485 - RNA, 21 nt, Human
uggcaaugcagacccaaacca

SEQ ID NO: 540486 - RNA, 20 nt, Human
uggcaggcugcccugggcag

SEQ ID NO: 540487 - RNA, 19 nt, Human
uggccaagaaccugcuccc

SEQ ID NO: 540488 - RNA, 25 nt, Human
uguaaaaucggaaagccuguaaaag

SEQ ID NO: 540489 - RNA, 20 nt, Human
uguaaacggccucauuucug

SEQ ID NO: 540490 - RNA, 20 nt, Human
uguccaaaccucggcuggaa

SEQ ID NO: 540491 - RNA, 21 nt, Human
ugugucuuuuccuaacucaga

SEQ ID NO: 540492 - RNA, 24 nt, Human
uuaaauaaacagaacaccaaacca

SEQ ID NO: 540493 - RNA, 20 nt, Human
uuccuaacacggcaaaaaaa

SEQ ID NO: 540494 - RNA, 22 nt, Human
uugacaaaaaucuugcuggggc

SEQ ID NO: 540495 - RNA, 21 nt, Human
uugcugcugucuacgcuggcc

SEQ ID NO: 540496 - RNA, 18 nt, Human
uugugccaguucuuugcu

SEQ ID NO: 540497 - RNA, 22 nt, Human
uugugucuuuuccuaacucaga

SEQ ID NO: 540498 - RNA, 21 nt, Human
aaaaagcagcuuuguucugau

SEQ ID NO: 540499 - RNA, 20 nt, Human
aaacgcaccaaaaguugugc

SEQ ID NO: 540500 - RNA, 29 nt, Human
aagcagcuuuguucugucuucucuuuucu

SEQ ID NO: 540501 - RNA, 21 nt, Human
agaagucuucuaccgucaugg

SEQ ID NO: 540502 - RNA, 28 nt, Human
aguugcuccccaaugagaagucuucuac

SEQ ID NO: 540503 - RNA, 20 nt, Human
augaugaagauccggaagaa

SEQ ID NO: 540504 - RNA, 20 nt, Human
cacacagguaccagugcuuu

SEQ ID NO: 540505 - RNA, 21 nt, Human
caccguaccauugggaggugc

SEQ ID NO: 540506 - RNA, 22 nt, Human
ccacauauuccaaccauuuaaa

SEQ ID NO: 540507 - RNA, 18 nt, Human
cccaagccagcccuccca

SEQ ID NO: 540508 - RNA, 22 nt, Human
ccccaaugagaagucuucuacc

SEQ ID NO: 540509 - RNA, 20 nt, Human
ccggaagaaaagauguagug

SEQ ID NO: 540510 - RNA, 26 nt, Human
cucccacaacugaccgauugcuguag

SEQ ID NO: 540511 - RNA, 22 nt, Human
cugguaguggacaagcacuccc

SEQ ID NO: 540512 - RNA, 18 nt, Human
gaagauccggaagaaaag

SEQ ID NO: 540513 - RNA, 20 nt, Human
gacaagcacucccacaacug

SEQ ID NO: 540514 - RNA, 23 nt, Human
gagccacauauuccaaccauuua

SEQ ID NO: 540515 - RNA, 18 nt, Human
gucaaaaaguugcucccc

SEQ ID NO: 540516 - RNA, 22 nt, Human
gucuucucuuuucugucccucc

SEQ ID NO: 540517 - RNA, 18 nt, Human
guggacaagcacucccac

SEQ ID NO: 540518 - RNA, 21 nt, Human
uaccauugggaggugcuucca

SEQ ID NO: 540519 - RNA, 22 nt, Human
uccaugaugaagauccggaaga

SEQ ID NO: 540520 - RNA, 19 nt, Human
ucccucccuucucagccca

SEQ ID NO: 540521 - RNA, 29 nt, Human
uccgcaacaaaugaaacuuccaugaugaa

SEQ ID NO: 540522 - RNA, 22 nt, Human
ucugucuucucuuuucuguccc

SEQ ID NO: 540523 - RNA, 25 nt, Human
ucugucuucucuuuucugucccucc

SEQ ID NO: 540524 - RNA, 21 nt, Human
ucugucuucucuuuucuguug

SEQ ID NO: 540525 - RNA, 23 nt, Human
ucuucucuuuucugucccucccu

SEQ ID NO: 540526 - RNA, 23 nt, Human
ugagaagucuucuaccgucaugg

SEQ ID NO: 540527 - RNA, 20 nt, Human
ugggaggagccugucugaua

SEQ ID NO: 540528 - RNA, 23 nt, Human
uguagugauggaaaaggagccac

SEQ ID NO: 540529 - RNA, 23 nt, Human
ugucuucucuuuucugucccucc

SEQ ID NO: 540530 - RNA, 23 nt, Human
uguuuuuuguuuuuuguuuuuuu

SEQ ID NO: 540531 - RNA, 23 nt, Human
uucaaguaagguuugauuaagaa

SEQ ID NO: 540532 - RNA, 18 nt, Human
uucugucuucucuuuucu

SEQ ID NO: 540533 - RNA, 23 nt, Human
uucugucuucucuuuucuguccc

SEQ ID NO: 540534 - RNA, 22 nt, Human
uuguucugucuucucuuuucug

SEQ ID NO: 540535 - RNA, 20 nt, Human
cagcggcggggccuggggag

SEQ ID NO: 540536 - RNA, 19 nt, Human
cauaaaccagaauggaauc

SEQ ID NO: 540537 - RNA, 20 nt, Human
cggcagcggcggggccuggg

SEQ ID NO: 540538 - RNA, 18 nt, Human
cucugcugccgcugcugc

SEQ ID NO: 540539 - RNA, 21 nt, Human
cucugcugccgcugcugccgc

SEQ ID NO: 540540 - RNA, 23 nt, Human
gaacugcuagacacucucaccug

SEQ ID NO: 540541 - RNA, 21 nt, Human
gcugccucugcugccgcugcu

SEQ ID NO: 540542 - RNA, 19 nt, Human
ggagugguggcuacugcug

SEQ ID NO: 540543 - RNA, 18 nt, Human
ggccuggggaggccgagc

SEQ ID NO: 540544 - RNA, 26 nt, Human
ggcggagugguggcuacugcugcugc

SEQ ID NO: 540545 - RNA, 20 nt, Human
gggaggccgagccgggguug

SEQ ID NO: 540546 - RNA, 23 nt, Human
uaccaagaacugcuagacacucu

SEQ ID NO: 540547 - RNA, 21 nt, Human
uacugcugcugccucugcugc

SEQ ID NO: 540548 - RNA, 18 nt, Human
uagcuuaccaagaacugc

SEQ ID NO: 540549 - RNA, 21 nt, Human
uccagaguagcuuaccaagaa

SEQ ID NO: 540550 - RNA, 21 nt, Human
ugccucugcugccgcugcugc

SEQ ID NO: 540551 - RNA, 23 nt, Human
ugcggccucggcggagugguggc

SEQ ID NO: 540552 - RNA, 18 nt, Human
uucauaaaagacucccaa

SEQ ID NO: 540553 - RNA, 18 nt, Human
aaaaaaaaccaaaagacc

SEQ ID NO: 540554 - RNA, 19 nt, Human
aaaaaaaccaaaagaccca

SEQ ID NO: 540555 - RNA, 23 nt, Human
aaaaaaaccaaaagacccacagg

SEQ ID NO: 540556 - RNA, 23 nt, Human
aaaaaacaacaacaacaacaaaa

SEQ ID NO: 540557 - RNA, 20 nt, Human
aaaaaacaaggauagcuggu

SEQ ID NO: 540558 - RNA, 19 nt, Human
aaaaaaccaaaagacccac

SEQ ID NO: 540559 - RNA, 20 nt, Human
aaaaaaccaaaagacccaca

SEQ ID NO: 540560 - RNA, 23 nt, Human
aaaaauauggcaucccuuaagcc

SEQ ID NO: 540561 - RNA, 22 nt, Human
aaaacaacaacaacaacaaaac

SEQ ID NO: 540562 - RNA, 21 nt, Human
aaaagcaggccuggaggccca

SEQ ID NO: 540563 - RNA, 18 nt, Human
aaaauagcaaaguagaaa

SEQ ID NO: 540564 - RNA, 19 nt, Human
aaacaacaacaacaacaaa

SEQ ID NO: 540565 - RNA, 21 nt, Human
aaacagaaagcacccggucac

SEQ ID NO: 540566 - RNA, 24 nt, Human
aaacaggaaacagaaagcacccgg

SEQ ID NO: 540567 - RNA, 24 nt, Human
aacaacaaaaaaaaaaccaaaaga

SEQ ID NO: 540568 - RNA, 23 nt, Human
aacaacaacaacaacaaaaaaaa

SEQ ID NO: 540569 - RNA, 20 nt, Human
aacaugaugaaacccugucu

SEQ ID NO: 540570 - RNA, 21 nt, Human
aacaugaugaaacccugucuc

SEQ ID NO: 540571 - RNA, 18 nt, Human
aagaaaaaaggagaauca

SEQ ID NO: 540572 - RNA, 23 nt, Human
aagaaacacacacauggggagac

SEQ ID NO: 540573 - RNA, 24 nt, Human
aagagugguggcucacgccuguaa

SEQ ID NO: 540574 - RNA, 19 nt, Human
aagcccagaaagucggcaa

SEQ ID NO: 540575 - RNA, 20 nt, Human
aaggcaucuuuuagaaguca

SEQ ID NO: 540576 - RNA, 24 nt, Human
aaucaccugaacccgagaggcgga

SEQ ID NO: 540577 - RNA, 25 nt, Human
acaacaaaaaaaaaaccaaaagacc

SEQ ID NO: 540578 - RNA, 25 nt, Human
acaacaacaaaaaaaaaaccaaaag

SEQ ID NO: 540579 - RNA, 26 nt, Human
acaacaacaaaaaaaaaaccaaaaga

SEQ ID NO: 540580 - RNA, 28 nt, Human
acaacaacaacaacaaaaaaaaaaccaa

SEQ ID NO: 540581 - RNA, 19 nt, Human
acaagagugaaacuccauc

SEQ ID NO: 540582 - RNA, 20 nt, Human
acaagagugaaacuccaucu

SEQ ID NO: 540583 - RNA, 20 nt, Human
acaagagugaaacuccaucu

SEQ ID NO: 540584 - RNA, 23 nt, Human
acaagcaggauccacagcacaga

SEQ ID NO: 540585 - RNA, 20 nt, Human
acagaaagcacccggucaca

SEQ ID NO: 540586 - RNA, 20 nt, Human
acauccccaucaaaacccac

SEQ ID NO: 540587 - RNA, 22 nt, Human
accaaaauacaaaggacuccug

SEQ ID NO: 540588 - RNA, 24 nt, Human
accaagacccccagaagcagcccu

SEQ ID NO: 540589 - RNA, 26 nt, Human
accaagacccccagaagcagcccuga

SEQ ID NO: 540590 - RNA, 22 nt, Human
accauugcacuccagccugggc

SEQ ID NO: 540591 - RNA, 20 nt, Human
acccaguggaacugccacuc

SEQ ID NO: 540592 - RNA, 31 nt, Human
acccugacaacucugagguaggacacacugg

SEQ ID NO: 540593 - RNA, 24 nt, Human
acccugucucuacuaaaaauacaa

SEQ ID NO: 540594 - RNA, 22 nt, Human
accugcacuugcaccacauccu

SEQ ID NO: 540595 - RNA, 25 nt, Human
acuccagccugggcaacaagaguga

SEQ ID NO: 540596 - RNA, 20 nt, Human
agaacaccugagacuagcuc

SEQ ID NO: 540597 - RNA, 19 nt, Human
agcaggccuggaggcccag

SEQ ID NO: 540598 - RNA, 23 nt, Human
agccgggagugguggugggcgcc

SEQ ID NO: 540599 - RNA, 18 nt, Human
aggaaaaaaaggcuggaa

SEQ ID NO: 540600 - RNA, 23 nt, Human
aggaaaaaaaggcuggaauggag

SEQ ID NO: 540601 - RNA, 19 nt, Human
aggaauacugggagucacu

SEQ ID NO: 540602 - RNA, 23 nt, Human
aggaggcugaggcaggagaauca

SEQ ID NO: 540603 - RNA, 18 nt, Human
aggcaggagaaucaccug

SEQ ID NO: 540604 - RNA, 18 nt, Human
aggcaggagaaucaccug

SEQ ID NO: 540605 - RNA, 24 nt, Human
aggcaggagaaucaccugaacccg

SEQ ID NO: 540606 - RNA, 21 nt, Human
aggccgaggugugcgggucac

SEQ ID NO: 540607 - RNA, 19 nt, Human
aggcggagguugcagugag

SEQ ID NO: 540608 - RNA, 24 nt, Human
aggcggagguugcagugagcggag

SEQ ID NO: 540609 - RNA, 24 nt, Human
aggcugaggcaggagaaucaccug

SEQ ID NO: 540610 - RNA, 24 nt, Human
agucuggacaacaugaugaaaccc

SEQ ID NO: 540611 - RNA, 19 nt, Human
aguuuggggcccaaccagg

SEQ ID NO: 540612 - RNA, 26 nt, Human
aucuuacacacccaugaacacugagc

SEQ ID NO: 540613 - RNA, 24 nt, Human
auugcacuccagccugggcaacaa

SEQ ID NO: 540614 - RNA, 25 nt, Human
auugcacuccagccugggcaacaag

SEQ ID NO: 540615 - RNA, 24 nt, Human
auuguaccauugcacuccagccug

SEQ ID NO: 540616 - RNA, 26 nt, Human
caaaaaaaaaaccaaaagacccacag

SEQ ID NO: 540617 - RNA, 21 nt, Human
caaaacaaaaaucccaggucc

SEQ ID NO: 540618 - RNA, 22 nt, Human
caaaacccacaggcugggccaa

SEQ ID NO: 540619 - RNA, 23 nt, Human
caaaagacccacaggcuggugga

SEQ ID NO: 540620 - RNA, 21 nt, Human
caaaauucuuagccugaggca

SEQ ID NO: 540621 - RNA, 23 nt, Human
caaacccaagggagccuggcuga

SEQ ID NO: 540622 - RNA, 19 nt, Human
caaaguagaaaacuuucca

SEQ ID NO: 540623 - RNA, 20 nt, Human
caaaugaggaaaccgaggac

SEQ ID NO: 540624 - RNA, 25 nt, Human
caacaaaaaaaaaaccaaaagaccc

SEQ ID NO: 540625 - RNA, 19 nt, Human
caacaacaaaaaaaaaacc

SEQ ID NO: 540626 - RNA, 22 nt, Human
caacaacaaaaaaaaaacccca

SEQ ID NO: 540627 - RNA, 25 nt, Human
caacaacaacaaaaaaaaaaccaaa

SEQ ID NO: 540628 - RNA, 22 nt, Human
caacaugaugaaacccugucuc

SEQ ID NO: 540629 - RNA, 24 nt, Human
caacaugaugaaacccugucucua

SEQ ID NO: 540630 - RNA, 22 nt, Human
caaccagggcucccacugaguc

SEQ ID NO: 540631 - RNA, 20 nt, Human
caagaaacacacacaugggg

SEQ ID NO: 540632 - RNA, 22 nt, Human
caagcaggauccacagcacaga

SEQ ID NO: 540633 - RNA, 18 nt, Human
caaggcgguaaaaaacaa

SEQ ID NO: 540634 - RNA, 18 nt, Human
cacagugccagacaaggc

SEQ ID NO: 540635 - RNA, 20 nt, Human
caccagaagggcagcuagcu

SEQ ID NO: 540636 - RNA, 23 nt, Human
cacgccuguaaucccagcacuuc

SEQ ID NO: 540637 - RNA, 23 nt, Human
cacuccagccugggcaacaagag

SEQ ID NO: 540638 - RNA, 24 nt, Human
cacuccagccugggcaacaagagu

SEQ ID NO: 540639 - RNA, 25 nt, Human
cacuccagccugggcaacaagagug

SEQ ID NO: 540640 - RNA, 22 nt, Human
cagaacaccugagacuagcucc

SEQ ID NO: 540641 - RNA, 22 nt, Human
cagagcccaaagugcucaaggg

SEQ ID NO: 540642 - RNA, 19 nt, Human
cagcaaugcuaccauuggc

SEQ ID NO: 540643 - RNA, 23 nt, Human
cagcaaugcuaccauuggccccc

SEQ ID NO: 540644 - RNA, 24 nt, Human
cagcuacucaggaggcugaggcag

SEQ ID NO: 540645 - RNA, 26 nt, Human
caggaggccgaggugugcgggucacc

SEQ ID NO: 540646 - RNA, 22 nt, Human
cagggugcuuucugggguccag

SEQ ID NO: 540647 - RNA, 19 nt, Human
cauugcacuccagccuggg

SEQ ID NO: 540648 - RNA, 21 nt, Human
cauugcacuccagccugggca

SEQ ID NO: 540649 - RNA, 22 nt, Human
cauugcacuccagccugggcaa

SEQ ID NO: 540650 - RNA, 24 nt, Human
cauugcacuccagccugggcaaca

SEQ ID NO: 540651 - RNA, 22 nt, Human
ccaaacccaagggagccuggcu

SEQ ID NO: 540652 - RNA, 19 nt, Human
ccaagacauccccaucaaa

SEQ ID NO: 540653 - RNA, 21 nt, Human
ccagcugacaacaaaaguaaa

SEQ ID NO: 540654 - RNA, 23 nt, Human
ccagggcucccacugagucuggg

SEQ ID NO: 540655 - RNA, 20 nt, Human
ccauugcacuccagccuggg

SEQ ID NO: 540656 - RNA, 21 nt, Human
ccauugcacuccagccugggc

SEQ ID NO: 540657 - RNA, 23 nt, Human
ccauugcacuccagccugggcaa

SEQ ID NO: 540658 - RNA, 24 nt, Human
ccauugcacuccagccugggcaac

SEQ ID NO: 540659 - RNA, 18 nt, Human
ccccagagcccaaagugc

SEQ ID NO: 540660 - RNA, 20 nt, Human
ccccagagcccaaagugcuc

SEQ ID NO: 540661 - RNA, 19 nt, Human
cccccagaagcagcccuga

SEQ ID NO: 540662 - RNA, 20 nt, Human
ccuaacaucaggaguucgag

SEQ ID NO: 540663 - RNA, 27 nt, Human
ccucagccagaccaagggccuccuccu

SEQ ID NO: 540664 - RNA, 19 nt, Human
ccuguaaucccagcuacuc

SEQ ID NO: 540665 - RNA, 21 nt, Human
ccuguaaucccagcuacucag

SEQ ID NO: 540666 - RNA, 21 nt, Human
ccuuugacagaagaggaacau

SEQ ID NO: 540667 - RNA, 23 nt, Human
cgagccucacauggaaaagccga

SEQ ID NO: 540668 - RNA, 19 nt, Human
cgaggugugcgggucaccu

SEQ ID NO: 540669 - RNA, 24 nt, Human
cgccuguaaucccagcuacucagg

SEQ ID NO: 540670 - RNA, 24 nt, Human
cgggucaccuaacaucaggaguuc

SEQ ID NO: 540671 - RNA, 22 nt, Human
cgguaaaaaacaaggauagcug

SEQ ID NO: 540672 - RNA, 22 nt, Human
cuaacaucaggaguucgagacc

SEQ ID NO: 540673 - RNA, 20 nt, Human
cucaaaguuugagcacauug

SEQ ID NO: 540674 - RNA, 24 nt, Human
cucacgccuguaaucccagcacuu

SEQ ID NO: 540675 - RNA, 25 nt, Human
cucacgccuguaaucccagcacuuc

SEQ ID NO: 540676 - RNA, 25 nt, Human
cuccugcaccacaaagcuucgguug

SEQ ID NO: 540677 - RNA, 24 nt, Human
cuccuggggaacagagccccaugg

SEQ ID NO: 540678 - RNA, 22 nt, Human
cucuacagacagcguccgcagu

SEQ ID NO: 540679 - RNA, 20 nt, Human
cugaacccaguggaacugcc

SEQ ID NO: 540680 - RNA, 24 nt, Human
cugaacccgagaggcggagguugc

SEQ ID NO: 540681 - RNA, 20 nt, Human
cugccccucagggugcuuuc

SEQ ID NO: 540682 - RNA, 21 nt, Human
cuggacaacaugaugaaaccc

SEQ ID NO: 540683 - RNA, 21 nt, Human
cuggugcagcagcaggcucuu

SEQ ID NO: 540684 - RNA, 20 nt, Human
cugguuugugaagcuccugg

SEQ ID NO: 540685 - RNA, 22 nt, Human
cuucacaguucucuugggcuuc

SEQ ID NO: 540686 - RNA, 21 nt, Human
cuuucacugaacccaguggaa

SEQ ID NO: 540687 - RNA, 19 nt, Human
gaaacccugucucuacuaa

SEQ ID NO: 540688 - RNA, 20 nt, Human
gaaaccgaggacccugcugg

SEQ ID NO: 540689 - RNA, 24 nt, Human
gaaacuccaucuuaaaaaaacaac

SEQ ID NO: 540690 - RNA, 21 nt, Human
gacauccccaucaaaacccac

SEQ ID NO: 540691 - RNA, 23 nt, Human
gagaggcggagguugcagugagc

SEQ ID NO: 540692 - RNA, 21 nt, Human
gagguugcagugagcggagau

SEQ ID NO: 540693 - RNA, 23 nt, Human
gagguugcagugagcggagauug

SEQ ID NO: 540694 - RNA, 20 nt, Human
gcaaggaaauggcacaucca

SEQ ID NO: 540695 - RNA, 18 nt, Human
gcacaaaacaaaaauccc

SEQ ID NO: 540696 - RNA, 20 nt, Human
gcagcagcaggcucuugcgc

SEQ ID NO: 540697 - RNA, 22 nt, Human
gcaggagaaucaccugaacccg

SEQ ID NO: 540698 - RNA, 25 nt, Human
gccaagacauccccaucaaaaccca

SEQ ID NO: 540699 - RNA, 19 nt, Human
gccaagagugguggcucac

SEQ ID NO: 540700 - RNA, 19 nt, Human
ggaaggacuaggaauacug

SEQ ID NO: 540701 - RNA, 18 nt, Human
ggaagggccaugaucucu

SEQ ID NO: 540702 - RNA, 24 nt, Human
ggagauuguaccauugcacuccag

SEQ ID NO: 540703 - RNA, 22 nt, Human
ggagguugcagugagcggagau

SEQ ID NO: 540704 - RNA, 24 nt, Human
ggagguugcagugagcggagauug

SEQ ID NO: 540705 - RNA, 23 nt, Human
ggcauuagccaaccaagcccaga

SEQ ID NO: 540706 - RNA, 19 nt, Human
ggccuggaggcccagggug

SEQ ID NO: 540707 - RNA, 20 nt, Human
gggagacguguccaggcuuc

SEQ ID NO: 540708 - RNA, 24 nt, Human
gggagugguggugggcgccuguaa

SEQ ID NO: 540709 - RNA, 23 nt, Human
gggcauuuggcauuagccaacca

SEQ ID NO: 540710 - RNA, 20 nt, Human
gggccaugaucucugguccu

SEQ ID NO: 540711 - RNA, 23 nt, Human
gggucaccuaacaucaggaguuc

SEQ ID NO: 540712 - RNA, 19 nt, Human
ggugacagcaggcaggaga

SEQ ID NO: 540713 - RNA, 24 nt, Human
gguggcucacgccuguaaucccag

SEQ ID NO: 540714 - RNA, 24 nt, Human
gguggugggcgccuguaaucccag

SEQ ID NO: 540715 - RNA, 22 nt, Human
gugcaccugcacuugcaccaca

SEQ ID NO: 540716 - RNA, 22 nt, Human
uaaaaaaacaacaacaacaaca

SEQ ID NO: 540717 - RNA, 22 nt, Human
uaacaacuacacacauuuacaa

SEQ ID NO: 540718 - RNA, 19 nt, Human
uaagccuuaaggcaucuuu

SEQ ID NO: 540719 - RNA, 24 nt, Human
uacacacccaugaacacugagccc

SEQ ID NO: 540720 - RNA, 24 nt, Human
uaccauugcacuccagccugggca

SEQ ID NO: 540721 - RNA, 20 nt, Human
uagcucaaaguuugagcaca

SEQ ID NO: 540722 - RNA, 21 nt, Human
uagcuccccuuucagcucugc

SEQ ID NO: 540723 - RNA, 25 nt, Human
uagcuggggucccaucacuccagcu

SEQ ID NO: 540724 - RNA, 25 nt, Human
uaugaaaaaaagaaaaaaggagaau

SEQ ID NO: 540725 - RNA, 18 nt, Human
ucacaagaccuagcucaa

SEQ ID NO: 540726 - RNA, 19 nt, Human
ucaccagaagggcagcuag

SEQ ID NO: 540727 - RNA, 22 nt, Human
ucaccuaacaucaggaguucga

SEQ ID NO: 540728 - RNA, 23 nt, Human
ucaccuaacaucaggaguucgag

SEQ ID NO: 540729 - RNA, 18 nt, Human
ucagccagaccaagggcc

SEQ ID NO: 540730 - RNA, 20 nt, Human
ucaggaaugcagaaaaggcc

SEQ ID NO: 540731 - RNA, 19 nt, Human
ucaggccauccauccacuc

SEQ ID NO: 540732 - RNA, 18 nt, Human
uccaagacagcagccaag

SEQ ID NO: 540733 - RNA, 20 nt, Human
uccacagcacagaagggcag

SEQ ID NO: 540734 - RNA, 20 nt, Human
uccaucuuaaaaaaacaaca

SEQ ID NO: 540735 - RNA, 18 nt, Human
ucccaaacccaagggagc

SEQ ID NO: 540736 - RNA, 19 nt, Human
ucccaaacccaagggagcc

SEQ ID NO: 540737 - RNA, 22 nt, Human
ucccagagaugacagcaaugcu

SEQ ID NO: 540738 - RNA, 20 nt, Human
ucccaggaaaaggaagaacc

SEQ ID NO: 540739 - RNA, 19 nt, Human
ucccagguccccgaugucu

SEQ ID NO: 540740 - RNA, 19 nt, Human
uccccagaacaccugagac

SEQ ID NO: 540741 - RNA, 24 nt, Human
uccccgaugucucuaucgccccca

SEQ ID NO: 540742 - RNA, 21 nt, Human
uccgacuuugcaaaaggcaaa

SEQ ID NO: 540743 - RNA, 21 nt, Human
uccugggcucucucugcacug

SEQ ID NO: 540744 - RNA, 21 nt, Human
ucucuacuaaaaauacaaaaa

SEQ ID NO: 540745 - RNA, 22 nt, Human
ucugaacugaggcagucugaac

SEQ ID NO: 540746 - RNA, 24 nt, Human
ucuggacaacaugaugaaacccug

SEQ ID NO: 540747 - RNA, 18 nt, Human
ugaaaaaaagaaaaaagg

SEQ ID NO: 540748 - RNA, 23 nt, Human
ugaaaagcaggccuggaggccca

SEQ ID NO: 540749 - RNA, 20 nt, Human
ugaacugucacugacuugua

SEQ ID NO: 540750 - RNA, 21 nt, Human
ugacaggaaaaaaaggcugga

SEQ ID NO: 540751 - RNA, 20 nt, Human
ugacuaaaggauucacccag

SEQ ID NO: 540752 - RNA, 23 nt, Human
ugacuuguauacucacucuccuc

SEQ ID NO: 540753 - RNA, 18 nt, Human
ugaggaaaccgaggaccc

SEQ ID NO: 540754 - RNA, 20 nt, Human
ugaggcaggagaaucaccug

SEQ ID NO: 540755 - RNA, 24 nt, Human
ugaggcaggagaaucaccugaacc

SEQ ID NO: 540756 - RNA, 25 nt, Human
ugaggcaggagaaucaccugaaccc

SEQ ID NO: 540757 - RNA, 22 nt, Human
ugcaaacaggaaacagaaagca

SEQ ID NO: 540758 - RNA, 19 nt, Human
ugcacuccagccugggcaa

SEQ ID NO: 540759 - RNA, 22 nt, Human
ugccucuucccaaacccaaggg

SEQ ID NO: 540760 - RNA, 25 nt, Human
uggaagaagugugagggucagaagg

SEQ ID NO: 540761 - RNA, 23 nt, Human
uggaagggccaugaucucugguc

SEQ ID NO: 540762 - RNA, 18 nt, Human
uggaauggaguagaaagg

SEQ ID NO: 540763 - RNA, 19 nt, Human
uggaauggaguagaaagga

SEQ ID NO: 540764 - RNA, 24 nt, Human
uggacaacaugaugaaacccuguc

SEQ ID NO: 540765 - RNA, 21 nt, Human
uggaggcccaggguggacgug

SEQ ID NO: 540766 - RNA, 22 nt, Human
uggcucacgccuguaaucccag

SEQ ID NO: 540767 - RNA, 24 nt, Human
uggcucacgccuguaaucccagca

SEQ ID NO: 540768 - RNA, 20 nt, Human
uggcugaacugucacugacu

SEQ ID NO: 540769 - RNA, 19 nt, Human
ugggagaguuuggggccca

SEQ ID NO: 540770 - RNA, 26 nt, Human
ugggagaguuuggggcccaaccaggg

SEQ ID NO: 540771 - RNA, 23 nt, Human
uggggaaggacuaggaauacugg

SEQ ID NO: 540772 - RNA, 24 nt, Human
ugguggcucacgccuguaauccca

SEQ ID NO: 540773 - RNA, 24 nt, Human
ugguggugggcgccuguaauccca

SEQ ID NO: 540774 - RNA, 20 nt, Human
ugucccagugccuguuacuu

SEQ ID NO: 540775 - RNA, 21 nt, Human
ugugaaaagcaggccuggagg

SEQ ID NO: 540776 - RNA, 19 nt, Human
ugugcaggcgcuggugcag

SEQ ID NO: 540777 - RNA, 24 nt, Human
uuagccgggagugguggugggcgc

SEQ ID NO: 540778 - RNA, 25 nt, Human
uucacaaaugaggaaaccgaggacc

SEQ ID NO: 540779 - RNA, 22 nt, Human
uucacccagaucuccuagccca

SEQ ID NO: 540780 - RNA, 24 nt, Human
uucaggaggccgaggugugcgggu

SEQ ID NO: 540781 - RNA, 21 nt, Human
uucauauuugucccagugccu

SEQ ID NO: 540782 - RNA, 24 nt, Human
uugaauggguaaaaacaacaaacc

SEQ ID NO: 540783 - RNA, 22 nt, Human
uugcagugagcggagauuguac

SEQ ID NO: 540784 - RNA, 23 nt, Human
uuguaccauugcacuccagccug

SEQ ID NO: 540785 - RNA, 20 nt, Human
uuuggggcccaaccagggcu

SEQ ID NO: 540786 - RNA, 25 nt, Human
uuuggggcccaaccagggcucccac

SEQ ID NO: 540787 - RNA, 21 nt, Human
acccaaggugcaagaaaaccc

SEQ ID NO: 540788 - RNA, 24 nt, Human
acccaaggugcaagaaaacccagc

SEQ ID NO: 540789 - RNA, 20 nt, Human
acccgcuucuccaccaggac

SEQ ID NO: 540790 - RNA, 30 nt, Human
acucaguugcuuuucucuccucucuuuucc

SEQ ID NO: 540791 - RNA, 20 nt, Human
agaaaacccagcccugugga

SEQ ID NO: 540792 - RNA, 20 nt, Human
agaaauuagcggaacccaag

SEQ ID NO: 540793 - RNA, 22 nt, Human
agaaauuagcggaacccaagcg

SEQ ID NO: 540794 - RNA, 22 nt, Human
agcggaacccaagcgagacccg

SEQ ID NO: 540795 - RNA, 21 nt, Human
aggggugggaaugcaaaggga

SEQ ID NO: 540796 - RNA, 24 nt, Human
cacacgcgcacucacaguugcccc

SEQ ID NO: 540797 - RNA, 21 nt, Human
cagcgcagcgaugccuaggga

SEQ ID NO: 540798 - RNA, 23 nt, Human
caggaagacgcaaagcccggagg

SEQ ID NO: 540799 - RNA, 18 nt, Human
ccaaggugcaagaaaacc

SEQ ID NO: 540800 - RNA, 18 nt, Human
cccacacgcgcacucaca

SEQ ID NO: 540801 - RNA, 18 nt, Human
cccaggaagacgcaaagc

SEQ ID NO: 540802 - RNA, 19 nt, Human
cccggaccgaauccucgag

SEQ ID NO: 540803 - RNA, 21 nt, Human
cccuguggaucgcaccgcuuc

SEQ ID NO: 540804 - RNA, 20 nt, Human
ccgcaccuccuuggucccgc

SEQ ID NO: 540805 - RNA, 23 nt, Human
ccugguucggggacccaggaccc

SEQ ID NO: 540806 - RNA, 20 nt, Human
cgagacccgcuucuccaccg

SEQ ID NO: 540807 - RNA, 22 nt, Human
cucacaagagacagcgaaucgc

SEQ ID NO: 540808 - RNA, 23 nt, Human
cucuccucucuuuuccuauccuu

SEQ ID NO: 540809 - RNA, 19 nt, Human
cuuccguuccuucuugccc

SEQ ID NO: 540810 - RNA, 18 nt, Human
gaagacgcaaagcccgga

SEQ ID NO: 540811 - RNA, 19 nt, Human
gaagagaaucgaggucccc

SEQ ID NO: 540812 - RNA, 19 nt, Human
gacccuaugaacucagucc

SEQ ID NO: 540813 - RNA, 23 nt, Human
gaggggugggaaugcaaagggag

SEQ ID NO: 540814 - RNA, 23 nt, Human
gaggggugggaaugcaaagggag

SEQ ID NO: 540815 - RNA, 19 nt, Human
gcaggacacagugcuccuu

SEQ ID NO: 540816 - RNA, 18 nt, Human
gccccgaagcguuguccc

SEQ ID NO: 540817 - RNA, 22 nt, Human
gcuuuaguaggggaucaggaga

SEQ ID NO: 540818 - RNA, 22 nt, Human
gcuuuucucuccucucuuuucc

SEQ ID NO: 540819 - RNA, 18 nt, Human
ucacaguugccccgaagc

SEQ ID NO: 540820 - RNA, 24 nt, Human
ucucacgccucaggacagaaauug

SEQ ID NO: 540821 - RNA, 25 nt, Human
ucuccucucuuuuccuauccuuuau

SEQ ID NO: 540822 - RNA, 20 nt, Human
ucucggcgguuuaacucucc

SEQ ID NO: 540823 - RNA, 25 nt, Human
ugacucacaagagacagcgaaucgc

SEQ ID NO: 540824 - RNA, 20 nt, Human
uggaagcaaucaaaugcgag

SEQ ID NO: 540825 - RNA, 22 nt, Human
uucccucaacccuuccugguuc

SEQ ID NO: 540826 - RNA, 18 nt, Human
ccgccgcccccucgugcc

SEQ ID NO: 540827 - RNA, 23 nt, Human
cucugcgcccgcagccgccgccc

SEQ ID NO: 540828 - RNA, 19 nt, Human
gcgcccgcagccgccgccc

SEQ ID NO: 540829 - RNA, 21 nt, Human
gcgcccgcagccgccgccccc

SEQ ID NO: 540830 - RNA, 21 nt, Human
uccgcucugcgcccgcagccg

SEQ ID NO: 540831 - RNA, 19 nt, Human
cacugugcgucaccaaagc

SEQ ID NO: 540832 - RNA, 18 nt, Human
cccggggcuccuggaggg

SEQ ID NO: 540833 - RNA, 21 nt, Human
cucuccacccagagcagagcu

SEQ ID NO: 540834 - RNA, 20 nt, Human
cuggcagcucagcacgucgu

SEQ ID NO: 540835 - RNA, 24 nt, Human
gcagagcuuccacuaagcuggcag

SEQ ID NO: 540836 - RNA, 18 nt, Human
gcuggcagcucagcacgu

SEQ ID NO: 540837 - RNA, 24 nt, Human
ucaaucccggggcuccuggagggu

SEQ ID NO: 540838 - RNA, 20 nt, Human
uguggauucuucuuuauuuu

SEQ ID NO: 540839 - RNA, 21 nt, Human
uuuuuuuuuuuuuuuuugcaa

SEQ ID NO: 540840 - RNA, 22 nt, Human
uuuuuuuuuuuuuuuuugcaau

SEQ ID NO: 540841 - RNA, 20 nt, Human
uuuuuuuuuuuuuuuuuugg

SEQ ID NO: 540842 - RNA, 19 nt, Human
cacagcccggccucgugcc

SEQ ID NO: 540843 - RNA, 21 nt, Human
cagggucugaugggggcuaca

SEQ ID NO: 540844 - RNA, 27 nt, Human
cuuuaugcuagaccacagcccggccuc

SEQ ID NO: 540845 - RNA, 18 nt, Human
gggcagggucugaugggg

SEQ ID NO: 540846 - RNA, 21 nt, Human
ggugcuccccgguccccaccc

SEQ ID NO: 540847 - RNA, 18 nt, Human
gugcuccccgguccccac

SEQ ID NO: 540848 - RNA, 23 nt, Human
uccgccuuuaugcuagaccacag

SEQ ID NO: 540849 - RNA, 19 nt, Human
aaacgcccacaacauuucu

SEQ ID NO: 540850 - RNA, 21 nt, Human
acaggccuuuaaaauauaaag

SEQ ID NO: 540851 - RNA, 19 nt, Human
accagcuacccagccugca

SEQ ID NO: 540852 - RNA, 27 nt, Human
agacguugggguugcagaccaagagcu

SEQ ID NO: 540853 - RNA, 26 nt, Human
agauaggcuguguuguuacucugcag

SEQ ID NO: 540854 - RNA, 26 nt, Human
agguggcugggauggagcagcuauag

SEQ ID NO: 540855 - RNA, 24 nt, Human
cagccagaacccuugaacucuguu

SEQ ID NO: 540856 - RNA, 22 nt, Human
ccacuuacaaacgcccacaaca

SEQ ID NO: 540857 - RNA, 18 nt, Human
ggaggaaacugagggaug

SEQ ID NO: 540858 - RNA, 20 nt, Human
ggguugcagaccaagagcug

SEQ ID NO: 540859 - RNA, 20 nt, Human
guugcagaccaagagcugag

SEQ ID NO: 540860 - RNA, 21 nt, Human
uaaaccuuugguguguccaua

SEQ ID NO: 540861 - RNA, 19 nt, Human
uaugcagaugccacuuugu

SEQ ID NO: 540862 - RNA, 25 nt, Human
ucaaugauaguaccuguguccuuuc

SEQ ID NO: 540863 - RNA, 20 nt, Human
ucacagguuuagggacucca

SEQ ID NO: 540864 - RNA, 20 nt, Human
uggaggaaacugagggaugg

SEQ ID NO: 540865 - RNA, 21 nt, Human
uggauaaucauagccuucuuc

SEQ ID NO: 540866 - RNA, 20 nt, Human
ugguguguccauacuuucug

SEQ ID NO: 540867 - RNA, 21 nt, Human
uuauaauggcguaaaucuucc

SEQ ID NO: 540868 - RNA, 26 nt, Human
uugcagaccaagagcugagaaucuau

SEQ ID NO: 540869 - RNA, 18 nt, Human
uuucugcuguaauucaca

SEQ ID NO: 540870 - RNA, 24 nt, Human
uuuuuuuuuuuuuuuuuuaacaug

SEQ ID NO: 540871 - RNA, 24 nt, Human
aaccccccacaccccaaaaccaac

SEQ ID NO: 540872 - RNA, 18 nt, Human
accaaccccccacacccc

SEQ ID NO: 540873 - RNA, 25 nt, Human
accacaauucuaccuaucguacauu

SEQ ID NO: 540874 - RNA, 18 nt, Human
accccaaaaccaacgccg

SEQ ID NO: 540875 - RNA, 18 nt, Human
accccccacaccccaaaa

SEQ ID NO: 540876 - RNA, 22 nt, Human
acuggcuagggcagugggagcc

SEQ ID NO: 540877 - RNA, 23 nt, Human
agaggucuaagaaaaugcugacu

SEQ ID NO: 540878 - RNA, 19 nt, Human
agaguuuagaaauucuuga

SEQ ID NO: 540879 - RNA, 19 nt, Human
agcagcggcguugccguca

SEQ ID NO: 540880 - RNA, 20 nt, Human
agcuuucuggaaaagcugga

SEQ ID NO: 540881 - RNA, 23 nt, Human
aggagccaggaaucgcccgcgag

SEQ ID NO: 540882 - RNA, 21 nt, Human
aggaguguuccagaggggccu

SEQ ID NO: 540883 - RNA, 19 nt, Human
agugccaccaaccccccac

SEQ ID NO: 540884 - RNA, 19 nt, Human
aucguacauuuccuagagg

SEQ ID NO: 540885 - RNA, 19 nt, Human
auggacugggccgcgcccc

SEQ ID NO: 540886 - RNA, 18 nt, Human
auucaagcccuuccccca

SEQ ID NO: 540887 - RNA, 24 nt, Human
caccccaaaaccaacgccgucucc

SEQ ID NO: 540888 - RNA, 18 nt, Human
caccuuuauguacuuguc

SEQ ID NO: 540889 - RNA, 19 nt, Human
ccaaccccccacaccccaa

SEQ ID NO: 540890 - RNA, 21 nt, Human
ccaaccccccacaccccaaaa

SEQ ID NO: 540891 - RNA, 25 nt, Human
ccaccaaccccccacaccccaaaac

SEQ ID NO: 540892 - RNA, 23 nt, Human
ccaggccagaaaugcgcggcacg

SEQ ID NO: 540893 - RNA, 22 nt, Human
ccccaaaaccaacgccgucucc

SEQ ID NO: 540894 - RNA, 19 nt, Human
ccccacaccccaaaaccaa

SEQ ID NO: 540895 - RNA, 20 nt, Human
ccccacaccccaaaaccaac

SEQ ID NO: 540896 - RNA, 21 nt, Human
ccccacaccccaaaaccaacg

SEQ ID NO: 540897 - RNA, 20 nt, Human
ccccccacaccccaaaacca

SEQ ID NO: 540898 - RNA, 21 nt, Human
ccccccacaccccaaaaccaa

SEQ ID NO: 540899 - RNA, 24 nt, Human
cccgcuccccaggccagaaaugcg

SEQ ID NO: 540900 - RNA, 22 nt, Human
cccuuaauuaggaguacagagc

SEQ ID NO: 540901 - RNA, 22 nt, Human
cggaaagggguggaaaguggua

SEQ ID NO: 540902 - RNA, 21 nt, Human
cggagcggggacgaggggcac

SEQ ID NO: 540903 - RNA, 23 nt, Human
cuccacccgcuccccaggccaga

SEQ ID NO: 540904 - RNA, 19 nt, Human
cucugcuucugcgcauccg

SEQ ID NO: 540905 - RNA, 19 nt, Human
cuuucuggaaaagcuggaa

SEQ ID NO: 540906 - RNA, 21 nt, Human
gaaggagccaggaaucgcccc

SEQ ID NO: 540907 - RNA, 18 nt, Human
gaccgagggggaggggcc

SEQ ID NO: 540908 - RNA, 22 nt, Human
gaguggccugagagucugggcc

SEQ ID NO: 540909 - RNA, 23 nt, Human
gccgaguggccugagagucuggg

SEQ ID NO: 540910 - RNA, 18 nt, Human
gccuaaaaaggcgcagag

SEQ ID NO: 540911 - RNA, 22 nt, Human
ggagugcugggguggugaagga

SEQ ID NO: 540912 - RNA, 25 nt, Human
ggcaggaguguuccagaggggccug

SEQ ID NO: 540913 - RNA, 18 nt, Human
ggccugagagucugggcc

SEQ ID NO: 540914 - RNA, 18 nt, Human
gggcaggaguguuccaga

SEQ ID NO: 540915 - RNA, 18 nt, Human
gggcagugggagccucag

SEQ ID NO: 540916 - RNA, 20 nt, Human
ggggccuaagagaugacaag

SEQ ID NO: 540917 - RNA, 22 nt, Human
gggggaggggccuaaaaaggcg

SEQ ID NO: 540918 - RNA, 22 nt, Human
gggucuuggagugcuggggugg

SEQ ID NO: 540919 - RNA, 24 nt, Human
gugcugggguggugaaggagccag

SEQ ID NO: 540920 - RNA, 23 nt, Human
guggaaagugguaggguucuagg

SEQ ID NO: 540921 - RNA, 19 nt, Human
uaaaaagaaccaccuguuu

SEQ ID NO: 540922 - RNA, 22 nt, Human
uaaaaagaaccaccuguuuaau

SEQ ID NO: 540923 - RNA, 20 nt, Human
uaagaaaaugcugacuuuua

SEQ ID NO: 540924 - RNA, 20 nt, Human
uagggcagugggagccucag

SEQ ID NO: 540925 - RNA, 18 nt, Human
ucaggccaaagggcgggg

SEQ ID NO: 540926 - RNA, 22 nt, Human
uccacccgcuccccaggccaga

SEQ ID NO: 540927 - RNA, 22 nt, Human
ugccaccaaccccccacacccc

SEQ ID NO: 540928 - RNA, 18 nt, Human
ugccgucagccacaccgc

SEQ ID NO: 540929 - RNA, 18 nt, Human
uggaaaagcuggaaguga

SEQ ID NO: 540930 - RNA, 21 nt, Human
uggaaaagcuggaagugagcc

SEQ ID NO: 540931 - RNA, 21 nt, Human
uggccaagcuuucuggaaaag

SEQ ID NO: 540932 - RNA, 25 nt, Human
ugggccgaggggcguggccaagcuu

SEQ ID NO: 540933 - RNA, 19 nt, Human
ugggguggugaaggagcca

SEQ ID NO: 540934 - RNA, 20 nt, Human
ugguaggguucuaggggagg

SEQ ID NO: 540935 - RNA, 20 nt, Human
uggugaaggagccaggaauc

SEQ ID NO: 540936 - RNA, 19 nt, Human
uucauagaaaaauaaacaa

SEQ ID NO: 540937 - RNA, 22 nt, Human
uuucuggaaaagcuggaaguga

SEQ ID NO: 540938 - RNA, 21 nt, Human
uuuuccugauuucucuuucuc

SEQ ID NO: 540939 - RNA, 22 nt, Human
acuucacggaggcgaguccgca

SEQ ID NO: 540940 - RNA, 23 nt, Human
agccauuggagaggacauccuga

SEQ ID NO: 540941 - RNA, 24 nt, Human
agccauuggagaggacauccugau

SEQ ID NO: 540942 - RNA, 22 nt, Human
aggcaggggcgguguucccugg

SEQ ID NO: 540943 - RNA, 20 nt, Human
cacugggcccuggggaggag

SEQ ID NO: 540944 - RNA, 20 nt, Human
ccaucgcugccgccgccacu

SEQ ID NO: 540945 - RNA, 24 nt, Human
ccgcagcccgaggccgaucgcucc

SEQ ID NO: 540946 - RNA, 21 nt, Human
ccgcccgcccgcccgcccgcc

SEQ ID NO: 540947 - RNA, 22 nt, Human
ccgccgccgccgcggucuccgg

SEQ ID NO: 540948 - RNA, 19 nt, Human
ccgccgcggucuccggcuc

SEQ ID NO: 540949 - RNA, 21 nt, Human
ccgccugcuugccaucgcugc

SEQ ID NO: 540950 - RNA, 18 nt, Human
ccgcgcuccgccucgcgc

SEQ ID NO: 540951 - RNA, 24 nt, Human
ccucgcgccgcccgcccgcccgcc

SEQ ID NO: 540952 - RNA, 20 nt, Human
ccugcagcugcagcagccgc

SEQ ID NO: 540953 - RNA, 18 nt, Human
ccugccgcgguccgcccu

SEQ ID NO: 540954 - RNA, 24 nt, Human
cgaggccgaucgcucccugccgcg

SEQ ID NO: 540955 - RNA, 19 nt, Human
cgaguccgcacugggcccu

SEQ ID NO: 540956 - RNA, 21 nt, Human
cggcucccgcagcccgaggcc

SEQ ID NO: 540957 - RNA, 20 nt, Human
cugccgccgccacugacacc

SEQ ID NO: 540958 - RNA, 27 nt, Human
cuugccaucgcugccgccgccacugac

SEQ ID NO: 540959 - RNA, 19 nt, Human
gacauacacaugaaaucga

SEQ ID NO: 540960 - RNA, 20 nt, Human
gaggcagagcacaggcaggg

SEQ ID NO: 540961 - RNA, 22 nt, Human
gaucgcucccugccgcgguccg

SEQ ID NO: 540962 - RNA, 19 nt, Human
gccaucgcugccgccgcca

SEQ ID NO: 540963 - RNA, 21 nt, Human
gcccgaggccgaucgcucccu

SEQ ID NO: 540964 - RNA, 21 nt, Human
gcggucuccggcucccgcagc

SEQ ID NO: 540965 - RNA, 21 nt, Human
ggucuccggcucccgcagccc

SEQ ID NO: 540966 - RNA, 20 nt, Human
gugacacuucacggaggcga

SEQ ID NO: 540967 - RNA, 22 nt, Human
uacacaugaaaucgaguauaca

SEQ ID NO: 540968 - RNA, 25 nt, Human
uagcacagccauuggagaggacauc

SEQ ID NO: 540969 - RNA, 25 nt, Human
uauacaguccaugcaguagcacagc

SEQ ID NO: 540970 - RNA, 20 nt, Human
uccaugcaguagcacagcca

SEQ ID NO: 540971 - RNA, 25 nt, Human
uccugcagcugcagcagccgccgcc

SEQ ID NO: 540972 - RNA, 19 nt, Human
ucuccggcucccgcagccc

SEQ ID NO: 540973 - RNA, 24 nt, Human
ucuccggcucccgcagcccgaggc

SEQ ID NO: 540974 - RNA, 24 nt, Human
uggcccgaggcagagcacaggcag

SEQ ID NO: 540975 - RNA, 22 nt, Human
uguuuacugcgacauacacaug

SEQ ID NO: 540976 - RNA, 19 nt, Human
uucacggaggcgaguccgc

SEQ ID NO: 540977 - RNA, 18 nt, Human
uuuuuuuuuuuuuuuuug

SEQ ID NO: 540978 - RNA, 23 nt, Human
uuuuuuuuuuuuuuuuuuugagg

SEQ ID NO: 540979 - RNA, 21 nt, Human
aaguggggggcugaggggggc

SEQ ID NO: 540980 - RNA, 20 nt, Human
agcggccgggggaggagggg

SEQ ID NO: 540981 - RNA, 18 nt, Human
agggucauggacacccgg

SEQ ID NO: 540982 - RNA, 20 nt, Human
cauggacacccggaagucaa

SEQ ID NO: 540983 - RNA, 23 nt, Human
ccagggucauggacacccggaag

SEQ ID NO: 540984 - RNA, 18 nt, Human
ccgggggaggaggggaca

SEQ ID NO: 540985 - RNA, 19 nt, Human
ccucagguaacuaugacuc

SEQ ID NO: 540986 - RNA, 20 nt, Human
ccugcaggguccaggcuguc

SEQ ID NO: 540987 - RNA, 20 nt, Human
cgagagaacugaggacggcg

SEQ ID NO: 540988 - RNA, 21 nt, Human
cgagguggacaacuacaccgc

SEQ ID NO: 540989 - RNA, 18 nt, Human
cgccagggucauggacac

SEQ ID NO: 540990 - RNA, 20 nt, Human
cggaccggaagcagccgcca

SEQ ID NO: 540991 - RNA, 22 nt, Human
cggcagaggagcggccggggga

SEQ ID NO: 540992 - RNA, 21 nt, Human
cggcaucaggacagggggcga

SEQ ID NO: 540993 - RNA, 19 nt, Human
cgggagcggacgggcucgg

SEQ ID NO: 540994 - RNA, 23 nt, Human
cgggggaggaggggacagaugcu

SEQ ID NO: 540995 - RNA, 22 nt, Human
cuggagcggaacuuuggugaug

SEQ ID NO: 540996 - RNA, 19 nt, Human
gagagaacugaggacggcg

SEQ ID NO: 540997 - RNA, 18 nt, Human
gagguggacaacuacacc

SEQ ID NO: 540998 - RNA, 18 nt, Human
ggaaguggggggcugagg

SEQ ID NO: 540999 - RNA, 19 nt, Human
ggaggaggggacagaugcu

SEQ ID NO: 541000 - RNA, 19 nt, Human
gggaaguggggggcugagg

SEQ ID NO: 541001 - RNA, 21 nt, Human
gggacagaugcuuggcggcgg

SEQ ID NO: 541002 - RNA, 20 nt, Human
gggcugaggggggcccgggg

SEQ ID NO: 541003 - RNA, 23 nt, Human
gggcugaggggggcccggggggc

SEQ ID NO: 541004 - RNA, 21 nt, Human
ggggcugaggggggcccgggg

SEQ ID NO: 541005 - RNA, 20 nt, Human
ggguacgggaaguggggggc

SEQ ID NO: 541006 - RNA, 21 nt, Human
uacacagguggguuuggcuuu

SEQ ID NO: 541007 - RNA, 22 nt, Human
uacacagguggguuuggcuuug

SEQ ID NO: 541008 - RNA, 21 nt, Human
uacgggaaguggggggcugag

SEQ ID NO: 541009 - RNA, 21 nt, Human
ucaccgagcucgggagcggac

SEQ ID NO: 541010 - RNA, 22 nt, Human
ugcccucagguaacuaugacuc

SEQ ID NO: 541011 - RNA, 21 nt, Human
uggaucucaguaugaggcagg

SEQ ID NO: 541012 - RNA, 23 nt, Human
uggaucucaguaugaggcagggc

SEQ ID NO: 541013 - RNA, 18 nt, Human
uggcggcggcggccgggc

SEQ ID NO: 541014 - RNA, 19 nt, Human
ugggcaaacggguacggga

SEQ ID NO: 541015 - RNA, 23 nt, Human
uggggggcugaggggggcccggg

SEQ ID NO: 541016 - RNA, 24 nt, Human
uggggggcugaggggggcccgggg

SEQ ID NO: 541017 - RNA, 21 nt, Human
uuggcggcggcggccgggcuu

SEQ ID NO: 541018 - RNA, 19 nt, Human
aaagccggucuccgccucu

SEQ ID NO: 541019 - RNA, 23 nt, Human
aaagcgcccuugccucgcccuug

SEQ ID NO: 541020 - RNA, 22 nt, Human
aaauauacacucaggcagugca

SEQ ID NO: 541021 - RNA, 23 nt, Human
aagaaaagacuggcucauaagaa

SEQ ID NO: 541022 - RNA, 26 nt, Human
aagaauccaaaauauacacucaggca

SEQ ID NO: 541023 - RNA, 21 nt, Human
aagucccgccgaaaccaagga

SEQ ID NO: 541024 - RNA, 21 nt, Human
acagcggcggacgcgcggggg

SEQ ID NO: 541025 - RNA, 22 nt, Human
accugcucggucugaacucggu

SEQ ID NO: 541026 - RNA, 19 nt, Human
acuucguuucccuucucca

SEQ ID NO: 541027 - RNA, 21 nt, Human
aggcaaccucgggaaaccggg

SEQ ID NO: 541028 - RNA, 22 nt, Human
aggcagugcaugcuucuuaggc

SEQ ID NO: 541029 - RNA, 25 nt, Human
caaaaaauaacacacaucuuuucca

SEQ ID NO: 541030 - RNA, 23 nt, Human
caaaaaggacaauaaaggcagug

SEQ ID NO: 541031 - RNA, 19 nt, Human
caagaaaagacuggcucau

SEQ ID NO: 541032 - RNA, 20 nt, Human
cauagacccgaagugccuuu

SEQ ID NO: 541033 - RNA, 24 nt, Human
caucuucguaucaaaaaggacaau

SEQ ID NO: 541034 - RNA, 18 nt, Human
ccaaaauauacacucagg

SEQ ID NO: 541035 - RNA, 20 nt, Human
ccacgcgcgagccugggggg

SEQ ID NO: 541036 - RNA, 23 nt, Human
ccccacuucucuccuuagaacag

SEQ ID NO: 541037 - RNA, 18 nt, Human
ccccagaaguugggcccc

SEQ ID NO: 541038 - RNA, 23 nt, Human
ccggucuccgccucuucccaaag

SEQ ID NO: 541039 - RNA, 20 nt, Human
ccucaggaggagaaccugcu

SEQ ID NO: 541040 - RNA, 23 nt, Human
ccuucuccaggccccagaaguug

SEQ ID NO: 541041 - RNA, 23 nt, Human
cgcccaagccgcaggaccaagac

SEQ ID NO: 541042 - RNA, 19 nt, Human
cgcccuugccucgcccaag

SEQ ID NO: 541043 - RNA, 24 nt, Human
cuccaggccccagaaguugggccc

SEQ ID NO: 541044 - RNA, 20 nt, Human
cuucccaaaggcgccguucu

SEQ ID NO: 541045 - RNA, 21 nt, Human
gaaaagacuggcucauaagaa

SEQ ID NO: 541046 - RNA, 20 nt, Human
gaagugccuuuguacauauu

SEQ ID NO: 541047 - RNA, 24 nt, Human
gaggaccucaggaggagaaccugc

SEQ ID NO: 541048 - RNA, 20 nt, Human
gccccagaaguugggccccg

SEQ ID NO: 541049 - RNA, 21 nt, Human
gcccuugccucgcccuugccu

SEQ ID NO: 541050 - RNA, 20 nt, Human
gccgaaaccaaggaugcccg

SEQ ID NO: 541051 - RNA, 24 nt, Human
guccacgaggccucccuccucuuc

SEQ ID NO: 541052 - RNA, 18 nt, Human
uaaaaaacgaacaucaca

SEQ ID NO: 541053 - RNA, 21 nt, Human
uaaaggcaguguuuguguuuc

SEQ ID NO: 541054 - RNA, 24 nt, Human
uaacaaaacaguaaaaaacucaaa

SEQ ID NO: 541055 - RNA, 22 nt, Human
uacauauuuaccaaaauuuaaa

SEQ ID NO: 541056 - RNA, 21 nt, Human
ucaaaaaggacaauaaaggca

SEQ ID NO: 541057 - RNA, 21 nt, Human
uccaaaauauacacucaggca

SEQ ID NO: 541058 - RNA, 18 nt, Human
ucuccaggccccagaagu

SEQ ID NO: 541059 - RNA, 24 nt, Human
ucugaacucgguuucucagcagca

SEQ ID NO: 541060 - RNA, 19 nt, Human
ucuuaagagcaacugucca

SEQ ID NO: 541061 - RNA, 22 nt, Human
ugccucgcccuugccucgccca

SEQ ID NO: 541062 - RNA, 21 nt, Human
uggcacaauauuccauaaaua

SEQ ID NO: 541063 - RNA, 19 nt, Human
uuaaagccggucuccgccu

SEQ ID NO: 541064 - RNA, 22 nt, Human
uuccauaaauacauuuauauac

SEQ ID NO: 541065 - RNA, 18 nt, Human
aacccgcgcuucuccucc

SEQ ID NO: 541066 - RNA, 18 nt, Human
cagcucgaggcugcacgg

SEQ ID NO: 541067 - RNA, 22 nt, Human
ccaacgccgcugucgcucccug

SEQ ID NO: 541068 - RNA, 18 nt, Human
cccgcucgcauugcucca

SEQ ID NO: 541069 - RNA, 24 nt, Human
ccucugcuucccuuuugggggucu

SEQ ID NO: 541070 - RNA, 23 nt, Human
ccuggggcccgcucgcauugcuc

SEQ ID NO: 541071 - RNA, 18 nt, Human
cgcucccuggggcccgcu

SEQ ID NO: 541072 - RNA, 23 nt, Human
cuccucugcuucccuuuuggggg

SEQ ID NO: 541073 - RNA, 23 nt, Human
cucgcauugcuccaggcccagcu

SEQ ID NO: 541074 - RNA, 23 nt, Human
gacuuucucuccucugcuucccu

SEQ ID NO: 541075 - RNA, 24 nt, Human
gcugcacgggucugauuaaagcag

SEQ ID NO: 541076 - RNA, 18 nt, Human
ggacuuucucuccucugc

SEQ ID NO: 541077 - RNA, 21 nt, Human
uaaagcagugcgcguggagag

SEQ ID NO: 541078 - RNA, 22 nt, Human
ucccuuuugggggucucuaugu

SEQ ID NO: 541079 - RNA, 23 nt, Human
uccucugcuucccuuuugggggu

SEQ ID NO: 541080 - RNA, 18 nt, Human
ucucuauguuuucggccg

SEQ ID NO: 541081 - RNA, 23 nt, Human
ucucuccucugcuucccuuuugg

SEQ ID NO: 541082 - RNA, 21 nt, Human
uucccuuuugggggucucuau

SEQ ID NO: 541083 - RNA, 21 nt, Human
uucggccgcugcgccaacgcc

SEQ ID NO: 541084 - RNA, 21 nt, Human
aacaaaacccaaaaaccaccu

SEQ ID NO: 541085 - RNA, 18 nt, Human
acaaaacccaaaaaccac

SEQ ID NO: 541086 - RNA, 24 nt, Human
acaccugcaccugucuguagcugc

SEQ ID NO: 541087 - RNA, 23 nt, Human
acccuccuaaacaaaacccaaaa

SEQ ID NO: 541088 - RNA, 24 nt, Human
accugcaccugucuguagcugcuc

SEQ ID NO: 541089 - RNA, 22 nt, Human
cacccuccuaaacaaaacccaa

SEQ ID NO: 541090 - RNA, 21 nt, Human
ccacccuccuaaacaaaaccc

SEQ ID NO: 541091 - RNA, 24 nt, Human
ccacccuccuaaacaaaacccaaa

SEQ ID NO: 541092 - RNA, 23 nt, Human
ccagggcgcagagagagcgcugg

SEQ ID NO: 541093 - RNA, 19 nt, Human
cccacccacccuccuaaac

SEQ ID NO: 541094 - RNA, 26 nt, Human
cccacccacccuccuaaacaaaaccc

SEQ ID NO: 541095 - RNA, 22 nt, Human
cccaggccgcgcacccccuccg

SEQ ID NO: 541096 - RNA, 19 nt, Human
ccccacccacccuccuaaa

SEQ ID NO: 541097 - RNA, 21 nt, Human
ccccacccacccuccuaaaca

SEQ ID NO: 541098 - RNA, 22 nt, Human
ccccacccacccuccuaaacaa

SEQ ID NO: 541099 - RNA, 21 nt, Human
ccuuugcucagccuuccccac

SEQ ID NO: 541100 - RNA, 19 nt, Human
cgagaacaccugcaccugu

SEQ ID NO: 541101 - RNA, 19 nt, Human
cgagaacaccugcaccugu

SEQ ID NO: 541102 - RNA, 20 nt, Human
cgagaacaccugcaccuguc

SEQ ID NO: 541103 - RNA, 22 nt, Human
cgcgcacccccuccgagaacac

SEQ ID NO: 541104 - RNA, 22 nt, Human
cuaaacaaaacccaaaaaccac

SEQ ID NO: 541105 - RNA, 24 nt, Human
cuaaacaaaacccaaaaaccaccu

SEQ ID NO: 541106 - RNA, 24 nt, Human
gccuuccccacccacccuccuaaa

SEQ ID NO: 541107 - RNA, 20 nt, Human
gcucccccuuugcucagccu

SEQ ID NO: 541108 - RNA, 18 nt, Human
gcugggcgaagagggguc

SEQ ID NO: 541109 - RNA, 19 nt, Human
ggcugggguuccuguuugg

SEQ ID NO: 541110 - RNA, 20 nt, Human
ucagccuuccccacccaccc

SEQ ID NO: 541111 - RNA, 25 nt, Human
ucagccuuccccacccacccuccua

SEQ ID NO: 541112 - RNA, 24 nt, Human
uccccacccacccuccuaaacaaa

SEQ ID NO: 541113 - RNA, 30 nt, Human
uccccacccacccuccuaaacaaaacccaa

SEQ ID NO: 541114 - RNA, 24 nt, Human
uccuaaacaaaacccaaaaaccac

SEQ ID NO: 541115 - RNA, 18 nt, Human
ugggguuccuguuugggg

SEQ ID NO: 541116 - RNA, 20 nt, Human
ugucuguagcugcucccccu

SEQ ID NO: 541117 - RNA, 21 nt, Human
aaaggcagcagaaggcugaaa

SEQ ID NO: 541118 - RNA, 18 nt, Human
aacacaaccaccaccucu

SEQ ID NO: 541119 - RNA, 22 nt, Human
aaguagccccagcagccaggau

SEQ ID NO: 541120 - RNA, 21 nt, Human
aauugcucuccuuccuccuau

SEQ ID NO: 541121 - RNA, 22 nt, Human
acucugcuggccaggagggcgg

SEQ ID NO: 541122 - RNA, 21 nt, Human
acuggaaucuugaugucugug

SEQ ID NO: 541123 - RNA, 19 nt, Human
agcgcccacuccucagagc

SEQ ID NO: 541124 - RNA, 22 nt, Human
aggcaggaugcugcagaaccug

SEQ ID NO: 541125 - RNA, 18 nt, Human
aucacuauaaaaacauca

SEQ ID NO: 541126 - RNA, 24 nt, Human
aucaguugccaucuaugcuaucaa

SEQ ID NO: 541127 - RNA, 18 nt, Human
caaaggcagcagaaggcu

SEQ ID NO: 541128 - RNA, 23 nt, Human
caaucacuauaaaaacaucaaau

SEQ ID NO: 541129 - RNA, 27 nt, Human
cacaaccaccaccucugggagcugcag

SEQ ID NO: 541130 - RNA, 21 nt, Human
cagaagcaccauucuauuccc

SEQ ID NO: 541131 - RNA, 25 nt, Human
cagcaaggcaggaugcugcagaaag

SEQ ID NO: 541132 - RNA, 19 nt, Human
cagcagaaggcugaaauag

SEQ ID NO: 541133 - RNA, 22 nt, Human
caucagugcuuaugaacagccu

SEQ ID NO: 541134 - RNA, 25 nt, Human
ccagugccccacucugcuggccagg

SEQ ID NO: 541135 - RNA, 19 nt, Human
ccccacucugcuggccagg

SEQ ID NO: 541136 - RNA, 18 nt, Human
ccccagcagccaggaugc

SEQ ID NO: 541137 - RNA, 19 nt, Human
cccccagugccccacucug

SEQ ID NO: 541138 - RNA, 20 nt, Human
ccccuuagaggaggggcaag

SEQ ID NO: 541139 - RNA, 22 nt, Human
ccucagagcccuggcccucccc

SEQ ID NO: 541140 - RNA, 22 nt, Human
ccucugggagcugcagagcaag

SEQ ID NO: 541141 - RNA, 18 nt, Human
ccuggcugcuggcuccag

SEQ ID NO: 541142 - RNA, 26 nt, Human
cucccagcgcccacuccucagagccc

SEQ ID NO: 541143 - RNA, 21 nt, Human
cugcuggcuccagccaccugg

SEQ ID NO: 541144 - RNA, 22 nt, Human
cugcuggcuccagccaccugga

SEQ ID NO: 541145 - RNA, 23 nt, Human
cugcuggcuccagccaccuggau

SEQ ID NO: 541146 - RNA, 21 nt, Human
cuggggcuuguuccaauaaau

SEQ ID NO: 541147 - RNA, 21 nt, Human
cugucaacgacccugguccug

SEQ ID NO: 541148 - RNA, 22 nt, Human
cuucucccagcgcccacuccuc

SEQ ID NO: 541149 - RNA, 21 nt, Human
gacccugguccuggcugcugg

SEQ ID NO: 541150 - RNA, 27 nt, Human
gcaaggcaggaugcugcagaaccugcu

SEQ ID NO: 541151 - RNA, 22 nt, Human
gcccacuccucagagcccuggc

SEQ ID NO: 541152 - RNA, 20 nt, Human
gcuaucaaccuccuuccucc

SEQ ID NO: 541153 - RNA, 21 nt, Human
ggacagagcagcaaggcagga

SEQ ID NO: 541154 - RNA, 22 nt, Human
ggagcuucucccagcgcccacu

SEQ ID NO: 541155 - RNA, 24 nt, Human
uaaaaacaucaaauagucaaacua

SEQ ID NO: 541156 - RNA, 22 nt, Human
uaacacaaccaccaccucuggg

SEQ ID NO: 541157 - RNA, 26 nt, Human
uaacacaaccaccaccucugggagcu

SEQ ID NO: 541158 - RNA, 22 nt, Human
uagaaauugcucuccuuccucc

SEQ ID NO: 541159 - RNA, 19 nt, Human
uaguaaaaccccuuagagg

SEQ ID NO: 541160 - RNA, 19 nt, Human
ucacagaagaaacuguuca

SEQ ID NO: 541161 - RNA, 22 nt, Human
ucacugaaugaagacaagaaaa

SEQ ID NO: 541162 - RNA, 22 nt, Human
uccucacagaagaaacuguuca

SEQ ID NO: 541163 - RNA, 23 nt, Human
uccucacagaagaaacuguucau

SEQ ID NO: 541164 - RNA, 18 nt, Human
uccucagagcccuggccc

SEQ ID NO: 541165 - RNA, 18 nt, Human
ucucccagcgcccacucc

SEQ ID NO: 541166 - RNA, 19 nt, Human
ucucccagcgcccacuccu

SEQ ID NO: 541167 - RNA, 21 nt, Human
ucuccuuccuccuaucuuaaa

SEQ ID NO: 541168 - RNA, 21 nt, Human
ugaagacaagaaaacuguugc

SEQ ID NO: 541169 - RNA, 21 nt, Human
ugcagaaccugcugucaacga

SEQ ID NO: 541170 - RNA, 24 nt, Human
ugcuggccaggagggcgggccugg

SEQ ID NO: 541171 - RNA, 23 nt, Human
ugcuguugccccccagugcccca

SEQ ID NO: 541172 - RNA, 19 nt, Human
uggaggaccaggcaaaggc

SEQ ID NO: 541173 - RNA, 24 nt, Human
uggccaggaagaugugggggacag

SEQ ID NO: 541174 - RNA, 23 nt, Human
ugucaacgacccugguccuggcu

SEQ ID NO: 541175 - RNA, 21 nt, Human
uuagaggaggggcaaggggcu

SEQ ID NO: 541176 - RNA, 21 nt, Human
uuccuccacacucuucuucaa

SEQ ID NO: 541177 - RNA, 23 nt, Human
aaaaagcccgaagcuuguacuac

SEQ ID NO: 541178 - RNA, 19 nt, Human
aaacaaacaaaaaagcccg

SEQ ID NO: 541179 - RNA, 23 nt, Human
aaacaaacaaaaaagcccgaagc

SEQ ID NO: 541180 - RNA, 19 nt, Human
aaacaaacaaacaaacaaa

SEQ ID NO: 541181 - RNA, 23 nt, Human
aaagcuuaaacaaacaaacaaac

SEQ ID NO: 541182 - RNA, 24 nt, Human
aagcuaaugaagcaccugaaagcu

SEQ ID NO: 541183 - RNA, 25 nt, Human
acaaacaaacaaaaaagcccgaagc

SEQ ID NO: 541184 - RNA, 18 nt, Human
acaaacaaacaaacaaac

SEQ ID NO: 541185 - RNA, 18 nt, Human
acaaacaaacaaacaaac

SEQ ID NO: 541186 - RNA, 22 nt, Human
acacuaaauauacagugccagc

SEQ ID NO: 541187 - RNA, 18 nt, Human
agaaucauggaauccugg

SEQ ID NO: 541188 - RNA, 22 nt, Human
agacacaaaaugaaaacaggga

SEQ ID NO: 541189 - RNA, 21 nt, Human
agacagccuccaucucugggg

SEQ ID NO: 541190 - RNA, 22 nt, Human
agcaagacagccuccaucucug

SEQ ID NO: 541191 - RNA, 21 nt, Human
aguaagacacuaaauauacag

SEQ ID NO: 541192 - RNA, 22 nt, Human
caaacaaacaaaaaagcccgaa

SEQ ID NO: 541193 - RNA, 21 nt, Human
caaacaaacaaacaaaaaagc

SEQ ID NO: 541194 - RNA, 25 nt, Human
caagaauauccacugucagccaagg

SEQ ID NO: 541195 - RNA, 20 nt, Human
cagccaaggaaaugcccaca

SEQ ID NO: 541196 - RNA, 22 nt, Human
ccaaaggaacugaaagcuaaug

SEQ ID NO: 541197 - RNA, 24 nt, Human
cccaggacccaagaaggguacaag

SEQ ID NO: 541198 - RNA, 24 nt, Human
gaaaugaacaaguccuuucuguca

SEQ ID NO: 541199 - RNA, 20 nt, Human
gaagcaccugaaagcuuaaa

SEQ ID NO: 541200 - RNA, 22 nt, Human
gaagcaccugaaagcuuaaaca

SEQ ID NO: 541201 - RNA, 18 nt, Human
gauaacagauuuuucacu

SEQ ID NO: 541202 - RNA, 20 nt, Human
gaucccaggacccaagaagg

SEQ ID NO: 541203 - RNA, 18 nt, Human
ggaaaugcccacacuacc

SEQ ID NO: 541204 - RNA, 19 nt, Human
ggaaaugcccacacuacca

SEQ ID NO: 541205 - RNA, 22 nt, Human
gguacaagaauauccacuguca

SEQ ID NO: 541206 - RNA, 22 nt, Human
uacagaaucauggaauccuggg

SEQ ID NO: 541207 - RNA, 22 nt, Human
uagacacaaaaugaaaacacuc

SEQ ID NO: 541208 - RNA, 18 nt, Human
uagcacaacucucucuuu

SEQ ID NO: 541209 - RNA, 22 nt, Human
uagcuauuggauaacagauuuu

SEQ ID NO: 541210 - RNA, 18 nt, Human
ucacacaaaccuagacac

SEQ ID NO: 541211 - RNA, 22 nt, Human
ucccaggacccaagaaggguac

SEQ ID NO: 541212 - RNA, 20 nt, Human
ucccugccauagcaagacag

SEQ ID NO: 541213 - RNA, 20 nt, Human
ugaaaacacucuccuguuuu

SEQ ID NO: 541214 - RNA, 21 nt, Human
ugaaaacacucuccuguuuuc

SEQ ID NO: 541215 - RNA, 19 nt, Human
ugagaagcgaaaugaacaa

SEQ ID NO: 541216 - RNA, 19 nt, Human
ugagaagcgaaaugaacaa

SEQ ID NO: 541217 - RNA, 26 nt, Human
ugcuuacucacacaaaccuagacaca

SEQ ID NO: 541218 - RNA, 23 nt, Human
uggcuuacaacaacaaagguuua

SEQ ID NO: 541219 - RNA, 20 nt, Human
uuauagauacuggucagcuu

SEQ ID NO: 541220 - RNA, 25 nt, Human
aaaaagcccaaaaggcuaccuuugc

SEQ ID NO: 541221 - RNA, 21 nt, Human
aaaaagucauagcagcaacaa

SEQ ID NO: 541222 - RNA, 18 nt, Human
aaaacacagugaaaagac

SEQ ID NO: 541223 - RNA, 21 nt, Human
aaaauaccaggauggaggaag

SEQ ID NO: 541224 - RNA, 18 nt, Human
aaaggagguaaaaaguca

SEQ ID NO: 541225 - RNA, 22 nt, Human
aaccaaauguaccaccacaaga

SEQ ID NO: 541226 - RNA, 24 nt, Human
aaccaaauguaccaccacaagacc

SEQ ID NO: 541227 - RNA, 24 nt, Human
aagcaaauauuguuuuuuuaaaau

SEQ ID NO: 541228 - RNA, 23 nt, Human
aauuaacagugugccuucuuugc

SEQ ID NO: 541229 - RNA, 21 nt, Human
acaaaacacagugaaaagaca

SEQ ID NO: 541230 - RNA, 20 nt, Human
acacagugaaaagacaacuu

SEQ ID NO: 541231 - RNA, 23 nt, Human
acagugccaugucugaucuuuag

SEQ ID NO: 541232 - RNA, 19 nt, Human
acuaaugacagugguuucu

SEQ ID NO: 541233 - RNA, 21 nt, Human
acuacaauuuaauuucacguu

SEQ ID NO: 541234 - RNA, 22 nt, Human
agacaacggauggaucagcuac

SEQ ID NO: 541235 - RNA, 20 nt, Human
agaucagaagaucacuggua

SEQ ID NO: 541236 - RNA, 19 nt, Human
agcagcaacaaugugugug

SEQ ID NO: 541237 - RNA, 20 nt, Human
aggauggaagcuccaaaaaa

SEQ ID NO: 541238 - RNA, 24 nt, Human
agugaaaagacaacuuugugaaga

SEQ ID NO: 541239 - RNA, 22 nt, Human
auggaggaagcagccacgggcg

SEQ ID NO: 541240 - RNA, 18 nt, Human
auucuuagauuuguuucc

SEQ ID NO: 541241 - RNA, 23 nt, Human
caaaaaaccuguagugaauuuua

SEQ ID NO: 541242 - RNA, 22 nt, Human
caaaacacagugaaaagacaac

SEQ ID NO: 541243 - RNA, 23 nt, Human
caaaaggcuaccuuugccuuaac

SEQ ID NO: 541244 - RNA, 22 nt, Human
caaauguaccaccacaagacca

SEQ ID NO: 541245 - RNA, 23 nt, Human
caaggguuuuuuuuucuugacuu

SEQ ID NO: 541246 - RNA, 24 nt, Human
caagucucaaacuuagucuucuug

SEQ ID NO: 541247 - RNA, 25 nt, Human
caauggguuaaccaaauguaccacc

SEQ ID NO: 541248 - RNA, 19 nt, Human
cagaaucaaguugccuucc

SEQ ID NO: 541249 - RNA, 22 nt, Human
cagaaucaaguugccuucccuu

SEQ ID NO: 541250 - RNA, 21 nt, Human
cagcuacagcccuucccacag

SEQ ID NO: 541251 - RNA, 22 nt, Human
cagcuacagcccuucccacaga

SEQ ID NO: 541252 - RNA, 28 nt, Human
ccaaaaaauaccaggauggaggaagcaa

SEQ ID NO: 541253 - RNA, 23 nt, Human
ccaaauguaccaccacaagacca

SEQ ID NO: 541254 - RNA, 18 nt, Human
ccaccggaaacggagcug

SEQ ID NO: 541255 - RNA, 21 nt, Human
ccaggauggaagcuccaaaaa

SEQ ID NO: 541256 - RNA, 19 nt, Human
cccacagaaucaaguugcc

SEQ ID NO: 541257 - RNA, 20 nt, Human
ccuaggcaaccaacuuuugc

SEQ ID NO: 541258 - RNA, 20 nt, Human
ccucuuggggguuugcuccu

SEQ ID NO: 541259 - RNA, 20 nt, Human
ccugccuaaaucagcucccc

SEQ ID NO: 541260 - RNA, 20 nt, Human
ccuucuguaguacaggaauu

SEQ ID NO: 541261 - RNA, 20 nt, Human
cuaaaucagcucccacugcc

SEQ ID NO: 541262 - RNA, 21 nt, Human
cuaaaucagcucccacugcca

SEQ ID NO: 541263 - RNA, 24 nt, Human
cuccaaaaaauaccaggauggagg

SEQ ID NO: 541264 - RNA, 22 nt, Human
cucccagccuccacucaacuac

SEQ ID NO: 541265 - RNA, 24 nt, Human
cucgaguuuuuuuuuuuuuuuuuc

SEQ ID NO: 541266 - RNA, 23 nt, Human
cuuaaaacucccagccuccacuc

SEQ ID NO: 541267 - RNA, 22 nt, Human
gagggggugaaaacugcuuaga

SEQ ID NO: 541268 - RNA, 20 nt, Human
gaguuuuuuuuuuuuuuuuu

SEQ ID NO: 541269 - RNA, 23 nt, Human
gauggaagcuccaaaaaauacca

SEQ ID NO: 541270 - RNA, 23 nt, Human
gcaaaacaucuaauaaaugguca

SEQ ID NO: 541271 - RNA, 19 nt, Human
gcuuaaaacucccagccuc

SEQ ID NO: 541272 - RNA, 20 nt, Human
gggguuugcuccuauuucuu

SEQ ID NO: 541273 - RNA, 18 nt, Human
gugaaaagacaacuuugu

SEQ ID NO: 541274 - RNA, 25 nt, Human
uaaaaagcccaaaaggcuaccuuuu

SEQ ID NO: 541275 - RNA, 24 nt, Human
uaacuacaauuuaauuucacguug

SEQ ID NO: 541276 - RNA, 18 nt, Human
uacaggaaugauucuuag

SEQ ID NO: 541277 - RNA, 19 nt, Human
uacaggaaugauucuuaga

SEQ ID NO: 541278 - RNA, 22 nt, Human
uaccccaccagcuaacacacua

SEQ ID NO: 541279 - RNA, 24 nt, Human
uacuuccuuccucauuuaguuuua

SEQ ID NO: 541280 - RNA, 21 nt, Human
uacuuuaaaccacagcaguua

SEQ ID NO: 541281 - RNA, 18 nt, Human
uaucaaggauagguaaca

SEQ ID NO: 541282 - RNA, 19 nt, Human
uaugcuggucaagucucaa

SEQ ID NO: 541283 - RNA, 22 nt, Human
uauuguaccccaccagcuaaca

SEQ ID NO: 541284 - RNA, 18 nt, Human
ucagcuacagcccuuccc

SEQ ID NO: 541285 - RNA, 21 nt, Human
ucauauucauuaaaaagccca

SEQ ID NO: 541286 - RNA, 23 nt, Human
ucauguuacccagauuguuucuc

SEQ ID NO: 541287 - RNA, 24 nt, Human
ucccauguaacacuaaacagggau

SEQ ID NO: 541288 - RNA, 24 nt, Human
ucccuaggcaaccaacuuuugcuu

SEQ ID NO: 541289 - RNA, 23 nt, Human
ucccuuagcaaccagcaucacuu

SEQ ID NO: 541290 - RNA, 18 nt, Human
uccuaggucucuauacuu

SEQ ID NO: 541291 - RNA, 23 nt, Human
ucuuagauuuguuuccuuuuguu

SEQ ID NO: 541292 - RNA, 22 nt, Human
ugaaaagacaacuuugugaaga

SEQ ID NO: 541293 - RNA, 22 nt, Human
ugacaaaacacagugaaaagaa

SEQ ID NO: 541294 - RNA, 20 nt, Human
ugcuuauccauauucccuuu

SEQ ID NO: 541295 - RNA, 21 nt, Human
uggaagaaccaggauggaagc

SEQ ID NO: 541296 - RNA, 20 nt, Human
uggaggaagcagccacgggc

SEQ ID NO: 541297 - RNA, 23 nt, Human
uggguuaaccaaauguaccacca

SEQ ID NO: 541298 - RNA, 21 nt, Human
uguaccaccacaagaccaccu

SEQ ID NO: 541299 - RNA, 25 nt, Human
uguaccccaccagcuaacacacuaa

SEQ ID NO: 541300 - RNA, 26 nt, Human
uguuuuuuuaaaauagccugagauga

SEQ ID NO: 541301 - RNA, 19 nt, Human
uuugccuuaacccuucugu

SEQ ID NO: 541302 - RNA, 22 nt, Human
uuuuuaaaauagccugagauga

SEQ ID NO: 541303 - RNA, 20 nt, Human
uuuuuuuuuuaagacaaaua

SEQ ID NO: 541304 - RNA, 19 nt, Human
uuuuuuuuuuuuuuuuuaa

SEQ ID NO: 541305 - RNA, 21 nt, Human
aaaagcacagacaauagcaag

SEQ ID NO: 541306 - RNA, 27 nt, Human
aaaagcacagacaauagcuggagaccc

SEQ ID NO: 541307 - RNA, 20 nt, Human
aaaauagcuccuuggccccu

SEQ ID NO: 541308 - RNA, 21 nt, Human
aacagcuugcugguguccuuu

SEQ ID NO: 541309 - RNA, 21 nt, Human
aaccgcuccucauugaacagc

SEQ ID NO: 541310 - RNA, 28 nt, Human
aagaggaaucugagcucuucuuuccagg

SEQ ID NO: 541311 - RNA, 21 nt, Human
acaaggcugaggccacaaggg

SEQ ID NO: 541312 - RNA, 20 nt, Human
accugcugcccaaaggcugg

SEQ ID NO: 541313 - RNA, 23 nt, Human
agaaacauuucgggggguggagg

SEQ ID NO: 541314 - RNA, 23 nt, Human
agagggccaggccugagaaacua

SEQ ID NO: 541315 - RNA, 23 nt, Human
agcaguccauccaucaugguuag

SEQ ID NO: 541316 - RNA, 23 nt, Human
agcuccuuggccccuggccgggg

SEQ ID NO: 541317 - RNA, 23 nt, Human
aggaggcaaggaccgaggagucc

SEQ ID NO: 541318 - RNA, 21 nt, Human
aggaggcugggggcauggggu

SEQ ID NO: 541319 - RNA, 24 nt, Human
aggcugggggaggaaaguggugga

SEQ ID NO: 541320 - RNA, 22 nt, Human
aggggacagacccgcugagaaa

SEQ ID NO: 541321 - RNA, 19 nt, Human
caaaauagcuccuuggccc

SEQ ID NO: 541322 - RNA, 22 nt, Human
cacacagguccucuacaucauc

SEQ ID NO: 541323 - RNA, 20 nt, Human
cacccccggcccugcccacu

SEQ ID NO: 541324 - RNA, 21 nt, Human
cacggcccaaguugaagcaga

SEQ ID NO: 541325 - RNA, 22 nt, Human
cagcauagacagagaagcccuc

SEQ ID NO: 541326 - RNA, 25 nt, Human
caggaacaggcucuccgacucaggc

SEQ ID NO: 541327 - RNA, 26 nt, Human
cagguacugcacuugacccccugaag

SEQ ID NO: 541328 - RNA, 25 nt, Human
cagguggccacuggcgugugaugcc

SEQ ID NO: 541329 - RNA, 20 nt, Human
cauuguacuuggcagugggu

SEQ ID NO: 541330 - RNA, 18 nt, Human
cauuucgggggguggagg

SEQ ID NO: 541331 - RNA, 22 nt, Human
ccagcagcgagauggucucggu

SEQ ID NO: 541332 - RNA, 19 nt, Human
ccagguacugcacuugacc

SEQ ID NO: 541333 - RNA, 21 nt, Human
cccaaaauagcuccuuggccc

SEQ ID NO: 541334 - RNA, 24 nt, Human
cccaaguugaagcagaccgggguc

SEQ ID NO: 541335 - RNA, 22 nt, Human
ccccaaaauagcuccuuggccc

SEQ ID NO: 541336 - RNA, 23 nt, Human
cccccaaauuuugugcagguggg

SEQ ID NO: 541337 - RNA, 23 nt, Human
cccccggcccugcccacucaacu

SEQ ID NO: 541338 - RNA, 18 nt, Human
cccggcccugcccacuca

SEQ ID NO: 541339 - RNA, 18 nt, Human
cccucagagccugaacag

SEQ ID NO: 541340 - RNA, 24 nt, Human
cccugggcaaacgagaccccaaaa

SEQ ID NO: 541341 - RNA, 20 nt, Human
ccuagaaccacagaguacac

SEQ ID NO: 541342 - RNA, 19 nt, Human
ccucccugggcaaacgaga

SEQ ID NO: 541343 - RNA, 23 nt, Human
ccucgcccugcuucagcaggcug

SEQ ID NO: 541344 - RNA, 22 nt, Human
ccugcccacucaacugaggggc

SEQ ID NO: 541345 - RNA, 20 nt, Human
ccugcgggacagggaggaac

SEQ ID NO: 541346 - RNA, 25 nt, Human
cgacucaggcagccacuucagauau

SEQ ID NO: 541347 - RNA, 25 nt, Human
cgcccguguccgggccagucugggg

SEQ ID NO: 541348 - RNA, 20 nt, Human
cgguggcagcagugaacugg

SEQ ID NO: 541349 - RNA, 22 nt, Human
cguuguacagguacagguggcc

SEQ ID NO: 541350 - RNA, 20 nt, Human
cuccccaggagugaccaguc

SEQ ID NO: 541351 - RNA, 21 nt, Human
cucccugcggcuccgagagcc

SEQ ID NO: 541352 - RNA, 18 nt, Human
cugcagaccuggggcucu

SEQ ID NO: 541353 - RNA, 24 nt, Human
cugggcugggagcaggccugcacu

SEQ ID NO: 541354 - RNA, 21 nt, Human
gaaauagagcucacggcccaa

SEQ ID NO: 541355 - RNA, 23 nt, Human
gaagacacacucccugcggcucc

SEQ ID NO: 541356 - RNA, 19 nt, Human
gagaaggcgaacucguuga

SEQ ID NO: 541357 - RNA, 19 nt, Human
gagccacauuccugcccag

SEQ ID NO: 541358 - RNA, 18 nt, Human
gagguggggaaggggugg

SEQ ID NO: 541359 - RNA, 20 nt, Human
gcagcuggggugggggccgg

SEQ ID NO: 541360 - RNA, 23 nt, Human
gcaggaugcucuucuccccaaga

SEQ ID NO: 541361 - RNA, 26 nt, Human
gccgggcgagggcuggaugcuggagc

SEQ ID NO: 541362 - RNA, 18 nt, Human
gccugggccuugagaggg

SEQ ID NO: 541363 - RNA, 21 nt, Human
gcgcugggcugggagcaggcc

SEQ ID NO: 541364 - RNA, 21 nt, Human
gcugggggaggaaaguggugg

SEQ ID NO: 541365 - RNA, 18 nt, Human
gcuucagcaggcuguacu

SEQ ID NO: 541366 - RNA, 19 nt, Human
ggaaagcggacugccuaga

SEQ ID NO: 541367 - RNA, 23 nt, Human
ggagucccagcugggcagggccg

SEQ ID NO: 541368 - RNA, 21 nt, Human
ggcagcauagacagagaagcc

SEQ ID NO: 541369 - RNA, 18 nt, Human
ggcaugggguuggggggg

SEQ ID NO: 541370 - RNA, 20 nt, Human
ggccccuggccggggagccc

SEQ ID NO: 541371 - RNA, 18 nt, Human
ggccgaggcgcaggggug

SEQ ID NO: 541372 - RNA, 20 nt, Human
ggccuggggugccugggccu

SEQ ID NO: 541373 - RNA, 19 nt, Human
ggcuaggaggcugggggca

SEQ ID NO: 541374 - RNA, 23 nt, Human
ggcucccacgacgacagcagccu

SEQ ID NO: 541375 - RNA, 22 nt, Human
gggccuugagagggccaggccu

SEQ ID NO: 541376 - RNA, 24 nt, Human
ggggcggggagucucuccccagga

SEQ ID NO: 541377 - RNA, 20 nt, Human
gggggcaugggguugggggg

SEQ ID NO: 541378 - RNA, 20 nt, Human
gggggcccccaaauuuugug

SEQ ID NO: 541379 - RNA, 18 nt, Human
ggggguggaggguggcgc

SEQ ID NO: 541380 - RNA, 18 nt, Human
ggggugccugggccuuga

SEQ ID NO: 541381 - RNA, 22 nt, Human
ggggugggaggcgcugggcugg

SEQ ID NO: 541382 - RNA, 18 nt, Human
ggguggaggguggcgcgg

SEQ ID NO: 541383 - RNA, 24 nt, Human
ggguuauggcuaggaggcuggggg

SEQ ID NO: 541384 - RNA, 21 nt, Human
ggguugggggggcccgauauc

SEQ ID NO: 541385 - RNA, 20 nt, Human
gguccugggcaguucugauu

SEQ ID NO: 541386 - RNA, 22 nt, Human
ggugcccuuguagauccgcuug

SEQ ID NO: 541387 - RNA, 19 nt, Human
ggugggcugggugcccuug

SEQ ID NO: 541388 - RNA, 21 nt, Human
ggugggggacaaggcugaggc

SEQ ID NO: 541389 - RNA, 22 nt, Human
gguggugaggacaggaccagga

SEQ ID NO: 541390 - RNA, 21 nt, Human
gucuggggggcccccaaauuu

SEQ ID NO: 541391 - RNA, 18 nt, Human
gugggaggcgcugggcug

SEQ ID NO: 541392 - RNA, 19 nt, Human
gugggugggggacaaggcu

SEQ ID NO: 541393 - RNA, 18 nt, Human
uaaaaaacaccgaggacu

SEQ ID NO: 541394 - RNA, 22 nt, Human
uacagguacagguggccacugg

SEQ ID NO: 541395 - RNA, 19 nt, Human
uacaucgcccguguccggg

SEQ ID NO: 541396 - RNA, 20 nt, Human
uacuggggcggggccgaggc

SEQ ID NO: 541397 - RNA, 18 nt, Human
uagaaccacagaguacac

SEQ ID NO: 541398 - RNA, 20 nt, Human
uagcuccuuggccccuggcc

SEQ ID NO: 541399 - RNA, 18 nt, Human
uaggaggcugggggcaug

SEQ ID NO: 541400 - RNA, 21 nt, Human
uaggaggcugggggcaugggg

SEQ ID NO: 541401 - RNA, 25 nt, Human
uaggaggcugggggcaugggguugg

SEQ ID NO: 541402 - RNA, 21 nt, Human
uauggcuaggaggcugggggc

SEQ ID NO: 541403 - RNA, 26 nt, Human
ucagaggaagaggucauuguacuugg

SEQ ID NO: 541404 - RNA, 18 nt, Human
ucagcaggcuguacuggg

SEQ ID NO: 541405 - RNA, 23 nt, Human
uccccaggagugaccagucacau

SEQ ID NO: 541406 - RNA, 22 nt, Human
ucccugggcaaacgagacccca

SEQ ID NO: 541407 - RNA, 23 nt, Human
ucccugggcaaacgagaccccaa

SEQ ID NO: 541408 - RNA, 21 nt, Human
ucccugggcuccggcuuuucc

SEQ ID NO: 541409 - RNA, 21 nt, Human
ucccugggcuccggcuuuucc

SEQ ID NO: 541410 - RNA, 18 nt, Human
ucgcagguccguucccuc

SEQ ID NO: 541411 - RNA, 20 nt, Human
ucgguggcagcagugaacug

SEQ ID NO: 541412 - RNA, 24 nt, Human
ucgguggcagcagugaacugguug

SEQ ID NO: 541413 - RNA, 21 nt, Human
ucuccccaagaggguccugcu

SEQ ID NO: 541414 - RNA, 18 nt, Human
ugacccgcugagaagccc

SEQ ID NO: 541415 - RNA, 22 nt, Human
ugaccugcugcccaaaggcugg

SEQ ID NO: 541416 - RNA, 25 nt, Human
ugacucgcagguccguucccucccu

SEQ ID NO: 541417 - RNA, 18 nt, Human
ugaggccacaagggcuau

SEQ ID NO: 541418 - RNA, 26 nt, Human
ugaucugugaggucagcagggagggu

SEQ ID NO: 541419 - RNA, 22 nt, Human
ugcccaggcugggauuagaaac

SEQ ID NO: 541420 - RNA, 24 nt, Human
ugcccaggcugggauuagaaacag

SEQ ID NO: 541421 - RNA, 20 nt, Human
ugccuagaaccacagaguac

SEQ ID NO: 541422 - RNA, 22 nt, Human
ugcuggggacagggaugagggu

SEQ ID NO: 541423 - RNA, 19 nt, Human
uggaccacccccggcccug

SEQ ID NO: 541424 - RNA, 21 nt, Human
uggcgcgggaagacacacucc

SEQ ID NO: 541425 - RNA, 27 nt, Human
ugggagcaggccugcacuccuccucug

SEQ ID NO: 541426 - RNA, 23 nt, Human
ugggauuagaaacagaaacauuu

SEQ ID NO: 541427 - RNA, 18 nt, Human
ugggggaggaaaguggug

SEQ ID NO: 541428 - RNA, 18 nt, Human
uggggugggggccgggcg

SEQ ID NO: 541429 - RNA, 20 nt, Human
uggggugggggccgggcgag

SEQ ID NO: 541430 - RNA, 24 nt, Human
uggggugggggccgggcgagggcu

SEQ ID NO: 541431 - RNA, 25 nt, Human
uggggugggggccgggcgagggcug

SEQ ID NO: 541432 - RNA, 24 nt, Human
ugggugcccuuguagauccgcuug

SEQ ID NO: 541433 - RNA, 25 nt, Human
ugggugcccuuguagauccgcuugu

SEQ ID NO: 541434 - RNA, 22 nt, Human
uuacaucgcccguguccgggcc

SEQ ID NO: 541435 - RNA, 24 nt, Human
uucagcaggcuguacuggggcggg

SEQ ID NO: 541436 - RNA, 24 nt, Human
uuguagauccgcuugucaauuggc

SEQ ID NO: 541437 - RNA, 23 nt, Human
ccaccaccucuugucccugcccc

SEQ ID NO: 541438 - RNA, 21 nt, Human
cucuugucccugccccaggga

SEQ ID NO: 541439 - RNA, 19 nt, Human
ucugcagccacguccaggg

SEQ ID NO: 541440 - RNA, 21 nt, Human
uugucccugccccagggacac

SEQ ID NO: 541441 - RNA, 18 nt, Human
acaaacaaaaaaaaaggu

SEQ ID NO: 541442 - RNA, 24 nt, Human
agccagccaacaagaaauaggaac

SEQ ID NO: 541443 - RNA, 19 nt, Human
aggcagggccccgggacuu

SEQ ID NO: 541444 - RNA, 24 nt, Human
caacaagaaauaggaacaaggaaa

SEQ ID NO: 541445 - RNA, 21 nt, Human
caagaaauaggaacaaggaaa

SEQ ID NO: 541446 - RNA, 22 nt, Human
ccccuaggacgauggaggcagg

SEQ ID NO: 541447 - RNA, 22 nt, Human
cgcggaaccccuaggacgaugg

SEQ ID NO: 541448 - RNA, 21 nt, Human
cucagccagccaacaagaaau

SEQ ID NO: 541449 - RNA, 25 nt, Human
gacgauggaggcagggccccgggaa

SEQ ID NO: 541450 - RNA, 21 nt, Human
ggaggcagggccccgggacuu

SEQ ID NO: 541451 - RNA, 21 nt, Human
uaaguaaauucauaauuauaa

SEQ ID NO: 541452 - RNA, 21 nt, Human
ugcuccugcccgcggaacccc

SEQ ID NO: 541453 - RNA, 18 nt, Human
ugcuucuggguugcuccu

SEQ ID NO: 541454 - RNA, 24 nt, Human
ugcuucuggguugcuccugcccgc

SEQ ID NO: 541455 - RNA, 18 nt, Human
uguuuucuuuagucuuua

SEQ ID NO: 541456 - RNA, 19 nt, Human
augaagggucaauuuucag

SEQ ID NO: 541457 - RNA, 20 nt, Human
cacacacaucacugaguccc

SEQ ID NO: 541458 - RNA, 18 nt, Human
cacaggcugucuaugugg

SEQ ID NO: 541459 - RNA, 24 nt, Human
ccugucucucuuuuaauguuuccu

SEQ ID NO: 541460 - RNA, 19 nt, Human
cuuucccuugccucucuaa

SEQ ID NO: 541461 - RNA, 22 nt, Human
gccaagauuuucugcuagaauu

SEQ ID NO: 541462 - RNA, 19 nt, Human
gccccuuuaguugcuccag

SEQ ID NO: 541463 - RNA, 22 nt, Human
gcccugagcagauggaaaugaa

SEQ ID NO: 541464 - RNA, 20 nt, Human
uaucuggaggaccuccggga

SEQ ID NO: 541465 - RNA, 21 nt, Human
ugcuagaauuucaaauauaua

SEQ ID NO: 541466 - RNA, 22 nt, Human
uguccaggccaagauuuucugc

SEQ ID NO: 541467 - RNA, 18 nt, Human
aaaacaaaaacaagagca

SEQ ID NO: 541468 - RNA, 22 nt, Human
aaaacaagagcaaguagugagc

SEQ ID NO: 541469 - RNA, 21 nt, Human
aaacaagagcaaguagugaag

SEQ ID NO: 541470 - RNA, 23 nt, Human
acugccggugcgggcugaggcgg

SEQ ID NO: 541471 - RNA, 22 nt, Human
gagcgggaaggagcgccgagcu

SEQ ID NO: 541472 - RNA, 18 nt, Human
gagcugugcgcagccggg

SEQ ID NO: 541473 - RNA, 24 nt, Human
ugaggcggugugugagggagcggg

SEQ ID NO: 541474 - RNA, 18 nt, Human
ugcgcagccgggguaguu

SEQ ID NO: 541475 - RNA, 22 nt, Human
uuauuaaaacaaaaacaagagc

SEQ ID NO: 541476 - RNA, 24 nt, Human
aaaaaaacuuuacaaccacagcua

SEQ ID NO: 541477 - RNA, 24 nt, Human
aaaaaacuuuacaaccacagcuaa

SEQ ID NO: 541478 - RNA, 22 nt, Human
aaaaaagaaaaaaaaaacaaaa

SEQ ID NO: 541479 - RNA, 18 nt, Human
aaaaagaaaaaagaaaaa

SEQ ID NO: 541480 - RNA, 22 nt, Human
aaaacaaaaccaaaaacaaaaa

SEQ ID NO: 541481 - RNA, 24 nt, Human
aaaagaaaaaaaaaacaaaaccaa

SEQ ID NO: 541482 - RNA, 23 nt, Human
aaacaaaaccaaaaacaaaaaaa

SEQ ID NO: 541483 - RNA, 20 nt, Human
aaacaaaaccaaaaacaaag

SEQ ID NO: 541484 - RNA, 21 nt, Human
aaaguuauacauagaccaaca

SEQ ID NO: 541485 - RNA, 22 nt, Human
aaaugaagauguaaagcuuugu

SEQ ID NO: 541486 - RNA, 19 nt, Human
aaauuguacaaacuuuaca

SEQ ID NO: 541487 - RNA, 25 nt, Human
aaccaaaaacaaaaaaacuuuacaa

SEQ ID NO: 541488 - RNA, 27 nt, Human
aagaaaaaagaaaaaaaaaacaaaacc

SEQ ID NO: 541489 - RNA, 19 nt, Human
acaaagcuucaggacaaau

SEQ ID NO: 541490 - RNA, 24 nt, Human
agaaaaaaaaaacaaaaccaaaaa

SEQ ID NO: 541491 - RNA, 21 nt, Human
agcuuugugguuaguuuaaau

SEQ ID NO: 541492 - RNA, 18 nt, Human
aguuauacauagaccaac

SEQ ID NO: 541493 - RNA, 21 nt, Human
augcaggugcagccaaacaca

SEQ ID NO: 541494 - RNA, 26 nt, Human
caaaaaaacuuuacaaccacagcuaa

SEQ ID NO: 541495 - RNA, 22 nt, Human
caaaaacaaaaaaacuuuacaa

SEQ ID NO: 541496 - RNA, 26 nt, Human
caaaaacaaaaaaacuuuacaaccac

SEQ ID NO: 541497 - RNA, 19 nt, Human
caaaaccaaaaacaaaaaa

SEQ ID NO: 541498 - RNA, 28 nt, Human
caaaaccaaaaacaaaaaaacuuuacaa

SEQ ID NO: 541499 - RNA, 22 nt, Human
caaaacugauaaaaaucaagca

SEQ ID NO: 541500 - RNA, 21 nt, Human
cagaugucccucaguucaucu

SEQ ID NO: 541501 - RNA, 19 nt, Human
cagcuggauugcugagaac

SEQ ID NO: 541502 - RNA, 24 nt, Human
caggcaaauguggaaagaaaaucc

SEQ ID NO: 541503 - RNA, 22 nt, Human
cauagaccaacagaugucccuc

SEQ ID NO: 541504 - RNA, 18 nt, Human
cauugugugcaaagccca

SEQ ID NO: 541505 - RNA, 21 nt, Human
ccaaaaacaaaaaaacuuuac

SEQ ID NO: 541506 - RNA, 23 nt, Human
ccaaaaacaaaaaaacuuuacaa

SEQ ID NO: 541507 - RNA, 20 nt, Human
cuggauugauaagacacucc

SEQ ID NO: 541508 - RNA, 22 nt, Human
gaaaaaaaaaacaaaaccaaaa

SEQ ID NO: 541509 - RNA, 18 nt, Human
gaaagggagucuuguuuc

SEQ ID NO: 541510 - RNA, 21 nt, Human
gcaaauguggaaagaaaaucc

SEQ ID NO: 541511 - RNA, 20 nt, Human
ggacaaauuguacaaacuuu

SEQ ID NO: 541512 - RNA, 20 nt, Human
ggccgggcagugcucgggga

SEQ ID NO: 541513 - RNA, 19 nt, Human
uaaaaaaaaaaaaaaagaa

SEQ ID NO: 541514 - RNA, 22 nt, Human
uaaaaaucaagcacagauacca

SEQ ID NO: 541515 - RNA, 22 nt, Human
uacauagaccaacagauguccc

SEQ ID NO: 541516 - RNA, 21 nt, Human
uaguuuaaauuauacacucug

SEQ ID NO: 541517 - RNA, 22 nt, Human
uaucgaguuucagaaaccuuuc

SEQ ID NO: 541518 - RNA, 21 nt, Human
ucaagcacagauaccaggauu

SEQ ID NO: 541519 - RNA, 24 nt, Human
ucacaagaugguaaaaaaaaaaaa

SEQ ID NO: 541520 - RNA, 22 nt, Human
ucccagucagcuccaaacccau

SEQ ID NO: 541521 - RNA, 20 nt, Human
uggaacagucaaaaugaaga

SEQ ID NO: 541522 - RNA, 24 nt, Human
uggaacagucaaaaugaagaugua

SEQ ID NO: 541523 - RNA, 21 nt, Human
uguggaaagaaaauccaccug

SEQ ID NO: 541524 - RNA, 20 nt, Human
ugugugcaaagcccauuuuu

SEQ ID NO: 541525 - RNA, 18 nt, Human
uucaagugcuuuauucug

SEQ ID NO: 541526 - RNA, 24 nt, Human
uuuaaaauaugaaacauaaaaauc

SEQ ID NO: 541527 - RNA, 19 nt, Human
aaaaaggaaacuguugaga

SEQ ID NO: 541528 - RNA, 22 nt, Human
aacaguguaagugggagaacca

SEQ ID NO: 541529 - RNA, 18 nt, Human
aaccaucucccucugccu

SEQ ID NO: 541530 - RNA, 20 nt, Human
aagucuggccagcacagugc

SEQ ID NO: 541531 - RNA, 18 nt, Human
acaggacucaauagucag

SEQ ID NO: 541532 - RNA, 21 nt, Human
accacccacacggucagagca

SEQ ID NO: 541533 - RNA, 22 nt, Human
accagcagaggcuggggaaugg

SEQ ID NO: 541534 - RNA, 18 nt, Human
agaaccaagccccugacu

SEQ ID NO: 541535 - RNA, 20 nt, Human
agcagagcagcugaugccuc

SEQ ID NO: 541536 - RNA, 21 nt, Human
aggcagcugaagucuggccag

SEQ ID NO: 541537 - RNA, 26 nt, Human
aggggaggacggugcugguggggccu

SEQ ID NO: 541538 - RNA, 21 nt, Human
agugcugcaaugggcuguggc

SEQ ID NO: 541539 - RNA, 19 nt, Human
auaaaggaaaacaaaaagg

SEQ ID NO: 541540 - RNA, 20 nt, Human
auaaaggaaaacaaaaagga

SEQ ID NO: 541541 - RNA, 22 nt, Human
aucacuucguaacuugaugcag

SEQ ID NO: 541542 - RNA, 25 nt, Human
caacauuuacaaaggaaaaaacaau

SEQ ID NO: 541543 - RNA, 20 nt, Human
caagccccugacuagcaaca

SEQ ID NO: 541544 - RNA, 22 nt, Human
caaggcagcugaagucuggcca

SEQ ID NO: 541545 - RNA, 23 nt, Human
caauuccaaauuagaguuuuagc

SEQ ID NO: 541546 - RNA, 20 nt, Human
cagcagaagggcaggagccc

SEQ ID NO: 541547 - RNA, 21 nt, Human
cagccucuggggcugcauccu

SEQ ID NO: 541548 - RNA, 22 nt, Human
caggagcccuccaugccuggcc

SEQ ID NO: 541549 - RNA, 22 nt, Human
caggugcccuggcccuuggagg

SEQ ID NO: 541550 - RNA, 21 nt, Human
caguucccaaggcagcugaag

SEQ ID NO: 541551 - RNA, 20 nt, Human
caucucccucugccugagcc

SEQ ID NO: 541552 - RNA, 20 nt, Human
cauggaaacugcgacaugcu

SEQ ID NO: 541553 - RNA, 19 nt, Human
cauucuggaaccucccgga

SEQ ID NO: 541554 - RNA, 24 nt, Human
ccagaggcucugcgggugggagcu

SEQ ID NO: 541555 - RNA, 23 nt, Human
ccaguggaucuuuuuccucggcu

SEQ ID NO: 541556 - RNA, 22 nt, Human
ccaucccggauggggugggagc

SEQ ID NO: 541557 - RNA, 23 nt, Human
ccaugccuggcuuacaacaacag

SEQ ID NO: 541558 - RNA, 21 nt, Human
cccagggacucucugggccuc

SEQ ID NO: 541559 - RNA, 23 nt, Human
ccccagggacucucugggccucu

SEQ ID NO: 541560 - RNA, 25 nt, Human
cccccagggacucucugggccucua

SEQ ID NO: 541561 - RNA, 19 nt, Human
cccuuggaggggcugcugc

SEQ ID NO: 541562 - RNA, 19 nt, Human
ccucuacgugccucccagg

SEQ ID NO: 541563 - RNA, 18 nt, Human
ccucugccugagccaggg

SEQ ID NO: 541564 - RNA, 19 nt, Human
cuagcaacaguggcagggc

SEQ ID NO: 541565 - RNA, 19 nt, Human
cucauucuggaaccucccg

SEQ ID NO: 541566 - RNA, 22 nt, Human
cucccaggcaccgacugugcag

SEQ ID NO: 541567 - RNA, 24 nt, Human
cucccaggcaccgacugugcagcu

SEQ ID NO: 541568 - RNA, 28 nt, Human
cugcugcuucccggccuaguuuccagug

SEQ ID NO: 541569 - RNA, 18 nt, Human
cuggaauccucccgucuc

SEQ ID NO: 541570 - RNA, 19 nt, Human
cuucaacugcuuagccugu

SEQ ID NO: 541571 - RNA, 24 nt, Human
gagccaggggccgucaccuaccaa

SEQ ID NO: 541572 - RNA, 19 nt, Human
gagucuaaccaucucccuc

SEQ ID NO: 541573 - RNA, 22 nt, Human
gaucaccacccacacggucaga

SEQ ID NO: 541574 - RNA, 20 nt, Human
gcaacaguggcagggcuuca

SEQ ID NO: 541575 - RNA, 24 nt, Human
gccaaggccguccagaggcucugc

SEQ ID NO: 541576 - RNA, 22 nt, Human
gcccgaagauccugaaacacau

SEQ ID NO: 541577 - RNA, 23 nt, Human
gcccuuggaggggcugcugcuuc

SEQ ID NO: 541578 - RNA, 21 nt, Human
ggagcccuccaugccuggcuu

SEQ ID NO: 541579 - RNA, 21 nt, Human
ggcuucaguucccaaggcagc

SEQ ID NO: 541580 - RNA, 18 nt, Human
gggaauggggguucugcu

SEQ ID NO: 541581 - RNA, 18 nt, Human
gugcagcugcuugguacc

SEQ ID NO: 541582 - RNA, 21 nt, Human
guggaucuuuuuccucggcug

SEQ ID NO: 541583 - RNA, 22 nt, Human
uaaaggaaaacaaaaaggaaac

SEQ ID NO: 541584 - RNA, 20 nt, Human
uaaggcuucauuucuaagcu

SEQ ID NO: 541585 - RNA, 22 nt, Human
uagcaacaguggcagggcuuca

SEQ ID NO: 541586 - RNA, 22 nt, Human
uagcacugaauaauuuaaacac

SEQ ID NO: 541587 - RNA, 24 nt, Human
uauucaauuccaaauuagaguuuu

SEQ ID NO: 541588 - RNA, 19 nt, Human
ucacugaaugguggggaac

SEQ ID NO: 541589 - RNA, 23 nt, Human
uccacaauauucaauuccaaauu

SEQ ID NO: 541590 - RNA, 21 nt, Human
ucccaugauuuugcuguugcc

SEQ ID NO: 541591 - RNA, 21 nt, Human
uccuacugcccgggcugucca

SEQ ID NO: 541592 - RNA, 19 nt, Human
ucucccaggugcccuggcc

SEQ ID NO: 541593 - RNA, 23 nt, Human
ucucugggccucuacgugccucc

SEQ ID NO: 541594 - RNA, 23 nt, Human
ucuggggcugcauccuacugccc

SEQ ID NO: 541595 - RNA, 21 nt, Human
ugaaacacauggaaacugcga

SEQ ID NO: 541596 - RNA, 21 nt, Human
ugcuaccagcagaggcugggg

SEQ ID NO: 541597 - RNA, 22 nt, Human
uggaaacugcgacaugcuacca

SEQ ID NO: 541598 - RNA, 21 nt, Human
uggaggggcugcugcuucccg

SEQ ID NO: 541599 - RNA, 19 nt, Human
uggcucagcagaagggcag

SEQ ID NO: 541600 - RNA, 19 nt, Human
uggcuuacaacaacaggac

SEQ ID NO: 541601 - RNA, 22 nt, Human
ugggccucuacgugccucccag

SEQ ID NO: 541602 - RNA, 19 nt, Human
uggggugggagcaaggacu

SEQ ID NO: 541603 - RNA, 18 nt, Human
ugguaccccgggaauaaa

SEQ ID NO: 541604 - RNA, 22 nt, Human
uguaagugggagaaccaagccc

SEQ ID NO: 541605 - RNA, 21 nt, Human
uguggcucagcagaagggcag

SEQ ID NO: 541606 - RNA, 21 nt, Human
uuuaaacacacuucagaaaau

SEQ ID NO: 541607 - RNA, 20 nt, Human
aaagaggucccgcuucccuu

SEQ ID NO: 541608 - RNA, 24 nt, Human
aaagggaacaugcagccacaaaca

SEQ ID NO: 541609 - RNA, 22 nt, Human
aaaguaauagagguauucugcc

SEQ ID NO: 541610 - RNA, 18 nt, Human
aacccaaaccaaggccag

SEQ ID NO: 541611 - RNA, 21 nt, Human
aaccucaugcaggcacaaggc

SEQ ID NO: 541612 - RNA, 27 nt, Human
aagaauaagggagagaagccgguaccc

SEQ ID NO: 541613 - RNA, 24 nt, Human
aagaggcugucugugaucucaagg

SEQ ID NO: 541614 - RNA, 19 nt, Human
aagcuggggcugccugagc

SEQ ID NO: 541615 - RNA, 24 nt, Human
aaggugcuguauuugggggaaucu

SEQ ID NO: 541616 - RNA, 22 nt, Human
aaguaaaccucagcaagaacac

SEQ ID NO: 541617 - RNA, 19 nt, Human
acacagcacucccugcccc

SEQ ID NO: 541618 - RNA, 21 nt, Human
acacagcacucccugccccgg

SEQ ID NO: 541619 - RNA, 23 nt, Human
acacgauaagaauaagggagaga

SEQ ID NO: 541620 - RNA, 20 nt, Human
acauggaauggaaauaaggc

SEQ ID NO: 541621 - RNA, 24 nt, Human
acccaaaccaaggccagguaagac

SEQ ID NO: 541622 - RNA, 22 nt, Human
acuccgaaagauucuagaggaa

SEQ ID NO: 541623 - RNA, 21 nt, Human
acuuuaaaagagagagagaga

SEQ ID NO: 541624 - RNA, 24 nt, Human
agccacaaacacuuacacaagccc

SEQ ID NO: 541625 - RNA, 19 nt, Human
agcuaaaauggaaaaaggc

SEQ ID NO: 541626 - RNA, 18 nt, Human
aggaagacacuccgaaag

SEQ ID NO: 541627 - RNA, 26 nt, Human
aggaagucgagaccagcuaggauacc

SEQ ID NO: 541628 - RNA, 22 nt, Human
aggcagggagggguggcuagga

SEQ ID NO: 541629 - RNA, 19 nt, Human
agucagcuugcacacucaa

SEQ ID NO: 541630 - RNA, 18 nt, Human
auagagguauucugcccc

SEQ ID NO: 541631 - RNA, 19 nt, Human
auagagguauucugccccc

SEQ ID NO: 541632 - RNA, 20 nt, Human
augcagcacauggggaaaug

SEQ ID NO: 541633 - RNA, 27 nt, Human
augcagccacaaacacuuacacaagcc

SEQ ID NO: 541634 - RNA, 20 nt, Human
augccacaccaccagcauag

SEQ ID NO: 541635 - RNA, 19 nt, Human
auggaauggaaauaaggcc

SEQ ID NO: 541636 - RNA, 24 nt, Human
caaaaugaauagcaggagaaggug

SEQ ID NO: 541637 - RNA, 20 nt, Human
caaaccaaggccagguaaga

SEQ ID NO: 541638 - RNA, 21 nt, Human
cacaaacacuuacacaagccc

SEQ ID NO: 541639 - RNA, 20 nt, Human
cacaggguuuaggcauguuu

SEQ ID NO: 541640 - RNA, 19 nt, Human
caccagacaggaagucgag

SEQ ID NO: 541641 - RNA, 18 nt, Human
caccagcauagggucacc

SEQ ID NO: 541642 - RNA, 23 nt, Human
cauuaccacuggcucaccuccuc

SEQ ID NO: 541643 - RNA, 18 nt, Human
ccacuggcucaccuccuc

SEQ ID NO: 541644 - RNA, 19 nt, Human
ccacuucccggggcacagg

SEQ ID NO: 541645 - RNA, 18 nt, Human
ccagacaggaagucgaga

SEQ ID NO: 541646 - RNA, 19 nt, Human
ccagacaggaagucgagac

SEQ ID NO: 541647 - RNA, 30 nt, Human
cccccaaacccuugaacuagccagucuauu

SEQ ID NO: 541648 - RNA, 23 nt, Human
cccggggcacagggugcaugacu

SEQ ID NO: 541649 - RNA, 23 nt, Human
cccugccccgggccugugaugcc

SEQ ID NO: 541650 - RNA, 20 nt, Human
ccucaugcaggcacaaggcu

SEQ ID NO: 541651 - RNA, 21 nt, Human
ccuccucaugggaaucauuuc

SEQ ID NO: 541652 - RNA, 24 nt, Human
ccucuaaccagauagagccaggac

SEQ ID NO: 541653 - RNA, 23 nt, Human
cuaauccggcugcaccagacagg

SEQ ID NO: 541654 - RNA, 22 nt, Human
cuucuuuaauugccugcucucc

SEQ ID NO: 541655 - RNA, 21 nt, Human
cuuuauucaucaagucuccca

SEQ ID NO: 541656 - RNA, 18 nt, Human
gaacacuuuggcagguga

SEQ ID NO: 541657 - RNA, 20 nt, Human
gaagagaagcuggggcugcc

SEQ ID NO: 541658 - RNA, 21 nt, Human
gaaggugcuguauuuggggga

SEQ ID NO: 541659 - RNA, 23 nt, Human
gccacaaacacuuacacaagccc

SEQ ID NO: 541660 - RNA, 22 nt, Human
gcccccaaacccuugaacuagc

SEQ ID NO: 541661 - RNA, 22 nt, Human
ggaaacaagaggaauucauggc

SEQ ID NO: 541662 - RNA, 22 nt, Human
ggaagggugaagagaagacugg

SEQ ID NO: 541663 - RNA, 23 nt, Human
ggcuugagaaugucaggagaugg

SEQ ID NO: 541664 - RNA, 21 nt, Human
gggaaauguggagaaagggaa

SEQ ID NO: 541665 - RNA, 22 nt, Human
gggauucuuuauucaucaaguc

SEQ ID NO: 541666 - RNA, 24 nt, Human
ggggcacagggugcaugacuuggg

SEQ ID NO: 541667 - RNA, 22 nt, Human
ggugguagggacacgauaagaa

SEQ ID NO: 541668 - RNA, 23 nt, Human
gugagcaucuaaccacgugccag

SEQ ID NO: 541669 - RNA, 22 nt, Human
uaaaagagagagagagagagau

SEQ ID NO: 541670 - RNA, 18 nt, Human
uaacccaaaccaaggcca

SEQ ID NO: 541671 - RNA, 23 nt, Human
uaagaauaagggagagaagccag

SEQ ID NO: 541672 - RNA, 21 nt, Human
uaagcaaaccugccauauaaa

SEQ ID NO: 541673 - RNA, 19 nt, Human
uaccuacuccuuugguaaa

SEQ ID NO: 541674 - RNA, 18 nt, Human
uagagccaggacucuggg

SEQ ID NO: 541675 - RNA, 21 nt, Human
uauggccaaugagcaucagaa

SEQ ID NO: 541676 - RNA, 24 nt, Human
ucagcuugcacacucaaggcacag

SEQ ID NO: 541677 - RNA, 21 nt, Human
ucccuuggcauaauguggggc

SEQ ID NO: 541678 - RNA, 21 nt, Human
uccucaugggaaucauuucac

SEQ ID NO: 541679 - RNA, 19 nt, Human
ugaaagcacuucauaugcc

SEQ ID NO: 541680 - RNA, 23 nt, Human
ugaagagaagcuggggcugccug

SEQ ID NO: 541681 - RNA, 23 nt, Human
ugacaaaagaggucccgcuuccc

SEQ ID NO: 541682 - RNA, 24 nt, Human
ugccccgggccugugaugccacac

SEQ ID NO: 541683 - RNA, 23 nt, Human
uggaaaaaggccuuaaaaugaug

SEQ ID NO: 541684 - RNA, 19 nt, Human
uggaauggaaauaaggcca

SEQ ID NO: 541685 - RNA, 22 nt, Human
uggaauggaaauaaggccagga

SEQ ID NO: 541686 - RNA, 21 nt, Human
uggcaggugacauggaaugga

SEQ ID NO: 541687 - RNA, 20 nt, Human
ugggggaaucugaugcagca

SEQ ID NO: 541688 - RNA, 23 nt, Human
ugguaaagugggaaacacagggc

SEQ ID NO: 541689 - RNA, 18 nt, Human
uuaaacaguaaguccuuu

SEQ ID NO: 541690 - RNA, 23 nt, Human
uugccugcucuccgccuugguca

SEQ ID NO: 541691 - RNA, 26 nt, Human
uuggaaagccacagaaucaucggaau

SEQ ID NO: 541692 - RNA, 19 nt, Human
aaaaaaaccuugcagauaa

SEQ ID NO: 541693 - RNA, 25 nt, Human
aaacacacacaaaaaaaccuugcag

SEQ ID NO: 541694 - RNA, 22 nt, Human
acacacaaaaaaaccuugcaga

SEQ ID NO: 541695 - RNA, 21 nt, Human
agagacagcuagcuagccccc

SEQ ID NO: 541696 - RNA, 19 nt, Human
agauaaaaaaauuaagccu

SEQ ID NO: 541697 - RNA, 21 nt, Human
caaauggacaaauucuuaagc

SEQ ID NO: 541698 - RNA, 20 nt, Human
cagcccacccggcccuguga

SEQ ID NO: 541699 - RNA, 20 nt, Human
cccccucuucugcucgugcc

SEQ ID NO: 541700 - RNA, 26 nt, Human
cggccgccaccgcgguggagcuccag

SEQ ID NO: 541701 - RNA, 24 nt, Human
cuauauuguguuucuuuugcuccu

SEQ ID NO: 541702 - RNA, 21 nt, Human
cucuuauucauuucaugauga

SEQ ID NO: 541703 - RNA, 22 nt, Human
cuugcauauugaaaauaaaaac

SEQ ID NO: 541704 - RNA, 18 nt, Human
gacagcuagcuagccccc

SEQ ID NO: 541705 - RNA, 22 nt, Human
gccaccgcgguggagcuccagc

SEQ ID NO: 541706 - RNA, 18 nt, Human
guccgcagagacagcuag

SEQ ID NO: 541707 - RNA, 22 nt, Human
uaaaaacaaaaacacacacaaa

SEQ ID NO: 541708 - RNA, 22 nt, Human
uagcuagcccccucuucugcuc

SEQ ID NO: 541709 - RNA, 24 nt, Human
uauuguguuucuuuugcuccugga

SEQ ID NO: 541710 - RNA, 21 nt, Human
uccccugguccgcagagacag

SEQ ID NO: 541711 - RNA, 25 nt, Human
uccgcagagacagcuagcuagcccc

SEQ ID NO: 541712 - RNA, 20 nt, Human
uccuccgccgccgcgucggc

SEQ ID NO: 541713 - RNA, 23 nt, Human
ucuccccugguccgcagagacug

SEQ ID NO: 541714 - RNA, 24 nt, Human
ucuuaagcccucuuauucauuuca

SEQ ID NO: 541715 - RNA, 21 nt, Human
ugaaaauaaaaacaaaaacac

SEQ ID NO: 541716 - RNA, 18 nt, Human
ugaaacucaggcggcagc

SEQ ID NO: 541717 - RNA, 20 nt, Human
uuccacacacuccucacagc

SEQ ID NO: 541718 - RNA, 19 nt, Human
uugcuaacaacuccaaccc

SEQ ID NO: 541719 - RNA, 19 nt, Human
uuugcuccuggaguccucu

SEQ ID NO: 541720 - RNA, 19 nt, Human
uuuugcuccuggaguccuc

SEQ ID NO: 541721 - RNA, 23 nt, Human
caugucaccaaaaauucuccagg

SEQ ID NO: 541722 - RNA, 19 nt, Human
cggaaccagaacgcggaac

SEQ ID NO: 541723 - RNA, 23 nt, Human
gaaccagaacgcggaaccaggga

SEQ ID NO: 541724 - RNA, 19 nt, Human
gugguguggcuggcccagg

SEQ ID NO: 541725 - RNA, 21 nt, Human
uauacaguccaucaccuuggc

SEQ ID NO: 541726 - RNA, 22 nt, Human
uguuugucuuuccucaaauaua

SEQ ID NO: 541727 - RNA, 20 nt, Human
uuggaccucggugguguggc

SEQ ID NO: 541728 - RNA, 25 nt, Human
aguccuuuuauauuuucagugccuu

SEQ ID NO: 541729 - RNA, 21 nt, Human
cacaucuuuauacagaauuca

SEQ ID NO: 541730 - RNA, 21 nt, Human
cagcaauucagcuagcugucu

SEQ ID NO: 541731 - RNA, 19 nt, Human
ccagucuuagcaacagauu

SEQ ID NO: 541732 - RNA, 18 nt, Human
uaacuuagauuucccuuu

SEQ ID NO: 541733 - RNA, 22 nt, Human
uacaucaguaaacuaccagucc

SEQ ID NO: 541734 - RNA, 20 nt, Human
uuuucagugccuuaucaaaa

SEQ ID NO: 541735 - RNA, 20 nt, Human
aaaaaaacuacuauaaaaac

SEQ ID NO: 541736 - RNA, 18 nt, Human
aacauuuuccugaaaacc

SEQ ID NO: 541737 - RNA, 19 nt, Human
aacauuuuccugaaaacca

SEQ ID NO: 541738 - RNA, 21 nt, Human
aagcagucuucccccagcuuc

SEQ ID NO: 541739 - RNA, 20 nt, Human
acauaucacaaaagugggau

SEQ ID NO: 541740 - RNA, 20 nt, Human
acccccaacagcaggaagcc

SEQ ID NO: 541741 - RNA, 22 nt, Human
acuacuauaaaaacauucgggg

SEQ ID NO: 541742 - RNA, 18 nt, Human
agcaggaagccaaaggga

SEQ ID NO: 541743 - RNA, 19 nt, Human
agcccuuucccuuccugau

SEQ ID NO: 541744 - RNA, 19 nt, Human
agcucuccccaccucccuc

SEQ ID NO: 541745 - RNA, 21 nt, Human
auagcugccaccugaccccaa

SEQ ID NO: 541746 - RNA, 24 nt, Human
caacagcaggaagccaaagggaag

SEQ ID NO: 541747 - RNA, 18 nt, Human
cacauaucacaaaagugg

SEQ ID NO: 541748 - RNA, 18 nt, Human
caccugaccccaaagccc

SEQ ID NO: 541749 - RNA, 19 nt, Human
cacuccccccaggcagccc

SEQ ID NO: 541750 - RNA, 20 nt, Human
cagcucugcagguguaggca

SEQ ID NO: 541751 - RNA, 18 nt, Human
caggaucuggcugaagca

SEQ ID NO: 541752 - RNA, 19 nt, Human
caggucacucuccagccac

SEQ ID NO: 541753 - RNA, 23 nt, Human
cagguugugaacuuucccuucuu

SEQ ID NO: 541754 - RNA, 23 nt, Human
cauuacaaaaaaauacaaaaaaa

SEQ ID NO: 541755 - RNA, 19 nt, Human
ccaaagcccuuucccuucc

SEQ ID NO: 541756 - RNA, 19 nt, Human
ccaccucccucccacuccc

SEQ ID NO: 541757 - RNA, 23 nt, Human
ccaccucccucccacucccccca

SEQ ID NO: 541758 - RNA, 21 nt, Human
cccaaagcccuuucccuuccu

SEQ ID NO: 541759 - RNA, 20 nt, Human
cccagcucuaaaagggguca

SEQ ID NO: 541760 - RNA, 18 nt, Human
cccaggcagcccagcucu

SEQ ID NO: 541761 - RNA, 22 nt, Human
cccaggcagcccagcucuaaaa

SEQ ID NO: 541762 - RNA, 24 nt, Human
ccccacacagccuccaaggguaag

SEQ ID NO: 541763 - RNA, 26 nt, Human
ccccaccucccucccacuccccccag

SEQ ID NO: 541764 - RNA, 21 nt, Human
ccccccugcuccagaugaaaa

SEQ ID NO: 541765 - RNA, 24 nt, Human
cccuugaacacuccugagagcagc

SEQ ID NO: 541766 - RNA, 19 nt, Human
ccuaaagaccccaccccag

SEQ ID NO: 541767 - RNA, 22 nt, Human
ccucaggccccauucccugccc

SEQ ID NO: 541768 - RNA, 23 nt, Human
ccucccucccacuccccccaggc

SEQ ID NO: 541769 - RNA, 18 nt, Human
ccucucuccuuucuccca

SEQ ID NO: 541770 - RNA, 21 nt, Human
cuagcucuccccaccucccuc

SEQ ID NO: 541771 - RNA, 23 nt, Human
cucccacuccccccaggcagccc

SEQ ID NO: 541772 - RNA, 18 nt, Human
cucccucccacucccccc

SEQ ID NO: 541773 - RNA, 18 nt, Human
cucuaaaaggggucaggg

SEQ ID NO: 541774 - RNA, 18 nt, Human
cucuccccaccucccucc

SEQ ID NO: 541775 - RNA, 20 nt, Human
cucuccccaccucccuccca

SEQ ID NO: 541776 - RNA, 20 nt, Human
cugcagguguaggcagggca

SEQ ID NO: 541777 - RNA, 26 nt, Human
cuggaaauuccccacacagccuccaa

SEQ ID NO: 541778 - RNA, 22 nt, Human
cuggggguggggcugagaaagc

SEQ ID NO: 541779 - RNA, 23 nt, Human
cuuaauaccucaggccccauucc

SEQ ID NO: 541780 - RNA, 19 nt, Human
cuugugcaugaauaugugu

SEQ ID NO: 541781 - RNA, 26 nt, Human
gaacauuuuccugaaaaccaguggcu

SEQ ID NO: 541782 - RNA, 22 nt, Human
gaauaugugugccauuaccuug

SEQ ID NO: 541783 - RNA, 24 nt, Human
gaccccaaagcccuuucccuuccu

SEQ ID NO: 541784 - RNA, 22 nt, Human
gagagcagcagggaggacagaa

SEQ ID NO: 541785 - RNA, 23 nt, Human
gagagcagcagggaggacagaac

SEQ ID NO: 541786 - RNA, 27 nt, Human
gagcagcagggaggacagaaccuccag

SEQ ID NO: 541787 - RNA, 21 nt, Human
gaguggagugaguguuggggg

SEQ ID NO: 541788 - RNA, 19 nt, Human
gccccauucccugcccucc

SEQ ID NO: 541789 - RNA, 26 nt, Human
gcccugucccccacuucuuagccuua

SEQ ID NO: 541790 - RNA, 21 nt, Human
ggaaaaaccugugacccugaa

SEQ ID NO: 541791 - RNA, 18 nt, Human
ggaaauuccccacacagc

SEQ ID NO: 541792 - RNA, 18 nt, Human
ggagcucaccccccugcu

SEQ ID NO: 541793 - RNA, 23 nt, Human
ggaggacagaaccuccagcucug

SEQ ID NO: 541794 - RNA, 19 nt, Human
ggauuuggaaguuuggggg

SEQ ID NO: 541795 - RNA, 20 nt, Human
guggagugaguguugggggu

SEQ ID NO: 541796 - RNA, 22 nt, Human
uaccucaggccccauucccugc

SEQ ID NO: 541797 - RNA, 18 nt, Human
uagaugggcccugucccc

SEQ ID NO: 541798 - RNA, 21 nt, Human
uagcucuccccaccucccucc

SEQ ID NO: 541799 - RNA, 19 nt, Human
uagcugccaccugacccca

SEQ ID NO: 541800 - RNA, 22 nt, Human
ucaaagugagaaaaccuaaaga

SEQ ID NO: 541801 - RNA, 27 nt, Human
ucacauaucacaaaagugggauuugga

SEQ ID NO: 541802 - RNA, 19 nt, Human
ucaccccccugcuccagau

SEQ ID NO: 541803 - RNA, 21 nt, Human
uccaguggacaucaagcuggg

SEQ ID NO: 541804 - RNA, 24 nt, Human
ucccacuccccccaggcagcccag

SEQ ID NO: 541805 - RNA, 22 nt, Human
ucccagagaggcacagacagcu

SEQ ID NO: 541806 - RNA, 21 nt, Human
uccccaccucccucccacucc

SEQ ID NO: 541807 - RNA, 24 nt, Human
uccccccaggcagcccagcucuaa

SEQ ID NO: 541808 - RNA, 25 nt, Human
uccugaugaaggcugguagaugggc

SEQ ID NO: 541809 - RNA, 20 nt, Human
ucuaaaaggggucagggaca

SEQ ID NO: 541810 - RNA, 21 nt, Human
ugagaaaaccuaaagacccca

SEQ ID NO: 541811 - RNA, 22 nt, Human
ugagaaaaccuaaagaccccac

SEQ ID NO: 541812 - RNA, 19 nt, Human
ugagagcagcagggaggac

SEQ ID NO: 541813 - RNA, 21 nt, Human
ugagagcagcagggaggacag

SEQ ID NO: 541814 - RNA, 23 nt, Human
ugagagcagcagggaggacagaa

SEQ ID NO: 541815 - RNA, 22 nt, Human
ugaguagcuucacauaucacaa

SEQ ID NO: 541816 - RNA, 22 nt, Human
ugaugaaggcugguagaugggc

SEQ ID NO: 541817 - RNA, 19 nt, Human
uggacaucaagcugggugc

SEQ ID NO: 541818 - RNA, 21 nt, Human
uggccugggcuagcucucccc

SEQ ID NO: 541819 - RNA, 18 nt, Human
ugggaucacacaggcaua

SEQ ID NO: 541820 - RNA, 21 nt, Human
uggggguggggugggaucaca

SEQ ID NO: 541821 - RNA, 21 nt, Human
ugguagaugggcccugucccc

SEQ ID NO: 541822 - RNA, 21 nt, Human
uguuggggguauugcuguggu

SEQ ID NO: 541823 - RNA, 20 nt, Human
uuuuagaaaaaguugccagu

SEQ ID NO: 541824 - RNA, 24 nt, Human
uuuuuuuuuuuuuuccauauuuuu

SEQ ID NO: 541825 - RNA, 22 nt, Human
aaaaauguuccuguuaauccuc

SEQ ID NO: 541826 - RNA, 20 nt, Human
aaagcaaaugacaaagaccc

SEQ ID NO: 541827 - RNA, 23 nt, Human
aacucaaaagucuaugacaaaua

SEQ ID NO: 541828 - RNA, 23 nt, Human
acaacuagaaaacauccuuaauu

SEQ ID NO: 541829 - RNA, 21 nt, Human
acacuaaagagucaagacuca

SEQ ID NO: 541830 - RNA, 21 nt, Human
acccaguuuaccagcuuuacu

SEQ ID NO: 541831 - RNA, 20 nt, Human
agacaaaaaaaaaauggucc

SEQ ID NO: 541832 - RNA, 22 nt, Human
agacaaaaaaaaaaugguccua

SEQ ID NO: 541833 - RNA, 24 nt, Human
agcaaaugacaaagacccaguuua

SEQ ID NO: 541834 - RNA, 21 nt, Human
caaaacuuacuaaguugccag

SEQ ID NO: 541835 - RNA, 25 nt, Human
caacaauuuuaaagacaaaaaaaaa

SEQ ID NO: 541836 - RNA, 19 nt, Human
cagacacaaugaaaagcag

SEQ ID NO: 541837 - RNA, 24 nt, Human
caggccgacacuacguggcucaca

SEQ ID NO: 541838 - RNA, 23 nt, Human
caugcacaacuagaaaacauccu

SEQ ID NO: 541839 - RNA, 22 nt, Human
caugcugguguuaguguacaau

SEQ ID NO: 541840 - RNA, 19 nt, Human
cgaggacagaagcggccgg

SEQ ID NO: 541841 - RNA, 21 nt, Human
cuagaaaacauccuuaauuua

SEQ ID NO: 541842 - RNA, 26 nt, Human
cuagaaaacauccuuaauuuauauua

SEQ ID NO: 541843 - RNA, 23 nt, Human
cuuaauuuauauuaaaccagaaa

SEQ ID NO: 541844 - RNA, 21 nt, Human
ggccgguggcgggacgcagga

SEQ ID NO: 541845 - RNA, 20 nt, Human
uaaaaaagcaaagugcauac

SEQ ID NO: 541846 - RNA, 22 nt, Human
uaaagcaaaugacaaagaccca

SEQ ID NO: 541847 - RNA, 23 nt, Human
uaacuucacagcaggccgacacu

SEQ ID NO: 541848 - RNA, 21 nt, Human
ucagacacaaugaaaagcagg

SEQ ID NO: 541849 - RNA, 20 nt, Human
uccuacacuaaagagucaag

SEQ ID NO: 541850 - RNA, 22 nt, Human
ugcaccaacacauucgcauuua

SEQ ID NO: 541851 - RNA, 21 nt, Human
uuaaagcaaaugacaaagacc

SEQ ID NO: 541852 - RNA, 24 nt, Human
uuacuaaguugccagcauucaugc

SEQ ID NO: 541853 - RNA, 19 nt, Human
uucaugcacaacuagaaaa

SEQ ID NO: 541854 - RNA, 20 nt, Human
uugaaauuauuucuguagaa

SEQ ID NO: 541855 - RNA, 22 nt, Human
uuuaaagcaaaugacaaagacc

SEQ ID NO: 541856 - RNA, 24 nt, Human
uuuucuuuuuuuuuuuuuuuaaag

SEQ ID NO: 541857 - RNA, 20 nt, Human
uuuuuuuuuuuaaagcaaau

SEQ ID NO: 541858 - RNA, 24 nt, Human
aaaaaaacagaagaccguagcuac

SEQ ID NO: 541859 - RNA, 20 nt, Human
aaaauaacagacacaggcca

SEQ ID NO: 541860 - RNA, 21 nt, Human
aaaauaacagacacaggccag

SEQ ID NO: 541861 - RNA, 21 nt, Human
aacacggcgaaggacacaccu

SEQ ID NO: 541862 - RNA, 21 nt, Human
aacagacacaggccaguccug

SEQ ID NO: 541863 - RNA, 21 nt, Human
aaccaaaauaacagacacagg

SEQ ID NO: 541864 - RNA, 24 nt, Human
aaccccaacacggcgaaggacaca

SEQ ID NO: 541865 - RNA, 24 nt, Human
aaccugaaccuacccuucugcaca

SEQ ID NO: 541866 - RNA, 22 nt, Human
aagaaaccagaggccauuucag

SEQ ID NO: 541867 - RNA, 18 nt, Human
aagaugggaggggggaga

SEQ ID NO: 541868 - RNA, 19 nt, Human
aagcagcuuccaugcgugu

SEQ ID NO: 541869 - RNA, 21 nt, Human
aagcaggcaggggugcugggg

SEQ ID NO: 541870 - RNA, 18 nt, Human
aagcggcacggaggcacc

SEQ ID NO: 541871 - RNA, 18 nt, Human
aagcugcccaggaccuag

SEQ ID NO: 541872 - RNA, 20 nt, Human
aagugcaggaacacagacaa

SEQ ID NO: 541873 - RNA, 20 nt, Human
aaucacaaucaccaccguga

SEQ ID NO: 541874 - RNA, 19 nt, Human
acaaagccuuaaagccaac

SEQ ID NO: 541875 - RNA, 21 nt, Human
acaaagccuuaaagccaacag

SEQ ID NO: 541876 - RNA, 22 nt, Human
acaacacagacauggaacagaa

SEQ ID NO: 541877 - RNA, 18 nt, Human
acaaccaaaauaacagac

SEQ ID NO: 541878 - RNA, 18 nt, Human
acaaccaaaauaacagac

SEQ ID NO: 541879 - RNA, 20 nt, Human
acaaccaaaauaacagacac

SEQ ID NO: 541880 - RNA, 23 nt, Human
acaaccaaaauaacagacacagg

SEQ ID NO: 541881 - RNA, 21 nt, Human
acacacacggacacaccacag

SEQ ID NO: 541882 - RNA, 26 nt, Human
acacacacggacacaccacagcccac

SEQ ID NO: 541883 - RNA, 28 nt, Human
acacagcccccaggauggggggaacgcc

SEQ ID NO: 541884 - RNA, 19 nt, Human
acacaggccaguccugcgc

SEQ ID NO: 541885 - RNA, 18 nt, Human
acagaaccccauacaugc

SEQ ID NO: 541886 - RNA, 21 nt, Human
acagacccccaagccaaccau

SEQ ID NO: 541887 - RNA, 24 nt, Human
acagacccccaagccaaccaugcc

SEQ ID NO: 541888 - RNA, 21 nt, Human
acagaguguggaccagacccc

SEQ ID NO: 541889 - RNA, 18 nt, Human
acaugcuauuaaaaaagg

SEQ ID NO: 541890 - RNA, 18 nt, Human
accacagacccccaagcc

SEQ ID NO: 541891 - RNA, 20 nt, Human
accccgggcccagccccuuc

SEQ ID NO: 541892 - RNA, 20 nt, Human
acccguucccccugcucccc

SEQ ID NO: 541893 - RNA, 22 nt, Human
accuccgagaaccagaacggca

SEQ ID NO: 541894 - RNA, 24 nt, Human
acguccuaagcuacaucuacaaaa

SEQ ID NO: 541895 - RNA, 20 nt, Human
acucuguaacugaaaagcca

SEQ ID NO: 541896 - RNA, 23 nt, Human
acugcagccucaaggcugggagc

SEQ ID NO: 541897 - RNA, 23 nt, Human
acuggaccaaccugaccgacagc

SEQ ID NO: 541898 - RNA, 22 nt, Human
agaacgccugagagcagccucg

SEQ ID NO: 541899 - RNA, 18 nt, Human
agaagaaacaaagaaaag

SEQ ID NO: 541900 - RNA, 23 nt, Human
agacaaaucuauacagcagcagc

SEQ ID NO: 541901 - RNA, 25 nt, Human
agacaaaucuauacagcagcagcug

SEQ ID NO: 541902 - RNA, 26 nt, Human
agacccccaagccaaccaugcccagg

SEQ ID NO: 541903 - RNA, 21 nt, Human
agagcagccucgacggcguga

SEQ ID NO: 541904 - RNA, 22 nt, Human
agagcgcugaaaacgguucugc

SEQ ID NO: 541905 - RNA, 20 nt, Human
agagggucccucugguccag

SEQ ID NO: 541906 - RNA, 19 nt, Human
agaguccuacugcagccuc

SEQ ID NO: 541907 - RNA, 22 nt, Human
agcauugucugcggcccgagag

SEQ ID NO: 541908 - RNA, 19 nt, Human
agccaaccaugcccagcac

SEQ ID NO: 541909 - RNA, 18 nt, Human
agccaccuuuaauuguac

SEQ ID NO: 541910 - RNA, 19 nt, Human
agcccccguccccaguagc

SEQ ID NO: 541911 - RNA, 21 nt, Human
aggaacacagacaaauaaccc

SEQ ID NO: 541912 - RNA, 23 nt, Human
aggaacacagacaaauaacccca

SEQ ID NO: 541913 - RNA, 18 nt, Human
aggaggcucaucugguug

SEQ ID NO: 541914 - RNA, 21 nt, Human
aggcagggaagggggcuucag

SEQ ID NO: 541915 - RNA, 18 nt, Human
aggcaggggugcuggggg

SEQ ID NO: 541916 - RNA, 19 nt, Human
aggcaggggugcugggggc

SEQ ID NO: 541917 - RNA, 19 nt, Human
aggcaggggugcugggggc

SEQ ID NO: 541918 - RNA, 23 nt, Human
aggcgcggaagcugccccaggac

SEQ ID NO: 541919 - RNA, 22 nt, Human
agggacccaacccuccugagcc

SEQ ID NO: 541920 - RNA, 18 nt, Human
aggggugcugggggcguc

SEQ ID NO: 541921 - RNA, 20 nt, Human
aucuacaaaaauugcaaagg

SEQ ID NO: 541922 - RNA, 20 nt, Human
aucucuacagggaccucugc

SEQ ID NO: 541923 - RNA, 19 nt, Human
augacacuccugcugcgug

SEQ ID NO: 541924 - RNA, 18 nt, Human
caaaagcaggcaggggug

SEQ ID NO: 541925 - RNA, 25 nt, Human
caaaaggaagacaaaaaaaucccac

SEQ ID NO: 541926 - RNA, 21 nt, Human
caaaauaacagacacaggcca

SEQ ID NO: 541927 - RNA, 30 nt, Human
caaaaugguccacuggacucuguaacugaa

SEQ ID NO: 541928 - RNA, 23 nt, Human
caacacggcgaaggacacaccuc

SEQ ID NO: 541929 - RNA, 25 nt, Human
caacauagagaacuaggaaaguuca

SEQ ID NO: 541930 - RNA, 19 nt, Human
caacucugcagcggccacc

SEQ ID NO: 541931 - RNA, 21 nt, Human
caagggacccacaauggucca

SEQ ID NO: 541932 - RNA, 23 nt, Human
cacacagcccccaggaugggcac

SEQ ID NO: 541933 - RNA, 21 nt, Human
cacagccuccuccucagcuuu

SEQ ID NO: 541934 - RNA, 23 nt, Human
cacaggaggaggggucgugggaa

SEQ ID NO: 541935 - RNA, 18 nt, Human
cacagugggcucagcgcu

SEQ ID NO: 541936 - RNA, 19 nt, Human
caccaaggaaugacaguga

SEQ ID NO: 541937 - RNA, 19 nt, Human
caccacagcccacacucac

SEQ ID NO: 541938 - RNA, 27 nt, Human
caccccacugucucgccaccucaccuu

SEQ ID NO: 541939 - RNA, 25 nt, Human
cacgcggucaugccgcggaaugucc

SEQ ID NO: 541940 - RNA, 21 nt, Human
cacuccucagccuggagaccc

SEQ ID NO: 541941 - RNA, 19 nt, Human
cagaacgccugagagcagc

SEQ ID NO: 541942 - RNA, 20 nt, Human
cagacauggaacagaacccc

SEQ ID NO: 541943 - RNA, 21 nt, Human
cagacccccaagccaaccaug

SEQ ID NO: 541944 - RNA, 24 nt, Human
cagacccccaagccaaccaugccc

SEQ ID NO: 541945 - RNA, 19 nt, Human
cagagcuaagggagggugg

SEQ ID NO: 541946 - RNA, 18 nt, Human
cagagggucccucugguc

SEQ ID NO: 541947 - RNA, 21 nt, Human
cagcaaggccagggcaggcag

SEQ ID NO: 541948 - RNA, 19 nt, Human
cagcacagacaccaaggaa

SEQ ID NO: 541949 - RNA, 21 nt, Human
cagcacagggccccuucccag

SEQ ID NO: 541950 - RNA, 18 nt, Human
cagcagcggcguccaaag

SEQ ID NO: 541951 - RNA, 22 nt, Human
cagccagcaucucaggcugaac

SEQ ID NO: 541952 - RNA, 24 nt, Human
cagccugcaugcuggugcccuucc

SEQ ID NO: 541953 - RNA, 22 nt, Human
cagcugccgugaaagggcccgc

SEQ ID NO: 541954 - RNA, 18 nt, Human
caggcccaacagagggcc

SEQ ID NO: 541955 - RNA, 18 nt, Human
cagguaggaaaggggcag

SEQ ID NO: 541956 - RNA, 19 nt, Human
caguucacgcggucaugcc

SEQ ID NO: 541957 - RNA, 19 nt, Human
cauacaagacggagaucac

SEQ ID NO: 541958 - RNA, 19 nt, Human
caucagacccguucccccu

SEQ ID NO: 541959 - RNA, 22 nt, Human
caugacacacagcccccaggau

SEQ ID NO: 541960 - RNA, 19 nt, Human
ccaaaauaacagacacagg

SEQ ID NO: 541961 - RNA, 22 nt, Human
ccaacagggcagagcgcugaaa

SEQ ID NO: 541962 - RNA, 21 nt, Human
ccacagagcugugugcaggcc

SEQ ID NO: 541963 - RNA, 20 nt, Human
ccacagcccacacucacagc

SEQ ID NO: 541964 - RNA, 19 nt, Human
ccacaguaggaugcacuga

SEQ ID NO: 541965 - RNA, 25 nt, Human
ccaccugaccggcugcagucacccc

SEQ ID NO: 541966 - RNA, 23 nt, Human
ccacgggagaaacccugccacaa

SEQ ID NO: 541967 - RNA, 19 nt, Human
ccacugggugcuggcugca

SEQ ID NO: 541968 - RNA, 25 nt, Human
ccaggaugggcaccccacccugcag

SEQ ID NO: 541969 - RNA, 24 nt, Human
ccagggacccaacccuccugagcc

SEQ ID NO: 541970 - RNA, 18 nt, Human
ccagucaguccuuccucc

SEQ ID NO: 541971 - RNA, 22 nt, Human
cccacccuaccccaccuuccgc

SEQ ID NO: 541972 - RNA, 21 nt, Human
cccaggaaaccacagaccccc

SEQ ID NO: 541973 - RNA, 27 nt, Human
cccauggccacacuugcucacagcauu

SEQ ID NO: 541974 - RNA, 18 nt, Human
ccccaggaugggcacccc

SEQ ID NO: 541975 - RNA, 24 nt, Human
cccccaagccaaccaugcccagca

SEQ ID NO: 541976 - RNA, 18 nt, Human
ccccucacuggaccaacc

SEQ ID NO: 541977 - RNA, 21 nt, Human
ccccuggcagcccccagcagc

SEQ ID NO: 541978 - RNA, 19 nt, Human
cccggaacagaacgccuga

SEQ ID NO: 541979 - RNA, 22 nt, Human
cccguccgcccgcccgcccgcc

SEQ ID NO: 541980 - RNA, 21 nt, Human
ccgcccgcccgcccucccgcc

SEQ ID NO: 541981 - RNA, 18 nt, Human
ccgcccuucagaugcagc

SEQ ID NO: 541982 - RNA, 20 nt, Human
ccucaaggcugggagcacag

SEQ ID NO: 541983 - RNA, 18 nt, Human
ccuccagaccugcuccuc

SEQ ID NO: 541984 - RNA, 23 nt, Human
ccuccuaugcuuuccacaccaaa

SEQ ID NO: 541985 - RNA, 22 nt, Human
ccucugcaacucugcagcggcc

SEQ ID NO: 541986 - RNA, 19 nt, Human
ccugcaggaccccgggccc

SEQ ID NO: 541987 - RNA, 20 nt, Human
ccugcaggaccccgggccca

SEQ ID NO: 541988 - RNA, 18 nt, Human
ccugccacaaggcccagg

SEQ ID NO: 541989 - RNA, 21 nt, Human
ccugcugggaaagccuccugc

SEQ ID NO: 541990 - RNA, 24 nt, Human
ccugguggggcugagcuagggccc

SEQ ID NO: 541991 - RNA, 19 nt, Human
ccuucugcacagccucggg

SEQ ID NO: 541992 - RNA, 22 nt, Human
cgggcccagccccuucuggagg

SEQ ID NO: 541993 - RNA, 19 nt, Human
cggggucccgucacugcca

SEQ ID NO: 541994 - RNA, 20 nt, Human
cggugucaaccucggaaggg

SEQ ID NO: 541995 - RNA, 22 nt, Human
cuacugcagccucaaggcuggg

SEQ ID NO: 541996 - RNA, 20 nt, Human
cuaggucaggcagggggagg

SEQ ID NO: 541997 - RNA, 20 nt, Human
cucacacaugcacaaucuac

SEQ ID NO: 541998 - RNA, 22 nt, Human
cuccccgauucgcggcgcugcu

SEQ ID NO: 541999 - RNA, 22 nt, Human
cuccucagccuggagaccccgg

SEQ ID NO: 542000 - RNA, 19 nt, Human
cuccucugaccacagcucc

SEQ ID NO: 542001 - RNA, 22 nt, Human
cugaccgacagcccugaggcag

SEQ ID NO: 542002 - RNA, 19 nt, Human
cugccacaaggcccaggaa

SEQ ID NO: 542003 - RNA, 23 nt, Human
cuuccaguccccuccucgauuuc

SEQ ID NO: 542004 - RNA, 18 nt, Human
gaacacagacaaauaacc

SEQ ID NO: 542005 - RNA, 22 nt, Human
gagaaacccugccacaaggccc

SEQ ID NO: 542006 - RNA, 23 nt, Human
gagaagaaacaaagaaaagugga

SEQ ID NO: 542007 - RNA, 25 nt, Human
gagcagaggccaaugcugguggggg

SEQ ID NO: 542008 - RNA, 29 nt, Human
gaggucugauuuugauaaauuauuucuaa

SEQ ID NO: 542009 - RNA, 22 nt, Human
gcacagggccccuucccaggcc

SEQ ID NO: 542010 - RNA, 19 nt, Human
gccaggcgccggcuccucc

SEQ ID NO: 542011 - RNA, 23 nt, Human
gcccaccugaccggcugcaguca

SEQ ID NO: 542012 - RNA, 20 nt, Human
gcuccgcggcuccgcucccc

SEQ ID NO: 542013 - RNA, 19 nt, Human
gcucuuggccagucugcgg

SEQ ID NO: 542014 - RNA, 20 nt, Human
gcugguccuaucaucugugg

SEQ ID NO: 542015 - RNA, 21 nt, Human
ggacagcagcaugaaugacac

SEQ ID NO: 542016 - RNA, 23 nt, Human
ggcaaacacaggaggaggggucg

SEQ ID NO: 542017 - RNA, 19 nt, Human
ggcagaugggagcucuggc

SEQ ID NO: 542018 - RNA, 24 nt, Human
ggcaggugagaucagaguccuacu

SEQ ID NO: 542019 - RNA, 20 nt, Human
ggcccagccccuucuggagg

SEQ ID NO: 542020 - RNA, 21 nt, Human
ggccguggcagugcccugggc

SEQ ID NO: 542021 - RNA, 22 nt, Human
ggccucccagggacccaacccu

SEQ ID NO: 542022 - RNA, 18 nt, Human
gggaaagccuccugcagg

SEQ ID NO: 542023 - RNA, 18 nt, Human
gggcacgugugcaugcca

SEQ ID NO: 542024 - RNA, 19 nt, Human
gggcagaugggagcucugg

SEQ ID NO: 542025 - RNA, 20 nt, Human
gggccccuggcagcccccag

SEQ ID NO: 542026 - RNA, 20 nt, Human
gggcugguccuaucaucugu

SEQ ID NO: 542027 - RNA, 20 nt, Human
gguggggcugagcuagggcc

SEQ ID NO: 542028 - RNA, 20 nt, Human
guggcucauugggcuggucc

SEQ ID NO: 542029 - RNA, 21 nt, Human
gugguucuaaagguccaaaaa

SEQ ID NO: 542030 - RNA, 22 nt, Human
gugucugggcuucccggggguc

SEQ ID NO: 542031 - RNA, 22 nt, Human
uaaaaaagggaaaaaaacagaa

SEQ ID NO: 542032 - RNA, 20 nt, Human
uaacugaaaagccaccuggc

SEQ ID NO: 542033 - RNA, 23 nt, Human
uaagacaaagccuuaaagccaac

SEQ ID NO: 542034 - RNA, 19 nt, Human
uacaaccaaaauaacagac

SEQ ID NO: 542035 - RNA, 21 nt, Human
uacaaccaaaauaacagacac

SEQ ID NO: 542036 - RNA, 18 nt, Human
uacagggaccucugcaac

SEQ ID NO: 542037 - RNA, 26 nt, Human
uacauauacacauauguacacacacg

SEQ ID NO: 542038 - RNA, 22 nt, Human
uacaucuacaaaaauugcaaag

SEQ ID NO: 542039 - RNA, 21 nt, Human
uagcuacacugcuuuaaauac

SEQ ID NO: 542040 - RNA, 21 nt, Human
uaggaugcacugagucagagc

SEQ ID NO: 542041 - RNA, 24 nt, Human
uaggaugcacugagucagagcuaa

SEQ ID NO: 542042 - RNA, 22 nt, Human
uaggggucagcugggggcccuc

SEQ ID NO: 542043 - RNA, 26 nt, Human
uauauacauauacacauauguacaca

SEQ ID NO: 542044 - RNA, 21 nt, Human
uauuagguuuuacagauucug

SEQ ID NO: 542045 - RNA, 20 nt, Human
ucaaccugaaccuacccuuc

SEQ ID NO: 542046 - RNA, 19 nt, Human
ucaaggcagggaagggcuu

SEQ ID NO: 542047 - RNA, 21 nt, Human
ucaccaggggacagcagcaug

SEQ ID NO: 542048 - RNA, 19 nt, Human
ucagacccguucccccugc

SEQ ID NO: 542049 - RNA, 18 nt, Human
ucagaguccuacugcagc

SEQ ID NO: 542050 - RNA, 22 nt, Human
ucaguccuuccuccagggaccu

SEQ ID NO: 542051 - RNA, 21 nt, Human
uccacaaaccuccagaccugc

SEQ ID NO: 542052 - RNA, 22 nt, Human
uccacaacacagacauggaaca

SEQ ID NO: 542053 - RNA, 20 nt, Human
uccacacgacgagacgacca

SEQ ID NO: 542054 - RNA, 24 nt, Human
ucccacccuaccccaccuuccgca

SEQ ID NO: 542055 - RNA, 28 nt, Human
ucccagggacccaacccuccugagccag

SEQ ID NO: 542056 - RNA, 21 nt, Human
ucccgccggcuccgcggcucc

SEQ ID NO: 542057 - RNA, 21 nt, Human
uccugagccagagggucccuc

SEQ ID NO: 542058 - RNA, 21 nt, Human
uccuuuuucuaguaggucccc

SEQ ID NO: 542059 - RNA, 22 nt, Human
ucuacaaaaauugcaaaggcug

SEQ ID NO: 542060 - RNA, 21 nt, Human
ucuaggucaggcagggggagg

SEQ ID NO: 542061 - RNA, 23 nt, Human
ucugcaacucugcagcggccacc

SEQ ID NO: 542062 - RNA, 19 nt, Human
ucugcagaaaccaggccca

SEQ ID NO: 542063 - RNA, 23 nt, Human
ucugcagaaaccaggcccacugg

SEQ ID NO: 542064 - RNA, 21 nt, Human
ucugccaggcagcaccugccu

SEQ ID NO: 542065 - RNA, 20 nt, Human
ucuguaacugaaaagccacc

SEQ ID NO: 542066 - RNA, 19 nt, Human
ugaaugacacuccugcugc

SEQ ID NO: 542067 - RNA, 18 nt, Human
ugacagcgccugcacccc

SEQ ID NO: 542068 - RNA, 20 nt, Human
ugacagcgccugcaccccac

SEQ ID NO: 542069 - RNA, 18 nt, Human
ugacagugacgccgguga

SEQ ID NO: 542070 - RNA, 19 nt, Human
ugacagugacgccggugac

SEQ ID NO: 542071 - RNA, 19 nt, Human
ugacgccggugacgccagg

SEQ ID NO: 542072 - RNA, 20 nt, Human
ugagaagaaacaaagaaaaa

SEQ ID NO: 542073 - RNA, 21 nt, Human
ugagaauggccacaaccauga

SEQ ID NO: 542074 - RNA, 22 nt, Human
ugagcaugacacacagccccca

SEQ ID NO: 542075 - RNA, 22 nt, Human
ugaggcuccagggccucuucug

SEQ ID NO: 542076 - RNA, 19 nt, Human
ugagggcaaugagugagcu

SEQ ID NO: 542077 - RNA, 23 nt, Human
ugagucagagcuaagggagggug

SEQ ID NO: 542078 - RNA, 21 nt, Human
ugauauauacauauacacaua

SEQ ID NO: 542079 - RNA, 26 nt, Human
ugauauauacauauacacauauggca

SEQ ID NO: 542080 - RNA, 24 nt, Human
ugcagcggccaccauggacauucu

SEQ ID NO: 542081 - RNA, 20 nt, Human
ugcccaggaccuagugcugg

SEQ ID NO: 542082 - RNA, 19 nt, Human
ugcccgacucccaagaaac

SEQ ID NO: 542083 - RNA, 18 nt, Human
ugcccggacccccucgug

SEQ ID NO: 542084 - RNA, 20 nt, Human
ugcccggacccccucgugaa

SEQ ID NO: 542085 - RNA, 19 nt, Human
ugccuccggccccucaagc

SEQ ID NO: 542086 - RNA, 23 nt, Human
ugccugaaucaucgaugacgggg

SEQ ID NO: 542087 - RNA, 19 nt, Human
ugcucgagccaggaucagc

SEQ ID NO: 542088 - RNA, 19 nt, Human
ugcugggaaagccuccugc

SEQ ID NO: 542089 - RNA, 18 nt, Human
ugcuggugggggccgugg

SEQ ID NO: 542090 - RNA, 22 nt, Human
uggaacagaaccccauacaugc

SEQ ID NO: 542091 - RNA, 19 nt, Human
uggacaagcagcuuccaug

SEQ ID NO: 542092 - RNA, 19 nt, Human
uggacaagcgcugaacucu

SEQ ID NO: 542093 - RNA, 18 nt, Human
uggcaaggggcccacucu

SEQ ID NO: 542094 - RNA, 26 nt, Human
uggcagcagccgacgugaagacgaag

SEQ ID NO: 542095 - RNA, 19 nt, Human
uggcaggugagaucagagu

SEQ ID NO: 542096 - RNA, 18 nt, Human
uggccaggcgccggcucc

SEQ ID NO: 542097 - RNA, 20 nt, Human
uggcuugaaacauuuucccc

SEQ ID NO: 542098 - RNA, 18 nt, Human
ugggaggggggagacugg

SEQ ID NO: 542099 - RNA, 21 nt, Human
ugggaggggggagacuggccc

SEQ ID NO: 542100 - RNA, 22 nt, Human
ugggcagcggccgacgcacucc

SEQ ID NO: 542101 - RNA, 18 nt, Human
ugggcguggaggcaggag

SEQ ID NO: 542102 - RNA, 21 nt, Human
uggguaccgaagggccuugga

SEQ ID NO: 542103 - RNA, 23 nt, Human
ugggucaagggucgacgcugggu

SEQ ID NO: 542104 - RNA, 18 nt, Human
ugggugggcguggaggca

SEQ ID NO: 542105 - RNA, 24 nt, Human
ugggugggcguggaggcaggaggg

SEQ ID NO: 542106 - RNA, 20 nt, Human
ugguggggcugagcuagggc

SEQ ID NO: 542107 - RNA, 20 nt, Human
uguccccacaguaggaugca

SEQ ID NO: 542108 - RNA, 22 nt, Human
ugugcaggcccaacagagggcc

SEQ ID NO: 542109 - RNA, 18 nt, Human
ugugcaugccaguuccuu

SEQ ID NO: 542110 - RNA, 18 nt, Human
uguucuagccacagagcu

SEQ ID NO: 542111 - RNA, 21 nt, Human
uuaaagccaacagggcagagc

SEQ ID NO: 542112 - RNA, 22 nt, Human
uucacagcucugaauacuggga

SEQ ID NO: 542113 - RNA, 20 nt, Human
uuuaucucuacagggaccuc

SEQ ID NO: 542114 - RNA, 23 nt, Human
uuuccacaccaaauucucccacg

SEQ ID NO: 542115 - RNA, 25 nt, Human
aaaaggccaaaaagcaauuggaauu

SEQ ID NO: 542116 - RNA, 19 nt, Human
aaacaaaaacaaaaaauga

SEQ ID NO: 542117 - RNA, 25 nt, Human
aaacaaaagagagaaagaggggacc

SEQ ID NO: 542118 - RNA, 18 nt, Human
aaacaggucacagcaaca

SEQ ID NO: 542119 - RNA, 24 nt, Human
aaacaggucacagcaacaugucuc

SEQ ID NO: 542120 - RNA, 22 nt, Human
aaacauauaucauguagcauaa

SEQ ID NO: 542121 - RNA, 21 nt, Human
aaaccaaacauccacauuccu

SEQ ID NO: 542122 - RNA, 22 nt, Human
aaagaaaaacaggucacagcaa

SEQ ID NO: 542123 - RNA, 24 nt, Human
aaagaccuguuggucugcauauag

SEQ ID NO: 542124 - RNA, 25 nt, Human
aaccaaacauccacauuccuuauca

SEQ ID NO: 542125 - RNA, 19 nt, Human
aacugcucacaaaccuaga

SEQ ID NO: 542126 - RNA, 20 nt, Human
aagagcauuaagccuuacag

SEQ ID NO: 542127 - RNA, 19 nt, Human
acaaaacaaaagagagaaa

SEQ ID NO: 542128 - RNA, 23 nt, Human
acaaaacaaaagagagaaagaga

SEQ ID NO: 542129 - RNA, 19 nt, Human
acaaacaaacaaacaaaac

SEQ ID NO: 542130 - RNA, 26 nt, Human
acacugaguccacacuagauauuggu

SEQ ID NO: 542131 - RNA, 20 nt, Human
agaaaaacaggucacagcaa

SEQ ID NO: 542132 - RNA, 19 nt, Human
agaaagaaaaacaggucac

SEQ ID NO: 542133 - RNA, 23 nt, Human
agacaagcacauacuggaucaaa

SEQ ID NO: 542134 - RNA, 23 nt, Human
aguuggugguaaucacuggacug

SEQ ID NO: 542135 - RNA, 24 nt, Human
augaacuuuaacaaacaaacaaac

SEQ ID NO: 542136 - RNA, 22 nt, Human
augagaaccagccaacacacug

SEQ ID NO: 542137 - RNA, 22 nt, Human
augugugcgugcaugugugugu

SEQ ID NO: 542138 - RNA, 22 nt, Human
augugugugugugugugugugu

SEQ ID NO: 542139 - RNA, 23 nt, Human
auguguguguguguguguguguu

SEQ ID NO: 542140 - RNA, 20 nt, Human
caaaacaacuuuuaaaagcu

SEQ ID NO: 542141 - RNA, 18 nt, Human
caaacaaacaaacaaaac

SEQ ID NO: 542142 - RNA, 23 nt, Human
caaacauccacauuccuuaucaa

SEQ ID NO: 542143 - RNA, 18 nt, Human
caaaugagcaggaaaguc

SEQ ID NO: 542144 - RNA, 25 nt, Human
cacaauaucuacaaaugugaaugag

SEQ ID NO: 542145 - RNA, 18 nt, Human
cacuagauauugguccug

SEQ ID NO: 542146 - RNA, 19 nt, Human
cacugugaucgugccauuc

SEQ ID NO: 542147 - RNA, 23 nt, Human
cagaauagcaaacugcuuacccc

SEQ ID NO: 542148 - RNA, 21 nt, Human
cagacuuccagguucaauccu

SEQ ID NO: 542149 - RNA, 18 nt, Human
cagcagagauggaaaagc

SEQ ID NO: 542150 - RNA, 23 nt, Human
cagcagagauggaaaagcucaua

SEQ ID NO: 542151 - RNA, 23 nt, Human
cagcggucucgggggcgaagucu

SEQ ID NO: 542152 - RNA, 19 nt, Human
caugaaaaucuuuuugccc

SEQ ID NO: 542153 - RNA, 21 nt, Human
caugucagaagguggcauuca

SEQ ID NO: 542154 - RNA, 24 nt, Human
caugugugugugugugugugugag

SEQ ID NO: 542155 - RNA, 23 nt, Human
caugugugugugugugugugugu

SEQ ID NO: 542156 - RNA, 23 nt, Human
cauuaagccuuacagcaaaauua

SEQ ID NO: 542157 - RNA, 23 nt, Human
cauucaagcuccucauuguauuc

SEQ ID NO: 542158 - RNA, 22 nt, Human
cauucucuuaccacaacugcuc

SEQ ID NO: 542159 - RNA, 22 nt, Human
ccauucucuuaccacaacugcu

SEQ ID NO: 542160 - RNA, 23 nt, Human
ccucugcugcaaaugagcaggaa

SEQ ID NO: 542161 - RNA, 18 nt, Human
ccuuaaaaguaaaucaug

SEQ ID NO: 542162 - RNA, 20 nt, Human
ccuuguggggaggugggacc

SEQ ID NO: 542163 - RNA, 22 nt, Human
ccuuguggggaggugggaccug

SEQ ID NO: 542164 - RNA, 20 nt, Human
cuaagcauuagcacaggucu

SEQ ID NO: 542165 - RNA, 20 nt, Human
cuaugauaaagucccagacu

SEQ ID NO: 542166 - RNA, 22 nt, Human
cucuccucauaacuuuccuuaa

SEQ ID NO: 542167 - RNA, 21 nt, Human
cugcaacccugacuuuugauu

SEQ ID NO: 542168 - RNA, 23 nt, Human
cugcucacaaaccuagagaacac

SEQ ID NO: 542169 - RNA, 20 nt, Human
cuggacuauuaucacucccc

SEQ ID NO: 542170 - RNA, 18 nt, Human
gaacaggccaaacuacuu

SEQ ID NO: 542171 - RNA, 24 nt, Human
gaacaggccaaacuacuuuaccac

SEQ ID NO: 542172 - RNA, 24 nt, Human
gaauugugacacacacuaagcauu

SEQ ID NO: 542173 - RNA, 21 nt, Human
gacuguguuucauucacggca

SEQ ID NO: 542174 - RNA, 19 nt, Human
gcagcagagauggaaaagc

SEQ ID NO: 542175 - RNA, 24 nt, Human
gcuuagucagaaaguuggugguaa

SEQ ID NO: 542176 - RNA, 22 nt, Human
ggaggugggaccugguuccuca

SEQ ID NO: 542177 - RNA, 24 nt, Human
ggcuaggagaccaggauuucuaug

SEQ ID NO: 542178 - RNA, 20 nt, Human
gggaggugggaccugguucc

SEQ ID NO: 542179 - RNA, 25 nt, Human
gggcaggguggaaugcggugguucu

SEQ ID NO: 542180 - RNA, 24 nt, Human
ggggcgaagucucucaacggagga

SEQ ID NO: 542181 - RNA, 19 nt, Human
gugauggguguuaugccuu

SEQ ID NO: 542182 - RNA, 21 nt, Human
gugugugugugugugugugug

SEQ ID NO: 542183 - RNA, 21 nt, Human
gugugugugugugugugugug

SEQ ID NO: 542184 - RNA, 21 nt, Human
gugugugugugugugugugug

SEQ ID NO: 542185 - RNA, 21 nt, Human
guuuaugacuguauauuuaaa

SEQ ID NO: 542186 - RNA, 21 nt, Human
uaaaaggaaugcaaagaccug

SEQ ID NO: 542187 - RNA, 22 nt, Human
uaaaaugagaaccagccaacac

SEQ ID NO: 542188 - RNA, 21 nt, Human
uaaaauuagaugcuacauuua

SEQ ID NO: 542189 - RNA, 20 nt, Human
uaacaaacaaacaaacaaaa

SEQ ID NO: 542190 - RNA, 22 nt, Human
uaacaaacaaacaaacaaaaca

SEQ ID NO: 542191 - RNA, 19 nt, Human
uaacgguuuaguacugaaa

SEQ ID NO: 542192 - RNA, 19 nt, Human
uaagacaagcacauacugg

SEQ ID NO: 542193 - RNA, 23 nt, Human
uaagacaagcacauacuggauca

SEQ ID NO: 542194 - RNA, 24 nt, Human
uacaaaacaaaaaauauauuacaa

SEQ ID NO: 542195 - RNA, 21 nt, Human
uacagcaaaauuagauguuuc

SEQ ID NO: 542196 - RNA, 21 nt, Human
uacagcauuuguuuccaaaga

SEQ ID NO: 542197 - RNA, 20 nt, Human
uacaguauuaugcuaaaggc

SEQ ID NO: 542198 - RNA, 23 nt, Human
uacauuacaaauauuuuagacca

SEQ ID NO: 542199 - RNA, 23 nt, Human
uaccacaacugcucacaaaccua

SEQ ID NO: 542200 - RNA, 22 nt, Human
uacguauaaauccagaaauccu

SEQ ID NO: 542201 - RNA, 19 nt, Human
uagaaguuccucucaugcu

SEQ ID NO: 542202 - RNA, 20 nt, Human
uagagaacacugaguccaca

SEQ ID NO: 542203 - RNA, 21 nt, Human
uagcacaggucugcagcagag

SEQ ID NO: 542204 - RNA, 24 nt, Human
uagcuuagucagaaaguugguggu

SEQ ID NO: 542205 - RNA, 18 nt, Human
uauaauguauccggaaaa

SEQ ID NO: 542206 - RNA, 19 nt, Human
uauggugggaacuuuggag

SEQ ID NO: 542207 - RNA, 24 nt, Human
ucaaaauacgugacauccacagaa

SEQ ID NO: 542208 - RNA, 21 nt, Human
ucacauugucaguaaaaggua

SEQ ID NO: 542209 - RNA, 23 nt, Human
ucacuggacuauuaucacucccc

SEQ ID NO: 542210 - RNA, 20 nt, Human
ucagagcagauacugacaag

SEQ ID NO: 542211 - RNA, 29 nt, Human
ucaugugugcgugcaugugugugugugug

SEQ ID NO: 542212 - RNA, 21 nt, Human
uccaagaaaaaucuagaaacc

SEQ ID NO: 542213 - RNA, 18 nt, Human
uccccagguagaaugcug

SEQ ID NO: 542214 - RNA, 20 nt, Human
ucccuauuuucuuuagccac

SEQ ID NO: 542215 - RNA, 21 nt, Human
ucccuguaugaaugucguucc

SEQ ID NO: 542216 - RNA, 18 nt, Human
ucugcagcagagauggaa

SEQ ID NO: 542217 - RNA, 18 nt, Human
ucugcgaaaaccucagaa

SEQ ID NO: 542218 - RNA, 19 nt, Human
ucugcuuccucccucugcu

SEQ ID NO: 542219 - RNA, 19 nt, Human
ugaaacagugaaucugauc

SEQ ID NO: 542220 - RNA, 24 nt, Human
ugacugggucugcaggugagugca

SEQ ID NO: 542221 - RNA, 22 nt, Human
ugaucugaauccagccagucug

SEQ ID NO: 542222 - RNA, 21 nt, Human
ugauggguguuaugccuucau

SEQ ID NO: 542223 - RNA, 19 nt, Human
ugcagcagagauggaaaag

SEQ ID NO: 542224 - RNA, 22 nt, Human
ugcagcucucucacugugaucg

SEQ ID NO: 542225 - RNA, 21 nt, Human
ugcaugugugugugugugugu

SEQ ID NO: 542226 - RNA, 22 nt, Human
ugccacaagaaaguuaaaacaa

SEQ ID NO: 542227 - RNA, 27 nt, Human
ugccacaagaaaguuaaaacaaaaaca

SEQ ID NO: 542228 - RNA, 21 nt, Human
ugccucaacauacagauucgu

SEQ ID NO: 542229 - RNA, 19 nt, Human
ugcgugcaugugugugugu

SEQ ID NO: 542230 - RNA, 24 nt, Human
ugcgugcaugugugugugugugug

SEQ ID NO: 542231 - RNA, 22 nt, Human
ugcucacaaaccuagagaacac

SEQ ID NO: 542232 - RNA, 23 nt, Human
ugcuuugcuuucacaaauguccc

SEQ ID NO: 542233 - RNA, 23 nt, Human
ugcuuuggaucuuuuaugguggg

SEQ ID NO: 542234 - RNA, 20 nt, Human
uggaaugcggugguucugca

SEQ ID NO: 542235 - RNA, 18 nt, Human
uggacuauuaucacuccc

SEQ ID NO: 542236 - RNA, 21 nt, Human
uggagaaaccaaacauccaca

SEQ ID NO: 542237 - RNA, 20 nt, Human
ugggaacuuuggagaaacca

SEQ ID NO: 542238 - RNA, 21 nt, Human
uggggaggugggaccugguuc

SEQ ID NO: 542239 - RNA, 19 nt, Human
uggggcaggagugauuacg

SEQ ID NO: 542240 - RNA, 23 nt, Human
uggugcaugcuuuuuguauucuc

SEQ ID NO: 542241 - RNA, 19 nt, Human
ugguucugcaaggucaucu

SEQ ID NO: 542242 - RNA, 20 nt, Human
ugguuuuguucuuggagucu

SEQ ID NO: 542243 - RNA, 21 nt, Human
ugucagauuacauuuuggugc

SEQ ID NO: 542244 - RNA, 21 nt, Human
ugugcacacaaaagagaucua

SEQ ID NO: 542245 - RNA, 21 nt, Human
ugugcgugcaugugugugugu

SEQ ID NO: 542246 - RNA, 31 nt, Human
ugugcgugcaugugugugugugugugugugg

SEQ ID NO: 542247 - RNA, 25 nt, Human
uguggauauauuuaauauauaugua

SEQ ID NO: 542248 - RNA, 20 nt, Human
ugugugcgugcaugugugug

SEQ ID NO: 542249 - RNA, 22 nt, Human
ugugugcgugcaugugugugug

SEQ ID NO: 542250 - RNA, 18 nt, Human
ugugugugugugugugug

SEQ ID NO: 542251 - RNA, 18 nt, Human
ugugugugugugugugug

SEQ ID NO: 542252 - RNA, 18 nt, Human
ugugugugugugugugug

SEQ ID NO: 542253 - RNA, 18 nt, Human
ugugugugugugugugug

SEQ ID NO: 542254 - RNA, 18 nt, Human
ugugugugugugugugug

SEQ ID NO: 542255 - RNA, 18 nt, Human
ugugugugugugugugug

SEQ ID NO: 542256 - RNA, 18 nt, Human
ugugugugugugugugug

SEQ ID NO: 542257 - RNA, 18 nt, Human
ugugugugugugugugug

SEQ ID NO: 542258 - RNA, 18 nt, Human
ugugugugugugugugug

SEQ ID NO: 542259 - RNA, 18 nt, Human
ugugugugugugugugug

SEQ ID NO: 542260 - RNA, 18 nt, Human
ugugugugugugugugug

SEQ ID NO: 542261 - RNA, 18 nt, Human
ugugugugugugugugug

SEQ ID NO: 542262 - RNA, 21 nt, Human
ugugugugugugugugugugu

SEQ ID NO: 542263 - RNA, 21 nt, Human
ugugugugugugugugugugu

SEQ ID NO: 542264 - RNA, 21 nt, Human
ugugugugugugugugugugu

SEQ ID NO: 542265 - RNA, 21 nt, Human
ugugugugugugugugugugu

SEQ ID NO: 542266 - RNA, 21 nt, Human
ugugugugugugugugugugu

SEQ ID NO: 542267 - RNA, 21 nt, Human
ugugugugugugugugugugu

SEQ ID NO: 542268 - RNA, 21 nt, Human
ugugugugugugugugugugu

SEQ ID NO: 542269 - RNA, 21 nt, Human
ugugugugugugugugugugu

SEQ ID NO: 542270 - RNA, 21 nt, Human
ugugugugugugugugugugu

SEQ ID NO: 542271 - RNA, 21 nt, Human
ugugugugugugugugugugu

SEQ ID NO: 542272 - RNA, 21 nt, Human
ugugugugugugugugugugu

SEQ ID NO: 542273 - RNA, 21 nt, Human
ugugugugugugugugugugu

SEQ ID NO: 542274 - RNA, 21 nt, Human
ugugugugugugugugugugu

SEQ ID NO: 542275 - RNA, 21 nt, Human
ugugugugugugugugugugu

SEQ ID NO: 542276 - RNA, 21 nt, Human
ugugugugugugugugugugu

SEQ ID NO: 542277 - RNA, 21 nt, Human
ugugugugugugugugugugu

SEQ ID NO: 542278 - RNA, 21 nt, Human
ugugugugugugugugugugu

SEQ ID NO: 542279 - RNA, 21 nt, Human
ugugugugugugugugugugu

SEQ ID NO: 542280 - RNA, 21 nt, Human
ugugugugugugugugugugu

SEQ ID NO: 542281 - RNA, 22 nt, Human
ugugugugugugugugugugug

SEQ ID NO: 542282 - RNA, 22 nt, Human
ugugugugugugugugugugug

SEQ ID NO: 542283 - RNA, 22 nt, Human
ugugugugugugugugugugug

SEQ ID NO: 542284 - RNA, 22 nt, Human
ugugugugugugugugugugug

SEQ ID NO: 542285 - RNA, 22 nt, Human
ugugugugugugugugugugug

SEQ ID NO: 542286 - RNA, 22 nt, Human
ugugugugugugugugugugug

SEQ ID NO: 542287 - RNA, 22 nt, Human
ugugugugugugugugugugug

SEQ ID NO: 542288 - RNA, 19 nt, Human
uguguguguguguguguug

SEQ ID NO: 542289 - RNA, 20 nt, Human
uguuuccaacuaagaauguu

SEQ ID NO: 542290 - RNA, 19 nt, Human
uuaaaaugagaaccagcca

SEQ ID NO: 542291 - RNA, 19 nt, Human
uuaaaccaucauauaacuc

SEQ ID NO: 542292 - RNA, 22 nt, Human
uuauaucuuuccaagaaaaauc

SEQ ID NO: 542293 - RNA, 24 nt, Human
uucaaaauacgugacauccacaga

SEQ ID NO: 542294 - RNA, 22 nt, Human
uucaacuugaacauucuuccac

SEQ ID NO: 542295 - RNA, 21 nt, Human
uucacagucagcggucucggg

SEQ ID NO: 542296 - RNA, 21 nt, Human
uuccagguucaauccuuuugc

SEQ ID NO: 542297 - RNA, 18 nt, Human
uuccccagguagaaugcu

SEQ ID NO: 542298 - RNA, 20 nt, Human
uugaauuacagcauuuguuu

SEQ ID NO: 542299 - RNA, 24 nt, Human
uuuacaguauuaugcuaaaggccu

SEQ ID NO: 542300 - RNA, 20 nt, Human
uuucauucauuuuuagcuua

SEQ ID NO: 542301 - RNA, 21 nt, Human
uuucuaaagggaaagaagggu

SEQ ID NO: 542302 - RNA, 23 nt, Human
uuugaaacauauaucauguagca

SEQ ID NO: 542303 - RNA, 23 nt, Human
aaacaccacagggcaucagaugc

SEQ ID NO: 542304 - RNA, 23 nt, Human
aagcaggaagggagauagcaggg

SEQ ID NO: 542305 - RNA, 22 nt, Human
aaggggcuuccuaaggugcccc

SEQ ID NO: 542306 - RNA, 22 nt, Human
aaguuucuaaccaucacaauuc

SEQ ID NO: 542307 - RNA, 21 nt, Human
aauggacuaaaaagcaaauac

SEQ ID NO: 542308 - RNA, 24 nt, Human
aauggacuaaaaagcaaauacuac

SEQ ID NO: 542309 - RNA, 20 nt, Human
acugaagcgaaggggcuucc

SEQ ID NO: 542310 - RNA, 23 nt, Human
aggcagcaccaaugguggcaccu

SEQ ID NO: 542311 - RNA, 18 nt, Human
aggugccccuuccaggcu

SEQ ID NO: 542312 - RNA, 22 nt, Human
auguugggguggaagugggagg

SEQ ID NO: 542313 - RNA, 22 nt, Human
caaaacacugaguuacaggcug

SEQ ID NO: 542314 - RNA, 24 nt, Human
caaaacacugaguuacaggcugug

SEQ ID NO: 542315 - RNA, 21 nt, Human
cagacaggcuaggacauggua

SEQ ID NO: 542316 - RNA, 19 nt, Human
cagaugcugcucugugugc

SEQ ID NO: 542317 - RNA, 21 nt, Human
ccuaaggugccccuuccaggg

SEQ ID NO: 542318 - RNA, 23 nt, Human
cgugggccucaugccacacugau

SEQ ID NO: 542319 - RNA, 20 nt, Human
gaaagguuuggguggcgugg

SEQ ID NO: 542320 - RNA, 21 nt, Human
gaagggagcacacccagaagc

SEQ ID NO: 542321 - RNA, 19 nt, Human
gaaguuucuaaccaucaca

SEQ ID NO: 542322 - RNA, 22 nt, Human
gagcacacccagaagcgagcaa

SEQ ID NO: 542323 - RNA, 23 nt, Human
gaggacggcuagcucuuuggaaa

SEQ ID NO: 542324 - RNA, 20 nt, Human
gcagcaccaaugguggcacc

SEQ ID NO: 542325 - RNA, 19 nt, Human
ggcagggagagggaaaggu

SEQ ID NO: 542326 - RNA, 23 nt, Human
ggggcagggagagggaaaggucu

SEQ ID NO: 542327 - RNA, 20 nt, Human
guucugugccugugaccuug

SEQ ID NO: 542328 - RNA, 21 nt, Human
uacaaaacacugaguuacagg

SEQ ID NO: 542329 - RNA, 20 nt, Human
uaggggcagggagagggaaa

SEQ ID NO: 542330 - RNA, 25 nt, Human
uaggggcagggagagggaaaggucu

SEQ ID NO: 542331 - RNA, 22 nt, Human
ucuuuuuuuaaaccaagccccu

SEQ ID NO: 542332 - RNA, 24 nt, Human
ugaguuacaggcugugggaagaga

SEQ ID NO: 542333 - RNA, 23 nt, Human
ugccccuuccaggcuugucucug

SEQ ID NO: 542334 - RNA, 24 nt, Human
ugcucugugugcucacaaguguuc

SEQ ID NO: 542335 - RNA, 18 nt, Human
ugggaagagaaggcagca

SEQ ID NO: 542336 - RNA, 19 nt, Human
ugggguggaagugggagga

SEQ ID NO: 542337 - RNA, 25 nt, Human
uggguggaggacggcuagcucuuug

SEQ ID NO: 542338 - RNA, 19 nt, Human
uuaccacuaacaaaugcag

SEQ ID NO: 542339 - RNA, 24 nt, Human
uucuaauacugguuguucuagggg

SEQ ID NO: 542340 - RNA, 21 nt, Human
uuuuuuuuuuuuuuuuugggu

SEQ ID NO: 542341 - RNA, 24 nt, Human
uuuuuuuuuuuuuuuuuuuuuggg

SEQ ID NO: 542342 - RNA, 19 nt, Human
aggcacaugacguagaaau

SEQ ID NO: 542343 - RNA, 19 nt, Human
cgagagcugggacguggcg

SEQ ID NO: 542344 - RNA, 23 nt, Human
gcggcgcuggcuguggggaacag

SEQ ID NO: 542345 - RNA, 19 nt, Human
gcgggcggcgcuggcugug

SEQ ID NO: 542346 - RNA, 23 nt, Human
uacaaaaugcaaauuucugcaua

SEQ ID NO: 542347 - RNA, 19 nt, Human
ucacccgccgcgcagcucc

SEQ ID NO: 542348 - RNA, 19 nt, Human
ucugcauaagauuuuuaag

SEQ ID NO: 542349 - RNA, 18 nt, Human
uggccgagagcugggacg

SEQ ID NO: 542350 - RNA, 19 nt, Human
uggccgagagcugggacgu

SEQ ID NO: 542351 - RNA, 22 nt, Human
uggcgggcggcgcuggcugugg

SEQ ID NO: 542352 - RNA, 23 nt, Human
uggcgggcggcgcuggcuguggg

SEQ ID NO: 542353 - RNA, 22 nt, Human
uuuuggaaaaugaaggugaaca

SEQ ID NO: 542354 - RNA, 23 nt, Human
aaagacaaaaagaaaagacccca

SEQ ID NO: 542355 - RNA, 20 nt, Human
aagaacauagaaaacccagc

SEQ ID NO: 542356 - RNA, 23 nt, Human
aagacaaaaagaaaagaccccaa

SEQ ID NO: 542357 - RNA, 21 nt, Human
aagcagccucguggugagagc

SEQ ID NO: 542358 - RNA, 20 nt, Human
aaggcccugcaggggacggg

SEQ ID NO: 542359 - RNA, 20 nt, Human
aaugacaaggacggccgaca

SEQ ID NO: 542360 - RNA, 23 nt, Human
acaaagacaaaaagaaaagaccc

SEQ ID NO: 542361 - RNA, 24 nt, Human
acaaagacaaaaagaaaagacccc

SEQ ID NO: 542362 - RNA, 21 nt, Human
acaccgccccaccccacgucu

SEQ ID NO: 542363 - RNA, 24 nt, Human
acacucgaaaagaacauagaaaac

SEQ ID NO: 542364 - RNA, 25 nt, Human
acacuucccggcaguacuggggaug

SEQ ID NO: 542365 - RNA, 23 nt, Human
acccugucacaccgccccacccc

SEQ ID NO: 542366 - RNA, 22 nt, Human
acuccgagggagacgguugaga

SEQ ID NO: 542367 - RNA, 19 nt, Human
agacaaaaagaaaagaccc

SEQ ID NO: 542368 - RNA, 20 nt, Human
agacaaaaagaaaagacccc

SEQ ID NO: 542369 - RNA, 21 nt, Human
agacaaaaagaaaagacccca

SEQ ID NO: 542370 - RNA, 22 nt, Human
agagagcaguacaaaucagcau

SEQ ID NO: 542371 - RNA, 19 nt, Human
agcacuccugcccaggugu

SEQ ID NO: 542372 - RNA, 20 nt, Human
agcagaaaaugucuuucccc

SEQ ID NO: 542373 - RNA, 20 nt, Human
aggaagcaggcccugccaac

SEQ ID NO: 542374 - RNA, 18 nt, Human
aggugcugggacuggcag

SEQ ID NO: 542375 - RNA, 19 nt, Human
aucucaucucccaccuccu

SEQ ID NO: 542376 - RNA, 22 nt, Human
aucucaucucccaccuccucua

SEQ ID NO: 542377 - RNA, 22 nt, Human
cacaccgccccaccccacgucu

SEQ ID NO: 542378 - RNA, 20 nt, Human
caccagaggcucggugaccc

SEQ ID NO: 542379 - RNA, 19 nt, Human
cacugggcguggcucagga

SEQ ID NO: 542380 - RNA, 20 nt, Human
cagcucccacacaccagccc

SEQ ID NO: 542381 - RNA, 22 nt, Human
cagcucccacacaccagccccu

SEQ ID NO: 542382 - RNA, 19 nt, Human
caggaaaaggcccugcagg

SEQ ID NO: 542383 - RNA, 21 nt, Human
cagggcaguggggcucccagg

SEQ ID NO: 542384 - RNA, 22 nt, Human
cagguagcagcucccacacacc

SEQ ID NO: 542385 - RNA, 21 nt, Human
caguacaaaucagcaugcggu

SEQ ID NO: 542386 - RNA, 23 nt, Human
cauagaaaacccagcagagagca

SEQ ID NO: 542387 - RNA, 19 nt, Human
ccaccccagaugaguggca

SEQ ID NO: 542388 - RNA, 25 nt, Human
ccaccuccucuacccugucacaccg

SEQ ID NO: 542389 - RNA, 21 nt, Human
ccagccccuggcucucaacug

SEQ ID NO: 542390 - RNA, 22 nt, Human
ccagccccuggcucucaacugu

SEQ ID NO: 542391 - RNA, 23 nt, Human
ccagccccuggcucucaacugua

SEQ ID NO: 542392 - RNA, 26 nt, Human
cccaccuccucuacccugucacaccg

SEQ ID NO: 542393 - RNA, 18 nt, Human
cccaugcccgcugccccg

SEQ ID NO: 542394 - RNA, 23 nt, Human
cccaugcccgcugccccguccac

SEQ ID NO: 542395 - RNA, 24 nt, Human
cccaugcccgcugccccguccaca

SEQ ID NO: 542396 - RNA, 22 nt, Human
ccccagaugaguggcaggaaaa

SEQ ID NO: 542397 - RNA, 20 nt, Human
cccugagacuccgagggaga

SEQ ID NO: 542398 - RNA, 22 nt, Human
cccuggagaaagggggacuggc

SEQ ID NO: 542399 - RNA, 21 nt, Human
cccuugaaagaaucaucuccu

SEQ ID NO: 542400 - RNA, 19 nt, Human
ccgcagccagcgaaccccc

SEQ ID NO: 542401 - RNA, 21 nt, Human
ccugccuagggcugcucccca

SEQ ID NO: 542402 - RNA, 24 nt, Human
ccugccuagggcugcuccccaccc

SEQ ID NO: 542403 - RNA, 18 nt, Human
ccuggggucaaguugggg

SEQ ID NO: 542404 - RNA, 22 nt, Human
ccugugcggaagaucucaucuc

SEQ ID NO: 542405 - RNA, 25 nt, Human
cucccaccuccucuacccugucaca

SEQ ID NO: 542406 - RNA, 22 nt, Human
cuccuuggaaaaaccaggaccu

SEQ ID NO: 542407 - RNA, 24 nt, Human
cuggggucaaguugggggaagggg

SEQ ID NO: 542408 - RNA, 23 nt, Human
cugguacacaaagacaaaaagaa

SEQ ID NO: 542409 - RNA, 24 nt, Human
cugguacacaaagacaaaaagaaa

SEQ ID NO: 542410 - RNA, 19 nt, Human
gaggugcugggacuggcag

SEQ ID NO: 542411 - RNA, 21 nt, Human
gaguggcaggaaaaggcccug

SEQ ID NO: 542412 - RNA, 22 nt, Human
gccccuggcucucaacuguacg

SEQ ID NO: 542413 - RNA, 21 nt, Human
gcccgcugccccguccacacc

SEQ ID NO: 542414 - RNA, 20 nt, Human
gcucccaggaugcaagggga

SEQ ID NO: 542415 - RNA, 19 nt, Human
gcugcuccccaccccagau

SEQ ID NO: 542416 - RNA, 22 nt, Human
ggaagcaggcccugccaacucg

SEQ ID NO: 542417 - RNA, 18 nt, Human
ggagagaagcugccugug

SEQ ID NO: 542418 - RNA, 19 nt, Human
ggccggagccggggccgca

SEQ ID NO: 542419 - RNA, 22 nt, Human
ggccggagccggggccgcagcc

SEQ ID NO: 542420 - RNA, 18 nt, Human
gggucaaguugggggaag

SEQ ID NO: 542421 - RNA, 25 nt, Human
gguacacaaagacaaaaagaaaaga

SEQ ID NO: 542422 - RNA, 22 nt, Human
gguagcagcucccacacaccag

SEQ ID NO: 542423 - RNA, 27 nt, Human
guaaaaaccaagacauuuauauaaaua

SEQ ID NO: 542424 - RNA, 24 nt, Human
uacacaaagacaaaaagaaaagac

SEQ ID NO: 542425 - RNA, 20 nt, Human
uacuggggauggcagggcag

SEQ ID NO: 542426 - RNA, 25 nt, Human
ucacaccgccccaccccacgucucc

SEQ ID NO: 542427 - RNA, 20 nt, Human
ucccacacagacccaugccc

SEQ ID NO: 542428 - RNA, 18 nt, Human
ucccaccuccucuacccu

SEQ ID NO: 542429 - RNA, 18 nt, Human
uccccaccaaggcugggg

SEQ ID NO: 542430 - RNA, 18 nt, Human
uccccagaggacaaggag

SEQ ID NO: 542431 - RNA, 18 nt, Human
uccccggggggugcugcu

SEQ ID NO: 542432 - RNA, 22 nt, Human
uccccggggggugcugcuccug

SEQ ID NO: 542433 - RNA, 25 nt, Human
uccccggggggugcugcuccugcgg

SEQ ID NO: 542434 - RNA, 18 nt, Human
ucccugcggaagcagccu

SEQ ID NO: 542435 - RNA, 21 nt, Human
ucuacuaaaacccuuuuccca

SEQ ID NO: 542436 - RNA, 24 nt, Human
ucucccaccuccucuacccuguca

SEQ ID NO: 542437 - RNA, 21 nt, Human
ugcaaggggaaggcagcccug

SEQ ID NO: 542438 - RNA, 19 nt, Human
ugcccaggugucccaccag

SEQ ID NO: 542439 - RNA, 23 nt, Human
ugcccaggugucccaccagaggc

SEQ ID NO: 542440 - RNA, 22 nt, Human
ugccccguccacacccugagac

SEQ ID NO: 542441 - RNA, 19 nt, Human
ugcggaagaucucaucucc

SEQ ID NO: 542442 - RNA, 24 nt, Human
uggaaaaaccaggaccugccuagg

SEQ ID NO: 542443 - RNA, 19 nt, Human
ugggggcugggggggcugc

SEQ ID NO: 542444 - RNA, 20 nt, Human
ugggggcugggggggcugcu

SEQ ID NO: 542445 - RNA, 21 nt, Human
uuccugugcggaagaucucau

SEQ ID NO: 542446 - RNA, 19 nt, Human
uucugaggggucagcaccu

SEQ ID NO: 542447 - RNA, 24 nt, Human
aaaaauugcauaaagauccaugca

SEQ ID NO: 542448 - RNA, 21 nt, Human
aaaaguagacaaaauaugucc

SEQ ID NO: 542449 - RNA, 22 nt, Human
aaaguaacucaauucagacaac

SEQ ID NO: 542450 - RNA, 19 nt, Human
aaauagcccuugcccaaag

SEQ ID NO: 542451 - RNA, 18 nt, Human
aagcuccccgcugcuccc

SEQ ID NO: 542452 - RNA, 26 nt, Human
agaagcaaacucucuaccagacagaa

SEQ ID NO: 542453 - RNA, 20 nt, Human
agaagccaguuuaugcccau

SEQ ID NO: 542454 - RNA, 22 nt, Human
agacagaaacaaggauguauga

SEQ ID NO: 542455 - RNA, 19 nt, Human
aggaaagccugcaugagag

SEQ ID NO: 542456 - RNA, 22 nt, Human
aggccaagaccagggaaaugga

SEQ ID NO: 542457 - RNA, 23 nt, Human
aggcuagaccugggauggcggca

SEQ ID NO: 542458 - RNA, 18 nt, Human
agguuuucugaaacaguu

SEQ ID NO: 542459 - RNA, 23 nt, Human
auaauucucaaaaguagacaaaa

SEQ ID NO: 542460 - RNA, 23 nt, Human
aucuccccuggaucauucuguua

SEQ ID NO: 542461 - RNA, 21 nt, Human
caucugcgucuugguuaagga

SEQ ID NO: 542462 - RNA, 18 nt, Human
ccaaagcuuaaucucccc

SEQ ID NO: 542463 - RNA, 19 nt, Human
ccauccuaugccaccacuu

SEQ ID NO: 542464 - RNA, 23 nt, Human
ccauuccauccuuucuggucaug

SEQ ID NO: 542465 - RNA, 20 nt, Human
ccccgcugcucccucccuua

SEQ ID NO: 542466 - RNA, 19 nt, Human
ccccuuuccucuucuaacc

SEQ ID NO: 542467 - RNA, 19 nt, Human
cguggccuccuagccucaa

SEQ ID NO: 542468 - RNA, 18 nt, Human
cuccccgcugcucccucc

SEQ ID NO: 542469 - RNA, 24 nt, Human
cuccccgcugcucccucccuuaau

SEQ ID NO: 542470 - RNA, 21 nt, Human
cuccccuuuccucuucuaacc

SEQ ID NO: 542471 - RNA, 26 nt, Human
cuccuagccucaacacccucuugguc

SEQ ID NO: 542472 - RNA, 18 nt, Human
cugcaagcuccccgcugc

SEQ ID NO: 542473 - RNA, 20 nt, Human
cuggaaagggauucagaagc

SEQ ID NO: 542474 - RNA, 22 nt, Human
cuguacccucccaauuucuuuu

SEQ ID NO: 542475 - RNA, 24 nt, Human
cuucuaaccaugcucugaauugcc

SEQ ID NO: 542476 - RNA, 27 nt, Human
gagaauaguaaaggauugccgguaccc

SEQ ID NO: 542477 - RNA, 19 nt, Human
gauagaguggauucuagaa

SEQ ID NO: 542478 - RNA, 22 nt, Human
gcaaacucucuaccagacagaa

SEQ ID NO: 542479 - RNA, 21 nt, Human
gcccauacuuaauucuagaca

SEQ ID NO: 542480 - RNA, 22 nt, Human
gccuccuagccucaacacccuc

SEQ ID NO: 542481 - RNA, 21 nt, Human
ggaaagggauucagaagccag

SEQ ID NO: 542482 - RNA, 19 nt, Human
gguuugauuccuuucuccu

SEQ ID NO: 542483 - RNA, 18 nt, Human
gugaagcagaaguuuccc

SEQ ID NO: 542484 - RNA, 21 nt, Human
uaccauccuaugccaccacuu

SEQ ID NO: 542485 - RNA, 19 nt, Human
uagcacugcaggagcugag

SEQ ID NO: 542486 - RNA, 18 nt, Human
uaguaaaggauugcccuc

SEQ ID NO: 542487 - RNA, 21 nt, Human
uaguaaaggauugcccucucg

SEQ ID NO: 542488 - RNA, 24 nt, Human
uaucaaaguaacucaauucagaca

SEQ ID NO: 542489 - RNA, 23 nt, Human
ucacugcaagcuccccgcugcuc

SEQ ID NO: 542490 - RNA, 19 nt, Human
ucagaagccaguuuaugcc

SEQ ID NO: 542491 - RNA, 22 nt, Human
ucgcucuaacgcuucuucccau

SEQ ID NO: 542492 - RNA, 28 nt, Human
ucguggccuccuagccucaacacccucu

SEQ ID NO: 542493 - RNA, 20 nt, Human
ucuaacgcuucuucccaucu

SEQ ID NO: 542494 - RNA, 26 nt, Human
ucuacccuaccauccuaugccaccac

SEQ ID NO: 542495 - RNA, 22 nt, Human
ucuagaauccaucccauauuuc

SEQ ID NO: 542496 - RNA, 19 nt, Human
ucucagcucuagaagugaa

SEQ ID NO: 542497 - RNA, 23 nt, Human
ucuccagcuuugagacuccccuu

SEQ ID NO: 542498 - RNA, 24 nt, Human
ucucuaccagacagaaacaaggau

SEQ ID NO: 542499 - RNA, 25 nt, Human
ucugugguuugauuccuuucuccug

SEQ ID NO: 542500 - RNA, 25 nt, Human
ucuucuaaccaugcucugaauugcc

SEQ ID NO: 542501 - RNA, 23 nt, Human
ucuuuuuucccucccaaauuucu

SEQ ID NO: 542502 - RNA, 21 nt, Human
ugcauaaagauccaugcauga

SEQ ID NO: 542503 - RNA, 25 nt, Human
ugccugacccuuuugagagaauuua

SEQ ID NO: 542504 - RNA, 24 nt, Human
ugcuuugacccugcuucucagcuc

SEQ ID NO: 542505 - RNA, 22 nt, Human
uggaaaaaaauugcauaaagau

SEQ ID NO: 542506 - RNA, 23 nt, Human
uggccuccuagccucaacacccu

SEQ ID NO: 542507 - RNA, 24 nt, Human
uggcggcaagaauucuauacagaa

SEQ ID NO: 542508 - RNA, 22 nt, Human
uucuagaaguauggacagagau

SEQ ID NO: 542509 - RNA, 22 nt, Human
uugcuccuaaggcuagaccugg

SEQ ID NO: 542510 - RNA, 22 nt, Human
uuugacccugcuucucagcucu

SEQ ID NO: 542511 - RNA, 22 nt, Human
uuugagacuccccuuuccucuu

SEQ ID NO: 542512 - RNA, 21 nt, Human
uuugcuccuaaggcuagaccu

SEQ ID NO: 542513 - RNA, 24 nt, Human
uuuuuuuucaagguaaccaugaca

SEQ ID NO: 542514 - RNA, 25 nt, Human
uuuuuuuuuuuuuuuuuuuucaagg

SEQ ID NO: 542515 - RNA, 18 nt, Human
acccaccccuucccuccg

SEQ ID NO: 542516 - RNA, 25 nt, Human
acccugaaggggccacuguuggggg

SEQ ID NO: 542517 - RNA, 18 nt, Human
agcgagaggcugggaggg

SEQ ID NO: 542518 - RNA, 21 nt, Human
cagacccaccgacccaccccu

SEQ ID NO: 542519 - RNA, 20 nt, Human
ccgacccaccccuucccucc

SEQ ID NO: 542520 - RNA, 26 nt, Human
ccgucccacagauggggaacggaggu

SEQ ID NO: 542521 - RNA, 19 nt, Human
gccccugguccacgcccag

SEQ ID NO: 542522 - RNA, 18 nt, Human
gccuacgcagacccgcug

SEQ ID NO: 542523 - RNA, 19 nt, Human
ggagcgagaggcugggagg

SEQ ID NO: 542524 - RNA, 20 nt, Human
guggcugccacccugaaggg

SEQ ID NO: 542525 - RNA, 18 nt, Human
ugccuuggggccucacug

SEQ ID NO: 542526 - RNA, 19 nt, Human
uggggccucacugaagggu

SEQ ID NO: 542527 - RNA, 23 nt, Human
uguccaugccccugguccacgcc

SEQ ID NO: 542528 - RNA, 20 nt, Human
uuccucagagccagggucug

SEQ ID NO: 542529 - RNA, 20 nt, Human
acaagcucagaccuuccaaa

SEQ ID NO: 542530 - RNA, 18 nt, Human
acagaaaggggcagcuag

SEQ ID NO: 542531 - RNA, 21 nt, Human
caaaggagccacgccauuggc

SEQ ID NO: 542532 - RNA, 23 nt, Human
caaccacuuucuuuucacaagcu

SEQ ID NO: 542533 - RNA, 24 nt, Human
cagcuuccuccaaccucagaccaa

SEQ ID NO: 542534 - RNA, 25 nt, Human
ccauuggccuucccaaauaccuccu

SEQ ID NO: 542535 - RNA, 21 nt, Human
ccuccaaccucagaccaacca

SEQ ID NO: 542536 - RNA, 20 nt, Human
cuccaaccucagaccaaccu

SEQ ID NO: 542537 - RNA, 20 nt, Human
cuuccaauuuccaccacucc

SEQ ID NO: 542538 - RNA, 18 nt, Human
cuucccaaauaccuccug

SEQ ID NO: 542539 - RNA, 21 nt, Human
ggagccacgccauuggccuuc

SEQ ID NO: 542540 - RNA, 23 nt, Human
uaaauaccaacuuucacuauuac

SEQ ID NO: 542541 - RNA, 25 nt, Human
ucaaaggagccacgccauuggccuu

SEQ ID NO: 542542 - RNA, 19 nt, Human
uccaccacucccaaccguc

SEQ ID NO: 542543 - RNA, 19 nt, Human
uccauucagcuuccuccaa

SEQ ID NO: 542544 - RNA, 23 nt, Human
ucccaaauaccuccugguauccu

SEQ ID NO: 542545 - RNA, 22 nt, Human
ugguauccuuccaauuuccacc

SEQ ID NO: 542546 - RNA, 20 nt, Human
uucagcuuccuccaaccuca

SEQ ID NO: 542547 - RNA, 18 nt, Human
uuccaccacucccaaccg

SEQ ID NO: 542548 - RNA, 18 nt, Human
aaagagggaugggcggcg

SEQ ID NO: 542549 - RNA, 21 nt, Human
aagaaccuuucccaaauccac

SEQ ID NO: 542550 - RNA, 25 nt, Human
aagaguccucccgccugcaacuucc

SEQ ID NO: 542551 - RNA, 18 nt, Human
acaaagagggaugggcgg

SEQ ID NO: 542552 - RNA, 21 nt, Human
accagcuccgcggcuuuccaa

SEQ ID NO: 542553 - RNA, 20 nt, Human
caaaauaacuaauaccaaau

SEQ ID NO: 542554 - RNA, 23 nt, Human
caaaauaacuaauaccaaauaua

SEQ ID NO: 542555 - RNA, 24 nt, Human
caacaccaacuguagccaccacca

SEQ ID NO: 542556 - RNA, 20 nt, Human
caacuucccgguaacguccc

SEQ ID NO: 542557 - RNA, 22 nt, Human
cagcuauauuaaaaaaugacac

SEQ ID NO: 542558 - RNA, 21 nt, Human
cccccaacaccaacuguagcc

SEQ ID NO: 542559 - RNA, 21 nt, Human
cgccuaagcccccaacaccaa

SEQ ID NO: 542560 - RNA, 19 nt, Human
cuaagcccccaacaccaac

SEQ ID NO: 542561 - RNA, 26 nt, Human
cuacggcuaaggagaaaccggggucc

SEQ ID NO: 542562 - RNA, 20 nt, Human
cucgccuaagcccccaacac

SEQ ID NO: 542563 - RNA, 22 nt, Human
cuuaagaaccuuucccaaaucc

SEQ ID NO: 542564 - RNA, 19 nt, Human
gaacucaaaauaacuaaua

SEQ ID NO: 542565 - RNA, 24 nt, Human
gcagaacuuauuucaucugugcuu

SEQ ID NO: 542566 - RNA, 21 nt, Human
gccuaagcccccaacaccaac

SEQ ID NO: 542567 - RNA, 23 nt, Human
gccuaagcccccaacaccaacug

SEQ ID NO: 542568 - RNA, 24 nt, Human
uaaagacaacaaaggaugucagaa

SEQ ID NO: 542569 - RNA, 26 nt, Human
uaagcccccaacaccaacuguagccu

SEQ ID NO: 542570 - RNA, 21 nt, Human
uaaguugaaaagaacucaaaa

SEQ ID NO: 542571 - RNA, 19 nt, Human
uaauccaugaaauuuccuu

SEQ ID NO: 542572 - RNA, 21 nt, Human
uagaaauaacuguauacagug

SEQ ID NO: 542573 - RNA, 21 nt, Human
uagaauucaaaaaagcugcuu

SEQ ID NO: 542574 - RNA, 20 nt, Human
ugaaaagaacucaaaauaac

SEQ ID NO: 542575 - RNA, 25 nt, Human
ugacacaaauccaaaacaagaugca

SEQ ID NO: 542576 - RNA, 19 nt, Human
uggggaagaguccucccgc

SEQ ID NO: 542577 - RNA, 21 nt, Human
uuagacagaagcaugcaaaua

SEQ ID NO: 542578 - RNA, 22 nt, Human
uucccaaauccacuaguuacac

SEQ ID NO: 542579 - RNA, 23 nt, Human
aaacaaaaaaggggguauauuaa

SEQ ID NO: 542580 - RNA, 23 nt, Human
aaccacacacacacacacacaca

SEQ ID NO: 542581 - RNA, 19 nt, Human
aaccucugcauuuuucuuu

SEQ ID NO: 542582 - RNA, 26 nt, Human
aagccauauauauauauauauaugua

SEQ ID NO: 542583 - RNA, 23 nt, Human
aagucacaaacaaaaaagggggu

SEQ ID NO: 542584 - RNA, 20 nt, Human
aauaaccucugcauuuuucu

SEQ ID NO: 542585 - RNA, 25 nt, Human
acacacacacacacacacacacgac

SEQ ID NO: 542586 - RNA, 24 nt, Human
accacacacacacacacacacaca

SEQ ID NO: 542587 - RNA, 21 nt, Human
agaaaacagaauaaauggcuu

SEQ ID NO: 542588 - RNA, 19 nt, Human
aggaucagugauugagaca

SEQ ID NO: 542589 - RNA, 18 nt, Human
aggcaaagccauauauau

SEQ ID NO: 542590 - RNA, 19 nt, Human
aggcaaagccauauauaua

SEQ ID NO: 542591 - RNA, 24 nt, Human
aggcggcugaggcgguggcggugg

SEQ ID NO: 542592 - RNA, 20 nt, Human
aggcgguggcgguggaggcg

SEQ ID NO: 542593 - RNA, 24 nt, Human
aggcgguggcgguggaggcggcgg

SEQ ID NO: 542594 - RNA, 18 nt, Human
aucacaccacucccggca

SEQ ID NO: 542595 - RNA, 19 nt, Human
auggcaaugcaaacagcaa

SEQ ID NO: 542596 - RNA, 21 nt, Human
auggcaaugcaaacagcaauc

SEQ ID NO: 542597 - RNA, 26 nt, Human
caaaauggcaaugcaaacagcaaucc

SEQ ID NO: 542598 - RNA, 20 nt, Human
cacacacacacacacacaca

SEQ ID NO: 542599 - RNA, 20 nt, Human
cacacacacacacacacaca

SEQ ID NO: 542600 - RNA, 22 nt, Human
cacacacacacacacacacaca

SEQ ID NO: 542601 - RNA, 26 nt, Human
cacacacacacacacacacacacacg

SEQ ID NO: 542602 - RNA, 25 nt, Human
cacacacacgacauaaauuuagucc

SEQ ID NO: 542603 - RNA, 21 nt, Human
cacacgacauaaauuuagucc

SEQ ID NO: 542604 - RNA, 19 nt, Human
cauauauauauauauauau

SEQ ID NO: 542605 - RNA, 22 nt, Human
caucugaagaagcacuccagcu

SEQ ID NO: 542606 - RNA, 19 nt, Human
ccacacacacacacacaca

SEQ ID NO: 542607 - RNA, 21 nt, Human
ccacacacacacacacacaca

SEQ ID NO: 542608 - RNA, 26 nt, Human
cuaaaauaagcuuagacuuccaaguc

SEQ ID NO: 542609 - RNA, 19 nt, Human
cugcauuuuucuuuuacac

SEQ ID NO: 542610 - RNA, 22 nt, Human
cuucuguacggcuccuucuaaa

SEQ ID NO: 542611 - RNA, 22 nt, Human
gaggcggcugaggcgguggcgg

SEQ ID NO: 542612 - RNA, 22 nt, Human
gcaaugcaaacagcaauccuac

SEQ ID NO: 542613 - RNA, 31 nt, Human
gguaaccacacacacacacacacacacacag

SEQ ID NO: 542614 - RNA, 18 nt, Human
ggugguacauuuauugug

SEQ ID NO: 542615 - RNA, 18 nt, Human
uaaaaaauggguaaccac

SEQ ID NO: 542616 - RNA, 21 nt, Human
uaucccagaaaacagaauaaa

SEQ ID NO: 542617 - RNA, 28 nt, Human
ucagugauugagacaaugaccggggucc

SEQ ID NO: 542618 - RNA, 22 nt, Human
ucaguuaaagcaacaccuuggc

SEQ ID NO: 542619 - RNA, 25 nt, Human
uccucaguuaaagcaacaccuuggc

SEQ ID NO: 542620 - RNA, 20 nt, Human
ugaaugcagagaauaaauac

SEQ ID NO: 542621 - RNA, 18 nt, Human
ugaggcgguggcggugga

SEQ ID NO: 542622 - RNA, 18 nt, Human
uuaaagcaacaccuuggc

SEQ ID NO: 542623 - RNA, 24 nt, Human
uugaaggaaaaggcagaggcaugu

SEQ ID NO: 542624 - RNA, 23 nt, Human
uuuacauuaucccagaaaacaga

SEQ ID NO: 542625 - RNA, 23 nt, Human
uuuuucuucuguacggcuccuuc

SEQ ID NO: 542626 - RNA, 19 nt, Human
aaaguucaucuccccugcc

SEQ ID NO: 542627 - RNA, 20 nt, Human
aaaguucaucuccccugccc

SEQ ID NO: 542628 - RNA, 21 nt, Human
ccaaaaaacugauagcaugug

SEQ ID NO: 542629 - RNA, 21 nt, Human
ccccaaaaaacugauagcaug

SEQ ID NO: 542630 - RNA, 24 nt, Human
cugccccaaaaaacugauagcaug

SEQ ID NO: 542631 - RNA, 23 nt, Human
uaucagaaaaauccuggucuuag

SEQ ID NO: 542632 - RNA, 24 nt, Human
aaccacagaaauuaaucugggucu

SEQ ID NO: 542633 - RNA, 22 nt, Human
aacucgaaagaauguuccacaa

SEQ ID NO: 542634 - RNA, 25 nt, Human
acagugaaaagagcacacacuagua

SEQ ID NO: 542635 - RNA, 23 nt, Human
acucgaaagaauguuccacaaag

SEQ ID NO: 542636 - RNA, 22 nt, Human
agacuuauucuguaacaaccac

SEQ ID NO: 542637 - RNA, 19 nt, Human
agcagcuagcauuuuaaau

SEQ ID NO: 542638 - RNA, 18 nt, Human
agugacggcggcggcggg

SEQ ID NO: 542639 - RNA, 22 nt, Human
agugacggcggcggcgguggca

SEQ ID NO: 542640 - RNA, 21 nt, Human
auuagacuuauucuguaacaa

SEQ ID NO: 542641 - RNA, 19 nt, Human
auuucauucggguuaggaa

SEQ ID NO: 542642 - RNA, 21 nt, Human
auuucauucggguuaggaaua

SEQ ID NO: 542643 - RNA, 19 nt, Human
ccacaaaacgaacauuuca

SEQ ID NO: 542644 - RNA, 19 nt, Human
ccacagaaauuaaucuggg

SEQ ID NO: 542645 - RNA, 19 nt, Human
cccaugcacagaauaaggc

SEQ ID NO: 542646 - RNA, 23 nt, Human
cgggagccggagccaggacgcag

SEQ ID NO: 542647 - RNA, 26 nt, Human
cucuacucagaaagccggcacucaaa

SEQ ID NO: 542648 - RNA, 22 nt, Human
gagcacacacuaguagaagcac

SEQ ID NO: 542649 - RNA, 19 nt, Human
gagggcgcgggagccggag

SEQ ID NO: 542650 - RNA, 20 nt, Human
gcagugacggcggcggcggu

SEQ ID NO: 542651 - RNA, 25 nt, Human
ggacgcagugacggcggcggcggug

SEQ ID NO: 542652 - RNA, 22 nt, Human
gugacggcggcggcgguggcuu

SEQ ID NO: 542653 - RNA, 24 nt, Human
uaacucuacucagaaagccggcac

SEQ ID NO: 542654 - RNA, 21 nt, Human
uagaagcacacaguuuagaga

SEQ ID NO: 542655 - RNA, 20 nt, Human
ucaacaaaacagugcagaaa

SEQ ID NO: 542656 - RNA, 23 nt, Human
uccaaacuaaaagcugcagaaaa

SEQ ID NO: 542657 - RNA, 24 nt, Human
uccaaacuaaaagcugcagaaaau

SEQ ID NO: 542658 - RNA, 21 nt, Human
uccacaaaguucaacaaaaca

SEQ ID NO: 542659 - RNA, 21 nt, Human
ugaaaagagcacacacuagua

SEQ ID NO: 542660 - RNA, 24 nt, Human
ugaaaagagcacacacuaguagaa

SEQ ID NO: 542661 - RNA, 27 nt, Human
ugaaaagagcacacacuaguagaagca

SEQ ID NO: 542662 - RNA, 21 nt, Human
ugagcagcuagcauuuuaaau

SEQ ID NO: 542663 - RNA, 20 nt, Human
uguaguaucucaucuuuuug

SEQ ID NO: 542664 - RNA, 20 nt, Human
uucaacaaaacagugcagaa

SEQ ID NO: 542665 - RNA, 20 nt, Human
uugaaaaauaauccaaaaaa

SEQ ID NO: 542666 - RNA, 24 nt, Human
uugauuagacuuauucuguaacaa

SEQ ID NO: 542667 - RNA, 18 nt, Human
uuuuccacaaaacgaaca

SEQ ID NO: 542668 - RNA, 19 nt, Human
aaguggccccaaggaagcg

SEQ ID NO: 542669 - RNA, 22 nt, Human
acagccucccgggaugucaaaa

SEQ ID NO: 542670 - RNA, 21 nt, Human
agaaggaaguggccccaagga

SEQ ID NO: 542671 - RNA, 27 nt, Human
ccaacccagugucgcuuaaacagccuu

SEQ ID NO: 542672 - RNA, 18 nt, Human
ccggcggcacagccuccc

SEQ ID NO: 542673 - RNA, 20 nt, Human
cguugcuaggaaaaaaagaa

SEQ ID NO: 542674 - RNA, 23 nt, Human
cguugcuaggaaaaaaagaagga

SEQ ID NO: 542675 - RNA, 22 nt, Human
cucaggccggcggcacagccuc

SEQ ID NO: 542676 - RNA, 21 nt, Human
gccaaguguuuccaacccagu

SEQ ID NO: 542677 - RNA, 20 nt, Human
gcuuaaacagccuuggccau

SEQ ID NO: 542678 - RNA, 21 nt, Human
ggaggccgcgaaacucugggc

SEQ ID NO: 542679 - RNA, 19 nt, Human
ucaaaaacgcuacccgccg

SEQ ID NO: 542680 - RNA, 22 nt, Human
ucgcuuaaacagccuuggccau

SEQ ID NO: 542681 - RNA, 21 nt, Human
aaaguagcuauuaccaaugca

SEQ ID NO: 542682 - RNA, 24 nt, Human
aaauggacccagaauuggaagggc

SEQ ID NO: 542683 - RNA, 21 nt, Human
aagaagcucagaaaaaacuaa

SEQ ID NO: 542684 - RNA, 18 nt, Human
acaguaugcacaccacag

SEQ ID NO: 542685 - RNA, 23 nt, Human
acaucaaaggcugcaaagaagcu

SEQ ID NO: 542686 - RNA, 21 nt, Human
accaagucuuucuagauaauc

SEQ ID NO: 542687 - RNA, 24 nt, Human
acucugaaaacacggggccccagu

SEQ ID NO: 542688 - RNA, 23 nt, Human
agucauaugaaauguugucuugg

SEQ ID NO: 542689 - RNA, 21 nt, Human
caaauggacccagaauuggaa

SEQ ID NO: 542690 - RNA, 20 nt, Human
caaugcauacauacaguaca

SEQ ID NO: 542691 - RNA, 21 nt, Human
cacaccacagccaugucagug

SEQ ID NO: 542692 - RNA, 22 nt, Human
cacagauccucuugugcauuca

SEQ ID NO: 542693 - RNA, 24 nt, Human
cagguuuaaguaugaaucaaagca

SEQ ID NO: 542694 - RNA, 22 nt, Human
cauuccugcuuucagguuuaag

SEQ ID NO: 542695 - RNA, 23 nt, Human
ccacaggcaaacugcuuugcaca

SEQ ID NO: 542696 - RNA, 20 nt, Human
cuaaaaggaacugaccauca

SEQ ID NO: 542697 - RNA, 19 nt, Human
gcaauacacaggaguucau

SEQ ID NO: 542698 - RNA, 22 nt, Human
gcauucagcuuucuuaaaaaca

SEQ ID NO: 542699 - RNA, 19 nt, Human
ggccacggcaaugaauggc

SEQ ID NO: 542700 - RNA, 21 nt, Human
uaaaaacacaucaaaggcugc

SEQ ID NO: 542701 - RNA, 24 nt, Human
uaaauugaaggacagguggaauac

SEQ ID NO: 542702 - RNA, 27 nt, Human
uaaguaugaaucaaagcauauuuuaau

SEQ ID NO: 542703 - RNA, 21 nt, Human
uacacaguaugcacaccacag

SEQ ID NO: 542704 - RNA, 22 nt, Human
uaccaagucuuucuagauaauc

SEQ ID NO: 542705 - RNA, 18 nt, Human
uagauggcuguuuuuaau

SEQ ID NO: 542706 - RNA, 26 nt, Human
uauaguacaugcauuauagucauaug

SEQ ID NO: 542707 - RNA, 19 nt, Human
uaugcacaccacagccaug

SEQ ID NO: 542708 - RNA, 23 nt, Human
uauguaacuacacaguaugcaca

SEQ ID NO: 542709 - RNA, 21 nt, Human
uaugugaggaacuugccaacu

SEQ ID NO: 542710 - RNA, 21 nt, Human
ucaaaggcugcaaagaagcuc

SEQ ID NO: 542711 - RNA, 22 nt, Human
ucacaucuuucaaagccagauc

SEQ ID NO: 542712 - RNA, 25 nt, Human
ucagaaaaaacuaaauugaaggaca

SEQ ID NO: 542713 - RNA, 18 nt, Human
uccacaggcaaacugcuu

SEQ ID NO: 542714 - RNA, 20 nt, Human
uccacaggcaaacugcuuug

SEQ ID NO: 542715 - RNA, 20 nt, Human
ucugcaauuuagaauacacu

SEQ ID NO: 542716 - RNA, 18 nt, Human
ugcauacauacaguacac

SEQ ID NO: 542717 - RNA, 19 nt, Human
ugucuuggugcuuucuucu

SEQ ID NO: 542718 - RNA, 23 nt, Human
ugugauguguucugcaauuugga

SEQ ID NO: 542719 - RNA, 22 nt, Human
ugugugauguguucugcaauuu

SEQ ID NO: 542720 - RNA, 24 nt, Human
uuacacaggucaucuuauccacag

SEQ ID NO: 542721 - RNA, 18 nt, Human
uuucuagauaaucaaggg

SEQ ID NO: 542722 - RNA, 21 nt, Human
uuuuuuuuuuuugaaacagcc

SEQ ID NO: 542723 - RNA, 18 nt, Human
uuuuuuuuuuuuuuuuug

SEQ ID NO: 542724 - RNA, 23 nt, Human
cagcugagaacuuccccucucag

SEQ ID NO: 542725 - RNA, 21 nt, Human
caggucccccgcgugccccuu

SEQ ID NO: 542726 - RNA, 22 nt, Human
ccaccgcgccgccugccccgcc

SEQ ID NO: 542727 - RNA, 19 nt, Human
ccagcuucagcucagcuga

SEQ ID NO: 542728 - RNA, 24 nt, Human
ccccgccccucacuagcuuugcag

SEQ ID NO: 542729 - RNA, 20 nt, Human
cccgcccccaccgcgccgcc

SEQ ID NO: 542730 - RNA, 24 nt, Human
ccgcacucguaggccuucaucacc

SEQ ID NO: 542731 - RNA, 19 nt, Human
ccgcgccgccugccccgcc

SEQ ID NO: 542732 - RNA, 21 nt, Human
ccgcgccgccugccccgcccc

SEQ ID NO: 542733 - RNA, 18 nt, Human
ccgggcucggcccgcccc

SEQ ID NO: 542734 - RNA, 21 nt, Human
cgcccccaccgcgccgccugc

SEQ ID NO: 542735 - RNA, 19 nt, Human
cuucaggccgcgccgcacu

SEQ ID NO: 542736 - RNA, 20 nt, Human
gcucaucuggccuccgggcu

SEQ ID NO: 542737 - RNA, 21 nt, Human
ucaggugcaaagggauggcag

SEQ ID NO: 542738 - RNA, 19 nt, Human
uccgcucaucuggccuccg

SEQ ID NO: 542739 - RNA, 19 nt, Human
ugccccgccccucacuagc

SEQ ID NO: 542740 - RNA, 25 nt, Human
uggccuccgggcucggcccgccccc

SEQ ID NO: 542741 - RNA, 18 nt, Human
uuuuuuuuuuuuuuucug

SEQ ID NO: 542742 - RNA, 22 nt, Human
uuuuuuuuuuuuuuuuuuuucu

SEQ ID NO: 542743 - RNA, 21 nt, Human
aagugcugggaagggcugagc

SEQ ID NO: 542744 - RNA, 21 nt, Human
agacgcugaggccgaggcgcu

SEQ ID NO: 542745 - RNA, 22 nt, Human
aggcagggaggugccaggccug

SEQ ID NO: 542746 - RNA, 19 nt, Human
aggccagggagaagcgggu

SEQ ID NO: 542747 - RNA, 18 nt, Human
aggcccuagaggcggggc

SEQ ID NO: 542748 - RNA, 20 nt, Human
cacaggacaggaagcccagg

SEQ ID NO: 542749 - RNA, 21 nt, Human
caggaagcccaggaugguuag

SEQ ID NO: 542750 - RNA, 19 nt, Human
caggacaggaagcccagga

SEQ ID NO: 542751 - RNA, 20 nt, Human
caggucgcaaccgccgccga

SEQ ID NO: 542752 - RNA, 20 nt, Human
ccccaggcccuagaggcggg

SEQ ID NO: 542753 - RNA, 18 nt, Human
ccccugguaaauagaggu

SEQ ID NO: 542754 - RNA, 24 nt, Human
cccuagaggcggggccuugggaac

SEQ ID NO: 542755 - RNA, 21 nt, Human
ccuagaggcggggccuuggga

SEQ ID NO: 542756 - RNA, 21 nt, Human
ccucacucgcgcugcuucaga

SEQ ID NO: 542757 - RNA, 22 nt, Human
ccucacucgcgcugcuucagaa

SEQ ID NO: 542758 - RNA, 24 nt, Human
cgcaaccgccgccgauuggccucc

SEQ ID NO: 542759 - RNA, 20 nt, Human
cgcaccugucugcuccggau

SEQ ID NO: 542760 - RNA, 21 nt, Human
cgccuuccggaccucgcaccu

SEQ ID NO: 542761 - RNA, 24 nt, Human
cgcucugcccaguuucggcccaau

SEQ ID NO: 542762 - RNA, 20 nt, Human
cggggguuggcugcggggcc

SEQ ID NO: 542763 - RNA, 22 nt, Human
cgucgccgcugccaccggugcc

SEQ ID NO: 542764 - RNA, 24 nt, Human
cucgcgccucacucgcgcugcuuc

SEQ ID NO: 542765 - RNA, 21 nt, Human
gaagaugucacucgagccucc

SEQ ID NO: 542766 - RNA, 19 nt, Human
gaagugcugggaagggcug

SEQ ID NO: 542767 - RNA, 21 nt, Human
gagcgguaggggccacaaaag

SEQ ID NO: 542768 - RNA, 26 nt, Human
gccaccuggagggccacuccuugguu

SEQ ID NO: 542769 - RNA, 19 nt, Human
gccggcgcgcucucaaucc

SEQ ID NO: 542770 - RNA, 24 nt, Human
gcgagcgggcacgaaugcucccuc

SEQ ID NO: 542771 - RNA, 18 nt, Human
ggacccggggcugggcug

SEQ ID NO: 542772 - RNA, 23 nt, Human
ggagggccacuccuugguuccug

SEQ ID NO: 542773 - RNA, 22 nt, Human
ggcaagcgggcugcacgccccu

SEQ ID NO: 542774 - RNA, 25 nt, Human
ggccuugggaaccgggacccggggc

SEQ ID NO: 542775 - RNA, 24 nt, Human
ggcugagcgguaggggccacaaaa

SEQ ID NO: 542776 - RNA, 19 nt, Human
ggcugggcugccgguucgc

SEQ ID NO: 542777 - RNA, 22 nt, Human
gggccuugggaaccgggacccg

SEQ ID NO: 542778 - RNA, 23 nt, Human
ggggaccucgcugcuaacucuug

SEQ ID NO: 542779 - RNA, 20 nt, Human
ggggagaaggaggcucggga

SEQ ID NO: 542780 - RNA, 20 nt, Human
guucgcgccgaggggucuuc

SEQ ID NO: 542781 - RNA, 20 nt, Human
uaaaaagggcauauuuagca

SEQ ID NO: 542782 - RNA, 21 nt, Human
uccucggggguuggcugcggg

SEQ ID NO: 542783 - RNA, 21 nt, Human
ucgcggcccgggccggcgcgc

SEQ ID NO: 542784 - RNA, 18 nt, Human
ugcugggaagggcugagc

SEQ ID NO: 542785 - RNA, 20 nt, Human
uggcucaggacacaaggcag

SEQ ID NO: 542786 - RNA, 24 nt, Human
ugggaaccgggacccggggcuggg

SEQ ID NO: 542787 - RNA, 19 nt, Human
ugggaagggcugagcggua

SEQ ID NO: 542788 - RNA, 22 nt, Human
ugggagaagugcugggaagggc

SEQ ID NO: 542789 - RNA, 19 nt, Human
ugguuagugcaacucggga

SEQ ID NO: 542790 - RNA, 19 nt, Human
uuggccgagaccugcccca

SEQ ID NO: 542791 - RNA, 21 nt, Human
uuuuuuuuuuuugagagcaca

SEQ ID NO: 542792 - RNA, 23 nt, Human
uuuuuuuuuuuuuuuuuuuuggg

SEQ ID NO: 542793 - RNA, 18 nt, Human
agacucacaaaauaggua

SEQ ID NO: 542794 - RNA, 20 nt, Human
aggaagucaccguggguccc

SEQ ID NO: 542795 - RNA, 19 nt, Human
caggguggggcagcccacc

SEQ ID NO: 542796 - RNA, 18 nt, Human
ccccucagcuccagcgcc

SEQ ID NO: 542797 - RNA, 26 nt, Human
ccccucaugagcagacagacccgggu

SEQ ID NO: 542798 - RNA, 20 nt, Human
ccgcacugccccucagcucc

SEQ ID NO: 542799 - RNA, 21 nt, Human
ccgcacugccccucagcucca

SEQ ID NO: 542800 - RNA, 19 nt, Human
ccguggguccccucuuccu

SEQ ID NO: 542801 - RNA, 18 nt, Human
cggcucugagcacugccc

SEQ ID NO: 542802 - RNA, 18 nt, Human
cgugcaacacacucgugc

SEQ ID NO: 542803 - RNA, 20 nt, Human
gagcgcggggccugggcggc

SEQ ID NO: 542804 - RNA, 21 nt, Human
gcacugccccucagcuccagc

SEQ ID NO: 542805 - RNA, 23 nt, Human
gcauauuugcagggacuagcgag

SEQ ID NO: 542806 - RNA, 18 nt, Human
gcggcucugagcacugcc

SEQ ID NO: 542807 - RNA, 23 nt, Human
gggcagcguggagaggcaggagu

SEQ ID NO: 542808 - RNA, 19 nt, Human
uagaacuccgcagccccuc

SEQ ID NO: 542809 - RNA, 19 nt, Human
uaggagccuuccuggggca

SEQ ID NO: 542810 - RNA, 23 nt, Human
uccgcagccccucaugagcagac

SEQ ID NO: 542811 - RNA, 18 nt, Human
uccuaggagccuuccugg

SEQ ID NO: 542812 - RNA, 21 nt, Human
ugagcagacagacccggguca

SEQ ID NO: 542813 - RNA, 18 nt, Human
ugaggagcgcggggccug

SEQ ID NO: 542814 - RNA, 23 nt, Human
ugaggagcgcggggccugggcgg

SEQ ID NO: 542815 - RNA, 19 nt, Human
ugcagggacuagcgaguca

SEQ ID NO: 542816 - RNA, 21 nt, Human
ugcaguaguagggggguuugc

SEQ ID NO: 542817 - RNA, 18 nt, Human
agcaguggcgggugggcg

SEQ ID NO: 542818 - RNA, 22 nt, Human
aggcgcccccacacuccugucc

SEQ ID NO: 542819 - RNA, 21 nt, Human
caaggcgcccccacacuccuu

SEQ ID NO: 542820 - RNA, 21 nt, Human
caccaccggccucuugggccc

SEQ ID NO: 542821 - RNA, 21 nt, Human
caccucccuccucuguuccca

SEQ ID NO: 542822 - RNA, 18 nt, Human
cagcgccgccccgccccg

SEQ ID NO: 542823 - RNA, 22 nt, Human
cagcuccuugcccuccccgucc

SEQ ID NO: 542824 - RNA, 23 nt, Human
caggagccuccgggaacucuggc

SEQ ID NO: 542825 - RNA, 26 nt, Human
ccaccugucugucugcucaccaccuc

SEQ ID NO: 542826 - RNA, 24 nt, Human
cccagagagcugagagccccccac

SEQ ID NO: 542827 - RNA, 18 nt, Human
cccagcuccuugcccucc

SEQ ID NO: 542828 - RNA, 21 nt, Human
cccagcuccuugcccuccccg

SEQ ID NO: 542829 - RNA, 19 nt, Human
ccccacacuccuguccucu

SEQ ID NO: 542830 - RNA, 24 nt, Human
ccccaccccagcuccuugcccucc

SEQ ID NO: 542831 - RNA, 23 nt, Human
ccccagagagcugagagcccccc

SEQ ID NO: 542832 - RNA, 26 nt, Human
ccccagagagcugagagccccccacc

SEQ ID NO: 542833 - RNA, 25 nt, Human
cccccacacuccuguccucucagcc

SEQ ID NO: 542834 - RNA, 21 nt, Human
cccccagugugggggccacag

SEQ ID NO: 542835 - RNA, 21 nt, Human
ccccccaccccagcuccuugc

SEQ ID NO: 542836 - RNA, 20 nt, Human
cccccggacggcccugacuu

SEQ ID NO: 542837 - RNA, 20 nt, Human
ccccgccccgggcgcggccc

SEQ ID NO: 542838 - RNA, 20 nt, Human
ccccgggcgcggcccggccc

SEQ ID NO: 542839 - RNA, 22 nt, Human
cccggcccggcgcgaccccggc

SEQ ID NO: 542840 - RNA, 22 nt, Human
cccugugucucauucaccccca

SEQ ID NO: 542841 - RNA, 18 nt, Human
ccgccccgccccgggcgc

SEQ ID NO: 542842 - RNA, 21 nt, Human
ccgcgcccccggacggcccug

SEQ ID NO: 542843 - RNA, 25 nt, Human
ccuccccgucccagaguggcugagc

SEQ ID NO: 542844 - RNA, 20 nt, Human
ccuccgagcggggacugcag

SEQ ID NO: 542845 - RNA, 18 nt, Human
ccuugguggcugcugggg

SEQ ID NO: 542846 - RNA, 23 nt, Human
cgccccgccccgggcgcggcccg

SEQ ID NO: 542847 - RNA, 18 nt, Human
cggcccggcccggcgcga

SEQ ID NO: 542848 - RNA, 22 nt, Human
cggcccgggggcggcucagcag

SEQ ID NO: 542849 - RNA, 22 nt, Human
cggccgcgcccccggacggccc

SEQ ID NO: 542850 - RNA, 19 nt, Human
cggccggcaggcccgcuuc

SEQ ID NO: 542851 - RNA, 24 nt, Human
cggccucuugggccccagagagcu

SEQ ID NO: 542852 - RNA, 20 nt, Human
cggcucagcaggcccggcgg

SEQ ID NO: 542853 - RNA, 19 nt, Human
gaccccggcccgggggcgg

SEQ ID NO: 542854 - RNA, 22 nt, Human
gagcugagagccccccacccca

SEQ ID NO: 542855 - RNA, 19 nt, Human
gaguggcugagcccuccac

SEQ ID NO: 542856 - RNA, 21 nt, Human
gccaaggcgcccccacacucc

SEQ ID NO: 542857 - RNA, 20 nt, Human
gccgcgcccccggacggccc

SEQ ID NO: 542858 - RNA, 21 nt, Human
gccgcgcccccggacggcccu

SEQ ID NO: 542859 - RNA, 19 nt, Human
gccggccgcgcccccggac

SEQ ID NO: 542860 - RNA, 19 nt, Human
gcgcggcgggggcugcggg

SEQ ID NO: 542861 - RNA, 20 nt, Human
gcguguccccuuccccuggg

SEQ ID NO: 542862 - RNA, 23 nt, Human
gcugagagccccccaccccagcu

SEQ ID NO: 542863 - RNA, 18 nt, Human
ggacugcaguggcucugu

SEQ ID NO: 542864 - RNA, 21 nt, Human
gggaacucuggcagacuuucg

SEQ ID NO: 542865 - RNA, 21 nt, Human
gggcgcagguggcggcagggg

SEQ ID NO: 542866 - RNA, 18 nt, Human
gggcgcggcccggcccgg

SEQ ID NO: 542867 - RNA, 21 nt, Human
gggcuggagcagccagucuuc

SEQ ID NO: 542868 - RNA, 19 nt, Human
guggcugcuggggaagccc

SEQ ID NO: 542869 - RNA, 23 nt, Human
gugggggccacaggccuuggugg

SEQ ID NO: 542870 - RNA, 18 nt, Human
uagaagggucuuugcucc

SEQ ID NO: 542871 - RNA, 18 nt, Human
ucagcaggcccggcgggg

SEQ ID NO: 542872 - RNA, 27 nt, Human
ucauucacccccagggcuuguggaauc

SEQ ID NO: 542873 - RNA, 20 nt, Human
ucccagaugggcgugucccc

SEQ ID NO: 542874 - RNA, 19 nt, Human
ucccugagggcaggcccug

SEQ ID NO: 542875 - RNA, 21 nt, Human
uccucuguucccacuguccgc

SEQ ID NO: 542876 - RNA, 24 nt, Human
ucggccggcaggcccgcuucuucc

SEQ ID NO: 542877 - RNA, 18 nt, Human
ucucccccaguguggggg

SEQ ID NO: 542878 - RNA, 20 nt, Human
ucugucugcucaccaccucc

SEQ ID NO: 542879 - RNA, 28 nt, Human
ucuugggccccagagagcugagagcccc

SEQ ID NO: 542880 - RNA, 22 nt, Human
ugacuagaugggaacucccuga

SEQ ID NO: 542881 - RNA, 23 nt, Human
ugagagccccccaccccagcucc

SEQ ID NO: 542882 - RNA, 18 nt, Human
ugagugaagcaugugcca

SEQ ID NO: 542883 - RNA, 22 nt, Human
ugcucaccaccucccuccucug

SEQ ID NO: 542884 - RNA, 18 nt, Human
ugcuggggaagcccgggg

SEQ ID NO: 542885 - RNA, 22 nt, Human
uggcucuguguccaagcagggg

SEQ ID NO: 542886 - RNA, 18 nt, Human
ugggcaggugcugagguc

SEQ ID NO: 542887 - RNA, 19 nt, Human
ugggccccagagagcugag

SEQ ID NO: 542888 - RNA, 20 nt, Human
ugggcgcagguggcggcagg

SEQ ID NO: 542889 - RNA, 19 nt, Human
uguccccuuccccugggca

SEQ ID NO: 542890 - RNA, 21 nt, Human
ugucugcucaccaccucccuc

SEQ ID NO: 542891 - RNA, 19 nt, Human
uugguggcugcuggggaag

SEQ ID NO: 542892 - RNA, 23 nt, Human
aacuccccucccuggcucuccca

SEQ ID NO: 542893 - RNA, 22 nt, Human
acugguugguuguauaaaaaaa

SEQ ID NO: 542894 - RNA, 21 nt, Human
auucaagcucugggaccugau

SEQ ID NO: 542895 - RNA, 22 nt, Human
cacagccccaggggaugcuggg

SEQ ID NO: 542896 - RNA, 19 nt, Human
caccaugaucacagcccca

SEQ ID NO: 542897 - RNA, 20 nt, Human
cagcaacucuucagagauga

SEQ ID NO: 542898 - RNA, 21 nt, Human
ccaccaugaucacagccccag

SEQ ID NO: 542899 - RNA, 19 nt, Human
cugauggggacagucuccc

SEQ ID NO: 542900 - RNA, 26 nt, Human
cuuguuagcauucaagcucugggacc

SEQ ID NO: 542901 - RNA, 18 nt, Human
gaaacagcaacucuucag

SEQ ID NO: 542902 - RNA, 18 nt, Human
gagaaggcauucuugcug

SEQ ID NO: 542903 - RNA, 24 nt, Human
ggggagagcacacugggagaaggc

SEQ ID NO: 542904 - RNA, 24 nt, Human
guaaaguacaaaacuguuaaucua

SEQ ID NO: 542905 - RNA, 27 nt, Human
uaaaaggcuuccuuuucuguuaaguuc

SEQ ID NO: 542906 - RNA, 24 nt, Human
uaaaugagauaaaaacaguuucuu

SEQ ID NO: 542907 - RNA, 25 nt, Human
ucacagccccaggggaugcugggcu

SEQ ID NO: 542908 - RNA, 23 nt, Human
ucauccaccaugaucacagcccc

SEQ ID NO: 542909 - RNA, 19 nt, Human
uccagaaacuccccucccu

SEQ ID NO: 542910 - RNA, 24 nt, Human
uccagaaacuccccucccuggcuc

SEQ ID NO: 542911 - RNA, 27 nt, Human
ugagauaaaaacaguuucuuacaccua

SEQ ID NO: 542912 - RNA, 19 nt, Human
uggcuagaaaagaaacugg

SEQ ID NO: 542913 - RNA, 21 nt, Human
uggcuagaaaagaaacugguu

SEQ ID NO: 542914 - RNA, 23 nt, Human
uggcuagaaaagaaacugguugg

SEQ ID NO: 542915 - RNA, 19 nt, Human
ugucaguaagaaacagcaa

SEQ ID NO: 542916 - RNA, 27 nt, Human
uguuccacgcauggcuuuccucuucca

SEQ ID NO: 542917 - RNA, 24 nt, Human
uuucuguuaaguucugagacuuaa

SEQ ID NO: 542918 - RNA, 25 nt, Human
aaaaauccaagguggaguaggagac

SEQ ID NO: 542919 - RNA, 22 nt, Human
aaaaggagaagcccccucccac

SEQ ID NO: 542920 - RNA, 25 nt, Human
aaaaggagaagcccccucccacccu

SEQ ID NO: 542921 - RNA, 24 nt, Human
aaacacauuuauagugcugaauac

SEQ ID NO: 542922 - RNA, 24 nt, Human
aaacuacccuccugccagccccga

SEQ ID NO: 542923 - RNA, 18 nt, Human
aaauccaaaacuagcccc

SEQ ID NO: 542924 - RNA, 18 nt, Human
aacccuggcagugcccug

SEQ ID NO: 542925 - RNA, 20 nt, Human
aacuuaaaagcacccuggua

SEQ ID NO: 542926 - RNA, 21 nt, Human
aacuuaaaagcacccugguaa

SEQ ID NO: 542927 - RNA, 21 nt, Human
aagcugugggucagggucagu

SEQ ID NO: 542928 - RNA, 27 nt, Human
aauucauucuccuuguccuuggggccu

SEQ ID NO: 542929 - RNA, 21 nt, Human
aauuuccauucggugcaucuc

SEQ ID NO: 542930 - RNA, 18 nt, Human
acagagacguuggugacu

SEQ ID NO: 542931 - RNA, 19 nt, Human
acaggccagcagaagagga

SEQ ID NO: 542932 - RNA, 20 nt, Human
accacuugcuggaacagggc

SEQ ID NO: 542933 - RNA, 18 nt, Human
acccauauccucagcagc

SEQ ID NO: 542934 - RNA, 25 nt, Human
accccauggcucagagguagugcug

SEQ ID NO: 542935 - RNA, 23 nt, Human
acccugaguggugguccccaugg

SEQ ID NO: 542936 - RNA, 18 nt, Human
acccuggcagugcccugg

SEQ ID NO: 542937 - RNA, 18 nt, Human
acccuucaugcugcugug

SEQ ID NO: 542938 - RNA, 19 nt, Human
accugggguugggauacgc

SEQ ID NO: 542939 - RNA, 22 nt, Human
agccccucaguagcacacuccu

SEQ ID NO: 542940 - RNA, 24 nt, Human
aggagacuuuuucagccacagaca

SEQ ID NO: 542941 - RNA, 21 nt, Human
aggcacaugcuuagcagguua

SEQ ID NO: 542942 - RNA, 18 nt, Human
aggcgggggugguagggc

SEQ ID NO: 542943 - RNA, 23 nt, Human
aggcgggggugguagggcuuggg

SEQ ID NO: 542944 - RNA, 21 nt, Human
agggaaaacaaacgguuucac

SEQ ID NO: 542945 - RNA, 24 nt, Human
agggaaaacaaacgguuucaccuu

SEQ ID NO: 542946 - RNA, 18 nt, Human
agggagcguagcuccugg

SEQ ID NO: 542947 - RNA, 20 nt, Human
aggggcaggugggcaggcau

SEQ ID NO: 542948 - RNA, 20 nt, Human
auaaacccccagaaaaaccc

SEQ ID NO: 542949 - RNA, 22 nt, Human
auccucagcagccuuccgcccc

SEQ ID NO: 542950 - RNA, 20 nt, Human
augacaauucuaccugcaug

SEQ ID NO: 542951 - RNA, 23 nt, Human
auggagccuugcggugcaggccu

SEQ ID NO: 542952 - RNA, 22 nt, Human
auugacagcugcaucaaugaca

SEQ ID NO: 542953 - RNA, 22 nt, Human
caaaugaacccauacuccccuc

SEQ ID NO: 542954 - RNA, 21 nt, Human
caacaaggcagccuugugacc

SEQ ID NO: 542955 - RNA, 22 nt, Human
caacaaggcagccuugugacca

SEQ ID NO: 542956 - RNA, 21 nt, Human
caaggggcuugggcccagggc

SEQ ID NO: 542957 - RNA, 22 nt, Human
cacaccccacacucuuacacca

SEQ ID NO: 542958 - RNA, 19 nt, Human
caccccacacucuuacacc

SEQ ID NO: 542959 - RNA, 20 nt, Human
caccccacacucuuacacca

SEQ ID NO: 542960 - RNA, 21 nt, Human
cacccuggggcugaguggcuc

SEQ ID NO: 542961 - RNA, 18 nt, Human
cacugcuugggcgguccc

SEQ ID NO: 542962 - RNA, 19 nt, Human
cagacugacuuauucucca

SEQ ID NO: 542963 - RNA, 18 nt, Human
cagacuggggagacugga

SEQ ID NO: 542964 - RNA, 20 nt, Human
cagagguaaucaucugggau

SEQ ID NO: 542965 - RNA, 22 nt, Human
cagagguagugcugaaaauccc

SEQ ID NO: 542966 - RNA, 25 nt, Human
cagcagguugguccagccagccccc

SEQ ID NO: 542967 - RNA, 22 nt, Human
caggcuggaggaagaagggcuu

SEQ ID NO: 542968 - RNA, 19 nt, Human
caggguuugcaggcuccga

SEQ ID NO: 542969 - RNA, 22 nt, Human
cagguccucaggagcaucaccc

SEQ ID NO: 542970 - RNA, 19 nt, Human
caucuggaacugaucaauu

SEQ ID NO: 542971 - RNA, 20 nt, Human
caugaaccugcuccugcaua

SEQ ID NO: 542972 - RNA, 26 nt, Human
cauucggugcaucucuacccuggagg

SEQ ID NO: 542973 - RNA, 18 nt, Human
ccaaaugaacccauacuc

SEQ ID NO: 542974 - RNA, 23 nt, Human
ccaccugacccuauccccccaaa

SEQ ID NO: 542975 - RNA, 22 nt, Human
ccagcaucaccauguuuccugc

SEQ ID NO: 542976 - RNA, 19 nt, Human
ccagucacaugccugagcc

SEQ ID NO: 542977 - RNA, 19 nt, Human
cccagcaucaccauguuuc

SEQ ID NO: 542978 - RNA, 21 nt, Human
cccaggccaugcgggccugcu

SEQ ID NO: 542979 - RNA, 24 nt, Human
cccccagaaaaacccuggagguaa

SEQ ID NO: 542980 - RNA, 22 nt, Human
cccccucccacccucuuuaccc

SEQ ID NO: 542981 - RNA, 21 nt, Human
ccccucccuaccucuugugcc

SEQ ID NO: 542982 - RNA, 24 nt, Human
cccucagacugacuuauucuccaa

SEQ ID NO: 542983 - RNA, 18 nt, Human
ccggcgccugccacaccc

SEQ ID NO: 542984 - RNA, 25 nt, Human
ccuaccuaugaaucaaauccaaaac

SEQ ID NO: 542985 - RNA, 23 nt, Human
ccucccacccucuuuacccagga

SEQ ID NO: 542986 - RNA, 25 nt, Human
ccuccucucucgaaaucccccuucu

SEQ ID NO: 542987 - RNA, 19 nt, Human
ccucguugccccucacugc

SEQ ID NO: 542988 - RNA, 20 nt, Human
ccucguugccccucacugcu

SEQ ID NO: 542989 - RNA, 24 nt, Human
ccucguugccccucacugcucccc

SEQ ID NO: 542990 - RNA, 21 nt, Human
ccucuaacaccugugaacacc

SEQ ID NO: 542991 - RNA, 23 nt, Human
ccugaacaugcaggacuuagcuu

SEQ ID NO: 542992 - RNA, 18 nt, Human
ccuggagugaaccuggug

SEQ ID NO: 542993 - RNA, 24 nt, Human
ccugugaacaccagaugguccaga

SEQ ID NO: 542994 - RNA, 19 nt, Human
ccuuccgccccacucugcc

SEQ ID NO: 542995 - RNA, 22 nt, Human
cgcacccuggggcugaguggcu

SEQ ID NO: 542996 - RNA, 24 nt, Human
cucaaaccccagagggcgggagau

SEQ ID NO: 542997 - RNA, 19 nt, Human
cucaucgugcuccagggcc

SEQ ID NO: 542998 - RNA, 23 nt, Human
cuccaccaguucccuccucucca

SEQ ID NO: 542999 - RNA, 21 nt, Human
cuccauaccuccacucaaacc

SEQ ID NO: 543000 - RNA, 22 nt, Human
cucccacuccugggcccugcag

SEQ ID NO: 543001 - RNA, 23 nt, Human
cucgaaaucccccuucuccaggg

SEQ ID NO: 543002 - RNA, 24 nt, Human
cugacccauauccucagcagccuu

SEQ ID NO: 543003 - RNA, 22 nt, Human
cugcuguggccucuguacaugg

SEQ ID NO: 543004 - RNA, 18 nt, Human
cuggagggagggccuggg

SEQ ID NO: 543005 - RNA, 23 nt, Human
cuggauacauggcacugcuuggg

SEQ ID NO: 543006 - RNA, 25 nt, Human
cuggcagugcccugggcaugcaguu

SEQ ID NO: 543007 - RNA, 18 nt, Human
cuggcccauugaacccug

SEQ ID NO: 543008 - RNA, 23 nt, Human
cuguauguggccacuugggagau

SEQ ID NO: 543009 - RNA, 22 nt, Human
cuucacgcagcagcacccccuc

SEQ ID NO: 543010 - RNA, 23 nt, Human
cuuuccuccucucucgaaauccc

SEQ ID NO: 543011 - RNA, 20 nt, Human
cuuugaggauuuccggcgcc

SEQ ID NO: 543012 - RNA, 21 nt, Human
gaacccugagugguggucccc

SEQ ID NO: 543013 - RNA, 18 nt, Human
gaacugcuagcccaacuc

SEQ ID NO: 543014 - RNA, 21 nt, Human
gaagaggggcaggugggcagg

SEQ ID NO: 543015 - RNA, 22 nt, Human
gaauucauucuccuuguccuug

SEQ ID NO: 543016 - RNA, 21 nt, Human
gaccauggccuuuacugucug

SEQ ID NO: 543017 - RNA, 20 nt, Human
gacuugcuuuucagaccugg

SEQ ID NO: 543018 - RNA, 18 nt, Human
gagacuuuuucagccaca

SEQ ID NO: 543019 - RNA, 21 nt, Human
gagaugccaggcaagcugugg

SEQ ID NO: 543020 - RNA, 19 nt, Human
gcaaaacggcuuguggccc

SEQ ID NO: 543021 - RNA, 24 nt, Human
gcacccccucaucgugcuccaggg

SEQ ID NO: 543022 - RNA, 19 nt, Human
gcagagagggagagccucg

SEQ ID NO: 543023 - RNA, 20 nt, Human
gccaugcgggccugcuccuc

SEQ ID NO: 543024 - RNA, 20 nt, Human
gccuggaagccuggcugggc

SEQ ID NO: 543025 - RNA, 21 nt, Human
gcuaugggaugccagaacauu

SEQ ID NO: 543026 - RNA, 22 nt, Human
gcugcuggauacauggcacugc

SEQ ID NO: 543027 - RNA, 18 nt, Human
gcuugugggggaggcugg

SEQ ID NO: 543028 - RNA, 23 nt, Human
ggagaagggacaaggggcuuggg

SEQ ID NO: 543029 - RNA, 21 nt, Human
ggagcguagcuccugguucuu

SEQ ID NO: 543030 - RNA, 26 nt, Human
ggauacgcgagcugcaugugguggua

SEQ ID NO: 543031 - RNA, 20 nt, Human
ggcacuggaaggggcagagg

SEQ ID NO: 543032 - RNA, 21 nt, Human
ggcauggcugggccuugaugg

SEQ ID NO: 543033 - RNA, 21 nt, Human
gggcagagguaaucaucuggg

SEQ ID NO: 543034 - RNA, 25 nt, Human
gggcagccaaccccauggcucagag

SEQ ID NO: 543035 - RNA, 21 nt, Human
gggccuccgaggagugcccaa

SEQ ID NO: 543036 - RNA, 20 nt, Human
gggccugggcucccacuccu

SEQ ID NO: 543037 - RNA, 18 nt, Human
ggugggucaucuugaugc

SEQ ID NO: 543038 - RNA, 22 nt, Human
guaaaguacuacuauacccacc

SEQ ID NO: 543039 - RNA, 20 nt, Human
gucacccagcaucaccaugu

SEQ ID NO: 543040 - RNA, 18 nt, Human
gucaucuugaugcucucc

SEQ ID NO: 543041 - RNA, 22 nt, Human
guccuuggggccuuugugaaaa

SEQ ID NO: 543042 - RNA, 22 nt, Human
gugggucaucuugaugcucucc

SEQ ID NO: 543043 - RNA, 24 nt, Human
gugggucaucuugaugcucuccgg

SEQ ID NO: 543044 - RNA, 24 nt, Human
gugguagggcuugggcggcagcgc

SEQ ID NO: 543045 - RNA, 19 nt, Human
uaaaagcacccugguaaag

SEQ ID NO: 543046 - RNA, 19 nt, Human
uaaacccccagaaaaaccc

SEQ ID NO: 543047 - RNA, 26 nt, Human
uaaagacaccaacagacuggggagac

SEQ ID NO: 543048 - RNA, 22 nt, Human
uaaccccuaacccucuaacacc

SEQ ID NO: 543049 - RNA, 19 nt, Human
uaagcuccuugagcugggu

SEQ ID NO: 543050 - RNA, 22 nt, Human
uaauaaacugagaggaaaauca

SEQ ID NO: 543051 - RNA, 25 nt, Human
uacacucuuuccuccucucucgaaa

SEQ ID NO: 543052 - RNA, 21 nt, Human
uacccuccugccagccccgaa

SEQ ID NO: 543053 - RNA, 20 nt, Human
uacccuggagggagggccug

SEQ ID NO: 543054 - RNA, 18 nt, Human
uaccuaugaaucaaaucc

SEQ ID NO: 543055 - RNA, 18 nt, Human
uacgcgagcugcaugugg

SEQ ID NO: 543056 - RNA, 21 nt, Human
uagaagcucuugacucgaucu

SEQ ID NO: 543057 - RNA, 20 nt, Human
uagaccuccaucuuucccag

SEQ ID NO: 543058 - RNA, 19 nt, Human
uagcccaacuccaaggaca

SEQ ID NO: 543059 - RNA, 21 nt, Human
uagccccuaaccccuaacccu

SEQ ID NO: 543060 - RNA, 19 nt, Human
uaggagacggcuggcccau

SEQ ID NO: 543061 - RNA, 21 nt, Human
uaggccagucacaugccugag

SEQ ID NO: 543062 - RNA, 19 nt, Human
uagguauuuacaaauaagc

SEQ ID NO: 543063 - RNA, 19 nt, Human
uagugcugaaaaucccuga

SEQ ID NO: 543064 - RNA, 21 nt, Human
uaucaaagaaggccuccugau

SEQ ID NO: 543065 - RNA, 19 nt, Human
ucaccacuggggcuccugu

SEQ ID NO: 543066 - RNA, 20 nt, Human
ucagaauguguccuuuucau

SEQ ID NO: 543067 - RNA, 23 nt, Human
ucagggccuggaagccuggcugg

SEQ ID NO: 543068 - RNA, 20 nt, Human
ucagggucagugugguacgu

SEQ ID NO: 543069 - RNA, 18 nt, Human
ucaugcugcuguggccuc

SEQ ID NO: 543070 - RNA, 20 nt, Human
ucauucuccuuguccuuggg

SEQ ID NO: 543071 - RNA, 26 nt, Human
uccaaaacuagccccuaaccccuaac

SEQ ID NO: 543072 - RNA, 21 nt, Human
uccaaaccuggaaacucaugg

SEQ ID NO: 543073 - RNA, 21 nt, Human
uccacaggcucuugaauucau

SEQ ID NO: 543074 - RNA, 21 nt, Human
uccagggccggcaggcggggg

SEQ ID NO: 543075 - RNA, 23 nt, Human
uccauugacagcugcaucaauga

SEQ ID NO: 543076 - RNA, 25 nt, Human
ucccagccgccucguugccccucac

SEQ ID NO: 543077 - RNA, 21 nt, Human
ucccaggccaugcgggccugc

SEQ ID NO: 543078 - RNA, 21 nt, Human
uccccguggggugcuggugcc

SEQ ID NO: 543079 - RNA, 23 nt, Human
uccucagggccuggaagccuggc

SEQ ID NO: 543080 - RNA, 18 nt, Human
uccugccagccccgaacc

SEQ ID NO: 543081 - RNA, 22 nt, Human
uccuuggggccuuugugaaaag

SEQ ID NO: 543082 - RNA, 22 nt, Human
ucuccaacaaaagggauuucag

SEQ ID NO: 543083 - RNA, 18 nt, Human
ucuccaggauggcugcug

SEQ ID NO: 543084 - RNA, 20 nt, Human
ucucgaaaucccccuucucc

SEQ ID NO: 543085 - RNA, 22 nt, Human
ucucgaaaucccccuucuccag

SEQ ID NO: 543086 - RNA, 22 nt, Human
ugacugggggcuugugggggag

SEQ ID NO: 543087 - RNA, 23 nt, Human
ugacugggggcuugugggggagg

SEQ ID NO: 543088 - RNA, 26 nt, Human
ugacugggggcuugugggggaggcug

SEQ ID NO: 543089 - RNA, 26 nt, Human
ugacugggggcuuguggggggagcac

SEQ ID NO: 543090 - RNA, 21 nt, Human
ugaggagagagaggaugauga

SEQ ID NO: 543091 - RNA, 22 nt, Human
ugagugcaagccucucuggcuc

SEQ ID NO: 543092 - RNA, 23 nt, Human
ugcacaaacuucucaugaacugc

SEQ ID NO: 543093 - RNA, 21 nt, Human
ugcccaacaaggcagccuugu

SEQ ID NO: 543094 - RNA, 21 nt, Human
ugccugagccagcagguuggu

SEQ ID NO: 543095 - RNA, 22 nt, Human
ugcggugcaggccucgaggccu

SEQ ID NO: 543096 - RNA, 24 nt, Human
ugcuggauacauggcacugcuugg

SEQ ID NO: 543097 - RNA, 23 nt, Human
uggaggucauacaggccagcaga

SEQ ID NO: 543098 - RNA, 21 nt, Human
uggcauggaguccaugguguc

SEQ ID NO: 543099 - RNA, 20 nt, Human
uggcucaagaucuucgucag

SEQ ID NO: 543100 - RNA, 25 nt, Human
ugggauacgcgagcugcauguggug

SEQ ID NO: 543101 - RNA, 23 nt, Human
ugggauaggguggagaggagacu

SEQ ID NO: 543102 - RNA, 22 nt, Human
ugggcggcagcgcaggcggguc

SEQ ID NO: 543103 - RNA, 19 nt, Human
uggggcugggggacuugcu

SEQ ID NO: 543104 - RNA, 21 nt, Human
ugggggcuugugggggaggcu

SEQ ID NO: 543105 - RNA, 18 nt, Human
ugggguggggcuggggga

SEQ ID NO: 543106 - RNA, 24 nt, Human
ugggguggggcugggggacuugcu

SEQ ID NO: 543107 - RNA, 20 nt, Human
ugggguuuguuuacaagaga

SEQ ID NO: 543108 - RNA, 22 nt, Human
ugucuggaaagaggggcagugg

SEQ ID NO: 543109 - RNA, 25 nt, Human
ugugaacaccagaugguccagagau

SEQ ID NO: 543110 - RNA, 19 nt, Human
ugugaugacugccuugucc

SEQ ID NO: 543111 - RNA, 18 nt, Human
ugugauggagagaaaaau

SEQ ID NO: 543112 - RNA, 18 nt, Human
ugugcaauuucuccaugu

SEQ ID NO: 543113 - RNA, 20 nt, Human
uguggaggucauacaggcca

SEQ ID NO: 543114 - RNA, 18 nt, Human
uguguugauacuggcuga

SEQ ID NO: 543115 - RNA, 20 nt, Human
uguugauacuggcugaucag

SEQ ID NO: 543116 - RNA, 22 nt, Human
uucaugcugcuguggccucugu

SEQ ID NO: 543117 - RNA, 21 nt, Human
uuccuccucucucgaaauccc

SEQ ID NO: 543118 - RNA, 22 nt, Human
uugaauucauucuccuuguccu

SEQ ID NO: 543119 - RNA, 21 nt, Human
uugggggugguucucuccuga

SEQ ID NO: 543120 - RNA, 18 nt, Human
uugugggggaggcuggga

SEQ ID NO: 543121 - RNA, 21 nt, Human
uuuucagaccuggagugauug

SEQ ID NO: 543122 - RNA, 22 nt, Human
aaaaaacaacaaaaaaccccac

SEQ ID NO: 543123 - RNA, 25 nt, Human
aaaaaacaacaaaaaaccccacaca

SEQ ID NO: 543124 - RNA, 27 nt, Human
aaaaaacaacaaaaaaccccacacaac

SEQ ID NO: 543125 - RNA, 22 nt, Human
aaaaaaccccacacaaccaaaa

SEQ ID NO: 543126 - RNA, 20 nt, Human
aaaaacaaaacccaaaaaac

SEQ ID NO: 543127 - RNA, 23 nt, Human
aaaacaacaaaaaaccccacaca

SEQ ID NO: 543128 - RNA, 21 nt, Human
aaacaaaacccaaaaaacaac

SEQ ID NO: 543129 - RNA, 21 nt, Human
aaacccaaaaaacaacaaaaa

SEQ ID NO: 543130 - RNA, 23 nt, Human
aaacuccaacugcaaggcuggca

SEQ ID NO: 543131 - RNA, 18 nt, Human
aaagagcacaacauaauc

SEQ ID NO: 543132 - RNA, 22 nt, Human
aacagggcaagggggcucccuc

SEQ ID NO: 543133 - RNA, 20 nt, Human
aacccaaaaaacaacaaaaa

SEQ ID NO: 543134 - RNA, 21 nt, Human
aacccaaaaaacaacaaaaaa

SEQ ID NO: 543135 - RNA, 24 nt, Human
aacccaaaaaacaacaaaaaaccu

SEQ ID NO: 543136 - RNA, 24 nt, Human
aagcaggaaggagccugugcagaa

SEQ ID NO: 543137 - RNA, 20 nt, Human
aaggucuguucccacaaauc

SEQ ID NO: 543138 - RNA, 21 nt, Human
acaaaacccaaaaaacaacaa

SEQ ID NO: 543139 - RNA, 20 nt, Human
acaaagcaggaaggagccug

SEQ ID NO: 543140 - RNA, 22 nt, Human
acaaaucaggacccuaaaguau

SEQ ID NO: 543141 - RNA, 21 nt, Human
accucugcuuaaaacuccaac

SEQ ID NO: 543142 - RNA, 19 nt, Human
acggcaguccugcugcggc

SEQ ID NO: 543143 - RNA, 18 nt, Human
acgugaauagaaagauag

SEQ ID NO: 543144 - RNA, 22 nt, Human
agaccuuuggaccccaguuccc

SEQ ID NO: 543145 - RNA, 21 nt, Human
agaugucaccucugcuuaaaa

SEQ ID NO: 543146 - RNA, 19 nt, Human
agccagcucugccucccuc

SEQ ID NO: 543147 - RNA, 21 nt, Human
agccccgcagcaggcagcccc

SEQ ID NO: 543148 - RNA, 22 nt, Human
agcugagccagccagcucugcc

SEQ ID NO: 543149 - RNA, 24 nt, Human
aggcccagaggaacugagaagcca

SEQ ID NO: 543150 - RNA, 20 nt, Human
aggcucuuggccgacagccc

SEQ ID NO: 543151 - RNA, 23 nt, Human
aggugguguggccagcccuuugc

SEQ ID NO: 543152 - RNA, 23 nt, Human
aguauuaaaaaacaaaacccaaa

SEQ ID NO: 543153 - RNA, 24 nt, Human
aguccagccucauccuugggggca

SEQ ID NO: 543154 - RNA, 21 nt, Human
auccuugggggcaaggagggg

SEQ ID NO: 543155 - RNA, 26 nt, Human
auccuugggggcaaggagggggcagc

SEQ ID NO: 543156 - RNA, 20 nt, Human
auggaggauggacacgacug

SEQ ID NO: 543157 - RNA, 22 nt, Human
caaaaaacaacaaaaaacccca

SEQ ID NO: 543158 - RNA, 18 nt, Human
caaaaaaccccacacaac

SEQ ID NO: 543159 - RNA, 18 nt, Human
caaaaaaccccacacaac

SEQ ID NO: 543160 - RNA, 20 nt, Human
caaaacccaaaaaacaacaa

SEQ ID NO: 543161 - RNA, 27 nt, Human
caaaacccaaaaaacaacaaaaaaccc

SEQ ID NO: 543162 - RNA, 22 nt, Human
caaauagugguuauuuacaaga

SEQ ID NO: 543163 - RNA, 23 nt, Human
caacaaaaaaccccacacaacca

SEQ ID NO: 543164 - RNA, 22 nt, Human
caacaaaaaaccccacacaacu

SEQ ID NO: 543165 - RNA, 21 nt, Human
caagcuccagccuuccuccac

SEQ ID NO: 543166 - RNA, 24 nt, Human
cagaaguuacauuuuaaaaccaga

SEQ ID NO: 543167 - RNA, 26 nt, Human
cagaugucaccucugcuuaaaacucc

SEQ ID NO: 543168 - RNA, 20 nt, Human
cagcacagaggaagugcaga

SEQ ID NO: 543169 - RNA, 19 nt, Human
cagcaccauguggggagga

SEQ ID NO: 543170 - RNA, 22 nt, Human
cagcaccccuaccccaggggca

SEQ ID NO: 543171 - RNA, 23 nt, Human
cagcaggagggcugugccaugga

SEQ ID NO: 543172 - RNA, 19 nt, Human
cagcaggcagcccccagca

SEQ ID NO: 543173 - RNA, 25 nt, Human
cagccagcucugccucccuccccaa

SEQ ID NO: 543174 - RNA, 21 nt, Human
caggaacaagcuccagccuuc

SEQ ID NO: 543175 - RNA, 27 nt, Human
caggacccuaaaguauuaaaaaacaaa

SEQ ID NO: 543176 - RNA, 18 nt, Human
caggagggcugugccaug

SEQ ID NO: 543177 - RNA, 21 nt, Human
cagggcaagggggcucccucu

SEQ ID NO: 543178 - RNA, 19 nt, Human
ccaggugccugggucuccg

SEQ ID NO: 543179 - RNA, 25 nt, Human
cccaaaaaacaacaaaaaaccccac

SEQ ID NO: 543180 - RNA, 21 nt, Human
ccccaaagaccuuuggacccc

SEQ ID NO: 543181 - RNA, 18 nt, Human
ccccucuacaggcuagcu

SEQ ID NO: 543182 - RNA, 26 nt, Human
cccgcgucacggcgcggcuggcgggg

SEQ ID NO: 543183 - RNA, 21 nt, Human
cccuaccccaggggcaucuuc

SEQ ID NO: 543184 - RNA, 24 nt, Human
cccuaccccaggggcaucuuccca

SEQ ID NO: 543185 - RNA, 19 nt, Human
ccgcagcaggcagccccca

SEQ ID NO: 543186 - RNA, 18 nt, Human
ccgccucagcauuguucu

SEQ ID NO: 543187 - RNA, 23 nt, Human
ccucaagcucugauuaucccccu

SEQ ID NO: 543188 - RNA, 22 nt, Human
ccuccaaucaccuguuccagac

SEQ ID NO: 543189 - RNA, 20 nt, Human
ccuggcagcaggagggcugu

SEQ ID NO: 543190 - RNA, 19 nt, Human
ccuggccuauuccuggggc

SEQ ID NO: 543191 - RNA, 18 nt, Human
ccuggggcaggaacaagc

SEQ ID NO: 543192 - RNA, 24 nt, Human
ccugugucacuccaggcccagagg

SEQ ID NO: 543193 - RNA, 22 nt, Human
cgccgaggcccgggccaggagc

SEQ ID NO: 543194 - RNA, 23 nt, Human
cuccaaccccucacacaugcuca

SEQ ID NO: 543195 - RNA, 20 nt, Human
cuccuggccuauuccugggg

SEQ ID NO: 543196 - RNA, 20 nt, Human
cugcucagcggcgccgcgga

SEQ ID NO: 543197 - RNA, 20 nt, Human
cugggcgccgaggcccgggc

SEQ ID NO: 543198 - RNA, 21 nt, Human
cuguucccacaaaucaggacc

SEQ ID NO: 543199 - RNA, 22 nt, Human
cuucaugcgucaucgugccacu

SEQ ID NO: 543200 - RNA, 18 nt, Human
cuugggggcaaggagggg

SEQ ID NO: 543201 - RNA, 22 nt, Human
cuuuaucauccuccugccacaa

SEQ ID NO: 543202 - RNA, 24 nt, Human
gagaggggggcagcaggggugcuu

SEQ ID NO: 543203 - RNA, 20 nt, Human
gagcacaacauaaucuccuu

SEQ ID NO: 543204 - RNA, 25 nt, Human
gagcacaacauaaucuccuucaugc

SEQ ID NO: 543205 - RNA, 18 nt, Human
gagccagccagcucugcc

SEQ ID NO: 543206 - RNA, 21 nt, Human
gcagcaggcagcccccagcag

SEQ ID NO: 543207 - RNA, 18 nt, Human
gccagcucugccucccuc

SEQ ID NO: 543208 - RNA, 22 nt, Human
gcccagaggaacugagaagcca

SEQ ID NO: 543209 - RNA, 20 nt, Human
gcgccgcggagcaggcucau

SEQ ID NO: 543210 - RNA, 19 nt, Human
gcggagcaggcucaugccc

SEQ ID NO: 543211 - RNA, 19 nt, Human
gcggcagggcggcggcggc

SEQ ID NO: 543212 - RNA, 24 nt, Human
gcuccuucgccccgcgccugcugg

SEQ ID NO: 543213 - RNA, 18 nt, Human
ggaaaagccagcagucag

SEQ ID NO: 543214 - RNA, 25 nt, Human
ggaaggauggggugagggugagggg

SEQ ID NO: 543215 - RNA, 21 nt, Human
ggacccuaaaguauuaaaaaa

SEQ ID NO: 543216 - RNA, 20 nt, Human
ggcuccuuugggaggggccg

SEQ ID NO: 543217 - RNA, 26 nt, Human
gggaaggaugcccaggugccuggguc

SEQ ID NO: 543218 - RNA, 18 nt, Human
gggcaaggagggggcagc

SEQ ID NO: 543219 - RNA, 18 nt, Human
gggcaagggggcucccuc

SEQ ID NO: 543220 - RNA, 24 nt, Human
gggcaggaacaagcuccagccuuc

SEQ ID NO: 543221 - RNA, 23 nt, Human
gggcgccgaggcccgggccagga

SEQ ID NO: 543222 - RNA, 22 nt, Human
gggggcggcagggcggcggcgg

SEQ ID NO: 543223 - RNA, 19 nt, Human
guccacgguacacugcagc

SEQ ID NO: 543224 - RNA, 23 nt, Human
guccacgguacacugcagccagc

SEQ ID NO: 543225 - RNA, 21 nt, Human
gucuccggcuccuccaaucac

SEQ ID NO: 543226 - RNA, 23 nt, Human
uaaaaaacaaaacccaaaaaaca

SEQ ID NO: 543227 - RNA, 24 nt, Human
uaaaaaacaaaacccaaaaaacaa

SEQ ID NO: 543228 - RNA, 28 nt, Human
uaaaaaacaaaacccaaaaaacaacaaa

SEQ ID NO: 543229 - RNA, 25 nt, Human
uaaucagcaccccuaccccaggggc

SEQ ID NO: 543230 - RNA, 21 nt, Human
uaccccaggggcaucuuccca

SEQ ID NO: 543231 - RNA, 24 nt, Human
uagcugagccagccagcucugccu

SEQ ID NO: 543232 - RNA, 18 nt, Human
uagucccacgguagcucc

SEQ ID NO: 543233 - RNA, 24 nt, Human
uauuaaaaaacaaaacccaaaaaa

SEQ ID NO: 543234 - RNA, 19 nt, Human
ucaacaaauaccagcacua

SEQ ID NO: 543235 - RNA, 21 nt, Human
ucaggugguguggccagcccu

SEQ ID NO: 543236 - RNA, 24 nt, Human
ucagugagaggggggcagcagggg

SEQ ID NO: 543237 - RNA, 18 nt, Human
uccacgguacacugcagc

SEQ ID NO: 543238 - RNA, 20 nt, Human
uccacgguacacugcagcca

SEQ ID NO: 543239 - RNA, 21 nt, Human
uccacgguacacugcagccag

SEQ ID NO: 543240 - RNA, 22 nt, Human
uccccaaagaccuuuggacccc

SEQ ID NO: 543241 - RNA, 22 nt, Human
uccccacggcaguccugcugcg

SEQ ID NO: 543242 - RNA, 24 nt, Human
uccccacggcaguccugcugcggc

SEQ ID NO: 543243 - RNA, 18 nt, Human
ucccuagcucaagggcuc

SEQ ID NO: 543244 - RNA, 19 nt, Human
ucccuccccaaagaccuuu

SEQ ID NO: 543245 - RNA, 23 nt, Human
ugagguaaucagcaccccuaccc

SEQ ID NO: 543246 - RNA, 24 nt, Human
ugcacucauacucaaaaacagccu

SEQ ID NO: 543247 - RNA, 24 nt, Human
ugcagaaguuacauuuuaaaacca

SEQ ID NO: 543248 - RNA, 24 nt, Human
ugcauugcagcagggagccucagc

SEQ ID NO: 543249 - RNA, 22 nt, Human
ugccauggaggauggacacgac

SEQ ID NO: 543250 - RNA, 22 nt, Human
ugcccaggugccugggucuccg

SEQ ID NO: 543251 - RNA, 20 nt, Human
ugcuuuaucauccuccugcc

SEQ ID NO: 543252 - RNA, 18 nt, Human
uggcaagcagcacagagg

SEQ ID NO: 543253 - RNA, 19 nt, Human
ugggaaaagccagcaguca

SEQ ID NO: 543254 - RNA, 24 nt, Human
ugggauuaaaaaauuuguguguau

SEQ ID NO: 543255 - RNA, 24 nt, Human
uggggcaggaacaagcuccagccu

SEQ ID NO: 543256 - RNA, 23 nt, Human
ugucggggcugccgcgaggggcu

SEQ ID NO: 543257 - RNA, 18 nt, Human
uuaaaaccagauuuucac

SEQ ID NO: 543258 - RNA, 20 nt, Human
uucaccugaggcgucaacca

SEQ ID NO: 543259 - RNA, 19 nt, Human
uucagagugcuuuuggcug

SEQ ID NO: 543260 - RNA, 18 nt, Human
uuccagacacucugucgg

SEQ ID NO: 543261 - RNA, 27 nt, Human
uucuuuuuaaaaguguuuauuuuuggc

SEQ ID NO: 543262 - RNA, 19 nt, Human
uugggaggggccgcgugcu

SEQ ID NO: 543263 - RNA, 18 nt, Human
uugguggggaaggauggg

SEQ ID NO: 543264 - RNA, 20 nt, Human
uuuggcuggccagagggugg

SEQ ID NO: 543265 - RNA, 24 nt, Human
uuuuuuucuuuuuaaaaguguuua

SEQ ID NO: 543266 - RNA, 23 nt, Human
uuuuuuuuuuuucuuuuuaaaag

SEQ ID NO: 543267 - RNA, 25 nt, Human
uuuuuuuuuuuuuuuuuuucuuuuu

SEQ ID NO: 543268 - RNA, 21 nt, Human
aaacauuucaguauauuccuu

SEQ ID NO: 543269 - RNA, 20 nt, Human
agaaucuugaauuuccuugc

SEQ ID NO: 543270 - RNA, 22 nt, Human
agagacuucccgcgcgcgccgg

SEQ ID NO: 543271 - RNA, 23 nt, Human
ccgcgcgcgccgggcccgccccu

SEQ ID NO: 543272 - RNA, 20 nt, Human
ccucaaagauuccuuuuagg

SEQ ID NO: 543273 - RNA, 23 nt, Human
ccuugcuagaaggcuuuuuuccu

SEQ ID NO: 543274 - RNA, 25 nt, Human
cuagaaggcuuuuuuccucccaaug

SEQ ID NO: 543275 - RNA, 22 nt, Human
cuguaguaaaaguuauguuuau

SEQ ID NO: 543276 - RNA, 21 nt, Human
gcggcugaggguagccggccg

SEQ ID NO: 543277 - RNA, 18 nt, Human
gucacaaugccauggggu

SEQ ID NO: 543278 - RNA, 26 nt, Human
uagaaggcuuuuuuccucaaagauuc

SEQ ID NO: 543279 - RNA, 22 nt, Human
ugaaacaagaaccugcuaacag

SEQ ID NO: 543280 - RNA, 19 nt, Human
ugaguuaucugaguuuuuc

SEQ ID NO: 543281 - RNA, 19 nt, Human
ugcuaugugauuucccauu

SEQ ID NO: 543282 - RNA, 18 nt, Human
uuucccauuugcaaggaa

SEQ ID NO: 543283 - RNA, 19 nt, Human
aaacaaauauacaaauacc

SEQ ID NO: 543284 - RNA, 20 nt, Human
aaacccggcuuuugcuggua

SEQ ID NO: 543285 - RNA, 24 nt, Human
aaagaaaacgcucaguagcaccau

SEQ ID NO: 543286 - RNA, 18 nt, Human
aaauagaaauguuacaga

SEQ ID NO: 543287 - RNA, 21 nt, Human
aacaacacagcaaaauccuca

SEQ ID NO: 543288 - RNA, 18 nt, Human
aaccagcuccaaacacgg

SEQ ID NO: 543289 - RNA, 22 nt, Human
aagaaauacauaagauagaaca

SEQ ID NO: 543290 - RNA, 25 nt, Human
aagaagacugcagcccauggcauuu

SEQ ID NO: 543291 - RNA, 24 nt, Human
aagaaucaaugggguacaaacuuc

SEQ ID NO: 543292 - RNA, 20 nt, Human
acaaaagcaaaagaaaauaa

SEQ ID NO: 543293 - RNA, 22 nt, Human
acaccacuguauuccacccugg

SEQ ID NO: 543294 - RNA, 22 nt, Human
accaagaaucaaugggguacaa

SEQ ID NO: 543295 - RNA, 24 nt, Human
accacuguauuccacccuggguga

SEQ ID NO: 543296 - RNA, 21 nt, Human
accagagaagacauggaaaac

SEQ ID NO: 543297 - RNA, 18 nt, Human
acugcagcccauggcauu

SEQ ID NO: 543298 - RNA, 22 nt, Human
agaaguccaaaauccagcuggg

SEQ ID NO: 543299 - RNA, 25 nt, Human
agcaaaauccucaaauaacuaggcc

SEQ ID NO: 543300 - RNA, 19 nt, Human
aggaauuccaggcugcagu

SEQ ID NO: 543301 - RNA, 24 nt, Human
aggcugagguggcaggguugcuug

SEQ ID NO: 543302 - RNA, 24 nt, Human
aggugaccagagaagacauggaaa

SEQ ID NO: 543303 - RNA, 22 nt, Human
auacugagaguaaccuaugcag

SEQ ID NO: 543304 - RNA, 24 nt, Human
aucacaccacuguauuccacccug

SEQ ID NO: 543305 - RNA, 20 nt, Human
auggaccugguagggaaaag

SEQ ID NO: 543306 - RNA, 24 nt, Human
augggguacaaacuuccccuuaga

SEQ ID NO: 543307 - RNA, 23 nt, Human
auuucuauuucaaaguugugcaa

SEQ ID NO: 543308 - RNA, 26 nt, Human
caaaaacugccacaaucuugcucaaa

SEQ ID NO: 543309 - RNA, 22 nt, Human
caaaagcaaaagaaaauaaugc

SEQ ID NO: 543310 - RNA, 26 nt, Human
caaaauccucaaauaacuaggccauu

SEQ ID NO: 543311 - RNA, 27 nt, Human
caagauagaguaccagguauuucuauu

SEQ ID NO: 543312 - RNA, 24 nt, Human
cacacucauuauuaaacaaaauug

SEQ ID NO: 543313 - RNA, 19 nt, Human
cacuguauuccacccuggg

SEQ ID NO: 543314 - RNA, 25 nt, Human
cacuguauuccacccugggugacaa

SEQ ID NO: 543315 - RNA, 28 nt, Human
cauuuauuuaacguaugcaguuuacaca

SEQ ID NO: 543316 - RNA, 18 nt, Human
ccacuggggcuugagggg

SEQ ID NO: 543317 - RNA, 24 nt, Human
ccacuguauuccacccugggugac

SEQ ID NO: 543318 - RNA, 22 nt, Human
ccaggaauuccaggcugcagug

SEQ ID NO: 543319 - RNA, 18 nt, Human
ccccuuagagaaaggugg

SEQ ID NO: 543320 - RNA, 19 nt, Human
ccccuuagagaaaggugga

SEQ ID NO: 543321 - RNA, 21 nt, Human
cccuaaagccucaaguuuucu

SEQ ID NO: 543322 - RNA, 21 nt, Human
ccgauauaaauagaaauguua

SEQ ID NO: 543323 - RNA, 24 nt, Human
ccugggugacaccgugaggcccug

SEQ ID NO: 543324 - RNA, 19 nt, Human
cuaguucuggaggccagaa

SEQ ID NO: 543325 - RNA, 22 nt, Human
cucauuauuaaacaaaauugga

SEQ ID NO: 543326 - RNA, 18 nt, Human
cugaacacagaaaaugua

SEQ ID NO: 543327 - RNA, 19 nt, Human
gaauauccuacuugguucc

SEQ ID NO: 543328 - RNA, 24 nt, Human
gagguggcaggguugcuugagccc

SEQ ID NO: 543329 - RNA, 20 nt, Human
gagugugucuuugguaggcu

SEQ ID NO: 543330 - RNA, 20 nt, Human
gcuaucauggauguucugua

SEQ ID NO: 543331 - RNA, 23 nt, Human
gcugaacacagaaaauguaucug

SEQ ID NO: 543332 - RNA, 18 nt, Human
gcuugaggggagaaugug

SEQ ID NO: 543333 - RNA, 22 nt, Human
ggcaaacacacaaaacaugcuu

SEQ ID NO: 543334 - RNA, 26 nt, Human
uaaaauaacuggcacuaguguuauaa

SEQ ID NO: 543335 - RNA, 22 nt, Human
uaacuaggccauuaaaacccag

SEQ ID NO: 543336 - RNA, 18 nt, Human
uaacugcuaucauugagg

SEQ ID NO: 543337 - RNA, 26 nt, Human
uaacugcuaucauugagguuaaccuu

SEQ ID NO: 543338 - RNA, 27 nt, Human
uaacugcuaucauugagguuaaccuuc

SEQ ID NO: 543339 - RNA, 21 nt, Human
uaacuggcacuaguguuauaa

SEQ ID NO: 543340 - RNA, 23 nt, Human
uaaguaugugcuucaagcaaugu

SEQ ID NO: 543341 - RNA, 22 nt, Human
uaauuacuuaccuuuacauuuu

SEQ ID NO: 543342 - RNA, 20 nt, Human
uacaaguucugcaccgugcu

SEQ ID NO: 543343 - RNA, 24 nt, Human
uagcuacuuggaaggcugaggugg

SEQ ID NO: 543344 - RNA, 21 nt, Human
uauacaaauaccauaagcauu

SEQ ID NO: 543345 - RNA, 25 nt, Human
uauacaaauaccauaagcauuauca

SEQ ID NO: 543346 - RNA, 23 nt, Human
ucacaccacuguauuccacccug

SEQ ID NO: 543347 - RNA, 20 nt, Human
uccacaugacacacaaugcc

SEQ ID NO: 543348 - RNA, 21 nt, Human
uccacaugacacacaaugccu

SEQ ID NO: 543349 - RNA, 21 nt, Human
uccacccugggugacaccgug

SEQ ID NO: 543350 - RNA, 19 nt, Human
uccuuugacucuuccagcu

SEQ ID NO: 543351 - RNA, 22 nt, Human
ucgaucccaaaggcaccaagaa

SEQ ID NO: 543352 - RNA, 20 nt, Human
ugacaccgugaggcccuguc

SEQ ID NO: 543353 - RNA, 19 nt, Human
ugaggggagaauguguccu

SEQ ID NO: 543354 - RNA, 18 nt, Human
ugagguggcaggguugcu

SEQ ID NO: 543355 - RNA, 24 nt, Human
ugagguggcaggguugcuugagcc

SEQ ID NO: 543356 - RNA, 27 nt, Human
ugcacuuuuaaagccuucacuucauag

SEQ ID NO: 543357 - RNA, 22 nt, Human
ugcuaucauggauguucuguag

SEQ ID NO: 543358 - RNA, 20 nt, Human
ugcuuugcucuucaaauuua

SEQ ID NO: 543359 - RNA, 21 nt, Human
uggaagaagacugcagcccau

SEQ ID NO: 543360 - RNA, 25 nt, Human
uggaagaagacugcagcccauggca

SEQ ID NO: 543361 - RNA, 19 nt, Human
uggaaggcugagguggcag

SEQ ID NO: 543362 - RNA, 19 nt, Human
uggaaggcugagguggcag

SEQ ID NO: 543363 - RNA, 20 nt, Human
uggaaggcugagguggcagg

SEQ ID NO: 543364 - RNA, 24 nt, Human
uggaaggcugagguggcaggguug

SEQ ID NO: 543365 - RNA, 23 nt, Human
uggggcuugaggggagaaugugu

SEQ ID NO: 543366 - RNA, 26 nt, Human
ugguaacuaagauccacaugacacac

SEQ ID NO: 543367 - RNA, 20 nt, Human
ugguacaaguucugcaccgu

SEQ ID NO: 543368 - RNA, 25 nt, Human
uguuacagaguaucauauacugaga

SEQ ID NO: 543369 - RNA, 19 nt, Human
uucuauuucaaaguugugc

SEQ ID NO: 543370 - RNA, 22 nt, Human
uucuguaguccuagcuacuugg

SEQ ID NO: 543371 - RNA, 19 nt, Human
uugcugguaaccugaaacu

SEQ ID NO: 543372 - RNA, 24 nt, Human
uugcuugagcccaggaauuccagg

SEQ ID NO: 543373 - RNA, 19 nt, Human
uuggaaggcugagguggca

SEQ ID NO: 543374 - RNA, 20 nt, Human
uugguacaaguucugcaccg

SEQ ID NO: 543375 - RNA, 24 nt, Human
uuucaaaguugugcaaaaacugcc

SEQ ID NO: 543376 - RNA, 23 nt, Human
uuugcugguaaccugaaacuuaa

SEQ ID NO: 543377 - RNA, 19 nt, Human
uuuguacuugguacaaguu

SEQ ID NO: 543378 - RNA, 18 nt, Human
uuuuuuuuuuuuuuuuug

SEQ ID NO: 543379 - RNA, 21 nt, Human
uuuuuuuuuuuuuuuuugcag

SEQ ID NO: 543380 - RNA, 21 nt, Human
aaaaaaggucaauagacagaa

SEQ ID NO: 543381 - RNA, 21 nt, Human
aaaacacacacagaugaaaug

SEQ ID NO: 543382 - RNA, 20 nt, Human
aaaauccagaaaacacacac

SEQ ID NO: 543383 - RNA, 26 nt, Human
aaaauccccuccuugcguguccaccc

SEQ ID NO: 543384 - RNA, 18 nt, Human
aaaaugggggugggggca

SEQ ID NO: 543385 - RNA, 26 nt, Human
aacaccuuuucauucucagaccauua

SEQ ID NO: 543386 - RNA, 20 nt, Human
aagcuacagcuggcuuuugg

SEQ ID NO: 543387 - RNA, 21 nt, Human
aauccagaaaacacacacaga

SEQ ID NO: 543388 - RNA, 26 nt, Human
aauccccuccuugcguguccacccac

SEQ ID NO: 543389 - RNA, 21 nt, Human
agaacagaugaaggguuaaua

SEQ ID NO: 543390 - RNA, 21 nt, Human
agacaggaaaauaaaugcuga

SEQ ID NO: 543391 - RNA, 18 nt, Human
agagaugagccuguuuac

SEQ ID NO: 543392 - RNA, 20 nt, Human
agaucagugggugagacugc

SEQ ID NO: 543393 - RNA, 20 nt, Human
agaugaaaugccuacaagga

SEQ ID NO: 543394 - RNA, 18 nt, Human
aggaggaaaacuugaauc

SEQ ID NO: 543395 - RNA, 19 nt, Human
aggaggaaaacuugaaucu

SEQ ID NO: 543396 - RNA, 24 nt, Human
auccguuuuuuuuguuuuuuuuuu

SEQ ID NO: 543397 - RNA, 23 nt, Human
auggaagagccagggcugggcgc

SEQ ID NO: 543398 - RNA, 23 nt, Human
caaacaccuuuucauucucagac

SEQ ID NO: 543399 - RNA, 21 nt, Human
caagaacagaugaaggguuaa

SEQ ID NO: 543400 - RNA, 18 nt, Human
caaggaggaaaacuugaa

SEQ ID NO: 543401 - RNA, 19 nt, Human
cacccacaacccagcaagc

SEQ ID NO: 543402 - RNA, 18 nt, Human
cagugcaguguucugcau

SEQ ID NO: 543403 - RNA, 23 nt, Human
cauggaagagccagggcugggcg

SEQ ID NO: 543404 - RNA, 20 nt, Human
ccauaaaccccacucacaag

SEQ ID NO: 543405 - RNA, 22 nt, Human
cccacaacccagcaagccaaac

SEQ ID NO: 543406 - RNA, 23 nt, Human
ccccuaaacuuacacccuccuug

SEQ ID NO: 543407 - RNA, 19 nt, Human
ccucccuuuccccauaaac

SEQ ID NO: 543408 - RNA, 24 nt, Human
ccucccuuuccccauaaaccccac

SEQ ID NO: 543409 - RNA, 18 nt, Human
ccugaaacccagagacuu

SEQ ID NO: 543410 - RNA, 20 nt, Human
ccuguagucccggaaauaga

SEQ ID NO: 543411 - RNA, 26 nt, Human
cuuccuguagucccggaaauagaaau

SEQ ID NO: 543412 - RNA, 20 nt, Human
gagaagauggguaacuuuua

SEQ ID NO: 543413 - RNA, 20 nt, Human
gagaauggggacaguagaga

SEQ ID NO: 543414 - RNA, 20 nt, Human
gcaaggguccugagaacuca

SEQ ID NO: 543415 - RNA, 24 nt, Human
gcugagacaccaaucagggaaggu

SEQ ID NO: 543416 - RNA, 21 nt, Human
gcuuaucaccucauuccccaa

SEQ ID NO: 543417 - RNA, 20 nt, Human
ggaaaggggcagagcaugga

SEQ ID NO: 543418 - RNA, 23 nt, Human
ggcauggagagaguggagaagga

SEQ ID NO: 543419 - RNA, 20 nt, Human
gggacaguagagaagauggg

SEQ ID NO: 543420 - RNA, 22 nt, Human
ggggacaguagagaagaugggu

SEQ ID NO: 543421 - RNA, 20 nt, Human
gggguggagaucagugggug

SEQ ID NO: 543422 - RNA, 19 nt, Human
uaaguaauagugaauggaa

SEQ ID NO: 543423 - RNA, 20 nt, Human
uaaugcuguccugaaaccca

SEQ ID NO: 543424 - RNA, 21 nt, Human
uacaaggaggaaaacuugaau

SEQ ID NO: 543425 - RNA, 21 nt, Human
uaggaaaacuaagggauuugg

SEQ ID NO: 543426 - RNA, 24 nt, Human
ucacaagucagucuggggcauugc

SEQ ID NO: 543427 - RNA, 19 nt, Human
ucaguauucucugcccuuc

SEQ ID NO: 543428 - RNA, 20 nt, Human
ucaguauucucugcccuucc

SEQ ID NO: 543429 - RNA, 23 nt, Human
ucagugcaguguucugcauuggu

SEQ ID NO: 543430 - RNA, 24 nt, Human
ucauuaaaaaaauggggguggggg

SEQ ID NO: 543431 - RNA, 22 nt, Human
uccacuguagacauuuaggaaa

SEQ ID NO: 543432 - RNA, 20 nt, Human
uccaggaaaggggcagagca

SEQ ID NO: 543433 - RNA, 25 nt, Human
uccagggcauggagagaguggagaa

SEQ ID NO: 543434 - RNA, 21 nt, Human
uccccuaaacuuacacccucc

SEQ ID NO: 543435 - RNA, 24 nt, Human
uccuuuaggacucagugcaguguu

SEQ ID NO: 543436 - RNA, 22 nt, Human
ugaaacccagagacucugcccu

SEQ ID NO: 543437 - RNA, 18 nt, Human
ugaaaugccuacaaggag

SEQ ID NO: 543438 - RNA, 19 nt, Human
uggaagagacaggaaaaua

SEQ ID NO: 543439 - RNA, 19 nt, Human
uggaagagccagggcuggg

SEQ ID NO: 543440 - RNA, 18 nt, Human
ugggggugggggcaaggg

SEQ ID NO: 543441 - RNA, 22 nt, Human
ugggggugggggcaaggguccu

SEQ ID NO: 543442 - RNA, 21 nt, Human
uggggugaaggugggaggaga

SEQ ID NO: 543443 - RNA, 24 nt, Human
uguccccuaaacuuacacccuccu

SEQ ID NO: 543444 - RNA, 22 nt, Human
uuauucauucuuucuucuuugu

SEQ ID NO: 543445 - RNA, 24 nt, Human
uuccccauaaaccccacucacaag

SEQ ID NO: 543446 - RNA, 18 nt, Human
uucuuucuucuuuguccc

SEQ ID NO: 543447 - RNA, 21 nt, Human
uuuaugauuucuucuggacuu

SEQ ID NO: 543448 - RNA, 24 nt, Human
uuuccccauaaaccccacucacaa

SEQ ID NO: 543449 - RNA, 18 nt, Human
uuugguggaagagacagg

SEQ ID NO: 543450 - RNA, 19 nt, Human
agaguacauuuuauacaaa

SEQ ID NO: 543451 - RNA, 20 nt, Human
ugaaaugaacguaacuauaa

SEQ ID NO: 543452 - RNA, 23 nt, Human
uuaugcaaaaaaaaauauacauu

SEQ ID NO: 543453 - RNA, 18 nt, Human
gaggaagggcuguccgca

SEQ ID NO: 543454 - RNA, 25 nt, Human
ucccagagguccgaacuugagugcc

SEQ ID NO: 543455 - RNA, 20 nt, Human
ugagugcccacaaaaggugg

SEQ ID NO: 543456 - RNA, 19 nt, Human
caagcuccugccccucccc

SEQ ID NO: 543457 - RNA, 19 nt, Human
cacacgaauggagggccac

SEQ ID NO: 543458 - RNA, 21 nt, Human
cccccuccccagccccuaaau

SEQ ID NO: 543459 - RNA, 19 nt, Human
ccccuaaauacacacacga

SEQ ID NO: 543460 - RNA, 21 nt, Human
cccuagcugucacgugccacc

SEQ ID NO: 543461 - RNA, 20 nt, Human
ccugccccucccccucccca

SEQ ID NO: 543462 - RNA, 21 nt, Human
ccugcugcagcagcugcucuu

SEQ ID NO: 543463 - RNA, 18 nt, Human
cguuuugaacccuagcug

SEQ ID NO: 543464 - RNA, 18 nt, Human
cguuuugaacccuagcug

SEQ ID NO: 543465 - RNA, 18 nt, Human
cucccccuccccagcccc

SEQ ID NO: 543466 - RNA, 23 nt, Human
cuccugccccucccccuccccag

SEQ ID NO: 543467 - RNA, 21 nt, Human
gaacugccauuuccucaucug

SEQ ID NO: 543468 - RNA, 21 nt, Human
gaacugccauuuccucaucug

SEQ ID NO: 543469 - RNA, 20 nt, Human
gagaacguuuugaacccuag

SEQ ID NO: 543470 - RNA, 20 nt, Human
gagaacguuuugaacccuag

SEQ ID NO: 543471 - RNA, 19 nt, Human
gaggggaagcaauuggcag

SEQ ID NO: 543472 - RNA, 19 nt, Human
gaggggaagcaauuggcag

SEQ ID NO: 543473 - RNA, 28 nt, Human
gcuccugccccucccccuccccagcccc

SEQ ID NO: 543474 - RNA, 19 nt, Human
ggaauugggggcaaggcca

SEQ ID NO: 543475 - RNA, 19 nt, Human
ggcccugcagcagcugcuc

SEQ ID NO: 543476 - RNA, 18 nt, Human
uagcugucacgugccacc

SEQ ID NO: 543477 - RNA, 24 nt, Human
uauggcagugcagaugaaaugaga

SEQ ID NO: 543478 - RNA, 24 nt, Human
uauggcagugcagaugaaaugaga

SEQ ID NO: 543479 - RNA, 20 nt, Human
ucacagaggggaagcaauug

SEQ ID NO: 543480 - RNA, 20 nt, Human
ucacagaggggaagcaauug

SEQ ID NO: 543481 - RNA, 18 nt, Human
uccugccccucccccucc

SEQ ID NO: 543482 - RNA, 23 nt, Human
ugauggaauugggggcaaggcca

SEQ ID NO: 543483 - RNA, 23 nt, Human
ugcagaugaaaugagaucacaga

SEQ ID NO: 543484 - RNA, 23 nt, Human
ugcagaugaaaugagaucacaga

SEQ ID NO: 543485 - RNA, 19 nt, Human
ugccauuuccucaucuggu

SEQ ID NO: 543486 - RNA, 19 nt, Human
ugccauuuccucaucuggu

SEQ ID NO: 543487 - RNA, 20 nt, Human
uucgcaaacucacuuccugc

SEQ ID NO: 543488 - RNA, 22 nt, Human
uuuuuuuuugguugucucuaau

SEQ ID NO: 543489 - RNA, 24 nt, Human
uuuuuuuuuuugguugucucuaau

SEQ ID NO: 543490 - RNA, 18 nt, Human
uuuuuuuuuuuuuuuuug

SEQ ID NO: 543491 - RNA, 18 nt, Human
uuuuuuuuuuuuuuuuug

SEQ ID NO: 543492 - RNA, 18 nt, Human
uuuuuuuuuuuuuuuuug

SEQ ID NO: 543493 - RNA, 18 nt, Human
uuuuuuuuuuuuuuuuug

SEQ ID NO: 543494 - RNA, 22 nt, Human
agaccccugcauggcaccacau

SEQ ID NO: 543495 - RNA, 26 nt, Human
agcggcggcaguagcagcggccuugg

SEQ ID NO: 543496 - RNA, 18 nt, Human
caggcggcgaacgcggca

SEQ ID NO: 543497 - RNA, 19 nt, Human
ccccccggccccgcccgga

SEQ ID NO: 543498 - RNA, 19 nt, Human
ccccccggccccgcccgga

SEQ ID NO: 543499 - RNA, 20 nt, Human
ccgccuccacuccgguccug

SEQ ID NO: 543500 - RNA, 20 nt, Human
ccugcgccgcuucaugcugc

SEQ ID NO: 543501 - RNA, 22 nt, Human
cggcaguagcagcggccuuggc

SEQ ID NO: 543502 - RNA, 21 nt, Human
cggccuuggccucggaggcuu

SEQ ID NO: 543503 - RNA, 23 nt, Human
cggcggcaguagcagcggccuug

SEQ ID NO: 543504 - RNA, 20 nt, Human
cugguugcaguggcuuccuc

SEQ ID NO: 543505 - RNA, 20 nt, Human
cuucaugcugcgccgccucc

SEQ ID NO: 543506 - RNA, 23 nt, Human
gcggcaguagcagcggccuuggc

SEQ ID NO: 543507 - RNA, 22 nt, Human
gcgggccugcgccgcuucaugc

SEQ ID NO: 543508 - RNA, 21 nt, Human
gucccgacgugcgcuauggag

SEQ ID NO: 543509 - RNA, 28 nt, Human
uaccagagaguucuacacaggucaagau

SEQ ID NO: 543510 - RNA, 22 nt, Human
uguauaccagagaguucuacac

SEQ ID NO: 543511 - RNA, 18 nt, Human
uucaugcugcgccgccuc

SEQ ID NO: 543512 - RNA, 18 nt, Human
uuccuuccccccggcccc

SEQ ID NO: 543513 - RNA, 21 nt, Human
uucuuaugguauugcuggguc

SEQ ID NO: 543514 - RNA, 19 nt, Human
aacuuccgguguucuccuu

SEQ ID NO: 543515 - RNA, 19 nt, Human
caacuuccgguguucuccu

SEQ ID NO: 543516 - RNA, 20 nt, Human
ccucggggcuggccagcgcu

SEQ ID NO: 543517 - RNA, 22 nt, Human
ccugguuccccgcggaggcugc

SEQ ID NO: 543518 - RNA, 18 nt, Human
cgcggaggcugcagccac

SEQ ID NO: 543519 - RNA, 21 nt, Human
cggggcuggccagcgcugggc

SEQ ID NO: 543520 - RNA, 19 nt, Human
cugcagccacuugugcugu

SEQ ID NO: 543521 - RNA, 18 nt, Human
gcagcggcuccucggggc

SEQ ID NO: 543522 - RNA, 23 nt, Human
uccaacuuccgguguucuccuug

SEQ ID NO: 543523 - RNA, 21 nt, Human
uccccgcggaggcugcagcca

SEQ ID NO: 543524 - RNA, 24 nt, Human
uccccgcggaggcugcagccacuu

SEQ ID NO: 543525 - RNA, 21 nt, Human
uccucggggcuggccagcgcu

SEQ ID NO: 543526 - RNA, 21 nt, Human
ucggggcggugaaggcagcgg

SEQ ID NO: 543527 - RNA, 21 nt, Human
ugaaggcagcggcuccucggg

SEQ ID NO: 543528 - RNA, 22 nt, Human
ugcagccacuugugcugugaug

SEQ ID NO: 543529 - RNA, 19 nt, Human
ugugauguggcggcucccg

SEQ ID NO: 543530 - RNA, 20 nt, Human
aagaagccugguguccagcu

SEQ ID NO: 543531 - RNA, 24 nt, Human
aggacagugucuuccuaaaggauc

SEQ ID NO: 543532 - RNA, 18 nt, Human
aggagggcucugcgccca

SEQ ID NO: 543533 - RNA, 22 nt, Human
aggcgggacucggccccucgcc

SEQ ID NO: 543534 - RNA, 20 nt, Human
aggggcggcacaagcggggg

SEQ ID NO: 543535 - RNA, 20 nt, Human
caaagcugcuacuaagaagc

SEQ ID NO: 543536 - RNA, 23 nt, Human
caaaugcccaccaggcgggacuc

SEQ ID NO: 543537 - RNA, 25 nt, Human
cacaagcgggggcgggcgggcggac

SEQ ID NO: 543538 - RNA, 21 nt, Human
caccaggcgggacucggcccc

SEQ ID NO: 543539 - RNA, 19 nt, Human
cacugugagcccggcaggu

SEQ ID NO: 543540 - RNA, 23 nt, Human
cagguucccuguccccaggcugg

SEQ ID NO: 543541 - RNA, 21 nt, Human
cagugacaucuccccagguuc

SEQ ID NO: 543542 - RNA, 24 nt, Human
caguguacaaagcugcuacuaaga

SEQ ID NO: 543543 - RNA, 21 nt, Human
ccaccaggcgggacucggccc

SEQ ID NO: 543544 - RNA, 23 nt, Human
cccaccaggcgggacucggcccc

SEQ ID NO: 543545 - RNA, 20 nt, Human
cccacuuuccucccaggccu

SEQ ID NO: 543546 - RNA, 20 nt, Human
ccccagguucagcccuucuc

SEQ ID NO: 543547 - RNA, 23 nt, Human
ccccagguucagcccuucucuug

SEQ ID NO: 543548 - RNA, 19 nt, Human
ccucacccuggcagugaca

SEQ ID NO: 543549 - RNA, 22 nt, Human
ccugguguccagcugcucccac

SEQ ID NO: 543550 - RNA, 25 nt, Human
cgccaagcaccuucgagaaacuucu

SEQ ID NO: 543551 - RNA, 24 nt, Human
cgcgugagccgggacgcgugcgug

SEQ ID NO: 543552 - RNA, 21 nt, Human
cggcugcgggaguguagggcu

SEQ ID NO: 543553 - RNA, 21 nt, Human
cuccguuccagucccgccccc

SEQ ID NO: 543554 - RNA, 22 nt, Human
cucugcgcccacuuuccuccca

SEQ ID NO: 543555 - RNA, 22 nt, Human
cugcgcccacuuuccucccagg

SEQ ID NO: 543556 - RNA, 20 nt, Human
cuggcagugacaucucccca

SEQ ID NO: 543557 - RNA, 18 nt, Human
gaagucucagcagcugug

SEQ ID NO: 543558 - RNA, 18 nt, Human
gacggcgggagacagacu

SEQ ID NO: 543559 - RNA, 20 nt, Human
gaggagcggcugcgggagug

SEQ ID NO: 543560 - RNA, 19 nt, Human
gaggcaggaugacugccug

SEQ ID NO: 543561 - RNA, 19 nt, Human
gaggcagugacugguggug

SEQ ID NO: 543562 - RNA, 19 nt, Human
gcaagaccgccaagcaccu

SEQ ID NO: 543563 - RNA, 22 nt, Human
gccgguucaccaagaagccugg

SEQ ID NO: 543564 - RNA, 23 nt, Human
gcucugcgcccacuuuccuccca

SEQ ID NO: 543565 - RNA, 18 nt, Human
ggaaggcaagaccgccaa

SEQ ID NO: 543566 - RNA, 22 nt, Human
ggagagccuguggggaggggga

SEQ ID NO: 543567 - RNA, 18 nt, Human
ggaguguagggcucugcg

SEQ ID NO: 543568 - RNA, 21 nt, Human
ggcgggcggacgcgugagccg

SEQ ID NO: 543569 - RNA, 19 nt, Human
gggaguguagggcucugcg

SEQ ID NO: 543570 - RNA, 20 nt, Human
ggggggcgagugcccugggg

SEQ ID NO: 543571 - RNA, 19 nt, Human
ggugguggggaggcggcag

SEQ ID NO: 543572 - RNA, 25 nt, Human
guccagcugcucccacacugugagc

SEQ ID NO: 543573 - RNA, 22 nt, Human
gugcccuggggcccccgcggcc

SEQ ID NO: 543574 - RNA, 22 nt, Human
uaaaagggacccuccacgggcg

SEQ ID NO: 543575 - RNA, 19 nt, Human
uaagaggacagugucuucc

SEQ ID NO: 543576 - RNA, 21 nt, Human
uaaggaggggggcgagugccc

SEQ ID NO: 543577 - RNA, 19 nt, Human
uacaaagcugcuacuaaga

SEQ ID NO: 543578 - RNA, 21 nt, Human
ucacagggccgguccugggcg

SEQ ID NO: 543579 - RNA, 21 nt, Human
uccccaggcugggcccagcgg

SEQ ID NO: 543580 - RNA, 21 nt, Human
uccccagguucagcccuucuc

SEQ ID NO: 543581 - RNA, 24 nt, Human
uccccagguucagcccuucucuug

SEQ ID NO: 543582 - RNA, 19 nt, Human
ucccugaagucucagcagc

SEQ ID NO: 543583 - RNA, 23 nt, Human
ucccugccauguggcuccaccuc

SEQ ID NO: 543584 - RNA, 23 nt, Human
ucgagaaacuucuacaaaagaaa

SEQ ID NO: 543585 - RNA, 19 nt, Human
ucuacaaaagaaaaugcua

SEQ ID NO: 543586 - RNA, 18 nt, Human
ucucuugaggggcucuug

SEQ ID NO: 543587 - RNA, 23 nt, Human
ucucuugaggggcucuuggcagc

SEQ ID NO: 543588 - RNA, 18 nt, Human
ucuuggcagcaggaccug

SEQ ID NO: 543589 - RNA, 21 nt, Human
ugaagucucagcagcugugug

SEQ ID NO: 543590 - RNA, 19 nt, Human
ugagcaggagggcucugcg

SEQ ID NO: 543591 - RNA, 21 nt, Human
ugaggggcucuuggcagcagg

SEQ ID NO: 543592 - RNA, 20 nt, Human
ugcccuggggcccccgcggc

SEQ ID NO: 543593 - RNA, 22 nt, Human
ugccugggcucaggcugccggc

SEQ ID NO: 543594 - RNA, 19 nt, Human
uggcagcaggaccugggac

SEQ ID NO: 543595 - RNA, 19 nt, Human
uggcaugcacagguuccug

SEQ ID NO: 543596 - RNA, 24 nt, Human
uggcuacaguguccucaguguaca

SEQ ID NO: 543597 - RNA, 21 nt, Human
ugggaccccacaaggagagcc

SEQ ID NO: 543598 - RNA, 19 nt, Human
uggggacggcgggagacag

SEQ ID NO: 543599 - RNA, 19 nt, Human
ugggucccugaagucucag

SEQ ID NO: 543600 - RNA, 22 nt, Human
uggugguggggaggcggcagca

SEQ ID NO: 543601 - RNA, 18 nt, Human
uguggggagggggaaggc

SEQ ID NO: 543602 - RNA, 22 nt, Human
aaccuguccuuucuggaacccu

SEQ ID NO: 543603 - RNA, 25 nt, Human
aaccuguccuuucuggaacccucug

SEQ ID NO: 543604 - RNA, 22 nt, Human
aagagaagggaagcccaucaaa

SEQ ID NO: 543605 - RNA, 21 nt, Human
acccuaaacuuugggcuucua

SEQ ID NO: 543606 - RNA, 19 nt, Human
agacugugguuuaccccau

SEQ ID NO: 543607 - RNA, 26 nt, Human
agagaagggaagcccaucaaaggggu

SEQ ID NO: 543608 - RNA, 19 nt, Human
aguagcgggaagagaaggg

SEQ ID NO: 543609 - RNA, 24 nt, Human
auaguagcgggaagagaagggaag

SEQ ID NO: 543610 - RNA, 23 nt, Human
cacagccaguucagacuccccag

SEQ ID NO: 543611 - RNA, 23 nt, Human
cagcgcaaacucugcacaccacc

SEQ ID NO: 543612 - RNA, 22 nt, Human
ccaacugcuccaagaagguaaa

SEQ ID NO: 543613 - RNA, 22 nt, Human
ccccauucuuuccauucccagu

SEQ ID NO: 543614 - RNA, 20 nt, Human
cccgcagagccaggcucccg

SEQ ID NO: 543615 - RNA, 24 nt, Human
cccgcagagccaggcucccgggcu

SEQ ID NO: 543616 - RNA, 21 nt, Human
cuccccagacaccagcaccac

SEQ ID NO: 543617 - RNA, 26 nt, Human
cugaguaacaguaaccuguccuuucu

SEQ ID NO: 543618 - RNA, 22 nt, Human
cuugccagaaccaggcucccca

SEQ ID NO: 543619 - RNA, 21 nt, Human
cuuucuggaacccucuggcca

SEQ ID NO: 543620 - RNA, 18 nt, Human
gagaaggcuaaggaaaga

SEQ ID NO: 543621 - RNA, 19 nt, Human
ggaagagaagggaagccca

SEQ ID NO: 543622 - RNA, 18 nt, Human
ggcaaggcuuggcgcugc

SEQ ID NO: 543623 - RNA, 24 nt, Human
gggcaaggcuuggcgcugcuucag

SEQ ID NO: 543624 - RNA, 22 nt, Human
ggugcucuugccagaaccaggc

SEQ ID NO: 543625 - RNA, 21 nt, Human
guccuuucuggaacccucugg

SEQ ID NO: 543626 - RNA, 19 nt, Human
uaccauuucuugggacuca

SEQ ID NO: 543627 - RNA, 22 nt, Human
uaccccauucuuuccauuccca

SEQ ID NO: 543628 - RNA, 23 nt, Human
uaccccauucuuuccauucccag

SEQ ID NO: 543629 - RNA, 23 nt, Human
uauagaucacaagggaguacaag

SEQ ID NO: 543630 - RNA, 20 nt, Human
ucagcagcucauaguagcgg

SEQ ID NO: 543631 - RNA, 26 nt, Human
ucagcagcucauaguagcgggaagag

SEQ ID NO: 543632 - RNA, 19 nt, Human
uccagugggguuacucucc

SEQ ID NO: 543633 - RNA, 22 nt, Human
uccccagacaccagcaccacuc

SEQ ID NO: 543634 - RNA, 24 nt, Human
uccccagacaccagcaccacucca

SEQ ID NO: 543635 - RNA, 23 nt, Human
uccccaggacuugggccauacuc

SEQ ID NO: 543636 - RNA, 22 nt, Human
ugagaggcugagaggucauggu

SEQ ID NO: 543637 - RNA, 18 nt, Human
ugagaugaacccagcucc

SEQ ID NO: 543638 - RNA, 21 nt, Human
ugagaugaacccagcuccauu

SEQ ID NO: 543639 - RNA, 21 nt, Human
ugagggauaaucuaaugugau

SEQ ID NO: 543640 - RNA, 19 nt, Human
uggcaggacuugcagcucu

SEQ ID NO: 543641 - RNA, 19 nt, Human
uggcaucauagaaaaaucu

SEQ ID NO: 543642 - RNA, 25 nt, Human
ugggacucagguuccaggguuuaca

SEQ ID NO: 543643 - RNA, 19 nt, Human
ugucugggugcuuuggugu

SEQ ID NO: 543644 - RNA, 19 nt, Human
ugucugggugcuuuggugu

SEQ ID NO: 543645 - RNA, 18 nt, Human
uuuuuuuuuuuuuuuuug

SEQ ID NO: 543646 - RNA, 22 nt, Human
uuuuuuuuuuuuuuuuuggcau

SEQ ID NO: 543647 - RNA, 22 nt, Human
uuuuuuuuuuuuuuuuuuuggc

SEQ ID NO: 543648 - RNA, 19 nt, Human
aaaaccaacuaaaaggggc

SEQ ID NO: 543649 - RNA, 18 nt, Human
accuucucuccucccccc

SEQ ID NO: 543650 - RNA, 24 nt, Human
agacacugagauucccuuuuauuu

SEQ ID NO: 543651 - RNA, 21 nt, Human
agccucccggcucccgggccu

SEQ ID NO: 543652 - RNA, 22 nt, Human
aggggcuauggucuggggggca

SEQ ID NO: 543653 - RNA, 19 nt, Human
cagggcccuagugcccucc

SEQ ID NO: 543654 - RNA, 20 nt, Human
ccagagcaacuaaaaccaac

SEQ ID NO: 543655 - RNA, 18 nt, Human
cccagagcaacuaaaacc

SEQ ID NO: 543656 - RNA, 23 nt, Human
cccccagagcaacuaaaaccaac

SEQ ID NO: 543657 - RNA, 21 nt, Human
ccccuggguccuggugccgcc

SEQ ID NO: 543658 - RNA, 25 nt, Human
cccgcagccucccggcucccgggcc

SEQ ID NO: 543659 - RNA, 26 nt, Human
cccgcagccucccggcucccgggccu

SEQ ID NO: 543660 - RNA, 18 nt, Human
cccuagugcccuccucuu

SEQ ID NO: 543661 - RNA, 21 nt, Human
cccuggguccuggugccgccc

SEQ ID NO: 543662 - RNA, 18 nt, Human
ccgcccccgccguuuccc

SEQ ID NO: 543663 - RNA, 19 nt, Human
ccgcccccgccguuucccg

SEQ ID NO: 543664 - RNA, 18 nt, Human
ccgcuccgcccccgccgu

SEQ ID NO: 543665 - RNA, 20 nt, Human
ccgcuccgcccccgccguuu

SEQ ID NO: 543666 - RNA, 21 nt, Human
ccgcuccgcccccgccguuuc

SEQ ID NO: 543667 - RNA, 19 nt, Human
ccuagugcccuccucuuga

SEQ ID NO: 543668 - RNA, 19 nt, Human
ccuccccccagagcaacua

SEQ ID NO: 543669 - RNA, 23 nt, Human
cuaccuucucuccuccccccaga

SEQ ID NO: 543670 - RNA, 26 nt, Human
cuagugcccuccucuugaagccuccu

SEQ ID NO: 543671 - RNA, 21 nt, Human
cucccgggccugcucgccgcc

SEQ ID NO: 543672 - RNA, 22 nt, Human
cucuaccuucucuccucccccc

SEQ ID NO: 543673 - RNA, 22 nt, Human
cuggccggugcgcgucccuccc

SEQ ID NO: 543674 - RNA, 27 nt, Human
gcccuagugcccuccucuugaagccuc

SEQ ID NO: 543675 - RNA, 19 nt, Human
gccucucucgccgcgucgg

SEQ ID NO: 543676 - RNA, 25 nt, Human
gcucuaccuucucuccuccccccag

SEQ ID NO: 543677 - RNA, 18 nt, Human
ggccugcucgccgcccgc

SEQ ID NO: 543678 - RNA, 20 nt, Human
uaaaaccaacuaaaaggggc

SEQ ID NO: 543679 - RNA, 24 nt, Human
uaaaaggggcuauggucugggggg

SEQ ID NO: 543680 - RNA, 19 nt, Human
uaagaacagcucuaccuuc

SEQ ID NO: 543681 - RNA, 24 nt, Human
uaagaacagcucuaccuucucucc

SEQ ID NO: 543682 - RNA, 20 nt, Human
ucccgcggaguccuagcgcc

SEQ ID NO: 543683 - RNA, 21 nt, Human
ucccgggccugcucgccgccc

SEQ ID NO: 543684 - RNA, 24 nt, Human
uggccggugcgcgucccuccccag

SEQ ID NO: 543685 - RNA, 24 nt, Human
aaaaaaccaaaccaaaccaaaaca

SEQ ID NO: 543686 - RNA, 21 nt, Human
aaaaagacaucuguaaauuca

SEQ ID NO: 543687 - RNA, 26 nt, Human
aaaacaagaaaaaccaccuuacaacc

SEQ ID NO: 543688 - RNA, 21 nt, Human
aaaaccaaaccaaaccaaaac

SEQ ID NO: 543689 - RNA, 21 nt, Human
aaaagacucaaaccaagggga

SEQ ID NO: 543690 - RNA, 24 nt, Human
aaaaugccaaauuaguuuuuaaua

SEQ ID NO: 543691 - RNA, 18 nt, Human
aaacaagaaaaaccaccu

SEQ ID NO: 543692 - RNA, 21 nt, Human
aaaccaaaccaaaacaagaaa

SEQ ID NO: 543693 - RNA, 26 nt, Human
aaaccaaaccaaaccaaaacaagaaa

SEQ ID NO: 543694 - RNA, 22 nt, Human
aacauaaacaacuuuaguuaau

SEQ ID NO: 543695 - RNA, 22 nt, Human
aaccaaaccaaaacaagaaaaa

SEQ ID NO: 543696 - RNA, 23 nt, Human
aaccaaaccaaaccaaaacaaga

SEQ ID NO: 543697 - RNA, 18 nt, Human
aagaacacaaacauaaac

SEQ ID NO: 543698 - RNA, 21 nt, Human
aagaacacaaacauaaacaac

SEQ ID NO: 543699 - RNA, 26 nt, Human
aagaacucgguuuaaacugguagcca

SEQ ID NO: 543700 - RNA, 20 nt, Human
aagagccaagaacuggacag

SEQ ID NO: 543701 - RNA, 23 nt, Human
aaugacaaaaagacaucuguaaa

SEQ ID NO: 543702 - RNA, 19 nt, Human
acaaauaagaggagggaaa

SEQ ID NO: 543703 - RNA, 24 nt, Human
acaaucuucccuucauaaagucag

SEQ ID NO: 543704 - RNA, 23 nt, Human
acaugcuaaauccagauaaaaca

SEQ ID NO: 543705 - RNA, 21 nt, Human
accaaaacaagaaaaaccacc

SEQ ID NO: 543706 - RNA, 23 nt, Human
accaaaacaagaaaaaccaccac

SEQ ID NO: 543707 - RNA, 19 nt, Human
acuaagauauuuaaaacag

SEQ ID NO: 543708 - RNA, 24 nt, Human
acuacaauuuauggcaauagaucu

SEQ ID NO: 543709 - RNA, 22 nt, Human
agaaagacauuucuuuuucuuc

SEQ ID NO: 543710 - RNA, 18 nt, Human
agaacacaaacauaaaca

SEQ ID NO: 543711 - RNA, 24 nt, Human
agcaagggacuaugaagaaggaaa

SEQ ID NO: 543712 - RNA, 19 nt, Human
agcuauuaaaaaaccaaac

SEQ ID NO: 543713 - RNA, 23 nt, Human
agcuuuacagccuauuauaccuu

SEQ ID NO: 543714 - RNA, 23 nt, Human
aggaacaagaggaaaacacuagc

SEQ ID NO: 543715 - RNA, 21 nt, Human
aucuucccccuccucucacug

SEQ ID NO: 543716 - RNA, 21 nt, Human
augcacaggggaaauucauug

SEQ ID NO: 543717 - RNA, 18 nt, Human
caaaacaagaaaaaccac

SEQ ID NO: 543718 - RNA, 21 nt, Human
caacaauaacaaauaagagga

SEQ ID NO: 543719 - RNA, 19 nt, Human
caaccagggcggcugccgg

SEQ ID NO: 543720 - RNA, 26 nt, Human
caaccucacaugagacauaaccaacu

SEQ ID NO: 543721 - RNA, 19 nt, Human
caagaaaaaccaccuuaca

SEQ ID NO: 543722 - RNA, 20 nt, Human
cacacagccaucaaaauagg

SEQ ID NO: 543723 - RNA, 23 nt, Human
cacuggguuaccaggcauuuucc

SEQ ID NO: 543724 - RNA, 27 nt, Human
cacuucaaaacaacacaccuaccagca

SEQ ID NO: 543725 - RNA, 19 nt, Human
cagauaaaacacuucaaaa

SEQ ID NO: 543726 - RNA, 21 nt, Human
cagcaguaggguaaaucagcu

SEQ ID NO: 543727 - RNA, 19 nt, Human
cagcuccuuaggucuuccu

SEQ ID NO: 543728 - RNA, 22 nt, Human
cauacagauacauacaaguuug

SEQ ID NO: 543729 - RNA, 23 nt, Human
caucuucccccuccucucacuga

SEQ ID NO: 543730 - RNA, 18 nt, Human
ccaaaacaagaaaaacca

SEQ ID NO: 543731 - RNA, 20 nt, Human
ccaaaacaagaaaaaccacc

SEQ ID NO: 543732 - RNA, 25 nt, Human
ccccuccucucacugacugacaacc

SEQ ID NO: 543733 - RNA, 28 nt, Human
ccgaguagcagcaccaccugcuccccuu

SEQ ID NO: 543734 - RNA, 24 nt, Human
ccgcaaccauagccaaaaggacca

SEQ ID NO: 543735 - RNA, 18 nt, Human
ccggugagccaucuuccc

SEQ ID NO: 543736 - RNA, 21 nt, Human
ccucccgaguagcagcaccac

SEQ ID NO: 543737 - RNA, 26 nt, Human
ccuucaaccagggcggcugccggagc

SEQ ID NO: 543738 - RNA, 23 nt, Human
ccuucagaauuuaagacaucagg

SEQ ID NO: 543739 - RNA, 19 nt, Human
cuggaguugugccucugcc

SEQ ID NO: 543740 - RNA, 23 nt, Human
cuggaguugugccucugccccau

SEQ ID NO: 543741 - RNA, 23 nt, Human
cuuccuagcagaacgggucccgg

SEQ ID NO: 543742 - RNA, 19 nt, Human
gaaaaaccaccuuacaacc

SEQ ID NO: 543743 - RNA, 21 nt, Human
gaaaugccucuagccaucccc

SEQ ID NO: 543744 - RNA, 19 nt, Human
gaacaagaggaaaacacua

SEQ ID NO: 543745 - RNA, 20 nt, Human
gaacucgguuuaaacuggua

SEQ ID NO: 543746 - RNA, 23 nt, Human
gaucuucacaugcuaaauccaga

SEQ ID NO: 543747 - RNA, 21 nt, Human
ggaaaacacuagcaugcucuc

SEQ ID NO: 543748 - RNA, 22 nt, Human
ggaacaagaggaaaacacuagc

SEQ ID NO: 543749 - RNA, 21 nt, Human
ggaagucuuccaaugacguau

SEQ ID NO: 543750 - RNA, 21 nt, Human
ggaggcugcucugcuuccucc

SEQ ID NO: 543751 - RNA, 23 nt, Human
ggaggcugcucugcuuccucccg

SEQ ID NO: 543752 - RNA, 27 nt, Human
ggcaacaauaacaaauaagaggaggga

SEQ ID NO: 543753 - RNA, 20 nt, Human
gggaaaaaaaagacucaaac

SEQ ID NO: 543754 - RNA, 22 nt, Human
gggcaacaauaacaaauaagag

SEQ ID NO: 543755 - RNA, 18 nt, Human
guauuuccagguucacua

SEQ ID NO: 543756 - RNA, 24 nt, Human
uaaaaaaccaaaccaaaccaaaac

SEQ ID NO: 543757 - RNA, 24 nt, Human
uaaaacaguucccauacaugcaga

SEQ ID NO: 543758 - RNA, 18 nt, Human
uaaacugguagccaaagc

SEQ ID NO: 543759 - RNA, 19 nt, Human
uaagaacacaaacauaaac

SEQ ID NO: 543760 - RNA, 24 nt, Human
uaagaacacaaacauaaacaacuu

SEQ ID NO: 543761 - RNA, 28 nt, Human
uaagaacacaaacauaaacuggagaccc

SEQ ID NO: 543762 - RNA, 21 nt, Human
uaagaggagggaaaaaaaaga

SEQ ID NO: 543763 - RNA, 23 nt, Human
uacagcaagggacuaugaagaag

SEQ ID NO: 543764 - RNA, 18 nt, Human
uagccaaagcaguugcag

SEQ ID NO: 543765 - RNA, 19 nt, Human
uauucuaggcacuggguua

SEQ ID NO: 543766 - RNA, 26 nt, Human
uauuucacuaccuuuauuuucuuuca

SEQ ID NO: 543767 - RNA, 23 nt, Human
ucaaauucauuuaugucaaaauc

SEQ ID NO: 543768 - RNA, 24 nt, Human
ucaggugcuuuucauacacaucau

SEQ ID NO: 543769 - RNA, 18 nt, Human
ucauaaagucaggggagc

SEQ ID NO: 543770 - RNA, 21 nt, Human
ucauaaagucaggggagcccc

SEQ ID NO: 543771 - RNA, 18 nt, Human
ucauauaauauucuaggc

SEQ ID NO: 543772 - RNA, 22 nt, Human
ucauauaauauucuaggcacug

SEQ ID NO: 543773 - RNA, 19 nt, Human
uccacauuguaaacagggc

SEQ ID NO: 543774 - RNA, 24 nt, Human
ucccauacaugcagacucccuuug

SEQ ID NO: 543775 - RNA, 18 nt, Human
ucccggugagccaucuuc

SEQ ID NO: 543776 - RNA, 20 nt, Human
ucccuuugacucugaaggcc

SEQ ID NO: 543777 - RNA, 22 nt, Human
ucucagcgacagcgacggaggc

SEQ ID NO: 543778 - RNA, 27 nt, Human
ucucagcgacagcgacggaggcugcuc

SEQ ID NO: 543779 - RNA, 24 nt, Human
ugaagaaggaaaccgcugugcagu

SEQ ID NO: 543780 - RNA, 27 nt, Human
ugaaggccaaacacacagccaucaaaa

SEQ ID NO: 543781 - RNA, 18 nt, Human
ugaaugaaaacgaguuca

SEQ ID NO: 543782 - RNA, 23 nt, Human
ugacugacaacccagccgggaga

SEQ ID NO: 543783 - RNA, 24 nt, Human
ugagagcuauguugcaagauuuac

SEQ ID NO: 543784 - RNA, 22 nt, Human
ugagcaaauuguucuaaucaua

SEQ ID NO: 543785 - RNA, 24 nt, Human
ugagcaaauuguucuaaucauaaa

SEQ ID NO: 543786 - RNA, 18 nt, Human
ugccucugccccauucuc

SEQ ID NO: 543787 - RNA, 20 nt, Human
uggagcuaaaagaaaaucaa

SEQ ID NO: 543788 - RNA, 21 nt, Human
uuaagaacacaaacauaaaca

SEQ ID NO: 543789 - RNA, 24 nt, Human
uucuuuugauaucauacuaagaua

SEQ ID NO: 543790 - RNA, 23 nt, Human
uugauuauucuuuugauaucaua

SEQ ID NO: 543791 - RNA, 20 nt, Human
uuuauugucacugacaaucu

SEQ ID NO: 543792 - RNA, 24 nt, Human
aaaaaagaaauaaaguagugagga

SEQ ID NO: 543793 - RNA, 22 nt, Human
aaaaacaugauuccauuuacgg

SEQ ID NO: 543794 - RNA, 20 nt, Human
aaaaaucauuagaacacacc

SEQ ID NO: 543795 - RNA, 24 nt, Human
aacuccuuuaaggauuucagggaa

SEQ ID NO: 543796 - RNA, 24 nt, Human
aagaagcaaaacucaacuguacaa

SEQ ID NO: 543797 - RNA, 19 nt, Human
aagccaaaccaauaaaaaa

SEQ ID NO: 543798 - RNA, 24 nt, Human
aaucuccccuucccccaagucuga

SEQ ID NO: 543799 - RNA, 20 nt, Human
aauuugcaauaaucuccccu

SEQ ID NO: 543800 - RNA, 23 nt, Human
acacggucuucaucaaaccauau

SEQ ID NO: 543801 - RNA, 23 nt, Human
agaaaaaaacaaaguucagugua

SEQ ID NO: 543802 - RNA, 22 nt, Human
agaaagaauuucuaaacaugaa

SEQ ID NO: 543803 - RNA, 22 nt, Human
agaaugaguuguauuuuucuua

SEQ ID NO: 543804 - RNA, 21 nt, Human
agaguugauaaaaauccacaa

SEQ ID NO: 543805 - RNA, 23 nt, Human
agccauugacacucaguaagcaa

SEQ ID NO: 543806 - RNA, 25 nt, Human
agggagcgggugagcgggcuccgca

SEQ ID NO: 543807 - RNA, 24 nt, Human
auaaaguaauucuucagguuuuaa

SEQ ID NO: 543808 - RNA, 21 nt, Human
auaaaguucucuacuugaaag

SEQ ID NO: 543809 - RNA, 19 nt, Human
auaaccacaaucucauauu

SEQ ID NO: 543810 - RNA, 18 nt, Human
auggcagcauuucugggu

SEQ ID NO: 543811 - RNA, 30 nt, Human
auggguuccucuauggcagcauuucugggu

SEQ ID NO: 543812 - RNA, 26 nt, Human
cacagccagcccgccagcagucuccu

SEQ ID NO: 543813 - RNA, 23 nt, Human
cacucaguaagcaacacugccau

SEQ ID NO: 543814 - RNA, 22 nt, Human
caugaaagaauaucaguggcua

SEQ ID NO: 543815 - RNA, 23 nt, Human
ccaaaaaaguuuauuagcaugau

SEQ ID NO: 543816 - RNA, 19 nt, Human
ccaaaccaauaaaaaaugc

SEQ ID NO: 543817 - RNA, 25 nt, Human
ccaagucugaagccuuccuuccccc

SEQ ID NO: 543818 - RNA, 20 nt, Human
ccacaaaacagcacuuuuaa

SEQ ID NO: 543819 - RNA, 21 nt, Human
ccaccgccgccaccgcccgag

SEQ ID NO: 543820 - RNA, 24 nt, Human
ccauugacacucaguaagcaacac

SEQ ID NO: 543821 - RNA, 20 nt, Human
cccauccagcccccuucagg

SEQ ID NO: 543822 - RNA, 19 nt, Human
ccccaaggguccucccuuc

SEQ ID NO: 543823 - RNA, 23 nt, Human
ccgccgccaccgcccgagcucga

SEQ ID NO: 543824 - RNA, 19 nt, Human
ccuuccuuccccccuauuc

SEQ ID NO: 543825 - RNA, 22 nt, Human
ccuugcccauccagcccccuuc

SEQ ID NO: 543826 - RNA, 18 nt, Human
cgccgccaccgcccgagc

SEQ ID NO: 543827 - RNA, 25 nt, Human
cgccuugcccauccagcccccuuca

SEQ ID NO: 543828 - RNA, 20 nt, Human
cggggcgaggaggaggaggc

SEQ ID NO: 543829 - RNA, 22 nt, Human
cugaagccaaaccaauaaaaaa

SEQ ID NO: 543830 - RNA, 18 nt, Human
cuggguuuaugguuggag

SEQ ID NO: 543831 - RNA, 21 nt, Human
gaaugaguuguauuuuucuua

SEQ ID NO: 543832 - RNA, 24 nt, Human
gacaugagugaucacaaagucaga

SEQ ID NO: 543833 - RNA, 20 nt, Human
gaccugcauuggagaguggc

SEQ ID NO: 543834 - RNA, 20 nt, Human
gagcgggugagcgggcuccg

SEQ ID NO: 543835 - RNA, 24 nt, Human
gccuugcccauccagcccccuuca

SEQ ID NO: 543836 - RNA, 19 nt, Human
gcuauaccuuaaaaccagu

SEQ ID NO: 543837 - RNA, 18 nt, Human
ggggggugguuaagaaug

SEQ ID NO: 543838 - RNA, 20 nt, Human
guaauugugaacacagaccc

SEQ ID NO: 543839 - RNA, 24 nt, Human
gucagaaccagguuauuuugcauu

SEQ ID NO: 543840 - RNA, 21 nt, Human
gugaauguguugaucugauga

SEQ ID NO: 543841 - RNA, 20 nt, Human
uaaaaugcauaaauguaugu

SEQ ID NO: 543842 - RNA, 26 nt, Human
uaaauuccuacaugauauuuagaaug

SEQ ID NO: 543843 - RNA, 23 nt, Human
uaacagcaaccccugauuuuaac

SEQ ID NO: 543844 - RNA, 19 nt, Human
uaacaguggaagauauugg

SEQ ID NO: 543845 - RNA, 20 nt, Human
uaacccaacucuuauuauga

SEQ ID NO: 543846 - RNA, 20 nt, Human
uaaucuccccuucccccaag

SEQ ID NO: 543847 - RNA, 21 nt, Human
uacuugaaaguuagaaaacac

SEQ ID NO: 543848 - RNA, 25 nt, Human
uacuugaaaguuagaaaacacuuug

SEQ ID NO: 543849 - RNA, 24 nt, Human
uacuugaauuccuggaaaaaaauc

SEQ ID NO: 543850 - RNA, 28 nt, Human
uagaauggcgguccccaaggguccuccc

SEQ ID NO: 543851 - RNA, 21 nt, Human
uauaaagaagcaaaacucaac

SEQ ID NO: 543852 - RNA, 22 nt, Human
ucaguguaugggacaugaguga

SEQ ID NO: 543853 - RNA, 21 nt, Human
ucccggagggugcggacucug

SEQ ID NO: 543854 - RNA, 22 nt, Human
uccuggaaaaaaaucauuagaa

SEQ ID NO: 543855 - RNA, 24 nt, Human
uccuugaacauccaucacuucugc

SEQ ID NO: 543856 - RNA, 20 nt, Human
ucgugacuauugcuuugucu

SEQ ID NO: 543857 - RNA, 23 nt, Human
ucuaaacaugaaagaauaucagu

SEQ ID NO: 543858 - RNA, 25 nt, Human
ucuaacagcaaccccugauuuuaac

SEQ ID NO: 543859 - RNA, 22 nt, Human
ucuccaaaaaaguuuauuagca

SEQ ID NO: 543860 - RNA, 18 nt, Human
ugaaagaauaucaguggc

SEQ ID NO: 543861 - RNA, 19 nt, Human
ugaacacagacccucuucc

SEQ ID NO: 543862 - RNA, 22 nt, Human
ugaacauccaucacuucugcuu

SEQ ID NO: 543863 - RNA, 20 nt, Human
ugaauaauaacagaaagaau

SEQ ID NO: 543864 - RNA, 22 nt, Human
ugagaaccugagauuguccaga

SEQ ID NO: 543865 - RNA, 20 nt, Human
ugcaauuugcaauaaucucc

SEQ ID NO: 543866 - RNA, 20 nt, Human
ugcauuuugucaguagacaa

SEQ ID NO: 543867 - RNA, 21 nt, Human
uggaagauauuggugugagga

SEQ ID NO: 543868 - RNA, 21 nt, Human
uggcuauaccuuaaaaccagu

SEQ ID NO: 543869 - RNA, 21 nt, Human
uggugugaggaugugggaaug

SEQ ID NO: 543870 - RNA, 18 nt, Human
uguccagaaaaaaacaaa

SEQ ID NO: 543871 - RNA, 24 nt, Human
ugugaacacagacccucuuccaag

SEQ ID NO: 543872 - RNA, 20 nt, Human
uguguuuucucuguuuuggg

SEQ ID NO: 543873 - RNA, 21 nt, Human
uguuuugggggggugguuaag

SEQ ID NO: 543874 - RNA, 23 nt, Human
uuaaaacauuuuuaguugcauuu

SEQ ID NO: 543875 - RNA, 20 nt, Human
uuaaaugcucugcucuuugg

SEQ ID NO: 543876 - RNA, 21 nt, Human
uuagaaaacacuuuggggcaa

SEQ ID NO: 543877 - RNA, 25 nt, Human
uucaauucugagaaccugagauugu

SEQ ID NO: 543878 - RNA, 19 nt, Human
uucacugcaauuugcaaua

SEQ ID NO: 543879 - RNA, 20 nt, Human
uugcuuugucugggaaugag

SEQ ID NO: 543880 - RNA, 18 nt, Human
uugggggagaaaaacaug

SEQ ID NO: 543881 - RNA, 20 nt, Human
uuugggggagaaaaacauga

SEQ ID NO: 543882 - RNA, 22 nt, Human
uuuuuuuuuuuuacugacucag

SEQ ID NO: 543883 - RNA, 18 nt, Human
uuuuuuuuuuuuuuuuug

SEQ ID NO: 543884 - RNA, 24 nt, Human
aaagugcugggauuacagguguga

SEQ ID NO: 543885 - RNA, 24 nt, Human
aaagugcugggauuauaggcguga

SEQ ID NO: 543886 - RNA, 23 nt, Human
aacccugucccgccacaucccac

SEQ ID NO: 543887 - RNA, 21 nt, Human
aagaaccugggaagaagagug

SEQ ID NO: 543888 - RNA, 20 nt, Human
aagaaggaaauaaugacaau

SEQ ID NO: 543889 - RNA, 25 nt, Human
aagacauccuguccuccacauggcc

SEQ ID NO: 543890 - RNA, 20 nt, Human
aaggaacagaugcuucugag

SEQ ID NO: 543891 - RNA, 23 nt, Human
aagugauucuucugcuucagcca

SEQ ID NO: 543892 - RNA, 18 nt, Human
aagugcugggauuacagg

SEQ ID NO: 543893 - RNA, 19 nt, Human
aagugcugggauuacaggu

SEQ ID NO: 543894 - RNA, 26 nt, Human
aagugcugggauuacaggugugagcc

SEQ ID NO: 543895 - RNA, 19 nt, Human
aagugcugggauuauaggc

SEQ ID NO: 543896 - RNA, 19 nt, Human
aagugcugggauuauaggc

SEQ ID NO: 543897 - RNA, 26 nt, Human
aagugcugggauuauaggcgugagcc

SEQ ID NO: 543898 - RNA, 20 nt, Human
acaaacacggugaccaucau

SEQ ID NO: 543899 - RNA, 19 nt, Human
acacaacaaacacggugac

SEQ ID NO: 543900 - RNA, 23 nt, Human
acagagucagguaggagcagaga

SEQ ID NO: 543901 - RNA, 20 nt, Human
accaauucucccuccacagg

SEQ ID NO: 543902 - RNA, 24 nt, Human
accacguuggucaggcuggucucg

SEQ ID NO: 543903 - RNA, 21 nt, Human
acccagcaacccugucccgcc

SEQ ID NO: 543904 - RNA, 19 nt, Human
acccaggcuggagugcagu

SEQ ID NO: 543905 - RNA, 25 nt, Human
acccgccuuggccucccaaagugcu

SEQ ID NO: 543906 - RNA, 24 nt, Human
accuugugauccacccgccuuggc

SEQ ID NO: 543907 - RNA, 18 nt, Human
acgggguuucaccacguu

SEQ ID NO: 543908 - RNA, 20 nt, Human
acgggguuucaccacguugg

SEQ ID NO: 543909 - RNA, 24 nt, Human
acgggguuucaccacguuggucag

SEQ ID NO: 543910 - RNA, 19 nt, Human
acuacaggugcgugccacc

SEQ ID NO: 543911 - RNA, 18 nt, Human
acugcaaccucugccucc

SEQ ID NO: 543912 - RNA, 22 nt, Human
acugcaaccucugccuccuggg

SEQ ID NO: 543913 - RNA, 22 nt, Human
acugccuccuccacugaugcuc

SEQ ID NO: 543914 - RNA, 21 nt, Human
agagacuccccaaggccugaa

SEQ ID NO: 543915 - RNA, 20 nt, Human
agaucuucccccuccacugg

SEQ ID NO: 543916 - RNA, 18 nt, Human
agcagcaccaccuccccc

SEQ ID NO: 543917 - RNA, 19 nt, Human
agccaccacacccagccua

SEQ ID NO: 543918 - RNA, 21 nt, Human
agccaccacacccagccuaga

SEQ ID NO: 543919 - RNA, 24 nt, Human
agcuggucuugaacuccuggccuc

SEQ ID NO: 543920 - RNA, 19 nt, Human
aggagcagagacuccccaa

SEQ ID NO: 543921 - RNA, 20 nt, Human
aggaggcugcugcugccccc

SEQ ID NO: 543922 - RNA, 21 nt, Human
aggcgugagccaccacaccca

SEQ ID NO: 543923 - RNA, 25 nt, Human
aggcuggagugcaguagcaugaucu

SEQ ID NO: 543924 - RNA, 25 nt, Human
aggcuggagugcaguggcacaaucu

SEQ ID NO: 543925 - RNA, 20 nt, Human
agggacugcagggaggcagg

SEQ ID NO: 543926 - RNA, 23 nt, Human
agguaggagcagagacuccccaa

SEQ ID NO: 543927 - RNA, 19 nt, Human
agguucaagugauucuucu

SEQ ID NO: 543928 - RNA, 21 nt, Human
agguucaagugauucuucugc

SEQ ID NO: 543929 - RNA, 18 nt, Human
aguagcugggauuacagg

SEQ ID NO: 543930 - RNA, 22 nt, Human
agucaccaauucucccuccaca

SEQ ID NO: 543931 - RNA, 21 nt, Human
agugaaggggacagauagaaa

SEQ ID NO: 543932 - RNA, 24 nt, Human
agugcaguagcaugaucuuggcug

SEQ ID NO: 543933 - RNA, 20 nt, Human
agugcaguggcacaaucucg

SEQ ID NO: 543934 - RNA, 24 nt, Human
agugcaguggcacaaucucggcuc

SEQ ID NO: 543935 - RNA, 19 nt, Human
agugguccacccaccucag

SEQ ID NO: 543936 - RNA, 19 nt, Human
auccacccgccuuggccuc

SEQ ID NO: 543937 - RNA, 24 nt, Human
augcuucuauuuuuaguagagacg

SEQ ID NO: 543938 - RNA, 23 nt, Human
augggguuucgccauguuggcca

SEQ ID NO: 543939 - RNA, 18 nt, Human
auucuccugccucagccu

SEQ ID NO: 543940 - RNA, 24 nt, Human
caaagugcugggauuacaggugug

SEQ ID NO: 543941 - RNA, 24 nt, Human
caaagugcugggauuauaggcgug

SEQ ID NO: 543942 - RNA, 19 nt, Human
caacaaacacggugaccau

SEQ ID NO: 543943 - RNA, 20 nt, Human
caagugauucuccugccuca

SEQ ID NO: 543944 - RNA, 22 nt, Human
caagugauucuccugccucagc

SEQ ID NO: 543945 - RNA, 22 nt, Human
caagugauucuucugcuucagc

SEQ ID NO: 543946 - RNA, 23 nt, Human
caauucucccuccacaggagccc

SEQ ID NO: 543947 - RNA, 20 nt, Human
cacagaaaggguaccaucca

SEQ ID NO: 543948 - RNA, 21 nt, Human
cacagccauguaccccuccug

SEQ ID NO: 543949 - RNA, 22 nt, Human
cacaguaaguacacaacaaaca

SEQ ID NO: 543950 - RNA, 23 nt, Human
cacaguaaguacacaacaaacac

SEQ ID NO: 543951 - RNA, 21 nt, Human
caccacacccagccuagaguu

SEQ ID NO: 543952 - RNA, 22 nt, Human
caccacacccagccuagaguua

SEQ ID NO: 543953 - RNA, 19 nt, Human
caccaccucccccaucaca

SEQ ID NO: 543954 - RNA, 21 nt, Human
caccacguuggucaggcuggu

SEQ ID NO: 543955 - RNA, 24 nt, Human
caccacguuggucaggcuggucuc

SEQ ID NO: 543956 - RNA, 22 nt, Human
cacccaccucagccucccaaag

SEQ ID NO: 543957 - RNA, 23 nt, Human
cacccaccucagccucccaaagu

SEQ ID NO: 543958 - RNA, 23 nt, Human
cacccgccuuggccucccaaagu

SEQ ID NO: 543959 - RNA, 24 nt, Human
cacccgccuuggccucccaaagug

SEQ ID NO: 543960 - RNA, 22 nt, Human
caccgcuuucccccuuccccac

SEQ ID NO: 543961 - RNA, 24 nt, Human
caccucagccucccaaagugcugg

SEQ ID NO: 543962 - RNA, 18 nt, Human
caccucccccaucacagc

SEQ ID NO: 543963 - RNA, 21 nt, Human
caccucgugaccaggaaggaa

SEQ ID NO: 543964 - RNA, 19 nt, Human
caccugcguagcggggacu

SEQ ID NO: 543965 - RNA, 19 nt, Human
caccuuaacuccuccuccu

SEQ ID NO: 543966 - RNA, 19 nt, Human
cagaauccucacuccccaa

SEQ ID NO: 543967 - RNA, 18 nt, Human
cagaucuucccccuccac

SEQ ID NO: 543968 - RNA, 18 nt, Human
cagcacaguaaguacaca

SEQ ID NO: 543969 - RNA, 18 nt, Human
cagccauguaccccuccu

SEQ ID NO: 543970 - RNA, 20 nt, Human
cagccuccugaguagcuggg

SEQ ID NO: 543971 - RNA, 18 nt, Human
caggagcccagcacagaa

SEQ ID NO: 543972 - RNA, 19 nt, Human
caggagcccagcacagaaa

SEQ ID NO: 543973 - RNA, 21 nt, Human
cagguucaagugauucuucug

SEQ ID NO: 543974 - RNA, 24 nt, Human
caucacagccauguaccccuccug

SEQ ID NO: 543975 - RNA, 24 nt, Human
cauguuggccaagcuggucuugaa

SEQ ID NO: 543976 - RNA, 23 nt, Human
cauugggagaggaaggaccacug

SEQ ID NO: 543977 - RNA, 20 nt, Human
ccaaagugcugggauuacag

SEQ ID NO: 543978 - RNA, 21 nt, Human
ccaaagugcugggauuacagg

SEQ ID NO: 543979 - RNA, 21 nt, Human
ccaaagugcugggauuacagg

SEQ ID NO: 543980 - RNA, 24 nt, Human
ccaaagugcugggauuacaggugu

SEQ ID NO: 543981 - RNA, 20 nt, Human
ccaaagugcugggauuauag

SEQ ID NO: 543982 - RNA, 22 nt, Human
ccaaagugcugggauuauaggc

SEQ ID NO: 543983 - RNA, 24 nt, Human
ccaaagugcugggauuauaggcgu

SEQ ID NO: 543984 - RNA, 18 nt, Human
ccacauccucccaccuuu

SEQ ID NO: 543985 - RNA, 25 nt, Human
ccacauccucccaccuuuguggauc

SEQ ID NO: 543986 - RNA, 20 nt, Human
ccaccacacccugcuaauuu

SEQ ID NO: 543987 - RNA, 26 nt, Human
ccacccaccucagccucccaaagugc

SEQ ID NO: 543988 - RNA, 24 nt, Human
ccaccugcguagcggggacuacag

SEQ ID NO: 543989 - RNA, 20 nt, Human
ccacuaaacuuuaacagccc

SEQ ID NO: 543990 - RNA, 20 nt, Human
ccaugagcucuucccgauuc

SEQ ID NO: 543991 - RNA, 21 nt, Human
ccauguuggccaagcuggucu

SEQ ID NO: 543992 - RNA, 21 nt, Human
ccauguuggccaagcuggucu

SEQ ID NO: 543993 - RNA, 24 nt, Human
ccccaaggccugaaagugaagggg

SEQ ID NO: 543994 - RNA, 25 nt, Human
ccccacauccucccaccuuugugga

SEQ ID NO: 543995 - RNA, 26 nt, Human
ccccaucacagccauguaccccuccu

SEQ ID NO: 543996 - RNA, 22 nt, Human
cccccaucacagccauguaccc

SEQ ID NO: 543997 - RNA, 20 nt, Human
cccgccacaucccacauccc

SEQ ID NO: 543998 - RNA, 19 nt, Human
cccugucccgccacauccc

SEQ ID NO: 543999 - RNA, 22 nt, Human
ccucaagugguccacccaccuc

SEQ ID NO: 544000 - RNA, 24 nt, Human
ccuccuggguucaagugauucucc

SEQ ID NO: 544001 - RNA, 22 nt, Human
ccucugccuccuggguucaagu

SEQ ID NO: 544002 - RNA, 18 nt, Human
ccucugcgaggaaagcuc

SEQ ID NO: 544003 - RNA, 23 nt, Human
ccugaguagcugggauuacaggc

SEQ ID NO: 544004 - RNA, 24 nt, Human
ccugaguagcugggauuacaggca

SEQ ID NO: 544005 - RNA, 23 nt, Human
ccugccucagccuccugaguagc

SEQ ID NO: 544006 - RNA, 18 nt, Human
ccuggccucaaguggucc

SEQ ID NO: 544007 - RNA, 24 nt, Human
ccuggccucaagugguccacccac

SEQ ID NO: 544008 - RNA, 23 nt, Human
ccuggguucaagugauucuccuc

SEQ ID NO: 544009 - RNA, 23 nt, Human
ccuggguucaagugauucuccug

SEQ ID NO: 544010 - RNA, 27 nt, Human
cgccauguuggccaagcuggucuugaa

SEQ ID NO: 544011 - RNA, 24 nt, Human
cgcucugucacccaggcuggagug

SEQ ID NO: 544012 - RNA, 20 nt, Human
cggccuccguacuccuuccu

SEQ ID NO: 544013 - RNA, 18 nt, Human
cggcuccuucucggccuc

SEQ ID NO: 544014 - RNA, 24 nt, Human
cgguagagaugggguuucgccaug

SEQ ID NO: 544015 - RNA, 24 nt, Human
cucacugcaaccuccaccucucag

SEQ ID NO: 544016 - RNA, 24 nt, Human
cucagccuccugaguagcugggau

SEQ ID NO: 544017 - RNA, 23 nt, Human
cuccuccugccacuaaacuuuaa

SEQ ID NO: 544018 - RNA, 23 nt, Human
cuccugccacuaaacuuuaacag

SEQ ID NO: 544019 - RNA, 23 nt, Human
cuccuggccucaagugguccacc

SEQ ID NO: 544020 - RNA, 20 nt, Human
cuccuggguucaagugauuc

SEQ ID NO: 544021 - RNA, 21 nt, Human
cuccuggguucaagugauucu

SEQ ID NO: 544022 - RNA, 24 nt, Human
cucgcucugucacccaggcuggag

SEQ ID NO: 544023 - RNA, 20 nt, Human
cucuaucgcccaggcuggag

SEQ ID NO: 544024 - RNA, 23 nt, Human
cucuaucgcccaggcuggagugc

SEQ ID NO: 544025 - RNA, 19 nt, Human
cucucagguucaagugauu

SEQ ID NO: 544026 - RNA, 19 nt, Human
cucugcguccucaccgcuu

SEQ ID NO: 544027 - RNA, 21 nt, Human
cucuucccgauuccacagucc

SEQ ID NO: 544028 - RNA, 24 nt, Human
cucuugaccuugugauccacccgc

SEQ ID NO: 544029 - RNA, 24 nt, Human
cugacugcaaccucugccuccugg

SEQ ID NO: 544030 - RNA, 23 nt, Human
cugaguagcugggauuacaggca

SEQ ID NO: 544031 - RNA, 21 nt, Human
cugaugcuccccugaaauuac

SEQ ID NO: 544032 - RNA, 19 nt, Human
cugcaaccucugccuccug

SEQ ID NO: 544033 - RNA, 23 nt, Human
cugcaaccucugccuccuggguu

SEQ ID NO: 544034 - RNA, 24 nt, Human
cugcaaccucugccuccuggguuc

SEQ ID NO: 544035 - RNA, 20 nt, Human
cugcagaucuucccccucca

SEQ ID NO: 544036 - RNA, 23 nt, Human
cugccucagccuccugaguagcu

SEQ ID NO: 544037 - RNA, 19 nt, Human
cugccuccuccacugaugc

SEQ ID NO: 544038 - RNA, 22 nt, Human
cugccuccuccacugaugcucc

SEQ ID NO: 544039 - RNA, 23 nt, Human
cugccuccuggguucaagugauu

SEQ ID NO: 544040 - RNA, 24 nt, Human
cuggagugcaguagcaugaucuug

SEQ ID NO: 544041 - RNA, 26 nt, Human
gaccaucauccucacugagcaugaaa

SEQ ID NO: 544042 - RNA, 20 nt, Human
gaccuugugauccacccgcc

SEQ ID NO: 544043 - RNA, 21 nt, Human
gaccuugugauccacccgccu

SEQ ID NO: 544044 - RNA, 21 nt, Human
gaccuugugauccacccgccu

SEQ ID NO: 544045 - RNA, 24 nt, Human
gaccuugugauccacccgccuugg

SEQ ID NO: 544046 - RNA, 23 nt, Human
gagacgggguuucaccacguugg

SEQ ID NO: 544047 - RNA, 24 nt, Human
gagacgggguuucaccacguuggu

SEQ ID NO: 544048 - RNA, 18 nt, Human
gagaugggguuucgccau

SEQ ID NO: 544049 - RNA, 24 nt, Human
gagaugggguuucgccauguuggc

SEQ ID NO: 544050 - RNA, 24 nt, Human
gaguagcugggauuacaggcacgc

SEQ ID NO: 544051 - RNA, 18 nt, Human
gauuacaggugugagcca

SEQ ID NO: 544052 - RNA, 20 nt, Human
gauuacaggugugagccacc

SEQ ID NO: 544053 - RNA, 24 nt, Human
gauuacaggugugagccaccucgc

SEQ ID NO: 544054 - RNA, 18 nt, Human
gauuauaggcgugagcca

SEQ ID NO: 544055 - RNA, 21 nt, Human
gauuauaggcgugagccacca

SEQ ID NO: 544056 - RNA, 22 nt, Human
gauuauaggcgugagccaccac

SEQ ID NO: 544057 - RNA, 21 nt, Human
gauucuccugccucagccucc

SEQ ID NO: 544058 - RNA, 22 nt, Human
gcaaccuccaccucucagguuc

SEQ ID NO: 544059 - RNA, 22 nt, Human
gcaaccucugccuccuggguuc

SEQ ID NO: 544060 - RNA, 25 nt, Human
gcagagacuccccaaggccugaaag

SEQ ID NO: 544061 - RNA, 19 nt, Human
gcauuuguaaaacaggauc

SEQ ID NO: 544062 - RNA, 19 nt, Human
gcccaggcuggagugcagu

SEQ ID NO: 544063 - RNA, 23 nt, Human
gcccaggcuggagugcaguggca

SEQ ID NO: 544064 - RNA, 19 nt, Human
gcccccacugccuccucca

SEQ ID NO: 544065 - RNA, 22 nt, Human
gccuuggccucccaaagugcug

SEQ ID NO: 544066 - RNA, 22 nt, Human
gcucuaucgcccaggcuggagu

SEQ ID NO: 544067 - RNA, 25 nt, Human
gcucugucacccaggcuggagugca

SEQ ID NO: 544068 - RNA, 19 nt, Human
gcuggagugcaguggcaca

SEQ ID NO: 544069 - RNA, 25 nt, Human
ggcauguucuagggaccuccugcgg

SEQ ID NO: 544070 - RNA, 23 nt, Human
gggacuacaggugcgugccacca

SEQ ID NO: 544071 - RNA, 21 nt, Human
gggacugcagggaggcaggua

SEQ ID NO: 544072 - RNA, 23 nt, Human
gggguuucaccacguuggucagg

SEQ ID NO: 544073 - RNA, 18 nt, Human
gggguuucgccauguugg

SEQ ID NO: 544074 - RNA, 22 nt, Human
gggguuucgccauguuggccaa

SEQ ID NO: 544075 - RNA, 22 nt, Human
ggguuucaccacguuggucagg

SEQ ID NO: 544076 - RNA, 20 nt, Human
ggugaccaucauccucacug

SEQ ID NO: 544077 - RNA, 21 nt, Human
guagagaugggguuucgccau

SEQ ID NO: 544078 - RNA, 22 nt, Human
guagagaugggguuucgccaug

SEQ ID NO: 544079 - RNA, 23 nt, Human
guagagaugggguuucgccaugu

SEQ ID NO: 544080 - RNA, 18 nt, Human
guagcugggauuacaggc

SEQ ID NO: 544081 - RNA, 24 nt, Human
gugauccacccgccuuggccuccc

SEQ ID NO: 544082 - RNA, 23 nt, Human
gugauucuccugccucagccucc

SEQ ID NO: 544083 - RNA, 24 nt, Human
gugguccacccaccucagccuccc

SEQ ID NO: 544084 - RNA, 25 nt, Human
guuacuuguuuuuuguuuuuuuuuu

SEQ ID NO: 544085 - RNA, 20 nt, Human
guuuuuuuuuugagacagag

SEQ ID NO: 544086 - RNA, 21 nt, Human
uaaaagaacgccguagcugcg

SEQ ID NO: 544087 - RNA, 24 nt, Human
uaaugcuucuauuuuuaguagaga

SEQ ID NO: 544088 - RNA, 22 nt, Human
uacaacacagagucagguagga

SEQ ID NO: 544089 - RNA, 18 nt, Human
uacaggugugagccaccu

SEQ ID NO: 544090 - RNA, 22 nt, Human
uacaggugugagccaccucgcc

SEQ ID NO: 544091 - RNA, 22 nt, Human
uagagacgggguuucaccacgu

SEQ ID NO: 544092 - RNA, 22 nt, Human
uagagaugggguuucgccaugu

SEQ ID NO: 544093 - RNA, 24 nt, Human
uaguagagacgggguuucaccacg

SEQ ID NO: 544094 - RNA, 26 nt, Human
uaguagagacgggguuucaccacguu

SEQ ID NO: 544095 - RNA, 19 nt, Human
uaucgcccaggcuggagug

SEQ ID NO: 544096 - RNA, 21 nt, Human
uaucgcccaggcuggagugca

SEQ ID NO: 544097 - RNA, 19 nt, Human
uaucucagggcagcuacag

SEQ ID NO: 544098 - RNA, 19 nt, Human
ucaagugauucuccugccu

SEQ ID NO: 544099 - RNA, 24 nt, Human
ucacccaggcuggagugcaguagc

SEQ ID NO: 544100 - RNA, 21 nt, Human
ucacugagcaugaaacuaugc

SEQ ID NO: 544101 - RNA, 24 nt, Human
ucacugcaaccuccaccucucagg

SEQ ID NO: 544102 - RNA, 24 nt, Human
ucacugcaaccuccaccucucagg

SEQ ID NO: 544103 - RNA, 27 nt, Human
ucacugcaaccuccaccucucagguuc

SEQ ID NO: 544104 - RNA, 18 nt, Human
ucagccucccaaagugcu

SEQ ID NO: 544105 - RNA, 20 nt, Human
ucagccuccugaguagcugg

SEQ ID NO: 544106 - RNA, 26 nt, Human
ucaguccagcagcaccaccuccccca

SEQ ID NO: 544107 - RNA, 23 nt, Human
uccacaggagcccagcacagaaa

SEQ ID NO: 544108 - RNA, 21 nt, Human
uccacccaccucagccuccca

SEQ ID NO: 544109 - RNA, 23 nt, Human
ucccaaagugcugggauuacagg

SEQ ID NO: 544110 - RNA, 24 nt, Human
ucccaaagugcugggauuauaggc

SEQ ID NO: 544111 - RNA, 22 nt, Human
ucccaacccccaggaagacauc

SEQ ID NO: 544112 - RNA, 24 nt, Human
ucccccaucacagccauguacccc

SEQ ID NO: 544113 - RNA, 24 nt, Human
uccugaguagcugggauuacaggc

SEQ ID NO: 544114 - RNA, 21 nt, Human
uccuggguucaagugauucuc

SEQ ID NO: 544115 - RNA, 24 nt, Human
uccuggguucaagugauucuccug

SEQ ID NO: 544116 - RNA, 22 nt, Human
ucgccauguuggccaagcuggu

SEQ ID NO: 544117 - RNA, 24 nt, Human
ucgccauguuggccaagcuggucu

SEQ ID NO: 544118 - RNA, 22 nt, Human
ucgcccaggcuggagugcagug

SEQ ID NO: 544119 - RNA, 24 nt, Human
ucgcucugucacccaggcuggagu

SEQ ID NO: 544120 - RNA, 24 nt, Human
ucggccuccguacuccuuccucag

SEQ ID NO: 544121 - RNA, 24 nt, Human
ucgguagagaugggguuucgccau

SEQ ID NO: 544122 - RNA, 20 nt, Human
ucuaaaagcugacacuccug

SEQ ID NO: 544123 - RNA, 23 nt, Human
ucuagcucuaucgcccaggcugg

SEQ ID NO: 544124 - RNA, 24 nt, Human
ucuagcucuaucgcccaggcugga

SEQ ID NO: 544125 - RNA, 21 nt, Human
ucucagguucaagugauucuu

SEQ ID NO: 544126 - RNA, 24 nt, Human
ucucagguucaagugauucuucug

SEQ ID NO: 544127 - RNA, 24 nt, Human
ucuccugccucagccuccugagua

SEQ ID NO: 544128 - RNA, 19 nt, Human
ucucgaacucuugaccuug

SEQ ID NO: 544129 - RNA, 19 nt, Human
ucucgcucugucacccagg

SEQ ID NO: 544130 - RNA, 23 nt, Human
ucucgcucugucacccaggcugg

SEQ ID NO: 544131 - RNA, 24 nt, Human
ucucgcucugucacccaggcugga

SEQ ID NO: 544132 - RNA, 26 nt, Human
ucucgcucugucacccaggcuggagu

SEQ ID NO: 544133 - RNA, 27 nt, Human
ucucgcucugucacccaggcuggagug

SEQ ID NO: 544134 - RNA, 18 nt, Human
ucucuuggcguuuucggc

SEQ ID NO: 544135 - RNA, 18 nt, Human
ucucuugguaggcuccag

SEQ ID NO: 544136 - RNA, 24 nt, Human
ucugucacccaggcuggagugcag

SEQ ID NO: 544137 - RNA, 24 nt, Human
ucuugaacuccuggccucaagugg

SEQ ID NO: 544138 - RNA, 21 nt, Human
ugaaacuaugcuagcugcaga

SEQ ID NO: 544139 - RNA, 21 nt, Human
ugaaauuacaacacagaguca

SEQ ID NO: 544140 - RNA, 18 nt, Human
ugaccaggaaggaacaga

SEQ ID NO: 544141 - RNA, 18 nt, Human
ugaccuugugauccaccc

SEQ ID NO: 544142 - RNA, 24 nt, Human
ugacugcaaccucugccuccuggg

SEQ ID NO: 544143 - RNA, 22 nt, Human
ugagacagagucuagcucuauc

SEQ ID NO: 544144 - RNA, 22 nt, Human
ugagacggagucucgcucuguc

SEQ ID NO: 544145 - RNA, 18 nt, Human
ugauguagaagaaggaaa

SEQ ID NO: 544146 - RNA, 20 nt, Human
ugcagaauccucacucccca

SEQ ID NO: 544147 - RNA, 22 nt, Human
ugcaguggcacaaucucggcuc

SEQ ID NO: 544148 - RNA, 20 nt, Human
ugcccagagaguccauccca

SEQ ID NO: 544149 - RNA, 19 nt, Human
ugcccccacugccuccucc

SEQ ID NO: 544150 - RNA, 24 nt, Human
ugccucagccuccugaguagcugg

SEQ ID NO: 544151 - RNA, 22 nt, Human
ugccuccuggguucaagugauu

SEQ ID NO: 544152 - RNA, 24 nt, Human
ugcgugccaccacacccugcuaau

SEQ ID NO: 544153 - RNA, 18 nt, Human
ugcucuggccaccucgug

SEQ ID NO: 544154 - RNA, 24 nt, Human
ugcugggauuacaggugugagcca

SEQ ID NO: 544155 - RNA, 24 nt, Human
uggagguggcucuggcuccgaccc

SEQ ID NO: 544156 - RNA, 19 nt, Human
uggagugcaguagcaugau

SEQ ID NO: 544157 - RNA, 24 nt, Human
uggagugcaguagcaugaucuugg

SEQ ID NO: 544158 - RNA, 23 nt, Human
uggagugcaguggcacaaucucg

SEQ ID NO: 544159 - RNA, 24 nt, Human
uggagugcaguggcacaaucucgg

SEQ ID NO: 544160 - RNA, 24 nt, Human
uggcacaaucucggcucacugcaa

SEQ ID NO: 544161 - RNA, 24 nt, Human
uggccaagcuggucuugaacuccu

SEQ ID NO: 544162 - RNA, 23 nt, Human
uggcuucuguacccagcaacccu

SEQ ID NO: 544163 - RNA, 21 nt, Human
ugggagggacugcagggaggc

SEQ ID NO: 544164 - RNA, 21 nt, Human
ugggauuacaggcacgcacca

SEQ ID NO: 544165 - RNA, 24 nt, Human
ugggauuacaggcacgcaccacca

SEQ ID NO: 544166 - RNA, 18 nt, Human
ugggauuacaggugugag

SEQ ID NO: 544167 - RNA, 19 nt, Human
ugggauuacaggugugagc

SEQ ID NO: 544168 - RNA, 21 nt, Human
ugggauuacaggugugagcca

SEQ ID NO: 544169 - RNA, 22 nt, Human
ugggauuacaggugugagccac

SEQ ID NO: 544170 - RNA, 23 nt, Human
ugggauuacaggugugagccacc

SEQ ID NO: 544171 - RNA, 23 nt, Human
ugggauuacaggugugagccacc

SEQ ID NO: 544172 - RNA, 25 nt, Human
ugggauuacaggugugagccaccuc

SEQ ID NO: 544173 - RNA, 27 nt, Human
ugggauuacaggugugagccaccucgc

SEQ ID NO: 544174 - RNA, 18 nt, Human
ugggauuauaggcgugag

SEQ ID NO: 544175 - RNA, 19 nt, Human
ugggauuauaggcgugagc

SEQ ID NO: 544176 - RNA, 22 nt, Human
ugggauuauaggcgugagccac

SEQ ID NO: 544177 - RNA, 23 nt, Human
ugggauuauaggcgugagccacc

SEQ ID NO: 544178 - RNA, 24 nt, Human
ugggauuauaggcgugagccacca

SEQ ID NO: 544179 - RNA, 24 nt, Human
ugggguuucgccauguuggccaag

SEQ ID NO: 544180 - RNA, 23 nt, Human
ugggugcuucagaagaaccuggg

SEQ ID NO: 544181 - RNA, 23 nt, Human
uggguucaagugauucuccugcc

SEQ ID NO: 544182 - RNA, 24 nt, Human
uggguucaagugauucuccugccu

SEQ ID NO: 544183 - RNA, 24 nt, Human
uggucaggcuggucucgaacucuu

SEQ ID NO: 544184 - RNA, 24 nt, Human
ugguccacccaccucagccuccca

SEQ ID NO: 544185 - RNA, 25 nt, Human
ugucccgccacaucccacaucccca

SEQ ID NO: 544186 - RNA, 19 nt, Human
ugucugagccuccacuacc

SEQ ID NO: 544187 - RNA, 24 nt, Human
uguuuuuuuuuugagacagagucu

SEQ ID NO: 544188 - RNA, 18 nt, Human
uuaguagagacgggguuu

SEQ ID NO: 544189 - RNA, 22 nt, Human
uuaguagagacgggguuucacc

SEQ ID NO: 544190 - RNA, 25 nt, Human
uuaguagagacgggguuucaccacg

SEQ ID NO: 544191 - RNA, 21 nt, Human
uucaagugauucuccugccuc

SEQ ID NO: 544192 - RNA, 23 nt, Human
uucaagugauucuccugccucag

SEQ ID NO: 544193 - RNA, 24 nt, Human
uucaagugauucuccugccucagc

SEQ ID NO: 544194 - RNA, 23 nt, Human
uucaagugauucuucugcuucag

SEQ ID NO: 544195 - RNA, 26 nt, Human
uucaagugauucuucugcuucagcca

SEQ ID NO: 544196 - RNA, 23 nt, Human
uucucacaagaucaccuuaacuc

SEQ ID NO: 544197 - RNA, 18 nt, Human
uuggccucccaaagugcu

SEQ ID NO: 544198 - RNA, 21 nt, Human
uuucaccacguuggucaggcu

SEQ ID NO: 544199 - RNA, 21 nt, Human
uuucgccauguuggccaagcu

SEQ ID NO: 544200 - RNA, 24 nt, Human
uuuucgguagagaugggguuucgc

SEQ ID NO: 544201 - RNA, 24 nt, Human
uuuuuaguagagacgggguuucac

SEQ ID NO: 544202 - RNA, 24 nt, Human
uuuuucgguagagaugggguuucg

SEQ ID NO: 544203 - RNA, 25 nt, Human
uuuuuuuuuuuugagacggagucuc

SEQ ID NO: 544204 - RNA, 24 nt, Human
aaguuccaguuugggugccuccau

SEQ ID NO: 544205 - RNA, 20 nt, Human
acccgcggcaaacugccacc

SEQ ID NO: 544206 - RNA, 21 nt, Human
acccuguggccuccacacugu

SEQ ID NO: 544207 - RNA, 19 nt, Human
agaaagaacugggguaggg

SEQ ID NO: 544208 - RNA, 24 nt, Human
agugacugccaaaaccagaaagaa

SEQ ID NO: 544209 - RNA, 18 nt, Human
aucucccuccccuggauc

SEQ ID NO: 544210 - RNA, 22 nt, Human
augaaguuccaguuugggugcc

SEQ ID NO: 544211 - RNA, 19 nt, Human
cacccgcggcaaacugcca

SEQ ID NO: 544212 - RNA, 19 nt, Human
cagugacugccaaaaccag

SEQ ID NO: 544213 - RNA, 26 nt, Human
ccacacugucucccuucacacacccg

SEQ ID NO: 544214 - RNA, 28 nt, Human
ccacacugucucccuucacacacccgcg

SEQ ID NO: 544215 - RNA, 24 nt, Human
ccuguggccuccacacugucuccc

SEQ ID NO: 544216 - RNA, 21 nt, Human
cguggcgaguacccuguggcc

SEQ ID NO: 544217 - RNA, 23 nt, Human
cuguggccuccacacugucuccc

SEQ ID NO: 544218 - RNA, 18 nt, Human
ggggaacgcuguuguggu

SEQ ID NO: 544219 - RNA, 19 nt, Human
guggcgaguacccuguggc

SEQ ID NO: 544220 - RNA, 19 nt, Human
uacccuguggccuccacac

SEQ ID NO: 544221 - RNA, 22 nt, Human
ucccuucacacacccgcggcaa

SEQ ID NO: 544222 - RNA, 23 nt, Human
ucgacauacaaggugacaccaag

SEQ ID NO: 544223 - RNA, 26 nt, Human
ugacugccaaaaccagaaagaacugg

SEQ ID NO: 544224 - RNA, 20 nt, Human
uggccuccacacugucuccc

SEQ ID NO: 544225 - RNA, 19 nt, Human
ugggugccuccaucucccu

SEQ ID NO: 544226 - RNA, 21 nt, Human
aaaaaaacaaaagucagcaaa

SEQ ID NO: 544227 - RNA, 22 nt, Human
aacugggcuccucacuggcacc

SEQ ID NO: 544228 - RNA, 21 nt, Human
aagacgcaguugagcagagcu

SEQ ID NO: 544229 - RNA, 19 nt, Human
acaacgcugucuguccugc

SEQ ID NO: 544230 - RNA, 22 nt, Human
acacacacccacgccacgcgcg

SEQ ID NO: 544231 - RNA, 22 nt, Human
acacugugcccugagcugggag

SEQ ID NO: 544232 - RNA, 21 nt, Human
acuccaccuccccgcccccac

SEQ ID NO: 544233 - RNA, 24 nt, Human
agagcaggaggggacagagcugcc

SEQ ID NO: 544234 - RNA, 20 nt, Human
agagcggcagcucaggcccc

SEQ ID NO: 544235 - RNA, 22 nt, Human
agcaggaccugaauggagccug

SEQ ID NO: 544236 - RNA, 21 nt, Human
agccccgaggcucugccuucc

SEQ ID NO: 544237 - RNA, 19 nt, Human
agcugccugcucccgcgca

SEQ ID NO: 544238 - RNA, 18 nt, Human
agcugggggugggggugu

SEQ ID NO: 544239 - RNA, 22 nt, Human
agggcaaguggggagcaugagg

SEQ ID NO: 544240 - RNA, 19 nt, Human
aggggagggaaauggaggg

SEQ ID NO: 544241 - RNA, 21 nt, Human
aggugccagggcugggcagcc

SEQ ID NO: 544242 - RNA, 23 nt, Human
agguggcuggggaacccuggagg

SEQ ID NO: 544243 - RNA, 21 nt, Human
auccaaugaccggaaagacac

SEQ ID NO: 544244 - RNA, 23 nt, Human
auggagagcaggaggggacagag

SEQ ID NO: 544245 - RNA, 22 nt, Human
auguguguguguguguguaugu

SEQ ID NO: 544246 - RNA, 19 nt, Human
auucugugcaucaacuucc

SEQ ID NO: 544247 - RNA, 23 nt, Human
caacugggcuccucacuggcacc

SEQ ID NO: 544248 - RNA, 20 nt, Human
caagauggccccauaagaaa

SEQ ID NO: 544249 - RNA, 21 nt, Human
caaugucuggccaaauggugc

SEQ ID NO: 544250 - RNA, 25 nt, Human
cacacacacccacgccaccccugag

SEQ ID NO: 544251 - RNA, 19 nt, Human
caccacgucccagaugccc

SEQ ID NO: 544252 - RNA, 21 nt, Human
cacccacagacccccacccag

SEQ ID NO: 544253 - RNA, 21 nt, Human
caccuccccgcccccacgauc

SEQ ID NO: 544254 - RNA, 21 nt, Human
cacuccaccuccccgccccca

SEQ ID NO: 544255 - RNA, 18 nt, Human
cagacuauuagaaggggg

SEQ ID NO: 544256 - RNA, 20 nt, Human
cagaugcccugugggcccuu

SEQ ID NO: 544257 - RNA, 18 nt, Human
cagcccaccaggcacacu

SEQ ID NO: 544258 - RNA, 23 nt, Human
cagcucaggccccggcgcggcag

SEQ ID NO: 544259 - RNA, 23 nt, Human
caggacaaucccugauuggacaa

SEQ ID NO: 544260 - RNA, 24 nt, Human
caggguccaggaggagcuguggag

SEQ ID NO: 544261 - RNA, 21 nt, Human
caugccuccacccaccuccuc

SEQ ID NO: 544262 - RNA, 29 nt, Human
caugcucuuggcuccuggcagccccacaa

SEQ ID NO: 544263 - RNA, 21 nt, Human
ccaaaccccugagaaagacau

SEQ ID NO: 544264 - RNA, 21 nt, Human
ccaacgguguggccaggcgag

SEQ ID NO: 544265 - RNA, 21 nt, Human
ccacgcgcggugucucccacu

SEQ ID NO: 544266 - RNA, 21 nt, Human
cccacacccugcaggcugagg

SEQ ID NO: 544267 - RNA, 22 nt, Human
cccacagacccccacccaguuc

SEQ ID NO: 544268 - RNA, 18 nt, Human
cccacaugggacuuaaaa

SEQ ID NO: 544269 - RNA, 19 nt, Human
cccagaguacagcaggacc

SEQ ID NO: 544270 - RNA, 25 nt, Human
ccccagccugccugugcccugagcu

SEQ ID NO: 544271 - RNA, 19 nt, Human
ccccaucccaugcucugca

SEQ ID NO: 544272 - RNA, 24 nt, Human
ccccgcccccacgaucccugaguc

SEQ ID NO: 544273 - RNA, 18 nt, Human
ccccucuagccucucccu

SEQ ID NO: 544274 - RNA, 24 nt, Human
ccccugcaugccuccacccaccuc

SEQ ID NO: 544275 - RNA, 20 nt, Human
cccgcccccacgaucccuga

SEQ ID NO: 544276 - RNA, 18 nt, Human
cccgcgcaggguccagga

SEQ ID NO: 544277 - RNA, 23 nt, Human
cccugaacugcccucacagccuc

SEQ ID NO: 544278 - RNA, 20 nt, Human
cccugugggcccuggcccug

SEQ ID NO: 544279 - RNA, 19 nt, Human
ccgaggcucugccuuccca

SEQ ID NO: 544280 - RNA, 19 nt, Human
ccucaagcuucacccacag

SEQ ID NO: 544281 - RNA, 19 nt, Human
ccucaucgggcucugggug

SEQ ID NO: 544282 - RNA, 20 nt, Human
ccuccccgcccccacgaucc

SEQ ID NO: 544283 - RNA, 19 nt, Human
ccucuccacuccaccuccc

SEQ ID NO: 544284 - RNA, 19 nt, Human
cgacccggugugagagcgg

SEQ ID NO: 544285 - RNA, 20 nt, Human
cgaucccugagucgucuccc

SEQ ID NO: 544286 - RNA, 19 nt, Human
cgcaggguccaggaggagc

SEQ ID NO: 544287 - RNA, 20 nt, Human
cgggcucugggugacacccu

SEQ ID NO: 544288 - RNA, 25 nt, Human
cggugucucccacugccacagcccc

SEQ ID NO: 544289 - RNA, 19 nt, Human
cgugggggcaccugcuggc

SEQ ID NO: 544290 - RNA, 22 nt, Human
cgugggggcaccugcuggcacc

SEQ ID NO: 544291 - RNA, 24 nt, Human
cguguggggauggugaggccaaga

SEQ ID NO: 544292 - RNA, 19 nt, Human
cucacugccuaggcuaccu

SEQ ID NO: 544293 - RNA, 22 nt, Human
cucccugcccccagaguacagc

SEQ ID NO: 544294 - RNA, 22 nt, Human
cucugcccacacccugcaggcu

SEQ ID NO: 544295 - RNA, 25 nt, Human
cugaagaaggcugaagaaggcuggg

SEQ ID NO: 544296 - RNA, 25 nt, Human
cugaagaaggcuggggaggacuggg

SEQ ID NO: 544297 - RNA, 24 nt, Human
cugccacacacacccacgccacgc

SEQ ID NO: 544298 - RNA, 23 nt, Human
cuggacacccacagacccccacc

SEQ ID NO: 544299 - RNA, 22 nt, Human
cuggcaccccucaucgggcucu

SEQ ID NO: 544300 - RNA, 22 nt, Human
cuggccaaaugucugagacacc

SEQ ID NO: 544301 - RNA, 21 nt, Human
gaaauauaaacauucgagaac

SEQ ID NO: 544302 - RNA, 19 nt, Human
gaagcaggugccagggcug

SEQ ID NO: 544303 - RNA, 20 nt, Human
gagaguggcaagugggaagc

SEQ ID NO: 544304 - RNA, 20 nt, Human
gagcgggccucuccacucca

SEQ ID NO: 544305 - RNA, 22 nt, Human
gaggacuggggagggcugaaga

SEQ ID NO: 544306 - RNA, 23 nt, Human
gagggaaauggagggccuccagc

SEQ ID NO: 544307 - RNA, 18 nt, Human
gagggccuccagcccugc

SEQ ID NO: 544308 - RNA, 18 nt, Human
gagguguccucugccucc

SEQ ID NO: 544309 - RNA, 20 nt, Human
gauggcaccuucaggggaag

SEQ ID NO: 544310 - RNA, 20 nt, Human
gccccacucgugggggcacc

SEQ ID NO: 544311 - RNA, 18 nt, Human
gcccgacccggugugaga

SEQ ID NO: 544312 - RNA, 22 nt, Human
gcucaggccccggcgcggcagc

SEQ ID NO: 544313 - RNA, 24 nt, Human
gcugaagagggcuggggaaaggau

SEQ ID NO: 544314 - RNA, 21 nt, Human
ggacagacggacacguccaaa

SEQ ID NO: 544315 - RNA, 22 nt, Human
ggaccugaauggagccuggaca

SEQ ID NO: 544316 - RNA, 26 nt, Human
ggagccuggacagacggacacgucca

SEQ ID NO: 544317 - RNA, 25 nt, Human
ggagcugccugcucccgcgcagggu

SEQ ID NO: 544318 - RNA, 20 nt, Human
ggauggugaggccaagaugg

SEQ ID NO: 544319 - RNA, 21 nt, Human
ggcaaagugggcuggaagggc

SEQ ID NO: 544320 - RNA, 21 nt, Human
ggcagaaaacggucuucagaa

SEQ ID NO: 544321 - RNA, 20 nt, Human
ggcagaaggcagggucaggg

SEQ ID NO: 544322 - RNA, 21 nt, Human
ggccaagauggccccauaaga

SEQ ID NO: 544323 - RNA, 22 nt, Human
ggccaauaagggcaagugggga

SEQ ID NO: 544324 - RNA, 19 nt, Human
ggcgcggcagcugcgucuc

SEQ ID NO: 544325 - RNA, 21 nt, Human
gggaaugcugagugaugggga

SEQ ID NO: 544326 - RNA, 22 nt, Human
gggcaaguggggagcaugaggu

SEQ ID NO: 544327 - RNA, 21 nt, Human
gggcagccccgaggcucugcc

SEQ ID NO: 544328 - RNA, 19 nt, Human
ggggaggacuggggagggc

SEQ ID NO: 544329 - RNA, 20 nt, Human
ggggagggaaauggagggcc

SEQ ID NO: 544330 - RNA, 22 nt, Human
ggggauggugaggccaagaugg

SEQ ID NO: 544331 - RNA, 21 nt, Human
gguaugugugugugugugugu

SEQ ID NO: 544332 - RNA, 21 nt, Human
ggucagcugggggugggggug

SEQ ID NO: 544333 - RNA, 18 nt, Human
gguccaggaggagcugug

SEQ ID NO: 544334 - RNA, 21 nt, Human
ggugggaagaguccauccuuu

SEQ ID NO: 544335 - RNA, 21 nt, Human
guaugugugugugugugugua

SEQ ID NO: 544336 - RNA, 18 nt, Human
gucuaaaccugugcgggg

SEQ ID NO: 544337 - RNA, 20 nt, Human
gugggaagaguccauccuuu

SEQ ID NO: 544338 - RNA, 23 nt, Human
uaaaaaaaaaacaaaagucagca

SEQ ID NO: 544339 - RNA, 24 nt, Human
uaaaaaaaaaacaaaagucagcaa

SEQ ID NO: 544340 - RNA, 22 nt, Human
uaacaguaggcaaagugggcug

SEQ ID NO: 544341 - RNA, 21 nt, Human
uaagaaauagaagagggcuga

SEQ ID NO: 544342 - RNA, 19 nt, Human
uaagauagaaaauaaccac

SEQ ID NO: 544343 - RNA, 21 nt, Human
uacagcaggaccugaauggag

SEQ ID NO: 544344 - RNA, 23 nt, Human
uacuggccaaaugucugagacac

SEQ ID NO: 544345 - RNA, 18 nt, Human
uaugugugugugugugug

SEQ ID NO: 544346 - RNA, 21 nt, Human
uauguguguguguguguguau

SEQ ID NO: 544347 - RNA, 23 nt, Human
uauguguguguguguguguaugu

SEQ ID NO: 544348 - RNA, 24 nt, Human
uauguguguguguguguguaugug

SEQ ID NO: 544349 - RNA, 18 nt, Human
ucacuggcaccacguccc

SEQ ID NO: 544350 - RNA, 18 nt, Human
uccccgcccccacgaucc

SEQ ID NO: 544351 - RNA, 21 nt, Human
ucccugcauccucuggguggg

SEQ ID NO: 544352 - RNA, 19 nt, Human
ucccuggucagcugggggu

SEQ ID NO: 544353 - RNA, 23 nt, Human
ucccuuuccucuccuacacagga

SEQ ID NO: 544354 - RNA, 22 nt, Human
ugaagaaggcugaagaaggcug

SEQ ID NO: 544355 - RNA, 20 nt, Human
ugaagagggcuggggaaagg

SEQ ID NO: 544356 - RNA, 22 nt, Human
ugagaaagacauacuggccaaa

SEQ ID NO: 544357 - RNA, 20 nt, Human
ugagcugggaaugcugagug

SEQ ID NO: 544358 - RNA, 23 nt, Human
ugagggcagugaggguucacucc

SEQ ID NO: 544359 - RNA, 20 nt, Human
ugccagggcugggcagcccc

SEQ ID NO: 544360 - RNA, 31 nt, Human
ugcuugggccaaggccccacucgugggggcc

SEQ ID NO: 544361 - RNA, 19 nt, Human
uggacacccacagaccccc

SEQ ID NO: 544362 - RNA, 24 nt, Human
uggagagcaggaggggacagagcu

SEQ ID NO: 544363 - RNA, 18 nt, Human
uggaggaagcuggacacc

SEQ ID NO: 544364 - RNA, 22 nt, Human
uggcaccuucaggggaagcucu

SEQ ID NO: 544365 - RNA, 18 nt, Human
uggcagaaggcaggguca

SEQ ID NO: 544366 - RNA, 27 nt, Human
uggcagaaggcagggucaaccggaacg

SEQ ID NO: 544367 - RNA, 22 nt, Human
uggcagaaggcagggucaggga

SEQ ID NO: 544368 - RNA, 18 nt, Human
uggcaugacucugaaccu

SEQ ID NO: 544369 - RNA, 23 nt, Human
uggcaugacucugaaccugggca

SEQ ID NO: 544370 - RNA, 21 nt, Human
uggccaaaugucugagacacc

SEQ ID NO: 544371 - RNA, 23 nt, Human
uggccaggcgagcugccugggga

SEQ ID NO: 544372 - RNA, 18 nt, Human
uggcuccuggcagccccu

SEQ ID NO: 544373 - RNA, 24 nt, Human
uggcuuugggggugaucuguuuuc

SEQ ID NO: 544374 - RNA, 18 nt, Human
ugggaaugcugagugaug

SEQ ID NO: 544375 - RNA, 23 nt, Human
uggggguggggguguggcagaaa

SEQ ID NO: 544376 - RNA, 20 nt, Human
ugggguaugugugugugugu

SEQ ID NO: 544377 - RNA, 23 nt, Human
ugggguaugugugugugugugug

SEQ ID NO: 544378 - RNA, 28 nt, Human
ugugcccugagcugggagguggcugggg

SEQ ID NO: 544379 - RNA, 18 nt, Human
uguggggauggugaggcc

SEQ ID NO: 544380 - RNA, 22 nt, Human
uguguguaugugugugggagug

SEQ ID NO: 544381 - RNA, 18 nt, Human
ugugugugggaguggggg

SEQ ID NO: 544382 - RNA, 19 nt, Human
uguguguguguaugugugu

SEQ ID NO: 544383 - RNA, 21 nt, Human
uguguguguguguaugugugu

SEQ ID NO: 544384 - RNA, 23 nt, Human
uguguguguguguguaugugugu

SEQ ID NO: 544385 - RNA, 21 nt, Human
uguguguguguguguguaugu

SEQ ID NO: 544386 - RNA, 25 nt, Human
uguguguguguguguguaugugugu

SEQ ID NO: 544387 - RNA, 19 nt, Human
uucauggcagaaggcaggg

SEQ ID NO: 544388 - RNA, 20 nt, Human
uucccaucagcagaugcccu

SEQ ID NO: 544389 - RNA, 21 nt, Human
uucucugcccacacccugcag

SEQ ID NO: 544390 - RNA, 24 nt, Human
uugagggaagggccagaggggccg

SEQ ID NO: 544391 - RNA, 19 nt, Human
uuggacaacgcugucuguc

SEQ ID NO: 544392 - RNA, 20 nt, Human
uuggacaacgcugucugucc

SEQ ID NO: 544393 - RNA, 20 nt, Human
uuucagggcccgacccggug

SEQ ID NO: 544394 - RNA, 21 nt, Human
uuugauucccuuuccucuccu

SEQ ID NO: 544395 - RNA, 24 nt, Human
aaaaaaaacgccucccccuacccc

SEQ ID NO: 544396 - RNA, 21 nt, Human
aaaacgccucccccuacccca

SEQ ID NO: 544397 - RNA, 20 nt, Human
aacauggcgaaauccuguuu

SEQ ID NO: 544398 - RNA, 22 nt, Human
aacccagguugaggcugcagug

SEQ ID NO: 544399 - RNA, 23 nt, Human
acagagugagaccuugucucaaa

SEQ ID NO: 544400 - RNA, 24 nt, Human
acagagugagaccuugucucaaaa

SEQ ID NO: 544401 - RNA, 18 nt, Human
acugcacuccgccuuggg

SEQ ID NO: 544402 - RNA, 24 nt, Human
acugcacuccgccuugggugacag

SEQ ID NO: 544403 - RNA, 24 nt, Human
agacuagcagaauauuccagaaag

SEQ ID NO: 544404 - RNA, 24 nt, Human
agcacuuugggaggccgaggcagg

SEQ ID NO: 544405 - RNA, 21 nt, Human
agcagaauauuccagaaaguu

SEQ ID NO: 544406 - RNA, 24 nt, Human
agccuggccaacauggcgaaaucc

SEQ ID NO: 544407 - RNA, 19 nt, Human
aggaggggaaagcggcuca

SEQ ID NO: 544408 - RNA, 26 nt, Human
aggcaggcggaucaguugagcccagg

SEQ ID NO: 544409 - RNA, 18 nt, Human
aggccgaggcaggcggau

SEQ ID NO: 544410 - RNA, 24 nt, Human
aggcugaggugagaggaucacuug

SEQ ID NO: 544411 - RNA, 18 nt, Human
aggugagaggaucacuug

SEQ ID NO: 544412 - RNA, 22 nt, Human
agguugaggcugcagugagcug

SEQ ID NO: 544413 - RNA, 18 nt, Human
auaaaaccugguugagca

SEQ ID NO: 544414 - RNA, 24 nt, Human
caacauggcgaaauccuguuucua

SEQ ID NO: 544415 - RNA, 24 nt, Human
cacaccuauaaucccagcacuuug

SEQ ID NO: 544416 - RNA, 19 nt, Human
caccuauaaucccagcacu

SEQ ID NO: 544417 - RNA, 24 nt, Human
caccuauaaucccagcacuuuggg

SEQ ID NO: 544418 - RNA, 22 nt, Human
cacuccgccuugggugacagag

SEQ ID NO: 544419 - RNA, 22 nt, Human
cacuccgccuugggugacagag

SEQ ID NO: 544420 - RNA, 24 nt, Human
cacuccgccuugggugacagagug

SEQ ID NO: 544421 - RNA, 19 nt, Human
cacugcacuccgccuuggg

SEQ ID NO: 544422 - RNA, 19 nt, Human
cacugcacuccgccuuggg

SEQ ID NO: 544423 - RNA, 23 nt, Human
cacugcacuccgccuugggugac

SEQ ID NO: 544424 - RNA, 24 nt, Human
cacugcacuccgccuugggugaca

SEQ ID NO: 544425 - RNA, 24 nt, Human
cagcacuuugggaggccgaggcag

SEQ ID NO: 544426 - RNA, 26 nt, Human
cagcacuuugggaggccgaggcaggc

SEQ ID NO: 544427 - RNA, 23 nt, Human
ccccagacaaccugcuguaauuu

SEQ ID NO: 544428 - RNA, 22 nt, Human
ccucccccuaccccagacaacc

SEQ ID NO: 544429 - RNA, 22 nt, Human
ccuggccaacauggcgaaaucc

SEQ ID NO: 544430 - RNA, 24 nt, Human
ccuggccaacauggcgaaauccug

SEQ ID NO: 544431 - RNA, 21 nt, Human
cgagaccagccuggccaacau

SEQ ID NO: 544432 - RNA, 22 nt, Human
cucaaaaaaaaaacgccucccc

SEQ ID NO: 544433 - RNA, 22 nt, Human
cucacaccuauaaucccagcac

SEQ ID NO: 544434 - RNA, 24 nt, Human
cucacaccuauaaucccagcacuu

SEQ ID NO: 544435 - RNA, 22 nt, Human
cucccccuaccccagacaaccu

SEQ ID NO: 544436 - RNA, 25 nt, Human
cucccccuaccccagacaaccugcu

SEQ ID NO: 544437 - RNA, 22 nt, Human
cuccgaaucccagaugcccaga

SEQ ID NO: 544438 - RNA, 19 nt, Human
cugcagagggccaguggcc

SEQ ID NO: 544439 - RNA, 19 nt, Human
gagcaugauuacauuaaac

SEQ ID NO: 544440 - RNA, 21 nt, Human
gaucacuugaacccagguuga

SEQ ID NO: 544441 - RNA, 21 nt, Human
gccaacauggcgaaauccugu

SEQ ID NO: 544442 - RNA, 22 nt, Human
gccuaggaggcacaacuacuug

SEQ ID NO: 544443 - RNA, 24 nt, Human
gccuugggugacagagugagaccu

SEQ ID NO: 544444 - RNA, 23 nt, Human
ggaggcugaggugagaggaucac

SEQ ID NO: 544445 - RNA, 24 nt, Human
gguggcucacaccuauaaucccag

SEQ ID NO: 544446 - RNA, 24 nt, Human
gucacugcacuccgccuuggguga

SEQ ID NO: 544447 - RNA, 23 nt, Human
uauccaaaguuuaacuaacuuaa

SEQ ID NO: 544448 - RNA, 18 nt, Human
ucacaggcuauacucucc

SEQ ID NO: 544449 - RNA, 21 nt, Human
ucacgugcggcuugagccccu

SEQ ID NO: 544450 - RNA, 21 nt, Human
ucacugcacuccgccuugggu

SEQ ID NO: 544451 - RNA, 24 nt, Human
ucacugcacuccgccuugggugac

SEQ ID NO: 544452 - RNA, 22 nt, Human
ucccagaugcccagacuuucuc

SEQ ID NO: 544453 - RNA, 24 nt, Human
uccgccuugggugacagagugaga

SEQ ID NO: 544454 - RNA, 22 nt, Human
ucgggagugucgaagggaugca

SEQ ID NO: 544455 - RNA, 22 nt, Human
ugagcaggguggcucacaccua

SEQ ID NO: 544456 - RNA, 23 nt, Human
ugagcccagguguucgagaccag

SEQ ID NO: 544457 - RNA, 19 nt, Human
ugaggugagaggaucacuu

SEQ ID NO: 544458 - RNA, 19 nt, Human
ugaggugagaggaucacuu

SEQ ID NO: 544459 - RNA, 21 nt, Human
ugaggugagaggaucacuuga

SEQ ID NO: 544460 - RNA, 24 nt, Human
uggccaacauggcgaaauccuguu

SEQ ID NO: 544461 - RNA, 24 nt, Human
uggcucacaccuauaaucccagca

SEQ ID NO: 544462 - RNA, 20 nt, Human
ugggaggccgaggcaggcgg

SEQ ID NO: 544463 - RNA, 24 nt, Human
ugggaggccgaggcaggcggauca

SEQ ID NO: 544464 - RNA, 19 nt, Human
ugggaggcugaggugagag

SEQ ID NO: 544465 - RNA, 24 nt, Human
ugggaggcugaggugagaggauca

SEQ ID NO: 544466 - RNA, 19 nt, Human
ugggugacagagugagacc

SEQ ID NO: 544467 - RNA, 18 nt, Human
ugugugccuaggaggcac

SEQ ID NO: 544468 - RNA, 21 nt, Human
uugccgggcauaguguugugu

SEQ ID NO: 544469 - RNA, 25 nt, Human
uugggaggccgaggcaggcggauca

SEQ ID NO: 544470 - RNA, 18 nt, Human
uugggaggcugaggugag

SEQ ID NO: 544471 - RNA, 25 nt, Human
uugggaggcugaggugagaggauca

SEQ ID NO: 544472 - RNA, 19 nt, Human
uuucuacaaaaaauacaaa

SEQ ID NO: 544473 - RNA, 24 nt, Human
uuuuuuuuuuuuuuuuuacuauag

SEQ ID NO: 544474 - RNA, 19 nt, Human
agguauuaacacauaagca

SEQ ID NO: 544475 - RNA, 26 nt, Human
caccuagacuggggggaaggugaggg

SEQ ID NO: 544476 - RNA, 22 nt, Human
cagccgagcuggcguguggggc

SEQ ID NO: 544477 - RNA, 26 nt, Human
gagcuggcguguggggcugcggcgcg

SEQ ID NO: 544478 - RNA, 18 nt, Human
gcgcggcgcggcccaggc

SEQ ID NO: 544479 - RNA, 20 nt, Human
ggggaaggugaggaggaggg

SEQ ID NO: 544480 - RNA, 18 nt, Human
ggugaggaggagggaaaa

SEQ ID NO: 544481 - RNA, 19 nt, Human
gguuuuuguuuugucguug

SEQ ID NO: 544482 - RNA, 24 nt, Human
gucugucuauauauguauauauau

SEQ ID NO: 544483 - RNA, 21 nt, Human
uaaugcagaaaaacagccgag

SEQ ID NO: 544484 - RNA, 22 nt, Human
uauauguauauauaucuccaca

SEQ ID NO: 544485 - RNA, 21 nt, Human
uccacacauauuuuguggggu

SEQ ID NO: 544486 - RNA, 23 nt, Human
ucucugaguugggauuuuggucu

SEQ ID NO: 544487 - RNA, 23 nt, Human
ucugucuauauauguauauauau

SEQ ID NO: 544488 - RNA, 23 nt, Human
ugcagugucucugaguugggauu

SEQ ID NO: 544489 - RNA, 20 nt, Human
uggggggaaggugaggagga

SEQ ID NO: 544490 - RNA, 21 nt, Human
uguauauauaucuccacacau

SEQ ID NO: 544491 - RNA, 24 nt, Human
uguauauauaucuccacacauauu

SEQ ID NO: 544492 - RNA, 18 nt, Human
ugucuauauauguauaua

SEQ ID NO: 544493 - RNA, 20 nt, Human
uuucauuuguacaaaagagu

SEQ ID NO: 544494 - RNA, 18 nt, Human
uuuuguggggugggggau

SEQ ID NO: 544495 - RNA, 27 nt, Human
aaaaccaaaaaccuccacagcaaagga

SEQ ID NO: 544496 - RNA, 18 nt, Human
aaacaaccaaacacccag

SEQ ID NO: 544497 - RNA, 24 nt, Human
aaacacccaggaauuuaaaggcaa

SEQ ID NO: 544498 - RNA, 18 nt, Human
aaccaaaaaccuccacag

SEQ ID NO: 544499 - RNA, 24 nt, Human
aaccuagugaaggaauuacuugau

SEQ ID NO: 544500 - RNA, 19 nt, Human
aaguaauccauuaauguac

SEQ ID NO: 544501 - RNA, 19 nt, Human
aaguggccaggagagaaca

SEQ ID NO: 544502 - RNA, 19 nt, Human
aaucacacguaacaaaaac

SEQ ID NO: 544503 - RNA, 22 nt, Human
acaaccaaacacccaggaauuu

SEQ ID NO: 544504 - RNA, 22 nt, Human
accacaacaaucccucaaucug

SEQ ID NO: 544505 - RNA, 24 nt, Human
agaaaacaaucauucagacaccau

SEQ ID NO: 544506 - RNA, 22 nt, Human
agaauggucauuucaacuuuua

SEQ ID NO: 544507 - RNA, 23 nt, Human
agaguucuacaggggaguggugu

SEQ ID NO: 544508 - RNA, 20 nt, Human
aggaaggaaucucaaacaac

SEQ ID NO: 544509 - RNA, 21 nt, Human
agucaaaaaccacaacaaucc

SEQ ID NO: 544510 - RNA, 24 nt, Human
aucacuaaauaaaaaacauccaga

SEQ ID NO: 544511 - RNA, 20 nt, Human
aucucaaacaaccaaacacc

SEQ ID NO: 544512 - RNA, 25 nt, Human
augaaaguacuuccccacuccauug

SEQ ID NO: 544513 - RNA, 21 nt, Human
augauaaagaggagacggcua

SEQ ID NO: 544514 - RNA, 21 nt, Human
auuguguuucuuuuaugacua

SEQ ID NO: 544515 - RNA, 18 nt, Human
caaaugacccacagauga

SEQ ID NO: 544516 - RNA, 19 nt, Human
caaguaacuuuuuugagca

SEQ ID NO: 544517 - RNA, 27 nt, Human
caaucacuaaauaaaaaacauccagau

SEQ ID NO: 544518 - RNA, 19 nt, Human
cacacguaacaaaaacaag

SEQ ID NO: 544519 - RNA, 18 nt, Human
cacccuggacaagccucc

SEQ ID NO: 544520 - RNA, 24 nt, Human
cacuccucagauuuuauuuuuaaa

SEQ ID NO: 544521 - RNA, 20 nt, Human
cacugcacgcagcccuccgc

SEQ ID NO: 544522 - RNA, 20 nt, Human
cauaaugugcgucauggaaa

SEQ ID NO: 544523 - RNA, 20 nt, Human
cauccagauuuuuuaaaagc

SEQ ID NO: 544524 - RNA, 23 nt, Human
ccaaacacccaggaauuuaaagg

SEQ ID NO: 544525 - RNA, 18 nt, Human
ccccccuccccaaaccca

SEQ ID NO: 544526 - RNA, 19 nt, Human
ccccccuccccaaacccaa

SEQ ID NO: 544527 - RNA, 23 nt, Human
ccccucuuuuccccccuccccaa

SEQ ID NO: 544528 - RNA, 20 nt, Human
cccucaaucuguuugcugug

SEQ ID NO: 544529 - RNA, 19 nt, Human
ccucagaguugggagugaa

SEQ ID NO: 544530 - RNA, 24 nt, Human
cucacaauagugaguauacccaga

SEQ ID NO: 544531 - RNA, 20 nt, Human
cuccagaggccauacacuuc

SEQ ID NO: 544532 - RNA, 21 nt, Human
cuccuggagcccgcucccacu

SEQ ID NO: 544533 - RNA, 25 nt, Human
cugcauucuggggauuuagcuucau

SEQ ID NO: 544534 - RNA, 22 nt, Human
cuggagcccgcucccacugcac

SEQ ID NO: 544535 - RNA, 24 nt, Human
cuuguguguuuuucugaggcuugg

SEQ ID NO: 544536 - RNA, 24 nt, Human
gacauaucaccuuuuccuagcccu

SEQ ID NO: 544537 - RNA, 21 nt, Human
gagucagcuuugaaaggcugg

SEQ ID NO: 544538 - RNA, 18 nt, Human
gaguugggagugaaggga

SEQ ID NO: 544539 - RNA, 18 nt, Human
gaucauuuuccuaaucua

SEQ ID NO: 544540 - RNA, 23 nt, Human
gauuuuauuuuuaaaaggaguuu

SEQ ID NO: 544541 - RNA, 20 nt, Human
gcucccacugcacgcagccc

SEQ ID NO: 544542 - RNA, 21 nt, Human
gcugcagugcucugcaucuga

SEQ ID NO: 544543 - RNA, 21 nt, Human
gcuggaggcucgggcuccugg

SEQ ID NO: 544544 - RNA, 22 nt, Human
ggaaaaagcaugauaaagagga

SEQ ID NO: 544545 - RNA, 19 nt, Human
gggaaaaagcaugauaaag

SEQ ID NO: 544546 - RNA, 23 nt, Human
gggagugguguuugaaaucuauu

SEQ ID NO: 544547 - RNA, 22 nt, Human
gugcugccuugcucugaggacg

SEQ ID NO: 544548 - RNA, 22 nt, Human
guuaaaguuuucaaccuuaaaa

SEQ ID NO: 544549 - RNA, 27 nt, Human
uaaaaaacauccagauuuuuuaaaagc

SEQ ID NO: 544550 - RNA, 22 nt, Human
uaaaacaaguggucuugauagc

SEQ ID NO: 544551 - RNA, 22 nt, Human
uaaaauagugcuaaagagauuu

SEQ ID NO: 544552 - RNA, 20 nt, Human
uaaaguuuucaaccuuaaaa

SEQ ID NO: 544553 - RNA, 22 nt, Human
uaaugugcgucauggaaaugcu

SEQ ID NO: 544554 - RNA, 19 nt, Human
uacuuuuuucccuagaacc

SEQ ID NO: 544555 - RNA, 21 nt, Human
uagagaaauaggaaaaucaca

SEQ ID NO: 544556 - RNA, 19 nt, Human
uagaggacaccauuucucc

SEQ ID NO: 544557 - RNA, 21 nt, Human
uagaggacaccauuucuccac

SEQ ID NO: 544558 - RNA, 29 nt, Human
uaggaaaagccccucuuuuccccccuccc

SEQ ID NO: 544559 - RNA, 22 nt, Human
uaucaucaaugaaaaaccaaaa

SEQ ID NO: 544560 - RNA, 18 nt, Human
uaucgagaaggagcaggc

SEQ ID NO: 544561 - RNA, 21 nt, Human
uauugaggaauaucuuugggg

SEQ ID NO: 544562 - RNA, 19 nt, Human
ucaaaugacccacagauga

SEQ ID NO: 544563 - RNA, 22 nt, Human
ucacaguaaaacggacuuuaau

SEQ ID NO: 544564 - RNA, 24 nt, Human
ucacccuggacaagccuccccaac

SEQ ID NO: 544565 - RNA, 21 nt, Human
ucagcugcugcugcauucugg

SEQ ID NO: 544566 - RNA, 22 nt, Human
uccgcguuugaggcagcacagc

SEQ ID NO: 544567 - RNA, 18 nt, Human
uccuaggaaaagccccuc

SEQ ID NO: 544568 - RNA, 19 nt, Human
ucgggcuccuggagcccgc

SEQ ID NO: 544569 - RNA, 24 nt, Human
ucuaaaguaauccauuaauguaca

SEQ ID NO: 544570 - RNA, 22 nt, Human
ucuacaggggagugguggggag

SEQ ID NO: 544571 - RNA, 20 nt, Human
ucucaaacaaccaaacaccc

SEQ ID NO: 544572 - RNA, 20 nt, Human
ucucaugcagucaaagucaa

SEQ ID NO: 544573 - RNA, 20 nt, Human
ucucucaucuagauuucuuu

SEQ ID NO: 544574 - RNA, 19 nt, Human
ucucuggcuuggaucaaca

SEQ ID NO: 544575 - RNA, 19 nt, Human
ugaaaaaccaaaaaccucc

SEQ ID NO: 544576 - RNA, 19 nt, Human
ugaaaguacuuccccacuc

SEQ ID NO: 544577 - RNA, 25 nt, Human
ugacaaacaacagggggaaaaagca

SEQ ID NO: 544578 - RNA, 21 nt, Human
ugagcacacgggugucgcgug

SEQ ID NO: 544579 - RNA, 19 nt, Human
ugagcuauacacgugcaca

SEQ ID NO: 544580 - RNA, 18 nt, Human
ugagugagaccagauagg

SEQ ID NO: 544581 - RNA, 21 nt, Human
ugauaacaaggaaggaaucuc

SEQ ID NO: 544582 - RNA, 24 nt, Human
ugaucaugcauguccugggaaugu

SEQ ID NO: 544583 - RNA, 22 nt, Human
ugaugaaacuaacauacaccuu

SEQ ID NO: 544584 - RNA, 19 nt, Human
ugcgucauggaaaugcuga

SEQ ID NO: 544585 - RNA, 24 nt, Human
ugcugcugcauucuggggauuuag

SEQ ID NO: 544586 - RNA, 27 nt, Human
uggaaaucuuccccuuccccuucauug

SEQ ID NO: 544587 - RNA, 24 nt, Human
uggauauugcuguggccaggccuc

SEQ ID NO: 544588 - RNA, 22 nt, Human
uggaugcugacaaucugugagu

SEQ ID NO: 544589 - RNA, 18 nt, Human
uggccaggccucggugcu

SEQ ID NO: 544590 - RNA, 22 nt, Human
uggccaggccucggugcugccu

SEQ ID NO: 544591 - RNA, 22 nt, Human
ugucgcgugaguaggaccggca

SEQ ID NO: 544592 - RNA, 19 nt, Human
uguggccaggccucggugc

SEQ ID NO: 544593 - RNA, 23 nt, Human
uguggccaggccucggugcugcc

SEQ ID NO: 544594 - RNA, 24 nt, Human
uuaacauugacacagagcaauaag

SEQ ID NO: 544595 - RNA, 27 nt, Human
uuacuaagacuaacuccagaggccaua

SEQ ID NO: 544596 - RNA, 21 nt, Human
uuacuaaguuguuaaaaaugu

SEQ ID NO: 544597 - RNA, 21 nt, Human
uuacuugaucugagacagguu

SEQ ID NO: 544598 - RNA, 23 nt, Human
uucaucccaauaaucuacaacug

SEQ ID NO: 544599 - RNA, 22 nt, Human
uucuuuagaaccugcauucugg

SEQ ID NO: 544600 - RNA, 22 nt, Human
uugcuguguuauuguucuugug

SEQ ID NO: 544601 - RNA, 19 nt, Human
uuuacuaagacuaacucca

SEQ ID NO: 544602 - RNA, 21 nt, Human
uuuaucaucaaugaaaaacca

SEQ ID NO: 544603 - RNA, 21 nt, Human
uuucuuuuaugacuacacaga

SEQ ID NO: 544604 - RNA, 20 nt, Human
aacauggugaaaccgagucu

SEQ ID NO: 544605 - RNA, 21 nt, Human
aacauggugaaaccgagucuc

SEQ ID NO: 544606 - RNA, 24 nt, Human
aagacaccacauguaagauaagua

SEQ ID NO: 544607 - RNA, 22 nt, Human
aagagcaaaacuccgucacaaa

SEQ ID NO: 544608 - RNA, 20 nt, Human
aagccucuagccucugcaca

SEQ ID NO: 544609 - RNA, 21 nt, Human
aagcgcugggagggggcagga

SEQ ID NO: 544610 - RNA, 26 nt, Human
aaguaggagguggaguggggggaccc

SEQ ID NO: 544611 - RNA, 24 nt, Human
aaguggagguugcagugagccgag

SEQ ID NO: 544612 - RNA, 19 nt, Human
aaucacuugaacccaagaa

SEQ ID NO: 544613 - RNA, 24 nt, Human
aaucacuugaacccaagaagugga

SEQ ID NO: 544614 - RNA, 22 nt, Human
aauugccaggggaaagaaaagu

SEQ ID NO: 544615 - RNA, 23 nt, Human
aauugucuccuaaaaaucccuau

SEQ ID NO: 544616 - RNA, 24 nt, Human
aauuuuguauuuuuaguagagaca

SEQ ID NO: 544617 - RNA, 22 nt, Human
acaaugcagaaggagcuuugaa

SEQ ID NO: 544618 - RNA, 23 nt, Human
acaaugcagaaggagcuuugaaa

SEQ ID NO: 544619 - RNA, 22 nt, Human
acaggagaaucacuugaaccca

SEQ ID NO: 544620 - RNA, 21 nt, Human
acauagaccuucucuuucucc

SEQ ID NO: 544621 - RNA, 19 nt, Human
acauggugaaaccgagucu

SEQ ID NO: 544622 - RNA, 24 nt, Human
accaacauggugaaaccgagucuc

SEQ ID NO: 544623 - RNA, 22 nt, Human
acgggggcggggcggcgcgggc

SEQ ID NO: 544624 - RNA, 21 nt, Human
acuccagccugggagacaaga

SEQ ID NO: 544625 - RNA, 18 nt, Human
acugcacuccagccuggg

SEQ ID NO: 544626 - RNA, 18 nt, Human
acugcacuccagccuggg

SEQ ID NO: 544627 - RNA, 18 nt, Human
agacagaguuucuccacg

SEQ ID NO: 544628 - RNA, 18 nt, Human
agacaggagaaucacuug

SEQ ID NO: 544629 - RNA, 23 nt, Human
agacaggagaaucacuugaaccc

SEQ ID NO: 544630 - RNA, 24 nt, Human
agacaggagaaucacuugaaccca

SEQ ID NO: 544631 - RNA, 18 nt, Human
agagaacgugaggggcag

SEQ ID NO: 544632 - RNA, 21 nt, Human
agccaggcgugguagcucaug

SEQ ID NO: 544633 - RNA, 20 nt, Human
agccauucuccugccucagc

SEQ ID NO: 544634 - RNA, 21 nt, Human
aggaagacaccacauguaaga

SEQ ID NO: 544635 - RNA, 21 nt, Human
aggagcuuugaaaacuggcuc

SEQ ID NO: 544636 - RNA, 23 nt, Human
aggagguggagugggcgacuauc

SEQ ID NO: 544637 - RNA, 21 nt, Human
aggcaugcaugagugcaccaa

SEQ ID NO: 544638 - RNA, 21 nt, Human
aggccaaggcggguggaucac

SEQ ID NO: 544639 - RNA, 20 nt, Human
aggccccaaacagucaccaa

SEQ ID NO: 544640 - RNA, 22 nt, Human
aggcggguggaucaccugaggu

SEQ ID NO: 544641 - RNA, 26 nt, Human
aggcggguggaucaccugaggucagg

SEQ ID NO: 544642 - RNA, 21 nt, Human
aggcgugguagcucaugccug

SEQ ID NO: 544643 - RNA, 24 nt, Human
aggcugagacaggagaaucacuug

SEQ ID NO: 544644 - RNA, 18 nt, Human
aggggcaggucccagagc

SEQ ID NO: 544645 - RNA, 21 nt, Human
aguagcugggaucacaggcau

SEQ ID NO: 544646 - RNA, 20 nt, Human
agugagugacaaugcagaag

SEQ ID NO: 544647 - RNA, 24 nt, Human
aguggcucacgccuguaaucccag

SEQ ID NO: 544648 - RNA, 21 nt, Human
aucuaauugucuccuaaaaau

SEQ ID NO: 544649 - RNA, 20 nt, Human
augccugcaaucccagccac

SEQ ID NO: 544650 - RNA, 24 nt, Human
auugugucacugcacuccagccug

SEQ ID NO: 544651 - RNA, 24 nt, Human
caacauggugaaaccgagucucua

SEQ ID NO: 544652 - RNA, 25 nt, Human
caagagcaaaacuccgucacaaaac

SEQ ID NO: 544653 - RNA, 24 nt, Human
caaggcggguggaucaccugaggu

SEQ ID NO: 544654 - RNA, 26 nt, Human
caaggcggguggaucaccugagguca

SEQ ID NO: 544655 - RNA, 22 nt, Human
cacacaggccuccuuauacagu

SEQ ID NO: 544656 - RNA, 22 nt, Human
cacaggcaugagccaucacgcc

SEQ ID NO: 544657 - RNA, 19 nt, Human
caccaaaaacgaauugcca

SEQ ID NO: 544658 - RNA, 24 nt, Human
cacgccuguaaucccagcacuuug

SEQ ID NO: 544659 - RNA, 24 nt, Human
cacuccagccugggagacaagagc

SEQ ID NO: 544660 - RNA, 18 nt, Human
cacugcacuccagccugg

SEQ ID NO: 544661 - RNA, 19 nt, Human
cacugcacuccagccuggg

SEQ ID NO: 544662 - RNA, 19 nt, Human
cacugcacuccagccuggg

SEQ ID NO: 544663 - RNA, 21 nt, Human
cacugcacuccagccugggag

SEQ ID NO: 544664 - RNA, 22 nt, Human
cacugcacuccagccugggaga

SEQ ID NO: 544665 - RNA, 23 nt, Human
cacugcacuccagccugggagac

SEQ ID NO: 544666 - RNA, 24 nt, Human
cacugcacuccagccugggagaca

SEQ ID NO: 544667 - RNA, 25 nt, Human
cacugcacuccagccugggagacaa

SEQ ID NO: 544668 - RNA, 19 nt, Human
cagaaauagcuaaauaaug

SEQ ID NO: 544669 - RNA, 24 nt, Human
cagcacuuugggaggccaaggcgg

SEQ ID NO: 544670 - RNA, 19 nt, Human
cagggcccaggagacagag

SEQ ID NO: 544671 - RNA, 25 nt, Human
caggucccagagcagggcccaggag

SEQ ID NO: 544672 - RNA, 21 nt, Human
caugccugcaaucccagccac

SEQ ID NO: 544673 - RNA, 19 nt, Human
ccacgcuggucaggcuggu

SEQ ID NO: 544674 - RNA, 24 nt, Human
ccagccauucuccugccucagccu

SEQ ID NO: 544675 - RNA, 20 nt, Human
ccaggccccaaacagucacc

SEQ ID NO: 544676 - RNA, 22 nt, Human
cccaaacagucaccaacuaaga

SEQ ID NO: 544677 - RNA, 21 nt, Human
cccaagaaguggagguugcag

SEQ ID NO: 544678 - RNA, 19 nt, Human
cccgaguagcugggaucac

SEQ ID NO: 544679 - RNA, 18 nt, Human
ccgggcucaguggcucac

SEQ ID NO: 544680 - RNA, 24 nt, Human
ccucccggguuccagccauucucc

SEQ ID NO: 544681 - RNA, 24 nt, Human
ccucccggguuccagccccgaccc

SEQ ID NO: 544682 - RNA, 22 nt, Human
ccucugcacacucagcagggau

SEQ ID NO: 544683 - RNA, 21 nt, Human
ccugaccaacauggugaaacc

SEQ ID NO: 544684 - RNA, 22 nt, Human
ccugaccaacauggugaaaccg

SEQ ID NO: 544685 - RNA, 22 nt, Human
ccugaggucaggaguucaaagc

SEQ ID NO: 544686 - RNA, 18 nt, Human
ccugcaaucccagccacu

SEQ ID NO: 544687 - RNA, 19 nt, Human
ccugcaaucccagccacuu

SEQ ID NO: 544688 - RNA, 22 nt, Human
ccugcaaucccagccacuuggg

SEQ ID NO: 544689 - RNA, 24 nt, Human
ccuggcucggguguccccaagaga

SEQ ID NO: 544690 - RNA, 22 nt, Human
ccuguaaucccagcacuuuggg

SEQ ID NO: 544691 - RNA, 22 nt, Human
cgacucacggcaaccuccgccu

SEQ ID NO: 544692 - RNA, 28 nt, Human
cgccucccggguuccagccauucuccuu

SEQ ID NO: 544693 - RNA, 23 nt, Human
cgccuguaaucccagcacuuugg

SEQ ID NO: 544694 - RNA, 18 nt, Human
cgggggcggggcggcgcg

SEQ ID NO: 544695 - RNA, 21 nt, Human
cgggggcggggcggcgcgggc

SEQ ID NO: 544696 - RNA, 24 nt, Human
cggguggaucaccugaggucagga

SEQ ID NO: 544697 - RNA, 24 nt, Human
cgucacaaaaccaaaccaaaccuu

SEQ ID NO: 544698 - RNA, 22 nt, Human
cuaauugucuccuaaaaauccc

SEQ ID NO: 544699 - RNA, 24 nt, Human
cuaauuuuguauuuuuaguagaga

SEQ ID NO: 544700 - RNA, 26 nt, Human
cuauuaaaauaccaggccccaaacag

SEQ ID NO: 544701 - RNA, 22 nt, Human
cucacgccuguaaucccagcac

SEQ ID NO: 544702 - RNA, 24 nt, Human
cucacgccuguaaucccagcacuu

SEQ ID NO: 544703 - RNA, 24 nt, Human
cucacggcaaccuccgccucccgg

SEQ ID NO: 544704 - RNA, 23 nt, Human
cucagccucccgaguagcuggga

SEQ ID NO: 544705 - RNA, 25 nt, Human
cucaugccugcaaucccagccacuu

SEQ ID NO: 544706 - RNA, 21 nt, Human
cucccggguuccagccauucu

SEQ ID NO: 544707 - RNA, 23 nt, Human
cugccucagccucccgaguagcu

SEQ ID NO: 544708 - RNA, 18 nt, Human
cugggagggggcaggacc

SEQ ID NO: 544709 - RNA, 19 nt, Human
cugguccuuuuuguuacuc

SEQ ID NO: 544710 - RNA, 21 nt, Human
cuuuuuuuuuuuuuuuuuuuu

SEQ ID NO: 544711 - RNA, 18 nt, Human
gaaguggagguugcagug

SEQ ID NO: 544712 - RNA, 21 nt, Human
gaaguggagguugcagugagc

SEQ ID NO: 544713 - RNA, 19 nt, Human
gaaucacuugaacccaaga

SEQ ID NO: 544714 - RNA, 23 nt, Human
gagauugugucacugcacuccag

SEQ ID NO: 544715 - RNA, 19 nt, Human
gagcuuugaaaacuggcuc

SEQ ID NO: 544716 - RNA, 23 nt, Human
gagguugcagugagccgagauug

SEQ ID NO: 544717 - RNA, 25 nt, Human
gaguagcugggaucacaggcaugag

SEQ ID NO: 544718 - RNA, 18 nt, Human
gaucacaggcaugagcca

SEQ ID NO: 544719 - RNA, 23 nt, Human
gaucaccugaggucaggaguuca

SEQ ID NO: 544720 - RNA, 24 nt, Human
gaucaccugaggucaggaguucaa

SEQ ID NO: 544721 - RNA, 19 nt, Human
gcaaaacuccgucacaaaa

SEQ ID NO: 544722 - RNA, 22 nt, Human
gcaaccuccgccucccggguuc

SEQ ID NO: 544723 - RNA, 21 nt, Human
gcaagcgcugggagggggcag

SEQ ID NO: 544724 - RNA, 20 nt, Human
gccucagccucccgaguagc

SEQ ID NO: 544725 - RNA, 18 nt, Human
gcggcgcgggcaagcgcu

SEQ ID NO: 544726 - RNA, 19 nt, Human
gcguaguguccuggcucgg

SEQ ID NO: 544727 - RNA, 20 nt, Human
ggagguugcagugagccgag

SEQ ID NO: 544728 - RNA, 22 nt, Human
ggagguugcagugagccgagau

SEQ ID NO: 544729 - RNA, 24 nt, Human
ggagguugcagugagccgagauug

SEQ ID NO: 544730 - RNA, 19 nt, Human
ggaucacaggcaugagcca

SEQ ID NO: 544731 - RNA, 22 nt, Human
ggaucaccugaggucaggaguu

SEQ ID NO: 544732 - RNA, 23 nt, Human
gggcaagcgcugggagggggcag

SEQ ID NO: 544733 - RNA, 21 nt, Human
gggcaggacccgaggagcucc

SEQ ID NO: 544734 - RNA, 22 nt, Human
gggcaggacccgaggagcuccg

SEQ ID NO: 544735 - RNA, 22 nt, Human
gggcggcgcgggcaagcgcugg

SEQ ID NO: 544736 - RNA, 24 nt, Human
gggcucaguggcucacgccuguaa

SEQ ID NO: 544737 - RNA, 24 nt, Human
gguagcucaugccugcaaucccag

SEQ ID NO: 544738 - RNA, 21 nt, Human
gguggaucaccugaggucagg

SEQ ID NO: 544739 - RNA, 24 nt, Human
guugcagugagccgagauuguguc

SEQ ID NO: 544740 - RNA, 24 nt, Human
uaaaaaaauaaaaaauuaaaaaag

SEQ ID NO: 544741 - RNA, 21 nt, Human
uaaugagucucagguuaagua

SEQ ID NO: 544742 - RNA, 21 nt, Human
uacaucuacccuuggaugaua

SEQ ID NO: 544743 - RNA, 24 nt, Human
uagccaggcgugguagcucaugcc

SEQ ID NO: 544744 - RNA, 18 nt, Human
uaggagguggagugggcg

SEQ ID NO: 544745 - RNA, 24 nt, Human
uaguagagacagaguuucuccacg

SEQ ID NO: 544746 - RNA, 21 nt, Human
uauauacaggaagacaccaca

SEQ ID NO: 544747 - RNA, 21 nt, Human
ucaaagccagccugaccaaca

SEQ ID NO: 544748 - RNA, 24 nt, Human
ucacggcaaccuccgccucccggg

SEQ ID NO: 544749 - RNA, 25 nt, Human
ucacggcaaccuccgccucccgggu

SEQ ID NO: 544750 - RNA, 24 nt, Human
ucacugcacuccagccugggagac

SEQ ID NO: 544751 - RNA, 20 nt, Human
ucagccucccgaguagcugg

SEQ ID NO: 544752 - RNA, 23 nt, Human
uccaaaaugcuacuaagcaacua

SEQ ID NO: 544753 - RNA, 18 nt, Human
ucccagccacuugggagg

SEQ ID NO: 544754 - RNA, 18 nt, Human
uccccaagagaacgugag

SEQ ID NO: 544755 - RNA, 24 nt, Human
ucccgaguagcugggaucacaggc

SEQ ID NO: 544756 - RNA, 21 nt, Human
ucccggguuccagccauucuc

SEQ ID NO: 544757 - RNA, 24 nt, Human
ucccggguuccagccauucuccug

SEQ ID NO: 544758 - RNA, 23 nt, Human
uccgucacaaaaccaaaccaaac

SEQ ID NO: 544759 - RNA, 18 nt, Human
uccgugaggggugcggag

SEQ ID NO: 544760 - RNA, 22 nt, Human
ucgcucuuguugcccaggcugg

SEQ ID NO: 544761 - RNA, 23 nt, Human
ucgcucuuguugcccaggcugga

SEQ ID NO: 544762 - RNA, 20 nt, Human
ucuccuagaauccuuucuca

SEQ ID NO: 544763 - RNA, 24 nt, Human
ucuccugccucagccucccgagua

SEQ ID NO: 544764 - RNA, 22 nt, Human
ucucuacuaaaaauacaaaaaa

SEQ ID NO: 544765 - RNA, 19 nt, Human
ucuguuacucuuuucuuuc

SEQ ID NO: 544766 - RNA, 22 nt, Human
ucuuguugcccaggcuggaaug

SEQ ID NO: 544767 - RNA, 18 nt, Human
ucuuuuuuuuuuuuuuuu

SEQ ID NO: 544768 - RNA, 24 nt, Human
ugaccaacauggugaaaccgaguc

SEQ ID NO: 544769 - RNA, 20 nt, Human
ugagacaggagaaucacuug

SEQ ID NO: 544770 - RNA, 24 nt, Human
ugagacaggagaaucacuugaacc

SEQ ID NO: 544771 - RNA, 22 nt, Human
ugagccgagauugugucacugc

SEQ ID NO: 544772 - RNA, 21 nt, Human
ugcacacucagcagggaugcg

SEQ ID NO: 544773 - RNA, 24 nt, Human
ugcagaaggagcuuugaaaacugg

SEQ ID NO: 544774 - RNA, 21 nt, Human
ugcccaggcuggaaugcaaug

SEQ ID NO: 544775 - RNA, 24 nt, Human
ugccucagccucccgaguagcugg

SEQ ID NO: 544776 - RNA, 23 nt, Human
uggaaugcaauggugcgaucucg

SEQ ID NO: 544777 - RNA, 24 nt, Human
uggaucaccugaggucaggaguuc

SEQ ID NO: 544778 - RNA, 26 nt, Human
uggaucaccugaggucaggaguucaa

SEQ ID NO: 544779 - RNA, 22 nt, Human
uggcucacgccuguaaucccag

SEQ ID NO: 544780 - RNA, 24 nt, Human
uggcucacgccuguaaucccagca

SEQ ID NO: 544781 - RNA, 24 nt, Human
ugggaggccaaggcggguggauca

SEQ ID NO: 544782 - RNA, 24 nt, Human
ugggaggcugagacaggagaauca

SEQ ID NO: 544783 - RNA, 21 nt, Human
ugggaucacaggcaugagcca

SEQ ID NO: 544784 - RNA, 22 nt, Human
ugggaucacaggcaugagccau

SEQ ID NO: 544785 - RNA, 23 nt, Human
ugggaucacaggcaugagccauc

SEQ ID NO: 544786 - RNA, 24 nt, Human
ugggaucacaggcaugagccauca

SEQ ID NO: 544787 - RNA, 24 nt, Human
ugggaucacaggcaugagccauca

SEQ ID NO: 544788 - RNA, 27 nt, Human
ugggaucacaggcaugagccaucacgc

SEQ ID NO: 544789 - RNA, 24 nt, Human
ugguagcucaugccugcaauccca

SEQ ID NO: 544790 - RNA, 21 nt, Human
uucaaagccagccugaccaac

SEQ ID NO: 544791 - RNA, 20 nt, Human
uucauggguuaaggguaggg

SEQ ID NO: 544792 - RNA, 24 nt, Human
uucgcucuuguugcccaggcugga

SEQ ID NO: 544793 - RNA, 23 nt, Human
uucuccuagaauccuuucucaaa

SEQ ID NO: 544794 - RNA, 18 nt, Human
uugcagugagccgagauu

SEQ ID NO: 544795 - RNA, 19 nt, Human
uugcagugagccgagauug

SEQ ID NO: 544796 - RNA, 22 nt, Human
uugcagugagccgagauugugu

SEQ ID NO: 544797 - RNA, 18 nt, Human
uugcccaggcuggaaugc

SEQ ID NO: 544798 - RNA, 25 nt, Human
uugggaggcugagacaggagaauca

SEQ ID NO: 544799 - RNA, 23 nt, Human
uugugucacugcacuccagccug

SEQ ID NO: 544800 - RNA, 23 nt, Human
uuguugcccaggcuggaaugcaa

SEQ ID NO: 544801 - RNA, 24 nt, Human
uuucgcucuuguugcccaggcugg

SEQ ID NO: 544802 - RNA, 19 nt, Human
uuuuguauuuuuaguagag

SEQ ID NO: 544803 - RNA, 20 nt, Human
uuuuguauuuuuaguagaga

SEQ ID NO: 544804 - RNA, 24 nt, Human
uuuuuucuuuuuuuuccaaaaugc

SEQ ID NO: 544805 - RNA, 25 nt, Human
uuuuuuuuuuuugagacggaguuuc

SEQ ID NO: 544806 - RNA, 22 nt, Human
uuuuuuuuuuuuuugagacgga

SEQ ID NO: 544807 - RNA, 18 nt, Human
uuuuuuuuuuuuuuuuug

SEQ ID NO: 544808 - RNA, 20 nt, Human
agaacuaacaauaaaaagga

SEQ ID NO: 544809 - RNA, 21 nt, Human
auguucuaaauggcagcucca

SEQ ID NO: 544810 - RNA, 18 nt, Human
caagacggccccugccaa

SEQ ID NO: 544811 - RNA, 19 nt, Human
caauaaaaaggaguuccaa

SEQ ID NO: 544812 - RNA, 22 nt, Human
cagcaagaugaagcugggauua

SEQ ID NO: 544813 - RNA, 21 nt, Human
ccaucuucucuuuuugccacc

SEQ ID NO: 544814 - RNA, 24 nt, Human
cuaaauggcagcuccaucuucucu

SEQ ID NO: 544815 - RNA, 21 nt, Human
gagaacuaacaauaaaaagga

SEQ ID NO: 544816 - RNA, 24 nt, Human
gaugaagcugggauuaggcauguu

SEQ ID NO: 544817 - RNA, 28 nt, Human
ggaaacaagugagaacuaaccgguaccc

SEQ ID NO: 544818 - RNA, 23 nt, Human
uggaaacaagugagaacuaacaa

SEQ ID NO: 544819 - RNA, 24 nt, Human
uggcagcuccaucuucucuuuuug

SEQ ID NO: 544820 - RNA, 21 nt, Human
caccacgcuggcuccggaggc

SEQ ID NO: 544821 - RNA, 21 nt, Human
cggaggcaccggcucugaagc

SEQ ID NO: 544822 - RNA, 21 nt, Human
cucugcccacccugaggacag

SEQ ID NO: 544823 - RNA, 22 nt, Human
cucugcccacccugaggacaga

SEQ ID NO: 544824 - RNA, 24 nt, Human
gcugguaagcuuccggccuucucc

SEQ ID NO: 544825 - RNA, 19 nt, Human
uaggaauuccuucucggcu

SEQ ID NO: 544826 - RNA, 21 nt, Human
uaguggcucugcccacccuga

SEQ ID NO: 544827 - RNA, 21 nt, Human
uccggaggcaccggcucugaa

SEQ ID NO: 544828 - RNA, 21 nt, Human
uggccaccacgcuggcuccgg

SEQ ID NO: 544829 - RNA, 20 nt, Human
aacaggcauuuggccaauaa

SEQ ID NO: 544830 - RNA, 19 nt, Human
aagcaaaagaaacaaagua

SEQ ID NO: 544831 - RNA, 20 nt, Human
aaugaugugccugaaauagc

SEQ ID NO: 544832 - RNA, 21 nt, Human
aauuuccuaagcaaaagaaac

SEQ ID NO: 544833 - RNA, 25 nt, Human
acaaagcagauuacaauguagcccu

SEQ ID NO: 544834 - RNA, 18 nt, Human
acauuaaacauggaagcu

SEQ ID NO: 544835 - RNA, 19 nt, Human
acucuaaaagaugacaaga

SEQ ID NO: 544836 - RNA, 23 nt, Human
agcaaaagaaacaaaguaaaugc

SEQ ID NO: 544837 - RNA, 25 nt, Human
aggaagaauaaagaauuuggaccgg

SEQ ID NO: 544838 - RNA, 24 nt, Human
aguaaaugcugagguuaauaaaga

SEQ ID NO: 544839 - RNA, 22 nt, Human
auuuccuaagcaaaagaaacaa

SEQ ID NO: 544840 - RNA, 23 nt, Human
caacucaucaaaacaggcauuug

SEQ ID NO: 544841 - RNA, 19 nt, Human
ccaggucacucuuccaauc

SEQ ID NO: 544842 - RNA, 20 nt, Human
ccccucagugagacccuggc

SEQ ID NO: 544843 - RNA, 22 nt, Human
ccccucagugagacccuggccu

SEQ ID NO: 544844 - RNA, 21 nt, Human
cucuuccaaucagugaauggc

SEQ ID NO: 544845 - RNA, 24 nt, Human
gcucaaggaagaauaaagaauuug

SEQ ID NO: 544846 - RNA, 20 nt, Human
gggacgcgggggagggagcc

SEQ ID NO: 544847 - RNA, 25 nt, Human
gggagggagccggcgggcagcgagu

SEQ ID NO: 544848 - RNA, 20 nt, Human
gucgcagggacgcgggggag

SEQ ID NO: 544849 - RNA, 28 nt, Human
uaacaaagcagauuacaauguagcccua

SEQ ID NO: 544850 - RNA, 24 nt, Human
uagauuuauuuagggcuguuugca

SEQ ID NO: 544851 - RNA, 22 nt, Human
ugacaagacagcucccccucag

SEQ ID NO: 544852 - RNA, 21 nt, Human
ugagguuaauaaagauguaau

SEQ ID NO: 544853 - RNA, 20 nt, Human
ugccaggucacucuuccaau

SEQ ID NO: 544854 - RNA, 21 nt, Human
ugcugagguuaauaaagaugu

SEQ ID NO: 544855 - RNA, 24 nt, Human
uguaauuuaaaauccugagcuuaa

SEQ ID NO: 544856 - RNA, 22 nt, Human
uuaguuguuacaagacacugca

SEQ ID NO: 544857 - RNA, 19 nt, Human
uuaugagcaauuuccuaag

SEQ ID NO: 544858 - RNA, 19 nt, Human
uuuuuuuuuuuuuuauucu

SEQ ID NO: 544859 - RNA, 19 nt, Human
aaagcccagcucuuccaag

SEQ ID NO: 544860 - RNA, 20 nt, Human
aaagcccagcucuuccaagc

SEQ ID NO: 544861 - RNA, 23 nt, Human
aacagcaaauaagggcccaaagc

SEQ ID NO: 544862 - RNA, 22 nt, Human
aagguccccccacccccaagac

SEQ ID NO: 544863 - RNA, 23 nt, Human
aagguccccccacccccaagacc

SEQ ID NO: 544864 - RNA, 23 nt, Human
aagguccccccacccccaagacc

SEQ ID NO: 544865 - RNA, 21 nt, Human
acccagccagcccccuaucac

SEQ ID NO: 544866 - RNA, 24 nt, Human
accccuacagacaacucuuagaac

SEQ ID NO: 544867 - RNA, 18 nt, Human
agacagaaaacaaagccc

SEQ ID NO: 544868 - RNA, 22 nt, Human
agacagaaaacaaagcccagcu

SEQ ID NO: 544869 - RNA, 21 nt, Human
agccucaccccugaacucaaa

SEQ ID NO: 544870 - RNA, 21 nt, Human
aggaguaaggaaagagguuag

SEQ ID NO: 544871 - RNA, 22 nt, Human
aggguggagaugggguaaccag

SEQ ID NO: 544872 - RNA, 21 nt, Human
aucucaccauuccugacccag

SEQ ID NO: 544873 - RNA, 24 nt, Human
caaaaaaaaaaccccuacagacaa

SEQ ID NO: 544874 - RNA, 25 nt, Human
caaaaaaaaaaccccuacagacaac

SEQ ID NO: 544875 - RNA, 23 nt, Human
caaaagacacuguacuggggaac

SEQ ID NO: 544876 - RNA, 23 nt, Human
caaaguaccaggcugcuagggug

SEQ ID NO: 544877 - RNA, 21 nt, Human
caaauaagggcccaaagccau

SEQ ID NO: 544878 - RNA, 20 nt, Human
caccauuccugacccagccg

SEQ ID NO: 544879 - RNA, 21 nt, Human
cacccacacucacucaucccc

SEQ ID NO: 544880 - RNA, 21 nt, Human
cagaaaacaaagcccagcucu

SEQ ID NO: 544881 - RNA, 25 nt, Human
cagaaaacaaagcccagcucuucca

SEQ ID NO: 544882 - RNA, 22 nt, Human
cauccccuuccucacaaugacc

SEQ ID NO: 544883 - RNA, 21 nt, Human
caucuguuugguuguccaaag

SEQ ID NO: 544884 - RNA, 22 nt, Human
ccaaauccaccugcccacuguc

SEQ ID NO: 544885 - RNA, 19 nt, Human
ccagccacacccacacuca

SEQ ID NO: 544886 - RNA, 21 nt, Human
ccaggggaauaugcuggaaaa

SEQ ID NO: 544887 - RNA, 25 nt, Human
cccacacucacucauccccuuccuc

SEQ ID NO: 544888 - RNA, 21 nt, Human
cccacuguccaccggcaucua

SEQ ID NO: 544889 - RNA, 19 nt, Human
ccccacccccaagaccaag

SEQ ID NO: 544890 - RNA, 19 nt, Human
cccccaagaccaaggaccc

SEQ ID NO: 544891 - RNA, 20 nt, Human
cccccaagaccaaggacccu

SEQ ID NO: 544892 - RNA, 24 nt, Human
cccccacccccaagaccaaggacc

SEQ ID NO: 544893 - RNA, 23 nt, Human
ccccugaacucaaaugggauggg

SEQ ID NO: 544894 - RNA, 18 nt, Human
ccucaaaaaaaaaacccc

SEQ ID NO: 544895 - RNA, 22 nt, Human
ccucaaaaaaaaaaccccuaca

SEQ ID NO: 544896 - RNA, 25 nt, Human
ccucaaaaaaaaaaccccuacagac

SEQ ID NO: 544897 - RNA, 24 nt, Human
ccucaccccugaacucaaauggga

SEQ ID NO: 544898 - RNA, 24 nt, Human
ccuccagccacacccacacucacu

SEQ ID NO: 544899 - RNA, 24 nt, Human
ccuccccaaauccaccugcccacu

SEQ ID NO: 544900 - RNA, 24 nt, Human
cuagcuccuccuccagccacaccc

SEQ ID NO: 544901 - RNA, 26 nt, Human
cucaccccugaacucaaaagguuuuc

SEQ ID NO: 544902 - RNA, 20 nt, Human
cucaccccugaacucaaaug

SEQ ID NO: 544903 - RNA, 20 nt, Human
cucacucauccccuuccuca

SEQ ID NO: 544904 - RNA, 18 nt, Human
cucauccccuuccucaca

SEQ ID NO: 544905 - RNA, 24 nt, Human
cuggaaaagguccccccaccccca

SEQ ID NO: 544906 - RNA, 22 nt, Human
cuuaagccucaccccugaacuc

SEQ ID NO: 544907 - RNA, 22 nt, Human
gaaaacaaagcccagcucuucc

SEQ ID NO: 544908 - RNA, 20 nt, Human
gaaaagguccccccaccccc

SEQ ID NO: 544909 - RNA, 18 nt, Human
gaacaggggagagggugg

SEQ ID NO: 544910 - RNA, 18 nt, Human
gaccgcacccaaaagaca

SEQ ID NO: 544911 - RNA, 20 nt, Human
gagaggguggagauggggua

SEQ ID NO: 544912 - RNA, 23 nt, Human
gauccucuccuccccaaauccac

SEQ ID NO: 544913 - RNA, 24 nt, Human
gccacacccacacucacucauccc

SEQ ID NO: 544914 - RNA, 24 nt, Human
gcccaaagccauuuccaaucaucc

SEQ ID NO: 544915 - RNA, 24 nt, Human
gcugcuagggugggcccagaaacu

SEQ ID NO: 544916 - RNA, 20 nt, Human
gcugcugcugauccucuccu

SEQ ID NO: 544917 - RNA, 22 nt, Human
ggaacccaggacuggaggcugg

SEQ ID NO: 544918 - RNA, 18 nt, Human
ggacuggaggcugggcug

SEQ ID NO: 544919 - RNA, 21 nt, Human
ggagaugggguaaccagucca

SEQ ID NO: 544920 - RNA, 20 nt, Human
ggaugggauaaggaguaagg

SEQ ID NO: 544921 - RNA, 28 nt, Human
ggcugcuagggugggcccagaaacugcu

SEQ ID NO: 544922 - RNA, 21 nt, Human
gggauaaggaguaaggaaaga

SEQ ID NO: 544923 - RNA, 19 nt, Human
gggcagggguacagagcug

SEQ ID NO: 544924 - RNA, 18 nt, Human
guccccccacccccaaga

SEQ ID NO: 544925 - RNA, 24 nt, Human
uaaacucugaagcugagcucccag

SEQ ID NO: 544926 - RNA, 21 nt, Human
uacagacaacucuuagaacag

SEQ ID NO: 544927 - RNA, 23 nt, Human
uacagagcuguugcgugugugug

SEQ ID NO: 544928 - RNA, 19 nt, Human
uagaacagcaaauaagggc

SEQ ID NO: 544929 - RNA, 19 nt, Human
uagaacagcaaauaagggc

SEQ ID NO: 544930 - RNA, 22 nt, Human
uagaacagcaaauaagggccca

SEQ ID NO: 544931 - RNA, 21 nt, Human
ucacucauccccuuccucaca

SEQ ID NO: 544932 - RNA, 23 nt, Human
ucacugaguacugcugcugcugc

SEQ ID NO: 544933 - RNA, 19 nt, Human
uccccaaauccaccugccc

SEQ ID NO: 544934 - RNA, 20 nt, Human
uccccuuccucacaaugacc

SEQ ID NO: 544935 - RNA, 20 nt, Human
ucccuuguaaacucugaagc

SEQ ID NO: 544936 - RNA, 22 nt, Human
ucccuuguaaacucugaagcuc

SEQ ID NO: 544937 - RNA, 22 nt, Human
uccucaaaaaaaaaaccccuac

SEQ ID NO: 544938 - RNA, 22 nt, Human
ucggauguuaacuaaaggccca

SEQ ID NO: 544939 - RNA, 26 nt, Human
ucuuaagccucaccccugaacucaaa

SEQ ID NO: 544940 - RNA, 23 nt, Human
ugcaauccucaaaaaaaaaaccc

SEQ ID NO: 544941 - RNA, 23 nt, Human
ugcugcugauccucuccucccca

SEQ ID NO: 544942 - RNA, 20 nt, Human
ugcuggaaaaggucccccca

SEQ ID NO: 544943 - RNA, 18 nt, Human
uggagaugggguaaccag

SEQ ID NO: 544944 - RNA, 23 nt, Human
ugggagguuccaaguucugggca

SEQ ID NO: 544945 - RNA, 19 nt, Human
ugggaugggauaaggagua

SEQ ID NO: 544946 - RNA, 18 nt, Human
ugggcugaaggaaggcag

SEQ ID NO: 544947 - RNA, 18 nt, Human
ugggguaaccaguccaca

SEQ ID NO: 544948 - RNA, 23 nt, Human
uucaucucaccauuccugaccca

SEQ ID NO: 544949 - RNA, 21 nt, Human
uuucaacuauucucucuucca

SEQ ID NO: 544950 - RNA, 24 nt, Human
uuucaacuauucucucuuccacuu

SEQ ID NO: 544951 - RNA, 22 nt, Human
aagaagcugacccagaacccac

SEQ ID NO: 544952 - RNA, 20 nt, Human
aauucccagaggggaggagg

SEQ ID NO: 544953 - RNA, 22 nt, Human
acaaaauugagguaaaagaagc

SEQ ID NO: 544954 - RNA, 20 nt, Human
acaacugcccagggcugccc

SEQ ID NO: 544955 - RNA, 19 nt, Human
acccucaacaaaccuccca

SEQ ID NO: 544956 - RNA, 21 nt, Human
acccucaacaaaccucccagc

SEQ ID NO: 544957 - RNA, 19 nt, Human
accgcgggcccgaagcagc

SEQ ID NO: 544958 - RNA, 21 nt, Human
acucgccccacaccaggcccc

SEQ ID NO: 544959 - RNA, 22 nt, Human
agcugacccagaacccacgccc

SEQ ID NO: 544960 - RNA, 18 nt, Human
agcuuccgagcgagccgc

SEQ ID NO: 544961 - RNA, 25 nt, Human
aggcaggcagggggagccccggcuu

SEQ ID NO: 544962 - RNA, 20 nt, Human
aggcagggggagccccggcu

SEQ ID NO: 544963 - RNA, 22 nt, Human
aggccccgagcaccgcgggccc

SEQ ID NO: 544964 - RNA, 23 nt, Human
aguacaacugcccagggcugccc

SEQ ID NO: 544965 - RNA, 22 nt, Human
caacaaaccucccagccucucg

SEQ ID NO: 544966 - RNA, 21 nt, Human
cacacccucaacaaaccuccc

SEQ ID NO: 544967 - RNA, 27 nt, Human
caccaggccccgagcaccgcgggcccc

SEQ ID NO: 544968 - RNA, 18 nt, Human
caccccacacccucaaca

SEQ ID NO: 544969 - RNA, 20 nt, Human
caccccacacccucaacaaa

SEQ ID NO: 544970 - RNA, 19 nt, Human
cagcuucagaccccucugg

SEQ ID NO: 544971 - RNA, 22 nt, Human
cagcuucagaccccucuggccu

SEQ ID NO: 544972 - RNA, 19 nt, Human
caggcagggggagccccgg

SEQ ID NO: 544973 - RNA, 20 nt, Human
cccagaacccacgcccgucc

SEQ ID NO: 544974 - RNA, 23 nt, Human
ccccacaccaggccccgagcacc

SEQ ID NO: 544975 - RNA, 22 nt, Human
ccccacacccucaacaaaccuc

SEQ ID NO: 544976 - RNA, 23 nt, Human
ccccaugaguacaacugcccagg

SEQ ID NO: 544977 - RNA, 23 nt, Human
cccccagaggacagacgggcccu

SEQ ID NO: 544978 - RNA, 22 nt, Human
ccccgagcaccgcgggcccgaa

SEQ ID NO: 544979 - RNA, 22 nt, Human
ccgagcaccgcgggcccgaagc

SEQ ID NO: 544980 - RNA, 22 nt, Human
ccguccaggcuggggaaguccu

SEQ ID NO: 544981 - RNA, 21 nt, Human
ccuaagcccccaugaguacaa

SEQ ID NO: 544982 - RNA, 19 nt, Human
ccuccggcagaucgaggcu

SEQ ID NO: 544983 - RNA, 20 nt, Human
cugcagcuccggcucggccu

SEQ ID NO: 544984 - RNA, 20 nt, Human
gacaagaggacggggcugag

SEQ ID NO: 544985 - RNA, 22 nt, Human
gagaggcaggcagggggagccc

SEQ ID NO: 544986 - RNA, 19 nt, Human
gaggacagacgggcccugc

SEQ ID NO: 544987 - RNA, 21 nt, Human
gccaccagaggcgggcgugcu

SEQ ID NO: 544988 - RNA, 21 nt, Human
gcugcagcuccggcucggccu

SEQ ID NO: 544989 - RNA, 23 nt, Human
ggacaagaggacggggcugaggg

SEQ ID NO: 544990 - RNA, 19 nt, Human
ggaggagagagaggcaggc

SEQ ID NO: 544991 - RNA, 24 nt, Human
ggaggagagagaggcaggcagggg

SEQ ID NO: 544992 - RNA, 22 nt, Human
ggcaggcagggggagccccggc

SEQ ID NO: 544993 - RNA, 23 nt, Human
gggaagucucuacucgccccaca

SEQ ID NO: 544994 - RNA, 21 nt, Human
gggcagcgggguggccaccag

SEQ ID NO: 544995 - RNA, 22 nt, Human
gggcagggcucuggcuguggcu

SEQ ID NO: 544996 - RNA, 23 nt, Human
gggcagggcucuggcuguggcuc

SEQ ID NO: 544997 - RNA, 19 nt, Human
gggcccgaagcagccccca

SEQ ID NO: 544998 - RNA, 23 nt, Human
ggggaggaggagagagaggcaga

SEQ ID NO: 544999 - RNA, 20 nt, Human
guggggcacaccccacaccc

SEQ ID NO: 545000 - RNA, 21 nt, Human
uaaaagaagcugacccagaac

SEQ ID NO: 545001 - RNA, 22 nt, Human
uaaaagaagcugacccagaacc

SEQ ID NO: 545002 - RNA, 24 nt, Human
uaaaagaagcugacccagaaccca

SEQ ID NO: 545003 - RNA, 19 nt, Human
uccaggcuggggaagucuc

SEQ ID NO: 545004 - RNA, 21 nt, Human
ucccaaacagcuucagacccc

SEQ ID NO: 545005 - RNA, 24 nt, Human
ucccaaacagcuucagaccccucu

SEQ ID NO: 545006 - RNA, 20 nt, Human
uccuaagcccccaugaguac

SEQ ID NO: 545007 - RNA, 20 nt, Human
ugagguaaaagaagcugacc

SEQ ID NO: 545008 - RNA, 22 nt, Human
ugagguagcugcauccuaagcc

SEQ ID NO: 545009 - RNA, 21 nt, Human
ugcccagcgccuccggcagau

SEQ ID NO: 545010 - RNA, 18 nt, Human
uggagucccggggucauu

SEQ ID NO: 545011 - RNA, 21 nt, Human
uuucccaaacagcuucagacc

SEQ ID NO: 545012 - RNA, 24 nt, Human
aaaaaaaaaauccagagcaugaaa

SEQ ID NO: 545013 - RNA, 20 nt, Human
aaaaaaaaauccagagcaug

SEQ ID NO: 545014 - RNA, 21 nt, Human
aaaaaaaaccagaauccaucc

SEQ ID NO: 545015 - RNA, 20 nt, Human
aaaaaaaucucuuaaaccca

SEQ ID NO: 545016 - RNA, 24 nt, Human
aaaaaaauuacuucuuuaaccucc

SEQ ID NO: 545017 - RNA, 22 nt, Human
aaacccagagaaggaaaaaaaa

SEQ ID NO: 545018 - RNA, 20 nt, Human
aaacuacuaaguccacuuca

SEQ ID NO: 545019 - RNA, 22 nt, Human
aaccagaauccauccuccuucc

SEQ ID NO: 545020 - RNA, 21 nt, Human
aacccagagaaggaaaaaaaa

SEQ ID NO: 545021 - RNA, 22 nt, Human
aacccagagaaggaaaaaaaaa

SEQ ID NO: 545022 - RNA, 22 nt, Human
aagaaaaaaaaccagaauccau

SEQ ID NO: 545023 - RNA, 20 nt, Human
aagaacucaagacaguuuca

SEQ ID NO: 545024 - RNA, 20 nt, Human
aagaagaacucaagacaguu

SEQ ID NO: 545025 - RNA, 22 nt, Human
aagaagccagugaaggcauaua

SEQ ID NO: 545026 - RNA, 19 nt, Human
aagcugcccugaucuucuc

SEQ ID NO: 545027 - RNA, 27 nt, Human
aagggcaagaugggggugagcucagcg

SEQ ID NO: 545028 - RNA, 19 nt, Human
aaucucuuaaacccagaga

SEQ ID NO: 545029 - RNA, 21 nt, Human
acaaaaaaaaaaagaaagaaa

SEQ ID NO: 545030 - RNA, 23 nt, Human
acaaaaaaaaaaagaaagaaaaa

SEQ ID NO: 545031 - RNA, 21 nt, Human
acacacaaaaucaaagguauc

SEQ ID NO: 545032 - RNA, 25 nt, Human
accagaaucaaaucagaaaaaaaaa

SEQ ID NO: 545033 - RNA, 23 nt, Human
accagaauccauccuccuuccuc

SEQ ID NO: 545034 - RNA, 21 nt, Human
agaaaaaaaaaaaaaaaagga

SEQ ID NO: 545035 - RNA, 26 nt, Human
agaaaaaaaaaaaaaaaaggaaaaag

SEQ ID NO: 545036 - RNA, 25 nt, Human
agaaggaaaaaaaaaaaaaauccag

SEQ ID NO: 545037 - RNA, 18 nt, Human
agggcaagauggggguga

SEQ ID NO: 545038 - RNA, 19 nt, Human
aggggugguggggaugggc

SEQ ID NO: 545039 - RNA, 25 nt, Human
auaaauuuuuacacaaucaacagaa

SEQ ID NO: 545040 - RNA, 20 nt, Human
auccagagcaugaaacacac

SEQ ID NO: 545041 - RNA, 22 nt, Human
auugccaaggaacaggaagggc

SEQ ID NO: 545042 - RNA, 19 nt, Human
caaaaaaaaucucuuaaac

SEQ ID NO: 545043 - RNA, 20 nt, Human
caagaagaacucaagacagu

SEQ ID NO: 545044 - RNA, 22 nt, Human
cacaaucaacagaaacacacca

SEQ ID NO: 545045 - RNA, 23 nt, Human
cacaaucaacagaaacacaccaa

SEQ ID NO: 545046 - RNA, 19 nt, Human
cagagaaggaaaaaaaaaa

SEQ ID NO: 545047 - RNA, 26 nt, Human
cagcccagguugaucccaggccuugg

SEQ ID NO: 545048 - RNA, 21 nt, Human
cagcugccagcucuaacuugu

SEQ ID NO: 545049 - RNA, 23 nt, Human
cagcugccagcucuaacuuguuu

SEQ ID NO: 545050 - RNA, 21 nt, Human
caggaagggcaagaugggggu

SEQ ID NO: 545051 - RNA, 20 nt, Human
cauucagcccccauucacuc

SEQ ID NO: 545052 - RNA, 22 nt, Human
ccaacuacaaaaaaaaaaagaa

SEQ ID NO: 545053 - RNA, 26 nt, Human
ccaacuacaaaaaaaaaaagaaagaa

SEQ ID NO: 545054 - RNA, 20 nt, Human
ccagcagcaacauaguuacu

SEQ ID NO: 545055 - RNA, 26 nt, Human
ccagcagcaacauaguuacuuucucu

SEQ ID NO: 545056 - RNA, 25 nt, Human
ccaucuggcgcuccucuucagcuau

SEQ ID NO: 545057 - RNA, 25 nt, Human
cccagagaaggaaaaaaaaaaaaaa

SEQ ID NO: 545058 - RNA, 23 nt, Human
ccucccggcacucuuggagcugg

SEQ ID NO: 545059 - RNA, 26 nt, Human
cgcggaugcgccgccccccaccuccc

SEQ ID NO: 545060 - RNA, 23 nt, Human
cuacaaaaaaaaaaagaaagaaa

SEQ ID NO: 545061 - RNA, 21 nt, Human
cugcccugaucuucucuuugc

SEQ ID NO: 545062 - RNA, 20 nt, Human
cuuaaaaggaaaagggggag

SEQ ID NO: 545063 - RNA, 21 nt, Human
cuuuugcuacacuguaaaugu

SEQ ID NO: 545064 - RNA, 19 nt, Human
gaaacacacaaaaucaaag

SEQ ID NO: 545065 - RNA, 22 nt, Human
gaaaguauuugauauauuguug

SEQ ID NO: 545066 - RNA, 19 nt, Human
gaaggaaaaaaaaaaaaaa

SEQ ID NO: 545067 - RNA, 19 nt, Human
gaccacuuaagcugcccug

SEQ ID NO: 545068 - RNA, 18 nt, Human
gagcacaacagggcuugg

SEQ ID NO: 545069 - RNA, 23 nt, Human
gaugggggugagcucagcguucu

SEQ ID NO: 545070 - RNA, 20 nt, Human
gauuuuuuuuuuuuuugcga

SEQ ID NO: 545071 - RNA, 23 nt, Human
ggaugcgccgccccccaccuccc

SEQ ID NO: 545072 - RNA, 23 nt, Human
gggugguggggaugggcugaggu

SEQ ID NO: 545073 - RNA, 20 nt, Human
gucacagagguuuucauggu

SEQ ID NO: 545074 - RNA, 19 nt, Human
gugguggggaugggcugag

SEQ ID NO: 545075 - RNA, 21 nt, Human
guuggguuuuuguuuucugug

SEQ ID NO: 545076 - RNA, 22 nt, Human
uaaacccagagaaggaaaaaaa

SEQ ID NO: 545077 - RNA, 24 nt, Human
uaaacucuacaaauagcuuaaaag

SEQ ID NO: 545078 - RNA, 21 nt, Human
uacaaaaaaaaaaagaaagaa

SEQ ID NO: 545079 - RNA, 18 nt, Human
uagaccacuuaagcugcc

SEQ ID NO: 545080 - RNA, 18 nt, Human
uauuugauauauuguuga

SEQ ID NO: 545081 - RNA, 19 nt, Human
ucaagaagaacucaagaca

SEQ ID NO: 545082 - RNA, 21 nt, Human
ucagaaaaaaaaaaaaaaaaa

SEQ ID NO: 545083 - RNA, 25 nt, Human
ucagaaaaaaaaaaaaaaaaggaaa

SEQ ID NO: 545084 - RNA, 21 nt, Human
ucaggggugguggggaugggc

SEQ ID NO: 545085 - RNA, 21 nt, Human
uccagcagcaacauaguuacu

SEQ ID NO: 545086 - RNA, 23 nt, Human
uccagguccugagcauccugcuc

SEQ ID NO: 545087 - RNA, 25 nt, Human
ucccaacuacaaaaaaaaaaagaaa

SEQ ID NO: 545088 - RNA, 26 nt, Human
ucccaacuacaaaaaaaaaaagaaag

SEQ ID NO: 545089 - RNA, 22 nt, Human
uccugagcauccugcucauugc

SEQ ID NO: 545090 - RNA, 24 nt, Human
ucuccagcagcaacauaguuacuu

SEQ ID NO: 545091 - RNA, 23 nt, Human
ucuuagaccacuuaagcugcccu

SEQ ID NO: 545092 - RNA, 21 nt, Human
ugaaacacacaaaaucaaagg

SEQ ID NO: 545093 - RNA, 20 nt, Human
ugcacaagaagccagugaag

SEQ ID NO: 545094 - RNA, 19 nt, Human
ugccaaggaacaggaaggg

SEQ ID NO: 545095 - RNA, 22 nt, Human
ugggggugagcucagcguucuc

SEQ ID NO: 545096 - RNA, 25 nt, Human
uuaaagaaugccugaaggauucuua

SEQ ID NO: 545097 - RNA, 18 nt, Human
uugguucuuuuuaauugg

SEQ ID NO: 545098 - RNA, 24 nt, Human
uugguuggguuuuuguuuucugug

SEQ ID NO: 545099 - RNA, 25 nt, Human
uuucaugguucugcuuaaaacuacu

SEQ ID NO: 545100 - RNA, 21 nt, Human
uuuuuauuguuggcuuaaaaa

SEQ ID NO: 545101 - RNA, 19 nt, Human
aagaagcaaaggcagcaca

SEQ ID NO: 545102 - RNA, 22 nt, Human
caagugauuuuaucuucuccca

SEQ ID NO: 545103 - RNA, 20 nt, Human
ccagguuacaucaagugauu

SEQ ID NO: 545104 - RNA, 21 nt, Human
ccaugaaugauaagaagcaaa

SEQ ID NO: 545105 - RNA, 19 nt, Human
guacaugaucaaaaggcuu

SEQ ID NO: 545106 - RNA, 19 nt, Human
ucccaagcuauaaaauauc

SEQ ID NO: 545107 - RNA, 28 nt, Human
ucugccaugaaugauaagaagcaaaggc

SEQ ID NO: 545108 - RNA, 19 nt, Human
ugaaagcacuaacaaucug

SEQ ID NO: 545109 - RNA, 18 nt, Human
ugauaagaagcaaaggca

SEQ ID NO: 545110 - RNA, 22 nt, Human
ugccauguaaagcauaguuucc

SEQ ID NO: 545111 - RNA, 23 nt, Human
uuuccagguuacaucaagugauu

SEQ ID NO: 545112 - RNA, 24 nt, Human
uuuccagguuacaucaagugauuu

SEQ ID NO: 545113 - RNA, 23 nt, Human
uuuuuuuuuuuuuuuuucugguu

SEQ ID NO: 545114 - RNA, 28 nt, Human
uuuuuuuuuuuuuuuuuuuuucuggggg

SEQ ID NO: 545115 - RNA, 24 nt, Human
aagcauauagauuuauuaaaaaua

SEQ ID NO: 545116 - RNA, 21 nt, Human
aagugauuuuugcacugagcu

SEQ ID NO: 545117 - RNA, 20 nt, Human
agaguccagugugcgcugcc

SEQ ID NO: 545118 - RNA, 20 nt, Human
auaguuacuuaacagcuaaa

SEQ ID NO: 545119 - RNA, 24 nt, Human
auguaugcauucccuuuauguccc

SEQ ID NO: 545120 - RNA, 18 nt, Human
caaccuucccuaagcauc

SEQ ID NO: 545121 - RNA, 23 nt, Human
cacauggauuccaagagagauuu

SEQ ID NO: 545122 - RNA, 21 nt, Human
caguagagacugaagcuggua

SEQ ID NO: 545123 - RNA, 23 nt, Human
cauggauuccaagagagauuuug

SEQ ID NO: 545124 - RNA, 20 nt, Human
ccaguagagacugaagcugg

SEQ ID NO: 545125 - RNA, 18 nt, Human
ccccucccucccuaucuc

SEQ ID NO: 545126 - RNA, 23 nt, Human
cuccugcaccuaccaaggugcca

SEQ ID NO: 545127 - RNA, 19 nt, Human
cugguccgcagccuggggc

SEQ ID NO: 545128 - RNA, 23 nt, Human
gagcagaugccggccccgcucgg

SEQ ID NO: 545129 - RNA, 18 nt, Human
gagggagaaccagaaguc

SEQ ID NO: 545130 - RNA, 23 nt, Human
gauuuuugcacugagcuccuccu

SEQ ID NO: 545131 - RNA, 25 nt, Human
gcaaagcuugucucuaaaggguuaa

SEQ ID NO: 545132 - RNA, 23 nt, Human
gcagugcuggugacaguggauac

SEQ ID NO: 545133 - RNA, 18 nt, Human
gcgcggcgcggguugcgg

SEQ ID NO: 545134 - RNA, 22 nt, Human
gcugccugggucuggauccagg

SEQ ID NO: 545135 - RNA, 21 nt, Human
ggauccagaaaguccuaagug

SEQ ID NO: 545136 - RNA, 22 nt, Human
ggcacauggauuccaagagaga

SEQ ID NO: 545137 - RNA, 19 nt, Human
ggcaugagauucagaagag

SEQ ID NO: 545138 - RNA, 23 nt, Human
ggcuccguccuccugcgcggcca

SEQ ID NO: 545139 - RNA, 24 nt, Human
ggggcaaagcuugucucuaaaggg

SEQ ID NO: 545140 - RNA, 20 nt, Human
uaaaagcuaaagauuuccau

SEQ ID NO: 545141 - RNA, 24 nt, Human
uccauaaacacuauuccaaaaugu

SEQ ID NO: 545142 - RNA, 22 nt, Human
ucccuaagcaucugucuggucc

SEQ ID NO: 545143 - RNA, 24 nt, Human
ucucuuaaaauaaauuugaacacc

SEQ ID NO: 545144 - RNA, 18 nt, Human
ugagaagagaguggagag

SEQ ID NO: 545145 - RNA, 18 nt, Human
ugcuggugacaguggaua

SEQ ID NO: 545146 - RNA, 19 nt, Human
uggauuccaagagagauuu

SEQ ID NO: 545147 - RNA, 22 nt, Human
uguaaaaaacacuugagggaga

SEQ ID NO: 545148 - RNA, 19 nt, Human
uguaugcauucccuuuaug

SEQ ID NO: 545149 - RNA, 19 nt, Human
uguuuuauuuuccuccacc

SEQ ID NO: 545150 - RNA, 23 nt, Human
uuugagaagagaguggagaggga

SEQ ID NO: 545151 - RNA, 19 nt, Human
uuugcacugagcuccuccu

SEQ ID NO: 545152 - RNA, 22 nt, Human
uuuuuuuuuuuuuuuuuuuaag

SEQ ID NO: 545153 - RNA, 18 nt, Human
aaaaaaaacaaaacagcc

SEQ ID NO: 545154 - RNA, 23 nt, Human
aaaaaaacaaaacagcccaccag

SEQ ID NO: 545155 - RNA, 24 nt, Human
aaaaaaacaaaacagcccaccaga

SEQ ID NO: 545156 - RNA, 26 nt, Human
aaaaaaacaaaacagcccaccagaug

SEQ ID NO: 545157 - RNA, 22 nt, Human
aaaaacaaacaagcauagaucc

SEQ ID NO: 545158 - RNA, 20 nt, Human
aaacagcccaccagaugugu

SEQ ID NO: 545159 - RNA, 21 nt, Human
aaccaccuggagagggaaccc

SEQ ID NO: 545160 - RNA, 22 nt, Human
aagaggaaaaaaaaaaacaaaa

SEQ ID NO: 545161 - RNA, 18 nt, Human
aagcacacacacgcacac

SEQ ID NO: 545162 - RNA, 23 nt, Human
aaguagcagcggcugugugggcc

SEQ ID NO: 545163 - RNA, 18 nt, Human
acaccagugauggcaaac

SEQ ID NO: 545164 - RNA, 22 nt, Human
acacccgugggugggggugggg

SEQ ID NO: 545165 - RNA, 31 nt, Human
acgugcgcacacacaagcacacacacgcaca

SEQ ID NO: 545166 - RNA, 20 nt, Human
agaaacagggaggugacaac

SEQ ID NO: 545167 - RNA, 24 nt, Human
agccacugggauccagugcaacga

SEQ ID NO: 545168 - RNA, 18 nt, Human
agcgcagggaggcgcagg

SEQ ID NO: 545169 - RNA, 22 nt, Human
aggaacaauuaaagaaagcaac

SEQ ID NO: 545170 - RNA, 19 nt, Human
aggcacguugauuaggacg

SEQ ID NO: 545171 - RNA, 22 nt, Human
aggcacguugauuaggacggca

SEQ ID NO: 545172 - RNA, 20 nt, Human
agugaucccgucaagacauc

SEQ ID NO: 545173 - RNA, 22 nt, Human
agugauggcaaacgccucuccc

SEQ ID NO: 545174 - RNA, 19 nt, Human
auagauccucuccaggcuc

SEQ ID NO: 545175 - RNA, 22 nt, Human
auagauccucuccaggcuccag

SEQ ID NO: 545176 - RNA, 22 nt, Human
auccucuccaggcuccagggug

SEQ ID NO: 545177 - RNA, 24 nt, Human
augacugugugugucugcagcuug

SEQ ID NO: 545178 - RNA, 25 nt, Human
caaaacagcccaccagauguguggc

SEQ ID NO: 545179 - RNA, 23 nt, Human
caaaagugaggccuucuucuucc

SEQ ID NO: 545180 - RNA, 23 nt, Human
caagcccuugguggagaaacagg

SEQ ID NO: 545181 - RNA, 21 nt, Human
cacaaagagccccagugaucc

SEQ ID NO: 545182 - RNA, 23 nt, Human
cacaaagagccccagugaucccg

SEQ ID NO: 545183 - RNA, 27 nt, Human
cacaagcacacacacgcacacccgcca

SEQ ID NO: 545184 - RNA, 22 nt, Human
cacacacacgcacacccgccac

SEQ ID NO: 545185 - RNA, 22 nt, Human
caccagugauggcaaacgccuc

SEQ ID NO: 545186 - RNA, 18 nt, Human
cacccccaucccgcaaag

SEQ ID NO: 545187 - RNA, 19 nt, Human
cacccugcucaggccgagc

SEQ ID NO: 545188 - RNA, 22 nt, Human
caccucuggguccccauccccu

SEQ ID NO: 545189 - RNA, 21 nt, Human
caccuggagagggaaccccca

SEQ ID NO: 545190 - RNA, 28 nt, Human
cacgugcgcacacacaagcacacacacg

SEQ ID NO: 545191 - RNA, 18 nt, Human
cagcagcaaaagugaggc

SEQ ID NO: 545192 - RNA, 23 nt, Human
cagcggcugugugggccccgcag

SEQ ID NO: 545193 - RNA, 18 nt, Human
cagggccgggaccugggc

SEQ ID NO: 545194 - RNA, 23 nt, Human
cagugcaacgagguggcacacac

SEQ ID NO: 545195 - RNA, 23 nt, Human
ccagugaucccgucaagacaucu

SEQ ID NO: 545196 - RNA, 19 nt, Human
cccagggccgggaccuggg

SEQ ID NO: 545197 - RNA, 19 nt, Human
ccccaaaguagcagcggcu

SEQ ID NO: 545198 - RNA, 25 nt, Human
ccccaagcagccacugggauccagu

SEQ ID NO: 545199 - RNA, 21 nt, Human
ccccagcacccugcucaggcc

SEQ ID NO: 545200 - RNA, 21 nt, Human
ccccagccccgagaggcccaa

SEQ ID NO: 545201 - RNA, 24 nt, Human
ccccagccccgagaggcccaagcc

SEQ ID NO: 545202 - RNA, 23 nt, Human
cccccaagcagccacugggaucc

SEQ ID NO: 545203 - RNA, 21 nt, Human
ccccgcagcagcaaaagugag

SEQ ID NO: 545204 - RNA, 20 nt, Human
ccccugggaggccccagccc

SEQ ID NO: 545205 - RNA, 19 nt, Human
cccuccccucccuugccac

SEQ ID NO: 545206 - RNA, 22 nt, Human
cccugcgucgcggccgggaagu

SEQ ID NO: 545207 - RNA, 18 nt, Human
ccuccugcccuccccucc

SEQ ID NO: 545208 - RNA, 23 nt, Human
ccugaagggggaagcgcagggag

SEQ ID NO: 545209 - RNA, 20 nt, Human
cgcaaagaaaaaguaacagu

SEQ ID NO: 545210 - RNA, 23 nt, Human
cgcggccgggaaguuuccgaagc

SEQ ID NO: 545211 - RNA, 25 nt, Human
cggcagcccgcgugagguauugcgc

SEQ ID NO: 545212 - RNA, 22 nt, Human
cgggaccugggcuuggacaacc

SEQ ID NO: 545213 - RNA, 24 nt, Human
cucacaaagagccccagugauccc

SEQ ID NO: 545214 - RNA, 19 nt, Human
cucucgcucugagacccca

SEQ ID NO: 545215 - RNA, 20 nt, Human
cugcaaagacugccagcccu

SEQ ID NO: 545216 - RNA, 22 nt, Human
cugcaccucuggguccccaucc

SEQ ID NO: 545217 - RNA, 23 nt, Human
gaaaaaaaaaaacaaaacagccc

SEQ ID NO: 545218 - RNA, 18 nt, Human
gagggaacccccaccccc

SEQ ID NO: 545219 - RNA, 18 nt, Human
gaugugggcggccacugc

SEQ ID NO: 545220 - RNA, 31 nt, Human
gcacacacaagcacacacacgcacacccgcc

SEQ ID NO: 545221 - RNA, 23 nt, Human
gccgagcuggcugagcacccagg

SEQ ID NO: 545222 - RNA, 20 nt, Human
gcgcuccgcucugcucgguu

SEQ ID NO: 545223 - RNA, 21 nt, Human
gcuuggccccuuccccacccc

SEQ ID NO: 545224 - RNA, 22 nt, Human
ggacacccgugggugggggugg

SEQ ID NO: 545225 - RNA, 21 nt, Human
ggccgggaccugggcuuggac

SEQ ID NO: 545226 - RNA, 19 nt, Human
ggccuagccgagcuggcug

SEQ ID NO: 545227 - RNA, 19 nt, Human
gggaagaggaaaaaaaaaa

SEQ ID NO: 545228 - RNA, 20 nt, Human
gggaaguuuccgaagcucgg

SEQ ID NO: 545229 - RNA, 21 nt, Human
gggaaguuuccgaagcucggg

SEQ ID NO: 545230 - RNA, 21 nt, Human
gggccgggaccugggcuugga

SEQ ID NO: 545231 - RNA, 19 nt, Human
uccccccagcacccugcuc

SEQ ID NO: 545232 - RNA, 23 nt, Human
uccccugggaggccccagccccc

SEQ ID NO: 545233 - RNA, 20 nt, Human
ucccgcaaagaaaaaguaac

SEQ ID NO: 545234 - RNA, 21 nt, Human
ucccuacacgcuggaccacgg

SEQ ID NO: 545235 - RNA, 24 nt, Human
uccgcagcucucgcucugagaccc

SEQ ID NO: 545236 - RNA, 18 nt, Human
ucugcagcuuggccccuu

SEQ ID NO: 545237 - RNA, 26 nt, Human
ucugcagcuuggccccuuccccaccc

SEQ ID NO: 545238 - RNA, 19 nt, Human
ugaaugacugugugugucu

SEQ ID NO: 545239 - RNA, 20 nt, Human
uggauuacaaaaacaaacaa

SEQ ID NO: 545240 - RNA, 21 nt, Human
uggcaaacgccucucccccaa

SEQ ID NO: 545241 - RNA, 20 nt, Human
uggccccuuccccacccccc

SEQ ID NO: 545242 - RNA, 18 nt, Human
ugggaggccccagccccg

SEQ ID NO: 545243 - RNA, 21 nt, Human
uggggcaggggccggccugcc

SEQ ID NO: 545244 - RNA, 22 nt, Human
ugucugcagcuuggccccuucc

SEQ ID NO: 545245 - RNA, 19 nt, Human
uguggccgggaaccugccc

SEQ ID NO: 545246 - RNA, 26 nt, Human
ugugugagcgccgacacgugcgcaca

SEQ ID NO: 545247 - RNA, 21 nt, Human
ugugugucugcagcuuggccc

SEQ ID NO: 545248 - RNA, 21 nt, Human
uucagaaggaacaauuaaaga

SEQ ID NO: 545249 - RNA, 23 nt, Human
uucagaaggaacaauuaaagaaa

SEQ ID NO: 545250 - RNA, 20 nt, Human
uuggccccuuccccaccccc

SEQ ID NO: 545251 - RNA, 24 nt, Human
uugguggagaaacagggaggugac

SEQ ID NO: 545252 - RNA, 22 nt, Human
uuuuuuuuuuuuuuuuuaucuu

SEQ ID NO: 545253 - RNA, 22 nt, Human
aaacucuauuuuaacccccaaa

SEQ ID NO: 545254 - RNA, 22 nt, Human
aaauguaagaaacucuauuuua

SEQ ID NO: 545255 - RNA, 26 nt, Human
agggggaggaaccaggcacugcucca

SEQ ID NO: 545256 - RNA, 21 nt, Human
cacacaccaggagcgcccggc

SEQ ID NO: 545257 - RNA, 18 nt, Human
caggagcgcccggcccag

SEQ ID NO: 545258 - RNA, 22 nt, Human
cccccaaaaaggcuuauaaaaa

SEQ ID NO: 545259 - RNA, 21 nt, Human
ccccugagccaagggggagga

SEQ ID NO: 545260 - RNA, 21 nt, Human
ccccugagccaagggggagga

SEQ ID NO: 545261 - RNA, 19 nt, Human
cccugagccaagggggagg

SEQ ID NO: 545262 - RNA, 21 nt, Human
ccggcccagccuggccccaca

SEQ ID NO: 545263 - RNA, 21 nt, Human
ccugagccaagggggaggaac

SEQ ID NO: 545264 - RNA, 25 nt, Human
cucuauuuuaacccccaaaaaggcu

SEQ ID NO: 545265 - RNA, 25 nt, Human
gcgcccggcccagccuggccccaca

SEQ ID NO: 545266 - RNA, 20 nt, Human
ggcacuguaagagcaagcac

SEQ ID NO: 545267 - RNA, 21 nt, Human
uaaaaaaggucccaaaaaugu

SEQ ID NO: 545268 - RNA, 23 nt, Human
uaaaaaaggucccaaaaauguaa

SEQ ID NO: 545269 - RNA, 18 nt, Human
uauaaaaaaacaaagcua

SEQ ID NO: 545270 - RNA, 25 nt, Human
ucaaaggucccuugucuaccccuga

SEQ ID NO: 545271 - RNA, 20 nt, Human
ucuauuuuaacccccaaaaa

SEQ ID NO: 545272 - RNA, 22 nt, Human
ucuccuguauggcagcagcugg

SEQ ID NO: 545273 - RNA, 23 nt, Human
ugagagucacaguggccacaauc

SEQ ID NO: 545274 - RNA, 22 nt, Human
ugagccaagggggaggaaccag

SEQ ID NO: 545275 - RNA, 26 nt, Human
uguaagaaacucuauuuuaaccccca

SEQ ID NO: 545276 - RNA, 23 nt, Human
aaaacaaaaacguuuagcaaaaa

SEQ ID NO: 545277 - RNA, 19 nt, Human
aaaagaaaugaaaagagac

SEQ ID NO: 545278 - RNA, 22 nt, Human
aaaaggucauauuucauaaaga

SEQ ID NO: 545279 - RNA, 26 nt, Human
aaguagcucuuuaaaauggauccccu

SEQ ID NO: 545280 - RNA, 23 nt, Human
aauaacuggaggauuagaaaaaa

SEQ ID NO: 545281 - RNA, 20 nt, Human
acaaagcagaauaaacguuu

SEQ ID NO: 545282 - RNA, 22 nt, Human
acaacagacaaagcagaauaaa

SEQ ID NO: 545283 - RNA, 19 nt, Human
acagaacaaugaaacaaag

SEQ ID NO: 545284 - RNA, 22 nt, Human
acuuacaucuaauaggucucaa

SEQ ID NO: 545285 - RNA, 21 nt, Human
aguaaaaaacaaaaacguuua

SEQ ID NO: 545286 - RNA, 22 nt, Human
aguaaaaaacaaaaacguuuag

SEQ ID NO: 545287 - RNA, 24 nt, Human
auccagaggucaggugauacagaa

SEQ ID NO: 545288 - RNA, 18 nt, Human
cagagggaaauaaaagaa

SEQ ID NO: 545289 - RNA, 23 nt, Human
caugguaguuaaaagaaaugaaa

SEQ ID NO: 545290 - RNA, 21 nt, Human
cauuccacacaugcuaagcac

SEQ ID NO: 545291 - RNA, 19 nt, Human
ccagggucagaagggaugg

SEQ ID NO: 545292 - RNA, 22 nt, Human
ccuaagacaucuacaaacaaac

SEQ ID NO: 545293 - RNA, 18 nt, Human
cuaaaauucuacaacaga

SEQ ID NO: 545294 - RNA, 23 nt, Human
gaagcuggaauacaaaaagacuu

SEQ ID NO: 545295 - RNA, 24 nt, Human
ggaagccagggucagaagggaugg

SEQ ID NO: 545296 - RNA, 23 nt, Human
ggacugaaacuagagaaaaguaa

SEQ ID NO: 545297 - RNA, 21 nt, Human
uaaaauggaucccugucuaca

SEQ ID NO: 545298 - RNA, 18 nt, Human
uaaauuguuuuacaguug

SEQ ID NO: 545299 - RNA, 19 nt, Human
uaacuggaggauuagaaaa

SEQ ID NO: 545300 - RNA, 20 nt, Human
uaagcuauggcucuuuccuc

SEQ ID NO: 545301 - RNA, 21 nt, Human
uagugacaguaaaaaacaaaa

SEQ ID NO: 545302 - RNA, 20 nt, Human
ucagaauuuuaaaaauuaaa

SEQ ID NO: 545303 - RNA, 22 nt, Human
uccagaggucaggugauacaga

SEQ ID NO: 545304 - RNA, 18 nt, Human
uccucguguaagaaugcc

SEQ ID NO: 545305 - RNA, 22 nt, Human
ucucuaaguagcucuuuaaaau

SEQ ID NO: 545306 - RNA, 18 nt, Human
ucugcucugaguguugcc

SEQ ID NO: 545307 - RNA, 23 nt, Human
ucuuuaaaaaaaaaaaaguuuua

SEQ ID NO: 545308 - RNA, 24 nt, Human
ucuuucuuuaucucucauuccuuc

SEQ ID NO: 545309 - RNA, 19 nt, Human
ugaagaugcaguuauacag

SEQ ID NO: 545310 - RNA, 24 nt, Human
ugacagaacaaugaaacaaagaua

SEQ ID NO: 545311 - RNA, 24 nt, Human
ugacagaacaaugaaacaaagaua

SEQ ID NO: 545312 - RNA, 20 nt, Human
ugacaguaagggagaucugc

SEQ ID NO: 545313 - RNA, 19 nt, Human
ugccaugugggccuuugaa

SEQ ID NO: 545314 - RNA, 19 nt, Human
ugccauuaauagcuuuauc

SEQ ID NO: 545315 - RNA, 24 nt, Human
ugcccuagugacaguaaaaaacaa

SEQ ID NO: 545316 - RNA, 22 nt, Human
ugccuaagacaucuacaaacaa

SEQ ID NO: 545317 - RNA, 23 nt, Human
ugccuaagacaucuacaaacaaa

SEQ ID NO: 545318 - RNA, 19 nt, Human
uggccuuagcucuaaauau

SEQ ID NO: 545319 - RNA, 25 nt, Human
uggccuuagcucuaaauaugaaguu

SEQ ID NO: 545320 - RNA, 21 nt, Human
ugguagguuagaagauuucug

SEQ ID NO: 545321 - RNA, 18 nt, Human
uguaauacccuuguaugg

SEQ ID NO: 545322 - RNA, 23 nt, Human
uuaaaagacauaggucccuggaa

SEQ ID NO: 545323 - RNA, 20 nt, Human
uuccucaguggccuuagcuc

SEQ ID NO: 545324 - RNA, 25 nt, Human
uuggaacuguggaaaauuauuucuc

SEQ ID NO: 545325 - RNA, 19 nt, Human
uuuaaaauggaucccuguc

SEQ ID NO: 545326 - RNA, 23 nt, Human
aaaaaggggcucaaaccaacagg

SEQ ID NO: 545327 - RNA, 22 nt, Human
aaaacacccagagggcaaaaca

SEQ ID NO: 545328 - RNA, 23 nt, Human
aaacaaaaaggggcucaaaccaa

SEQ ID NO: 545329 - RNA, 22 nt, Human
aaacacccagagggcaaaacaa

SEQ ID NO: 545330 - RNA, 23 nt, Human
aaaccaacaggaagucagcccca

SEQ ID NO: 545331 - RNA, 23 nt, Human
aaccgaacucucccacagcagcc

SEQ ID NO: 545332 - RNA, 22 nt, Human
aacucgugcucuccacgcucag

SEQ ID NO: 545333 - RNA, 22 nt, Human
aagcagaagggcacaaacagaa

SEQ ID NO: 545334 - RNA, 23 nt, Human
aagggaaugggggaagcagaagg

SEQ ID NO: 545335 - RNA, 22 nt, Human
aaguacuggagggagaggccgg

SEQ ID NO: 545336 - RNA, 23 nt, Human
aagucagccccaccgcaagccgg

SEQ ID NO: 545337 - RNA, 18 nt, Human
aaugugcuuggagagugu

SEQ ID NO: 545338 - RNA, 25 nt, Human
acccagagggcaaaacaaaaagggg

SEQ ID NO: 545339 - RNA, 21 nt, Human
accgaacucucccacagcagc

SEQ ID NO: 545340 - RNA, 22 nt, Human
accuguuccacccacccuccug

SEQ ID NO: 545341 - RNA, 22 nt, Human
agcagccccggccccgccccuc

SEQ ID NO: 545342 - RNA, 21 nt, Human
aggcaggggaggaaggaggcc

SEQ ID NO: 545343 - RNA, 21 nt, Human
aggcguggaagccaaggcuuc

SEQ ID NO: 545344 - RNA, 20 nt, Human
agggaaugggggaagcagaa

SEQ ID NO: 545345 - RNA, 21 nt, Human
caaagaaaacacccagagggc

SEQ ID NO: 545346 - RNA, 23 nt, Human
caaagaaaacacccagagggcaa

SEQ ID NO: 545347 - RNA, 24 nt, Human
caaccgaacucucccacagcagcc

SEQ ID NO: 545348 - RNA, 23 nt, Human
caagccggacuacaacuaacucg

SEQ ID NO: 545349 - RNA, 20 nt, Human
cacccuccugcgggaccaaa

SEQ ID NO: 545350 - RNA, 18 nt, Human
caccuguuccacccaccc

SEQ ID NO: 545351 - RNA, 21 nt, Human
caccuguuccacccacccucc

SEQ ID NO: 545352 - RNA, 19 nt, Human
cagaaguacuggagggaga

SEQ ID NO: 545353 - RNA, 22 nt, Human
cagcaaccgaacucucccacag

SEQ ID NO: 545354 - RNA, 19 nt, Human
ccaccuguuccacccaccc

SEQ ID NO: 545355 - RNA, 19 nt, Human
ccagagggcaaaacaaaaa

SEQ ID NO: 545356 - RNA, 19 nt, Human
ccagagggcaaaacaaaaa

SEQ ID NO: 545357 - RNA, 26 nt, Human
ccaggccaagcaggaugacagcaaac

SEQ ID NO: 545358 - RNA, 21 nt, Human
ccaggccuggccaggccaagc

SEQ ID NO: 545359 - RNA, 19 nt, Human
cccacagcagccccggccc

SEQ ID NO: 545360 - RNA, 23 nt, Human
cccacagcagccccggccccgcc

SEQ ID NO: 545361 - RNA, 22 nt, Human
cccacagucaacgugcaggccc

SEQ ID NO: 545362 - RNA, 23 nt, Human
ccccaccgcaagccggacuacaa

SEQ ID NO: 545363 - RNA, 25 nt, Human
ccccgccccucauaccgcggccgga

SEQ ID NO: 545364 - RNA, 22 nt, Human
cccgccccucauaccgcggccg

SEQ ID NO: 545365 - RNA, 18 nt, Human
cccggccccgccccucau

SEQ ID NO: 545366 - RNA, 19 nt, Human
ccggccccgccccucauac

SEQ ID NO: 545367 - RNA, 23 nt, Human
ccucaagagaaacuccaguccac

SEQ ID NO: 545368 - RNA, 19 nt, Human
cgaacucucccacagcagc

SEQ ID NO: 545369 - RNA, 18 nt, Human
cgagaugacgagcuauga

SEQ ID NO: 545370 - RNA, 23 nt, Human
cgcagcaaccgaacucucccaca

SEQ ID NO: 545371 - RNA, 20 nt, Human
cgggaccaaagaaaacaccc

SEQ ID NO: 545372 - RNA, 21 nt, Human
gaagcagcaggcacgugccag

SEQ ID NO: 545373 - RNA, 18 nt, Human
gaagccagcugcaggcag

SEQ ID NO: 545374 - RNA, 25 nt, Human
gaagggaaugggggaagcagaaggg

SEQ ID NO: 545375 - RNA, 25 nt, Human
gagaugacgagcuaugagcuguggg

SEQ ID NO: 545376 - RNA, 21 nt, Human
gagggagaggccgggcucuca

SEQ ID NO: 545377 - RNA, 24 nt, Human
gcaaaacaaaaaggggcucaaacc

SEQ ID NO: 545378 - RNA, 19 nt, Human
gcagccccggccccgcccc

SEQ ID NO: 545379 - RNA, 18 nt, Human
gcaggccccgccgcagca

SEQ ID NO: 545380 - RNA, 24 nt, Human
gcuuguuuccgaguuucccacagu

SEQ ID NO: 545381 - RNA, 21 nt, Human
ggaccaaagaaaacacccaga

SEQ ID NO: 545382 - RNA, 23 nt, Human
ggagggagaggccgggcucucag

SEQ ID NO: 545383 - RNA, 19 nt, Human
ggcaaaacaaaaaggggcu

SEQ ID NO: 545384 - RNA, 20 nt, Human
gggaagcagaagggcacaaa

SEQ ID NO: 545385 - RNA, 23 nt, Human
uccacccacccuccugcgggacc

SEQ ID NO: 545386 - RNA, 18 nt, Human
ugccaggccuggccaggc

SEQ ID NO: 545387 - RNA, 21 nt, Human
ugccaggccuggccaggccaa

SEQ ID NO: 545388 - RNA, 25 nt, Human
ugcuuggagaguguggacaagggcc

SEQ ID NO: 545389 - RNA, 18 nt, Human
uguggaagggaauggggg

SEQ ID NO: 545390 - RNA, 25 nt, Human
uguuccacccacccuccugcgggac

SEQ ID NO: 545391 - RNA, 20 nt, Human
uugcuagaagguuucccaca

SEQ ID NO: 545392 - RNA, 18 nt, Human
uuggagaguguggacaag

SEQ ID NO: 545393 - RNA, 18 nt, Human
aaaacaugaggcccuccc

SEQ ID NO: 545394 - RNA, 21 nt, Human
aaacaugaggcccucccagga

SEQ ID NO: 545395 - RNA, 23 nt, Human
aaacaugaggcccucccaggaaa

SEQ ID NO: 545396 - RNA, 18 nt, Human
aggccaggcuuagcggga

SEQ ID NO: 545397 - RNA, 22 nt, Human
caaagugggaccucgcuccauu

SEQ ID NO: 545398 - RNA, 24 nt, Human
ccaggccaggcuuagcgggaaacg

SEQ ID NO: 545399 - RNA, 27 nt, Human
ccucgcuccauuugcccaggccaggcu

SEQ ID NO: 545400 - RNA, 22 nt, Human
ggauggacgcacugccuacaag

SEQ ID NO: 545401 - RNA, 23 nt, Human
ggccaggcuuagcgggaaacggg

SEQ ID NO: 545402 - RNA, 21 nt, Human
ggggcccaaagcgcugcaugg

SEQ ID NO: 545403 - RNA, 23 nt, Human
uaacaaacauuuaagaaccagau

SEQ ID NO: 545404 - RNA, 18 nt, Human
uaccucaguuuuauuuuc

SEQ ID NO: 545405 - RNA, 19 nt, Human
uaccucaguuuuauuuucu

SEQ ID NO: 545406 - RNA, 23 nt, Human
uaccucaguuuuauuuucuguag

SEQ ID NO: 545407 - RNA, 24 nt, Human
uaccucaguuuuauuuucuguagu

SEQ ID NO: 545408 - RNA, 24 nt, Human
ugcccaggccaggcuuagcgggaa

SEQ ID NO: 545409 - RNA, 18 nt, Human
ugcccuagggaaggaugg

SEQ ID NO: 545410 - RNA, 21 nt, Human
acacugagggagcugaggagc

SEQ ID NO: 545411 - RNA, 20 nt, Human
acuucuuuauuggaaaagaa

SEQ ID NO: 545412 - RNA, 23 nt, Human
agcggcggcggcggcggcggcgg

SEQ ID NO: 545413 - RNA, 22 nt, Human
cacaaugcaggcgcuccagcuc

SEQ ID NO: 545414 - RNA, 23 nt, Human
cagcgacagcggcagcggcagcg

SEQ ID NO: 545415 - RNA, 19 nt, Human
cagcggcagcggcagcggc

SEQ ID NO: 545416 - RNA, 28 nt, Human
cggcgacagcgacagcggcagcggcagg

SEQ ID NO: 545417 - RNA, 21 nt, Human
cggcggcgacagcgacagcgg

SEQ ID NO: 545418 - RNA, 20 nt, Human
cggcggcggcggcgggcggc

SEQ ID NO: 545419 - RNA, 20 nt, Human
cgggcggcggcggcggcgac

SEQ ID NO: 545420 - RNA, 18 nt, Human
cggugacaccacggggca

SEQ ID NO: 545421 - RNA, 22 nt, Human
cuccagcucugacacgugcacu

SEQ ID NO: 545422 - RNA, 19 nt, Human
cugccguccuccucccagc

SEQ ID NO: 545423 - RNA, 20 nt, Human
gacagcgacagcggcagcgg

SEQ ID NO: 545424 - RNA, 26 nt, Human
gagccggggccgcgcagccuccugga

SEQ ID NO: 545425 - RNA, 22 nt, Human
gcagcggcggcggcggcggcuu

SEQ ID NO: 545426 - RNA, 23 nt, Human
gcggcggcgacagcgacagcggc

SEQ ID NO: 545427 - RNA, 20 nt, Human
gcggcggcggcggcggcggc

SEQ ID NO: 545428 - RNA, 20 nt, Human
gcggcggcggcggcggcggc

SEQ ID NO: 545429 - RNA, 20 nt, Human
gcggcggcggcggcggcggc

SEQ ID NO: 545430 - RNA, 23 nt, Human
gcggcggcggcggcggcggcggc

SEQ ID NO: 545431 - RNA, 23 nt, Human
gcggcggcggcggcggcggcggc

SEQ ID NO: 545432 - RNA, 21 nt, Human
gcggcggcggcggcggcgggc

SEQ ID NO: 545433 - RNA, 24 nt, Human
gcggcggcggcggcgggcggcggc

SEQ ID NO: 545434 - RNA, 24 nt, Human
gcggcggcgggcggcggcggcggc

SEQ ID NO: 545435 - RNA, 23 nt, Human
ggcagcggcggcggcggcggcgg

SEQ ID NO: 545436 - RNA, 18 nt, Human
ggcggcggcggcggcgac

SEQ ID NO: 545437 - RNA, 23 nt, Human
ggcggcggcggcggcggcggcgg

SEQ ID NO: 545438 - RNA, 23 nt, Human
ggcggcggcggcggcggcggcgg

SEQ ID NO: 545439 - RNA, 24 nt, Human
ggcggcggcgggcggcggcggcgg

SEQ ID NO: 545440 - RNA, 22 nt, Human
gggcaggacacgagcagcugcc

SEQ ID NO: 545441 - RNA, 21 nt, Human
gggcggcggcggcggcgacag

SEQ ID NO: 545442 - RNA, 23 nt, Human
gggcggcggcggcggcgacagcg

SEQ ID NO: 545443 - RNA, 24 nt, Human
ggucgcaggggagcgggugccugg

SEQ ID NO: 545444 - RNA, 24 nt, Human
ucgcaggggagcgggugccuggag

SEQ ID NO: 545445 - RNA, 20 nt, Human
ugacaccacggggcacacug

SEQ ID NO: 545446 - RNA, 21 nt, Human
ugccuggagucccggugacac

SEQ ID NO: 545447 - RNA, 18 nt, Human
uggagucccggugacacc

SEQ ID NO: 545448 - RNA, 19 nt, Human
uggucgcaggggagcgggu

SEQ ID NO: 545449 - RNA, 20 nt, Human
uggucgcaggggagcgggug

SEQ ID NO: 545450 - RNA, 20 nt, Human
aaaaaaaacagucugaagua

SEQ ID NO: 545451 - RNA, 24 nt, Human
acaaaucacugguggaaaggagca

SEQ ID NO: 545452 - RNA, 22 nt, Human
acacugguguuuagcugcaggc

SEQ ID NO: 545453 - RNA, 20 nt, Human
acagcagggaugacuucagc

SEQ ID NO: 545454 - RNA, 21 nt, Human
aggggagugaaguaacacugg

SEQ ID NO: 545455 - RNA, 20 nt, Human
cagcaggacuuucuugcuaa

SEQ ID NO: 545456 - RNA, 20 nt, Human
caggcuuucaacagcucaca

SEQ ID NO: 545457 - RNA, 22 nt, Human
ccacaaaggggagugaaguaac

SEQ ID NO: 545458 - RNA, 21 nt, Human
ccuugguguccacaaagggga

SEQ ID NO: 545459 - RNA, 22 nt, Human
cugcaggcuuucaacagcucac

SEQ ID NO: 545460 - RNA, 23 nt, Human
ggaaaggagcaggacauacccuc

SEQ ID NO: 545461 - RNA, 23 nt, Human
uaaaaaaaacagucugaaguauu

SEQ ID NO: 545462 - RNA, 18 nt, Human
uauuguacaauauaagug

SEQ ID NO: 545463 - RNA, 20 nt, Human
uccacaaaggggagugaagu

SEQ ID NO: 545464 - RNA, 20 nt, Human
ucuccugauacagcagggau

SEQ ID NO: 545465 - RNA, 22 nt, Human
ugcaggcuuucaacagcucaca

SEQ ID NO: 545466 - RNA, 25 nt, Human
uuaccguauucuucuuccccuuggu

SEQ ID NO: 545467 - RNA, 20 nt, Human
aaaacauacauaugugaauu

SEQ ID NO: 545468 - RNA, 18 nt, Human
aaacgugucuggucuggg

SEQ ID NO: 545469 - RNA, 20 nt, Human
accagacaucaggaauuuuu

SEQ ID NO: 545470 - RNA, 23 nt, Human
accccaccccccucccgcccccu

SEQ ID NO: 545471 - RNA, 20 nt, Human
accccccucccgcccccucc

SEQ ID NO: 545472 - RNA, 19 nt, Human
agcaaagcggagagaggca

SEQ ID NO: 545473 - RNA, 18 nt, Human
aggaauuuuuuuucuuuc

SEQ ID NO: 545474 - RNA, 26 nt, Human
aggauaccccaccccccucccgcccc

SEQ ID NO: 545475 - RNA, 26 nt, Human
aggcagaagcacuagaaucauggagg

SEQ ID NO: 545476 - RNA, 28 nt, Human
caaauuacugaaacacugugauacugaa

SEQ ID NO: 545477 - RNA, 18 nt, Human
caaguuauaaaaaugcaa

SEQ ID NO: 545478 - RNA, 19 nt, Human
cacaggggacccagacccc

SEQ ID NO: 545479 - RNA, 19 nt, Human
cacccagaacccuuacaaa

SEQ ID NO: 545480 - RNA, 24 nt, Human
caccucagccucccaaguagcugg

SEQ ID NO: 545481 - RNA, 19 nt, Human
caggaauuuuuuuucuuuc

SEQ ID NO: 545482 - RNA, 20 nt, Human
caggauaccccaccccccuc

SEQ ID NO: 545483 - RNA, 20 nt, Human
cauuccccaauccaccgggg

SEQ ID NO: 545484 - RNA, 23 nt, Human
ccagacauuccccaauccaccgg

SEQ ID NO: 545485 - RNA, 19 nt, Human
cccaaguagcugggauuaa

SEQ ID NO: 545486 - RNA, 20 nt, Human
cccaccucagccucccaagu

SEQ ID NO: 545487 - RNA, 23 nt, Human
cccaccucagccucccaaguagc

SEQ ID NO: 545488 - RNA, 25 nt, Human
cccagccugggccgccucccgggcc

SEQ ID NO: 545489 - RNA, 19 nt, Human
cccagguccggaccuggag

SEQ ID NO: 545490 - RNA, 21 nt, Human
ccccaccccccucccgccccc

SEQ ID NO: 545491 - RNA, 25 nt, Human
ccccaccccccucccgcccccuccc

SEQ ID NO: 545492 - RNA, 22 nt, Human
cccgcggaggccgaggagcagc

SEQ ID NO: 545493 - RNA, 20 nt, Human
cccuuacaaacuugggucgg

SEQ ID NO: 545494 - RNA, 23 nt, Human
ccuagaaccccagcugcgcgcuc

SEQ ID NO: 545495 - RNA, 21 nt, Human
ccucaggagcgggagaaggcc

SEQ ID NO: 545496 - RNA, 26 nt, Human
ccucccaccucagccucccaaguagc

SEQ ID NO: 545497 - RNA, 24 nt, Human
ccucccgcccccuccccuccgcga

SEQ ID NO: 545498 - RNA, 22 nt, Human
ccucgcuuccgcggcggcggcg

SEQ ID NO: 545499 - RNA, 22 nt, Human
ccuuacaaacuugggucggggc

SEQ ID NO: 545500 - RNA, 22 nt, Human
cgcggaggccgaggagcagcaa

SEQ ID NO: 545501 - RNA, 18 nt, Human
cuagggccuuccagacuc

SEQ ID NO: 545502 - RNA, 21 nt, Human
cuaugggucuucugggggccu

SEQ ID NO: 545503 - RNA, 24 nt, Human
cucaaguuauccucccaccucagc

SEQ ID NO: 545504 - RNA, 23 nt, Human
cucagccucccaaguagcuggga

SEQ ID NO: 545505 - RNA, 18 nt, Human
cucgcuuccgcggcggcg

SEQ ID NO: 545506 - RNA, 19 nt, Human
cugaggaaaagccagacau

SEQ ID NO: 545507 - RNA, 23 nt, Human
cuggcgccgcucuagggccuucc

SEQ ID NO: 545508 - RNA, 18 nt, Human
cuggucugggcaaguugu

SEQ ID NO: 545509 - RNA, 21 nt, Human
gaaacacugugauacugaaau

SEQ ID NO: 545510 - RNA, 19 nt, Human
gaacaagagcuguggucuc

SEQ ID NO: 545511 - RNA, 22 nt, Human
gacacaggggacccagacccca

SEQ ID NO: 545512 - RNA, 21 nt, Human
gacucaggauaccccaccccc

SEQ ID NO: 545513 - RNA, 24 nt, Human
gacucaggauaccccaccccccuc

SEQ ID NO: 545514 - RNA, 21 nt, Human
gacuuguagaccucaggccuc

SEQ ID NO: 545515 - RNA, 19 nt, Human
gcgcuccugggcgggugcc

SEQ ID NO: 545516 - RNA, 19 nt, Human
gcgggcgggggcgacacag

SEQ ID NO: 545517 - RNA, 24 nt, Human
gcuauauugcccacgcuggucuug

SEQ ID NO: 545518 - RNA, 19 nt, Human
ggaccuggagcaaagggcg

SEQ ID NO: 545519 - RNA, 21 nt, Human
ggcucaaagcugaaugugaca

SEQ ID NO: 545520 - RNA, 18 nt, Human
ggucuugaacuccugugc

SEQ ID NO: 545521 - RNA, 20 nt, Human
guauacgucccuagaacccc

SEQ ID NO: 545522 - RNA, 24 nt, Human
uaaaaaaaaacauacauaugugaa

SEQ ID NO: 545523 - RNA, 25 nt, Human
uaaaaaaaauucacuaaaaaauuag

SEQ ID NO: 545524 - RNA, 25 nt, Human
uaaaacccaacaaaucuuuuaguua

SEQ ID NO: 545525 - RNA, 21 nt, Human
uaaaauaacuauacuuuauuc

SEQ ID NO: 545526 - RNA, 23 nt, Human
uaagcugaggaaaagccagacau

SEQ ID NO: 545527 - RNA, 22 nt, Human
uacuuuuuugggguguggaggg

SEQ ID NO: 545528 - RNA, 18 nt, Human
uagaaucauggaggcaaa

SEQ ID NO: 545529 - RNA, 19 nt, Human
uagauucuggacuccaucc

SEQ ID NO: 545530 - RNA, 23 nt, Human
uaguaauucaaaccaaaacaugc

SEQ ID NO: 545531 - RNA, 20 nt, Human
uauauugcccacgcuggucu

SEQ ID NO: 545532 - RNA, 24 nt, Human
uauauugcccacgcuggucuugaa

SEQ ID NO: 545533 - RNA, 23 nt, Human
uauccucccaccucagccuccca

SEQ ID NO: 545534 - RNA, 23 nt, Human
ucaaaccaaaacaugcuguaagu

SEQ ID NO: 545535 - RNA, 21 nt, Human
ucaaugacauguuauuuuuaa

SEQ ID NO: 545536 - RNA, 20 nt, Human
ucagccucccaaguagcugg

SEQ ID NO: 545537 - RNA, 21 nt, Human
ucagcgugcacccagaacccu

SEQ ID NO: 545538 - RNA, 24 nt, Human
ucccaaguagcugggauuaaaggu

SEQ ID NO: 545539 - RNA, 22 nt, Human
ucccgcccccuccccuccgcga

SEQ ID NO: 545540 - RNA, 18 nt, Human
ucccuagaaccccagcug

SEQ ID NO: 545541 - RNA, 20 nt, Human
ucccuagaaccccagcugcg

SEQ ID NO: 545542 - RNA, 21 nt, Human
ucccuagaaccccagcugcgc

SEQ ID NO: 545543 - RNA, 25 nt, Human
uccgcgaucucccuccggccucuuc

SEQ ID NO: 545544 - RNA, 18 nt, Human
uccggaccacggacgacu

SEQ ID NO: 545545 - RNA, 22 nt, Human
ucggggcugcauucugggcuuu

SEQ ID NO: 545546 - RNA, 21 nt, Human
ucugauuuucaauacuguauu

SEQ ID NO: 545547 - RNA, 22 nt, Human
ucuguagauucuggacuccauc

SEQ ID NO: 545548 - RNA, 23 nt, Human
ucuguagauucuggacuccaucc

SEQ ID NO: 545549 - RNA, 21 nt, Human
ucuugaacuccugugcucaag

SEQ ID NO: 545550 - RNA, 23 nt, Human
ucuugcuauauugcccacgcugg

SEQ ID NO: 545551 - RNA, 24 nt, Human
ucuugcuauauugcccacgcuggu

SEQ ID NO: 545552 - RNA, 20 nt, Human
ugaaaagagaucuaaaaccu

SEQ ID NO: 545553 - RNA, 22 nt, Human
ugaaauacugcuggcuucugga

SEQ ID NO: 545554 - RNA, 22 nt, Human
ugaggaaaagccagacauuccc

SEQ ID NO: 545555 - RNA, 23 nt, Human
ugaggaaaagccagacauucccc

SEQ ID NO: 545556 - RNA, 24 nt, Human
ugcccacgcuggucuugaacuccu

SEQ ID NO: 545557 - RNA, 21 nt, Human
uggaccagacaucaggaauuu

SEQ ID NO: 545558 - RNA, 21 nt, Human
uggaggcaaauuacugaaaca

SEQ ID NO: 545559 - RNA, 23 nt, Human
uggcucaaagcugaaugugacaa

SEQ ID NO: 545560 - RNA, 19 nt, Human
ugggaaacacgguaaggca

SEQ ID NO: 545561 - RNA, 19 nt, Human
ugggauuaaaggugaacac

SEQ ID NO: 545562 - RNA, 24 nt, Human
ugggauuaaaggugaacaccacca

SEQ ID NO: 545563 - RNA, 20 nt, Human
ugggcaaguuguggcgaggc

SEQ ID NO: 545564 - RNA, 22 nt, Human
ugggcaaguuguggcgaggcga

SEQ ID NO: 545565 - RNA, 18 nt, Human
ugggguguggaggggugg

SEQ ID NO: 545566 - RNA, 23 nt, Human
ugguuccaccaauucaauuuuaa

SEQ ID NO: 545567 - RNA, 21 nt, Human
uguaacuaaauuacuuuugag

SEQ ID NO: 545568 - RNA, 19 nt, Human
uuacaaacuugggucgggg

SEQ ID NO: 545569 - RNA, 22 nt, Human
uuaguugaaaaaaauacacuua

SEQ ID NO: 545570 - RNA, 26 nt, Human
uucacuaaaaaauuaguugaaaaaaa

SEQ ID NO: 545571 - RNA, 23 nt, Human
uuccagacuccggaccacggacg

SEQ ID NO: 545572 - RNA, 18 nt, Human
uugaaucagucucugugu

SEQ ID NO: 545573 - RNA, 27 nt, Human
uugacaaaugaaaagagaucuaaaacc

SEQ ID NO: 545574 - RNA, 18 nt, Human
uugcugugggaaacacgg

SEQ ID NO: 545575 - RNA, 19 nt, Human
auggggcagaggagcaaag

SEQ ID NO: 545576 - RNA, 20 nt, Human
caugcuugccuucucacuua

SEQ ID NO: 545577 - RNA, 21 nt, Human
ccuacgcuggauaaacaagaa

SEQ ID NO: 545578 - RNA, 20 nt, Human
cuuccuacgcuggauaaaca

SEQ ID NO: 545579 - RNA, 29 nt, Human
uaaauagugaauggggcagaggagcaaag

SEQ ID NO: 545580 - RNA, 25 nt, Human
ucgccgggugacuccuuuguugcgc

SEQ ID NO: 545581 - RNA, 26 nt, Human
uucuuuuccuucuuccuacgcuggau

SEQ ID NO: 545582 - RNA, 25 nt, Human
aaaaaaaagcgcauaauuaccaaaa

SEQ ID NO: 545583 - RNA, 23 nt, Human
aaaacaaaacgaaaccaaacaaa

SEQ ID NO: 545584 - RNA, 25 nt, Human
aaaacaaaacgaaaccaaacaaaaa

SEQ ID NO: 545585 - RNA, 22 nt, Human
aaaaggaagaagguaggaagaa

SEQ ID NO: 545586 - RNA, 19 nt, Human
aaacagaaaauaaaagggg

SEQ ID NO: 545587 - RNA, 22 nt, Human
aaacagaaaauaaaagggggac

SEQ ID NO: 545588 - RNA, 22 nt, Human
aaaccaaacaaaacagggcaaa

SEQ ID NO: 545589 - RNA, 22 nt, Human
aaacgaaaccaaacaaaacagg

SEQ ID NO: 545590 - RNA, 21 nt, Human
aaagucacugcuuccuccccc

SEQ ID NO: 545591 - RNA, 20 nt, Human
aaaguuauggggaacugggg

SEQ ID NO: 545592 - RNA, 25 nt, Human
aacaaaacgaaaccaaacaaaacag

SEQ ID NO: 545593 - RNA, 19 nt, Human
aacaggagguggaaggcug

SEQ ID NO: 545594 - RNA, 20 nt, Human
aacaggagguggaaggcugg

SEQ ID NO: 545595 - RNA, 27 nt, Human
aaccuccccuucuucccucucacccac

SEQ ID NO: 545596 - RNA, 21 nt, Human
aagaaaacaaaacgaaaccaa

SEQ ID NO: 545597 - RNA, 22 nt, Human
aagccggcaggggccuccggga

SEQ ID NO: 545598 - RNA, 24 nt, Human
acaaaacgaaaccaaacaaaacag

SEQ ID NO: 545599 - RNA, 23 nt, Human
acaguaaaaagacaaauucuaaa

SEQ ID NO: 545600 - RNA, 21 nt, Human
accccauccccagcaccacgg

SEQ ID NO: 545601 - RNA, 20 nt, Human
accuccccuucuucccucuc

SEQ ID NO: 545602 - RNA, 21 nt, Human
accuccccuucuucccucuca

SEQ ID NO: 545603 - RNA, 23 nt, Human
acgaaaccaaacaaaacagggca

SEQ ID NO: 545604 - RNA, 20 nt, Human
acgggaucuggcgggggcag

SEQ ID NO: 545605 - RNA, 21 nt, Human
agaaaaaaaugccuggcccua

SEQ ID NO: 545606 - RNA, 26 nt, Human
agaaaacaaaacgaaaccaaacaaaa

SEQ ID NO: 545607 - RNA, 21 nt, Human
agacaguaaaacagcuccugg

SEQ ID NO: 545608 - RNA, 21 nt, Human
agccccucagaggggaggcag

SEQ ID NO: 545609 - RNA, 19 nt, Human
aggaaaagcuuuugggucu

SEQ ID NO: 545610 - RNA, 21 nt, Human
aggaaagaaaugcuuaucuug

SEQ ID NO: 545611 - RNA, 23 nt, Human
aggaagaacaggagguggaaggc

SEQ ID NO: 545612 - RNA, 20 nt, Human
aggagguggaaggcugggga

SEQ ID NO: 545613 - RNA, 25 nt, Human
aggcgaagggggaaagggggggggc

SEQ ID NO: 545614 - RNA, 19 nt, Human
aggguaucacuguaggaaa

SEQ ID NO: 545615 - RNA, 27 nt, Human
caaaaaaaagucacugcuuccuccccc

SEQ ID NO: 545616 - RNA, 24 nt, Human
caaaacgaaaccaaacaaaacagg

SEQ ID NO: 545617 - RNA, 21 nt, Human
caaaauggccgccgccaccgc

SEQ ID NO: 545618 - RNA, 30 nt, Human
caaagaaaacaaaacgaaaccaaacaaaaa

SEQ ID NO: 545619 - RNA, 23 nt, Human
caaaguuauggggaacuggggca

SEQ ID NO: 545620 - RNA, 26 nt, Human
caacccugcuuccuuccugcuaggag

SEQ ID NO: 545621 - RNA, 22 nt, Human
cacugcuuccucccccucccca

SEQ ID NO: 545622 - RNA, 23 nt, Human
cacugcuuccucccccuccccau

SEQ ID NO: 545623 - RNA, 21 nt, Human
cagaaaaaaaugccuggcccu

SEQ ID NO: 545624 - RNA, 22 nt, Human
cagaaaaaaaugccuggcccua

SEQ ID NO: 545625 - RNA, 21 nt, Human
cagaagcuugugugcaaaguu

SEQ ID NO: 545626 - RNA, 22 nt, Human
cagcaccacgggaucuggcggg

SEQ ID NO: 545627 - RNA, 22 nt, Human
ccaaaaaaaagucacugcuucc

SEQ ID NO: 545628 - RNA, 24 nt, Human
ccaaccuccccuucuucccucuca

SEQ ID NO: 545629 - RNA, 24 nt, Human
ccaauggcggcagcggcucaaaau

SEQ ID NO: 545630 - RNA, 19 nt, Human
ccaguccagacaccccgcc

SEQ ID NO: 545631 - RNA, 18 nt, Human
cccacccacaguaaaaag

SEQ ID NO: 545632 - RNA, 24 nt, Human
cccagcaccacgggaucuggcggg

SEQ ID NO: 545633 - RNA, 20 nt, Human
ccccaaccuccccuucuucc

SEQ ID NO: 545634 - RNA, 22 nt, Human
ccccaaccuccccuucuucccu

SEQ ID NO: 545635 - RNA, 21 nt, Human
cccccgagcccggcccggccu

SEQ ID NO: 545636 - RNA, 24 nt, Human
cccccgagcccggcccggccuccc

SEQ ID NO: 545637 - RNA, 19 nt, Human
ccccgagcccggcccggcc

SEQ ID NO: 545638 - RNA, 22 nt, Human
ccccgccccucgcccacguccg

SEQ ID NO: 545639 - RNA, 27 nt, Human
ccccgggguggcccccgagcccggccc

SEQ ID NO: 545640 - RNA, 21 nt, Human
ccccuucuucccucucaccca

SEQ ID NO: 545641 - RNA, 21 nt, Human
cccggcccggccucccagggc

SEQ ID NO: 545642 - RNA, 23 nt, Human
cccuccccauuuugcuuuuuaaa

SEQ ID NO: 545643 - RNA, 18 nt, Human
cccuucuucccucucacc

SEQ ID NO: 545644 - RNA, 19 nt, Human
ccgccaccgccuccccccu

SEQ ID NO: 545645 - RNA, 21 nt, Human
ccgccaccgccuccccccuca

SEQ ID NO: 545646 - RNA, 26 nt, Human
ccucgcccacguccgacuuccucucu

SEQ ID NO: 545647 - RNA, 18 nt, Human
ccuggcccuauggagggg

SEQ ID NO: 545648 - RNA, 26 nt, Human
cgcauaauuaccaaaaaaaagucacu

SEQ ID NO: 545649 - RNA, 26 nt, Human
cgggggcagaggaggggccgaggcag

SEQ ID NO: 545650 - RNA, 19 nt, Human
cucccccuccccauuuugc

SEQ ID NO: 545651 - RNA, 24 nt, Human
gaaaaaaaugccuggcccuaugga

SEQ ID NO: 545652 - RNA, 23 nt, Human
gaaaccaaacaaaacagggcaaa

SEQ ID NO: 545653 - RNA, 18 nt, Human
gaagcugaggggcuggag

SEQ ID NO: 545654 - RNA, 22 nt, Human
gaaggcuggggagguggggaca

SEQ ID NO: 545655 - RNA, 18 nt, Human
gagccucugggucacacu

SEQ ID NO: 545656 - RNA, 22 nt, Human
gaggggcuggagcaggguuggg

SEQ ID NO: 545657 - RNA, 18 nt, Human
gagguggaaggcugggga

SEQ ID NO: 545658 - RNA, 21 nt, Human
gcagaggaggggccgaggcag

SEQ ID NO: 545659 - RNA, 18 nt, Human
gcagcccugggaugaccc

SEQ ID NO: 545660 - RNA, 18 nt, Human
gcuuuugggucuggcacc

SEQ ID NO: 545661 - RNA, 22 nt, Human
ggaagccggcaggggccuccgg

SEQ ID NO: 545662 - RNA, 18 nt, Human
ggagaccacuggagagga

SEQ ID NO: 545663 - RNA, 20 nt, Human
ggagguggaaggcuggggag

SEQ ID NO: 545664 - RNA, 19 nt, Human
ggcagaggaggggccgagg

SEQ ID NO: 545665 - RNA, 19 nt, Human
ggcccagagguuccagucc

SEQ ID NO: 545666 - RNA, 21 nt, Human
ggccgaggcaggcgcuggugg

SEQ ID NO: 545667 - RNA, 22 nt, Human
ggcgggggcagaggaggggccg

SEQ ID NO: 545668 - RNA, 19 nt, Human
gggaagcugaggggcugga

SEQ ID NO: 545669 - RNA, 23 nt, Human
gggaggcagcccugggaugaccc

SEQ ID NO: 545670 - RNA, 21 nt, Human
gggaggcagugggcuggaggg

SEQ ID NO: 545671 - RNA, 21 nt, Human
gggcagaggaggggccgaggc

SEQ ID NO: 545672 - RNA, 23 nt, Human
gggcagaggaggggccgaggcag

SEQ ID NO: 545673 - RNA, 26 nt, Human
gggccgaggcaggcgcugguggagga

SEQ ID NO: 545674 - RNA, 22 nt, Human
ggggaggcagugggcuggaggg

SEQ ID NO: 545675 - RNA, 21 nt, Human
ggggagguggggacaaacaga

SEQ ID NO: 545676 - RNA, 20 nt, Human
ggggcuggagcaggguuggg

SEQ ID NO: 545677 - RNA, 24 nt, Human
gucacugcuuccucccccucccca

SEQ ID NO: 545678 - RNA, 19 nt, Human
gucuggcaccugggagacc

SEQ ID NO: 545679 - RNA, 18 nt, Human
guuguguuuuguuuugug

SEQ ID NO: 545680 - RNA, 26 nt, Human
guuuuguuuuguggcucuuccucagu

SEQ ID NO: 545681 - RNA, 26 nt, Human
uaaaaaaaagcgcauaauuaccaaaa

SEQ ID NO: 545682 - RNA, 19 nt, Human
uaaaacagcuccugggaga

SEQ ID NO: 545683 - RNA, 20 nt, Human
uacaaccaacugcaugaggg

SEQ ID NO: 545684 - RNA, 23 nt, Human
uaccaaaaaaaagucacugcuuc

SEQ ID NO: 545685 - RNA, 24 nt, Human
uaccaaaaaaaagucacugcuucc

SEQ ID NO: 545686 - RNA, 21 nt, Human
uaccaagacgcccggaauaaa

SEQ ID NO: 545687 - RNA, 22 nt, Human
uaggaaaagcuuuugggucugg

SEQ ID NO: 545688 - RNA, 24 nt, Human
uaugaucaagggagguggggauua

SEQ ID NO: 545689 - RNA, 25 nt, Human
uaugaucaagggagguggggauuau

SEQ ID NO: 545690 - RNA, 19 nt, Human
ucacccacugaaucccacc

SEQ ID NO: 545691 - RNA, 26 nt, Human
ucacugcuuccucccccuccccauuu

SEQ ID NO: 545692 - RNA, 23 nt, Human
ucacuguaggaaaagcuuuuggg

SEQ ID NO: 545693 - RNA, 21 nt, Human
ucaggaaagaaaugcuuaucu

SEQ ID NO: 545694 - RNA, 21 nt, Human
uccagaaaaaaaugccuggcc

SEQ ID NO: 545695 - RNA, 19 nt, Human
uccagacaccccgccccuc

SEQ ID NO: 545696 - RNA, 23 nt, Human
ucccccuuaaaccuuuccuguca

SEQ ID NO: 545697 - RNA, 25 nt, Human
uccgggagccucugggucacacugg

SEQ ID NO: 545698 - RNA, 24 nt, Human
ucucacccacugaaucccaccaga

SEQ ID NO: 545699 - RNA, 19 nt, Human
ucuucccucucacccacug

SEQ ID NO: 545700 - RNA, 18 nt, Human
ucuugaugaaauaucaac

SEQ ID NO: 545701 - RNA, 21 nt, Human
ugaaauaucaacagcccaccc

SEQ ID NO: 545702 - RNA, 19 nt, Human
ugaccccauccccagcacc

SEQ ID NO: 545703 - RNA, 18 nt, Human
uggagcaggguugggaga

SEQ ID NO: 545704 - RNA, 19 nt, Human
uggaggaagccggcagggg

SEQ ID NO: 545705 - RNA, 19 nt, Human
uggcccccgagcccggccc

SEQ ID NO: 545706 - RNA, 19 nt, Human
ugggaagcugaggggcugg

SEQ ID NO: 545707 - RNA, 21 nt, Human
ugggaagcugaggggcuggag

SEQ ID NO: 545708 - RNA, 18 nt, Human
ugggcuggagggaggcag

SEQ ID NO: 545709 - RNA, 19 nt, Human
ugggcuggagggaggcagc

SEQ ID NO: 545710 - RNA, 19 nt, Human
uguuuuguggcucuuccuc

SEQ ID NO: 545711 - RNA, 24 nt, Human
uuaccaaaaaaaagucacugcuuc

SEQ ID NO: 545712 - RNA, 18 nt, Human
uuagucaaaaaggaagaa

SEQ ID NO: 545713 - RNA, 25 nt, Human
uuagucaaaaaggaagaagguagga

SEQ ID NO: 545714 - RNA, 24 nt, Human
uucaaagaaaacaaaacgaaacca

SEQ ID NO: 545715 - RNA, 27 nt, Human
uuuauucaaagaaaacaaaacgaaacc

SEQ ID NO: 545716 - RNA, 24 nt, Human
uuuuguuguguuuuguuuuguggc

SEQ ID NO: 545717 - RNA, 20 nt, Human
acccuccccgaccccagcca

SEQ ID NO: 545718 - RNA, 22 nt, Human
agaaaaacaaauccagguccca

SEQ ID NO: 545719 - RNA, 21 nt, Human
aggggacaggagagguugggg

SEQ ID NO: 545720 - RNA, 22 nt, Human
agguuggggucacgguggaagg

SEQ ID NO: 545721 - RNA, 19 nt, Human
agugcccccuguacccucc

SEQ ID NO: 545722 - RNA, 21 nt, Human
caaauccaggucccagugccc

SEQ ID NO: 545723 - RNA, 22 nt, Human
caggagagguuggggucacggu

SEQ ID NO: 545724 - RNA, 23 nt, Human
caggagagguuggggucacggug

SEQ ID NO: 545725 - RNA, 22 nt, Human
cccagugcccccuguacccucc

SEQ ID NO: 545726 - RNA, 23 nt, Human
ccuguacccuccccgaccccagc

SEQ ID NO: 545727 - RNA, 25 nt, Human
ccuguacccuccccgaccccagcca

SEQ ID NO: 545728 - RNA, 18 nt, Human
cggguccccccggccccc

SEQ ID NO: 545729 - RNA, 18 nt, Human
ggccgggggcgggucccc

SEQ ID NO: 545730 - RNA, 18 nt, Human
ggcugcggccggccgggg

SEQ ID NO: 545731 - RNA, 19 nt, Human
gggacaggagagguugggg

SEQ ID NO: 545732 - RNA, 20 nt, Human
guccccccggcccccuuccu

SEQ ID NO: 545733 - RNA, 19 nt, Human
uagagacagaguuggaggg

SEQ ID NO: 545734 - RNA, 26 nt, Human
ucccagugcccccuguacccuccccg

SEQ ID NO: 545735 - RNA, 18 nt, Human
uccccccggcccccuucc

SEQ ID NO: 545736 - RNA, 21 nt, Human
uggggucacgguggaaggagg

SEQ ID NO: 545737 - RNA, 19 nt, Human
aacagaucuuuccuauaac

SEQ ID NO: 545738 - RNA, 27 nt, Human
aagaagaaaaaacggaaggauucacaa

SEQ ID NO: 545739 - RNA, 19 nt, Human
agaaaaaacggaaggauuc

SEQ ID NO: 545740 - RNA, 23 nt, Human
agaaggacauacagaaauacagg

SEQ ID NO: 545741 - RNA, 24 nt, Human
aggcauuggcacauuuuaaaaaca

SEQ ID NO: 545742 - RNA, 24 nt, Human
aguaaagaaaguauuagggaagaa

SEQ ID NO: 545743 - RNA, 20 nt, Human
auuagaagaaaaguugaaau

SEQ ID NO: 545744 - RNA, 23 nt, Human
caauuagaagaaaaguugaaauc

SEQ ID NO: 545745 - RNA, 23 nt, Human
cuuaagaagaaaaaacggaagga

SEQ ID NO: 545746 - RNA, 22 nt, Human
gaaaguggaaugucagaaguca

SEQ ID NO: 545747 - RNA, 21 nt, Human
uaaaacagaaggcacuucaca

SEQ ID NO: 545748 - RNA, 22 nt, Human
uaagacaaguaaugaguccuug

SEQ ID NO: 545749 - RNA, 21 nt, Human
uauccucguuuacauccuuca

SEQ ID NO: 545750 - RNA, 25 nt, Human
ugaacuaaaaaagguguuacauuca

SEQ ID NO: 545751 - RNA, 18 nt, Human
ugaugaccuguagugucc

SEQ ID NO: 545752 - RNA, 21 nt, Human
uggcaguaaaaauauaagaca

SEQ ID NO: 545753 - RNA, 21 nt, Human
uggcagugaacgucuguuugg

SEQ ID NO: 545754 - RNA, 18 nt, Human
ugugaaguaaagaaagua

SEQ ID NO: 545755 - RNA, 24 nt, Human
ugugauaaacuuaaagugcuaaaa

SEQ ID NO: 545756 - RNA, 21 nt, Human
uuaagaagaaaaaacggaagg

SEQ ID NO: 545757 - RNA, 22 nt, Human
uucagaaucagugaacuaaaaa

SEQ ID NO: 545758 - RNA, 24 nt, Human
uuuacauccuucacuuuacaagug

SEQ ID NO: 545759 - RNA, 21 nt, Human
uuuccuccuuaagaagaaaaa

SEQ ID NO: 545760 - RNA, 18 nt, Human
uuugggaguggggacguu

SEQ ID NO: 545761 - RNA, 23 nt, Human
uuuuuuuuuuuuuuuaauguuuu

SEQ ID NO: 545762 - RNA, 19 nt, Human
uuuuuuuuuuuuuuuuuaa

SEQ ID NO: 545763 - RNA, 21 nt, Human
aaaaagucucuucuaacccuc

SEQ ID NO: 545764 - RNA, 18 nt, Human
aaagacacuacuggccau

SEQ ID NO: 545765 - RNA, 21 nt, Human
aacuacagaguaaacugaggc

SEQ ID NO: 545766 - RNA, 25 nt, Human
aagacacuacuggccaugaugccgc

SEQ ID NO: 545767 - RNA, 24 nt, Human
aaugugggagcagagcuggagaga

SEQ ID NO: 545768 - RNA, 18 nt, Human
accccuuggacugacuca

SEQ ID NO: 545769 - RNA, 22 nt, Human
agcaaggcugcauacacaaaca

SEQ ID NO: 545770 - RNA, 26 nt, Human
agccacugggcaugccaccccaucag

SEQ ID NO: 545771 - RNA, 22 nt, Human
aggcacagagugguaaaugagu

SEQ ID NO: 545772 - RNA, 22 nt, Human
agguagacagcuuaaaaccaag

SEQ ID NO: 545773 - RNA, 21 nt, Human
auuugaugcguaauucuccac

SEQ ID NO: 545774 - RNA, 23 nt, Human
caaaaaccugaaaggaguuucca

SEQ ID NO: 545775 - RNA, 20 nt, Human
caaagucccucaaggagcuc

SEQ ID NO: 545776 - RNA, 22 nt, Human
cacauuuaugauacuucuacau

SEQ ID NO: 545777 - RNA, 22 nt, Human
cagagcuggagagagggcaagg

SEQ ID NO: 545778 - RNA, 20 nt, Human
cagaguaaacugaggcacag

SEQ ID NO: 545779 - RNA, 25 nt, Human
cagauauauacaaagacaucacaau

SEQ ID NO: 545780 - RNA, 21 nt, Human
cauuucagccugacugucugu

SEQ ID NO: 545781 - RNA, 22 nt, Human
ccacaaagaacuguccauuuca

SEQ ID NO: 545782 - RNA, 22 nt, Human
ccccuuggacugacucaacagc

SEQ ID NO: 545783 - RNA, 20 nt, Human
ccucaaagacacuacuggcc

SEQ ID NO: 545784 - RNA, 19 nt, Human
ccuugaagggaaggguaga

SEQ ID NO: 545785 - RNA, 21 nt, Human
cuucauggauaauuuauugcu

SEQ ID NO: 545786 - RNA, 19 nt, Human
cuuggacugacucaacagc

SEQ ID NO: 545787 - RNA, 20 nt, Human
cuuggacugacucaacagca

SEQ ID NO: 545788 - RNA, 27 nt, Human
gaaaaagucucuucuaacccucaucca

SEQ ID NO: 545789 - RNA, 21 nt, Human
gagcuggagagagggcaaggu

SEQ ID NO: 545790 - RNA, 18 nt, Human
gaguuuccaauuaucacc

SEQ ID NO: 545791 - RNA, 22 nt, Human
ggaaggguagaguccacaaaga

SEQ ID NO: 545792 - RNA, 20 nt, Human
uaaacuacagaguaaacuga

SEQ ID NO: 545793 - RNA, 24 nt, Human
uaaguaaucucaacauuauacaga

SEQ ID NO: 545794 - RNA, 19 nt, Human
uacagaguaaacugaggca

SEQ ID NO: 545795 - RNA, 26 nt, Human
uagcacugaaaaccauauuaaaauac

SEQ ID NO: 545796 - RNA, 24 nt, Human
uagguagacagcuuaaaaccaaga

SEQ ID NO: 545797 - RNA, 20 nt, Human
uaugacauacuccuugaagg

SEQ ID NO: 545798 - RNA, 18 nt, Human
uccacaaacauaaaugug

SEQ ID NO: 545799 - RNA, 18 nt, Human
ucuaacccucauccagag

SEQ ID NO: 545800 - RNA, 22 nt, Human
ucuaaguggugaacuccucaaa

SEQ ID NO: 545801 - RNA, 21 nt, Human
ugacugaauucauguuucaca

SEQ ID NO: 545802 - RNA, 21 nt, Human
ugagguagaaacagcuaggua

SEQ ID NO: 545803 - RNA, 22 nt, Human
ugcccccaaagccacugggcau

SEQ ID NO: 545804 - RNA, 18 nt, Human
uggugugaggcacuggga

SEQ ID NO: 545805 - RNA, 18 nt, Human
ugugaggcacugggaugu

SEQ ID NO: 545806 - RNA, 21 nt, Human
uguguacaucuaugcaaugua

SEQ ID NO: 545807 - RNA, 23 nt, Human
uguguacaucuaugcaauguaca

SEQ ID NO: 545808 - RNA, 24 nt, Human
uuacaaaaucuacuugcaaaaacc

SEQ ID NO: 545809 - RNA, 23 nt, Human
uucuccacgaagauauucccaaa

SEQ ID NO: 545810 - RNA, 24 nt, Human
uugcccccaaagccacugggcaug

SEQ ID NO: 545811 - RNA, 26 nt, Human
uuggaaaaagucucuucuaacccuca

SEQ ID NO: 545812 - RNA, 26 nt, Human
uuuccauauauacauuauuuuggcug

SEQ ID NO: 545813 - RNA, 19 nt, Human
accgccucucugcgugcgc

SEQ ID NO: 545814 - RNA, 24 nt, Human
auacauauucacaaaauuuacaca

SEQ ID NO: 545815 - RNA, 22 nt, Human
ccagauaacuacuuccacucac

SEQ ID NO: 545816 - RNA, 24 nt, Human
ccgccguaaagugcgucaccgccu

SEQ ID NO: 545817 - RNA, 22 nt, Human
cgcgggcacgcagugucgcgcg

SEQ ID NO: 545818 - RNA, 23 nt, Human
uacauauucacaaaauuuacaca

SEQ ID NO: 545819 - RNA, 20 nt, Human
uaccauaacuuauacagaga

SEQ ID NO: 545820 - RNA, 21 nt, Human
uauacagagaacaguuuagca

SEQ ID NO: 545821 - RNA, 18 nt, Human
uuccacucacaaugagau

SEQ ID NO: 545822 - RNA, 26 nt, Human
uuuuuuuuuuuuuuuuuuucaauagg

SEQ ID NO: 545823 - RNA, 22 nt, Human
aacaccccaacacaggcccagg

SEQ ID NO: 545824 - RNA, 18 nt, Human
aagcaggaggggacccga

SEQ ID NO: 545825 - RNA, 18 nt, Human
aagcaggaggggacccga

SEQ ID NO: 545826 - RNA, 18 nt, Human
aagcaggaggggacccga

SEQ ID NO: 545827 - RNA, 23 nt, Human
aagcaggaggggacccgagucug

SEQ ID NO: 545828 - RNA, 24 nt, Human
aagcaggaggggacccgagucugg

SEQ ID NO: 545829 - RNA, 19 nt, Human
acaaaugacaugucuccau

SEQ ID NO: 545830 - RNA, 20 nt, Human
acagcccaggguucggaagc

SEQ ID NO: 545831 - RNA, 23 nt, Human
accccaacacaggcccaggacaa

SEQ ID NO: 545832 - RNA, 24 nt, Human
acgcugccacauaggccugcgggc

SEQ ID NO: 545833 - RNA, 24 nt, Human
agacaagaaagugcauuggguccg

SEQ ID NO: 545834 - RNA, 22 nt, Human
agacagagcucacugcccugug

SEQ ID NO: 545835 - RNA, 24 nt, Human
agagugacuuagcccaugccgcac

SEQ ID NO: 545836 - RNA, 23 nt, Human
agccuuuuuccuucucaaggccu

SEQ ID NO: 545837 - RNA, 20 nt, Human
aggaugcucaggggaaaaug

SEQ ID NO: 545838 - RNA, 21 nt, Human
aggcccaggacaauauuacaa

SEQ ID NO: 545839 - RNA, 25 nt, Human
aggcccaggacaauauuacaaaagu

SEQ ID NO: 545840 - RNA, 18 nt, Human
aggcggggaggguggggc

SEQ ID NO: 545841 - RNA, 21 nt, Human
aggugggggaagacagagcuc

SEQ ID NO: 545842 - RNA, 22 nt, Human
augaagcgggccucauggccuc

SEQ ID NO: 545843 - RNA, 26 nt, Human
augggcccaaggggacacucagccca

SEQ ID NO: 545844 - RNA, 22 nt, Human
cacagcuggucagaggcccaga

SEQ ID NO: 545845 - RNA, 18 nt, Human
cagagucccacuugugag

SEQ ID NO: 545846 - RNA, 22 nt, Human
cagcagggggucccacccaccc

SEQ ID NO: 545847 - RNA, 19 nt, Human
cagcagggguaggggaggc

SEQ ID NO: 545848 - RNA, 19 nt, Human
cagcccaggacagcagucu

SEQ ID NO: 545849 - RNA, 22 nt, Human
cagcccaggguucggaagcuga

SEQ ID NO: 545850 - RNA, 21 nt, Human
caggaggcugugcuccaguca

SEQ ID NO: 545851 - RNA, 20 nt, Human
cagguccaaagccucuccua

SEQ ID NO: 545852 - RNA, 22 nt, Human
cauggcaaagaaagggcuaugu

SEQ ID NO: 545853 - RNA, 21 nt, Human
ccaaagccucuccuaggccca

SEQ ID NO: 545854 - RNA, 21 nt, Human
ccaacaccccaacacaggccc

SEQ ID NO: 545855 - RNA, 19 nt, Human
ccauguggccacugaugcc

SEQ ID NO: 545856 - RNA, 24 nt, Human
cccagagucccacuugugaggcuc

SEQ ID NO: 545857 - RNA, 19 nt, Human
cccaggcggggaggguggg

SEQ ID NO: 545858 - RNA, 25 nt, Human
cccaugccgcacagcuggucagagg

SEQ ID NO: 545859 - RNA, 22 nt, Human
ccccaacaccccaacacaggcc

SEQ ID NO: 545860 - RNA, 23 nt, Human
cccccaacaccccaacacaggcc

SEQ ID NO: 545861 - RNA, 19 nt, Human
cccggccagcagggguagg

SEQ ID NO: 545862 - RNA, 22 nt, Human
cccucugcucaugguuugggga

SEQ ID NO: 545863 - RNA, 28 nt, Human
cccucugcucaugguuuggggccccggc

SEQ ID NO: 545864 - RNA, 22 nt, Human
ccugcugcugcuacuccugugc

SEQ ID NO: 545865 - RNA, 18 nt, Human
ccuguggggucucugugg

SEQ ID NO: 545866 - RNA, 24 nt, Human
cgaagggcagagugacuuagccca

SEQ ID NO: 545867 - RNA, 23 nt, Human
cgggaccugaggcagcccaggac

SEQ ID NO: 545868 - RNA, 18 nt, Human
cuccuaggcccacaacuc

SEQ ID NO: 545869 - RNA, 24 nt, Human
cuccuaggcccacaacuccugugg

SEQ ID NO: 545870 - RNA, 23 nt, Human
cucgggaccugaggcagcccagg

SEQ ID NO: 545871 - RNA, 26 nt, Human
cuugggggauaaguggggaagggaag

SEQ ID NO: 545872 - RNA, 18 nt, Human
gaagacagagcucacugc

SEQ ID NO: 545873 - RNA, 18 nt, Human
gaccuugucuccuuucac

SEQ ID NO: 545874 - RNA, 22 nt, Human
gcaaagaaagggcuauguuaga

SEQ ID NO: 545875 - RNA, 21 nt, Human
gcccuguggggucucuguggg

SEQ ID NO: 545876 - RNA, 18 nt, Human
gcuucccccaacacccca

SEQ ID NO: 545877 - RNA, 20 nt, Human
ggaggcaggaggcugugcuc

SEQ ID NO: 545878 - RNA, 18 nt, Human
ggaggguaagaagggcug

SEQ ID NO: 545879 - RNA, 18 nt, Human
ggcugggaggcaggaggc

SEQ ID NO: 545880 - RNA, 22 nt, Human
gggaaaauggguagguuuccag

SEQ ID NO: 545881 - RNA, 21 nt, Human
gggaacaggcaagggcagccg

SEQ ID NO: 545882 - RNA, 22 nt, Human
gggaagcaggaggggacccgag

SEQ ID NO: 545883 - RNA, 24 nt, Human
gggagcccaggcggggaggguggg

SEQ ID NO: 545884 - RNA, 18 nt, Human
gggccucauggccucaug

SEQ ID NO: 545885 - RNA, 18 nt, Human
gggggaagacagagcuca

SEQ ID NO: 545886 - RNA, 23 nt, Human
gggguaggggaggccgguugaaa

SEQ ID NO: 545887 - RNA, 22 nt, Human
gggucccacccacccucugccc

SEQ ID NO: 545888 - RNA, 20 nt, Human
gucccacccacccucugccc

SEQ ID NO: 545889 - RNA, 22 nt, Human
guggcccugggccacaccauuu

SEQ ID NO: 545890 - RNA, 22 nt, Human
guggcucccagguccaaagccu

SEQ ID NO: 545891 - RNA, 22 nt, Human
uaaaaugaagacuaaggaaaca

SEQ ID NO: 545892 - RNA, 18 nt, Human
uaaggaaacagcccaggg

SEQ ID NO: 545893 - RNA, 26 nt, Human
uagaggaugcucaggggaaaaugggu

SEQ ID NO: 545894 - RNA, 24 nt, Human
uagccuuuuuccuucucaaggccu

SEQ ID NO: 545895 - RNA, 22 nt, Human
uauguuagaaaagaaacucgcc

SEQ ID NO: 545896 - RNA, 20 nt, Human
ucaugccacugcccgcagga

SEQ ID NO: 545897 - RNA, 18 nt, Human
ucccagguccaaagccuc

SEQ ID NO: 545898 - RNA, 20 nt, Human
ucccagguccaaagccucuc

SEQ ID NO: 545899 - RNA, 20 nt, Human
uccugcugcugcuacuccug

SEQ ID NO: 545900 - RNA, 24 nt, Human
ucucaaggccucaguuuccccauc

SEQ ID NO: 545901 - RNA, 22 nt, Human
ucuccuaggcccacaacuccug

SEQ ID NO: 545902 - RNA, 21 nt, Human
ucuugccuguccugcugcugc

SEQ ID NO: 545903 - RNA, 24 nt, Human
ugacacuccguuaaaaaggcaaca

SEQ ID NO: 545904 - RNA, 21 nt, Human
ugacuuagcccaugccgcaca

SEQ ID NO: 545905 - RNA, 19 nt, Human
ugccacauaggccugcggg

SEQ ID NO: 545906 - RNA, 18 nt, Human
ugcccauugcgggucagg

SEQ ID NO: 545907 - RNA, 20 nt, Human
ugcccuaagcuuccagaggc

SEQ ID NO: 545908 - RNA, 18 nt, Human
ugccuguccugcugcugc

SEQ ID NO: 545909 - RNA, 27 nt, Human
uggcucccagguccaaagccucuccuu

SEQ ID NO: 545910 - RNA, 20 nt, Human
uggggaagggaagcaggagg

SEQ ID NO: 545911 - RNA, 26 nt, Human
uggggaagggaagcaggaggggaccc

SEQ ID NO: 545912 - RNA, 22 nt, Human
uggggccagccccugaugcccc

SEQ ID NO: 545913 - RNA, 24 nt, Human
ugggggaccccaacccagggugag

SEQ ID NO: 545914 - RNA, 22 nt, Human
uguuagaaaagaaacucgcccc

SEQ ID NO: 545915 - RNA, 19 nt, Human
uuccagucuggaugcuggg

SEQ ID NO: 545916 - RNA, 21 nt, Human
uugcuccuagguguggcuccc

SEQ ID NO: 545917 - RNA, 20 nt, Human
uugugaggcucuugccuguc

SEQ ID NO: 545918 - RNA, 25 nt, Human
uuucacggcauuccugggaggguaa

SEQ ID NO: 545919 - RNA, 18 nt, Human
aaacagcccaguugagaa

SEQ ID NO: 545920 - RNA, 22 nt, Human
acuuugauaaugggaagagaag

SEQ ID NO: 545921 - RNA, 19 nt, Human
agaaaaacagcccaguuga

SEQ ID NO: 545922 - RNA, 19 nt, Human
agaaggcuggcccuccaag

SEQ ID NO: 545923 - RNA, 23 nt, Human
augaagcuaagaggugacuugug

SEQ ID NO: 545924 - RNA, 22 nt, Human
caacuggccuuccuuaucuccu

SEQ ID NO: 545925 - RNA, 22 nt, Human
cacuugcucuccgccgaccagc

SEQ ID NO: 545926 - RNA, 22 nt, Human
cagcgcagaacuucgccgggga

SEQ ID NO: 545927 - RNA, 21 nt, Human
caggugguaagaaaaacagcc

SEQ ID NO: 545928 - RNA, 24 nt, Human
cauuuuucuccaaaaggcugagag

SEQ ID NO: 545929 - RNA, 23 nt, Human
ccagcgcagaacuucgccgggga

SEQ ID NO: 545930 - RNA, 18 nt, Human
ccaucugccagcauguuc

SEQ ID NO: 545931 - RNA, 22 nt, Human
ccuccaucugccagcauguuca

SEQ ID NO: 545932 - RNA, 19 nt, Human
ccuuagaaauuccuggcug

SEQ ID NO: 545933 - RNA, 23 nt, Human
ccuuagaaauuccuggcuggacc

SEQ ID NO: 545934 - RNA, 18 nt, Human
cgccggggacgguggcgc

SEQ ID NO: 545935 - RNA, 19 nt, Human
cuaaaagccuccaucugcc

SEQ ID NO: 545936 - RNA, 25 nt, Human
cuaaggcaugaagcuaagaggugac

SEQ ID NO: 545937 - RNA, 18 nt, Human
cuccaaaaggcugagagg

SEQ ID NO: 545938 - RNA, 22 nt, Human
cuccuaaaagccuccaucugcc

SEQ ID NO: 545939 - RNA, 23 nt, Human
cuuagaaauuccuggcuggaccu

SEQ ID NO: 545940 - RNA, 26 nt, Human
gcugcaccugggccauauacucaacu

SEQ ID NO: 545941 - RNA, 25 nt, Human
gguaagaaaaacagcccaguugaga

SEQ ID NO: 545942 - RNA, 28 nt, Human
guccuuagaaauuccuggcuggacccca

SEQ ID NO: 545943 - RNA, 23 nt, Human
uaaaaaacuauucuccuaaaagc

SEQ ID NO: 545944 - RNA, 18 nt, Human
uaaaagccuccaucugcc

SEQ ID NO: 545945 - RNA, 19 nt, Human
uaaguccuuagaaauuccu

SEQ ID NO: 545946 - RNA, 20 nt, Human
uacuuugauaaugggaagag

SEQ ID NO: 545947 - RNA, 21 nt, Human
ucaaaacaauaaaacacaguc

SEQ ID NO: 545948 - RNA, 19 nt, Human
uccccaccaguacaccagg

SEQ ID NO: 545949 - RNA, 24 nt, Human
ucuccaaaaggcugagaggcuaca

SEQ ID NO: 545950 - RNA, 24 nt, Human
ugacccccaagcaacuccaugaca

SEQ ID NO: 545951 - RNA, 23 nt, Human
uggaucaaaacaauaaaacacag

SEQ ID NO: 545952 - RNA, 21 nt, Human
ugggaagagaaguaagauaug

SEQ ID NO: 545953 - RNA, 24 nt, Human
ugggaagagaaguaagauauggua

SEQ ID NO: 545954 - RNA, 23 nt, Human
ugucagaauguuuaaaaaacuau

SEQ ID NO: 545955 - RNA, 19 nt, Human
uuauagaauguggucuggc

SEQ ID NO: 545956 - RNA, 19 nt, Human
uuugauaaugggaagagaa

SEQ ID NO: 545957 - RNA, 22 nt, Human
aaccgccgccgccgcugcagcc

SEQ ID NO: 545958 - RNA, 18 nt, Human
aggauggcgaggaggaag

SEQ ID NO: 545959 - RNA, 23 nt, Human
caugaaacagauuccaaaaauuc

SEQ ID NO: 545960 - RNA, 23 nt, Human
ccagggggacaaaggcaaaccac

SEQ ID NO: 545961 - RNA, 21 nt, Human
cccgcgcugcccugaagcugc

SEQ ID NO: 545962 - RNA, 20 nt, Human
ccgccgccgccgcugcagcc

SEQ ID NO: 545963 - RNA, 20 nt, Human
ccgcgcugcccugaagcugc

SEQ ID NO: 545964 - RNA, 21 nt, Human
ccgcugcagcccgcgcugccc

SEQ ID NO: 545965 - RNA, 22 nt, Human
ccgcugcagcccgcgcugcccu

SEQ ID NO: 545966 - RNA, 18 nt, Human
ccuaaccgccgccgccgc

SEQ ID NO: 545967 - RNA, 22 nt, Human
ccucgcccuacacagcccuaac

SEQ ID NO: 545968 - RNA, 24 nt, Human
cgcugcagcccgcgcugcccugaa

SEQ ID NO: 545969 - RNA, 23 nt, Human
gaaacaagagaacacucaguuac

SEQ ID NO: 545970 - RNA, 22 nt, Human
ggccucgcccuacacagcccua

SEQ ID NO: 545971 - RNA, 24 nt, Human
gggaggccucgcccuacacagccc

SEQ ID NO: 545972 - RNA, 23 nt, Human
uaaaucuucaaacacuugcaauu

SEQ ID NO: 545973 - RNA, 24 nt, Human
uaaaucuucaaacacuugcaauuu

SEQ ID NO: 545974 - RNA, 19 nt, Human
uaaccgccgccgccgcugc

SEQ ID NO: 545975 - RNA, 21 nt, Human
uacauuaaugcaaagaaacaa

SEQ ID NO: 545976 - RNA, 23 nt, Human
uacauuaaugcaaagaaacaaga

SEQ ID NO: 545977 - RNA, 22 nt, Human
uccaugaaacagauuccaaaaa

SEQ ID NO: 545978 - RNA, 25 nt, Human
ugacgaggaggaggaaggcgaggag

SEQ ID NO: 545979 - RNA, 20 nt, Human
ugacgaggagggaggaguag

SEQ ID NO: 545980 - RNA, 26 nt, Human
ugacgaggagggaggaguaggaugga

SEQ ID NO: 545981 - RNA, 21 nt, Human
ugcaaagaaacaagagaacac

SEQ ID NO: 545982 - RNA, 21 nt, Human
uggcgaggaggaagggggagg

SEQ ID NO: 545983 - RNA, 25 nt, Human
uuuuuuuuuuuuuuuugcccuccaa

SEQ ID NO: 545984 - RNA, 18 nt, Human
uuuuuuuuuuuuuuuuug

SEQ ID NO: 545985 - RNA, 22 nt, Human
uuuuuuuuuuuuuuuuugcccu

SEQ ID NO: 545986 - RNA, 19 nt, Human
aagacaaggagagccgagc

SEQ ID NO: 545987 - RNA, 19 nt, Human
aaguagguuucgaaagauc

SEQ ID NO: 545988 - RNA, 18 nt, Human
aggagagccgagccggca

SEQ ID NO: 545989 - RNA, 21 nt, Human
aggagagccgagccggcaccc

SEQ ID NO: 545990 - RNA, 23 nt, Human
cacccacccggguccagaagcaa

SEQ ID NO: 545991 - RNA, 24 nt, Human
ccaccgcucuggaagacaaggaga

SEQ ID NO: 545992 - RNA, 19 nt, Human
ccccgcaccugccucgcac

SEQ ID NO: 545993 - RNA, 20 nt, Human
ccccgcaccugccucgcacc

SEQ ID NO: 545994 - RNA, 22 nt, Human
ccccgcaccugccucgcaccca

SEQ ID NO: 545995 - RNA, 21 nt, Human
cccgcaccugccucgcaccca

SEQ ID NO: 545996 - RNA, 19 nt, Human
ccgagcuucuggcgcuggc

SEQ ID NO: 545997 - RNA, 25 nt, Human
ccucgcacccagaucggcgcucucc

SEQ ID NO: 545998 - RNA, 18 nt, Human
cgcucuggaagacaagga

SEQ ID NO: 545999 - RNA, 20 nt, Human
cugugcuuccgggccaccgc

SEQ ID NO: 546000 - RNA, 19 nt, Human
gagccggcacccacccggg

SEQ ID NO: 546001 - RNA, 23 nt, Human
gagccggcacccacccgggucca

SEQ ID NO: 546002 - RNA, 21 nt, Human
gagcuucuggcgcuggcgucu

SEQ ID NO: 546003 - RNA, 24 nt, Human
aaaaauaaaagaaugagggaagaa

SEQ ID NO: 546004 - RNA, 18 nt, Human
aaaugcaacgugaaggca

SEQ ID NO: 546005 - RNA, 24 nt, Human
aacuuggaacuuuuuuucuauuuu

SEQ ID NO: 546006 - RNA, 18 nt, Human
acccugggcccgcgggcc

SEQ ID NO: 546007 - RNA, 25 nt, Human
acccugggcccgcgggccgcccggc

SEQ ID NO: 546008 - RNA, 23 nt, Human
aggaaacaacccacauucuaggc

SEQ ID NO: 546009 - RNA, 20 nt, Human
cacauucuaggcccagcucu

SEQ ID NO: 546010 - RNA, 19 nt, Human
cagaugaccuacaaaaauc

SEQ ID NO: 546011 - RNA, 25 nt, Human
cagcuacaaagacuagacaggccag

SEQ ID NO: 546012 - RNA, 21 nt, Human
caggccaggaaacaacccaca

SEQ ID NO: 546013 - RNA, 23 nt, Human
caggccaggaaacaacccacauu

SEQ ID NO: 546014 - RNA, 23 nt, Human
caugaacuugcagaugaccuaca

SEQ ID NO: 546015 - RNA, 21 nt, Human
cccugggcccgcgggccgccc

SEQ ID NO: 546016 - RNA, 20 nt, Human
cgcgggccgcccggcugccg

SEQ ID NO: 546017 - RNA, 18 nt, Human
cuaggcccagcucuucca

SEQ ID NO: 546018 - RNA, 18 nt, Human
cucccugccugcugcugu

SEQ ID NO: 546019 - RNA, 19 nt, Human
gagauaaggaacauuuuau

SEQ ID NO: 546020 - RNA, 23 nt, Human
gcugccgggaccccgggucucca

SEQ ID NO: 546021 - RNA, 22 nt, Human
ggcccagcucuuccaugaacuu

SEQ ID NO: 546022 - RNA, 21 nt, Human
uaaaaaugcaacgugaaggca

SEQ ID NO: 546023 - RNA, 18 nt, Human
uauaaacaaaauugccca

SEQ ID NO: 546024 - RNA, 33 nt, Human
ucacagcuacaaagacuagacaggccaggaaaa

SEQ ID NO: 546025 - RNA, 19 nt, Human
uccaauaaaaaugcaacgu

SEQ ID NO: 546026 - RNA, 20 nt, Human
uccucccugccugcugcugu

SEQ ID NO: 546027 - RNA, 22 nt, Human
ugagggaagaaagaaaaacuug

SEQ ID NO: 546028 - RNA, 22 nt, Human
ugccgggaccccgggucuccac

SEQ ID NO: 546029 - RNA, 23 nt, Human
ugccugcugcugugugcccuucc

SEQ ID NO: 546030 - RNA, 19 nt, Human
ugcuugccguucucugugu

SEQ ID NO: 546031 - RNA, 26 nt, Human
ugucucacagcuacaaagacuagaca

SEQ ID NO: 546032 - RNA, 23 nt, Human
uuacugaacgagcgagguuuucc

SEQ ID NO: 546033 - RNA, 27 nt, Human
uuuauuugccaccuccgccuccucccc

SEQ ID NO: 546034 - RNA, 23 nt, Human
aaauugcugugaccccaaaucuc

SEQ ID NO: 546035 - RNA, 23 nt, Human
aacaccauauccuauuagaaaug

SEQ ID NO: 546036 - RNA, 19 nt, Human
aaccaggaggagaguagcc

SEQ ID NO: 546037 - RNA, 20 nt, Human
aacuaggcacagcucugggc

SEQ ID NO: 546038 - RNA, 24 nt, Human
aacucacagacaagugugccccuc

SEQ ID NO: 546039 - RNA, 22 nt, Human
acaagaacgucaguucucuccu

SEQ ID NO: 546040 - RNA, 22 nt, Human
acacagccacaggacuggaacu

SEQ ID NO: 546041 - RNA, 23 nt, Human
acccaaccacagagacaaagaaa

SEQ ID NO: 546042 - RNA, 19 nt, Human
acuggagaggguuuugaaa

SEQ ID NO: 546043 - RNA, 22 nt, Human
agaaccacauucaugcuguuga

SEQ ID NO: 546044 - RNA, 22 nt, Human
agacaaagaaacuaagaccugg

SEQ ID NO: 546045 - RNA, 21 nt, Human
agaggguuuugaaauugcucc

SEQ ID NO: 546046 - RNA, 18 nt, Human
agccacaggacuggaacu

SEQ ID NO: 546047 - RNA, 21 nt, Human
aggaaagagaaaauaaaaugu

SEQ ID NO: 546048 - RNA, 20 nt, Human
agucaguuucuaugaacuag

SEQ ID NO: 546049 - RNA, 24 nt, Human
aucccucaccuucaccugacacaa

SEQ ID NO: 546050 - RNA, 19 nt, Human
aucucacaaugcuccacac

SEQ ID NO: 546051 - RNA, 23 nt, Human
augaacuaggcacagcucugggc

SEQ ID NO: 546052 - RNA, 23 nt, Human
auuacuacaauuugaugauaggu

SEQ ID NO: 546053 - RNA, 23 nt, Human
caacaaaccucccucagcaaugu

SEQ ID NO: 546054 - RNA, 20 nt, Human
caacagagagacuggggcaa

SEQ ID NO: 546055 - RNA, 19 nt, Human
caagaacauggauguggca

SEQ ID NO: 546056 - RNA, 23 nt, Human
caaggaaagagaaaauaaaaugu

SEQ ID NO: 546057 - RNA, 18 nt, Human
caagggagacccaaccgu

SEQ ID NO: 546058 - RNA, 24 nt, Human
cacacagccacaggacuggaacuc

SEQ ID NO: 546059 - RNA, 18 nt, Human
cacaggacuggaacucag

SEQ ID NO: 546060 - RNA, 20 nt, Human
cacagugucuguucaucugu

SEQ ID NO: 546061 - RNA, 24 nt, Human
cacccccaagucaagggacagcuc

SEQ ID NO: 546062 - RNA, 20 nt, Human
cacuguggaagauacaaggg

SEQ ID NO: 546063 - RNA, 24 nt, Human
caugaaagggcaaaaaagaugacc

SEQ ID NO: 546064 - RNA, 22 nt, Human
ccaauucaacaaaccucccuca

SEQ ID NO: 546065 - RNA, 22 nt, Human
ccacagagacaaagaaacuaag

SEQ ID NO: 546066 - RNA, 23 nt, Human
cccaagaacauggauguggcaug

SEQ ID NO: 546067 - RNA, 18 nt, Human
cccacccaaccacagaga

SEQ ID NO: 546068 - RNA, 19 nt, Human
ccccucugacugcaugguc

SEQ ID NO: 546069 - RNA, 23 nt, Human
ccucuguauaaagcugccccucu

SEQ ID NO: 546070 - RNA, 22 nt, Human
ccugcagaagugggucaucagu

SEQ ID NO: 546071 - RNA, 23 nt, Human
cuaagccaguuuugaaaaguaaa

SEQ ID NO: 546072 - RNA, 27 nt, Human
cucacaaugcuccacacuuuggggcuu

SEQ ID NO: 546073 - RNA, 18 nt, Human
cuccaucacucccgaucc

SEQ ID NO: 546074 - RNA, 20 nt, Human
cuccaugaaagggcaaaaaa

SEQ ID NO: 546075 - RNA, 18 nt, Human
cuccugguauaugucugg

SEQ ID NO: 546076 - RNA, 21 nt, Human
cucuguauaaagcugccccuc

SEQ ID NO: 546077 - RNA, 23 nt, Human
cugaccagguccuaauucacauu

SEQ ID NO: 546078 - RNA, 24 nt, Human
cuggaacucagggcuucaaacuca

SEQ ID NO: 546079 - RNA, 21 nt, Human
gaaagaaccaggaggagagua

SEQ ID NO: 546080 - RNA, 18 nt, Human
gacaaaaucauuuacaua

SEQ ID NO: 546081 - RNA, 18 nt, Human
gagaggguuaacauuuca

SEQ ID NO: 546082 - RNA, 20 nt, Human
gagaguagcccaggcuggag

SEQ ID NO: 546083 - RNA, 18 nt, Human
gagagucugaauugucca

SEQ ID NO: 546084 - RNA, 25 nt, Human
gagugaccucuggugcuggugggcc

SEQ ID NO: 546085 - RNA, 19 nt, Human
gcucaccaggaaguuuaag

SEQ ID NO: 546086 - RNA, 19 nt, Human
gcucugggcagcacaaauu

SEQ ID NO: 546087 - RNA, 20 nt, Human
gcugugaccccaaaucucac

SEQ ID NO: 546088 - RNA, 21 nt, Human
ggaagcccuguuggccugaaa

SEQ ID NO: 546089 - RNA, 19 nt, Human
ggauguggagagugaccuc

SEQ ID NO: 546090 - RNA, 18 nt, Human
ggcaaaaaagaugaccca

SEQ ID NO: 546091 - RNA, 24 nt, Human
ggcaaaaaagaugacccaagaaca

SEQ ID NO: 546092 - RNA, 23 nt, Human
ggcagcacaaauuucuacacacu

SEQ ID NO: 546093 - RNA, 23 nt, Human
ggcucaacagagagacuggggca

SEQ ID NO: 546094 - RNA, 21 nt, Human
ggggguccagcagguacagag

SEQ ID NO: 546095 - RNA, 27 nt, Human
guaaaccuuaaaaaccaauucaacaaa

SEQ ID NO: 546096 - RNA, 20 nt, Human
uaagauaucauuuacagcaa

SEQ ID NO: 546097 - RNA, 25 nt, Human
uaagcaaaaccagggagaaaguguu

SEQ ID NO: 546098 - RNA, 25 nt, Human
uaagcagcuguaccuccuguggagc

SEQ ID NO: 546099 - RNA, 23 nt, Human
uaaguggaauuaagcaaaaccag

SEQ ID NO: 546100 - RNA, 19 nt, Human
uacaagggagacccaaccg

SEQ ID NO: 546101 - RNA, 20 nt, Human
uacacacuguggaagauaca

SEQ ID NO: 546102 - RNA, 23 nt, Human
uacauuacuacaauuugaugaua

SEQ ID NO: 546103 - RNA, 19 nt, Human
uaccagacccagggaauag

SEQ ID NO: 546104 - RNA, 26 nt, Human
uagaaaacacaauagaaucaacaggu

SEQ ID NO: 546105 - RNA, 23 nt, Human
uagaaucaacagguaaacuagua

SEQ ID NO: 546106 - RNA, 19 nt, Human
uauagaagaaucaaggucc

SEQ ID NO: 546107 - RNA, 21 nt, Human
uauuagaaauguaauaaaaca

SEQ ID NO: 546108 - RNA, 23 nt, Human
uauuucaaacugaccagguccua

SEQ ID NO: 546109 - RNA, 19 nt, Human
ucaaagucacacagccaca

SEQ ID NO: 546110 - RNA, 19 nt, Human
ucaacagagagacuggggc

SEQ ID NO: 546111 - RNA, 20 nt, Human
ucaccaacaccauauccuag

SEQ ID NO: 546112 - RNA, 18 nt, Human
ucaccaggaaguuuaaga

SEQ ID NO: 546113 - RNA, 21 nt, Human
ucaguucucuccuauuuacaa

SEQ ID NO: 546114 - RNA, 20 nt, Human
uccaaaggagggugucaacc

SEQ ID NO: 546115 - RNA, 26 nt, Human
uccacauacaucacuguacagaacca

SEQ ID NO: 546116 - RNA, 20 nt, Human
uccagcagguacagagaagg

SEQ ID NO: 546117 - RNA, 23 nt, Human
uccagcagguacagagaaggugc

SEQ ID NO: 546118 - RNA, 22 nt, Human
ucccucagcaaugugcuuccag

SEQ ID NO: 546119 - RNA, 24 nt, Human
uccucuguauaaagcugccccucu

SEQ ID NO: 546120 - RNA, 18 nt, Human
ucuccacauacaucacug

SEQ ID NO: 546121 - RNA, 20 nt, Human
ucuccacauacaucacugua

SEQ ID NO: 546122 - RNA, 18 nt, Human
ucugaauuguccacuaga

SEQ ID NO: 546123 - RNA, 20 nt, Human
ugaaaaguaaaagaggacau

SEQ ID NO: 546124 - RNA, 23 nt, Human
ugaacuagcagaaaaauucagca

SEQ ID NO: 546125 - RNA, 19 nt, Human
ugaauaccuaagccaguuu

SEQ ID NO: 546126 - RNA, 22 nt, Human
ugacugaugcauaaguggaauu

SEQ ID NO: 546127 - RNA, 23 nt, Human
ugaggagagauguguaagcagcu

SEQ ID NO: 546128 - RNA, 20 nt, Human
ugauguagggugguaccuuu

SEQ ID NO: 546129 - RNA, 23 nt, Human
ugcaucuccaucacucccgaucc

SEQ ID NO: 546130 - RNA, 21 nt, Human
ugccccucugacugcaugguc

SEQ ID NO: 546131 - RNA, 21 nt, Human
ugcugugaccccaaaucucac

SEQ ID NO: 546132 - RNA, 18 nt, Human
ugggaaaacaucacaaga

SEQ ID NO: 546133 - RNA, 21 nt, Human
ugggaaaacaucacaagaacg

SEQ ID NO: 546134 - RNA, 19 nt, Human
ugggaggcggggaugugga

SEQ ID NO: 546135 - RNA, 18 nt, Human
ugggcagaacaucuucag

SEQ ID NO: 546136 - RNA, 23 nt, Human
uggugggcagaacaucuucaguu

SEQ ID NO: 546137 - RNA, 19 nt, Human
uguagggugguaccuuuaa

SEQ ID NO: 546138 - RNA, 22 nt, Human
uguaugcaucuccaucacuccc

SEQ ID NO: 546139 - RNA, 18 nt, Human
uguccuaccuaccagacc

SEQ ID NO: 546140 - RNA, 22 nt, Human
uguggaagauacaagggagacc

SEQ ID NO: 546141 - RNA, 20 nt, Human
uguggcauguuuaugcaugg

SEQ ID NO: 546142 - RNA, 25 nt, Human
uguugaaaugacugaugcauaagug

SEQ ID NO: 546143 - RNA, 27 nt, Human
uuaaaacucugaagauaaguccagugg

SEQ ID NO: 546144 - RNA, 23 nt, Human
uuaccucuaagucgagagcuccu

SEQ ID NO: 546145 - RNA, 18 nt, Human
uuccaagaaagaagagug

SEQ ID NO: 546146 - RNA, 24 nt, Human
acaaagaaaaacaaauaguaucca

SEQ ID NO: 546147 - RNA, 25 nt, Human
caaagaaaaacaaauaguauccaaa

SEQ ID NO: 546148 - RNA, 23 nt, Human
caccacuacacccccaaaagagc

SEQ ID NO: 546149 - RNA, 19 nt, Human
ccacuacacccccaaaagg

SEQ ID NO: 546150 - RNA, 20 nt, Human
ccaucagaguaaguaguuuu

SEQ ID NO: 546151 - RNA, 21 nt, Human
gcagacccaaggguguccaac

SEQ ID NO: 546152 - RNA, 23 nt, Human
ggggcaccacuacacccccaaaa

SEQ ID NO: 546153 - RNA, 21 nt, Human
uaagcaaacacacauacaaca

SEQ ID NO: 546154 - RNA, 22 nt, Human
uacaaagaaaaacaaauaguau

SEQ ID NO: 546155 - RNA, 25 nt, Human
uacacccccaaaagagcuccuagug

SEQ ID NO: 546156 - RNA, 21 nt, Human
uaucugaaaggcuucauagaa

SEQ ID NO: 546157 - RNA, 23 nt, Human
uaucugaaaggcuucauagaaaa

SEQ ID NO: 546158 - RNA, 19 nt, Human
uccuugcagacccaagggu

SEQ ID NO: 546159 - RNA, 22 nt, Human
ugacaucuuuuguccuuguccc

SEQ ID NO: 546160 - RNA, 22 nt, Human
uggcuccuugcagacccaaggg

SEQ ID NO: 546161 - RNA, 23 nt, Human
uggcuuugaugcaggggguagcu

SEQ ID NO: 546162 - RNA, 21 nt, Human
uucaacuuuuuuuuccuacaa

SEQ ID NO: 546163 - RNA, 18 nt, Human
uucauuuuuuaaagagau

SEQ ID NO: 546164 - RNA, 18 nt, Human
uuuuaagaaagucuuccg

SEQ ID NO: 546165 - RNA, 28 nt, Human
acaccaacagaagggaucaaaguguguc

SEQ ID NO: 546166 - RNA, 26 nt, Human
agaaacgggguaucccgagacccaag

SEQ ID NO: 546167 - RNA, 20 nt, Human
auaaaaugaaggcaauuuga

SEQ ID NO: 546168 - RNA, 22 nt, Human
caggaagaaacgggguaucccg

SEQ ID NO: 546169 - RNA, 24 nt, Human
caugacaccaacagaagggaucaa

SEQ ID NO: 546170 - RNA, 21 nt, Human
ccgcacgcacgucccacaccu

SEQ ID NO: 546171 - RNA, 20 nt, Human
ccuacaggaagaaacggggu

SEQ ID NO: 546172 - RNA, 21 nt, Human
cuacucccacgccguggcucc

SEQ ID NO: 546173 - RNA, 19 nt, Human
cucccacgccguggcucca

SEQ ID NO: 546174 - RNA, 18 nt, Human
cugcugccugccuucagc

SEQ ID NO: 546175 - RNA, 24 nt, Human
ucaauagauagcaauggaaaguaa

SEQ ID NO: 546176 - RNA, 24 nt, Human
ucuagacuauuuaaccaaagguau

SEQ ID NO: 546177 - RNA, 19 nt, Human
aacaauacaaaaacaaagu

SEQ ID NO: 546178 - RNA, 26 nt, Human
aauacaaaaacaaaguguagacugga

SEQ ID NO: 546179 - RNA, 19 nt, Human
aauuugaaacagguuguuc

SEQ ID NO: 546180 - RNA, 23 nt, Human
acaauacaaaaacaaaguguaga

SEQ ID NO: 546181 - RNA, 21 nt, Human
aggagcaacaauacaaaaaca

SEQ ID NO: 546182 - RNA, 22 nt, Human
auugaacaacaauacaacgaaa

SEQ ID NO: 546183 - RNA, 27 nt, Human
caacaauacaacgaaaacuggucgccu

SEQ ID NO: 546184 - RNA, 21 nt, Human
cggcccaggaccaugcggcag

SEQ ID NO: 546185 - RNA, 21 nt, Human
ggaccaugcggcagaggaaag

SEQ ID NO: 546186 - RNA, 24 nt, Human
ggcccaggaccaugcggcagagga

SEQ ID NO: 546187 - RNA, 21 nt, Human
uccgacgccaacggcccagga

SEQ ID NO: 546188 - RNA, 18 nt, Human
uuuuuuuuuuuuuuuuug

SEQ ID NO: 546189 - RNA, 19 nt, Human
uuuuuuuuuuuuuuuuugu

SEQ ID NO: 546190 - RNA, 19 nt, Human
aaccaguacccgcuacaca

SEQ ID NO: 546191 - RNA, 18 nt, Human
aacuggccuccccaccca

SEQ ID NO: 546192 - RNA, 24 nt, Human
accacacccucccacccucuuuuc

SEQ ID NO: 546193 - RNA, 20 nt, Human
acccucccacccucuuuucu

SEQ ID NO: 546194 - RNA, 23 nt, Human
acucuguucuuccuuuucccugc

SEQ ID NO: 546195 - RNA, 24 nt, Human
acucuguucuuccuuuucccugcu

SEQ ID NO: 546196 - RNA, 20 nt, Human
agaggcccuugggcuuccac

SEQ ID NO: 546197 - RNA, 18 nt, Human
aggaggcuuucagaggcc

SEQ ID NO: 546198 - RNA, 23 nt, Human
aggaggcuuucagaggcccuugg

SEQ ID NO: 546199 - RNA, 19 nt, Human
aggcaggggcacccccaaa

SEQ ID NO: 546200 - RNA, 19 nt, Human
aggccugugggucacagug

SEQ ID NO: 546201 - RNA, 21 nt, Human
agugaauggugggggcucugc

SEQ ID NO: 546202 - RNA, 21 nt, Human
aucacggccgccgcgcagcac

SEQ ID NO: 546203 - RNA, 25 nt, Human
caacccaagagcaaacagcuuuguc

SEQ ID NO: 546204 - RNA, 18 nt, Human
caauguggugauugagga

SEQ ID NO: 546205 - RNA, 24 nt, Human
cacacccucccacccucuuuucug

SEQ ID NO: 546206 - RNA, 21 nt, Human
caccacccaggccuguggguc

SEQ ID NO: 546207 - RNA, 25 nt, Human
cacggaaagaugucacagugaaugg

SEQ ID NO: 546208 - RNA, 21 nt, Human
cagcccagggaaacagugggc

SEQ ID NO: 546209 - RNA, 20 nt, Human
cagcugggcauuucuccccu

SEQ ID NO: 546210 - RNA, 19 nt, Human
caggaggcuuucagaggcc

SEQ ID NO: 546211 - RNA, 24 nt, Human
cagggagaaucaaucauuugcuag

SEQ ID NO: 546212 - RNA, 22 nt, Human
caguacccgcuacacauaugca

SEQ ID NO: 546213 - RNA, 19 nt, Human
ccaacccaagagcaaacag

SEQ ID NO: 546214 - RNA, 19 nt, Human
ccaacccaagagcaaacag

SEQ ID NO: 546215 - RNA, 24 nt, Human
ccccacccagaccucuuccaggca

SEQ ID NO: 546216 - RNA, 20 nt, Human
cccccgcucggccgcggccg

SEQ ID NO: 546217 - RNA, 18 nt, Human
cccuaagacacaggaacc

SEQ ID NO: 546218 - RNA, 20 nt, Human
cccucccacccucuuuucug

SEQ ID NO: 546219 - RNA, 24 nt, Human
ccgccgucaccagccaucacgggg

SEQ ID NO: 546220 - RNA, 21 nt, Human
ccgcucccgggccgcggcccc

SEQ ID NO: 546221 - RNA, 23 nt, Human
ccgcucccgggccgcggccccgg

SEQ ID NO: 546222 - RNA, 19 nt, Human
ccucuuccaggcaggguga

SEQ ID NO: 546223 - RNA, 18 nt, Human
ccuggggacagaagaggc

SEQ ID NO: 546224 - RNA, 21 nt, Human
cggcaggccccauggccgcca

SEQ ID NO: 546225 - RNA, 24 nt, Human
cucccaacccaagagcaaacagcu

SEQ ID NO: 546226 - RNA, 27 nt, Human
cucccaacccaagagcaaacagcuuug

SEQ ID NO: 546227 - RNA, 18 nt, Human
cucccgggccgcggcccc

SEQ ID NO: 546228 - RNA, 19 nt, Human
cucccgggccgcggccccg

SEQ ID NO: 546229 - RNA, 20 nt, Human
cugcuuuccugcuuugucca

SEQ ID NO: 546230 - RNA, 19 nt, Human
cuuucagaggcccuugggc

SEQ ID NO: 546231 - RNA, 20 nt, Human
cuuuccugcuuuguccaggg

SEQ ID NO: 546232 - RNA, 20 nt, Human
gaaacagugggcagcaggag

SEQ ID NO: 546233 - RNA, 21 nt, Human
gaaccaguacccgcuacacau

SEQ ID NO: 546234 - RNA, 22 nt, Human
gcagcacugggagcaguggcac

SEQ ID NO: 546235 - RNA, 24 nt, Human
gccaggcugagugagccuggggac

SEQ ID NO: 546236 - RNA, 19 nt, Human
gccugugggucacaguggg

SEQ ID NO: 546237 - RNA, 20 nt, Human
gcuggaggcaggggcacccc

SEQ ID NO: 546238 - RNA, 23 nt, Human
ggaaacagugggcagcaggaggc

SEQ ID NO: 546239 - RNA, 18 nt, Human
ggacagaagaggcagacu

SEQ ID NO: 546240 - RNA, 19 nt, Human
ggagcacagggugaggugg

SEQ ID NO: 546241 - RNA, 24 nt, Human
ggccaagaccacacccucccaccc

SEQ ID NO: 546242 - RNA, 19 nt, Human
ggcugagugagccugggga

SEQ ID NO: 546243 - RNA, 20 nt, Human
guacucaugucaccuguggg

SEQ ID NO: 546244 - RNA, 24 nt, Human
gugggcagcaggaggcuuucagag

SEQ ID NO: 546245 - RNA, 22 nt, Human
uaaaaauaaacucuguucuucc

SEQ ID NO: 546246 - RNA, 25 nt, Human
uacaccacccaggccugugggucaa

SEQ ID NO: 546247 - RNA, 23 nt, Human
ucaugucaccugugggggggagg

SEQ ID NO: 546248 - RNA, 21 nt, Human
uccccacccagaccucuucca

SEQ ID NO: 546249 - RNA, 21 nt, Human
uccucccaacccaagagcaaa

SEQ ID NO: 546250 - RNA, 18 nt, Human
ucugcuggaggcaggggc

SEQ ID NO: 546251 - RNA, 18 nt, Human
ucuguucuuccuuuuccc

SEQ ID NO: 546252 - RNA, 22 nt, Human
ugaggagggucuguacucaugu

SEQ ID NO: 546253 - RNA, 22 nt, Human
ugauucagggcucccggcagcu

SEQ ID NO: 546254 - RNA, 24 nt, Human
ugccccaggucuggugacagcugg

SEQ ID NO: 546255 - RNA, 23 nt, Human
ugcccggccccgccgucaccagc

SEQ ID NO: 546256 - RNA, 21 nt, Human
uggagucgggccaggcgguga

SEQ ID NO: 546257 - RNA, 18 nt, Human
ugggagcaguggcacaag

SEQ ID NO: 546258 - RNA, 19 nt, Human
ugggagcaguggcacaagg

SEQ ID NO: 546259 - RNA, 23 nt, Human
ugggagcaguggcacaaggagca

SEQ ID NO: 546260 - RNA, 25 nt, Human
ugggcagcaggaggcuuucagaggc

SEQ ID NO: 546261 - RNA, 21 nt, Human
uggggcaggcacggcaggccc

SEQ ID NO: 546262 - RNA, 25 nt, Human
uguggugauugaggagggucuguac

SEQ ID NO: 546263 - RNA, 21 nt, Human
uugugcccuaagacacaggaa

SEQ ID NO: 546264 - RNA, 21 nt, Human
uuucagaggcccuugggcuuc

SEQ ID NO: 546265 - RNA, 23 nt, Human
uuucagaggcccuugggcuucca

SEQ ID NO: 546266 - RNA, 19 nt, Human
uuugucaggagagcugccc

SEQ ID NO: 546267 - RNA, 24 nt, Human
aaagaaacucagucagagccuggg

SEQ ID NO: 546268 - RNA, 18 nt, Human
aagaaacucagucagagc

SEQ ID NO: 546269 - RNA, 28 nt, Human
aagaaacucagucagagccugggaugau

SEQ ID NO: 546270 - RNA, 21 nt, Human
agaacaucaguaaaacugaaa

SEQ ID NO: 546271 - RNA, 23 nt, Human
ccacccagaacaucaguaaaacu

SEQ ID NO: 546272 - RNA, 19 nt, Human
cuggcucugucccccaccc

SEQ ID NO: 546273 - RNA, 22 nt, Human
gaaacuuucuccauucagucaa

SEQ ID NO: 546274 - RNA, 24 nt, Human
gacguguuaaaaaaaaaaugcugg

SEQ ID NO: 546275 - RNA, 18 nt, Human
ucccccacccagaacauc

SEQ ID NO: 546276 - RNA, 21 nt, Human
ugagauugucacuacagcugc

SEQ ID NO: 546277 - RNA, 18 nt, Human
ugggagauuauuuuuuua

SEQ ID NO: 546278 - RNA, 23 nt, Human
ugggaugaugaagaugaugauga

SEQ ID NO: 546279 - RNA, 19 nt, Human
ugguguugaagcugcucug

SEQ ID NO: 546280 - RNA, 24 nt, Human
uuuuuuuuuuuuuuuuuuucuggg

SEQ ID NO: 546281 - RNA, 21 nt, Human
acuucgaggugcugcgaggga

SEQ ID NO: 546282 - RNA, 18 nt, Human
cauuaggagauacaugaa

SEQ ID NO: 546283 - RNA, 21 nt, Human
uagagcaaaucagaaaccaag

SEQ ID NO: 546284 - RNA, 24 nt, Human
ugaaauagagcaaaucagaaacca

SEQ ID NO: 546285 - RNA, 28 nt, Human
ugaaauagagcaaaucagaaaccaagua

SEQ ID NO: 546286 - RNA, 19 nt, Human
cagcaggaaugggcugggg

SEQ ID NO: 546287 - RNA, 24 nt, Human
gaacuggcggccaaggggaaccgg

SEQ ID NO: 546288 - RNA, 18 nt, Human
gaggagaacggaacuggc

SEQ ID NO: 546289 - RNA, 24 nt, Human
gcgcacugauuucgaggcuuugug

SEQ ID NO: 546290 - RNA, 23 nt, Human
gguuuuguuuguuugacagcagg

SEQ ID NO: 546291 - RNA, 22 nt, Human
ucccccgcaagcuggaccccuu

SEQ ID NO: 546292 - RNA, 20 nt, Human
uccguucggcccgugaggag

SEQ ID NO: 546293 - RNA, 24 nt, Human
aaacaaauacauucaaaaaucaag

SEQ ID NO: 546294 - RNA, 18 nt, Human
aaagagacgcuuucacau

SEQ ID NO: 546295 - RNA, 24 nt, Human
aaaugauccacaaaagucagaaac

SEQ ID NO: 546296 - RNA, 24 nt, Human
aacaaauacauucaaaaaggguuc

SEQ ID NO: 546297 - RNA, 27 nt, Human
aagaaaucaaagugacuucagugggca

SEQ ID NO: 546298 - RNA, 22 nt, Human
aagcuccagacaaagagacgcu

SEQ ID NO: 546299 - RNA, 25 nt, Human
aauuacuaucuaaugaauagcugga

SEQ ID NO: 546300 - RNA, 19 nt, Human
accgcagccucgcucaagc

SEQ ID NO: 546301 - RNA, 20 nt, Human
agaaaccuauuaaauacuau

SEQ ID NO: 546302 - RNA, 21 nt, Human
agcagaagugcacacacucac

SEQ ID NO: 546303 - RNA, 20 nt, Human
aggagcuugacaaugcuaga

SEQ ID NO: 546304 - RNA, 20 nt, Human
aggaggggccaaaugaaccc

SEQ ID NO: 546305 - RNA, 20 nt, Human
agugcacacacucacuuggg

SEQ ID NO: 546306 - RNA, 26 nt, Human
caaccaaauuccaaaaaacggauccc

SEQ ID NO: 546307 - RNA, 18 nt, Human
cacuggcuucaggggugg

SEQ ID NO: 546308 - RNA, 21 nt, Human
ccaacacccgacaccaccagg

SEQ ID NO: 546309 - RNA, 25 nt, Human
ccacaaaagucagaaaccuauuaaa

SEQ ID NO: 546310 - RNA, 19 nt, Human
ccuccaaaccaucuucauc

SEQ ID NO: 546311 - RNA, 18 nt, Human
ccuuaugcagauuucggc

SEQ ID NO: 546312 - RNA, 23 nt, Human
cguacucaacauagccuauuugc

SEQ ID NO: 546313 - RNA, 20 nt, Human
cuaacucuacccaccaacac

SEQ ID NO: 546314 - RNA, 24 nt, Human
cuaggacaccaaggauccuggcua

SEQ ID NO: 546315 - RNA, 20 nt, Human
cucggaaaccgcagccucgc

SEQ ID NO: 546316 - RNA, 25 nt, Human
cugcugcccccgacugacugcguag

SEQ ID NO: 546317 - RNA, 26 nt, Human
cuucgcaucuugcugcugcccccgac

SEQ ID NO: 546318 - RNA, 19 nt, Human
cuuggcuggagagggccuc

SEQ ID NO: 546319 - RNA, 20 nt, Human
gaaaacaucuccucaaagcu

SEQ ID NO: 546320 - RNA, 21 nt, Human
gaacccuuuaggagcuugaca

SEQ ID NO: 546321 - RNA, 22 nt, Human
gauccacaaaagucagaaaccu

SEQ ID NO: 546322 - RNA, 20 nt, Human
ggacugaaaaguuucuggcg

SEQ ID NO: 546323 - RNA, 18 nt, Human
ggagggugggguguggga

SEQ ID NO: 546324 - RNA, 21 nt, Human
ggccaaaugaacccuuuagga

SEQ ID NO: 546325 - RNA, 18 nt, Human
ggccucggaaaccgcagc

SEQ ID NO: 546326 - RNA, 20 nt, Human
uaaacaucaacaaaagugcc

SEQ ID NO: 546327 - RNA, 21 nt, Human
uaaacaucaacaaaagugcca

SEQ ID NO: 546328 - RNA, 21 nt, Human
uaaaguaaugcuuuuaagggc

SEQ ID NO: 546329 - RNA, 20 nt, Human
uaacacauuucauugaaaaa

SEQ ID NO: 546330 - RNA, 21 nt, Human
uaacacggguuagaaaaaucc

SEQ ID NO: 546331 - RNA, 21 nt, Human
ucaacaaaagugccaaagaca

SEQ ID NO: 546332 - RNA, 20 nt, Human
ucacuggcuucagggguggu

SEQ ID NO: 546333 - RNA, 22 nt, Human
uccacaaaagucagaaaccuau

SEQ ID NO: 546334 - RNA, 24 nt, Human
uccagacaaagagacgcuuucaca

SEQ ID NO: 546335 - RNA, 20 nt, Human
uccaggccgggaccugaucu

SEQ ID NO: 546336 - RNA, 19 nt, Human
ucccccuuccucccucugg

SEQ ID NO: 546337 - RNA, 19 nt, Human
ucccuaaagaagcagaagu

SEQ ID NO: 546338 - RNA, 23 nt, Human
ucccucuggcuugcagcagcucc

SEQ ID NO: 546339 - RNA, 24 nt, Human
ucccucuggcuugcagcagcuccc

SEQ ID NO: 546340 - RNA, 21 nt, Human
uccgguggguggacagcuucc

SEQ ID NO: 546341 - RNA, 24 nt, Human
ucuacccaccaacacccgacacca

SEQ ID NO: 546342 - RNA, 23 nt, Human
ucucccuugguuugcaaaaguug

SEQ ID NO: 546343 - RNA, 22 nt, Human
ucuuugaggaggggccaaauga

SEQ ID NO: 546344 - RNA, 24 nt, Human
ugaaacaaauacauucaaaaauca

SEQ ID NO: 546345 - RNA, 31 nt, Human
ugaaauaaacaucaacaaaagugccaaagag

SEQ ID NO: 546346 - RNA, 25 nt, Human
ugaaucacacaacauucugaaauaa

SEQ ID NO: 546347 - RNA, 19 nt, Human
ugacaaugcuagaccuuug

SEQ ID NO: 546348 - RNA, 19 nt, Human
ugacugcguagugcucucg

SEQ ID NO: 546349 - RNA, 19 nt, Human
ugacuucaaccaaauucca

SEQ ID NO: 546350 - RNA, 21 nt, Human
ugaggagggguaugaagggaa

SEQ ID NO: 546351 - RNA, 23 nt, Human
ugaggagggguaugaagggaagg

SEQ ID NO: 546352 - RNA, 25 nt, Human
ugaggagggguaugaagggaaggga

SEQ ID NO: 546353 - RNA, 18 nt, Human
ugauccacaaaagucaga

SEQ ID NO: 546354 - RNA, 22 nt, Human
ugauccacaaaagucagaaacc

SEQ ID NO: 546355 - RNA, 23 nt, Human
ugauccacaaaagucagaaaccu

SEQ ID NO: 546356 - RNA, 23 nt, Human
ugcaaaaugauccacaaaaguca

SEQ ID NO: 546357 - RNA, 21 nt, Human
ugcacugaaaaccauacuaaa

SEQ ID NO: 546358 - RNA, 18 nt, Human
uggcagcagucgaagccc

SEQ ID NO: 546359 - RNA, 24 nt, Human
ugguaacacauuucauugaaaaga

SEQ ID NO: 546360 - RNA, 26 nt, Human
uguuuuacaccuccaaaccaucuuca

SEQ ID NO: 546361 - RNA, 21 nt, Human
uucauugaaaagauguuuuuu

SEQ ID NO: 546362 - RNA, 19 nt, Human
uuccaaaaaacggaucccg

SEQ ID NO: 546363 - RNA, 19 nt, Human
uuccgguggguggacagcu

SEQ ID NO: 546364 - RNA, 21 nt, Human
aaaaauaaaaaagggaagccg

SEQ ID NO: 546365 - RNA, 25 nt, Human
aaaauuagaaacaaccuaaauaguu

SEQ ID NO: 546366 - RNA, 27 nt, Human
aaaccacacaaaaucuuuuaaaagucu

SEQ ID NO: 546367 - RNA, 23 nt, Human
aacgcacggccacccacccgcgc

SEQ ID NO: 546368 - RNA, 23 nt, Human
aacgcacggccacccacccgcgc

SEQ ID NO: 546369 - RNA, 20 nt, Human
aaugaaaauuagaaacaacc

SEQ ID NO: 546370 - RNA, 23 nt, Human
acacaaaaucuuuuaaaagucua

SEQ ID NO: 546371 - RNA, 22 nt, Human
accacaaagcccguccgcggcg

SEQ ID NO: 546372 - RNA, 18 nt, Human
acccacacucucacuggc

SEQ ID NO: 546373 - RNA, 18 nt, Human
acccacacucucacuggc

SEQ ID NO: 546374 - RNA, 24 nt, Human
acuggcacucgcacgcgcgccccc

SEQ ID NO: 546375 - RNA, 21 nt, Human
agcccguccgcggcgggacag

SEQ ID NO: 546376 - RNA, 22 nt, Human
aggcauacauggggguugcuuu

SEQ ID NO: 546377 - RNA, 21 nt, Human
agggauggggaucaagaugag

SEQ ID NO: 546378 - RNA, 20 nt, Human
auaauuccaacuuacaguuu

SEQ ID NO: 546379 - RNA, 21 nt, Human
auacauuucugcauuuuucaa

SEQ ID NO: 546380 - RNA, 18 nt, Human
auggaauauaauauagcc

SEQ ID NO: 546381 - RNA, 28 nt, Human
caaaccacacaaaaucuuuuaaaagucu

SEQ ID NO: 546382 - RNA, 18 nt, Human
caagaacgcacggccacc

SEQ ID NO: 546383 - RNA, 18 nt, Human
caagaacgcacggccacc

SEQ ID NO: 546384 - RNA, 21 nt, Human
cacaaaaucuuuuaaaagucu

SEQ ID NO: 546385 - RNA, 21 nt, Human
cacaaagcccguccgcggcgg

SEQ ID NO: 546386 - RNA, 22 nt, Human
cacccgcgccgcggcccacagc

SEQ ID NO: 546387 - RNA, 22 nt, Human
cacccgcgccgcggcccacagc

SEQ ID NO: 546388 - RNA, 22 nt, Human
cacgccccagaacuacgggaga

SEQ ID NO: 546389 - RNA, 22 nt, Human
cacgccccagaacuacgggaga

SEQ ID NO: 546390 - RNA, 18 nt, Human
cagcgcgcacccacacuc

SEQ ID NO: 546391 - RNA, 18 nt, Human
cagcgcgcacccacacuc

SEQ ID NO: 546392 - RNA, 26 nt, Human
caguccugagaagucagguacucaga

SEQ ID NO: 546393 - RNA, 29 nt, Human
cauacugcauacauacauuacaugcaugg

SEQ ID NO: 546394 - RNA, 22 nt, Human
caugcaugcuuucuaaacaaaa

SEQ ID NO: 546395 - RNA, 18 nt, Human
ccaaccacaaagcccguc

SEQ ID NO: 546396 - RNA, 18 nt, Human
cccacccgcgccgcggcc

SEQ ID NO: 546397 - RNA, 18 nt, Human
cccacccgcgccgcggcc

SEQ ID NO: 546398 - RNA, 18 nt, Human
cccacccgcgccgcggcc

SEQ ID NO: 546399 - RNA, 18 nt, Human
cccacccgcgccgcggcc

SEQ ID NO: 546400 - RNA, 20 nt, Human
cccacccgcgccgcggccca

SEQ ID NO: 546401 - RNA, 20 nt, Human
cccacccgcgccgcggccca

SEQ ID NO: 546402 - RNA, 19 nt, Human
cccccaaccacaaagcccg

SEQ ID NO: 546403 - RNA, 19 nt, Human
cccgcgccgcggcccacag

SEQ ID NO: 546404 - RNA, 19 nt, Human
cccgcgccgcggcccacag

SEQ ID NO: 546405 - RNA, 26 nt, Human
ccgggcggcugcaggcaacuucccuc

SEQ ID NO: 546406 - RNA, 25 nt, Human
ccgggcggcugcggcaacuucccuc

SEQ ID NO: 546407 - RNA, 24 nt, Human
ccuaaacaaauacuggcuuugaag

SEQ ID NO: 546408 - RNA, 26 nt, Human
ccuccugcaggccggcucgcaagaac

SEQ ID NO: 546409 - RNA, 26 nt, Human
ccuccugcaggccggcucgcaagaac

SEQ ID NO: 546410 - RNA, 20 nt, Human
ccugagaagucagguacuca

SEQ ID NO: 546411 - RNA, 20 nt, Human
cgcacgcgcgcccccaacca

SEQ ID NO: 546412 - RNA, 21 nt, Human
cgcccccaaccacaaagcccg

SEQ ID NO: 546413 - RNA, 24 nt, Human
cgcccccaaccacaaagcccgucc

SEQ ID NO: 546414 - RNA, 26 nt, Human
cgcccccaaccacaaagcccguccgc

SEQ ID NO: 546415 - RNA, 20 nt, Human
cgcggcccacagcgcgcacc

SEQ ID NO: 546416 - RNA, 20 nt, Human
cgcggcccacagcgcgcacc

SEQ ID NO: 546417 - RNA, 19 nt, Human
cgcgggacaggagggccgg

SEQ ID NO: 546418 - RNA, 19 nt, Human
cgcgggacaggagggccgg

SEQ ID NO: 546419 - RNA, 19 nt, Human
cggcccgggcggcugcagg

SEQ ID NO: 546420 - RNA, 21 nt, Human
cggcccgggcggcugcggcaa

SEQ ID NO: 546421 - RNA, 18 nt, Human
cuaaauggacacuccaga

SEQ ID NO: 546422 - RNA, 21 nt, Human
cuccaagagaggacggcuggu

SEQ ID NO: 546423 - RNA, 20 nt, Human
cucgcacgcgcgcccccaaa

SEQ ID NO: 546424 - RNA, 22 nt, Human
gauauuaucaguaaucauuuuu

SEQ ID NO: 546425 - RNA, 21 nt, Human
gauggggagcuucauaaauca

SEQ ID NO: 546426 - RNA, 20 nt, Human
gcaagaacgcacggccaccc

SEQ ID NO: 546427 - RNA, 20 nt, Human
gcaagaacgcacggccaccc

SEQ ID NO: 546428 - RNA, 23 nt, Human
gcacccacacucucacuggcacu

SEQ ID NO: 546429 - RNA, 23 nt, Human
gcacccacacucucacuggcacu

SEQ ID NO: 546430 - RNA, 18 nt, Human
gccggcggcccgggcggc

SEQ ID NO: 546431 - RNA, 21 nt, Human
gcgcgcccccaaccacaaagc

SEQ ID NO: 546432 - RNA, 20 nt, Human
ggaggccaggggagccucgc

SEQ ID NO: 546433 - RNA, 20 nt, Human
ggaggccaggggagccucgc

SEQ ID NO: 546434 - RNA, 19 nt, Human
ggcauacugcauacauaca

SEQ ID NO: 546435 - RNA, 19 nt, Human
ggcccgggcggcugcggca

SEQ ID NO: 546436 - RNA, 20 nt, Human
gggauggggaucaagaugag

SEQ ID NO: 546437 - RNA, 20 nt, Human
gggccggcggcccgggcggc

SEQ ID NO: 546438 - RNA, 22 nt, Human
gguggugaacacgccccagaac

SEQ ID NO: 546439 - RNA, 22 nt, Human
gguggugaacacgccccagaac

SEQ ID NO: 546440 - RNA, 24 nt, Human
uaaacaaauacuggcuuugaaguc

SEQ ID NO: 546441 - RNA, 23 nt, Human
uaaacaguuaauauugugauuag

SEQ ID NO: 546442 - RNA, 21 nt, Human
uaaaucagacguccaccuggc

SEQ ID NO: 546443 - RNA, 21 nt, Human
uacaugcaugcuuucuaaaca

SEQ ID NO: 546444 - RNA, 24 nt, Human
uacgggagacaaauuuucuuguuu

SEQ ID NO: 546445 - RNA, 24 nt, Human
uacgggagacaaauuuucuuguuu

SEQ ID NO: 546446 - RNA, 27 nt, Human
uagccagaauuuauucugacuugcacc

SEQ ID NO: 546447 - RNA, 23 nt, Human
uaggagaagcuguguaccugaug

SEQ ID NO: 546448 - RNA, 23 nt, Human
uaggagaagcuguguaccuggcg

SEQ ID NO: 546449 - RNA, 19 nt, Human
uagguggugaacacgcccc

SEQ ID NO: 546450 - RNA, 19 nt, Human
uagguggugaacacgcccc

SEQ ID NO: 546451 - RNA, 24 nt, Human
uauacaauacacauauaggcauac

SEQ ID NO: 546452 - RNA, 22 nt, Human
uauaucaagucuuguggggucc

SEQ ID NO: 546453 - RNA, 21 nt, Human
uccgcggcgggacagugugag

SEQ ID NO: 546454 - RNA, 19 nt, Human
ucgcacgcgcgcccccaaa

SEQ ID NO: 546455 - RNA, 25 nt, Human
ucgcacgcgcgcccccaaacacccc

SEQ ID NO: 546456 - RNA, 21 nt, Human
ucuaugacuuuuuuggaauac

SEQ ID NO: 546457 - RNA, 19 nt, Human
ucugugguuguagguggug

SEQ ID NO: 546458 - RNA, 19 nt, Human
ucugugguuguagguggug

SEQ ID NO: 546459 - RNA, 20 nt, Human
ucuuguuugcugaucagauc

SEQ ID NO: 546460 - RNA, 20 nt, Human
ucuuguuugcugaucagauc

SEQ ID NO: 546461 - RNA, 18 nt, Human
ugaccuaaacaaauacug

SEQ ID NO: 546462 - RNA, 20 nt, Human
ugaccuaaacaaauacuggc

SEQ ID NO: 546463 - RNA, 23 nt, Human
ugcauacauacauuacaugcaug

SEQ ID NO: 546464 - RNA, 27 nt, Human
ugcauacauacauuacaugcaugcuuu

SEQ ID NO: 546465 - RNA, 28 nt, Human
ugcauacauacauuacaugcaugcuuuc

SEQ ID NO: 546466 - RNA, 22 nt, Human
uggcaauuuugcaaugaaaaag

SEQ ID NO: 546467 - RNA, 22 nt, Human
uggcacucgcacgcgcgccccc

SEQ ID NO: 546468 - RNA, 21 nt, Human
uggcgcgggacaggagggccg

SEQ ID NO: 546469 - RNA, 21 nt, Human
uggcgcgggacaggagggccg

SEQ ID NO: 546470 - RNA, 19 nt, Human
ugggaacaauauuauagug

SEQ ID NO: 546471 - RNA, 24 nt, Human
uguggcaauuuugcaaugaaaaag

SEQ ID NO: 546472 - RNA, 22 nt, Human
ugugguuguagguggugaacac

SEQ ID NO: 546473 - RNA, 22 nt, Human
ugugguuguagguggugaacac

SEQ ID NO: 546474 - RNA, 23 nt, Human
uuacaguaugacuccaauuaugu

SEQ ID NO: 546475 - RNA, 18 nt, Human
uuaguauccuuuuaaucu

SEQ ID NO: 546476 - RNA, 31 nt, Human
uucuaugacuuuuuuggaauacauaucacuu

SEQ ID NO: 546477 - RNA, 24 nt, Human
uuuacaguaugacuccaauuaugu

SEQ ID NO: 546478 - RNA, 24 nt, Human
uuuauacauuucugcauuuuucaa

SEQ ID NO: 546479 - RNA, 18 nt, Human
uuucagaagggauggggu

SEQ ID NO: 546480 - RNA, 22 nt, Human
uuugaagucuagguucuauuuc

SEQ ID NO: 546481 - RNA, 22 nt, Human
uuuuucaaguuuucuaugauga

SEQ ID NO: 546482 - RNA, 18 nt, Human
accugggugggccgagag

SEQ ID NO: 546483 - RNA, 18 nt, Human
ggugggccgagaggcauc

SEQ ID NO: 546484 - RNA, 21 nt, Human
gugggccgagaggcauccaga

SEQ ID NO: 546485 - RNA, 18 nt, Human
ugggccgagaggcaucca

SEQ ID NO: 546486 - RNA, 24 nt, Human
ugggugggccgagaggcauccaga

SEQ ID NO: 546487 - RNA, 19 nt, Human
cagcgcagggcagcagcag

SEQ ID NO: 546488 - RNA, 20 nt, Human
cucccggacgugaccccggc

SEQ ID NO: 546489 - RNA, 22 nt, Human
ggagggcaguguagccgaggug

SEQ ID NO: 546490 - RNA, 25 nt, Human
gggcaguguagccgaggucgggccc

SEQ ID NO: 546491 - RNA, 18 nt, Human
gugaaauguagccucccc

SEQ ID NO: 546492 - RNA, 23 nt, Human
uaaaaacaccguuaguugccuac

SEQ ID NO: 546493 - RNA, 20 nt, Human
ugaaaaaaaaaaaaaaacca

SEQ ID NO: 546494 - RNA, 21 nt, Human
uucaguuuccuacagauuuug

SEQ ID NO: 546495 - RNA, 22 nt, Human
uucaugaaaaaaaaaaaaaaac

SEQ ID NO: 546496 - RNA, 24 nt, Human
uuucaugaaaaaaaaaaaaaaacc

SEQ ID NO: 546497 - RNA, 22 nt, Human
aaaaaacucugagccacagcua

SEQ ID NO: 546498 - RNA, 26 nt, Human
aaagaaaaaacucugagccacagcua

SEQ ID NO: 546499 - RNA, 21 nt, Human
aacaaaaagaaaaaacucuga

SEQ ID NO: 546500 - RNA, 22 nt, Human
aacaacucuuucuucccugcaa

SEQ ID NO: 546501 - RNA, 18 nt, Human
aacagccacaugugcccc

SEQ ID NO: 546502 - RNA, 21 nt, Human
aacagugggaugcagaaagaa

SEQ ID NO: 546503 - RNA, 20 nt, Human
aaccugacauuccacccagu

SEQ ID NO: 546504 - RNA, 21 nt, Human
aauagugccuaaggcagguac

SEQ ID NO: 546505 - RNA, 19 nt, Human
acacaagcuagaaaaaccc

SEQ ID NO: 546506 - RNA, 18 nt, Human
acaguggagagugucugc

SEQ ID NO: 546507 - RNA, 23 nt, Human
acuucugucacacaagcuagaaa

SEQ ID NO: 546508 - RNA, 21 nt, Human
agaaaaacccuaccucuccca

SEQ ID NO: 546509 - RNA, 18 nt, Human
agaaaauaacauaaauug

SEQ ID NO: 546510 - RNA, 19 nt, Human
agaaagaaugacaacagcc

SEQ ID NO: 546511 - RNA, 19 nt, Human
agugccuaaggcagguacu

SEQ ID NO: 546512 - RNA, 21 nt, Human
caaaaagaaaaaacucugagc

SEQ ID NO: 546513 - RNA, 19 nt, Human
caacaaaaagaaaaaacuc

SEQ ID NO: 546514 - RNA, 21 nt, Human
cacaagcuagaaaaacccuac

SEQ ID NO: 546515 - RNA, 20 nt, Human
caccagcaaccaauucuugc

SEQ ID NO: 546516 - RNA, 20 nt, Human
cacuucucuucccugucuca

SEQ ID NO: 546517 - RNA, 24 nt, Human
cagaaagaaugacaacagccacau

SEQ ID NO: 546518 - RNA, 21 nt, Human
caggcugggcugggcgccggc

SEQ ID NO: 546519 - RNA, 26 nt, Human
ccauacuauguauuccuccucuugga

SEQ ID NO: 546520 - RNA, 24 nt, Human
ccccucgccuccuccccuuucugg

SEQ ID NO: 546521 - RNA, 23 nt, Human
ccccuuucuggaggggcgggggc

SEQ ID NO: 546522 - RNA, 18 nt, Human
ccgcggcgggcuccccuc

SEQ ID NO: 546523 - RNA, 20 nt, Human
ccucgccuccuccccuuucu

SEQ ID NO: 546524 - RNA, 29 nt, Human
ccugaccucagccccacacaccgguuccg

SEQ ID NO: 546525 - RNA, 25 nt, Human
ccugaccucagccccacaccgguuc

SEQ ID NO: 546526 - RNA, 21 nt, Human
cggccuccgcggcgggcuccc

SEQ ID NO: 546527 - RNA, 22 nt, Human
cggcgggcuccccucgccuccu

SEQ ID NO: 546528 - RNA, 23 nt, Human
cuagaaaaacccuaccucuccca

SEQ ID NO: 546529 - RNA, 19 nt, Human
cucggccuccgcggcgggc

SEQ ID NO: 546530 - RNA, 21 nt, Human
cuggggauccugccauggaug

SEQ ID NO: 546531 - RNA, 20 nt, Human
cuuauacuccugaccucagc

SEQ ID NO: 546532 - RNA, 18 nt, Human
cuugcacuucucuucccu

SEQ ID NO: 546533 - RNA, 20 nt, Human
gaaaaacccuaccucuccca

SEQ ID NO: 546534 - RNA, 18 nt, Human
gaacagugggaugcagaa

SEQ ID NO: 546535 - RNA, 20 nt, Human
gcagaaagaaugacaacagc

SEQ ID NO: 546536 - RNA, 21 nt, Human
gcagcagaagaugccaaccaa

SEQ ID NO: 546537 - RNA, 19 nt, Human
ggaacugaaaaacagggua

SEQ ID NO: 546538 - RNA, 22 nt, Human
guagaacccagagaaaauguca

SEQ ID NO: 546539 - RNA, 25 nt, Human
uaaaguagaacccagagaaaauguc

SEQ ID NO: 546540 - RNA, 24 nt, Human
uaggcugguuugugcaagagggcc

SEQ ID NO: 546541 - RNA, 24 nt, Human
uauacuccugaccucagccccaca

SEQ ID NO: 546542 - RNA, 22 nt, Human
uauuccuccucuuggagaauua

SEQ ID NO: 546543 - RNA, 21 nt, Human
ucacacaagcuagaaaaaccc

SEQ ID NO: 546544 - RNA, 22 nt, Human
uccgcggcgggcuccccucgcc

SEQ ID NO: 546545 - RNA, 21 nt, Human
uccuaguucucuagacugccu

SEQ ID NO: 546546 - RNA, 20 nt, Human
ugaaauggugagaacuguaa

SEQ ID NO: 546547 - RNA, 22 nt, Human
ugacaacagccacaugugcccc

SEQ ID NO: 546548 - RNA, 21 nt, Human
ugaccucagccccacacacuc

SEQ ID NO: 546549 - RNA, 25 nt, Human
ugcagaaagaaugacaacagccaca

SEQ ID NO: 546550 - RNA, 21 nt, Human
ugcagcagaagaugccaacca

SEQ ID NO: 546551 - RNA, 18 nt, Human
ugggaggggggaggacca

SEQ ID NO: 546552 - RNA, 18 nt, Human
uguaaagauuuuaaaaaa

SEQ ID NO: 546553 - RNA, 18 nt, Human
ugucugccuuaggcuggu

SEQ ID NO: 546554 - RNA, 18 nt, Human
uuagucccugcagcagaa

SEQ ID NO: 546555 - RNA, 20 nt, Human
uucuugcacuucucuucccu

SEQ ID NO: 546556 - RNA, 19 nt, Human
uuggaggggaacaguggga

SEQ ID NO: 546557 - RNA, 22 nt, Human
uuuaaaaaauaaaguagaaccc

SEQ ID NO: 546558 - RNA, 27 nt, Human
aaaaguccuucauuuccaacccugccu

SEQ ID NO: 546559 - RNA, 18 nt, Human
aacaggcugaagggggag

SEQ ID NO: 546560 - RNA, 23 nt, Human
aacccuggcugcugcagaaacag

SEQ ID NO: 546561 - RNA, 20 nt, Human
aaguggcuguuugcuacaaa

SEQ ID NO: 546562 - RNA, 18 nt, Human
agaaaggugccuaccucc

SEQ ID NO: 546563 - RNA, 20 nt, Human
agaggcaggcccucgcccuu

SEQ ID NO: 546564 - RNA, 20 nt, Human
agaggggaagagagcggggc

SEQ ID NO: 546565 - RNA, 24 nt, Human
agaggggaagagagcggggcuaga

SEQ ID NO: 546566 - RNA, 22 nt, Human
agcacaggccgugacugcuggg

SEQ ID NO: 546567 - RNA, 18 nt, Human
aggaaggaaggcaagggc

SEQ ID NO: 546568 - RNA, 21 nt, Human
aggaaugucugucuggcucug

SEQ ID NO: 546569 - RNA, 22 nt, Human
aggcaagggcuuucuaggccuc

SEQ ID NO: 546570 - RNA, 24 nt, Human
agggcggucaggggaacuucacag

SEQ ID NO: 546571 - RNA, 23 nt, Human
agugggaggaaggaaggcaaggg

SEQ ID NO: 546572 - RNA, 19 nt, Human
aucacaaauuggggcugcg

SEQ ID NO: 546573 - RNA, 25 nt, Human
caaaggacacggcaggucagaggca

SEQ ID NO: 546574 - RNA, 23 nt, Human
caacggaagaguuaaccaggccu

SEQ ID NO: 546575 - RNA, 21 nt, Human
caagcauaaagccccaucuuc

SEQ ID NO: 546576 - RNA, 22 nt, Human
cacagaaaugaaaggccccuga

SEQ ID NO: 546577 - RNA, 20 nt, Human
caccgcagcuuucuuaaugc

SEQ ID NO: 546578 - RNA, 22 nt, Human
caccuaccucucugccccuccc

SEQ ID NO: 546579 - RNA, 22 nt, Human
cagugcggggaggggugucugg

SEQ ID NO: 546580 - RNA, 19 nt, Human
ccacagaaaugaaaggccc

SEQ ID NO: 546581 - RNA, 24 nt, Human
ccacagaaaugaaaggccccugag

SEQ ID NO: 546582 - RNA, 18 nt, Human
ccaggccuggagaaagaa

SEQ ID NO: 546583 - RNA, 20 nt, Human
ccccugagagccauggagga

SEQ ID NO: 546584 - RNA, 22 nt, Human
ccccuggaaaaugggggacaga

SEQ ID NO: 546585 - RNA, 18 nt, Human
cccuuucugcccugccuc

SEQ ID NO: 546586 - RNA, 22 nt, Human
ccgcagcuuucuuaaugcucuu

SEQ ID NO: 546587 - RNA, 21 nt, Human
ccuaccucucugccccuccca

SEQ ID NO: 546588 - RNA, 24 nt, Human
ccuaccucucugccccucccacag

SEQ ID NO: 546589 - RNA, 19 nt, Human
ccucccacagaaaugaaag

SEQ ID NO: 546590 - RNA, 18 nt, Human
ccugcagaggguguaggg

SEQ ID NO: 546591 - RNA, 19 nt, Human
cgcccuuucugcccugccu

SEQ ID NO: 546592 - RNA, 20 nt, Human
cucccacagaaaugaaaggc

SEQ ID NO: 546593 - RNA, 22 nt, Human
cucugcgcugaggcugccauuc

SEQ ID NO: 546594 - RNA, 22 nt, Human
cugagagccauggaggaggugc

SEQ ID NO: 546595 - RNA, 25 nt, Human
cugaguggaguccaggacaaagcac

SEQ ID NO: 546596 - RNA, 18 nt, Human
cugcugcuggaucacaaa

SEQ ID NO: 546597 - RNA, 26 nt, Human
cugcuggaucacaaauuggggcugca

SEQ ID NO: 546598 - RNA, 21 nt, Human
cugggcuggagggccacgcuu

SEQ ID NO: 546599 - RNA, 18 nt, Human
cuucacagugcggggagg

SEQ ID NO: 546600 - RNA, 20 nt, Human
gaaaaugggggacagaaaga

SEQ ID NO: 546601 - RNA, 23 nt, Human
gaacccuggcugcugcagaaaca

SEQ ID NO: 546602 - RNA, 18 nt, Human
gacuuuggaggaagccag

SEQ ID NO: 546603 - RNA, 19 nt, Human
gaggaaggaaggcaagggc

SEQ ID NO: 546604 - RNA, 20 nt, Human
gaggaaggaaggcaagggcu

SEQ ID NO: 546605 - RNA, 19 nt, Human
gcaugggccucugagcugg

SEQ ID NO: 546606 - RNA, 21 nt, Human
gccagagaguagcccuuggcc

SEQ ID NO: 546607 - RNA, 21 nt, Human
gccauggaggaggugcccaga

SEQ ID NO: 546608 - RNA, 20 nt, Human
gccccuagggagagccccug

SEQ ID NO: 546609 - RNA, 20 nt, Human
gcugaagggggagaagcuga

SEQ ID NO: 546610 - RNA, 22 nt, Human
gcuuggagagacugaggcgagc

SEQ ID NO: 546611 - RNA, 18 nt, Human
ggccaggaggcucagccc

SEQ ID NO: 546612 - RNA, 20 nt, Human
gggaagagagcggggcuaga

SEQ ID NO: 546613 - RNA, 19 nt, Human
gggcaggcaggccaggagg

SEQ ID NO: 546614 - RNA, 22 nt, Human
gggcaggcaggccaggaggcuc

SEQ ID NO: 546615 - RNA, 26 nt, Human
gggcgggcaggcaggccaggaggcuc

SEQ ID NO: 546616 - RNA, 22 nt, Human
ggggagcccugaccauauaccc

SEQ ID NO: 546617 - RNA, 19 nt, Human
ggggcggcggcugcugcug

SEQ ID NO: 546618 - RNA, 22 nt, Human
gggguggggcucagcuuggagc

SEQ ID NO: 546619 - RNA, 19 nt, Human
ggugggcgggcaggcaggc

SEQ ID NO: 546620 - RNA, 18 nt, Human
uacccccuggaaaauggg

SEQ ID NO: 546621 - RNA, 23 nt, Human
uauuccccauccugaggcugagu

SEQ ID NO: 546622 - RNA, 19 nt, Human
ucaauauuuacaagcauaa

SEQ ID NO: 546623 - RNA, 19 nt, Human
ucacaucaacagaaacucc

SEQ ID NO: 546624 - RNA, 19 nt, Human
ucaccacugggacucccag

SEQ ID NO: 546625 - RNA, 23 nt, Human
ucagaaaggugccuaccuccuuc

SEQ ID NO: 546626 - RNA, 20 nt, Human
ucagucgggaggaggcgccc

SEQ ID NO: 546627 - RNA, 24 nt, Human
uccagcuguucuuuccccuuagca

SEQ ID NO: 546628 - RNA, 21 nt, Human
uccaggcucccacacagucac

SEQ ID NO: 546629 - RNA, 20 nt, Human
ucccacacagucacacaguc

SEQ ID NO: 546630 - RNA, 19 nt, Human
ucgggaggaggcgcccugg

SEQ ID NO: 546631 - RNA, 19 nt, Human
ucuccaccugcagagggug

SEQ ID NO: 546632 - RNA, 20 nt, Human
ucugagcugggcuggagggc

SEQ ID NO: 546633 - RNA, 18 nt, Human
ugagcugggcuggagggc

SEQ ID NO: 546634 - RNA, 19 nt, Human
ugaggcugccauucuuggc

SEQ ID NO: 546635 - RNA, 18 nt, Human
ugcccuugaaguaaccca

SEQ ID NO: 546636 - RNA, 18 nt, Human
ugccugggggugugggug

SEQ ID NO: 546637 - RNA, 18 nt, Human
ugccugggggugugggug

SEQ ID NO: 546638 - RNA, 20 nt, Human
ugcggggaggggugucugga

SEQ ID NO: 546639 - RNA, 18 nt, Human
ugcugcagaaacaggcug

SEQ ID NO: 546640 - RNA, 19 nt, Human
ugcuggggcggcggcugcu

SEQ ID NO: 546641 - RNA, 24 nt, Human
uggaaaggaaacucugaagcgccg

SEQ ID NO: 546642 - RNA, 23 nt, Human
uggagcacaggccgugacugcug

SEQ ID NO: 546643 - RNA, 18 nt, Human
uggcucugcucagucggg

SEQ ID NO: 546644 - RNA, 20 nt, Human
uggcugcugcagaaacaggc

SEQ ID NO: 546645 - RNA, 21 nt, Human
ugggaggaaggaaggcaaggg

SEQ ID NO: 546646 - RNA, 24 nt, Human
ugggaggaaggaaggcaagggcuu

SEQ ID NO: 546647 - RNA, 18 nt, Human
ugggaggccaagagcugc

SEQ ID NO: 546648 - RNA, 22 nt, Human
ugggagugggaggccaagagcu

SEQ ID NO: 546649 - RNA, 21 nt, Human
ugggccagaauccuggcugcc

SEQ ID NO: 546650 - RNA, 18 nt, Human
ugggcgggcaggcaggcc

SEQ ID NO: 546651 - RNA, 21 nt, Human
ugggcuggagggccacgcuug

SEQ ID NO: 546652 - RNA, 23 nt, Human
ugucuggaaaggaaacucugaag

SEQ ID NO: 546653 - RNA, 20 nt, Human
ugucuggcucugcucagucg

SEQ ID NO: 546654 - RNA, 28 nt, Human
ugugccaccuaccucucugccccuccca

SEQ ID NO: 546655 - RNA, 18 nt, Human
ugugggagugggaggcca

SEQ ID NO: 546656 - RNA, 21 nt, Human
ugugggagugggaggccaaga

SEQ ID NO: 546657 - RNA, 24 nt, Human
uguucuuuccccuuagcaguucuc

SEQ ID NO: 546658 - RNA, 18 nt, Human
uucuuggcuauuccccau

SEQ ID NO: 546659 - RNA, 21 nt, Human
uuggcuauuccccauccugag

SEQ ID NO: 546660 - RNA, 20 nt, Human
uuucugcccugccuccuccu

SEQ ID NO: 546661 - RNA, 27 nt, Human
cugccccaucagggccacuuggacgac

SEQ ID NO: 546662 - RNA, 24 nt, Human
gcacagaaucuucaugagaagcca

SEQ ID NO: 546663 - RNA, 18 nt, Human
ucgcugccccaucagggc

SEQ ID NO: 546664 - RNA, 24 nt, Human
ucgcugccccaucagggccacuug

SEQ ID NO: 546665 - RNA, 20 nt, Human
aaccaaguguccaaaccaaa

SEQ ID NO: 546666 - RNA, 26 nt, Human
accaccacccgggcccgccgcgguga

SEQ ID NO: 546667 - RNA, 18 nt, Human
accaugaacccacauaua

SEQ ID NO: 546668 - RNA, 21 nt, Human
agaaagaaguaagcuauggaa

SEQ ID NO: 546669 - RNA, 24 nt, Human
caaaccaaauaguaguccaagacc

SEQ ID NO: 546670 - RNA, 20 nt, Human
ccaaaccaaauaguagucca

SEQ ID NO: 546671 - RNA, 27 nt, Human
ccaaaccaaauaguaguccaagaccuc

SEQ ID NO: 546672 - RNA, 22 nt, Human
ccaccacccgggcccgccgcgg

SEQ ID NO: 546673 - RNA, 24 nt, Human
ccauaacauuccaaaauauacuaa

SEQ ID NO: 546674 - RNA, 22 nt, Human
cccacauauaagagaaaaaggc

SEQ ID NO: 546675 - RNA, 23 nt, Human
cccacauauaagagaaaaaggca

SEQ ID NO: 546676 - RNA, 24 nt, Human
ccugcgcggggccacucacuacuc

SEQ ID NO: 546677 - RNA, 23 nt, Human
cgccgcggugacucuccagaccc

SEQ ID NO: 546678 - RNA, 21 nt, Human
ggaccgggaaggaggucgggc

SEQ ID NO: 546679 - RNA, 21 nt, Human
uaacauaacaaucgaacugaa

SEQ ID NO: 546680 - RNA, 18 nt, Human
uaaccaccacccgggccc

SEQ ID NO: 546681 - RNA, 19 nt, Human
uaacuucacaaagagaaua

SEQ ID NO: 546682 - RNA, 22 nt, Human
uaacuucacaaagagaauauuu

SEQ ID NO: 546683 - RNA, 22 nt, Human
uaagagaaaaaggcagaggaaa

SEQ ID NO: 546684 - RNA, 23 nt, Human
uaagagaaaaaggcagaggaaag

SEQ ID NO: 546685 - RNA, 24 nt, Human
uaagauaaacuguauuuagaacac

SEQ ID NO: 546686 - RNA, 24 nt, Human
uaauuaauauuguuaaaacaaaaa

SEQ ID NO: 546687 - RNA, 20 nt, Human
uagaacacccaaguaguaaa

SEQ ID NO: 546688 - RNA, 23 nt, Human
uagaacacccaaguaguaaauuc

SEQ ID NO: 546689 - RNA, 28 nt, Human
uaggagaaagaaguaagcuauggaaaaa

SEQ ID NO: 546690 - RNA, 18 nt, Human
ucacaaaaauagaagagu

SEQ ID NO: 546691 - RNA, 24 nt, Human
uccaggggcuaaaugggaaaaaag

SEQ ID NO: 546692 - RNA, 19 nt, Human
ucuaaacuuggcaugaaag

SEQ ID NO: 546693 - RNA, 18 nt, Human
ucucacaaaaauagaaga

SEQ ID NO: 546694 - RNA, 26 nt, Human
ugcuauuuucuguccaaaguuuauuu

SEQ ID NO: 546695 - RNA, 21 nt, Human
ugggcgggcgggagggacugg

SEQ ID NO: 546696 - RNA, 25 nt, Human
uguccaaaccaaauaguaguccaag

SEQ ID NO: 546697 - RNA, 21 nt, Human
uucauuggcuaauucuaaacu

SEQ ID NO: 546698 - RNA, 18 nt, Human
uuugaauucauauuacua

SEQ ID NO: 546699 - RNA, 22 nt, Human
aaaauugcaaaacuucagcuaa

SEQ ID NO: 546700 - RNA, 18 nt, Human
aaaugucaucuacuaaaa

SEQ ID NO: 546701 - RNA, 21 nt, Human
agaguacauuuuccauuuaaa

SEQ ID NO: 546702 - RNA, 24 nt, Human
caacuucaacaaauaaugaaugac

SEQ ID NO: 546703 - RNA, 21 nt, Human
cauaaaaauugcaaaacuuca

SEQ ID NO: 546704 - RNA, 19 nt, Human
caucugucuucccuuuugg

SEQ ID NO: 546705 - RNA, 24 nt, Human
ccuguggucuagaguacauuuucc

SEQ ID NO: 546706 - RNA, 24 nt, Human
gucuucccuuuuggcuuccuuggc

SEQ ID NO: 546707 - RNA, 21 nt, Human
uaaaaauugcaaaacuucagc

SEQ ID NO: 546708 - RNA, 22 nt, Human
uaaaaauugcaaaacuucagcu

SEQ ID NO: 546709 - RNA, 18 nt, Human
ucaucuacuaaaaacaag

SEQ ID NO: 546710 - RNA, 24 nt, Human
ucccuuuuggcuuccuuggcacaa

SEQ ID NO: 546711 - RNA, 23 nt, Human
ucuagaguacauuuuccauuuaa

SEQ ID NO: 546712 - RNA, 20 nt, Human
ucucaacuuguuuaauagca

SEQ ID NO: 546713 - RNA, 21 nt, Human
ucugucuucccuuuuggcuuc

SEQ ID NO: 546714 - RNA, 22 nt, Human
ugacauaaaaauugcaaaacuu

SEQ ID NO: 546715 - RNA, 28 nt, Human
uuaauaaauagccaaauauuguaaugac

SEQ ID NO: 546716 - RNA, 30 nt, Human
uuucccacauuuacuagcucacauaaacaa

SEQ ID NO: 546717 - RNA, 26 nt, Human
uuuuuuuuuuuuuuuuucccacauuu

SEQ ID NO: 546718 - RNA, 22 nt, Human
aaaaggugcauuagcuaucaag

SEQ ID NO: 546719 - RNA, 25 nt, Human
aaaaugcuuucuauccucugcaucu

SEQ ID NO: 546720 - RNA, 18 nt, Human
aaacaagagaaaaccaaa

SEQ ID NO: 546721 - RNA, 19 nt, Human
aaacaagagaaaaccaaaa

SEQ ID NO: 546722 - RNA, 23 nt, Human
aaacuccaacuuggacaauuccu

SEQ ID NO: 546723 - RNA, 20 nt, Human
aacaagcucaugacugcaaa

SEQ ID NO: 546724 - RNA, 23 nt, Human
aacugagcagacugcaaacaaga

SEQ ID NO: 546725 - RNA, 23 nt, Human
aagauuccucaguuuuccaacca

SEQ ID NO: 546726 - RNA, 24 nt, Human
aagccagcaugcgagguggggaca

SEQ ID NO: 546727 - RNA, 19 nt, Human
aagcugccucauauuggag

SEQ ID NO: 546728 - RNA, 21 nt, Human
aaggaacucaauuucaaggac

SEQ ID NO: 546729 - RNA, 21 nt, Human
aaguauuuuuaggagaaaguu

SEQ ID NO: 546730 - RNA, 18 nt, Human
aaguggcuaucaaggaga

SEQ ID NO: 546731 - RNA, 20 nt, Human
aaucacgauccccuccuccu

SEQ ID NO: 546732 - RNA, 23 nt, Human
aaugacauucucucuaugaagac

SEQ ID NO: 546733 - RNA, 18 nt, Human
acaaagaaagcaacugca

SEQ ID NO: 546734 - RNA, 24 nt, Human
acacaaccccaugcccacacacgc

SEQ ID NO: 546735 - RNA, 23 nt, Human
acacacacgcacgcacacacaca

SEQ ID NO: 546736 - RNA, 24 nt, Human
acagacagcaaccuucagaagccu

SEQ ID NO: 546737 - RNA, 18 nt, Human
acagaggggaaggaagua

SEQ ID NO: 546738 - RNA, 21 nt, Human
acagugcuauaguggugcuga

SEQ ID NO: 546739 - RNA, 23 nt, Human
acagugcuauaguggugcugaug

SEQ ID NO: 546740 - RNA, 20 nt, Human
accccaugcccacacacgca

SEQ ID NO: 546741 - RNA, 22 nt, Human
accccaugcccacacacgcaca

SEQ ID NO: 546742 - RNA, 21 nt, Human
acgaugccaccaucugcagac

SEQ ID NO: 546743 - RNA, 19 nt, Human
agaaaaccaaaagagaagg

SEQ ID NO: 546744 - RNA, 24 nt, Human
agaaauacuguagcaagguaccau

SEQ ID NO: 546745 - RNA, 24 nt, Human
aggaagaccucaauaucacaacca

SEQ ID NO: 546746 - RNA, 24 nt, Human
aggaugccacuuugguucuuuguu

SEQ ID NO: 546747 - RNA, 22 nt, Human
aggcagagaguuaaaagugagg

SEQ ID NO: 546748 - RNA, 19 nt, Human
aggugggcgacggaggugg

SEQ ID NO: 546749 - RNA, 18 nt, Human
aguggugcugaugcuagc

SEQ ID NO: 546750 - RNA, 21 nt, Human
auacaacuauaaauacccaca

SEQ ID NO: 546751 - RNA, 19 nt, Human
auccucaauuucuucuggc

SEQ ID NO: 546752 - RNA, 21 nt, Human
auccuuuagcaaacaaaauua

SEQ ID NO: 546753 - RNA, 24 nt, Human
augcaaucuacacacugaugcauu

SEQ ID NO: 546754 - RNA, 18 nt, Human
augcauuuacauacauac

SEQ ID NO: 546755 - RNA, 18 nt, Human
auguacauguaccauaca

SEQ ID NO: 546756 - RNA, 20 nt, Human
augucagaaauacuguagca

SEQ ID NO: 546757 - RNA, 21 nt, Human
caaagcaaaagaaaucaagag

SEQ ID NO: 546758 - RNA, 24 nt, Human
caaagcaaaagaaaucaagagcaa

SEQ ID NO: 546759 - RNA, 25 nt, Human
caaagcucuaggucucagugggcua

SEQ ID NO: 546760 - RNA, 23 nt, Human
caaccugcugaaaacucgaccaa

SEQ ID NO: 546761 - RNA, 19 nt, Human
caacugagcagacugcaaa

SEQ ID NO: 546762 - RNA, 23 nt, Human
caacugagcagacugcaaacaag

SEQ ID NO: 546763 - RNA, 20 nt, Human
caacugcagcuacguuuucc

SEQ ID NO: 546764 - RNA, 18 nt, Human
caagagcaaagacaaucu

SEQ ID NO: 546765 - RNA, 20 nt, Human
caaguugcaaaaaucaucaa

SEQ ID NO: 546766 - RNA, 19 nt, Human
cacaaaagaaccuuuaaag

SEQ ID NO: 546767 - RNA, 23 nt, Human
cacaaagcucuaggucucagugg

SEQ ID NO: 546768 - RNA, 23 nt, Human
cacaaccccaugcccacacacgc

SEQ ID NO: 546769 - RNA, 20 nt, Human
cacaagaaaagcuguuucau

SEQ ID NO: 546770 - RNA, 21 nt, Human
cacaagaccacugcaccaaaa

SEQ ID NO: 546771 - RNA, 24 nt, Human
cacacacacgcacgcacacacaca

SEQ ID NO: 546772 - RNA, 23 nt, Human
cacugugauucuuacuggagcau

SEQ ID NO: 546773 - RNA, 19 nt, Human
cagacagcaaccuucagaa

SEQ ID NO: 546774 - RNA, 19 nt, Human
cagaggcgcaucugccugc

SEQ ID NO: 546775 - RNA, 23 nt, Human
cagcucaugacaagcaggcccug

SEQ ID NO: 546776 - RNA, 22 nt, Human
caggacacaaccccaugcccac

SEQ ID NO: 546777 - RNA, 25 nt, Human
caggaugcaacaugcuuaacugaug

SEQ ID NO: 546778 - RNA, 19 nt, Human
caucaaagcaaaagaaauc

SEQ ID NO: 546779 - RNA, 23 nt, Human
caugucacuuuugcccaggggcc

SEQ ID NO: 546780 - RNA, 20 nt, Human
ccaggacacaaccccaugcc

SEQ ID NO: 546781 - RNA, 21 nt, Human
cccacacacgcacacacacgg

SEQ ID NO: 546782 - RNA, 23 nt, Human
ccgaucucaacaacaagugcuaa

SEQ ID NO: 546783 - RNA, 21 nt, Human
ccucauaaacuagacuucagg

SEQ ID NO: 546784 - RNA, 20 nt, Human
ccuguaagaauagucuccaa

SEQ ID NO: 546785 - RNA, 22 nt, Human
cgaucucaacaacaagugcuaa

SEQ ID NO: 546786 - RNA, 21 nt, Human
cggcagucugagauccuggcu

SEQ ID NO: 546787 - RNA, 22 nt, Human
cuaaaugucagaaauacuguag

SEQ ID NO: 546788 - RNA, 22 nt, Human
cucucuauugcuaucaauaauc

SEQ ID NO: 546789 - RNA, 22 nt, Human
cugaaaucacgauccccuccuc

SEQ ID NO: 546790 - RNA, 19 nt, Human
cugcagcuacguuuuccuu

SEQ ID NO: 546791 - RNA, 20 nt, Human
cugguuccucccauagcaua

SEQ ID NO: 546792 - RNA, 20 nt, Human
cuucaaagggacuguaacug

SEQ ID NO: 546793 - RNA, 20 nt, Human
cuugcaaaauuuuccugcug

SEQ ID NO: 546794 - RNA, 22 nt, Human
gaagggauacauaauucauucu

SEQ ID NO: 546795 - RNA, 20 nt, Human
gacugcaaacaagagaaaac

SEQ ID NO: 546796 - RNA, 21 nt, Human
gagauccuggcucacaaaaga

SEQ ID NO: 546797 - RNA, 22 nt, Human
gaggcuacaaaaaucaaucuga

SEQ ID NO: 546798 - RNA, 21 nt, Human
gaguaguagcagagugaagug

SEQ ID NO: 546799 - RNA, 24 nt, Human
gccauauugguaacuauccuguuu

SEQ ID NO: 546800 - RNA, 22 nt, Human
gcccugccucucauccuuccca

SEQ ID NO: 546801 - RNA, 18 nt, Human
gcgcaucugccugcaaag

SEQ ID NO: 546802 - RNA, 19 nt, Human
gcgcugaggugggcgacgg

SEQ ID NO: 546803 - RNA, 20 nt, Human
ggaaaaaauucugucauuug

SEQ ID NO: 546804 - RNA, 22 nt, Human
ggaaaaagaaaaaucaaaguga

SEQ ID NO: 546805 - RNA, 18 nt, Human
ggaaagggaaggggugcu

SEQ ID NO: 546806 - RNA, 18 nt, Human
ggauauccugaugucccc

SEQ ID NO: 546807 - RNA, 18 nt, Human
ggcauggccugggagaca

SEQ ID NO: 546808 - RNA, 23 nt, Human
ggccacagggugaaauacaaacc

SEQ ID NO: 546809 - RNA, 19 nt, Human
gugcagcucaugacaagca

SEQ ID NO: 546810 - RNA, 22 nt, Human
uaaaguaaggacucugcauccc

SEQ ID NO: 546811 - RNA, 21 nt, Human
uaacaacucuuaggaugccac

SEQ ID NO: 546812 - RNA, 20 nt, Human
uaacuugcaaaauuuuccug

SEQ ID NO: 546813 - RNA, 23 nt, Human
uaacuugcuuguggauauguugg

SEQ ID NO: 546814 - RNA, 21 nt, Human
uaagacaauggagaaacuucu

SEQ ID NO: 546815 - RNA, 18 nt, Human
uaagaugcuauaagacug

SEQ ID NO: 546816 - RNA, 25 nt, Human
uaaggacacaagaaaagcuggagac

SEQ ID NO: 546817 - RNA, 22 nt, Human
uacacugcaaaagauucacaaa

SEQ ID NO: 546818 - RNA, 22 nt, Human
uaccauggcuuuacagcagguu

SEQ ID NO: 546819 - RNA, 21 nt, Human
uaccuucagaggaaagggaag

SEQ ID NO: 546820 - RNA, 22 nt, Human
uacuaaaacuacaguuugucca

SEQ ID NO: 546821 - RNA, 20 nt, Human
uagacacuaccauggcuuua

SEQ ID NO: 546822 - RNA, 21 nt, Human
uagaguaagaaaaaucuauuc

SEQ ID NO: 546823 - RNA, 26 nt, Human
uagaugcuuugagacaaaagcagaua

SEQ ID NO: 546824 - RNA, 25 nt, Human
uagcaaacaaaauuaacuggguauc

SEQ ID NO: 546825 - RNA, 22 nt, Human
uagcauaaacucuuggccuccu

SEQ ID NO: 546826 - RNA, 23 nt, Human
uauagaacuagagaaacuuucua

SEQ ID NO: 546827 - RNA, 26 nt, Human
uaucaaucuuuccucagccuucaaag

SEQ ID NO: 546828 - RNA, 23 nt, Human
uaucacaaccaggacacaacccc

SEQ ID NO: 546829 - RNA, 20 nt, Human
uauccagaagucccuggagu

SEQ ID NO: 546830 - RNA, 23 nt, Human
uauccagaagucccuggaguuaa

SEQ ID NO: 546831 - RNA, 20 nt, Human
uauccuguuuguuuugcagu

SEQ ID NO: 546832 - RNA, 20 nt, Human
uaugggccagacucucagaa

SEQ ID NO: 546833 - RNA, 18 nt, Human
uauugcuaucaauaaucu

SEQ ID NO: 546834 - RNA, 23 nt, Human
ucaagggccgauuauugccccca

SEQ ID NO: 546835 - RNA, 24 nt, Human
ucacaagguuaguugaaagucauu

SEQ ID NO: 546836 - RNA, 20 nt, Human
ucacagacuuuuuuuuuuuu

SEQ ID NO: 546837 - RNA, 23 nt, Human
ucagaggacucucucccaucaug

SEQ ID NO: 546838 - RNA, 20 nt, Human
ucauuugaaaagucaaggga

SEQ ID NO: 546839 - RNA, 24 nt, Human
ucccaaaggaaaaugugguuggcu

SEQ ID NO: 546840 - RNA, 20 nt, Human
ucccaaggcuccugggcgcu

SEQ ID NO: 546841 - RNA, 18 nt, Human
uccugggcgcugaggugg

SEQ ID NO: 546842 - RNA, 25 nt, Human
uccuucaugcacucaugacagacag

SEQ ID NO: 546843 - RNA, 22 nt, Human
ucucagaaguucuguagcuugg

SEQ ID NO: 546844 - RNA, 19 nt, Human
ucucuaauucacuggaacc

SEQ ID NO: 546845 - RNA, 18 nt, Human
ucugaaguugugccacuu

SEQ ID NO: 546846 - RNA, 23 nt, Human
ucugccugcaaagcugacuuacc

SEQ ID NO: 546847 - RNA, 21 nt, Human
ugacaagcaggcccugccucu

SEQ ID NO: 546848 - RNA, 18 nt, Human
ugacagcauuuucuuuga

SEQ ID NO: 546849 - RNA, 23 nt, Human
ugacagcauuuucuuugaugacu

SEQ ID NO: 546850 - RNA, 18 nt, Human
ugaccagcacuuccuggc

SEQ ID NO: 546851 - RNA, 19 nt, Human
ugacugcaaggaaaaaugc

SEQ ID NO: 546852 - RNA, 21 nt, Human
ugagacaaaagcagauacuau

SEQ ID NO: 546853 - RNA, 23 nt, Human
ugaggugggcgacggaggugggu

SEQ ID NO: 546854 - RNA, 21 nt, Human
ugaguagacagaaagaaagga

SEQ ID NO: 546855 - RNA, 26 nt, Human
ugaguuuaaguuuaauaaaacaauac

SEQ ID NO: 546856 - RNA, 20 nt, Human
ugcaaaaaucaucaaagcaa

SEQ ID NO: 546857 - RNA, 22 nt, Human
ugcaaaaauucuuccacaaucu

SEQ ID NO: 546858 - RNA, 21 nt, Human
ugcaaaagauucacaagguua

SEQ ID NO: 546859 - RNA, 21 nt, Human
ugcaaagcugacuuaccauuu

SEQ ID NO: 546860 - RNA, 24 nt, Human
ugcaacaacacuaugaccaaggca

SEQ ID NO: 546861 - RNA, 21 nt, Human
ugcccaggggccaguccucau

SEQ ID NO: 546862 - RNA, 18 nt, Human
ugcgcuaaagauggacag

SEQ ID NO: 546863 - RNA, 22 nt, Human
uggacagcaucaugcuacggca

SEQ ID NO: 546864 - RNA, 21 nt, Human
ugggcaaacacauucaagcca

SEQ ID NO: 546865 - RNA, 23 nt, Human
ugggccaauuauugucauaagca

SEQ ID NO: 546866 - RNA, 21 nt, Human
uggucaauuuugcaacaacac

SEQ ID NO: 546867 - RNA, 18 nt, Human
ugucacuuuugcccaggg

SEQ ID NO: 546868 - RNA, 21 nt, Human
ugucuuaaggacacaagaaaa

SEQ ID NO: 546869 - RNA, 18 nt, Human
ugugaugauuugaucaug

SEQ ID NO: 546870 - RNA, 27 nt, Human
uuaaauauauucacggauuaccagaaa

SEQ ID NO: 546871 - RNA, 20 nt, Human
uuacaaagaaagcaacugca

SEQ ID NO: 546872 - RNA, 19 nt, Human
uuacugccuuuacccaaac

SEQ ID NO: 546873 - RNA, 21 nt, Human
uuacugccuuuacccaaacaa

SEQ ID NO: 546874 - RNA, 25 nt, Human
uucaaaggcaaaaugacuccacuuc

SEQ ID NO: 546875 - RNA, 22 nt, Human
uuccaaccauaauucauucuga

SEQ ID NO: 546876 - RNA, 18 nt, Human
uuccugcagacugagcac

SEQ ID NO: 546877 - RNA, 21 nt, Human
uuccugcagacugagcacaug

SEQ ID NO: 546878 - RNA, 25 nt, Human
uucuaagggaggaaaaagaaaaauc

SEQ ID NO: 546879 - RNA, 22 nt, Human
uucuagucuagacccuguggga

SEQ ID NO: 546880 - RNA, 21 nt, Human
uugguucuuuguuuuacagug

SEQ ID NO: 546881 - RNA, 19 nt, Human
uuuggauuucaguccuucc

SEQ ID NO: 546882 - RNA, 23 nt, Human
uuugucuuaaggacacaagaaaa

SEQ ID NO: 546883 - RNA, 18 nt, Human
agggcugguccuggggcg

SEQ ID NO: 546884 - RNA, 18 nt, Human
caccccggccccucgggc

SEQ ID NO: 546885 - RNA, 19 nt, Human
caccccggccccucgggcu

SEQ ID NO: 546886 - RNA, 21 nt, Human
caccgccagcccgcuucaagc

SEQ ID NO: 546887 - RNA, 21 nt, Human
cccucgggcuccggggggggg

SEQ ID NO: 546888 - RNA, 25 nt, Human
ccggcccgcgggcccggguucuccg

SEQ ID NO: 546889 - RNA, 18 nt, Human
ccggcgggggcggcuccu

SEQ ID NO: 546890 - RNA, 22 nt, Human
ccuccugcgaccaccgccagcc

SEQ ID NO: 546891 - RNA, 19 nt, Human
ccuggggcggguggauggc

SEQ ID NO: 546892 - RNA, 20 nt, Human
cgacgccccagaggagaugg

SEQ ID NO: 546893 - RNA, 19 nt, Human
cgccccagaggagauggcc

SEQ ID NO: 546894 - RNA, 20 nt, Human
cgguccgcauccacaccccg

SEQ ID NO: 546895 - RNA, 18 nt, Human
cucccugagggcuggucc

SEQ ID NO: 546896 - RNA, 19 nt, Human
cucgggcuccggggggggg

SEQ ID NO: 546897 - RNA, 23 nt, Human
cuggggcggguggauggccccug

SEQ ID NO: 546898 - RNA, 22 nt, Human
gcccggcgggggcggcuccugg

SEQ ID NO: 546899 - RNA, 19 nt, Human
ggcugguccuggggcgggu

SEQ ID NO: 546900 - RNA, 21 nt, Human
gggccgaggucaggcggucca

SEQ ID NO: 546901 - RNA, 22 nt, Human
gggcggguggauggccccugcc

SEQ ID NO: 546902 - RNA, 20 nt, Human
gggcugguccuggggcgggu

SEQ ID NO: 546903 - RNA, 18 nt, Human
gggggggcucucggccgu

SEQ ID NO: 546904 - RNA, 22 nt, Human
guccaggcagggucggcguccu

SEQ ID NO: 546905 - RNA, 24 nt, Human
ucaacggcgagggccacgccuccu

SEQ ID NO: 546906 - RNA, 22 nt, Human
uccgcauccacaccccggcccc

SEQ ID NO: 546907 - RNA, 19 nt, Human
ucucggaggcgggggccgc

SEQ ID NO: 546908 - RNA, 22 nt, Human
uggccuggccacgguccgcauc

SEQ ID NO: 546909 - RNA, 24 nt, Human
uggccuggccacgguccgcaucca

SEQ ID NO: 546910 - RNA, 26 nt, Human
aaaaaggaaucacaagauggagagaa

SEQ ID NO: 546911 - RNA, 20 nt, Human
aaaaaugaaagggggcgaga

SEQ ID NO: 546912 - RNA, 21 nt, Human
aaaacccucccagcccuagcc

SEQ ID NO: 546913 - RNA, 25 nt, Human
aaacaaaaaucugacaucugccaaa

SEQ ID NO: 546914 - RNA, 22 nt, Human
aaugaaagggggcgagaaagga

SEQ ID NO: 546915 - RNA, 22 nt, Human
acaggagcugacgaaccacugg

SEQ ID NO: 546916 - RNA, 21 nt, Human
agaaaggaaagaggcgcccac

SEQ ID NO: 546917 - RNA, 24 nt, Human
agaaaggaaagaggcgcccaccaa

SEQ ID NO: 546918 - RNA, 24 nt, Human
agccagcgcuggcugcaucugcca

SEQ ID NO: 546919 - RNA, 21 nt, Human
aggagagcgagaagaaaagaa

SEQ ID NO: 546920 - RNA, 18 nt, Human
aggcggugggaugggggg

SEQ ID NO: 546921 - RNA, 19 nt, Human
agggagggaggcaggcaaa

SEQ ID NO: 546922 - RNA, 19 nt, Human
agggggcgagaaaggaaag

SEQ ID NO: 546923 - RNA, 22 nt, Human
caggcaaagggacagagagaga

SEQ ID NO: 546924 - RNA, 20 nt, Human
caggcugaaagaaagaaaac

SEQ ID NO: 546925 - RNA, 19 nt, Human
ccagggcuggggguggggc

SEQ ID NO: 546926 - RNA, 20 nt, Human
ccagggcuggggguggggcg

SEQ ID NO: 546927 - RNA, 22 nt, Human
cccagcccuagccagcgcuggc

SEQ ID NO: 546928 - RNA, 24 nt, Human
cccccaaccugaaguuguugcuua

SEQ ID NO: 546929 - RNA, 20 nt, Human
ccucccagcccuagccagcc

SEQ ID NO: 546930 - RNA, 22 nt, Human
cgagaaaggaaagaggcgccca

SEQ ID NO: 546931 - RNA, 25 nt, Human
cgccaaauaaauaugaauaaauaaa

SEQ ID NO: 546932 - RNA, 23 nt, Human
cuuaauaccuccccuccggaccu

SEQ ID NO: 546933 - RNA, 20 nt, Human
gaaagggggcgagaaaggaa

SEQ ID NO: 546934 - RNA, 20 nt, Human
gacacagugcgcuaacggag

SEQ ID NO: 546935 - RNA, 22 nt, Human
gcccccaaccugaaguuguugc

SEQ ID NO: 546936 - RNA, 23 nt, Human
gcuggggguggggcggggugggg

SEQ ID NO: 546937 - RNA, 19 nt, Human
ggaaucacaagauggagag

SEQ ID NO: 546938 - RNA, 21 nt, Human
ggagcugacgaaccacuggug

SEQ ID NO: 546939 - RNA, 21 nt, Human
ggaguccauuuaauuugggag

SEQ ID NO: 546940 - RNA, 21 nt, Human
ggcuggggguggggcggggug

SEQ ID NO: 546941 - RNA, 22 nt, Human
ggcuggggguggggcggggugg

SEQ ID NO: 546942 - RNA, 18 nt, Human
gggccagggcugggggug

SEQ ID NO: 546943 - RNA, 20 nt, Human
gggccagggcuggggguggg

SEQ ID NO: 546944 - RNA, 19 nt, Human
gggcgggguggggugaggg

SEQ ID NO: 546945 - RNA, 20 nt, Human
gggcuggggguggggcgggg

SEQ ID NO: 546946 - RNA, 23 nt, Human
gggcuggggguggggcggggugg

SEQ ID NO: 546947 - RNA, 24 nt, Human
gggcuggggguggggcgggguggg

SEQ ID NO: 546948 - RNA, 20 nt, Human
ggggguggggcggggugggg

SEQ ID NO: 546949 - RNA, 19 nt, Human
ggggugagggaggcaggaa

SEQ ID NO: 546950 - RNA, 19 nt, Human
gggguggggcggggugggg

SEQ ID NO: 546951 - RNA, 19 nt, Human
uaggaugagcaguuaggug

SEQ ID NO: 546952 - RNA, 18 nt, Human
ucaggcugaaagaaagaa

SEQ ID NO: 546953 - RNA, 19 nt, Human
uccggaccugacaugguga

SEQ ID NO: 546954 - RNA, 20 nt, Human
uccggagggagggaggcagg

SEQ ID NO: 546955 - RNA, 19 nt, Human
ugacacagugcgcuaacgg

SEQ ID NO: 546956 - RNA, 19 nt, Human
ugagagaagccaagggcca

SEQ ID NO: 546957 - RNA, 22 nt, Human
uggcugcaucugccacuauucu

SEQ ID NO: 546958 - RNA, 18 nt, Human
uggggagggguaggagag

SEQ ID NO: 546959 - RNA, 21 nt, Human
uggggugagggaggcaggaac

SEQ ID NO: 546960 - RNA, 24 nt, Human
ugucucaaccuuuuagaagccugu

SEQ ID NO: 546961 - RNA, 19 nt, Human
uuucaucuggaguccauuu

SEQ ID NO: 546962 - RNA, 23 nt, Human
uuucugugacaagugaugggagg

SEQ ID NO: 546963 - RNA, 23 nt, Human
aaacaggaaaagagagaggggac

SEQ ID NO: 546964 - RNA, 18 nt, Human
aaagccuuccagccaccc

SEQ ID NO: 546965 - RNA, 21 nt, Human
aaagccuuccagccacccaag

SEQ ID NO: 546966 - RNA, 23 nt, Human
aacaaagccuuccagccacccaa

SEQ ID NO: 546967 - RNA, 20 nt, Human
aacccacaaaacuucccaaa

SEQ ID NO: 546968 - RNA, 19 nt, Human
aagccuuccagccacccaa

SEQ ID NO: 546969 - RNA, 19 nt, Human
acaggaaaagagagaggcu

SEQ ID NO: 546970 - RNA, 21 nt, Human
accagggcugcucaccaugcu

SEQ ID NO: 546971 - RNA, 19 nt, Human
acccacaaaacuucccaaa

SEQ ID NO: 546972 - RNA, 20 nt, Human
acccaugucugagccccagc

SEQ ID NO: 546973 - RNA, 21 nt, Human
acccccauuucuccuaguccc

SEQ ID NO: 546974 - RNA, 21 nt, Human
acccuaggcugaggagagaag

SEQ ID NO: 546975 - RNA, 24 nt, Human
acucuggacaguuuaugucuugcc

SEQ ID NO: 546976 - RNA, 23 nt, Human
agaaaacccacaaaacuucccaa

SEQ ID NO: 546977 - RNA, 21 nt, Human
agaaagaaaacccacaaaacu

SEQ ID NO: 546978 - RNA, 20 nt, Human
agaagacaccucugugagag

SEQ ID NO: 546979 - RNA, 19 nt, Human
agcagaaagggcaggaaag

SEQ ID NO: 546980 - RNA, 21 nt, Human
aggagcggggcgggccggggc

SEQ ID NO: 546981 - RNA, 25 nt, Human
aggaggagaaagaaaacccacaaaa

SEQ ID NO: 546982 - RNA, 18 nt, Human
aggcaggaggaggagcgg

SEQ ID NO: 546983 - RNA, 21 nt, Human
aggcaggaggaggagcggggc

SEQ ID NO: 546984 - RNA, 25 nt, Human
auccgaaaauucccuucccgggccu

SEQ ID NO: 546985 - RNA, 23 nt, Human
aucucccccaaacccuaaaggca

SEQ ID NO: 546986 - RNA, 19 nt, Human
cacaauauacuugcagaac

SEQ ID NO: 546987 - RNA, 22 nt, Human
caccaugcucccaagaagcaga

SEQ ID NO: 546988 - RNA, 24 nt, Human
cagagucagggaggcagacagcag

SEQ ID NO: 546989 - RNA, 21 nt, Human
ccagccacccaaggccuaaag

SEQ ID NO: 546990 - RNA, 20 nt, Human
ccccaaacccuaaaggcauc

SEQ ID NO: 546991 - RNA, 18 nt, Human
ccccagagccuaguaccu

SEQ ID NO: 546992 - RNA, 20 nt, Human
ccccagagccuaguaccugc

SEQ ID NO: 546993 - RNA, 24 nt, Human
ccccagguuucugccaccugacuu

SEQ ID NO: 546994 - RNA, 19 nt, Human
cccccaaacccuaaaggca

SEQ ID NO: 546995 - RNA, 18 nt, Human
ccccgggagcugcccgcc

SEQ ID NO: 546996 - RNA, 19 nt, Human
ccccgggagcugcccgccc

SEQ ID NO: 546997 - RNA, 21 nt, Human
cccgggccggggcgggugagc

SEQ ID NO: 546998 - RNA, 21 nt, Human
cccuaggccgcgggggcgccc

SEQ ID NO: 546999 - RNA, 21 nt, Human
cccuccggucuuuccgagaac

SEQ ID NO: 547000 - RNA, 18 nt, Human
cccuucccgggccggggc

SEQ ID NO: 547001 - RNA, 18 nt, Human
cccuucccgggccggggc

SEQ ID NO: 547002 - RNA, 19 nt, Human
ccucaggccaggcucgguu

SEQ ID NO: 547003 - RNA, 19 nt, Human
ccucccgggcgccaccggc

SEQ ID NO: 547004 - RNA, 23 nt, Human
ccuuccagccacccaaggccuaa

SEQ ID NO: 547005 - RNA, 23 nt, Human
cgaaaauucccuucccgggccgg

SEQ ID NO: 547006 - RNA, 19 nt, Human
cgccggggcgguugggcug

SEQ ID NO: 547007 - RNA, 22 nt, Human
cgcucaggagagccucgagggc

SEQ ID NO: 547008 - RNA, 19 nt, Human
cgcugggcugcgcucgacg

SEQ ID NO: 547009 - RNA, 22 nt, Human
cgggccggggcgggugagcagg

SEQ ID NO: 547010 - RNA, 21 nt, Human
cgggccggggcgucgcugcgg

SEQ ID NO: 547011 - RNA, 28 nt, Human
cucacugccccagagccuaguaccugcu

SEQ ID NO: 547012 - RNA, 24 nt, Human
cuccaggccgcucaggagagccuc

SEQ ID NO: 547013 - RNA, 22 nt, Human
cucgguuuugcugacuucagcg

SEQ ID NO: 547014 - RNA, 22 nt, Human
cugagccccagcucucuccgcc

SEQ ID NO: 547015 - RNA, 21 nt, Human
cugaucuucuagagccaagaa

SEQ ID NO: 547016 - RNA, 25 nt, Human
cugcgugcuguccccgcggccuccc

SEQ ID NO: 547017 - RNA, 25 nt, Human
cuuuccgagaaccuucaaacucugg

SEQ ID NO: 547018 - RNA, 19 nt, Human
gaaagaaaacccacaaaac

SEQ ID NO: 547019 - RNA, 22 nt, Human
gaccuccacccuaggcugagga

SEQ ID NO: 547020 - RNA, 22 nt, Human
gagagguugagaugagcagaaa

SEQ ID NO: 547021 - RNA, 22 nt, Human
gagcagaaagggcaggaaaggg

SEQ ID NO: 547022 - RNA, 19 nt, Human
gagcugcccgcccuaggcc

SEQ ID NO: 547023 - RNA, 21 nt, Human
gcaggcaggggaggagcagag

SEQ ID NO: 547024 - RNA, 19 nt, Human
gccaaccgucuccacccgc

SEQ ID NO: 547025 - RNA, 23 nt, Human
gccccagcucucuccgccuucug

SEQ ID NO: 547026 - RNA, 19 nt, Human
gccccgggcucgcaggauc

SEQ ID NO: 547027 - RNA, 21 nt, Human
gcgcugcagagcggugcuccc

SEQ ID NO: 547028 - RNA, 18 nt, Human
gcggggcgggccggggcg

SEQ ID NO: 547029 - RNA, 19 nt, Human
ggagcggggcgggccgggg

SEQ ID NO: 547030 - RNA, 18 nt, Human
ggcaggaaaggggaaagg

SEQ ID NO: 547031 - RNA, 18 nt, Human
ggcaggggaggagcagag

SEQ ID NO: 547032 - RNA, 22 nt, Human
ggcgggcgcugggcugcgcucg

SEQ ID NO: 547033 - RNA, 18 nt, Human
gggcaggaaaggggaaag

SEQ ID NO: 547034 - RNA, 22 nt, Human
gggccggggcgucgcugcggga

SEQ ID NO: 547035 - RNA, 20 nt, Human
gggcgccccgggcucgcagg

SEQ ID NO: 547036 - RNA, 18 nt, Human
gggcgggugagcaggcgg

SEQ ID NO: 547037 - RNA, 22 nt, Human
ggggagaagacaccucugugag

SEQ ID NO: 547038 - RNA, 21 nt, Human
gggggcuuuggcaggcagggg

SEQ ID NO: 547039 - RNA, 19 nt, Human
ggggggcuuuggcaggcag

SEQ ID NO: 547040 - RNA, 25 nt, Human
guaaaaucucccccaaacccuaaag

SEQ ID NO: 547041 - RNA, 21 nt, Human
uaacaaagccuuccagccacc

SEQ ID NO: 547042 - RNA, 24 nt, Human
uaaggugcacacccaugucugagc

SEQ ID NO: 547043 - RNA, 21 nt, Human
uagaacaauacauucacaaua

SEQ ID NO: 547044 - RNA, 24 nt, Human
uagagccaagaaacaggaaaagag

SEQ ID NO: 547045 - RNA, 21 nt, Human
uagggggagaagacaccucug

SEQ ID NO: 547046 - RNA, 21 nt, Human
uagugcagugaccuccacccu

SEQ ID NO: 547047 - RNA, 19 nt, Human
ucagggaggcagacagcag

SEQ ID NO: 547048 - RNA, 21 nt, Human
ucccagggcuggggucugcgg

SEQ ID NO: 547049 - RNA, 19 nt, Human
ucccgggcgccaccggcuc

SEQ ID NO: 547050 - RNA, 18 nt, Human
ucuccgccuucugugggg

SEQ ID NO: 547051 - RNA, 24 nt, Human
ugacuuauuuguguaucccacuag

SEQ ID NO: 547052 - RNA, 22 nt, Human
ugcagugcugaucuucuagagc

SEQ ID NO: 547053 - RNA, 19 nt, Human
uggcaggcaggggaggagc

SEQ ID NO: 547054 - RNA, 20 nt, Human
uggcgccugagucguggccu

SEQ ID NO: 547055 - RNA, 20 nt, Human
uggcuuguacaaaaagcugu

SEQ ID NO: 547056 - RNA, 20 nt, Human
ugggagaagccgccggggcg

SEQ ID NO: 547057 - RNA, 18 nt, Human
ugucuugcccgcacucuc

SEQ ID NO: 547058 - RNA, 21 nt, Human
ugucuugcccgcacucucagc

SEQ ID NO: 547059 - RNA, 20 nt, Human
ugugagagguugagaugagc

SEQ ID NO: 547060 - RNA, 23 nt, Human
uucagcgguggcugccccgcacc

SEQ ID NO: 547061 - RNA, 21 nt, Human
uucccuucccgggccggggcg

SEQ ID NO: 547062 - RNA, 24 nt, Human
uugcugacuucagcgguggcugcc

SEQ ID NO: 547063 - RNA, 22 nt, Human
uuggcaggcaggggaggagcag

SEQ ID NO: 547064 - RNA, 26 nt, Human
aaaaacacauuucuugaaacuauaua

SEQ ID NO: 547065 - RNA, 21 nt, Human
aaacuauacaauauaacauaa

SEQ ID NO: 547066 - RNA, 19 nt, Human
aaagauuggaucuuucuag

SEQ ID NO: 547067 - RNA, 20 nt, Human
aaauccugucucaacuacau

SEQ ID NO: 547068 - RNA, 21 nt, Human
aacuagaugaccuuuaagguc

SEQ ID NO: 547069 - RNA, 20 nt, Human
aagaaaccuucagcuuugcc

SEQ ID NO: 547070 - RNA, 21 nt, Human
aagaagcaggaagcccagagc

SEQ ID NO: 547071 - RNA, 18 nt, Human
aagaggaagagggugcug

SEQ ID NO: 547072 - RNA, 27 nt, Human
aagaggagacaaguguuaggccgagaa

SEQ ID NO: 547073 - RNA, 22 nt, Human
aagcaaucuggcaauauaaaac

SEQ ID NO: 547074 - RNA, 24 nt, Human
aagcagaucugacacauaggaaau

SEQ ID NO: 547075 - RNA, 18 nt, Human
aagcagguuagaagagga

SEQ ID NO: 547076 - RNA, 18 nt, Human
aagcccaugcaucccuuc

SEQ ID NO: 547077 - RNA, 19 nt, Human
aagcccgcgccgaggccga

SEQ ID NO: 547078 - RNA, 19 nt, Human
aaggagaggggcaggagag

SEQ ID NO: 547079 - RNA, 25 nt, Human
aaguggucauaagaaaugaaugaac

SEQ ID NO: 547080 - RNA, 24 nt, Human
aaucauacaaaaucaaaugguuga

SEQ ID NO: 547081 - RNA, 22 nt, Human
aaugaaauaaaacaacucuuca

SEQ ID NO: 547082 - RNA, 18 nt, Human
aaugacucuuuaacaaac

SEQ ID NO: 547083 - RNA, 25 nt, Human
acaaaggagaauguacacaacgauc

SEQ ID NO: 547084 - RNA, 19 nt, Human
acgacaugaaucgaucaac

SEQ ID NO: 547085 - RNA, 20 nt, Human
agaaaccuucagcuuugccc

SEQ ID NO: 547086 - RNA, 20 nt, Human
agaaagauuucccucaaaaa

SEQ ID NO: 547087 - RNA, 25 nt, Human
agccaagcagaucugacacauagga

SEQ ID NO: 547088 - RNA, 18 nt, Human
agccaagcccuacacaua

SEQ ID NO: 547089 - RNA, 21 nt, Human
agcccagagccuccuggaaac

SEQ ID NO: 547090 - RNA, 21 nt, Human
agccgccugcgggcgcgccgg

SEQ ID NO: 547091 - RNA, 20 nt, Human
agggguaaaaggacccaaac

SEQ ID NO: 547092 - RNA, 24 nt, Human
auaaaaauggcaaaacccaauacu

SEQ ID NO: 547093 - RNA, 18 nt, Human
auaccuauuaaacuagca

SEQ ID NO: 547094 - RNA, 22 nt, Human
auagaaaaacucuaaugcuuag

SEQ ID NO: 547095 - RNA, 19 nt, Human
caaaaagcccaugcauccc

SEQ ID NO: 547096 - RNA, 22 nt, Human
caaaaauaaauaaaaauggcaa

SEQ ID NO: 547097 - RNA, 19 nt, Human
caaccuucagaaacuucaa

SEQ ID NO: 547098 - RNA, 18 nt, Human
caacucuucaagaacaac

SEQ ID NO: 547099 - RNA, 23 nt, Human
caagcccgcgccgaggccgaggc

SEQ ID NO: 547100 - RNA, 19 nt, Human
cacugcaccguaccaaggu

SEQ ID NO: 547101 - RNA, 21 nt, Human
cagaagccucagaaagcaggu

SEQ ID NO: 547102 - RNA, 24 nt, Human
cagucaaagcucggugcaaguuuc

SEQ ID NO: 547103 - RNA, 18 nt, Human
cauagaguaauagaaaaa

SEQ ID NO: 547104 - RNA, 24 nt, Human
caucagugagaacagcauaauauc

SEQ ID NO: 547105 - RNA, 21 nt, Human
caucccuucuuggaagccaag

SEQ ID NO: 547106 - RNA, 18 nt, Human
cauccuggcugggggcgc

SEQ ID NO: 547107 - RNA, 21 nt, Human
ccaaaaagcccaugcaucccu

SEQ ID NO: 547108 - RNA, 26 nt, Human
ccagagccuccuggaaacacuggcca

SEQ ID NO: 547109 - RNA, 19 nt, Human
ccauaaaagucaagccaga

SEQ ID NO: 547110 - RNA, 21 nt, Human
cccccugccuccgcccccugc

SEQ ID NO: 547111 - RNA, 20 nt, Human
cccguuuucccaucuuucuu

SEQ ID NO: 547112 - RNA, 21 nt, Human
cccucggccgcccgcgccgcc

SEQ ID NO: 547113 - RNA, 18 nt, Human
ccgccgccgccgccgccg

SEQ ID NO: 547114 - RNA, 18 nt, Human
ccgccgccgccgccgcgc

SEQ ID NO: 547115 - RNA, 18 nt, Human
ccgccgccgccgccgcgc

SEQ ID NO: 547116 - RNA, 27 nt, Human
ccgccgccgccgccgcgcgcucuccgg

SEQ ID NO: 547117 - RNA, 24 nt, Human
ccgcugccgcugccgcugccgcug

SEQ ID NO: 547118 - RNA, 20 nt, Human
ccgcugccgcugccgcugcg

SEQ ID NO: 547119 - RNA, 21 nt, Human
ccgcugccgcugccgcugcgc

SEQ ID NO: 547120 - RNA, 23 nt, Human
ccgcugccgcugcgccgccgccc

SEQ ID NO: 547121 - RNA, 21 nt, Human
ccgucccgccgccgccgccgc

SEQ ID NO: 547122 - RNA, 21 nt, Human
ccguucagugcccucggccgc

SEQ ID NO: 547123 - RNA, 18 nt, Human
ccucggccgcccgcgccg

SEQ ID NO: 547124 - RNA, 19 nt, Human
cgcccgcgccgccucucgc

SEQ ID NO: 547125 - RNA, 22 nt, Human
cgcuacaauugccccggauagc

SEQ ID NO: 547126 - RNA, 23 nt, Human
cggcccggggcaagcccgcgccg

SEQ ID NO: 547127 - RNA, 18 nt, Human
cggcggccaaagguccgg

SEQ ID NO: 547128 - RNA, 21 nt, Human
cuaaagcuguuuuaaaaguau

SEQ ID NO: 547129 - RNA, 24 nt, Human
cuagcaaaaauaaauaaaaauggc

SEQ ID NO: 547130 - RNA, 21 nt, Human
cuagcaauuaaugaaauaaaa

SEQ ID NO: 547131 - RNA, 19 nt, Human
cuaguaaaucaucacaugg

SEQ ID NO: 547132 - RNA, 23 nt, Human
cuccuggaaacacuggccaaaaa

SEQ ID NO: 547133 - RNA, 23 nt, Human
cugaauauucacauacauuccuc

SEQ ID NO: 547134 - RNA, 18 nt, Human
cugccgcugcgccgccgc

SEQ ID NO: 547135 - RNA, 24 nt, Human
cugcgcugccgcugccgcugccgc

SEQ ID NO: 547136 - RNA, 20 nt, Human
gaaaaaccagcaauaaagaa

SEQ ID NO: 547137 - RNA, 24 nt, Human
gaacauuuuacacacaaggaaaua

SEQ ID NO: 547138 - RNA, 20 nt, Human
gaagaagcaggaagcccaga

SEQ ID NO: 547139 - RNA, 18 nt, Human
gaagaggaagagggugcu

SEQ ID NO: 547140 - RNA, 21 nt, Human
gaccuuguaaucccucuuugg

SEQ ID NO: 547141 - RNA, 20 nt, Human
gaccuuuaagguccuuccaa

SEQ ID NO: 547142 - RNA, 22 nt, Human
gagcaggaggugaagagcagaa

SEQ ID NO: 547143 - RNA, 20 nt, Human
gaggggguggggaggcuaaa

SEQ ID NO: 547144 - RNA, 18 nt, Human
gagggugcuggguuggca

SEQ ID NO: 547145 - RNA, 23 nt, Human
gcaaaacccaauacuggcagagc

SEQ ID NO: 547146 - RNA, 21 nt, Human
gcaguaaaaaaccaucaguga

SEQ ID NO: 547147 - RNA, 27 nt, Human
gcccagagccuccuggaaacacuggcc

SEQ ID NO: 547148 - RNA, 20 nt, Human
gccccauauuguacgggaac

SEQ ID NO: 547149 - RNA, 21 nt, Human
gccgcugccgcugcgccgccg

SEQ ID NO: 547150 - RNA, 18 nt, Human
gccgcugcgccgccgccc

SEQ ID NO: 547151 - RNA, 24 nt, Human
gccgucccgccgccgccgccgccg

SEQ ID NO: 547152 - RNA, 19 nt, Human
gcuacggcccggggcaagc

SEQ ID NO: 547153 - RNA, 22 nt, Human
gcuuccccaagaaaccuucagc

SEQ ID NO: 547154 - RNA, 22 nt, Human
ggagaccugggcgaacaaagca

SEQ ID NO: 547155 - RNA, 21 nt, Human
gggaagcggggaagaagcagg

SEQ ID NO: 547156 - RNA, 20 nt, Human
gggaagugcguaauacauuu

SEQ ID NO: 547157 - RNA, 19 nt, Human
ggguaaaaggacccaaacg

SEQ ID NO: 547158 - RNA, 22 nt, Human
gugaagagcagaagccucagaa

SEQ ID NO: 547159 - RNA, 21 nt, Human
uaaaaaaccaucagugagaac

SEQ ID NO: 547160 - RNA, 21 nt, Human
uaaaaaaccaucagugagaac

SEQ ID NO: 547161 - RNA, 22 nt, Human
uaaaaaaccaucagugagaaca

SEQ ID NO: 547162 - RNA, 23 nt, Human
uaaaacaaaggagaauguacaca

SEQ ID NO: 547163 - RNA, 22 nt, Human
uaaaacaagagcuauaaaauac

SEQ ID NO: 547164 - RNA, 26 nt, Human
uaaagauccuacaucauauuaacccc

SEQ ID NO: 547165 - RNA, 20 nt, Human
uaaauucuguuuauuccaaa

SEQ ID NO: 547166 - RNA, 30 nt, Human
uaagaaaugaaugaacauuuuacacacaaa

SEQ ID NO: 547167 - RNA, 23 nt, Human
uaagguccuuccaacccaaagau

SEQ ID NO: 547168 - RNA, 21 nt, Human
uacaacaauacuaguaaauga

SEQ ID NO: 547169 - RNA, 23 nt, Human
uacauagaguaauagaaaaacuc

SEQ ID NO: 547170 - RNA, 28 nt, Human
uagcaaaaauaaauaaaaauggcaaaag

SEQ ID NO: 547171 - RNA, 20 nt, Human
uauaaaacaagagcuauaaa

SEQ ID NO: 547172 - RNA, 23 nt, Human
ucagcacuuaaaggguuaauccu

SEQ ID NO: 547173 - RNA, 18 nt, Human
ucagcgagcaggagguga

SEQ ID NO: 547174 - RNA, 23 nt, Human
ucagugcccucggccgcccgcgc

SEQ ID NO: 547175 - RNA, 21 nt, Human
ucccgccgccgccgccgccgc

SEQ ID NO: 547176 - RNA, 23 nt, Human
ucccucaaaaaaaaauauauuaa

SEQ ID NO: 547177 - RNA, 20 nt, Human
uccuggaaacacuggccaaa

SEQ ID NO: 547178 - RNA, 19 nt, Human
ucggccgcccgcgccgccu

SEQ ID NO: 547179 - RNA, 25 nt, Human
ugaaaaggaaucccguuuucccauc

SEQ ID NO: 547180 - RNA, 22 nt, Human
ugaaacuauauaaaaagagcaa

SEQ ID NO: 547181 - RNA, 21 nt, Human
ugaaauaaaacaacucuucaa

SEQ ID NO: 547182 - RNA, 20 nt, Human
ugaagugagguuacccaugu

SEQ ID NO: 547183 - RNA, 20 nt, Human
ugaccuuguaaucccucuuu

SEQ ID NO: 547184 - RNA, 23 nt, Human
ugacgucaaccuucagaaacuuc

SEQ ID NO: 547185 - RNA, 19 nt, Human
ugagaacagcauaauaucc

SEQ ID NO: 547186 - RNA, 19 nt, Human
ugagagcagaaucuguguu

SEQ ID NO: 547187 - RNA, 22 nt, Human
ugcucagccuugcuagcaauua

SEQ ID NO: 547188 - RNA, 18 nt, Human
uggccaaaaagcccaugc

SEQ ID NO: 547189 - RNA, 21 nt, Human
uggccgcacggggagggcgcg

SEQ ID NO: 547190 - RNA, 22 nt, Human
uuaccuuuuuuuguagucauua

SEQ ID NO: 547191 - RNA, 18 nt, Human
uucagugcccucggccgc

SEQ ID NO: 547192 - RNA, 22 nt, Human
uucauagcagcacuauuuauaa

SEQ ID NO: 547193 - RNA, 21 nt, Human
uuccaacccaaagauuggauc

SEQ ID NO: 547194 - RNA, 22 nt, Human
uuccccaagaaaccuucagcuu

SEQ ID NO: 547195 - RNA, 19 nt, Human
uucuugauauugaaucauc

SEQ ID NO: 547196 - RNA, 22 nt, Human
uugaaucaucuuaaccuuguaa

SEQ ID NO: 547197 - RNA, 20 nt, Human
uugcuuuauuccugcaaagu

SEQ ID NO: 547198 - RNA, 21 nt, Human
uuuguagucauuaguaucaaa

SEQ ID NO: 547199 - RNA, 23 nt, Human
uuuuaaagauucagcacuuaaag

SEQ ID NO: 547200 - RNA, 19 nt, Human
uuuuuuguagucauuagua

SEQ ID NO: 547201 - RNA, 28 nt, Human
aaaaggaaggagucugacuugcucagaa

SEQ ID NO: 547202 - RNA, 22 nt, Human
aggccaaaaggaaggagucuga

SEQ ID NO: 547203 - RNA, 24 nt, Human
ccccgcacgcgcaaccgcucccag

SEQ ID NO: 547204 - RNA, 22 nt, Human
cccgcacgcgcaaccgcuccca

SEQ ID NO: 547205 - RNA, 25 nt, Human
cccgcacgcgcaaccgcucccagcg

SEQ ID NO: 547206 - RNA, 22 nt, Human
ccggccaacaucuguggcuuug

SEQ ID NO: 547207 - RNA, 20 nt, Human
gcagggcagaagucacagcu

SEQ ID NO: 547208 - RNA, 23 nt, Human
uaaacaggugggccggccaacau

SEQ ID NO: 547209 - RNA, 21 nt, Human
uauaacucagcuccccgcacg

SEQ ID NO: 547210 - RNA, 26 nt, Human
uuuaccuuuggaagcccuucuuuauu

SEQ ID NO: 547211 - RNA, 25 nt, Human
uuuuuuuuuuuuuuuuaccuuugga

SEQ ID NO: 547212 - RNA, 23 nt, Human
uuuuuuuuuuuuuuuuuaccuuu

SEQ ID NO: 547213 - RNA, 27 nt, Human
uuuuuuuuuuuuuuuuuuuaccuuugg

SEQ ID NO: 547214 - RNA, 26 nt, Human
uuuuuuuuuuuuuuuuuuuuaccuuu

SEQ ID NO: 547215 - RNA, 26 nt, Human
uuuuuuuuuuuuuuuuuuuuuaccuu

SEQ ID NO: 547216 - RNA, 24 nt, Human
aaacaaguaaauugaaugaccaaa

SEQ ID NO: 547217 - RNA, 18 nt, Human
aagcagcuuauagauuuu

SEQ ID NO: 547218 - RNA, 21 nt, Human
aaguaaauugaaugaccaaau

SEQ ID NO: 547219 - RNA, 18 nt, Human
acacggcaccugcggacg

SEQ ID NO: 547220 - RNA, 21 nt, Human
acugguuuuaggagauuuuua

SEQ ID NO: 547221 - RNA, 25 nt, Human
agagaaucauguauuaaaaacaagu

SEQ ID NO: 547222 - RNA, 23 nt, Human
auaacagugaaaaaggauuguac

SEQ ID NO: 547223 - RNA, 22 nt, Human
aucagaauguucaaggcuuuaa

SEQ ID NO: 547224 - RNA, 21 nt, Human
cacuuguguuuuguguugcuu

SEQ ID NO: 547225 - RNA, 25 nt, Human
cagcuuauagauuuuagcaaaccau

SEQ ID NO: 547226 - RNA, 18 nt, Human
caggggcacacgagcauc

SEQ ID NO: 547227 - RNA, 21 nt, Human
ccacugcuccuuaguucaggc

SEQ ID NO: 547228 - RNA, 22 nt, Human
ccuucugccacugcuccuuagu

SEQ ID NO: 547229 - RNA, 23 nt, Human
ccuucugccacugcuccuuaguu

SEQ ID NO: 547230 - RNA, 19 nt, Human
cuggaaaugcuguaaacac

SEQ ID NO: 547231 - RNA, 23 nt, Human
gacccguauucuuuaaaaacuuu

SEQ ID NO: 547232 - RNA, 23 nt, Human
gcccaccuucugccacugcuccu

SEQ ID NO: 547233 - RNA, 18 nt, Human
gugagccacgccaggggc

SEQ ID NO: 547234 - RNA, 19 nt, Human
uauagauuuuagcaaacca

SEQ ID NO: 547235 - RNA, 27 nt, Human
ugacaacaucagaauguucaaggcuuu

SEQ ID NO: 547236 - RNA, 21 nt, Human
uggcagaacacggcaccugcg

SEQ ID NO: 547237 - RNA, 19 nt, Human
uggguucucauacaggucu

SEQ ID NO: 547238 - RNA, 26 nt, Human
uggguucucauacaggucugcaguuc

SEQ ID NO: 547239 - RNA, 24 nt, Human
uuaggagauuuuuaggacacaugg

SEQ ID NO: 547240 - RNA, 24 nt, Human
uuuaaaaacuuuggaaaauaaaug

SEQ ID NO: 547241 - RNA, 22 nt, Human
aaaaaaaaaaaaacaacaguaa

SEQ ID NO: 547242 - RNA, 23 nt, Human
aaaguguuggagcuacuguguga

SEQ ID NO: 547243 - RNA, 23 nt, Human
aaauagauaaaaggcacagaacc

SEQ ID NO: 547244 - RNA, 18 nt, Human
aacaaauuucaguaaaca

SEQ ID NO: 547245 - RNA, 21 nt, Human
aagugccaggguuacaggcau

SEQ ID NO: 547246 - RNA, 26 nt, Human
aagugccaggguuacaggcaugagcu

SEQ ID NO: 547247 - RNA, 19 nt, Human
acaaaaucaaaagaaaaaa

SEQ ID NO: 547248 - RNA, 20 nt, Human
acaaaaucaaaagaaaaaaa

SEQ ID NO: 547249 - RNA, 19 nt, Human
acaacaaagaagcaccugu

SEQ ID NO: 547250 - RNA, 22 nt, Human
acucccuuaaaaaugcucaaaa

SEQ ID NO: 547251 - RNA, 23 nt, Human
acuggccucaagugauccuccug

SEQ ID NO: 547252 - RNA, 21 nt, Human
agaaauucaagauuuggauaa

SEQ ID NO: 547253 - RNA, 23 nt, Human
agacagaagugaaaauuauaugc

SEQ ID NO: 547254 - RNA, 25 nt, Human
agacagaagugaaaauuauaugcca

SEQ ID NO: 547255 - RNA, 22 nt, Human
agagaccagacuugcuuccccc

SEQ ID NO: 547256 - RNA, 18 nt, Human
aguagucuagucuuggau

SEQ ID NO: 547257 - RNA, 22 nt, Human
auagcaauaaaaauaaaaaauu

SEQ ID NO: 547258 - RNA, 26 nt, Human
auggaaacauguaaaaaaaaaaaaac

SEQ ID NO: 547259 - RNA, 23 nt, Human
auuuacagccaggaagcgcugcu

SEQ ID NO: 547260 - RNA, 24 nt, Human
caacugguaccucaaguaucauaa

SEQ ID NO: 547261 - RNA, 22 nt, Human
caagugauccuccugccuuggc

SEQ ID NO: 547262 - RNA, 21 nt, Human
cagagaccagacuugcuuccc

SEQ ID NO: 547263 - RNA, 22 nt, Human
caguuccacaucaagacuaaaa

SEQ ID NO: 547264 - RNA, 20 nt, Human
caucagaaauggaaaucaca

SEQ ID NO: 547265 - RNA, 22 nt, Human
cauguugccagcuuucuaaacu

SEQ ID NO: 547266 - RNA, 22 nt, Human
ccaacacacucuucuauuuucc

SEQ ID NO: 547267 - RNA, 21 nt, Human
ccucaagugauccuccugccu

SEQ ID NO: 547268 - RNA, 23 nt, Human
ccuuaagugccaggguuacaggc

SEQ ID NO: 547269 - RNA, 24 nt, Human
cucaaaguguuggagcuacugugu

SEQ ID NO: 547270 - RNA, 24 nt, Human
cucaagugauccuccugccuuggc

SEQ ID NO: 547271 - RNA, 23 nt, Human
cucucagaaaccagccacuggaa

SEQ ID NO: 547272 - RNA, 21 nt, Human
cucuucuauuuuccagacccu

SEQ ID NO: 547273 - RNA, 19 nt, Human
cuuaaagacagaaaugaug

SEQ ID NO: 547274 - RNA, 23 nt, Human
cuuaagugccaggguuacaggca

SEQ ID NO: 547275 - RNA, 24 nt, Human
cuuaagugccaggguuacaggcau

SEQ ID NO: 547276 - RNA, 23 nt, Human
cuuagaaauaaaaaauauucagc

SEQ ID NO: 547277 - RNA, 20 nt, Human
cuuugccaagccuguucuuc

SEQ ID NO: 547278 - RNA, 23 nt, Human
gaacauuuaaauacuuagaaaua

SEQ ID NO: 547279 - RNA, 19 nt, Human
gacagaagugaaaauuaua

SEQ ID NO: 547280 - RNA, 18 nt, Human
gacuugcuucccccucac

SEQ ID NO: 547281 - RNA, 19 nt, Human
gagguaugugugugauucc

SEQ ID NO: 547282 - RNA, 19 nt, Human
gaguagucuagucuuggau

SEQ ID NO: 547283 - RNA, 24 nt, Human
gagugcacuggagugaucacagcu

SEQ ID NO: 547284 - RNA, 22 nt, Human
gauuguuugccuuggaugcccc

SEQ ID NO: 547285 - RNA, 20 nt, Human
gccaggguuacaggcaugag

SEQ ID NO: 547286 - RNA, 20 nt, Human
gcccugucacccaggcucga

SEQ ID NO: 547287 - RNA, 18 nt, Human
ggauuucaaaagcuagua

SEQ ID NO: 547288 - RNA, 22 nt, Human
ggccucaagugauccuccugcc

SEQ ID NO: 547289 - RNA, 22 nt, Human
ggguuacaggcaugagcuacca

SEQ ID NO: 547290 - RNA, 24 nt, Human
ggguuacaggcaugagcuaccaug

SEQ ID NO: 547291 - RNA, 22 nt, Human
ggugccaaucuggagacaucag

SEQ ID NO: 547292 - RNA, 24 nt, Human
gguuacaggcaugagcuaccaugc

SEQ ID NO: 547293 - RNA, 23 nt, Human
gugaaaugaggccacucccuuaa

SEQ ID NO: 547294 - RNA, 19 nt, Human
gugccaggguuacaggcau

SEQ ID NO: 547295 - RNA, 24 nt, Human
guucuuuuccucgugguaucagug

SEQ ID NO: 547296 - RNA, 21 nt, Human
uaaaaaauauucagcuuugaa

SEQ ID NO: 547297 - RNA, 24 nt, Human
uaagugccaggguuacaggcauga

SEQ ID NO: 547298 - RNA, 22 nt, Human
uacaaacuaccugcccaacaca

SEQ ID NO: 547299 - RNA, 25 nt, Human
uacaaacuaccugcccaacacacuu

SEQ ID NO: 547300 - RNA, 19 nt, Human
uacaacaaagaagcaccug

SEQ ID NO: 547301 - RNA, 22 nt, Human
uacaggcaugagcuaccaugcc

SEQ ID NO: 547302 - RNA, 22 nt, Human
uacauccagguucuccucuaca

SEQ ID NO: 547303 - RNA, 25 nt, Human
uacugaucuauucucuggcuagggu

SEQ ID NO: 547304 - RNA, 21 nt, Human
uacugugugacaacagcugac

SEQ ID NO: 547305 - RNA, 22 nt, Human
uagugaaaugaggccacucccu

SEQ ID NO: 547306 - RNA, 22 nt, Human
uaucuugucccugcugucuuuu

SEQ ID NO: 547307 - RNA, 20 nt, Human
ucaaacagaucccuguuuug

SEQ ID NO: 547308 - RNA, 21 nt, Human
ucaaaguguuggagcuacugu

SEQ ID NO: 547309 - RNA, 20 nt, Human
ucaacuuucacugugguuaa

SEQ ID NO: 547310 - RNA, 22 nt, Human
ucacaagcccaauuuuagaacu

SEQ ID NO: 547311 - RNA, 19 nt, Human
ucacagagaccagacuugc

SEQ ID NO: 547312 - RNA, 23 nt, Human
ucaguaaacaaaaucaaaagaaa

SEQ ID NO: 547313 - RNA, 23 nt, Human
ucuuaaguacauccagguucucc

SEQ ID NO: 547314 - RNA, 22 nt, Human
ucuucaaucacagagaccagac

SEQ ID NO: 547315 - RNA, 19 nt, Human
ucuugcccugucacccagg

SEQ ID NO: 547316 - RNA, 24 nt, Human
ucuugcccugucacccaggcucga

SEQ ID NO: 547317 - RNA, 23 nt, Human
ugacaacagcugacauuuaggag

SEQ ID NO: 547318 - RNA, 24 nt, Human
ugacaacagcugacauuuaggagg

SEQ ID NO: 547319 - RNA, 22 nt, Human
ugagacagggucuugcccuguc

SEQ ID NO: 547320 - RNA, 18 nt, Human
ugcagcugcuuuuuaaaa

SEQ ID NO: 547321 - RNA, 19 nt, Human
ugcccugucacccaggcuc

SEQ ID NO: 547322 - RNA, 23 nt, Human
ugccucaacagacagaagugaaa

SEQ ID NO: 547323 - RNA, 19 nt, Human
ugccuuggaugccccuggc

SEQ ID NO: 547324 - RNA, 20 nt, Human
ugccuuggccccuuaagugc

SEQ ID NO: 547325 - RNA, 20 nt, Human
ugcguacaacaaagaagcac

SEQ ID NO: 547326 - RNA, 23 nt, Human
uggaaacauguaaaaaaaaaaaa

SEQ ID NO: 547327 - RNA, 21 nt, Human
uggaugccccuggcaaaucuc

SEQ ID NO: 547328 - RNA, 18 nt, Human
uggccucaagugauccuc

SEQ ID NO: 547329 - RNA, 24 nt, Human
uggccucaagugauccuccugccu

SEQ ID NO: 547330 - RNA, 25 nt, Human
ugugugauucccgcacuggagccca

SEQ ID NO: 547331 - RNA, 23 nt, Human
uuaagugccaggguuacaggcau

SEQ ID NO: 547332 - RNA, 19 nt, Human
uuacaggcaugagcuacca

SEQ ID NO: 547333 - RNA, 22 nt, Human
uuagaaauaaaaaauauucagc

SEQ ID NO: 547334 - RNA, 20 nt, Human
uuaguucuuaaagacagaaa

SEQ ID NO: 547335 - RNA, 22 nt, Human
uucaaguuauucagaacugggu

SEQ ID NO: 547336 - RNA, 18 nt, Human
uucccaauauggaaugcu

SEQ ID NO: 547337 - RNA, 22 nt, Human
uugaaguuuucaauacuggaaa

SEQ ID NO: 547338 - RNA, 19 nt, Human
uugaaugcauucuucaugu

SEQ ID NO: 547339 - RNA, 22 nt, Human
uugagacagggucuugcccugu

SEQ ID NO: 547340 - RNA, 21 nt, Human
uuguuuguucuuuuccucgug

SEQ ID NO: 547341 - RNA, 22 nt, Human
uuuaauagcaauaaaaauaaaa

SEQ ID NO: 547342 - RNA, 24 nt, Human
uuuuuuuuuugagacagggucuug

SEQ ID NO: 547343 - RNA, 20 nt, Human
uuuuuuuuuuugagacaggg

SEQ ID NO: 547344 - RNA, 23 nt, Human
uuuuuuuuuuuugagacaggguc

SEQ ID NO: 547345 - RNA, 24 nt, Human
uuuuuuuuuuuugagacagggucu

SEQ ID NO: 547346 - RNA, 24 nt, Human
uuuuuuuuuuuuuuugagacaggg

SEQ ID NO: 547347 - RNA, 21 nt, Human
aaaaaagcaccuccuuacccc

SEQ ID NO: 547348 - RNA, 22 nt, Human
accacucgccaaaaaucuuggc

SEQ ID NO: 547349 - RNA, 19 nt, Human
accccauaucacguuucuc

SEQ ID NO: 547350 - RNA, 22 nt, Human
agccccaggccccggcggcagc

SEQ ID NO: 547351 - RNA, 21 nt, Human
agcgcugccccugccgauacc

SEQ ID NO: 547352 - RNA, 23 nt, Human
agucagacgggucagccccaggc

SEQ ID NO: 547353 - RNA, 20 nt, Human
caagcuuugcaaaaucagug

SEQ ID NO: 547354 - RNA, 19 nt, Human
cacaucuccacaacaagcu

SEQ ID NO: 547355 - RNA, 19 nt, Human
cagacgggucagccccagg

SEQ ID NO: 547356 - RNA, 21 nt, Human
cagcgcugccccugccgauac

SEQ ID NO: 547357 - RNA, 20 nt, Human
caggccccggcggcagcgcu

SEQ ID NO: 547358 - RNA, 18 nt, Human
ccacaacaagcuuugcaa

SEQ ID NO: 547359 - RNA, 20 nt, Human
ccccggcggcagcgcugccc

SEQ ID NO: 547360 - RNA, 19 nt, Human
ccccugccgauaccucucc

SEQ ID NO: 547361 - RNA, 20 nt, Human
cccugccgauaccucuccca

SEQ ID NO: 547362 - RNA, 26 nt, Human
ccgauaccucucccaccaaucgguug

SEQ ID NO: 547363 - RNA, 22 nt, Human
ccgauaccucucccaccacccg

SEQ ID NO: 547364 - RNA, 20 nt, Human
ccggcggcagcgcugccccu

SEQ ID NO: 547365 - RNA, 18 nt, Human
cgcugccccugccgauac

SEQ ID NO: 547366 - RNA, 18 nt, Human
cugccgauaccucuccca

SEQ ID NO: 547367 - RNA, 18 nt, Human
gccccaggccccggcggc

SEQ ID NO: 547368 - RNA, 18 nt, Human
ggaagucagacgggucag

SEQ ID NO: 547369 - RNA, 19 nt, Human
ucagaccaaccacucgcca

SEQ ID NO: 547370 - RNA, 18 nt, Human
ucagccccaggccccggc

SEQ ID NO: 547371 - RNA, 21 nt, Human
uccacaacaagcuuugcaaaa

SEQ ID NO: 547372 - RNA, 24 nt, Human
ucugauggcaaaccuguccagcca

SEQ ID NO: 547373 - RNA, 21 nt, Human
ugauggcaaaccuguccagcc

SEQ ID NO: 547374 - RNA, 23 nt, Human
ugccccugccgauaccucuccca

SEQ ID NO: 547375 - RNA, 19 nt, Human
uuuacagaagucuaugaac

SEQ ID NO: 547376 - RNA, 21 nt, Human
uuuacagaagucuaugaacga

SEQ ID NO: 547377 - RNA, 18 nt, Human
aaaggaaaggaaaggaaa

SEQ ID NO: 547378 - RNA, 18 nt, Human
aacacuaaccacacauuu

SEQ ID NO: 547379 - RNA, 22 nt, Human
aacauaacaauuuaccaaacug

SEQ ID NO: 547380 - RNA, 22 nt, Human
aacugcuuuucuugacaaguua

SEQ ID NO: 547381 - RNA, 23 nt, Human
aagaugacaccaagaaaagauaa

SEQ ID NO: 547382 - RNA, 27 nt, Human
aagcagucuucuucacaauguauuuuu

SEQ ID NO: 547383 - RNA, 22 nt, Human
aaugcaauaauggaaagguuua

SEQ ID NO: 547384 - RNA, 22 nt, Human
acaaagauuuguuucucagaca

SEQ ID NO: 547385 - RNA, 18 nt, Human
acaggcucaguuacucca

SEQ ID NO: 547386 - RNA, 19 nt, Human
acucccaagagcuguguuc

SEQ ID NO: 547387 - RNA, 21 nt, Human
acugcacuucugauuguagca

SEQ ID NO: 547388 - RNA, 28 nt, Human
agacacuuaaaucaggcaaauaaaaaua

SEQ ID NO: 547389 - RNA, 22 nt, Human
aggaaaucuuagcccuugucug

SEQ ID NO: 547390 - RNA, 21 nt, Human
aggaaucuuuauuuaauuuac

SEQ ID NO: 547391 - RNA, 21 nt, Human
aggaaucuuuauuuaauuuac

SEQ ID NO: 547392 - RNA, 23 nt, Human
aggagaagacauaauaaagauuc

SEQ ID NO: 547393 - RNA, 24 nt, Human
aggagaagacauaauaaagauucc

SEQ ID NO: 547394 - RNA, 25 nt, Human
aggagaagacauaauaaagauuccc

SEQ ID NO: 547395 - RNA, 18 nt, Human
auaagcagucuucuucac

SEQ ID NO: 547396 - RNA, 24 nt, Human
augcccuugcugcaaacugcuuuu

SEQ ID NO: 547397 - RNA, 25 nt, Human
caaaucacuuagaugauggucuuuu

SEQ ID NO: 547398 - RNA, 23 nt, Human
cacaaaagauacugcacuucuga

SEQ ID NO: 547399 - RNA, 23 nt, Human
cacaauguauuuuuaauauccuc

SEQ ID NO: 547400 - RNA, 20 nt, Human
cacacauuugguuaaacugc

SEQ ID NO: 547401 - RNA, 18 nt, Human
caccaagaaaagauaaaa

SEQ ID NO: 547402 - RNA, 20 nt, Human
caccaagaaaagauaaaaug

SEQ ID NO: 547403 - RNA, 20 nt, Human
cagaugucauaauuguuaac

SEQ ID NO: 547404 - RNA, 18 nt, Human
cagccuaagagaacaaag

SEQ ID NO: 547405 - RNA, 21 nt, Human
caguuaaggaacaggugauac

SEQ ID NO: 547406 - RNA, 20 nt, Human
ccagcacaaaagauacugca

SEQ ID NO: 547407 - RNA, 18 nt, Human
cccucccccaccugaagc

SEQ ID NO: 547408 - RNA, 24 nt, Human
ccuugcugcaaacugcuuuucuug

SEQ ID NO: 547409 - RNA, 25 nt, Human
ccuugcugcaaacugcuuuucuuga

SEQ ID NO: 547410 - RNA, 19 nt, Human
cuauggugacaacauaagg

SEQ ID NO: 547411 - RNA, 20 nt, Human
cuuaguagguauacagagcu

SEQ ID NO: 547412 - RNA, 19 nt, Human
gcagcccuauaccuuuguu

SEQ ID NO: 547413 - RNA, 24 nt, Human
gucacguugcaaccuuuuguuucc

SEQ ID NO: 547414 - RNA, 23 nt, Human
guugcaaccuuuuguuuccaauu

SEQ ID NO: 547415 - RNA, 22 nt, Human
uaaaaauaaguuucccuccccc

SEQ ID NO: 547416 - RNA, 20 nt, Human
uaaauaagaggaaggcagcc

SEQ ID NO: 547417 - RNA, 24 nt, Human
uaacacaaaauuuaaguccucaca

SEQ ID NO: 547418 - RNA, 19 nt, Human
uacagagcuuugacguucc

SEQ ID NO: 547419 - RNA, 20 nt, Human
uaggagaagacauaauaaag

SEQ ID NO: 547420 - RNA, 18 nt, Human
uauaaaggaaaggaaagg

SEQ ID NO: 547421 - RNA, 18 nt, Human
uauacuuaacagccauaa

SEQ ID NO: 547422 - RNA, 21 nt, Human
uaugaaaucagauagcaacaa

SEQ ID NO: 547423 - RNA, 22 nt, Human
uauugcuguguagucacuacuu

SEQ ID NO: 547424 - RNA, 18 nt, Human
ucccaauuuuaaccagca

SEQ ID NO: 547425 - RNA, 19 nt, Human
uccccaaauaaauaagagg

SEQ ID NO: 547426 - RNA, 24 nt, Human
uccccaaauaaauaagaggaaggc

SEQ ID NO: 547427 - RNA, 19 nt, Human
ucuauggugacaacauaag

SEQ ID NO: 547428 - RNA, 20 nt, Human
ugaaaucagauagcaacaac

SEQ ID NO: 547429 - RNA, 19 nt, Human
ugaagcaguucaucaguag

SEQ ID NO: 547430 - RNA, 20 nt, Human
ugacaaguuaugaaguaguu

SEQ ID NO: 547431 - RNA, 21 nt, Human
ugagagggagagcuagcgagg

SEQ ID NO: 547432 - RNA, 19 nt, Human
ugcccuugcugcaaacugc

SEQ ID NO: 547433 - RNA, 22 nt, Human
uggaaagguuuaccuucuuuag

SEQ ID NO: 547434 - RNA, 21 nt, Human
ugggcaacauaaagaugacac

SEQ ID NO: 547435 - RNA, 22 nt, Human
uguucuauacucucaaaaagua

SEQ ID NO: 547436 - RNA, 21 nt, Human
uuaauuaauuaggccuuggua

SEQ ID NO: 547437 - RNA, 23 nt, Human
uuaggggaauaaaaaaacacuaa

SEQ ID NO: 547438 - RNA, 20 nt, Human
uugcaaccuuuuguuuccaa

SEQ ID NO: 547439 - RNA, 28 nt, Human
uuucucagacacuuaaaucaggcaaaua

SEQ ID NO: 547440 - RNA, 19 nt, Human
uuucuguaauaaaauagau

SEQ ID NO: 547441 - RNA, 22 nt, Human
uuugaacuaugauuuaguagca

SEQ ID NO: 547442 - RNA, 24 nt, Human
uuugaacuaugauuuaguagcaac

SEQ ID NO: 547443 - RNA, 18 nt, Human
uuuguuagaaacugaucu

SEQ ID NO: 547444 - RNA, 21 nt, Human
uuuuuuguucuuucugucuua

SEQ ID NO: 547445 - RNA, 23 nt, Human
aggcugucuucugucgccaaggg

SEQ ID NO: 547446 - RNA, 21 nt, Human
cuuggagcccgcgcucucgga

SEQ ID NO: 547447 - RNA, 18 nt, Human
gaguacacgguggcagcu

SEQ ID NO: 547448 - RNA, 18 nt, Human
gcugucuucugucgccaa

SEQ ID NO: 547449 - RNA, 20 nt, Human
uauugcccuuggagcccgcg

SEQ ID NO: 547450 - RNA, 18 nt, Human
uuuugagaguggagcugc

SEQ ID NO: 547451 - RNA, 23 nt, Human
uuuuuuuuuuuuuugagagugga

SEQ ID NO: 547452 - RNA, 18 nt, Human
uuuuuuuuuuuuuuuuug

SEQ ID NO: 547453 - RNA, 23 nt, Human
aacccauuucuccuucacuucug

SEQ ID NO: 547454 - RNA, 20 nt, Human
cacaaaaaacccauuucucc

SEQ ID NO: 547455 - RNA, 19 nt, Human
uagagucacacacaacuga

SEQ ID NO: 547456 - RNA, 26 nt, Human
ucaagaccacaaaaaacccauuucuc

SEQ ID NO: 547457 - RNA, 19 nt, Human
agauccuuuacugagaucc

SEQ ID NO: 547458 - RNA, 18 nt, Human
caaaacagguuccugaau

SEQ ID NO: 547459 - RNA, 25 nt, Human
caaaacagguuccugaaugugugug

SEQ ID NO: 547460 - RNA, 21 nt, Human
ccugccuauaauacaucaaaa

SEQ ID NO: 547461 - RNA, 20 nt, Human
ccuuaacuuguuaacugagu

SEQ ID NO: 547462 - RNA, 19 nt, Human
uacaucaaaacagguuccu

SEQ ID NO: 547463 - RNA, 21 nt, Human
uacugagauccacuugaaaca

SEQ ID NO: 547464 - RNA, 22 nt, Human
uuuacugagauccacuugaaac

SEQ ID NO: 547465 - RNA, 18 nt, Human
aaaagacuaaacagauau

SEQ ID NO: 547466 - RNA, 22 nt, Human
auggcaacagauggugcgugcc

SEQ ID NO: 547467 - RNA, 20 nt, Human
caaaaucugcaauggccucg

SEQ ID NO: 547468 - RNA, 21 nt, Human
cacuaagcaucaaaggcccuc

SEQ ID NO: 547469 - RNA, 22 nt, Human
ccgcguuagcucgugccgaauu

SEQ ID NO: 547470 - RNA, 18 nt, Human
cugcaauggccucggccg

SEQ ID NO: 547471 - RNA, 19 nt, Human
ggacaaacuccagcuccac

SEQ ID NO: 547472 - RNA, 18 nt, Human
gugcgugccggggaccgc

SEQ ID NO: 547473 - RNA, 22 nt, Human
ucaaaggcccucguagucucgg

SEQ ID NO: 547474 - RNA, 24 nt, Human
uggaaggacaaacuccagcuccac

SEQ ID NO: 547475 - RNA, 18 nt, Human
uuuuuuuuuuuuaaaaga

SEQ ID NO: 547476 - RNA, 23 nt, Human
uuuuuuuuuuuuuuuuuuaaaag

SEQ ID NO: 547477 - RNA, 22 nt, Human
aagguuggauggcccaggcggg

SEQ ID NO: 547478 - RNA, 19 nt, Human
acaccgcaggcccugacag

SEQ ID NO: 547479 - RNA, 22 nt, Human
caacaagcaaucaaccagaaca

SEQ ID NO: 547480 - RNA, 19 nt, Human
caacacaccuuuguggcaa

SEQ ID NO: 547481 - RNA, 20 nt, Human
cacaccuuuguggcaacaag

SEQ ID NO: 547482 - RNA, 25 nt, Human
cacaccuuuguggcaacaagcaauc

SEQ ID NO: 547483 - RNA, 23 nt, Human
cagcucagaaguauaaucagcaa

SEQ ID NO: 547484 - RNA, 19 nt, Human
cccaggcgggaaacagagu

SEQ ID NO: 547485 - RNA, 19 nt, Human
cgcggaggugcuacggccg

SEQ ID NO: 547486 - RNA, 19 nt, Human
cucaacacaccuuuguggc

SEQ ID NO: 547487 - RNA, 19 nt, Human
cugagcccgcgagucacac

SEQ ID NO: 547488 - RNA, 20 nt, Human
gaaugggcucaacacaccuu

SEQ ID NO: 547489 - RNA, 23 nt, Human
gacagcggaaacgccgagagaga

SEQ ID NO: 547490 - RNA, 18 nt, Human
ggcgggaaacagagugga

SEQ ID NO: 547491 - RNA, 25 nt, Human
ucaauucaccucuucaucugagccu

SEQ ID NO: 547492 - RNA, 20 nt, Human
ucaccucuucaucugagccu

SEQ ID NO: 547493 - RNA, 23 nt, Human
ugaaugggcucaacacaccuuug

SEQ ID NO: 547494 - RNA, 19 nt, Human
uggcccaggcgggaaacag

SEQ ID NO: 547495 - RNA, 23 nt, Human
uuaaacagaccuuuagugacuga

SEQ ID NO: 547496 - RNA, 21 nt, Human
aaccugcggagaaaaccggcc

SEQ ID NO: 547497 - RNA, 19 nt, Human
aagaaagaaguggaagcgg

SEQ ID NO: 547498 - RNA, 23 nt, Human
acugggcgcaggagaaggugccg

SEQ ID NO: 547499 - RNA, 20 nt, Human
agaaggugccgccagugcgu

SEQ ID NO: 547500 - RNA, 21 nt, Human
agcacugcccgcaauggggau

SEQ ID NO: 547501 - RNA, 23 nt, Human
agccaacgccggcgguuccaaca

SEQ ID NO: 547502 - RNA, 19 nt, Human
caaccugcggagaaaaccg

SEQ ID NO: 547503 - RNA, 20 nt, Human
cagaaaacuccaaacaagaa

SEQ ID NO: 547504 - RNA, 21 nt, Human
ccgcggccgccggccuucggu

SEQ ID NO: 547505 - RNA, 19 nt, Human
cggaaaugcugcucggcug

SEQ ID NO: 547506 - RNA, 23 nt, Human
cucgaguuuuuuuuuuuuuuuuu

SEQ ID NO: 547507 - RNA, 30 nt, Human
gagccaacgccggcgguuccaacagaaaaa

SEQ ID NO: 547508 - RNA, 20 nt, Human
gaguuuuuuuuuuuuuuuuu

SEQ ID NO: 547509 - RNA, 22 nt, Human
gaguuuuuuuuuuuuuuuuuuu

SEQ ID NO: 547510 - RNA, 19 nt, Human
gcaauggggaugcaagucc

SEQ ID NO: 547511 - RNA, 19 nt, Human
gcggagaaaaccggccaca

SEQ ID NO: 547512 - RNA, 21 nt, Human
gggcuccgcggccgccggccu

SEQ ID NO: 547513 - RNA, 19 nt, Human
uacaaggcaugcggcgccc

SEQ ID NO: 547514 - RNA, 19 nt, Human
ucacugggcgcaggagaag

SEQ ID NO: 547515 - RNA, 22 nt, Human
ucacugggcgcaggagaaggug

SEQ ID NO: 547516 - RNA, 19 nt, Human
ucuucggagccaacgccgg

SEQ ID NO: 547517 - RNA, 23 nt, Human
ugcugcucggcuguguacaggca

SEQ ID NO: 547518 - RNA, 18 nt, Human
ugggucuccgggacacgu

SEQ ID NO: 547519 - RNA, 22 nt, Human
uuccaacagaaaacuccaaaca

SEQ ID NO: 547520 - RNA, 20 nt, Human
aaaaaaggaauucccucuag

SEQ ID NO: 547521 - RNA, 25 nt, Human
aaaacccuuucaaucuucaauacuc

SEQ ID NO: 547522 - RNA, 21 nt, Human
aaaagcaggcaaguuuagcua

SEQ ID NO: 547523 - RNA, 21 nt, Human
aaacaaaaaacccacaaccca

SEQ ID NO: 547524 - RNA, 23 nt, Human
aaacacugggaauuaccacgacc

SEQ ID NO: 547525 - RNA, 18 nt, Human
aaagaucagauuuauuug

SEQ ID NO: 547526 - RNA, 24 nt, Human
aaaucccaucaagguuguaagaaa

SEQ ID NO: 547527 - RNA, 20 nt, Human
aaauucacuugguacacacc

SEQ ID NO: 547528 - RNA, 20 nt, Human
aaccacgauuuucccauuua

SEQ ID NO: 547529 - RNA, 27 nt, Human
aagcuucuuuucaaaccacgauuuucc

SEQ ID NO: 547530 - RNA, 20 nt, Human
aauuaccacgacccccaagu

SEQ ID NO: 547531 - RNA, 21 nt, Human
acacaauuuuccccuauuacc

SEQ ID NO: 547532 - RNA, 23 nt, Human
accaagcugaucccuacaaaaau

SEQ ID NO: 547533 - RNA, 19 nt, Human
accacaacuuuuccucuaa

SEQ ID NO: 547534 - RNA, 19 nt, Human
accacgacccccaagugcu

SEQ ID NO: 547535 - RNA, 21 nt, Human
acuaggacacagaaaacacug

SEQ ID NO: 547536 - RNA, 18 nt, Human
acuguguugcaagagaaa

SEQ ID NO: 547537 - RNA, 23 nt, Human
agaaaaacccuuucaaucuucaa

SEQ ID NO: 547538 - RNA, 22 nt, Human
agaaaccaggaccuuguuaaau

SEQ ID NO: 547539 - RNA, 24 nt, Human
agacaugaagagggcaaacccuag

SEQ ID NO: 547540 - RNA, 22 nt, Human
agaguagcaugaagaacuuaag

SEQ ID NO: 547541 - RNA, 21 nt, Human
agaugaugauaagagucuaaa

SEQ ID NO: 547542 - RNA, 18 nt, Human
agcaggcaaggagaacca

SEQ ID NO: 547543 - RNA, 21 nt, Human
agcaucaggagcaggcaagga

SEQ ID NO: 547544 - RNA, 22 nt, Human
agcaugcaaaauaauuucauuu

SEQ ID NO: 547545 - RNA, 26 nt, Human
agguaggggagagggaaaaacaguuu

SEQ ID NO: 547546 - RNA, 21 nt, Human
auaaaccaacaccccugcaug

SEQ ID NO: 547547 - RNA, 18 nt, Human
aucacugucauuaccauu

SEQ ID NO: 547548 - RNA, 20 nt, Human
aucucacacuuuuccuucua

SEQ ID NO: 547549 - RNA, 18 nt, Human
auucaggagcgggacauu

SEQ ID NO: 547550 - RNA, 22 nt, Human
caaaaaacccacaacccaaagg

SEQ ID NO: 547551 - RNA, 21 nt, Human
caacaaaacaacacauugguc

SEQ ID NO: 547552 - RNA, 25 nt, Human
caagaucaagguguuucuccgcuaa

SEQ ID NO: 547553 - RNA, 20 nt, Human
caagguaggggagagggaaa

SEQ ID NO: 547554 - RNA, 19 nt, Human
caccacaacuuuuccucua

SEQ ID NO: 547555 - RNA, 22 nt, Human
caccacaacuuuuccucuaaaa

SEQ ID NO: 547556 - RNA, 20 nt, Human
cacgcauaaaccaacacccc

SEQ ID NO: 547557 - RNA, 23 nt, Human
cagcacgcauaaaccaacacccc

SEQ ID NO: 547558 - RNA, 19 nt, Human
cagcagcaugcaaaauaau

SEQ ID NO: 547559 - RNA, 27 nt, Human
ccacuggguaaauuauauucauuaugc

SEQ ID NO: 547560 - RNA, 22 nt, Human
cccaaccagguuccaggcauua

SEQ ID NO: 547561 - RNA, 23 nt, Human
cccacugcugcagcacgcauaaa

SEQ ID NO: 547562 - RNA, 24 nt, Human
ccccuauuaccuggugcaaaauga

SEQ ID NO: 547563 - RNA, 20 nt, Human
ccccugggggguuaaaaaaa

SEQ ID NO: 547564 - RNA, 21 nt, Human
cccugcauggcugaacagggc

SEQ ID NO: 547565 - RNA, 24 nt, Human
ccuauagucucacucccaacuacc

SEQ ID NO: 547566 - RNA, 20 nt, Human
ccuccccuacugcccaacca

SEQ ID NO: 547567 - RNA, 22 nt, Human
ccucuaggcuggcccccaaaac

SEQ ID NO: 547568 - RNA, 19 nt, Human
ccuucuaccucccuccccu

SEQ ID NO: 547569 - RNA, 18 nt, Human
cucaucacuucccaaaag

SEQ ID NO: 547570 - RNA, 18 nt, Human
cucccuccccuacugccc

SEQ ID NO: 547571 - RNA, 22 nt, Human
cuggcagccuccuggagacuag

SEQ ID NO: 547572 - RNA, 27 nt, Human
cugucuaccaagcugaucccuacaaaa

SEQ ID NO: 547573 - RNA, 21 nt, Human
cuuguuaaauaguucucucca

SEQ ID NO: 547574 - RNA, 22 nt, Human
cuuuauggccuauagucucacu

SEQ ID NO: 547575 - RNA, 24 nt, Human
gaaaacacugggaauuaccacgac

SEQ ID NO: 547576 - RNA, 23 nt, Human
gaauucauauaugccacaauagg

SEQ ID NO: 547577 - RNA, 24 nt, Human
gacucaucacuucccaaaagcuuc

SEQ ID NO: 547578 - RNA, 22 nt, Human
gagaaaacaaaaaacccacaac

SEQ ID NO: 547579 - RNA, 18 nt, Human
gagaauucauauaugcca

SEQ ID NO: 547580 - RNA, 22 nt, Human
gagaccccuaggcacuaaucac

SEQ ID NO: 547581 - RNA, 20 nt, Human
gagagggaaaaacaguuuug

SEQ ID NO: 547582 - RNA, 20 nt, Human
gauucuuccuuucagaguuc

SEQ ID NO: 547583 - RNA, 20 nt, Human
gcccacugcugcagcacgca

SEQ ID NO: 547584 - RNA, 23 nt, Human
gcugcagcacgcauaaaccaaca

SEQ ID NO: 547585 - RNA, 18 nt, Human
gcuguagucccuuucucu

SEQ ID NO: 547586 - RNA, 18 nt, Human
ggaaaaaucccaucaagg

SEQ ID NO: 547587 - RNA, 18 nt, Human
ggagaaaacaaaaaaccc

SEQ ID NO: 547588 - RNA, 24 nt, Human
ggagaaaagcacaggauguagagg

SEQ ID NO: 547589 - RNA, 22 nt, Human
ggggacaagguaggggagaggg

SEQ ID NO: 547590 - RNA, 23 nt, Human
ggggacaagguaggggagaggga

SEQ ID NO: 547591 - RNA, 23 nt, Human
guuuugauuugcucucgaauguu

SEQ ID NO: 547592 - RNA, 31 nt, Human
uaaaaaaacaacaacaaaacaacacauuggg

SEQ ID NO: 547593 - RNA, 25 nt, Human
uaaaaaagaaagaaaaacccuuuca

SEQ ID NO: 547594 - RNA, 20 nt, Human
uaaaagcaggcaaguuuagc

SEQ ID NO: 547595 - RNA, 19 nt, Human
uaaaagguagaaaucucac

SEQ ID NO: 547596 - RNA, 18 nt, Human
uacaucaagacaucuccc

SEQ ID NO: 547597 - RNA, 21 nt, Human
uacaucaagacaucucccagg

SEQ ID NO: 547598 - RNA, 23 nt, Human
uaccaagcugaucccuacaaaaa

SEQ ID NO: 547599 - RNA, 26 nt, Human
uaccacgacccccaagugcuuccggc

SEQ ID NO: 547600 - RNA, 19 nt, Human
uaccuggugcaaaaugacu

SEQ ID NO: 547601 - RNA, 19 nt, Human
uagaaaucucacacuuuuc

SEQ ID NO: 547602 - RNA, 24 nt, Human
uagcaugaagaacuuaagaugaug

SEQ ID NO: 547603 - RNA, 23 nt, Human
uagcuacuggccaauccacacca

SEQ ID NO: 547604 - RNA, 28 nt, Human
uaggcuggcccccaaaacucagaauuaa

SEQ ID NO: 547605 - RNA, 25 nt, Human
uaguuuguuuuucuuuuuuaaaaaa

SEQ ID NO: 547606 - RNA, 21 nt, Human
uauucuagagcacucugauca

SEQ ID NO: 547607 - RNA, 19 nt, Human
ucacacuuuuccuucuacc

SEQ ID NO: 547608 - RNA, 25 nt, Human
ucacuucccaaaagcuucuuuucaa

SEQ ID NO: 547609 - RNA, 21 nt, Human
uccaagaguggaaaauuuauu

SEQ ID NO: 547610 - RNA, 21 nt, Human
uccaagcaucaggagcaggca

SEQ ID NO: 547611 - RNA, 23 nt, Human
uccaagcaucaggagcaggcaag

SEQ ID NO: 547612 - RNA, 23 nt, Human
uccaucauccaagaccauccauu

SEQ ID NO: 547613 - RNA, 26 nt, Human
uccauggcugagaaaaugcccaagac

SEQ ID NO: 547614 - RNA, 18 nt, Human
ucccucuaggcuggcccc

SEQ ID NO: 547615 - RNA, 22 nt, Human
ucccucuaggcuggcccccaaa

SEQ ID NO: 547616 - RNA, 19 nt, Human
ucuaggcuggcccccaaaa

SEQ ID NO: 547617 - RNA, 19 nt, Human
ucuccauuaccauuuauuc

SEQ ID NO: 547618 - RNA, 21 nt, Human
ucuggauagagguuuugauuu

SEQ ID NO: 547619 - RNA, 23 nt, Human
ucuuuuuuaaaaaagaaagaaaa

SEQ ID NO: 547620 - RNA, 20 nt, Human
ugaguuuuauuuugucuugu

SEQ ID NO: 547621 - RNA, 20 nt, Human
ugaugggagaagggcuugca

SEQ ID NO: 547622 - RNA, 20 nt, Human
ugcaaaccaagaucaaggug

SEQ ID NO: 547623 - RNA, 19 nt, Human
ugccacaauaggauaaaaa

SEQ ID NO: 547624 - RNA, 19 nt, Human
ugcucucgaauguuccagg

SEQ ID NO: 547625 - RNA, 24 nt, Human
ugcugcagcacgcauaaaccaaca

SEQ ID NO: 547626 - RNA, 18 nt, Human
uggauauaacuauuugga

SEQ ID NO: 547627 - RNA, 21 nt, Human
ugggggguuaaaaaaaaaaaa

SEQ ID NO: 547628 - RNA, 22 nt, Human
ugggggguuaaaaaaaaaaaag

SEQ ID NO: 547629 - RNA, 25 nt, Human
uggucuggccaccucaugaauccaa

SEQ ID NO: 547630 - RNA, 18 nt, Human
ugucuugucuggauagag

SEQ ID NO: 547631 - RNA, 24 nt, Human
uuagcuacuggccaauccacacca

SEQ ID NO: 547632 - RNA, 19 nt, Human
uuauucagauaauguuuga

SEQ ID NO: 547633 - RNA, 21 nt, Human
uucaaaccacgauuuucccau

SEQ ID NO: 547634 - RNA, 23 nt, Human
uucaauacucuuuaaaagcccac

SEQ ID NO: 547635 - RNA, 22 nt, Human
uucacuugguacacaccuuugu

SEQ ID NO: 547636 - RNA, 24 nt, Human
uucaggagauggugaguuuuauuu

SEQ ID NO: 547637 - RNA, 23 nt, Human
uugcuggaggucacacaauuuuc

SEQ ID NO: 547638 - RNA, 19 nt, Human
uugggagguuaagaguagc

SEQ ID NO: 547639 - RNA, 21 nt, Human
uuuaaaaaagaaagaaaaacc

SEQ ID NO: 547640 - RNA, 22 nt, Human
uuuccccuauuaccuggugcaa

SEQ ID NO: 547641 - RNA, 22 nt, Human
uuugcucucgaauguuccaggg

SEQ ID NO: 547642 - RNA, 23 nt, Human
uuuuucuuuuuuaaaaaagaaag

SEQ ID NO: 547643 - RNA, 23 nt, Human
aaaaaaauccaaacuguugacac

SEQ ID NO: 547644 - RNA, 20 nt, Human
aaaagaaaaucccaaaugua

SEQ ID NO: 547645 - RNA, 21 nt, Human
aaaagcccauaaaccaacccg

SEQ ID NO: 547646 - RNA, 19 nt, Human
aacagcuucacacagagug

SEQ ID NO: 547647 - RNA, 21 nt, Human
aagaaaaucccaaauguacaa

SEQ ID NO: 547648 - RNA, 23 nt, Human
aagauccuuccaucauaaugcgg

SEQ ID NO: 547649 - RNA, 18 nt, Human
aagcaggguccugcccag

SEQ ID NO: 547650 - RNA, 18 nt, Human
acacacuuagcauaugca

SEQ ID NO: 547651 - RNA, 27 nt, Human
accaaacagcuucacacagagugcucc

SEQ ID NO: 547652 - RNA, 23 nt, Human
auaaugcggaccacaccagaugc

SEQ ID NO: 547653 - RNA, 23 nt, Human
auaucuuacaaaaaagaaagacc

SEQ ID NO: 547654 - RNA, 23 nt, Human
augaagcaggguccugcccagug

SEQ ID NO: 547655 - RNA, 24 nt, Human
caaauguacaagugaaaaaaaucc

SEQ ID NO: 547656 - RNA, 18 nt, Human
cccauaaaccaacccgag

SEQ ID NO: 547657 - RNA, 26 nt, Human
cuauacauuuauuuccucagaacccu

SEQ ID NO: 547658 - RNA, 19 nt, Human
cugcacucggugccuccgc

SEQ ID NO: 547659 - RNA, 18 nt, Human
cuucacacagagugcucc

SEQ ID NO: 547660 - RNA, 19 nt, Human
gcccauaaaccaacccgag

SEQ ID NO: 547661 - RNA, 23 nt, Human
ggauugacaacauugugcauccu

SEQ ID NO: 547662 - RNA, 21 nt, Human
uaaucaaccaaaagaaaaucc

SEQ ID NO: 547663 - RNA, 25 nt, Human
uacaaaaaagaaagaccauuuccag

SEQ ID NO: 547664 - RNA, 26 nt, Human
uccaaaguaaaagcccauaaaccaac

SEQ ID NO: 547665 - RNA, 21 nt, Human
ucuguacauaagggucuauac

SEQ ID NO: 547666 - RNA, 19 nt, Human
uggguuccaccaaacagcu

SEQ ID NO: 547667 - RNA, 22 nt, Human
uguacauaagggucuauacauu

SEQ ID NO: 547668 - RNA, 18 nt, Human
uuuauacacaggucugua

SEQ ID NO: 547669 - RNA, 23 nt, Human
aaaaagaaaagauuaaaacagaa

SEQ ID NO: 547670 - RNA, 25 nt, Human
aaaaagaaaagauuaaaacagaaaa

SEQ ID NO: 547671 - RNA, 22 nt, Human
aacuuuuuuuuuuuuuugcuaa

SEQ ID NO: 547672 - RNA, 18 nt, Human
aaggggaugggguagggg

SEQ ID NO: 547673 - RNA, 18 nt, Human
aguuguuuacagaaacug

SEQ ID NO: 547674 - RNA, 24 nt, Human
augccaaaaaaaaaaaaaucuuuc

SEQ ID NO: 547675 - RNA, 28 nt, Human
augugcugaauaaggggaugggguaggg

SEQ ID NO: 547676 - RNA, 25 nt, Human
auuugaugccaaaaaaaaaaaaauc

SEQ ID NO: 547677 - RNA, 20 nt, Human
caaacuucaguuuccucauc

SEQ ID NO: 547678 - RNA, 22 nt, Human
cauguacaccuuuuuuucucuu

SEQ ID NO: 547679 - RNA, 18 nt, Human
cgcaagauuuggaugccc

SEQ ID NO: 547680 - RNA, 20 nt, Human
gaauaaggggaugggguagg

SEQ ID NO: 547681 - RNA, 22 nt, Human
gcaauguuugucuuuauuuugu

SEQ ID NO: 547682 - RNA, 23 nt, Human
gcagaaagauuugaugccaaaaa

SEQ ID NO: 547683 - RNA, 22 nt, Human
guuaccuugggaaaaugaugug

SEQ ID NO: 547684 - RNA, 18 nt, Human
uaccuuguucaccccaaa

SEQ ID NO: 547685 - RNA, 22 nt, Human
uaccuuguucaccccaaacuuu

SEQ ID NO: 547686 - RNA, 25 nt, Human
uaccuuguucaccccaaacuuucuc

SEQ ID NO: 547687 - RNA, 22 nt, Human
uauuuuguucuuuauauuuuca

SEQ ID NO: 547688 - RNA, 23 nt, Human
ucaggguagcacuuuuuuuuuuu

SEQ ID NO: 547689 - RNA, 19 nt, Human
uccaaacuucaguuuccuc

SEQ ID NO: 547690 - RNA, 20 nt, Human
ucucaggguagcacuuuuuu

SEQ ID NO: 547691 - RNA, 19 nt, Human
ucugaagcaagcugagagg

SEQ ID NO: 547692 - RNA, 25 nt, Human
ucuuuuguuucauuuuguguauuug

SEQ ID NO: 547693 - RNA, 20 nt, Human
ugaagcaagcugagaggcag

SEQ ID NO: 547694 - RNA, 22 nt, Human
ugagagaguccaggggacgaug

SEQ ID NO: 547695 - RNA, 25 nt, Human
uggaugccccuuguuuauuucaugu

SEQ ID NO: 547696 - RNA, 25 nt, Human
ugggaaaaugaugugaucgcuccaa

SEQ ID NO: 547697 - RNA, 21 nt, Human
ugggguagggguucccggcug

SEQ ID NO: 547698 - RNA, 22 nt, Human
ugggguagggguucccggcugg

SEQ ID NO: 547699 - RNA, 19 nt, Human
ugucccgggggcguugccg

SEQ ID NO: 547700 - RNA, 23 nt, Human
uguuuugauuacuauugugauuu

SEQ ID NO: 547701 - RNA, 26 nt, Human
uucaaagugaaaagaaauaguacuga

SEQ ID NO: 547702 - RNA, 23 nt, Human
uucuauguauuuacaagccuuaa

SEQ ID NO: 547703 - RNA, 20 nt, Human
uugaugccaaaaaaaaaaaa

SEQ ID NO: 547704 - RNA, 23 nt, Human
uugaugccaaaaaaaaaaaaauc

SEQ ID NO: 547705 - RNA, 27 nt, Human
uugaugccaaaaaaaaaaaaaucuuuc

SEQ ID NO: 547706 - RNA, 20 nt, Human
uuuacaagccuuaaaguugc

SEQ ID NO: 547707 - RNA, 26 nt, Human
uuuuuucucuuuccccucucccacuc

SEQ ID NO: 547708 - RNA, 22 nt, Human
uuuuuuuuuuuuaaacaauucu

SEQ ID NO: 547709 - RNA, 23 nt, Human
aaaaaaaaagaaaaaagaaagaa

SEQ ID NO: 547710 - RNA, 26 nt, Human
aaaaaaaauccucuuuggugugacaa

SEQ ID NO: 547711 - RNA, 20 nt, Human
aaaaaaacagaggugaaugg

SEQ ID NO: 547712 - RNA, 18 nt, Human
aaaaagaaaaaagaaaga

SEQ ID NO: 547713 - RNA, 27 nt, Human
aaaaauaucccaagucuuacaccaaaa

SEQ ID NO: 547714 - RNA, 21 nt, Human
aaacagucagaacccauaaua

SEQ ID NO: 547715 - RNA, 23 nt, Human
aaagccacacugaacgaaaaaau

SEQ ID NO: 547716 - RNA, 18 nt, Human
aaaguguagcaugauguu

SEQ ID NO: 547717 - RNA, 23 nt, Human
aagcaaccaaaaucuaaaaagca

SEQ ID NO: 547718 - RNA, 19 nt, Human
aaguucucucaguacaaag

SEQ ID NO: 547719 - RNA, 24 nt, Human
acacgacuucaaagacaauuuggg

SEQ ID NO: 547720 - RNA, 22 nt, Human
acaguaugucuaacauuuugga

SEQ ID NO: 547721 - RNA, 18 nt, Human
acauguugcacuucuggc

SEQ ID NO: 547722 - RNA, 21 nt, Human
acccaacgcugcucgcccggg

SEQ ID NO: 547723 - RNA, 18 nt, Human
acccuaagggcaaaagcu

SEQ ID NO: 547724 - RNA, 25 nt, Human
acccuaagggcaaaagcugaaaaau

SEQ ID NO: 547725 - RNA, 19 nt, Human
acccuuccuuguuucuccc

SEQ ID NO: 547726 - RNA, 22 nt, Human
agaaaaaagaaagaaaaucaag

SEQ ID NO: 547727 - RNA, 22 nt, Human
agaucagccuugcggcaaagaa

SEQ ID NO: 547728 - RNA, 20 nt, Human
aggcauuacagaacaaacug

SEQ ID NO: 547729 - RNA, 21 nt, Human
aggguaacugccaagagguuu

SEQ ID NO: 547730 - RNA, 25 nt, Human
agguaccaauggcugcgcaacagcu

SEQ ID NO: 547731 - RNA, 24 nt, Human
aguuaucaacucuuguguguccaa

SEQ ID NO: 547732 - RNA, 20 nt, Human
aucaacucuuguguguccaa

SEQ ID NO: 547733 - RNA, 19 nt, Human
aucaagccaaccaaguuuu

SEQ ID NO: 547734 - RNA, 22 nt, Human
aucuuugauugcaacuuuuugg

SEQ ID NO: 547735 - RNA, 25 nt, Human
auuacaauuaaguuugcuuuacauc

SEQ ID NO: 547736 - RNA, 19 nt, Human
caaagcacauucccuccag

SEQ ID NO: 547737 - RNA, 19 nt, Human
caaauccuuaagacaguuc

SEQ ID NO: 547738 - RNA, 20 nt, Human
cacaaaaaaacagaggugaa

SEQ ID NO: 547739 - RNA, 21 nt, Human
caccaguaucuccuacagaau

SEQ ID NO: 547740 - RNA, 22 nt, Human
cacccgaaucuugaucaaaggc

SEQ ID NO: 547741 - RNA, 20 nt, Human
cacugaguaugcugagugca

SEQ ID NO: 547742 - RNA, 22 nt, Human
cagaggugaaugguauaagcca

SEQ ID NO: 547743 - RNA, 19 nt, Human
caggaccuaacaauaucug

SEQ ID NO: 547744 - RNA, 26 nt, Human
caucugaagaacgaccaaaaucaaac

SEQ ID NO: 547745 - RNA, 19 nt, Human
cauugggcuuaauaacaga

SEQ ID NO: 547746 - RNA, 24 nt, Human
ccacacccgucagcgccggagcug

SEQ ID NO: 547747 - RNA, 21 nt, Human
ccacacugaacgaaaaaauac

SEQ ID NO: 547748 - RNA, 22 nt, Human
ccacacugaacgaaaaaauaca

SEQ ID NO: 547749 - RNA, 18 nt, Human
ccccaaagcaaguucucu

SEQ ID NO: 547750 - RNA, 24 nt, Human
cccgggacugggaugaagugaggc

SEQ ID NO: 547751 - RNA, 21 nt, Human
ccgccgagcagcggggagggg

SEQ ID NO: 547752 - RNA, 22 nt, Human
cgcgguccacacccgucagcgc

SEQ ID NO: 547753 - RNA, 18 nt, Human
cgggccagaugccgccgc

SEQ ID NO: 547754 - RNA, 22 nt, Human
cuaaagcccugcaugggcucug

SEQ ID NO: 547755 - RNA, 24 nt, Human
cuagaagcccugaacauguuuucc

SEQ ID NO: 547756 - RNA, 18 nt, Human
cuggagaagaagggauga

SEQ ID NO: 547757 - RNA, 22 nt, Human
cuuaagucauucagagccaaac

SEQ ID NO: 547758 - RNA, 23 nt, Human
gcaacauacaaguuugaagaaaa

SEQ ID NO: 547759 - RNA, 21 nt, Human
gcaaguucucucaguacaaag

SEQ ID NO: 547760 - RNA, 21 nt, Human
gccacacugaacgaaaaaaua

SEQ ID NO: 547761 - RNA, 20 nt, Human
ggacugggaugaagugaggc

SEQ ID NO: 547762 - RNA, 22 nt, Human
ggcaaagaauuugaaaccuagg

SEQ ID NO: 547763 - RNA, 25 nt, Human
ggcaagaaagcaaccaaaaucuaaa

SEQ ID NO: 547764 - RNA, 23 nt, Human
ggggaggggcugucccagcgacg

SEQ ID NO: 547765 - RNA, 22 nt, Human
ggucucugacaugaaaaaauuu

SEQ ID NO: 547766 - RNA, 22 nt, Human
guaugcugagugcaacuuagcu

SEQ ID NO: 547767 - RNA, 24 nt, Human
gucagcgccggagcugggcgaccu

SEQ ID NO: 547768 - RNA, 20 nt, Human
uaaacaaauccuuaagacag

SEQ ID NO: 547769 - RNA, 23 nt, Human
uaaacccuaagggcaaaagcuga

SEQ ID NO: 547770 - RNA, 24 nt, Human
uaaaguaaggagccaguuacuuca

SEQ ID NO: 547771 - RNA, 22 nt, Human
uaaauaagcaaacuacaucugc

SEQ ID NO: 547772 - RNA, 21 nt, Human
uaacaauaucuggcaggcucc

SEQ ID NO: 547773 - RNA, 18 nt, Human
uaacagaccacucacagu

SEQ ID NO: 547774 - RNA, 23 nt, Human
uaacuacuacgcacacacaaaau

SEQ ID NO: 547775 - RNA, 21 nt, Human
uacaaaguaacuacuacgcac

SEQ ID NO: 547776 - RNA, 21 nt, Human
uagaaccucauuagcuugaca

SEQ ID NO: 547777 - RNA, 24 nt, Human
uagaaccucauuagcuugacacug

SEQ ID NO: 547778 - RNA, 18 nt, Human
uagaugucucauugggcu

SEQ ID NO: 547779 - RNA, 21 nt, Human
uaguuaagugcacccuuccuu

SEQ ID NO: 547780 - RNA, 21 nt, Human
uauaagccacugcuccaaaau

SEQ ID NO: 547781 - RNA, 24 nt, Human
ucaagccaaccaaguuuuauuaca

SEQ ID NO: 547782 - RNA, 22 nt, Human
ucauucagagccaaacaucuga

SEQ ID NO: 547783 - RNA, 28 nt, Human
uccaaaauuaacccuaucgauucucgau

SEQ ID NO: 547784 - RNA, 19 nt, Human
ucccaagucuuacaccaaa

SEQ ID NO: 547785 - RNA, 23 nt, Human
ucccaagucuuacaccaaaauag

SEQ ID NO: 547786 - RNA, 19 nt, Human
uccuguugaggaccucuuu

SEQ ID NO: 547787 - RNA, 20 nt, Human
uccuuguuucucccaaauaa

SEQ ID NO: 547788 - RNA, 24 nt, Human
ucuagaagcccugaacauguuuuc

SEQ ID NO: 547789 - RNA, 23 nt, Human
ucuccaaguuucaaauccugcuc

SEQ ID NO: 547790 - RNA, 23 nt, Human
ugaacaaaguucagauuauguga

SEQ ID NO: 547791 - RNA, 24 nt, Human
ugaacaaaguucagauuaugugaa

SEQ ID NO: 547792 - RNA, 22 nt, Human
ugaagaacgaccaaaaucaaaa

SEQ ID NO: 547793 - RNA, 18 nt, Human
ugaaguaaaaaauauccc

SEQ ID NO: 547794 - RNA, 22 nt, Human
ugacaaagcacauucccuccag

SEQ ID NO: 547795 - RNA, 18 nt, Human
ugaggaaguuaucaacuc

SEQ ID NO: 547796 - RNA, 23 nt, Human
ugaggaccucuuugcagccccag

SEQ ID NO: 547797 - RNA, 19 nt, Human
ugccgccgccgagcagcgg

SEQ ID NO: 547798 - RNA, 23 nt, Human
uguguguccaaaucuaaagcccu

SEQ ID NO: 547799 - RNA, 18 nt, Human
uguugaggaccucuuugc

SEQ ID NO: 547800 - RNA, 20 nt, Human
uucaugaggaaguuaucaac

SEQ ID NO: 547801 - RNA, 23 nt, Human
uucccuggcucauccaacgugca

SEQ ID NO: 547802 - RNA, 21 nt, Human
uucgaaguuuggcaccagacu

SEQ ID NO: 547803 - RNA, 23 nt, Human
uucgaaguuuggcaccagacuga

SEQ ID NO: 547804 - RNA, 23 nt, Human
uugcacauacauguugcacuucu

SEQ ID NO: 547805 - RNA, 18 nt, Human
uugguaucuucugucugg

SEQ ID NO: 547806 - RNA, 24 nt, Human
uuguaugcuauguuuccccaauac

SEQ ID NO: 547807 - RNA, 24 nt, Human
uuuaaacaaauccuuaagacaguu

SEQ ID NO: 547808 - RNA, 21 nt, Human
uuuggcaagaaagcaaccaaa

SEQ ID NO: 547809 - RNA, 25 nt, Human
uuuuauaacuguauaaaugugaucc

SEQ ID NO: 547810 - RNA, 22 nt, Human
aaaaacagucacagaaucgugc

SEQ ID NO: 547811 - RNA, 21 nt, Human
aaagcaagauaaccaaauuaa

SEQ ID NO: 547812 - RNA, 19 nt, Human
aacacauuucuaauccacc

SEQ ID NO: 547813 - RNA, 21 nt, Human
acagagaaaaacagucacaga

SEQ ID NO: 547814 - RNA, 19 nt, Human
accacauacggauagcagu

SEQ ID NO: 547815 - RNA, 19 nt, Human
agagaaaaacagucacaga

SEQ ID NO: 547816 - RNA, 19 nt, Human
caacauagguuaaauuauc

SEQ ID NO: 547817 - RNA, 23 nt, Human
caacgaacgugaaacagagaaaa

SEQ ID NO: 547818 - RNA, 24 nt, Human
caacgaacgugaaacagagaaaaa

SEQ ID NO: 547819 - RNA, 22 nt, Human
cagugaauguauuucaccuucc

SEQ ID NO: 547820 - RNA, 26 nt, Human
cauuugaaaacauuauuuaauacaga

SEQ ID NO: 547821 - RNA, 23 nt, Human
ccccaaaaagaaauacuuucuaa

SEQ ID NO: 547822 - RNA, 18 nt, Human
cgucacgcgcggggcggg

SEQ ID NO: 547823 - RNA, 24 nt, Human
cucaacgaacgugaaacagagaaa

SEQ ID NO: 547824 - RNA, 18 nt, Human
gcgcugcgucagggugcc

SEQ ID NO: 547825 - RNA, 23 nt, Human
gugaaacagagaaaaacagucac

SEQ ID NO: 547826 - RNA, 28 nt, Human
uaagaaaagauucacaagcauugcucag

SEQ ID NO: 547827 - RNA, 21 nt, Human
uaauaaauaauucacauacaa

SEQ ID NO: 547828 - RNA, 26 nt, Human
uauugaauucaacaagauguaccacc

SEQ ID NO: 547829 - RNA, 19 nt, Human
ucaaaaauagauuugauug

SEQ ID NO: 547830 - RNA, 29 nt, Human
ucaacaagauguaccaccaacagagacaa

SEQ ID NO: 547831 - RNA, 21 nt, Human
ugaaacagagaaaaacaguca

SEQ ID NO: 547832 - RNA, 20 nt, Human
ugaauguauuucaccuuccu

SEQ ID NO: 547833 - RNA, 24 nt, Human
acagaacuaaaguacuaaacagaa

SEQ ID NO: 547834 - RNA, 21 nt, Human
acauauguauuaauaugaaga

SEQ ID NO: 547835 - RNA, 20 nt, Human
acccauacccuaaaaccaag

SEQ ID NO: 547836 - RNA, 18 nt, Human
acccuaaaaccaagagaa

SEQ ID NO: 547837 - RNA, 27 nt, Human
agaaaacacagguuucccccuucuccc

SEQ ID NO: 547838 - RNA, 23 nt, Human
agacccauacccuaaaaccaaga

SEQ ID NO: 547839 - RNA, 22 nt, Human
auucagaaaugauucaagucaa

SEQ ID NO: 547840 - RNA, 18 nt, Human
caagggcaagcuuaauuc

SEQ ID NO: 547841 - RNA, 20 nt, Human
cccccuucucccaucauccc

SEQ ID NO: 547842 - RNA, 23 nt, Human
cccccuucucccaucaucccaag

SEQ ID NO: 547843 - RNA, 20 nt, Human
cccuaaaaccaagagaaaac

SEQ ID NO: 547844 - RNA, 19 nt, Human
cgccagcaccucgcggacu

SEQ ID NO: 547845 - RNA, 18 nt, Human
cggccgggagcccggcgu

SEQ ID NO: 547846 - RNA, 25 nt, Human
cuauaccaaaacauauuuuguuaca

SEQ ID NO: 547847 - RNA, 28 nt, Human
gaaguagacccauacccuaaaaccaaga

SEQ ID NO: 547848 - RNA, 21 nt, Human
gccugcuugguugcuagggaa

SEQ ID NO: 547849 - RNA, 26 nt, Human
guagacccauacccuaaaaccaagag

SEQ ID NO: 547850 - RNA, 21 nt, Human
uaaaaccaagagaaaacacag

SEQ ID NO: 547851 - RNA, 21 nt, Human
uaaacagaaagcgauucugua

SEQ ID NO: 547852 - RNA, 24 nt, Human
uagauuuacuuauucagaaaugau

SEQ ID NO: 547853 - RNA, 21 nt, Human
ucaguaaguguccugguaacu

SEQ ID NO: 547854 - RNA, 20 nt, Human
ucccagcgugcuccggcgcc

SEQ ID NO: 547855 - RNA, 23 nt, Human
uggggccagaguagucugcugga

SEQ ID NO: 547856 - RNA, 25 nt, Human
uuaaaaaacuuauaacaauacuuag

SEQ ID NO: 547857 - RNA, 22 nt, Human
uucaaagaaguagacccauacc

SEQ ID NO: 547858 - RNA, 19 nt, Human
uuuuguuacaagggcaagc

SEQ ID NO: 547859 - RNA, 26 nt, Human
auuauuuuccuucugugaccuuucca

SEQ ID NO: 547860 - RNA, 19 nt, Human
caagucugaaacaguccca

SEQ ID NO: 547861 - RNA, 18 nt, Human
ugugaccuuuccaagucg

SEQ ID NO: 547862 - RNA, 19 nt, Human
ugugaccuuuccaagucug

SEQ ID NO: 547863 - RNA, 18 nt, Human
uuuuuuuuuuuuuuuuug

SEQ ID NO: 547864 - RNA, 21 nt, Human
uuuuuuuuuuuuuuuuugcau

SEQ ID NO: 547865 - RNA, 24 nt, Human
uuuuuuuuuuuuuuuuuugcauag

SEQ ID NO: 547866 - RNA, 25 nt, Human
uuuuuuuuuuuuuuuuuuuauuuuu

SEQ ID NO: 547867 - RNA, 22 nt, Human
cgaucagcacugccagcugggc

SEQ ID NO: 547868 - RNA, 21 nt, Human
ugggaucgaucagcacugcca

SEQ ID NO: 547869 - RNA, 21 nt, Human
uuuuuuuuuuuuuuuuuccga

SEQ ID NO: 547870 - RNA, 23 nt, Human
uuuuuuuuuuuuuuuuuuuuccg

SEQ ID NO: 547871 - RNA, 27 nt, Human
uuuuuuuuuuuuuuuuuuuuuccgggg

SEQ ID NO: 547872 - RNA, 24 nt, Human
uuuuuuuuuuuuuuuuuuuuuccu

SEQ ID NO: 547873 - RNA, 22 nt, Human
cgaucagcacugccagcugggc

SEQ ID NO: 547874 - RNA, 21 nt, Human
ugggaucgaucagcacugcca

SEQ ID NO: 547875 - RNA, 22 nt, Human
aaaauaccauuuuuagccacga

SEQ ID NO: 547876 - RNA, 22 nt, Human
aaacaagaaauaaaaaaacugg

SEQ ID NO: 547877 - RNA, 23 nt, Human
aaacaagaaauaaaaaaacugga

SEQ ID NO: 547878 - RNA, 25 nt, Human
aaacugccaaaauaccauuuuuagc

SEQ ID NO: 547879 - RNA, 26 nt, Human
aaauaauuucagacuaaaacaagaaa

SEQ ID NO: 547880 - RNA, 22 nt, Human
aacaucccuuaucccugcugac

SEQ ID NO: 547881 - RNA, 19 nt, Human
aacgucucaugacauuucu

SEQ ID NO: 547882 - RNA, 20 nt, Human
aagaaauaaaaaaacuggac

SEQ ID NO: 547883 - RNA, 18 nt, Human
acacauucacucuuuagg

SEQ ID NO: 547884 - RNA, 21 nt, Human
aguaguaccaccacuaccacc

SEQ ID NO: 547885 - RNA, 23 nt, Human
auacugagccaauucaucaaugc

SEQ ID NO: 547886 - RNA, 25 nt, Human
auagcagcaauaaagcugggcagaa

SEQ ID NO: 547887 - RNA, 23 nt, Human
caagaaaacauacccauaauuuc

SEQ ID NO: 547888 - RNA, 20 nt, Human
caccccucuccccgaggccc

SEQ ID NO: 547889 - RNA, 20 nt, Human
cacucuuuaggauuugacuu

SEQ ID NO: 547890 - RNA, 19 nt, Human
cagcaauaaagcugggcag

SEQ ID NO: 547891 - RNA, 24 nt, Human
cauuaugucacuaauuuugguaaa

SEQ ID NO: 547892 - RNA, 24 nt, Human
ccaaaauaccauuuuuagccacga

SEQ ID NO: 547893 - RNA, 19 nt, Human
ccaccccucuccccgaggc

SEQ ID NO: 547894 - RNA, 20 nt, Human
ccacuaccaccaccguacuc

SEQ ID NO: 547895 - RNA, 18 nt, Human
cccgcacccuggcccagc

SEQ ID NO: 547896 - RNA, 25 nt, Human
cgaggcccgcgccaggagccgaggg

SEQ ID NO: 547897 - RNA, 23 nt, Human
cuaaaacaagaaauaaaaaaacu

SEQ ID NO: 547898 - RNA, 22 nt, Human
cuggacuauagguucaguaaca

SEQ ID NO: 547899 - RNA, 24 nt, Human
cuuccaccccucuccccgaggccc

SEQ ID NO: 547900 - RNA, 21 nt, Human
gacuucaaaaaggaugcuggg

SEQ ID NO: 547901 - RNA, 19 nt, Human
gagccgagggaggcgcagg

SEQ ID NO: 547902 - RNA, 21 nt, Human
gaggcccgcgccaggagccga

SEQ ID NO: 547903 - RNA, 23 nt, Human
gcaggcccgcacccuggcccagc

SEQ ID NO: 547904 - RNA, 20 nt, Human
gcuauggucaugcuaucauc

SEQ ID NO: 547905 - RNA, 20 nt, Human
gcuguguaucucaaugggcc

SEQ ID NO: 547906 - RNA, 21 nt, Human
gggcagaagcuaagcccagga

SEQ ID NO: 547907 - RNA, 24 nt, Human
ggugagaugauucuuuauuguaua

SEQ ID NO: 547908 - RNA, 22 nt, Human
uaaaauaaacaccuagccaaac

SEQ ID NO: 547909 - RNA, 24 nt, Human
uaaaauaaacaccuagccaaaccc

SEQ ID NO: 547910 - RNA, 26 nt, Human
uaaaauaaacaccuagccaaacccug

SEQ ID NO: 547911 - RNA, 19 nt, Human
uacaaacugccaaaauacc

SEQ ID NO: 547912 - RNA, 20 nt, Human
uacaaacugccaaaauacca

SEQ ID NO: 547913 - RNA, 21 nt, Human
uaccuccagguucauaagcuu

SEQ ID NO: 547914 - RNA, 21 nt, Human
uaucaaaaaguuugcucccuu

SEQ ID NO: 547915 - RNA, 22 nt, Human
uaucucaaugggccugcaauuu

SEQ ID NO: 547916 - RNA, 19 nt, Human
ucaauacaaacugccaaaa

SEQ ID NO: 547917 - RNA, 20 nt, Human
ugacaagaaaacauacccau

SEQ ID NO: 547918 - RNA, 20 nt, Human
ugagccaauucaucaaugca

SEQ ID NO: 547919 - RNA, 23 nt, Human
ugcuguguaucucaaugggccug

SEQ ID NO: 547920 - RNA, 19 nt, Human
uggcccagcuguccgcggg

SEQ ID NO: 547921 - RNA, 20 nt, Human
ugggcagaagcuaagcccag

SEQ ID NO: 547922 - RNA, 25 nt, Human
uggguuaagacccaaauagaaaguu

SEQ ID NO: 547923 - RNA, 20 nt, Human
ugugguaguagcacaaaaua

SEQ ID NO: 547924 - RNA, 20 nt, Human
uuaaaauaaacaccuagcca

SEQ ID NO: 547925 - RNA, 25 nt, Human
uuaaaauaaacaccuagccaaaccc

SEQ ID NO: 547926 - RNA, 20 nt, Human
uucagacuaaaacaagaaau

SEQ ID NO: 547927 - RNA, 24 nt, Human
uucauaagcuucacuuaauggcuc

SEQ ID NO: 547928 - RNA, 22 nt, Human
uuccagcaaagcuauggucaug

SEQ ID NO: 547929 - RNA, 23 nt, Human
uugcuguguaucucaaugggccu

SEQ ID NO: 547930 - RNA, 19 nt, Human
uuugcaggacagcuaacau

SEQ ID NO: 547931 - RNA, 21 nt, Human
aaauucacucuguaauaugaa

SEQ ID NO: 547932 - RNA, 23 nt, Human
aacaauuacaaaauuagaaaccu

SEQ ID NO: 547933 - RNA, 18 nt, Human
aacauuuuagcuauucuu

SEQ ID NO: 547934 - RNA, 24 nt, Human
aagaagauucacguaucaggcagc

SEQ ID NO: 547935 - RNA, 20 nt, Human
accaauuaaagauacaaaaa

SEQ ID NO: 547936 - RNA, 21 nt, Human
acuauccugcuucugaaacag

SEQ ID NO: 547937 - RNA, 23 nt, Human
agaaaaucuaauacaauguaaaa

SEQ ID NO: 547938 - RNA, 22 nt, Human
agaaagagucuugacucucuca

SEQ ID NO: 547939 - RNA, 19 nt, Human
agauccacaugagaaaaau

SEQ ID NO: 547940 - RNA, 18 nt, Human
aggcagcaaaauccagga

SEQ ID NO: 547941 - RNA, 21 nt, Human
auagcaacugaaauaaaaauc

SEQ ID NO: 547942 - RNA, 21 nt, Human
caaagcacaguggccuaaaga

SEQ ID NO: 547943 - RNA, 19 nt, Human
caacugaaauaaaaaucuc

SEQ ID NO: 547944 - RNA, 20 nt, Human
cacguaucaggcagcaaaau

SEQ ID NO: 547945 - RNA, 21 nt, Human
cagcucugucuguggaguaau

SEQ ID NO: 547946 - RNA, 19 nt, Human
ccccccaaguccgccccca

SEQ ID NO: 547947 - RNA, 18 nt, Human
cccuuagauccacaugag

SEQ ID NO: 547948 - RNA, 22 nt, Human
ccugucuucaguggcuucuuuu

SEQ ID NO: 547949 - RNA, 22 nt, Human
cgcccccaguaaaaaaugaucc

SEQ ID NO: 547950 - RNA, 25 nt, Human
cuaaagucaaucuaagugacaccau

SEQ ID NO: 547951 - RNA, 25 nt, Human
cuaagugacaccauaauuuuaacaa

SEQ ID NO: 547952 - RNA, 22 nt, Human
cuauauaaauuuccuguugccu

SEQ ID NO: 547953 - RNA, 18 nt, Human
cugaaauuuuucuucucu

SEQ ID NO: 547954 - RNA, 22 nt, Human
gaauuaaaaaaauuagaacuag

SEQ ID NO: 547955 - RNA, 21 nt, Human
gcaaagcacaguggccuaaag

SEQ ID NO: 547956 - RNA, 23 nt, Human
uaaagcauuccccuuagauccac

SEQ ID NO: 547957 - RNA, 21 nt, Human
uaaauguacauuauuuacagu

SEQ ID NO: 547958 - RNA, 23 nt, Human
uaagaaagagucuugacucucuc

SEQ ID NO: 547959 - RNA, 22 nt, Human
uaagugacaccauaauuuuaac

SEQ ID NO: 547960 - RNA, 19 nt, Human
uaaucuaaaaacauuucau

SEQ ID NO: 547961 - RNA, 19 nt, Human
uacacaaguggaaugaaaa

SEQ ID NO: 547962 - RNA, 23 nt, Human
uagaaaagaaacuuuaaaaaugc

SEQ ID NO: 547963 - RNA, 19 nt, Human
uagaacuagaagagaaagu

SEQ ID NO: 547964 - RNA, 19 nt, Human
uagaaucagucagucugca

SEQ ID NO: 547965 - RNA, 26 nt, Human
uagcaguauucuguuuagcacuuagc

SEQ ID NO: 547966 - RNA, 18 nt, Human
uaggaagaauuuauggca

SEQ ID NO: 547967 - RNA, 19 nt, Human
uauaacugacuacucagcc

SEQ ID NO: 547968 - RNA, 19 nt, Human
uauccugcuucugaaacag

SEQ ID NO: 547969 - RNA, 21 nt, Human
ucaagacuuaacuuacacaag

SEQ ID NO: 547970 - RNA, 20 nt, Human
ucagaaaaucuaauacaaug

SEQ ID NO: 547971 - RNA, 18 nt, Human
uccgcccccaguaaaaaa

SEQ ID NO: 547972 - RNA, 21 nt, Human
uccuucacgauugaauucuga

SEQ ID NO: 547973 - RNA, 20 nt, Human
ucucuuccuuuuaugagagg

SEQ ID NO: 547974 - RNA, 21 nt, Human
ucuguaauaugaaaacauagc

SEQ ID NO: 547975 - RNA, 22 nt, Human
ugaaaaaguaaucuaaaaacau

SEQ ID NO: 547976 - RNA, 25 nt, Human
ugaaaacauagcauuagaccucuaa

SEQ ID NO: 547977 - RNA, 18 nt, Human
ugagaggaacuaaagccc

SEQ ID NO: 547978 - RNA, 19 nt, Human
ugagaggaacuaaagccca

SEQ ID NO: 547979 - RNA, 21 nt, Human
ugauccaaaauauaaagcaau

SEQ ID NO: 547980 - RNA, 24 nt, Human
uggauauauauguuaucuuuguau

SEQ ID NO: 547981 - RNA, 20 nt, Human
uguaaaauuagaaaagaaac

SEQ ID NO: 547982 - RNA, 23 nt, Human
uguuuagaggauuccaaaauuua

SEQ ID NO: 547983 - RNA, 19 nt, Human
uuaaauguacauuauuuac

SEQ ID NO: 547984 - RNA, 25 nt, Human
uuaggaaauaaccugauaaugauuu

SEQ ID NO: 547985 - RNA, 22 nt, Human
uuagggaaggugcuucaguuuu

SEQ ID NO: 547986 - RNA, 19 nt, Human
uucuuggcccuuaagaaag

SEQ ID NO: 547987 - RNA, 24 nt, Human
uuguaugcaaccccccccaagucc

SEQ ID NO: 547988 - RNA, 20 nt, Human
uuuguaugcaacccccccca

SEQ ID NO: 547989 - RNA, 23 nt, Human
aaaaaaaacaaagaaaacuccag

SEQ ID NO: 547990 - RNA, 21 nt, Human
aaaaaaacaaagaaaacucca

SEQ ID NO: 547991 - RNA, 24 nt, Human
aaaaaaagaaaaaaaaacaaagaa

SEQ ID NO: 547992 - RNA, 23 nt, Human
aaaaaagaaaaaaaaacaaagaa

SEQ ID NO: 547993 - RNA, 22 nt, Human
aaaaagcuuuacacaaacaagc

SEQ ID NO: 547994 - RNA, 18 nt, Human
aaaacacuucuauacuga

SEQ ID NO: 547995 - RNA, 21 nt, Human
aaaagaaaaaaaaacaaagaa

SEQ ID NO: 547996 - RNA, 22 nt, Human
aaagaaaaaaaaacaaagaaaa

SEQ ID NO: 547997 - RNA, 19 nt, Human
aaauguugaauauacaaac

SEQ ID NO: 547998 - RNA, 22 nt, Human
aacuaaaaaaaagaaaaaaaga

SEQ ID NO: 547999 - RNA, 23 nt, Human
aagaggcaguuuucugucagcau

SEQ ID NO: 548000 - RNA, 20 nt, Human
accaaaacagaagauaaauu

SEQ ID NO: 548001 - RNA, 22 nt, Human
acccaucccaaccccucccacu

SEQ ID NO: 548002 - RNA, 23 nt, Human
acccaucccaaccccucccacug

SEQ ID NO: 548003 - RNA, 21 nt, Human
acugugcuagguacaagauuu

SEQ ID NO: 548004 - RNA, 20 nt, Human
agagaccaaaacagaagaua

SEQ ID NO: 548005 - RNA, 21 nt, Human
agagaccaaaacagaagauaa

SEQ ID NO: 548006 - RNA, 23 nt, Human
agagaccaaaacagaagauaaau

SEQ ID NO: 548007 - RNA, 18 nt, Human
agcaaaaggccagagcca

SEQ ID NO: 548008 - RNA, 20 nt, Human
agguauuagagcuaccugcc

SEQ ID NO: 548009 - RNA, 22 nt, Human
agucuuaguguaacuugauauc

SEQ ID NO: 548010 - RNA, 24 nt, Human
auagaauauacuucaaauguugaa

SEQ ID NO: 548011 - RNA, 19 nt, Human
auauauauauauauauaua

SEQ ID NO: 548012 - RNA, 19 nt, Human
auauauauauauauauaua

SEQ ID NO: 548013 - RNA, 19 nt, Human
auauauauauauauauaua

SEQ ID NO: 548014 - RNA, 19 nt, Human
auauauauauauauauaua

SEQ ID NO: 548015 - RNA, 19 nt, Human
auauauguauguauauaua

SEQ ID NO: 548016 - RNA, 23 nt, Human
auaugauauauauauauguaugu

SEQ ID NO: 548017 - RNA, 18 nt, Human
auguauauauauauauau

SEQ ID NO: 548018 - RNA, 19 nt, Human
auguauauauauauauaua

SEQ ID NO: 548019 - RNA, 22 nt, Human
auucaugcugagccugaacuuc

SEQ ID NO: 548020 - RNA, 23 nt, Human
auucuucaauucacauucuaaaa

SEQ ID NO: 548021 - RNA, 23 nt, Human
caacaaaauagaauauacuucaa

SEQ ID NO: 548022 - RNA, 23 nt, Human
caaccccucccacugaaaaacua

SEQ ID NO: 548023 - RNA, 20 nt, Human
caagccauuagcuuauuuca

SEQ ID NO: 548024 - RNA, 24 nt, Human
caagugacagcagaacugaaaaug

SEQ ID NO: 548025 - RNA, 19 nt, Human
cacacgccgugcgaccgac

SEQ ID NO: 548026 - RNA, 23 nt, Human
cagcaaaaggccagagccaacug

SEQ ID NO: 548027 - RNA, 21 nt, Human
caguacugccacuaacagccu

SEQ ID NO: 548028 - RNA, 23 nt, Human
caucccaaccccucccacugaaa

SEQ ID NO: 548029 - RNA, 22 nt, Human
ccaaaacagaagauaaauuuca

SEQ ID NO: 548030 - RNA, 20 nt, Human
ccacugaaacaugggauagg

SEQ ID NO: 548031 - RNA, 18 nt, Human
ccggagacacacgccgug

SEQ ID NO: 548032 - RNA, 19 nt, Human
cgcggccggagacacacgc

SEQ ID NO: 548033 - RNA, 24 nt, Human
cggaacccgcggccggagacacac

SEQ ID NO: 548034 - RNA, 23 nt, Human
cggcggcaggggaggaggcggaa

SEQ ID NO: 548035 - RNA, 25 nt, Human
cuaaaacacuucuauacugacuuuu

SEQ ID NO: 548036 - RNA, 19 nt, Human
cugcuuggucccuuucgau

SEQ ID NO: 548037 - RNA, 19 nt, Human
gaacccgcggccggagaca

SEQ ID NO: 548038 - RNA, 24 nt, Human
gcacuagaucuuuuuuugcuaucc

SEQ ID NO: 548039 - RNA, 18 nt, Human
gcagcggcggcaggggag

SEQ ID NO: 548040 - RNA, 18 nt, Human
gcggccggagacacacgc

SEQ ID NO: 548041 - RNA, 25 nt, Human
uaaaaaaaagaaaaaaaaacaaaga

SEQ ID NO: 548042 - RNA, 27 nt, Human
uaaaauaucaccagagaccaaaacaga

SEQ ID NO: 548043 - RNA, 19 nt, Human
uaacuugauaucguaguga

SEQ ID NO: 548044 - RNA, 24 nt, Human
uacaagauuuuuaaaauuuuucuu

SEQ ID NO: 548045 - RNA, 21 nt, Human
uacccaucccaaccccuccca

SEQ ID NO: 548046 - RNA, 22 nt, Human
uacuguaagaggcaguuuucug

SEQ ID NO: 548047 - RNA, 20 nt, Human
uagaauuucuucaugcagua

SEQ ID NO: 548048 - RNA, 18 nt, Human
uagcagagucuucacaua

SEQ ID NO: 548049 - RNA, 21 nt, Human
uagcagagucuucacauagca

SEQ ID NO: 548050 - RNA, 19 nt, Human
uauauauauauauauauau

SEQ ID NO: 548051 - RNA, 19 nt, Human
uauauauauauauauauau

SEQ ID NO: 548052 - RNA, 19 nt, Human
uauauauauauauauauau

SEQ ID NO: 548053 - RNA, 20 nt, Human
uauauauauguauguauaua

SEQ ID NO: 548054 - RNA, 18 nt, Human
uauaugauauauauauau

SEQ ID NO: 548055 - RNA, 20 nt, Human
uauauguauguauauauaua

SEQ ID NO: 548056 - RNA, 20 nt, Human
uauauguauguauauauaua

SEQ ID NO: 548057 - RNA, 22 nt, Human
uauauguauguauauauauaua

SEQ ID NO: 548058 - RNA, 28 nt, Human
uaucacuuccuaacuaaaacacuucuau

SEQ ID NO: 548059 - RNA, 23 nt, Human
uaugauauauauauauguaugua

SEQ ID NO: 548060 - RNA, 18 nt, Human
uauguauauauauauaua

SEQ ID NO: 548061 - RNA, 19 nt, Human
uauguauauauauauauau

SEQ ID NO: 548062 - RNA, 22 nt, Human
uauguauauauauauauauaua

SEQ ID NO: 548063 - RNA, 18 nt, Human
uauguauguauauauaua

SEQ ID NO: 548064 - RNA, 20 nt, Human
uauguauguauauauauaua

SEQ ID NO: 548065 - RNA, 22 nt, Human
uauguauguauauauauauaua

SEQ ID NO: 548066 - RNA, 25 nt, Human
ucaacuaaaaaaaagaaaaaaaaac

SEQ ID NO: 548067 - RNA, 21 nt, Human
ucacuuccuaacuaaaacacu

SEQ ID NO: 548068 - RNA, 18 nt, Human
ucagaaaaccuacuugaa

SEQ ID NO: 548069 - RNA, 24 nt, Human
uccacaauuaagaaacugacagac

SEQ ID NO: 548070 - RNA, 22 nt, Human
ucccggggcuggagcuggguac

SEQ ID NO: 548071 - RNA, 20 nt, Human
ucuaaaauaccuauauuagc

SEQ ID NO: 548072 - RNA, 23 nt, Human
ucugaaguuuuugggauccauuc

SEQ ID NO: 548073 - RNA, 21 nt, Human
ucuucaauucacauucuaaaa

SEQ ID NO: 548074 - RNA, 18 nt, Human
ucuucacauagcaccagu

SEQ ID NO: 548075 - RNA, 19 nt, Human
ugauaucguagugagcugc

SEQ ID NO: 548076 - RNA, 19 nt, Human
ugccacuaacagccugaag

SEQ ID NO: 548077 - RNA, 20 nt, Human
uggaaguagaauuucuucau

SEQ ID NO: 548078 - RNA, 18 nt, Human
uguauauauauauauaua

SEQ ID NO: 548079 - RNA, 22 nt, Human
uguauauauauauauauauaua

SEQ ID NO: 548080 - RNA, 22 nt, Human
uguauguauauauauauauaua

SEQ ID NO: 548081 - RNA, 19 nt, Human
ugucaguacugccacuaac

SEQ ID NO: 548082 - RNA, 20 nt, Human
ugucaguacugccacuaaca

SEQ ID NO: 548083 - RNA, 21 nt, Human
uguuuuaaagucuucuuugga

SEQ ID NO: 548084 - RNA, 19 nt, Human
uuaaaauaucaccagagac

SEQ ID NO: 548085 - RNA, 22 nt, Human
uuaagaaacugacagacuuaaa

SEQ ID NO: 548086 - RNA, 24 nt, Human
uuacagcaaaaggccagagccaac

SEQ ID NO: 548087 - RNA, 26 nt, Human
uuuaaaauaucaccagagaccaaaac

SEQ ID NO: 548088 - RNA, 23 nt, Human
uuuaucacuuccuaacuaaaaca

SEQ ID NO: 548089 - RNA, 25 nt, Human
uuucugaaguuuuugggauccauuc

SEQ ID NO: 548090 - RNA, 23 nt, Human
aaaaaggcacuuuaaugccaacu

SEQ ID NO: 548091 - RNA, 23 nt, Human
aaauacucaaugaauucagcucu

SEQ ID NO: 548092 - RNA, 21 nt, Human
aaggcacuuuaaugccaacug

SEQ ID NO: 548093 - RNA, 23 nt, Human
aaugcugcucaauuuugccuggu

SEQ ID NO: 548094 - RNA, 22 nt, Human
acaaagaagagaagagcgagag

SEQ ID NO: 548095 - RNA, 20 nt, Human
acccuggccacaaacuucug

SEQ ID NO: 548096 - RNA, 21 nt, Human
acugaaaugcaggggcaggug

SEQ ID NO: 548097 - RNA, 21 nt, Human
acugaaucucggcaugaacaa

SEQ ID NO: 548098 - RNA, 23 nt, Human
acugaaucucggcaugaacaaag

SEQ ID NO: 548099 - RNA, 20 nt, Human
agaaaaaggcacuuuaaugc

SEQ ID NO: 548100 - RNA, 18 nt, Human
agaagggagaggggagga

SEQ ID NO: 548101 - RNA, 19 nt, Human
agaccucacagcuacagcc

SEQ ID NO: 548102 - RNA, 19 nt, Human
agagggaagggggaagcag

SEQ ID NO: 548103 - RNA, 24 nt, Human
agagggaagggggaagcagggagc

SEQ ID NO: 548104 - RNA, 23 nt, Human
agauagagccagguagaagggcu

SEQ ID NO: 548105 - RNA, 21 nt, Human
agcagcagaaaccauguggua

SEQ ID NO: 548106 - RNA, 20 nt, Human
agccccgccagcccguccuc

SEQ ID NO: 548107 - RNA, 18 nt, Human
aggaggucuucugcaguc

SEQ ID NO: 548108 - RNA, 30 nt, Human
aggcacuuuaaugccaacugcuggaaacag

SEQ ID NO: 548109 - RNA, 18 nt, Human
agggaagggggaagcagg

SEQ ID NO: 548110 - RNA, 21 nt, Human
agggagaggggaggagaucca

SEQ ID NO: 548111 - RNA, 22 nt, Human
agggggcagggagaaagaagag

SEQ ID NO: 548112 - RNA, 21 nt, Human
aggggguggagagagcuggag

SEQ ID NO: 548113 - RNA, 21 nt, Human
agguacuuuggagccuagagc

SEQ ID NO: 548114 - RNA, 23 nt, Human
caaacagcccaagcccuaggcac

SEQ ID NO: 548115 - RNA, 21 nt, Human
caacaaguacacacaaguaca

SEQ ID NO: 548116 - RNA, 21 nt, Human
caagauuccagccugacugca

SEQ ID NO: 548117 - RNA, 21 nt, Human
cacacaaguacauacagggga

SEQ ID NO: 548118 - RNA, 21 nt, Human
cacacacccuuggagacaaga

SEQ ID NO: 548119 - RNA, 22 nt, Human
cacagcuacagcccuguccucc

SEQ ID NO: 548120 - RNA, 26 nt, Human
cacauuacccaaagucaccagauauu

SEQ ID NO: 548121 - RNA, 20 nt, Human
cacugugggguggcccaaga

SEQ ID NO: 548122 - RNA, 19 nt, Human
cagcaaagguccucaggca

SEQ ID NO: 548123 - RNA, 22 nt, Human
cagccccgccagcccguccucu

SEQ ID NO: 548124 - RNA, 24 nt, Human
cagcuacagcccuguccuccccaa

SEQ ID NO: 548125 - RNA, 23 nt, Human
caggaucggggaaguagacuggg

SEQ ID NO: 548126 - RNA, 20 nt, Human
cagggccgggggacuugggg

SEQ ID NO: 548127 - RNA, 19 nt, Human
cagucaggcugagcagcag

SEQ ID NO: 548128 - RNA, 20 nt, Human
cagugagauagagccaggua

SEQ ID NO: 548129 - RNA, 22 nt, Human
caucacagaggcaggcuggucc

SEQ ID NO: 548130 - RNA, 20 nt, Human
cauucugggcuggaccaacc

SEQ ID NO: 548131 - RNA, 19 nt, Human
ccaaagaaacuaagauaca

SEQ ID NO: 548132 - RNA, 20 nt, Human
ccacgggaacuccuggcugc

SEQ ID NO: 548133 - RNA, 22 nt, Human
ccaggaagaguaccuuggucca

SEQ ID NO: 548134 - RNA, 27 nt, Human
ccaggcagggccgggggacuugggguc

SEQ ID NO: 548135 - RNA, 19 nt, Human
ccaggggagguaguuaggu

SEQ ID NO: 548136 - RNA, 20 nt, Human
ccaggggagguaguuagguc

SEQ ID NO: 548137 - RNA, 20 nt, Human
cccaaagaaacuaagauaca

SEQ ID NO: 548138 - RNA, 20 nt, Human
cccauagucucagagcaacu

SEQ ID NO: 548139 - RNA, 24 nt, Human
cccaugcuugagcaggaauggggg

SEQ ID NO: 548140 - RNA, 19 nt, Human
ccccgccagcccguccucu

SEQ ID NO: 548141 - RNA, 23 nt, Human
ccccgccagcccguccucucccc

SEQ ID NO: 548142 - RNA, 23 nt, Human
ccccugagcugcaguaaaauagg

SEQ ID NO: 548143 - RNA, 21 nt, Human
cccguccucuccccucggaag

SEQ ID NO: 548144 - RNA, 20 nt, Human
ccuacccccugagcugcagu

SEQ ID NO: 548145 - RNA, 23 nt, Human
ccugagcugcaguaaaauagggg

SEQ ID NO: 548146 - RNA, 22 nt, Human
cgacucccgucuucuuggugaa

SEQ ID NO: 548147 - RNA, 19 nt, Human
cgaguggcucacgggccca

SEQ ID NO: 548148 - RNA, 20 nt, Human
cgccaggaacucggcgccgg

SEQ ID NO: 548149 - RNA, 23 nt, Human
cgccaggaacucggcgccggcga

SEQ ID NO: 548150 - RNA, 20 nt, Human
cggaagccgggccgggcgag

SEQ ID NO: 548151 - RNA, 19 nt, Human
cgggccgggcgagcggcgc

SEQ ID NO: 548152 - RNA, 24 nt, Human
cggggucugucuccgugguccccg

SEQ ID NO: 548153 - RNA, 23 nt, Human
cucaaacuuggcaggagggaggc

SEQ ID NO: 548154 - RNA, 19 nt, Human
cucacagcuacagcccugu

SEQ ID NO: 548155 - RNA, 22 nt, Human
cugcacaaacccuggccacaaa

SEQ ID NO: 548156 - RNA, 20 nt, Human
cugcagucaucacagaggca

SEQ ID NO: 548157 - RNA, 24 nt, Human
cugccggacuagccccagugaugc

SEQ ID NO: 548158 - RNA, 22 nt, Human
cuggccacaaacuucuccuucg

SEQ ID NO: 548159 - RNA, 24 nt, Human
cuuagccuugcccucaaacuuggc

SEQ ID NO: 548160 - RNA, 22 nt, Human
cuugcccucaaacuuggcagga

SEQ ID NO: 548161 - RNA, 18 nt, Human
cuuuuuuuuuuuuuuuug

SEQ ID NO: 548162 - RNA, 23 nt, Human
gaagcagggagccacgaagagag

SEQ ID NO: 548163 - RNA, 19 nt, Human
gaaguagacugggguguca

SEQ ID NO: 548164 - RNA, 20 nt, Human
gaauuccuuuuuuuuuuuuu

SEQ ID NO: 548165 - RNA, 20 nt, Human
gagaaagaagaguaggagag

SEQ ID NO: 548166 - RNA, 19 nt, Human
gagaagagcgagagcgcgg

SEQ ID NO: 548167 - RNA, 22 nt, Human
gagccuagagccuacccccuga

SEQ ID NO: 548168 - RNA, 25 nt, Human
gagcgaccugaggccgaguggcuca

SEQ ID NO: 548169 - RNA, 21 nt, Human
gagcugcaguaaaauaggggg

SEQ ID NO: 548170 - RNA, 24 nt, Human
gagcugcaguaaaauagggggugg

SEQ ID NO: 548171 - RNA, 18 nt, Human
gagggaagggggaagcag

SEQ ID NO: 548172 - RNA, 19 nt, Human
gagguaguuaggucaagug

SEQ ID NO: 548173 - RNA, 22 nt, Human
gagguaguuaggucaaguggau

SEQ ID NO: 548174 - RNA, 21 nt, Human
gaguggcucacgggcccagcu

SEQ ID NO: 548175 - RNA, 25 nt, Human
gcaaacuccaggaagaggggaacgc

SEQ ID NO: 548176 - RNA, 21 nt, Human
gcaacugaaucucggcaugaa

SEQ ID NO: 548177 - RNA, 20 nt, Human
gcaaggugacugugguugcu

SEQ ID NO: 548178 - RNA, 21 nt, Human
gcaggcugguccgccuucgag

SEQ ID NO: 548179 - RNA, 18 nt, Human
gccacagugacaccaggc

SEQ ID NO: 548180 - RNA, 19 nt, Human
gccaggggagguaguuagg

SEQ ID NO: 548181 - RNA, 18 nt, Human
gccgagacgcgggucccc

SEQ ID NO: 548182 - RNA, 26 nt, Human
gcugagcagcagaaaccaugugguag

SEQ ID NO: 548183 - RNA, 21 nt, Human
ggagaaagaagaguaggagag

SEQ ID NO: 548184 - RNA, 22 nt, Human
ggcugccgacucccgucuucuu

SEQ ID NO: 548185 - RNA, 26 nt, Human
gggaagcagggagccacgaagagaga

SEQ ID NO: 548186 - RNA, 18 nt, Human
gggccgggggacuugggg

SEQ ID NO: 548187 - RNA, 20 nt, Human
gggccggggucugucuccgu

SEQ ID NO: 548188 - RNA, 22 nt, Human
ggguccccagccccgccagccc

SEQ ID NO: 548189 - RNA, 22 nt, Human
gucuucuuggugaaggagucag

SEQ ID NO: 548190 - RNA, 26 nt, Human
gucuucuuggugaaggagucaggguu

SEQ ID NO: 548191 - RNA, 22 nt, Human
guggcugacauuucuuagccuu

SEQ ID NO: 548192 - RNA, 21 nt, Human
guggggcuuucuugaugaagg

SEQ ID NO: 548193 - RNA, 26 nt, Human
uaaaaacaaaaucccuaucccugugg

SEQ ID NO: 548194 - RNA, 19 nt, Human
uacagcaaagcacuguggg

SEQ ID NO: 548195 - RNA, 19 nt, Human
uaccccauagucucagagc

SEQ ID NO: 548196 - RNA, 21 nt, Human
uacuuuggagccuagagccua

SEQ ID NO: 548197 - RNA, 24 nt, Human
uaggggguggagagagcuggagua

SEQ ID NO: 548198 - RNA, 21 nt, Human
ucacacaaacagcccaagccc

SEQ ID NO: 548199 - RNA, 22 nt, Human
ucaccaagucagcccguuaugc

SEQ ID NO: 548200 - RNA, 22 nt, Human
ucagagagcugacaacgggauu

SEQ ID NO: 548201 - RNA, 21 nt, Human
uccagagcuguggggcuuucu

SEQ ID NO: 548202 - RNA, 23 nt, Human
uccagagcuguggggcuuucuug

SEQ ID NO: 548203 - RNA, 20 nt, Human
uccagggggcagggagaaag

SEQ ID NO: 548204 - RNA, 18 nt, Human
ucccagagcugacuuccc

SEQ ID NO: 548205 - RNA, 18 nt, Human
uccccaaagaaacuaaga

SEQ ID NO: 548206 - RNA, 18 nt, Human
uccccaaagaaacuaaga

SEQ ID NO: 548207 - RNA, 19 nt, Human
uccccagccccgccagccc

SEQ ID NO: 548208 - RNA, 21 nt, Human
uccccagccccgccagcccgu

SEQ ID NO: 548209 - RNA, 22 nt, Human
ucccuuaaaaacaaaaucccua

SEQ ID NO: 548210 - RNA, 24 nt, Human
ucccuucgugguuuuaccccacuc

SEQ ID NO: 548211 - RNA, 20 nt, Human
uccgugguccccgcuccggg

SEQ ID NO: 548212 - RNA, 20 nt, Human
uccuacagcaaagcacugug

SEQ ID NO: 548213 - RNA, 18 nt, Human
uccuuuuuuuuuuuuuuu

SEQ ID NO: 548214 - RNA, 21 nt, Human
uccuuuuuuuuuuuuuuuugg

SEQ ID NO: 548215 - RNA, 20 nt, Human
ucugcagucaucacagaggc

SEQ ID NO: 548216 - RNA, 23 nt, Human
ucuguaccaaggacacagcaaag

SEQ ID NO: 548217 - RNA, 24 nt, Human
ucuguaccaaggacacagcaaagg

SEQ ID NO: 548218 - RNA, 22 nt, Human
ugaaaaugcugcucaauuuugc

SEQ ID NO: 548219 - RNA, 18 nt, Human
ugagcaggaaugggggug

SEQ ID NO: 548220 - RNA, 22 nt, Human
ugagggcugcucccagagcuga

SEQ ID NO: 548221 - RNA, 20 nt, Human
ugaggggcauugguacaccc

SEQ ID NO: 548222 - RNA, 23 nt, Human
ugaugaagggacaauacccaggu

SEQ ID NO: 548223 - RNA, 22 nt, Human
ugccacgggaacuccuggcugc

SEQ ID NO: 548224 - RNA, 21 nt, Human
ugccagggaugcuuaagcugg

SEQ ID NO: 548225 - RNA, 21 nt, Human
ugccuggcucaaggcuuuuuc

SEQ ID NO: 548226 - RNA, 18 nt, Human
uggccacaaacuucugcc

SEQ ID NO: 548227 - RNA, 22 nt, Human
uggcccaagauuccagccugac

SEQ ID NO: 548228 - RNA, 20 nt, Human
uggcugacauuucuuagccu

SEQ ID NO: 548229 - RNA, 19 nt, Human
ugggagaugaggggcauug

SEQ ID NO: 548230 - RNA, 22 nt, Human
ugggcuggaccaaccacaggag

SEQ ID NO: 548231 - RNA, 21 nt, Human
uggggguggaccccaucuagg

SEQ ID NO: 548232 - RNA, 19 nt, Human
uuaaagaagggagagggga

SEQ ID NO: 548233 - RNA, 20 nt, Human
uuuccguggcugacauuucu

SEQ ID NO: 548234 - RNA, 25 nt, Human
uuugcacaaccaaacacagugcccu

SEQ ID NO: 548235 - RNA, 22 nt, Human
aaaaccuucauuuaugcuagaa

SEQ ID NO: 548236 - RNA, 23 nt, Human
aaacacaccuuaagaucggggag

SEQ ID NO: 548237 - RNA, 23 nt, Human
aacaacaacaacaaaaaugggaa

SEQ ID NO: 548238 - RNA, 21 nt, Human
aagaagcuggguaggaaaggc

SEQ ID NO: 548239 - RNA, 18 nt, Human
aagagcaacgggcaucug

SEQ ID NO: 548240 - RNA, 29 nt, Human
aagcagaaaggcagaguaagagggacccc

SEQ ID NO: 548241 - RNA, 23 nt, Human
aagcagaaaggcagaguaagaug

SEQ ID NO: 548242 - RNA, 24 nt, Human
aagcagaagagacaguaaaaagaa

SEQ ID NO: 548243 - RNA, 20 nt, Human
aagccucagcacuagcgaca

SEQ ID NO: 548244 - RNA, 23 nt, Human
aagcuggguaggaaaggcgaaag

SEQ ID NO: 548245 - RNA, 22 nt, Human
aaggaauguguguaggaggaaa

SEQ ID NO: 548246 - RNA, 18 nt, Human
aaguggccuuuucaagga

SEQ ID NO: 548247 - RNA, 25 nt, Human
aauuuuuuguagagacagggucacg

SEQ ID NO: 548248 - RNA, 22 nt, Human
acaacaacaaaaaugggaaccu

SEQ ID NO: 548249 - RNA, 25 nt, Human
acaacaacaacaacaaaaaugggaa

SEQ ID NO: 548250 - RNA, 18 nt, Human
accagcccaagagcaacg

SEQ ID NO: 548251 - RNA, 20 nt, Human
agaaaacacaccuuaagauc

SEQ ID NO: 548252 - RNA, 18 nt, Human
agacagggucacgcuaug

SEQ ID NO: 548253 - RNA, 23 nt, Human
agcagaaaaucaacaacaacaac

SEQ ID NO: 548254 - RNA, 22 nt, Human
agcugguggagugaguccacgg

SEQ ID NO: 548255 - RNA, 23 nt, Human
aggaaggaauguguguaggagga

SEQ ID NO: 548256 - RNA, 21 nt, Human
agguccccagcuguccaaucu

SEQ ID NO: 548257 - RNA, 21 nt, Human
agguguucaggggaaaccagc

SEQ ID NO: 548258 - RNA, 21 nt, Human
aguguagagaccacauccaaa

SEQ ID NO: 548259 - RNA, 21 nt, Human
aucaacaacaacaacaacaaa

SEQ ID NO: 548260 - RNA, 21 nt, Human
aucaagaagguuaguguagag

SEQ ID NO: 548261 - RNA, 19 nt, Human
auccugaagcugcccccgg

SEQ ID NO: 548262 - RNA, 18 nt, Human
augaagacucagaccuug

SEQ ID NO: 548263 - RNA, 26 nt, Human
caacaacaacaaaaaugggaacccug

SEQ ID NO: 548264 - RNA, 24 nt, Human
caacaacaacaacaaaaaugggaa

SEQ ID NO: 548265 - RNA, 28 nt, Human
caacaacaacaacaaaaaugggaaccuu

SEQ ID NO: 548266 - RNA, 19 nt, Human
caagaagguuaguguagag

SEQ ID NO: 548267 - RNA, 19 nt, Human
caagagcaacgggcaucug

SEQ ID NO: 548268 - RNA, 22 nt, Human
cacagaauccacuacaucucuc

SEQ ID NO: 548269 - RNA, 23 nt, Human
caccagcucccacaguucuccac

SEQ ID NO: 548270 - RNA, 18 nt, Human
caccgccgccgccgccac

SEQ ID NO: 548271 - RNA, 21 nt, Human
cagcccaagagcaacgggcau

SEQ ID NO: 548272 - RNA, 22 nt, Human
cagcuccgccccugcccggggg

SEQ ID NO: 548273 - RNA, 26 nt, Human
caggaaaggugugagcagaaaaucaa

SEQ ID NO: 548274 - RNA, 19 nt, Human
caggagagacugguggaga

SEQ ID NO: 548275 - RNA, 18 nt, Human
caggaggugagaggcucc

SEQ ID NO: 548276 - RNA, 18 nt, Human
ccaaagcagaaaggcaga

SEQ ID NO: 548277 - RNA, 20 nt, Human
ccagcccgggccgugagcaa

SEQ ID NO: 548278 - RNA, 22 nt, Human
cccccuucucuuuuucuaaucu

SEQ ID NO: 548279 - RNA, 19 nt, Human
cccuucucuuuuucuaauc

SEQ ID NO: 548280 - RNA, 25 nt, Human
ccgccgccacuaccgccgccgccgg

SEQ ID NO: 548281 - RNA, 20 nt, Human
ccgcgcugucgccgccgccg

SEQ ID NO: 548282 - RNA, 22 nt, Human
ccgcggccgucucaccguccuc

SEQ ID NO: 548283 - RNA, 19 nt, Human
ccucagggcugccgcuacu

SEQ ID NO: 548284 - RNA, 24 nt, Human
ccucagggcugccgcuacugcugc

SEQ ID NO: 548285 - RNA, 24 nt, Human
ccugcucacagcuccccgguacaa

SEQ ID NO: 548286 - RNA, 23 nt, Human
cgcugucgccgccgccgcggccg

SEQ ID NO: 548287 - RNA, 24 nt, Human
cgggacaauggucugcuaucugcu

SEQ ID NO: 548288 - RNA, 18 nt, Human
cugcauugucccguucac

SEQ ID NO: 548289 - RNA, 19 nt, Human
cugccgcugccgcccgggc

SEQ ID NO: 548290 - RNA, 22 nt, Human
cugccgcugccgcccgggcacc

SEQ ID NO: 548291 - RNA, 21 nt, Human
cuuccgcgcugucgccgccgc

SEQ ID NO: 548292 - RNA, 20 nt, Human
cuucuucaagugagcaaguu

SEQ ID NO: 548293 - RNA, 22 nt, Human
cuucuuguuaacuggccgagga

SEQ ID NO: 548294 - RNA, 22 nt, Human
cuuucaaccucacauguucuuc

SEQ ID NO: 548295 - RNA, 24 nt, Human
gaagcuggguaggaaaggcgaaag

SEQ ID NO: 548296 - RNA, 24 nt, Human
gaaggcugcgacagacaggcaggg

SEQ ID NO: 548297 - RNA, 18 nt, Human
gacacgggugcuggcaag

SEQ ID NO: 548298 - RNA, 24 nt, Human
gcagcucauucucccaagccgccu

SEQ ID NO: 548299 - RNA, 25 nt, Human
gccgcccgggcaccgccgccgccgg

SEQ ID NO: 548300 - RNA, 24 nt, Human
ggaaucacacuucuucaagugagc

SEQ ID NO: 548301 - RNA, 20 nt, Human
ggcaaagcuagcagggugag

SEQ ID NO: 548302 - RNA, 18 nt, Human
gggaaaccagcccaagag

SEQ ID NO: 548303 - RNA, 18 nt, Human
gggcagagccaccagcuc

SEQ ID NO: 548304 - RNA, 20 nt, Human
gggcgcguugcccugcccag

SEQ ID NO: 548305 - RNA, 26 nt, Human
ggggaaaccagcccaagagcaacggg

SEQ ID NO: 548306 - RNA, 18 nt, Human
guagagacagggucacgc

SEQ ID NO: 548307 - RNA, 20 nt, Human
guagagaccacauccaaagc

SEQ ID NO: 548308 - RNA, 19 nt, Human
guccaaucuugaagaagua

SEQ ID NO: 548309 - RNA, 20 nt, Human
guggagaacaccucacacca

SEQ ID NO: 548310 - RNA, 19 nt, Human
guggagugaguccacggag

SEQ ID NO: 548311 - RNA, 20 nt, Human
guuauaggaagcugguggag

SEQ ID NO: 548312 - RNA, 18 nt, Human
uaagaggggcuggaugau

SEQ ID NO: 548313 - RNA, 23 nt, Human
uacagcuccgccccugcccgggg

SEQ ID NO: 548314 - RNA, 22 nt, Human
uagagacagggucacgcuaugu

SEQ ID NO: 548315 - RNA, 21 nt, Human
uaggaaaggcgaaagccucag

SEQ ID NO: 548316 - RNA, 24 nt, Human
uaggagaaagcaccuauugugaua

SEQ ID NO: 548317 - RNA, 18 nt, Human
uaucuuacaccauaucua

SEQ ID NO: 548318 - RNA, 18 nt, Human
uauguugcccuggcuggu

SEQ ID NO: 548319 - RNA, 19 nt, Human
uauguugcccuggcuggug

SEQ ID NO: 548320 - RNA, 21 nt, Human
ucaacaacaacaacaacaaaa

SEQ ID NO: 548321 - RNA, 24 nt, Human
ucacgcuauguugcccuggcuggu

SEQ ID NO: 548322 - RNA, 18 nt, Human
ucaugucagaggacagga

SEQ ID NO: 548323 - RNA, 18 nt, Human
uccauggcucucugucag

SEQ ID NO: 548324 - RNA, 23 nt, Human
ucccaagccaucgugaggccugc

SEQ ID NO: 548325 - RNA, 19 nt, Human
uccccccuucucuuuuucu

SEQ ID NO: 548326 - RNA, 25 nt, Human
uccccccuucucuuuuucuaaucuu

SEQ ID NO: 548327 - RNA, 19 nt, Human
ucccuuccccccuucucuu

SEQ ID NO: 548328 - RNA, 28 nt, Human
uccgcgcugucgccgccgccgcggccgg

SEQ ID NO: 548329 - RNA, 21 nt, Human
ucggucauggcagaggguugu

SEQ ID NO: 548330 - RNA, 21 nt, Human
ucuacagcuccgccccugccc

SEQ ID NO: 548331 - RNA, 18 nt, Human
ucucacagaauccacuac

SEQ ID NO: 548332 - RNA, 20 nt, Human
ucucuuuucuuggcuccugg

SEQ ID NO: 548333 - RNA, 18 nt, Human
ucugaaugaaauaaccga

SEQ ID NO: 548334 - RNA, 26 nt, Human
ucuguuacuggggcaaagcugcaggc

SEQ ID NO: 548335 - RNA, 18 nt, Human
ugaaauaaccgaggaagg

SEQ ID NO: 548336 - RNA, 20 nt, Human
ugaacuccaaguccauuccu

SEQ ID NO: 548337 - RNA, 23 nt, Human
ugaggaaggcugcgacagacagg

SEQ ID NO: 548338 - RNA, 18 nt, Human
ugcagcucauucucccaa

SEQ ID NO: 548339 - RNA, 21 nt, Human
ugcccuggcuggugcucuuuc

SEQ ID NO: 548340 - RNA, 22 nt, Human
ugcccuggcuggugcucuuuca

SEQ ID NO: 548341 - RNA, 21 nt, Human
uggaaaguaagcagaagagac

SEQ ID NO: 548342 - RNA, 19 nt, Human
uggagugaguccacggagg

SEQ ID NO: 548343 - RNA, 21 nt, Human
uggcuccuggguugacuaccu

SEQ ID NO: 548344 - RNA, 20 nt, Human
ugggaaccuugugagguguu

SEQ ID NO: 548345 - RNA, 21 nt, Human
ugguggagugaguccacggag

SEQ ID NO: 548346 - RNA, 24 nt, Human
uguagagacagggucacgcuaugu

SEQ ID NO: 548347 - RNA, 26 nt, Human
ugucccguucaccuuucucuaacuca

SEQ ID NO: 548348 - RNA, 23 nt, Human
ugucgccgccgccgcggccgucu

SEQ ID NO: 548349 - RNA, 23 nt, Human
uucaaccucacauguucuucaau

SEQ ID NO: 548350 - RNA, 24 nt, Human
uuccugguuucauucucaugucag

SEQ ID NO: 548351 - RNA, 23 nt, Human
uuggcaaacuccugcaguucugc

SEQ ID NO: 548352 - RNA, 19 nt, Human
uuguagagacagggucacg

SEQ ID NO: 548353 - RNA, 20 nt, Human
uuuguagagacagggucacg

SEQ ID NO: 548354 - RNA, 26 nt, Human
uuuguaguguuuggugccaagaaggu

SEQ ID NO: 548355 - RNA, 27 nt, Human
uuuucucuucccuuccccccuucuccc

SEQ ID NO: 548356 - RNA, 23 nt, Human
uuuuuuguagagacagggucacg

SEQ ID NO: 548357 - RNA, 24 nt, Human
aaaaaaacaaaaaaacacccuaca

SEQ ID NO: 548358 - RNA, 24 nt, Human
aaaaaaacaaaaaaacacccuaca

SEQ ID NO: 548359 - RNA, 25 nt, Human
aaaaaacaaaaaaacaaaaaaacac

SEQ ID NO: 548360 - RNA, 27 nt, Human
aaaaaacaaaaaaacaaaaaaacaccc

SEQ ID NO: 548361 - RNA, 24 nt, Human
aaaacaaaaaaacaaaaaaacacc

SEQ ID NO: 548362 - RNA, 21 nt, Human
aaauuucuaaauauucuacca

SEQ ID NO: 548363 - RNA, 26 nt, Human
aagaaaaaaaacaaaaaaacaaaaaa

SEQ ID NO: 548364 - RNA, 23 nt, Human
aagucacuagaguuuugcuccug

SEQ ID NO: 548365 - RNA, 26 nt, Human
aauaacaaacacaaguuuuugaggaa

SEQ ID NO: 548366 - RNA, 22 nt, Human
acaaaaaaacaaaaaaacaccc

SEQ ID NO: 548367 - RNA, 21 nt, Human
acaucuuuauuaaagacacua

SEQ ID NO: 548368 - RNA, 25 nt, Human
acuauguacacaacuagcaaacacc

SEQ ID NO: 548369 - RNA, 19 nt, Human
agaagaaaaaaaacaaaaa

SEQ ID NO: 548370 - RNA, 29 nt, Human
agaagaaaaaaaacaaaaaaacaaaaaag

SEQ ID NO: 548371 - RNA, 18 nt, Human
agagcaacucauuuggaa

SEQ ID NO: 548372 - RNA, 25 nt, Human
agaugcugguaggccacaguaugcu

SEQ ID NO: 548373 - RNA, 22 nt, Human
agcaaacaccuuaaggcaacca

SEQ ID NO: 548374 - RNA, 19 nt, Human
agccagaccucggacugcc

SEQ ID NO: 548375 - RNA, 22 nt, Human
aggaaaaaaaacugauuugaaa

SEQ ID NO: 548376 - RNA, 21 nt, Human
aggcugacgucuaggugacgc

SEQ ID NO: 548377 - RNA, 22 nt, Human
auacugaaacuuucaacagcca

SEQ ID NO: 548378 - RNA, 21 nt, Human
auagaagaaaaaaaacaaaaa

SEQ ID NO: 548379 - RNA, 28 nt, Human
aucaaugucaacagauaaacuccaguuu

SEQ ID NO: 548380 - RNA, 18 nt, Human
caaaaaaacaaaaaaaca

SEQ ID NO: 548381 - RNA, 24 nt, Human
caaaaaaacacccuacaguaacac

SEQ ID NO: 548382 - RNA, 22 nt, Human
caagugggaagcaguguagcua

SEQ ID NO: 548383 - RNA, 22 nt, Human
cacaguaugcuucccauugcuc

SEQ ID NO: 548384 - RNA, 19 nt, Human
cacaguauguuaugguuaa

SEQ ID NO: 548385 - RNA, 20 nt, Human
cacaugauaaaacaagugac

SEQ ID NO: 548386 - RNA, 23 nt, Human
cacccgccccacccuccggcccc

SEQ ID NO: 548387 - RNA, 24 nt, Human
cacccuccggccccgcgccccgcc

SEQ ID NO: 548388 - RNA, 24 nt, Human
caccgccgccacccgccccacccu

SEQ ID NO: 548389 - RNA, 25 nt, Human
cacuuugaaaagacaauacaauaag

SEQ ID NO: 548390 - RNA, 26 nt, Human
cagauaaacuccaugaaaugaaaguu

SEQ ID NO: 548391 - RNA, 24 nt, Human
caugcacgcucacauccacaccac

SEQ ID NO: 548392 - RNA, 19 nt, Human
ccaauaccuaaaaaaauua

SEQ ID NO: 548393 - RNA, 21 nt, Human
ccaccgccgccacccgcccca

SEQ ID NO: 548394 - RNA, 23 nt, Human
ccaccgccgccacccgccccacc

SEQ ID NO: 548395 - RNA, 20 nt, Human
ccccgccccgggcucgucuc

SEQ ID NO: 548396 - RNA, 19 nt, Human
ccccgcgccccgccccggg

SEQ ID NO: 548397 - RNA, 19 nt, Human
cccuccggccccgcgcccc

SEQ ID NO: 548398 - RNA, 18 nt, Human
ccgccccgggcucgucuc

SEQ ID NO: 548399 - RNA, 26 nt, Human
ccgccgccacccgccccacccuccgg

SEQ ID NO: 548400 - RNA, 21 nt, Human
ccgccgccgccgccgcuccgg

SEQ ID NO: 548401 - RNA, 22 nt, Human
ccuggcaccaggaugaaaaaaa

SEQ ID NO: 548402 - RNA, 22 nt, Human
cgccccacccuccggccccgcg

SEQ ID NO: 548403 - RNA, 18 nt, Human
cggccgcccuccacucuc

SEQ ID NO: 548404 - RNA, 20 nt, Human
cgucucauuggucuuguucc

SEQ ID NO: 548405 - RNA, 22 nt, Human
cugcggccgcggcugcuugggc

SEQ ID NO: 548406 - RNA, 23 nt, Human
cugcggccgcggcugcuugggcu

SEQ ID NO: 548407 - RNA, 22 nt, Human
cuggaugcuggagacaaacauc

SEQ ID NO: 548408 - RNA, 25 nt, Human
cuggcaccaggaugaaaaaaaaaaa

SEQ ID NO: 548409 - RNA, 28 nt, Human
cuuuauagcaguauauaaauagguuacc

SEQ ID NO: 548410 - RNA, 21 nt, Human
gaaaaaaaacaaaaaaacaaa

SEQ ID NO: 548411 - RNA, 24 nt, Human
gaaaaaaaacaaaaaaacaaaaaa

SEQ ID NO: 548412 - RNA, 20 nt, Human
gacaauacaauaagacaauu

SEQ ID NO: 548413 - RNA, 23 nt, Human
gaggaaaaaaaacugauuugaaa

SEQ ID NO: 548414 - RNA, 26 nt, Human
gauuuguaaacauaaugcuucccuuu

SEQ ID NO: 548415 - RNA, 23 nt, Human
gcaauuugauagaagaaaaaaaa

SEQ ID NO: 548416 - RNA, 24 nt, Human
gcaauuugauagaagaaaaaaaac

SEQ ID NO: 548417 - RNA, 21 nt, Human
gcacgcucacauccacaccac

SEQ ID NO: 548418 - RNA, 21 nt, Human
gcagcacuuugaaaagacaau

SEQ ID NO: 548419 - RNA, 22 nt, Human
gccaccgccgccacccgcccca

SEQ ID NO: 548420 - RNA, 22 nt, Human
gcccucaucggccgcccuccac

SEQ ID NO: 548421 - RNA, 21 nt, Human
gccgccgccgccgccgcuccg

SEQ ID NO: 548422 - RNA, 21 nt, Human
ggggugguggggaggaccaga

SEQ ID NO: 548423 - RNA, 20 nt, Human
ggguggggugguggggagga

SEQ ID NO: 548424 - RNA, 24 nt, Human
ggguggggugguggggaggaccag

SEQ ID NO: 548425 - RNA, 18 nt, Human
gguggggugguggggagg

SEQ ID NO: 548426 - RNA, 21 nt, Human
guauauacauauguguaugug

SEQ ID NO: 548427 - RNA, 20 nt, Human
gugccgccgccgccgccgcu

SEQ ID NO: 548428 - RNA, 24 nt, Human
uaaaacaagugacaguuuaaauca

SEQ ID NO: 548429 - RNA, 20 nt, Human
uaacaaacacaagucuuggg

SEQ ID NO: 548430 - RNA, 23 nt, Human
uaacaaacacaaguuuuugagga

SEQ ID NO: 548431 - RNA, 20 nt, Human
uaaguguggacacuggaucc

SEQ ID NO: 548432 - RNA, 22 nt, Human
uagaagaaaaaaaacaaaaaaa

SEQ ID NO: 548433 - RNA, 18 nt, Human
uagcaaacaccuuaaggc

SEQ ID NO: 548434 - RNA, 22 nt, Human
uaggugacgcgccaacuuaucc

SEQ ID NO: 548435 - RNA, 18 nt, Human
uauacauauguguaugug

SEQ ID NO: 548436 - RNA, 19 nt, Human
uauauacauauguguaugu

SEQ ID NO: 548437 - RNA, 24 nt, Human
uauguacacaacuagcaaacaccu

SEQ ID NO: 548438 - RNA, 22 nt, Human
uauguguaugugaaucuauaca

SEQ ID NO: 548439 - RNA, 27 nt, Human
ucaacuggcagcacuuugaaaagacaa

SEQ ID NO: 548440 - RNA, 18 nt, Human
ucacuagaguuuugcucc

SEQ ID NO: 548441 - RNA, 25 nt, Human
uccacaccaccucugcacacauaca

SEQ ID NO: 548442 - RNA, 26 nt, Human
uccccggggugccgccgccgccgccg

SEQ ID NO: 548443 - RNA, 23 nt, Human
ucucauuggucuuguucccuuca

SEQ ID NO: 548444 - RNA, 21 nt, Human
ugacaaacucguugaaaugga

SEQ ID NO: 548445 - RNA, 18 nt, Human
ugaggaaaaaaaacugau

SEQ ID NO: 548446 - RNA, 24 nt, Human
ugcacacauacagaucgagcacac

SEQ ID NO: 548447 - RNA, 25 nt, Human
ugcacacauacagaucgagcacaca

SEQ ID NO: 548448 - RNA, 21 nt, Human
ugcacgcucacauccacacca

SEQ ID NO: 548449 - RNA, 20 nt, Human
ugcuugggcuucugcagccg

SEQ ID NO: 548450 - RNA, 22 nt, Human
uggcaccaggaugaaaaaaaaa

SEQ ID NO: 548451 - RNA, 23 nt, Human
uggggaggaccagaaagagcagc

SEQ ID NO: 548452 - RNA, 21 nt, Human
uggggguggggugguggggag

SEQ ID NO: 548453 - RNA, 18 nt, Human
uggggugguggggaggac

SEQ ID NO: 548454 - RNA, 18 nt, Human
uguaaacauaaugcuucc

SEQ ID NO: 548455 - RNA, 22 nt, Human
uguacacaacuagcaaacaccu

SEQ ID NO: 548456 - RNA, 21 nt, Human
uguauauacauauguguaugu

SEQ ID NO: 548457 - RNA, 24 nt, Human
uguguaugugaaucuauacacaua

SEQ ID NO: 548458 - RNA, 26 nt, Human
uguuugaugaaucacaguauguuaug

SEQ ID NO: 548459 - RNA, 24 nt, Human
uugcaaugggggguuaacuugcag

SEQ ID NO: 548460 - RNA, 20 nt, Human
uuuuaaguguggacacugga

SEQ ID NO: 548461 - RNA, 20 nt, Human
uuuucuggaugcuggagaca

SEQ ID NO: 548462 - RNA, 18 nt, Human
uuuuuuuuuuuuuuucug

SEQ ID NO: 548463 - RNA, 20 nt, Human
uuuuuuuuuuuuuuuucugg

SEQ ID NO: 548464 - RNA, 20 nt, Human
aaaaaggccacgagacccuu

SEQ ID NO: 548465 - RNA, 18 nt, Human
aaccaaagccgugguccc

SEQ ID NO: 548466 - RNA, 23 nt, Human
aacuguacagcccuuuuagcccc

SEQ ID NO: 548467 - RNA, 25 nt, Human
aacuguacagcccuuuuagccccca

SEQ ID NO: 548468 - RNA, 23 nt, Human
aaggacuccguaggggccaggcg

SEQ ID NO: 548469 - RNA, 18 nt, Human
acagcaaugaggccacau

SEQ ID NO: 548470 - RNA, 25 nt, Human
acagcaaugaggccacaucccugga

SEQ ID NO: 548471 - RNA, 19 nt, Human
agcagcuguggggagggga

SEQ ID NO: 548472 - RNA, 19 nt, Human
agcccccagcucuggagug

SEQ ID NO: 548473 - RNA, 22 nt, Human
agggagcagggccagagagaag

SEQ ID NO: 548474 - RNA, 25 nt, Human
agggagggggaaauaacuguacagc

SEQ ID NO: 548475 - RNA, 24 nt, Human
agugacauuauugcugaccucuuc

SEQ ID NO: 548476 - RNA, 18 nt, Human
agugcuccucucccaagu

SEQ ID NO: 548477 - RNA, 21 nt, Human
auaacuguacagcccuuuuag

SEQ ID NO: 548478 - RNA, 21 nt, Human
cacacagccuccgugguuucc

SEQ ID NO: 548479 - RNA, 20 nt, Human
cacaucccuggagcugcccg

SEQ ID NO: 548480 - RNA, 21 nt, Human
cacugacggacacugcccuaa

SEQ ID NO: 548481 - RNA, 19 nt, Human
cagccugccugccugccac

SEQ ID NO: 548482 - RNA, 19 nt, Human
cagcuguggggaggggagg

SEQ ID NO: 548483 - RNA, 23 nt, Human
ccagcucuggaguggcagacagc

SEQ ID NO: 548484 - RNA, 25 nt, Human
cccacccugaccuuuggcccagaag

SEQ ID NO: 548485 - RNA, 26 nt, Human
ccccgcccacccugaccuuuggccca

SEQ ID NO: 548486 - RNA, 18 nt, Human
cccggggccagccugccu

SEQ ID NO: 548487 - RNA, 21 nt, Human
ccugaccuuuggcccagaagc

SEQ ID NO: 548488 - RNA, 18 nt, Human
ccugccugccacuuccuc

SEQ ID NO: 548489 - RNA, 18 nt, Human
ccuuggucacagguguag

SEQ ID NO: 548490 - RNA, 19 nt, Human
cgugguuuccucugucacu

SEQ ID NO: 548491 - RNA, 21 nt, Human
cucucccaaguuuuaaggcag

SEQ ID NO: 548492 - RNA, 21 nt, Human
gagcagcuguggggaggggag

SEQ ID NO: 548493 - RNA, 25 nt, Human
gagcagggccagagagaaguccccc

SEQ ID NO: 548494 - RNA, 18 nt, Human
gaggggagggccaguccc

SEQ ID NO: 548495 - RNA, 21 nt, Human
gcccugagugcuccucuccca

SEQ ID NO: 548496 - RNA, 19 nt, Human
gcuaaggacuccguagggg

SEQ ID NO: 548497 - RNA, 19 nt, Human
ggcacugacggacacugcc

SEQ ID NO: 548498 - RNA, 18 nt, Human
ggugaggaaccaaagccg

SEQ ID NO: 548499 - RNA, 20 nt, Human
guauacacacagccuccgug

SEQ ID NO: 548500 - RNA, 25 nt, Human
uaagacacaaguugaguaagcagcc

SEQ ID NO: 548501 - RNA, 19 nt, Human
ucacagguguagguggaga

SEQ ID NO: 548502 - RNA, 22 nt, Human
ucccaaguuuuaaggcagggag

SEQ ID NO: 548503 - RNA, 20 nt, Human
ucccaggcccccgcccaccc

SEQ ID NO: 548504 - RNA, 19 nt, Human
uccccggggccagccugcc

SEQ ID NO: 548505 - RNA, 18 nt, Human
ucccuggagcugcccggg

SEQ ID NO: 548506 - RNA, 18 nt, Human
uccugaccacauaagccu

SEQ ID NO: 548507 - RNA, 23 nt, Human
ucggagggagcagggccagagag

SEQ ID NO: 548508 - RNA, 22 nt, Human
ucuguucacauacguauacaca

SEQ ID NO: 548509 - RNA, 18 nt, Human
ugagacuggguccacagu

SEQ ID NO: 548510 - RNA, 19 nt, Human
ugaggaaccaaagccgugg

SEQ ID NO: 548511 - RNA, 25 nt, Human
ugaguaagcagccuccacaggcugu

SEQ ID NO: 548512 - RNA, 26 nt, Human
ugccugccacuuccucaucugcuggu

SEQ ID NO: 548513 - RNA, 18 nt, Human
uggcccagaagcuacugc

SEQ ID NO: 548514 - RNA, 28 nt, Human
ugggguggaggagugagacuggguccac

SEQ ID NO: 548515 - RNA, 23 nt, Human
uguauucccaggcccccgcccac

SEQ ID NO: 548516 - RNA, 18 nt, Human
uguggacagggcuaagcg

SEQ ID NO: 548517 - RNA, 18 nt, Human
ugugugaggaaaaaggcc

SEQ ID NO: 548518 - RNA, 19 nt, Human
ugugugaggaaaaaggcca

SEQ ID NO: 548519 - RNA, 18 nt, Human
uguguucccccaccuccu

SEQ ID NO: 548520 - RNA, 23 nt, Human
uguucccccaccuccucuguuca

SEQ ID NO: 548521 - RNA, 21 nt, Human
uuagcccccagcucuggagug

SEQ ID NO: 548522 - RNA, 24 nt, Human
uuuuaaggcagggagggggaaaua

SEQ ID NO: 548523 - RNA, 20 nt, Human
aacagauuaaccuaauagca

SEQ ID NO: 548524 - RNA, 18 nt, Human
aaccuaggcugacuggca

SEQ ID NO: 548525 - RNA, 20 nt, Human
aagcugcaccaguucugagg

SEQ ID NO: 548526 - RNA, 22 nt, Human
aaguaggcucacaaaaaagagu

SEQ ID NO: 548527 - RNA, 23 nt, Human
acagaggaacaauccuauccaca

SEQ ID NO: 548528 - RNA, 23 nt, Human
acuccaucuuuuuccucccagcu

SEQ ID NO: 548529 - RNA, 22 nt, Human
agaaaguaaacgggcagccaga

SEQ ID NO: 548530 - RNA, 22 nt, Human
agacaagacucuggcuuacaga

SEQ ID NO: 548531 - RNA, 22 nt, Human
aggagugcugaguuugccaaac

SEQ ID NO: 548532 - RNA, 21 nt, Human
aguagugaguaacaguccugc

SEQ ID NO: 548533 - RNA, 18 nt, Human
aguuugccaaacuggcau

SEQ ID NO: 548534 - RNA, 24 nt, Human
auagacaagacucuggcuuacaga

SEQ ID NO: 548535 - RNA, 20 nt, Human
cagaagcauuuuuuucuccu

SEQ ID NO: 548536 - RNA, 19 nt, Human
cagcagcaugcauguucaa

SEQ ID NO: 548537 - RNA, 18 nt, Human
cccuuuuuauuuggagac

SEQ ID NO: 548538 - RNA, 18 nt, Human
cggaguggacuccagugc

SEQ ID NO: 548539 - RNA, 19 nt, Human
cugagguccucggagguga

SEQ ID NO: 548540 - RNA, 21 nt, Human
gacagcuucuggcgaaagguu

SEQ ID NO: 548541 - RNA, 18 nt, Human
gacccgggcgggcggcga

SEQ ID NO: 548542 - RNA, 24 nt, Human
gagaaaggaaauacucauuaauac

SEQ ID NO: 548543 - RNA, 19 nt, Human
gagagagaagcugcaccag

SEQ ID NO: 548544 - RNA, 18 nt, Human
gagggagagagaagcugc

SEQ ID NO: 548545 - RNA, 21 nt, Human
gaguggacuccagugcuugcu

SEQ ID NO: 548546 - RNA, 21 nt, Human
gcagggaacaggagugcugag

SEQ ID NO: 548547 - RNA, 20 nt, Human
gcgcggcgacccgggcgggc

SEQ ID NO: 548548 - RNA, 23 nt, Human
ggaaucuuuccaagcuacuccau

SEQ ID NO: 548549 - RNA, 20 nt, Human
ggagggagagagaagcugca

SEQ ID NO: 548550 - RNA, 19 nt, Human
ggagggagggagagagaag

SEQ ID NO: 548551 - RNA, 24 nt, Human
ggagugcugaguuugccaaacugg

SEQ ID NO: 548552 - RNA, 24 nt, Human
guaaacauuuuaaucugaacaaaa

SEQ ID NO: 548553 - RNA, 18 nt, Human
guaugaucccauuuuaau

SEQ ID NO: 548554 - RNA, 21 nt, Human
uaaccugugaagagugacaac

SEQ ID NO: 548555 - RNA, 19 nt, Human
uacuuuugugcuugcuucu

SEQ ID NO: 548556 - RNA, 18 nt, Human
uagauuagaacauacccu

SEQ ID NO: 548557 - RNA, 20 nt, Human
uagccgggucccucugcccu

SEQ ID NO: 548558 - RNA, 19 nt, Human
uagugaguaacaguccugc

SEQ ID NO: 548559 - RNA, 24 nt, Human
ucaaugcugaucaaagcauucagu

SEQ ID NO: 548560 - RNA, 21 nt, Human
ucaguagagaucgcauauacc

SEQ ID NO: 548561 - RNA, 22 nt, Human
ucugcuacuucugcuaguucug

SEQ ID NO: 548562 - RNA, 24 nt, Human
ucugcuaguucugauuuauacaua

SEQ ID NO: 548563 - RNA, 19 nt, Human
ugagguccucggaggugag

SEQ ID NO: 548564 - RNA, 19 nt, Human
ugauagacaagacucuggc

SEQ ID NO: 548565 - RNA, 23 nt, Human
ugcuaaaggaacaaauggaauga

SEQ ID NO: 548566 - RNA, 18 nt, Human
uggagacucucugugaga

SEQ ID NO: 548567 - RNA, 21 nt, Human
uggcacaagagggagacauga

SEQ ID NO: 548568 - RNA, 21 nt, Human
uggucuacuuuugugcuugcu

SEQ ID NO: 548569 - RNA, 18 nt, Human
uuaacagauuaaccuaau

SEQ ID NO: 548570 - RNA, 24 nt, Human
uucagugccuauuuugcucccauc

SEQ ID NO: 548571 - RNA, 21 nt, Human
uuuauacauauuccagcagca

SEQ ID NO: 548572 - RNA, 22 nt, Human
uuuccuggcuguguaugcguau

SEQ ID NO: 548573 - RNA, 18 nt, Human
uuuuuuuuuuuuuuuuug

SEQ ID NO: 548574 - RNA, 20 nt, Human
aagcagguggugcagagggu

SEQ ID NO: 548575 - RNA, 19 nt, Human
cucagccucaguauggcgg

SEQ ID NO: 548576 - RNA, 22 nt, Human
gggauugguugaauggcuuugg

SEQ ID NO: 548577 - RNA, 18 nt, Human
ggggauugguugaauggc

SEQ ID NO: 548578 - RNA, 20 nt, Human
ggggauugguugaauggcuu

SEQ ID NO: 548579 - RNA, 20 nt, Human
gugcagaggguauuucuaaa

SEQ ID NO: 548580 - RNA, 18 nt, Human
gugcucagccucaguaug

SEQ ID NO: 548581 - RNA, 23 nt, Human
ucaagacuccuuuauuggugguu

SEQ ID NO: 548582 - RNA, 23 nt, Human
ucaguauggcggcagucuuccuc

SEQ ID NO: 548583 - RNA, 19 nt, Human
uccucugaagauauuucuc

SEQ ID NO: 548584 - RNA, 18 nt, Human
ugaaaaagacaaaucugu

SEQ ID NO: 548585 - RNA, 18 nt, Human
ugaagauauuucuccuuu

SEQ ID NO: 548586 - RNA, 25 nt, Human
ugacagaugcaaugaaaaagacaaa

SEQ ID NO: 548587 - RNA, 24 nt, Human
ugccgcauucucucuacguucuuc

SEQ ID NO: 548588 - RNA, 22 nt, Human
uggcuuuggccccagccugucu

SEQ ID NO: 548589 - RNA, 25 nt, Human
uuggugguuaugccgcauucucucu

SEQ ID NO: 548590 - RNA, 22 nt, Human
agggguucuugggggaucgcgc

SEQ ID NO: 548591 - RNA, 21 nt, Human
ccccaggagcccgccgccccc

SEQ ID NO: 548592 - RNA, 18 nt, Human
ccccgagccucccugagc

SEQ ID NO: 548593 - RNA, 20 nt, Human
cccuggagggguucuugggg

SEQ ID NO: 548594 - RNA, 20 nt, Human
ccgcaggccggcccuggagg

SEQ ID NO: 548595 - RNA, 20 nt, Human
ccucccugagccggcgcgcc

SEQ ID NO: 548596 - RNA, 24 nt, Human
cgcgccaggccaaaagucugcaug

SEQ ID NO: 548597 - RNA, 21 nt, Human
cggcuccuccgcaggccggcc

SEQ ID NO: 548598 - RNA, 18 nt, Human
cgggcccgggugcggcgc

SEQ ID NO: 548599 - RNA, 24 nt, Human
cgucucaggcgagaccccaggagc

SEQ ID NO: 548600 - RNA, 22 nt, Human
cucgcccagggcuaggugcccc

SEQ ID NO: 548601 - RNA, 18 nt, Human
gaccuggagggccagugg

SEQ ID NO: 548602 - RNA, 20 nt, Human
gccccgagccucccugagcc

SEQ ID NO: 548603 - RNA, 21 nt, Human
gcccgccgcccccgcugucuc

SEQ ID NO: 548604 - RNA, 23 nt, Human
gcuccuccgcaggccggcccugg

SEQ ID NO: 548605 - RNA, 23 nt, Human
ggagggguucuugggggaucgcg

SEQ ID NO: 548606 - RNA, 20 nt, Human
ggggagaggccgcucugggc

SEQ ID NO: 548607 - RNA, 21 nt, Human
ggggagaggccgcucugggcg

SEQ ID NO: 548608 - RNA, 25 nt, Human
gucuuuauuccucgaucguuuagua

SEQ ID NO: 548609 - RNA, 24 nt, Human
uccgcaggccggcccuggaggggu

SEQ ID NO: 548610 - RNA, 20 nt, Human
ucucaggcgagaccccagga

SEQ ID NO: 548611 - RNA, 18 nt, Human
agcccaacaagcuuuggg

SEQ ID NO: 548612 - RNA, 21 nt, Human
aggcggcaauggugagccaag

SEQ ID NO: 548613 - RNA, 23 nt, Human
aggcugccggcggccagggcgcc

SEQ ID NO: 548614 - RNA, 18 nt, Human
aguccagggcccucagag

SEQ ID NO: 548615 - RNA, 23 nt, Human
aguguagauacagguggaggccu

SEQ ID NO: 548616 - RNA, 19 nt, Human
aguuguccaguuagagugg

SEQ ID NO: 548617 - RNA, 28 nt, Human
aucuaucuuuccccugacaucuccccag

SEQ ID NO: 548618 - RNA, 23 nt, Human
caaccagugcuccgcggccgccc

SEQ ID NO: 548619 - RNA, 25 nt, Human
caagcucaggcccaguccagggccc

SEQ ID NO: 548620 - RNA, 18 nt, Human
cagacagcuggccacagg

SEQ ID NO: 548621 - RNA, 19 nt, Human
caggcccaguccagggccc

SEQ ID NO: 548622 - RNA, 19 nt, Human
ccacaaggcugccggcggc

SEQ ID NO: 548623 - RNA, 21 nt, Human
ccaguccagggcccucagagu

SEQ ID NO: 548624 - RNA, 20 nt, Human
ccccgccugcccggguccgg

SEQ ID NO: 548625 - RNA, 19 nt, Human
ccccugccucccuccuccc

SEQ ID NO: 548626 - RNA, 23 nt, Human
ccggcucuccccugccucccucc

SEQ ID NO: 548627 - RNA, 25 nt, Human
ccucacucccugcagccuggcugga

SEQ ID NO: 548628 - RNA, 21 nt, Human
ccucccagcccacagucagac

SEQ ID NO: 548629 - RNA, 22 nt, Human
ccucuguggcaagcucaggccc

SEQ ID NO: 548630 - RNA, 21 nt, Human
cgcggcggaucggggcaccgg

SEQ ID NO: 548631 - RNA, 26 nt, Human
cgcuccaaccagugcuccgcggccgc

SEQ ID NO: 548632 - RNA, 22 nt, Human
cggagccucuguggcaagcuca

SEQ ID NO: 548633 - RNA, 21 nt, Human
cggccacaaggcugccggcgg

SEQ ID NO: 548634 - RNA, 21 nt, Human
cggccagggcgccgcccgcga

SEQ ID NO: 548635 - RNA, 22 nt, Human
cggcggcacgggccacuucggc

SEQ ID NO: 548636 - RNA, 20 nt, Human
cgggcgcggcgcggcgcucc

SEQ ID NO: 548637 - RNA, 19 nt, Human
cggggcaccggccacaagg

SEQ ID NO: 548638 - RNA, 22 nt, Human
cggggcaccggccacaaggcug

SEQ ID NO: 548639 - RNA, 19 nt, Human
cucugugcggcggcacggg

SEQ ID NO: 548640 - RNA, 20 nt, Human
cucugugcggcggcacgggc

SEQ ID NO: 548641 - RNA, 18 nt, Human
gaccggcucuccccugcc

SEQ ID NO: 548642 - RNA, 21 nt, Human
gaucggggcaccggccacaag

SEQ ID NO: 548643 - RNA, 18 nt, Human
gccccgccugcccggguc

SEQ ID NO: 548644 - RNA, 24 nt, Human
gccccgccugcccggguccggagc

SEQ ID NO: 548645 - RNA, 18 nt, Human
gcgcagcgggcgcgcccc

SEQ ID NO: 548646 - RNA, 22 nt, Human
ggagcccaacaagcuuugggaa

SEQ ID NO: 548647 - RNA, 21 nt, Human
ggagccucuguggcaagcuca

SEQ ID NO: 548648 - RNA, 22 nt, Human
ggcccaguccagggcccucaga

SEQ ID NO: 548649 - RNA, 20 nt, Human
ggcggcaauggugagccaag

SEQ ID NO: 548650 - RNA, 21 nt, Human
ggcucuccccugccucccucc

SEQ ID NO: 548651 - RNA, 18 nt, Human
gguccggagcgcggcgga

SEQ ID NO: 548652 - RNA, 26 nt, Human
gugcggcggcacgggccacuucggca

SEQ ID NO: 548653 - RNA, 18 nt, Human
uaaacuucugcaugcagu

SEQ ID NO: 548654 - RNA, 25 nt, Human
ucccagcccacagucagacggagcc

SEQ ID NO: 548655 - RNA, 18 nt, Human
uccccugacaucucccca

SEQ ID NO: 548656 - RNA, 20 nt, Human
uccccugccucccuccuccc

SEQ ID NO: 548657 - RNA, 21 nt, Human
uccccugccucccuccuccca

SEQ ID NO: 548658 - RNA, 22 nt, Human
ucccuccucccagcccacaguc

SEQ ID NO: 548659 - RNA, 19 nt, Human
ucugcaugcaguguaaaga

SEQ ID NO: 548660 - RNA, 20 nt, Human
ugagcagguuaagucccagg

SEQ ID NO: 548661 - RNA, 18 nt, Human
ugccucacucccugcagc

SEQ ID NO: 548662 - RNA, 22 nt, Human
ugccucacucccugcagccugg

SEQ ID NO: 548663 - RNA, 21 nt, Human
ugccucccuccucccagccca

SEQ ID NO: 548664 - RNA, 18 nt, Human
uggaugcaguaaggcaug

SEQ ID NO: 548665 - RNA, 20 nt, Human
uguaaagacagacagcuggc

SEQ ID NO: 548666 - RNA, 20 nt, Human
uguggcaagcucaggcccag

SEQ ID NO: 548667 - RNA, 22 nt, Human
uuggggccuauguggaaacucu

SEQ ID NO: 548668 - RNA, 23 nt, Human
aaacaccaauggauccccaaagc

SEQ ID NO: 548669 - RNA, 20 nt, Human
aaacaccccaaaccaaacac

SEQ ID NO: 548670 - RNA, 19 nt, Human
aaccaaacaccaauggauc

SEQ ID NO: 548671 - RNA, 23 nt, Human
aagaaaaaacuuaaaaaacaccc

SEQ ID NO: 548672 - RNA, 24 nt, Human
acccucccgcccccauaacccccu

SEQ ID NO: 548673 - RNA, 18 nt, Human
agcgaugugacucccucu

SEQ ID NO: 548674 - RNA, 25 nt, Human
caaaccaaacaccaauggauccccc

SEQ ID NO: 548675 - RNA, 25 nt, Human
caauggauccccaaagcgaugugac

SEQ ID NO: 548676 - RNA, 22 nt, Human
caccugacucuucccuggccgc

SEQ ID NO: 548677 - RNA, 26 nt, Human
ccaaaccaaacaccaauggaucccca

SEQ ID NO: 548678 - RNA, 23 nt, Human
ccauaacccccucugcuauagac

SEQ ID NO: 548679 - RNA, 22 nt, Human
ccccaaagcgaugugacucccu

SEQ ID NO: 548680 - RNA, 23 nt, Human
cccccauaacccccucugcuaua

SEQ ID NO: 548681 - RNA, 24 nt, Human
ccugacaccugacucuucccuggc

SEQ ID NO: 548682 - RNA, 23 nt, Human
cgcccccauaacccccucugcua

SEQ ID NO: 548683 - RNA, 25 nt, Human
cuacucggcaauagacaucucccga

SEQ ID NO: 548684 - RNA, 23 nt, Human
cucccucuucccacccggauaaa

SEQ ID NO: 548685 - RNA, 20 nt, Human
gaaaaaacuuaaaaaacacc

SEQ ID NO: 548686 - RNA, 19 nt, Human
gaaaauagaauuccugccc

SEQ ID NO: 548687 - RNA, 25 nt, Human
gcgaugugacucccucuucccaccc

SEQ ID NO: 548688 - RNA, 21 nt, Human
uaaaaaacaccccaaaccaaa

SEQ ID NO: 548689 - RNA, 25 nt, Human
uaaaaaacaccccaaaccaaacacc

SEQ ID NO: 548690 - RNA, 22 nt, Human
ucccgaaaauagaauuccugcc

SEQ ID NO: 548691 - RNA, 27 nt, Human
ucccgcccccauaacccccucugcuag

SEQ ID NO: 548692 - RNA, 22 nt, Human
ucggcaauagacaucucccgaa

SEQ ID NO: 548693 - RNA, 22 nt, Human
ucucccgaaaauagaauuccug

SEQ ID NO: 548694 - RNA, 18 nt, Human
ugugacucccucuuccca

SEQ ID NO: 548695 - RNA, 19 nt, Human
aaaaaacugcuacacagca

SEQ ID NO: 548696 - RNA, 20 nt, Human
aaaaaaguaguacagucuga

SEQ ID NO: 548697 - RNA, 25 nt, Human
aaaacaaaucacauggaaaccaaaa

SEQ ID NO: 548698 - RNA, 18 nt, Human
aaaacagaguugcacaca

SEQ ID NO: 548699 - RNA, 24 nt, Human
aaacaaaucacauggaaaccaaaa

SEQ ID NO: 548700 - RNA, 25 nt, Human
aaacaaaucacauggaaaccaaaau

SEQ ID NO: 548701 - RNA, 23 nt, Human
aaacuaccaccgaagaguaucau

SEQ ID NO: 548702 - RNA, 27 nt, Human
aagaaaacaaaucacauggaaaccaaa

SEQ ID NO: 548703 - RNA, 27 nt, Human
aagaaaacaaaucacauggaaaccaag

SEQ ID NO: 548704 - RNA, 21 nt, Human
aagcaccaauucaauaaucua

SEQ ID NO: 548705 - RNA, 21 nt, Human
aagccgcggccgcccgaacca

SEQ ID NO: 548706 - RNA, 18 nt, Human
aauuucauaaccccaccc

SEQ ID NO: 548707 - RNA, 24 nt, Human
acaaaaccaauaaauuucaagcac

SEQ ID NO: 548708 - RNA, 23 nt, Human
acacacccacacccuuccauaca

SEQ ID NO: 548709 - RNA, 23 nt, Human
acagaacauacauacugaagaaa

SEQ ID NO: 548710 - RNA, 21 nt, Human
acagaacuuaaaaaaaauacc

SEQ ID NO: 548711 - RNA, 19 nt, Human
acagauaccuauacacaua

SEQ ID NO: 548712 - RNA, 20 nt, Human
acauuuggggugagagggua

SEQ ID NO: 548713 - RNA, 21 nt, Human
aguagugucuuuugaaacuac

SEQ ID NO: 548714 - RNA, 20 nt, Human
auaaccccacccacuuccaa

SEQ ID NO: 548715 - RNA, 25 nt, Human
auuaaaaauuuuccauuacacauuu

SEQ ID NO: 548716 - RNA, 25 nt, Human
auucacuugaaucucaaacauuuga

SEQ ID NO: 548717 - RNA, 22 nt, Human
caaaagaguaggauagccacau

SEQ ID NO: 548718 - RNA, 23 nt, Human
caacaccauugcacuuggcaaaa

SEQ ID NO: 548719 - RNA, 24 nt, Human
caacaccauugcacuuggcaaaac

SEQ ID NO: 548720 - RNA, 20 nt, Human
caacuccaccagaaaaaaac

SEQ ID NO: 548721 - RNA, 19 nt, Human
cacacaagaaauuaaggga

SEQ ID NO: 548722 - RNA, 19 nt, Human
cacacacccacacccuucc

SEQ ID NO: 548723 - RNA, 19 nt, Human
cacaugcugaucugaugau

SEQ ID NO: 548724 - RNA, 20 nt, Human
cacugguaguguaagaaaac

SEQ ID NO: 548725 - RNA, 22 nt, Human
cagcaacuccaccagaaaaaaa

SEQ ID NO: 548726 - RNA, 18 nt, Human
cagcggaccgacagagug

SEQ ID NO: 548727 - RNA, 19 nt, Human
cauagcuagccaacagaac

SEQ ID NO: 548728 - RNA, 24 nt, Human
cauuaaauagcuggaacgcuuccu

SEQ ID NO: 548729 - RNA, 22 nt, Human
cauugcacuuggcaaaacugaa

SEQ ID NO: 548730 - RNA, 24 nt, Human
ccaaaaaaauagaaaguaucaaaa

SEQ ID NO: 548731 - RNA, 25 nt, Human
ccacucgccccuucacacacaccca

SEQ ID NO: 548732 - RNA, 25 nt, Human
ccccagguacuuaaagaaaugcucu

SEQ ID NO: 548733 - RNA, 18 nt, Human
ccgccugcccggccuccc

SEQ ID NO: 548734 - RNA, 21 nt, Human
ccgcgccgcucagccgccugc

SEQ ID NO: 548735 - RNA, 29 nt, Human
ccuauacacauagagaucuacacugaguu

SEQ ID NO: 548736 - RNA, 19 nt, Human
cgcccggcucggcuaccgg

SEQ ID NO: 548737 - RNA, 18 nt, Human
cgcccugggguaguaagc

SEQ ID NO: 548738 - RNA, 18 nt, Human
cucaaauaaacucccugc

SEQ ID NO: 548739 - RNA, 19 nt, Human
cucccgccuccgucguccg

SEQ ID NO: 548740 - RNA, 22 nt, Human
cugauguccucaaauaaacucc

SEQ ID NO: 548741 - RNA, 23 nt, Human
cugcugaucacugagagcuguau

SEQ ID NO: 548742 - RNA, 25 nt, Human
cuguauuuauauuucuccuauuacu

SEQ ID NO: 548743 - RNA, 23 nt, Human
cuuagaaaaggcagcaccucucu

SEQ ID NO: 548744 - RNA, 19 nt, Human
cuucacacacacccacacc

SEQ ID NO: 548745 - RNA, 23 nt, Human
cuucacacacacccacacccuuc

SEQ ID NO: 548746 - RNA, 19 nt, Human
cuuccccgucacguugaga

SEQ ID NO: 548747 - RNA, 20 nt, Human
gaacaaauuaugaugaaggc

SEQ ID NO: 548748 - RNA, 20 nt, Human
gacaguucugaugcacuuug

SEQ ID NO: 548749 - RNA, 23 nt, Human
gacuuacagcaacuccaccagaa

SEQ ID NO: 548750 - RNA, 18 nt, Human
gacuuagaaaaggcagca

SEQ ID NO: 548751 - RNA, 19 nt, Human
gcuccgggcuuagaggggc

SEQ ID NO: 548752 - RNA, 23 nt, Human
guaguacagucugagccaguaga

SEQ ID NO: 548753 - RNA, 20 nt, Human
guuaaaaaaucaaaacaaaa

SEQ ID NO: 548754 - RNA, 19 nt, Human
uaaaauuacaacaaaacca

SEQ ID NO: 548755 - RNA, 23 nt, Human
uaaccccacccacuuccaaccau

SEQ ID NO: 548756 - RNA, 24 nt, Human
uaauacaugcauugcccaaaagag

SEQ ID NO: 548757 - RNA, 23 nt, Human
uacagcaacuccaccagaaaaaa

SEQ ID NO: 548758 - RNA, 22 nt, Human
uaccucugguuguuccugaaga

SEQ ID NO: 548759 - RNA, 22 nt, Human
uaggaaauguacugaaaaccau

SEQ ID NO: 548760 - RNA, 19 nt, Human
uaguagacuaagagcaugu

SEQ ID NO: 548761 - RNA, 19 nt, Human
uaucacaaaaucacaugca

SEQ ID NO: 548762 - RNA, 20 nt, Human
uauguacagaacauacauag

SEQ ID NO: 548763 - RNA, 23 nt, Human
uauugaagaaaacaaaucacaug

SEQ ID NO: 548764 - RNA, 24 nt, Human
ucagccgccugcccggccucccuc

SEQ ID NO: 548765 - RNA, 21 nt, Human
uccacugguaguguaagaaaa

SEQ ID NO: 548766 - RNA, 23 nt, Human
ucuaaacaugauuugaccaaaaa

SEQ ID NO: 548767 - RNA, 24 nt, Human
ucuacaauuucauaaccccaccca

SEQ ID NO: 548768 - RNA, 22 nt, Human
ucuccaagaacugccuguucau

SEQ ID NO: 548769 - RNA, 19 nt, Human
ucucuaggucgcccggcuc

SEQ ID NO: 548770 - RNA, 19 nt, Human
ucucuaggucgcccggcuc

SEQ ID NO: 548771 - RNA, 22 nt, Human
ucucuaggucgcccggcucggc

SEQ ID NO: 548772 - RNA, 22 nt, Human
ucucucuucuuuugaagagaac

SEQ ID NO: 548773 - RNA, 23 nt, Human
ucugaugcacuuuggaauggcac

SEQ ID NO: 548774 - RNA, 24 nt, Human
ucuugcagggaguauagcacaugc

SEQ ID NO: 548775 - RNA, 26 nt, Human
ugaagaaaacaaaucacauggaaacc

SEQ ID NO: 548776 - RNA, 22 nt, Human
ugauacuuacuggcgcgcuccg

SEQ ID NO: 548777 - RNA, 22 nt, Human
ugauucagucuucuccuaguau

SEQ ID NO: 548778 - RNA, 21 nt, Human
ugcagcugaaggaaaagaguu

SEQ ID NO: 548779 - RNA, 18 nt, Human
ugcauaauacaugcauug

SEQ ID NO: 548780 - RNA, 22 nt, Human
uggcaaccccaaaggugacuga

SEQ ID NO: 548781 - RNA, 19 nt, Human
uguaaaaaaaagaauuugc

SEQ ID NO: 548782 - RNA, 24 nt, Human
uguaaacaaaaggaaagauauaca

SEQ ID NO: 548783 - RNA, 23 nt, Human
uguccuugggaguucacuggagu

SEQ ID NO: 548784 - RNA, 19 nt, Human
ugucuccacucgccccuuc

SEQ ID NO: 548785 - RNA, 23 nt, Human
ugugagacaucauuaaugauuca

SEQ ID NO: 548786 - RNA, 22 nt, Human
uguuugugauaccucugguugu

SEQ ID NO: 548787 - RNA, 20 nt, Human
uuaaagaaggcaacaccauu

SEQ ID NO: 548788 - RNA, 21 nt, Human
uuaacucauccaaaguuucua

SEQ ID NO: 548789 - RNA, 18 nt, Human
uuaacugaccauuaaaca

SEQ ID NO: 548790 - RNA, 21 nt, Human
uuacagcaacuccaccagaaa

SEQ ID NO: 548791 - RNA, 22 nt, Human
uuacaucacaccacuuagguac

SEQ ID NO: 548792 - RNA, 20 nt, Human
uuaguagugucuuuugaaac

SEQ ID NO: 548793 - RNA, 21 nt, Human
uuaguucuaggauaaaacaga

SEQ ID NO: 548794 - RNA, 18 nt, Human
uucaaaauuuucugccau

SEQ ID NO: 548795 - RNA, 22 nt, Human
uucaggaaaaaaaaaaaaaaaa

SEQ ID NO: 548796 - RNA, 23 nt, Human
uugaagguuuuaauauacauuga

SEQ ID NO: 548797 - RNA, 18 nt, Human
acaaaaacaaaaacaaaa

SEQ ID NO: 548798 - RNA, 27 nt, Human
acaacaaaaacaaaaacaaaaaauuaa

SEQ ID NO: 548799 - RNA, 19 nt, Human
acuagagaacaacaaaaac

SEQ ID NO: 548800 - RNA, 22 nt, Human
acuucauuuuccccuaaaagcu

SEQ ID NO: 548801 - RNA, 26 nt, Human
agaacaacaaaaacaaaaacaaaaaa

SEQ ID NO: 548802 - RNA, 24 nt, Human
agagaacaacaaaaacaaaaacaa

SEQ ID NO: 548803 - RNA, 26 nt, Human
agagaacaacaaaaacaaaaacaaaa

SEQ ID NO: 548804 - RNA, 18 nt, Human
caacaaaaacaaaaacaa

SEQ ID NO: 548805 - RNA, 22 nt, Human
cagaacaaagucuuuucuuucc

SEQ ID NO: 548806 - RNA, 23 nt, Human
caggaauugaaugccaagcacgc

SEQ ID NO: 548807 - RNA, 20 nt, Human
cagggcauggaagauuuccg

SEQ ID NO: 548808 - RNA, 18 nt, Human
cauccuucauauugcuga

SEQ ID NO: 548809 - RNA, 27 nt, Human
cauuuuccccuaaaagcuccaugaagg

SEQ ID NO: 548810 - RNA, 24 nt, Human
ccauaacauccuucauauugcuga

SEQ ID NO: 548811 - RNA, 25 nt, Human
ccccuaaaagcuccaugaaggcagg

SEQ ID NO: 548812 - RNA, 22 nt, Human
ccguagaacuagagaacaacaa

SEQ ID NO: 548813 - RNA, 24 nt, Human
ccuuccauaacauccuucauauug

SEQ ID NO: 548814 - RNA, 19 nt, Human
cggcaggagcagcagggga

SEQ ID NO: 548815 - RNA, 20 nt, Human
cggcuucugagucaacucuu

SEQ ID NO: 548816 - RNA, 22 nt, Human
cugagucaacucuagcugcaag

SEQ ID NO: 548817 - RNA, 26 nt, Human
cugcaagagccacuucauuuuccccu

SEQ ID NO: 548818 - RNA, 24 nt, Human
gagcagcaggggaaagagugagug

SEQ ID NO: 548819 - RNA, 19 nt, Human
gagucaacucuagcugcaa

SEQ ID NO: 548820 - RNA, 22 nt, Human
gauuuuccaccggcaaagaggg

SEQ ID NO: 548821 - RNA, 21 nt, Human
guccucuuaggcuuguuuucc

SEQ ID NO: 548822 - RNA, 23 nt, Human
gugaauuucuugaaacacacaga

SEQ ID NO: 548823 - RNA, 27 nt, Human
gugaauuucuugaaacacacagaacaa

SEQ ID NO: 548824 - RNA, 20 nt, Human
uagcugcaagagccacuuca

SEQ ID NO: 548825 - RNA, 24 nt, Human
uccagaucguggugugaacauucu

SEQ ID NO: 548826 - RNA, 30 nt, Human
uccccuaaaagcuccaugaaggcaggagcu

SEQ ID NO: 548827 - RNA, 22 nt, Human
ugagcacauugcagggcaugga

SEQ ID NO: 548828 - RNA, 27 nt, Human
ugccaagcacgccuuccauaacauccu

SEQ ID NO: 548829 - RNA, 24 nt, Human
uggccguccauaugcugagaguuu

SEQ ID NO: 548830 - RNA, 25 nt, Human
uuuggaggagucuuuguaggaagga

SEQ ID NO: 548831 - RNA, 19 nt, Human
uuuuaagauuuggaggagu

SEQ ID NO: 548832 - RNA, 20 nt, Human
aaugcaauuuaccacacauu

SEQ ID NO: 548833 - RNA, 18 nt, Human
agguugauuacuuccucu

SEQ ID NO: 548834 - RNA, 25 nt, Human
cggguaucccacgccagccagcccu

SEQ ID NO: 548835 - RNA, 23 nt, Human
cuggaagcucucuacugugccgu

SEQ ID NO: 548836 - RNA, 21 nt, Human
gauuuuccauauggaguugaa

SEQ ID NO: 548837 - RNA, 18 nt, Human
uaagccaaccaccuuucc

SEQ ID NO: 548838 - RNA, 25 nt, Human
uaaugaauucccuuuuccuuagcuu

SEQ ID NO: 548839 - RNA, 19 nt, Human
aaaaaaaucccucauccaa

SEQ ID NO: 548840 - RNA, 20 nt, Human
aaaaagaauccagaugcagg

SEQ ID NO: 548841 - RNA, 22 nt, Human
aaaaaucccucauccaaacuuc

SEQ ID NO: 548842 - RNA, 22 nt, Human
aaaagcagcuucauucaggaac

SEQ ID NO: 548843 - RNA, 18 nt, Human
aaaauguccacaugcaua

SEQ ID NO: 548844 - RNA, 21 nt, Human
aaacuacacuaucaacaagcu

SEQ ID NO: 548845 - RNA, 23 nt, Human
aaauuauuccuccccuuccuccc

SEQ ID NO: 548846 - RNA, 22 nt, Human
aacaauuuaggaaggcaucuaa

SEQ ID NO: 548847 - RNA, 20 nt, Human
aacauguaggauuucucccc

SEQ ID NO: 548848 - RNA, 22 nt, Human
aagaacaaaccugagagaaaca

SEQ ID NO: 548849 - RNA, 21 nt, Human
aaguacaauaauaaagaugaa

SEQ ID NO: 548850 - RNA, 23 nt, Human
acaaagaaaaaaaaaaucccuca

SEQ ID NO: 548851 - RNA, 25 nt, Human
acaauaauaaagaugaaaaugccuc

SEQ ID NO: 548852 - RNA, 22 nt, Human
accaguuucaaaggaaagaaaa

SEQ ID NO: 548853 - RNA, 18 nt, Human
agaaaaacuuccuaagcc

SEQ ID NO: 548854 - RNA, 21 nt, Human
agaaagcagaugaaagugaau

SEQ ID NO: 548855 - RNA, 22 nt, Human
aggaagaacaaaccugagagaa

SEQ ID NO: 548856 - RNA, 19 nt, Human
aggcagagugucuaauucc

SEQ ID NO: 548857 - RNA, 21 nt, Human
aggcagagugucuaauuccuu

SEQ ID NO: 548858 - RNA, 22 nt, Human
aggugguggaggaggagggggu

SEQ ID NO: 548859 - RNA, 23 nt, Human
agguugguuuuucccuccuucuu

SEQ ID NO: 548860 - RNA, 19 nt, Human
augcagggagggguggggc

SEQ ID NO: 548861 - RNA, 21 nt, Human
auguacaaaaucuagaaagca

SEQ ID NO: 548862 - RNA, 19 nt, Human
auuagaccaaggcacaaaa

SEQ ID NO: 548863 - RNA, 23 nt, Human
caaaaucaaaagagguugcugac

SEQ ID NO: 548864 - RNA, 20 nt, Human
caaauauggcacauaacaac

SEQ ID NO: 548865 - RNA, 19 nt, Human
cacaguuuaaucuaaaaau

SEQ ID NO: 548866 - RNA, 18 nt, Human
caccagagucauaauguc

SEQ ID NO: 548867 - RNA, 26 nt, Human
cacgugcgcgagagcacacacacgca

SEQ ID NO: 548868 - RNA, 19 nt, Human
cagaugcagggaggggugg

SEQ ID NO: 548869 - RNA, 21 nt, Human
caguuuaaucuaaaaaugaaa

SEQ ID NO: 548870 - RNA, 18 nt, Human
cauauagacagcacgugc

SEQ ID NO: 548871 - RNA, 27 nt, Human
caugacaaugaauaucugauagaaaaa

SEQ ID NO: 548872 - RNA, 20 nt, Human
ccaaaaagaauccagaugca

SEQ ID NO: 548873 - RNA, 22 nt, Human
ccagaaaaaagcagcaaacgga

SEQ ID NO: 548874 - RNA, 20 nt, Human
cccaccacccaagucucacu

SEQ ID NO: 548875 - RNA, 19 nt, Human
ccccuuccucccacucccc

SEQ ID NO: 548876 - RNA, 23 nt, Human
ccuguguaacagcggggguaccu

SEQ ID NO: 548877 - RNA, 22 nt, Human
ccuucuucccaccacccaaguc

SEQ ID NO: 548878 - RNA, 18 nt, Human
ccuucuucccaccuuccu

SEQ ID NO: 548879 - RNA, 22 nt, Human
cucugcagaaaaacuuccuaag

SEQ ID NO: 548880 - RNA, 23 nt, Human
cugucugcaauuaaaaaagcuaa

SEQ ID NO: 548881 - RNA, 21 nt, Human
gagagaaacauuacaauacaa

SEQ ID NO: 548882 - RNA, 22 nt, Human
gaggugguggaggaggaggggg

SEQ ID NO: 548883 - RNA, 20 nt, Human
gcagcaaacggagagggaaa

SEQ ID NO: 548884 - RNA, 24 nt, Human
gcaggaggugguggaggaggaggg

SEQ ID NO: 548885 - RNA, 22 nt, Human
gcgagagcacacacacgcagag

SEQ ID NO: 548886 - RNA, 20 nt, Human
ggaagaacaaaccugagaga

SEQ ID NO: 548887 - RNA, 22 nt, Human
ggaggugguggaggaggagggg

SEQ ID NO: 548888 - RNA, 25 nt, Human
ggcaggaggugguggaggaggaggg

SEQ ID NO: 548889 - RNA, 21 nt, Human
gggaaagagcuuaucaccaga

SEQ ID NO: 548890 - RNA, 26 nt, Human
gggcaggaggugguggaggaggaggg

SEQ ID NO: 548891 - RNA, 18 nt, Human
gggguggggcaggaggug

SEQ ID NO: 548892 - RNA, 20 nt, Human
ggugguggaggaggaggggg

SEQ ID NO: 548893 - RNA, 18 nt, Human
gguuaaaauacaaauagc

SEQ ID NO: 548894 - RNA, 21 nt, Human
guugguuuuucccuccuucug

SEQ ID NO: 548895 - RNA, 22 nt, Human
uaaaugauucucuuccauucug

SEQ ID NO: 548896 - RNA, 24 nt, Human
uaacuuacccaacaaaaucaaaag

SEQ ID NO: 548897 - RNA, 18 nt, Human
uaccaauuaaagucacaa

SEQ ID NO: 548898 - RNA, 23 nt, Human
uagaaaacuacacuaucaacaag

SEQ ID NO: 548899 - RNA, 24 nt, Human
uagaaagcagaugaaagugaauua

SEQ ID NO: 548900 - RNA, 22 nt, Human
uaguauuuucugcauaacuguu

SEQ ID NO: 548901 - RNA, 24 nt, Human
uagugcagaaaucaacuuuaaaua

SEQ ID NO: 548902 - RNA, 18 nt, Human
ucaaagcaaauauggcac

SEQ ID NO: 548903 - RNA, 20 nt, Human
ucauggaauaucaaacauga

SEQ ID NO: 548904 - RNA, 26 nt, Human
uccacaguuaagauauuaugugaagc

SEQ ID NO: 548905 - RNA, 27 nt, Human
uccacaugcauaaaucuaaaaaagguu

SEQ ID NO: 548906 - RNA, 22 nt, Human
uccccuuccucccacuccccua

SEQ ID NO: 548907 - RNA, 20 nt, Human
uccuucuucccaccuuccuc

SEQ ID NO: 548908 - RNA, 19 nt, Human
ucuacaaaauguuuucccu

SEQ ID NO: 548909 - RNA, 25 nt, Human
ucugcaauuaaaaaagcuaaccuug

SEQ ID NO: 548910 - RNA, 18 nt, Human
ugauaggaagaacaaacc

SEQ ID NO: 548911 - RNA, 22 nt, Human
uggaggaggaggggguacuuga

SEQ ID NO: 548912 - RNA, 19 nt, Human
uggcacauaacaacucaag

SEQ ID NO: 548913 - RNA, 23 nt, Human
uggcacauaacaacucaagcaua

SEQ ID NO: 548914 - RNA, 18 nt, Human
ugggacuaggccuugaaa

SEQ ID NO: 548915 - RNA, 19 nt, Human
uguaaaggccagaaaaaag

SEQ ID NO: 548916 - RNA, 19 nt, Human
ugucugaaggcuuucagag

SEQ ID NO: 548917 - RNA, 24 nt, Human
uuacuacuacugcaugacaaugaa

SEQ ID NO: 548918 - RNA, 19 nt, Human
uucccuccuucuguuuguc

SEQ ID NO: 548919 - RNA, 24 nt, Human
uucuaaaauuucucaagcugaaga

SEQ ID NO: 548920 - RNA, 19 nt, Human
uucugugaccuuaauugcu

SEQ ID NO: 548921 - RNA, 18 nt, Human
uugauguuuuuacuacua

SEQ ID NO: 548922 - RNA, 20 nt, Human
uuuagucucuuaucuuaguu

SEQ ID NO: 548923 - RNA, 19 nt, Human
uuucccugggacuaggccu

SEQ ID NO: 548924 - RNA, 22 nt, Human
uuugcauaaccaaaaguacaau

SEQ ID NO: 548925 - RNA, 23 nt, Human
uuuucccuccuucuguuugucuc

SEQ ID NO: 548926 - RNA, 19 nt, Human
aaagaggcucucguucccc

SEQ ID NO: 548927 - RNA, 22 nt, Human
aaggggugggagagaaggggcg

SEQ ID NO: 548928 - RNA, 22 nt, Human
accagcccaggcucugcccagc

SEQ ID NO: 548929 - RNA, 24 nt, Human
acccaccuaggccccuccugccac

SEQ ID NO: 548930 - RNA, 26 nt, Human
accccaccagcccaggcucugcccag

SEQ ID NO: 548931 - RNA, 21 nt, Human
acccgugcccugguucucagg

SEQ ID NO: 548932 - RNA, 18 nt, Human
acgcugcacucagcuggg

SEQ ID NO: 548933 - RNA, 27 nt, Human
agaaggaaggggugggagagaaggggc

SEQ ID NO: 548934 - RNA, 19 nt, Human
agacacaacagaucugccc

SEQ ID NO: 548935 - RNA, 19 nt, Human
agacugacccagggcccca

SEQ ID NO: 548936 - RNA, 19 nt, Human
agagggugaacucugggcc

SEQ ID NO: 548937 - RNA, 21 nt, Human
agcccagcagacaccacaccc

SEQ ID NO: 548938 - RNA, 24 nt, Human
agcccccucagcugacccucauca

SEQ ID NO: 548939 - RNA, 18 nt, Human
agcuccucccgcccuggc

SEQ ID NO: 548940 - RNA, 20 nt, Human
agcuccucccgcccuggccc

SEQ ID NO: 548941 - RNA, 18 nt, Human
agcugggucucagcccag

SEQ ID NO: 548942 - RNA, 22 nt, Human
agcugguggggggccagacuga

SEQ ID NO: 548943 - RNA, 21 nt, Human
aggcccccccagaaagggaaa

SEQ ID NO: 548944 - RNA, 21 nt, Human
aggccccuccugccacgcccc

SEQ ID NO: 548945 - RNA, 23 nt, Human
aggccccuccugccacgccccac

SEQ ID NO: 548946 - RNA, 18 nt, Human
aggccugggccgggggcu

SEQ ID NO: 548947 - RNA, 22 nt, Human
aggggcagagcccucccccgcc

SEQ ID NO: 548948 - RNA, 18 nt, Human
aggggcgagagggagcag

SEQ ID NO: 548949 - RNA, 21 nt, Human
caaaccagagccaggagcugg

SEQ ID NO: 548950 - RNA, 24 nt, Human
caaaccagagccaggagcuggaga

SEQ ID NO: 548951 - RNA, 22 nt, Human
cacagagcugaggcugccaggu

SEQ ID NO: 548952 - RNA, 27 nt, Human
caccacacccgugcccugguucucagg

SEQ ID NO: 548953 - RNA, 20 nt, Human
caccccaccagcccaggcuc

SEQ ID NO: 548954 - RNA, 18 nt, Human
caccuaggccccuccugc

SEQ ID NO: 548955 - RNA, 18 nt, Human
cacgccccacagccaccc

SEQ ID NO: 548956 - RNA, 22 nt, Human
cagacaccacacccgugcccug

SEQ ID NO: 548957 - RNA, 18 nt, Human
cagcccagcccuuguggg

SEQ ID NO: 548958 - RNA, 19 nt, Human
cagcuccccagcuccuccc

SEQ ID NO: 548959 - RNA, 21 nt, Human
cagcuccucccgcccuggccc

SEQ ID NO: 548960 - RNA, 26 nt, Human
cagcuccucccgcccuggcccugccc

SEQ ID NO: 548961 - RNA, 22 nt, Human
caggagaugacaucccagcccg

SEQ ID NO: 548962 - RNA, 24 nt, Human
cagggccccagcuccccagcuccu

SEQ ID NO: 548963 - RNA, 22 nt, Human
cagggcucgggugcugcuccuc

SEQ ID NO: 548964 - RNA, 21 nt, Human
caucaggaacaagagggcucc

SEQ ID NO: 548965 - RNA, 22 nt, Human
cauuuaaaaaaucaacuacaga

SEQ ID NO: 548966 - RNA, 19 nt, Human
ccaaaccagagccaggagc

SEQ ID NO: 548967 - RNA, 22 nt, Human
ccaaaccagagccaggagcugg

SEQ ID NO: 548968 - RNA, 18 nt, Human
ccacgcugucgcaccagg

SEQ ID NO: 548969 - RNA, 21 nt, Human
ccagacuccugcuccucuggg

SEQ ID NO: 548970 - RNA, 22 nt, Human
ccagcccggcccagcucccacc

SEQ ID NO: 548971 - RNA, 21 nt, Human
ccagcuccggcucccaacagc

SEQ ID NO: 548972 - RNA, 23 nt, Human
ccaggacucuggcaacccuuccc

SEQ ID NO: 548973 - RNA, 23 nt, Human
cccacagccaccccagcaggcac

SEQ ID NO: 548974 - RNA, 28 nt, Human
cccacagccaccccagcaggcacaggag

SEQ ID NO: 548975 - RNA, 22 nt, Human
cccaccagcccaggcucugccc

SEQ ID NO: 548976 - RNA, 22 nt, Human
cccaccuaggccccuccugcca

SEQ ID NO: 548977 - RNA, 24 nt, Human
cccagggccccagcuccccagcuc

SEQ ID NO: 548978 - RNA, 18 nt, Human
cccccaggacucuggcaa

SEQ ID NO: 548979 - RNA, 18 nt, Human
ccccgcccggcaggagau

SEQ ID NO: 548980 - RNA, 19 nt, Human
ccccgcccggcaggagaug

SEQ ID NO: 548981 - RNA, 19 nt, Human
cccggcccagcucccaccc

SEQ ID NO: 548982 - RNA, 18 nt, Human
cccucccagacuccugcu

SEQ ID NO: 548983 - RNA, 18 nt, Human
cccucccauccuaccucu

SEQ ID NO: 548984 - RNA, 24 nt, Human
cccuuccauaggccaacuggacag

SEQ ID NO: 548985 - RNA, 26 nt, Human
cccuugcuccaaaccagagccaggag

SEQ ID NO: 548986 - RNA, 20 nt, Human
ccucccauccuaccucuggu

SEQ ID NO: 548987 - RNA, 22 nt, Human
ccucccauccuaccucugguuc

SEQ ID NO: 548988 - RNA, 19 nt, Human
ccucccccgcccggcagga

SEQ ID NO: 548989 - RNA, 19 nt, Human
ccucccgcccuggcccugc

SEQ ID NO: 548990 - RNA, 21 nt, Human
ccucuggggcccccaggacuc

SEQ ID NO: 548991 - RNA, 27 nt, Human
ccugccacgccccacagccaccccagc

SEQ ID NO: 548992 - RNA, 22 nt, Human
ccuggcccugcccacgcgccug

SEQ ID NO: 548993 - RNA, 24 nt, Human
ccuggcccugcccacgcgccuggc

SEQ ID NO: 548994 - RNA, 24 nt, Human
ccugggagguuggggugucucucc

SEQ ID NO: 548995 - RNA, 20 nt, Human
ccuugcuccaaaccagagcc

SEQ ID NO: 548996 - RNA, 21 nt, Human
cgccccacagccaccccagca

SEQ ID NO: 548997 - RNA, 22 nt, Human
cgcggaucaacaggccugggcc

SEQ ID NO: 548998 - RNA, 24 nt, Human
cgcuguggcagccccgaggcuggg

SEQ ID NO: 548999 - RNA, 18 nt, Human
cggcccagcucccacccu

SEQ ID NO: 549000 - RNA, 21 nt, Human
cuccagggcucgggugcugcu

SEQ ID NO: 549001 - RNA, 18 nt, Human
cucccaacagcgacuccc

SEQ ID NO: 549002 - RNA, 19 nt, Human
cuccccagucuuaucucca

SEQ ID NO: 549003 - RNA, 18 nt, Human
cuccugcuccucuggggc

SEQ ID NO: 549004 - RNA, 23 nt, Human
cuccuggauccacuagaggguga

SEQ ID NO: 549005 - RNA, 20 nt, Human
cucuccccagucuuaucucc

SEQ ID NO: 549006 - RNA, 23 nt, Human
cucucguucccccucccauccua

SEQ ID NO: 549007 - RNA, 19 nt, Human
gaccucaggcccccccaga

SEQ ID NO: 549008 - RNA, 19 nt, Human
gagggcgcacaggcgcaac

SEQ ID NO: 549009 - RNA, 20 nt, Human
gcagacaccacacccgugcc

SEQ ID NO: 549010 - RNA, 19 nt, Human
gcagccccgaggcugggcu

SEQ ID NO: 549011 - RNA, 23 nt, Human
gccacgccccacagccaccccag

SEQ ID NO: 549012 - RNA, 18 nt, Human
gcccaggcucugcccagc

SEQ ID NO: 549013 - RNA, 23 nt, Human
gcgcaacgcgcuguggcagcccc

SEQ ID NO: 549014 - RNA, 22 nt, Human
gcucucguucccccucccaucc

SEQ ID NO: 549015 - RNA, 19 nt, Human
ggagaugacaucccagccc

SEQ ID NO: 549016 - RNA, 23 nt, Human
ggcaacccuuccccuugcuccaa

SEQ ID NO: 549017 - RNA, 18 nt, Human
ggccugggccgggggcuc

SEQ ID NO: 549018 - RNA, 23 nt, Human
gggacaggggaggcuccucgggc

SEQ ID NO: 549019 - RNA, 20 nt, Human
gggcccggcucagaaggaag

SEQ ID NO: 549020 - RNA, 22 nt, Human
gggcccucccagacuccugcuc

SEQ ID NO: 549021 - RNA, 18 nt, Human
ggggcacaggaccaggug

SEQ ID NO: 549022 - RNA, 18 nt, Human
ggggcccccaggacucug

SEQ ID NO: 549023 - RNA, 20 nt, Human
gggugucucuccccagucuu

SEQ ID NO: 549024 - RNA, 18 nt, Human
guggcaccccaccagccc

SEQ ID NO: 549025 - RNA, 19 nt, Human
guucucaggcccaacccac

SEQ ID NO: 549026 - RNA, 18 nt, Human
uauuuugguccccacagg

SEQ ID NO: 549027 - RNA, 23 nt, Human
ucacauugucccacgcugucgca

SEQ ID NO: 549028 - RNA, 21 nt, Human
ucagcccccucagcugacccu

SEQ ID NO: 549029 - RNA, 20 nt, Human
ucccagcccggcccagcucc

SEQ ID NO: 549030 - RNA, 19 nt, Human
uccccagcuccucccgccc

SEQ ID NO: 549031 - RNA, 20 nt, Human
uccugcuccucuggggcccc

SEQ ID NO: 549032 - RNA, 18 nt, Human
ucgggcucugcaaagaag

SEQ ID NO: 549033 - RNA, 20 nt, Human
ucgggugcugcuccuccugg

SEQ ID NO: 549034 - RNA, 24 nt, Human
ucucaggcccaacccaccuaggcc

SEQ ID NO: 549035 - RNA, 27 nt, Human
ugaacucugggcccucccagacuccuu

SEQ ID NO: 549036 - RNA, 23 nt, Human
ugacaagaccucaggccccccca

SEQ ID NO: 549037 - RNA, 18 nt, Human
ugaggggcacagagcuga

SEQ ID NO: 549038 - RNA, 19 nt, Human
ugcaaagaaggggguccug

SEQ ID NO: 549039 - RNA, 21 nt, Human
ugcccgaggggacaggggagg

SEQ ID NO: 549040 - RNA, 18 nt, Human
ugcuccaaaccagagcca

SEQ ID NO: 549041 - RNA, 23 nt, Human
ugcuccaaaccagagccaggagc

SEQ ID NO: 549042 - RNA, 19 nt, Human
uggagauguuagggaacuu

SEQ ID NO: 549043 - RNA, 18 nt, Human
aaaaaaccuguuucaggc

SEQ ID NO: 549044 - RNA, 24 nt, Human
aaaaagaguuuaucuaauuaugga

SEQ ID NO: 549045 - RNA, 21 nt, Human
aacaauuucaaauacauagga

SEQ ID NO: 549046 - RNA, 26 nt, Human
aacuucaggcacauaauuccaauuuu

SEQ ID NO: 549047 - RNA, 23 nt, Human
aaggcaaaauucugauuauaauc

SEQ ID NO: 549048 - RNA, 21 nt, Human
acaaagcagauauuuccuuca

SEQ ID NO: 549049 - RNA, 21 nt, Human
agaaauccuugucuuuuuagu

SEQ ID NO: 549050 - RNA, 24 nt, Human
agaagaaaaaaggcaaaauucuga

SEQ ID NO: 549051 - RNA, 18 nt, Human
agacuuuagaaaccagua

SEQ ID NO: 549052 - RNA, 24 nt, Human
aggaaaaaaaauaaugcauuguga

SEQ ID NO: 549053 - RNA, 23 nt, Human
aguugccaagaaauuucuaagga

SEQ ID NO: 549054 - RNA, 21 nt, Human
caaaaggcagcugaauauaag

SEQ ID NO: 549055 - RNA, 22 nt, Human
cacuauauuuagaaaacauaaa

SEQ ID NO: 549056 - RNA, 18 nt, Human
cagccccugcggagcuuu

SEQ ID NO: 549057 - RNA, 23 nt, Human
cauucagaauauguucuugcuau

SEQ ID NO: 549058 - RNA, 22 nt, Human
cauuccugccuaaagagcaaag

SEQ ID NO: 549059 - RNA, 23 nt, Human
ccccugcggagcuuuuugggaac

SEQ ID NO: 549060 - RNA, 23 nt, Human
cuaacuggcauauacacaaagca

SEQ ID NO: 549061 - RNA, 22 nt, Human
cucuccuagcuugagaccucag

SEQ ID NO: 549062 - RNA, 19 nt, Human
cuggaaugcaggagagaag

SEQ ID NO: 549063 - RNA, 23 nt, Human
cugucccaucauggaacagcccu

SEQ ID NO: 549064 - RNA, 23 nt, Human
gaaguugccaagaaauuucuaag

SEQ ID NO: 549065 - RNA, 19 nt, Human
gagguaggucuccacucca

SEQ ID NO: 549066 - RNA, 23 nt, Human
ggaaagcucuguaacaauuucaa

SEQ ID NO: 549067 - RNA, 21 nt, Human
ggaaggaaaggaggaaaaaaa

SEQ ID NO: 549068 - RNA, 23 nt, Human
uaaaagaaauccuugucuuuuua

SEQ ID NO: 549069 - RNA, 25 nt, Human
uaaaguggaaguaaaaaaaccuguu

SEQ ID NO: 549070 - RNA, 21 nt, Human
uaaaugacaggacuacaauau

SEQ ID NO: 549071 - RNA, 21 nt, Human
uaacuggcauauacacaaagc

SEQ ID NO: 549072 - RNA, 21 nt, Human
uaauggaugagaucaccuccc

SEQ ID NO: 549073 - RNA, 18 nt, Human
uacagugguauaguuugg

SEQ ID NO: 549074 - RNA, 19 nt, Human
uacuuuggcuuagcauuua

SEQ ID NO: 549075 - RNA, 20 nt, Human
uagaagugguaaauacagug

SEQ ID NO: 549076 - RNA, 19 nt, Human
uauaagucuaagaccucaa

SEQ ID NO: 549077 - RNA, 22 nt, Human
uauauaauacauacauauguaa

SEQ ID NO: 549078 - RNA, 23 nt, Human
uaugaaaacaaauccaaagcugg

SEQ ID NO: 549079 - RNA, 18 nt, Human
uauuacacaugagaaugu

SEQ ID NO: 549080 - RNA, 21 nt, Human
uauuacacaugagaauguuuu

SEQ ID NO: 549081 - RNA, 22 nt, Human
ucaaaaaucagacauauuuaua

SEQ ID NO: 549082 - RNA, 21 nt, Human
ucaaaacugguuuuugugccc

SEQ ID NO: 549083 - RNA, 19 nt, Human
ucauuuauugcuacauaau

SEQ ID NO: 549084 - RNA, 24 nt, Human
ucuggaaugcaggagagaagucug

SEQ ID NO: 549085 - RNA, 25 nt, Human
ugaaaagaucauuccugccuaaaga

SEQ ID NO: 549086 - RNA, 20 nt, Human
ugaagagcuaccccggccgg

SEQ ID NO: 549087 - RNA, 22 nt, Human
ugacuugaucuucaaguugaga

SEQ ID NO: 549088 - RNA, 20 nt, Human
ugagaacauccugggagaga

SEQ ID NO: 549089 - RNA, 22 nt, Human
ugcauugugauacaaaaauauu

SEQ ID NO: 549090 - RNA, 24 nt, Human
ugccuaaagagcaaagcuuaugug

SEQ ID NO: 549091 - RNA, 27 nt, Human
ugccuccaaacuucaggcacauaauuc

SEQ ID NO: 549092 - RNA, 18 nt, Human
ugcgaaguugccaagaaa

SEQ ID NO: 549093 - RNA, 22 nt, Human
uggaaggaaaggaggaaaaaaa

SEQ ID NO: 549094 - RNA, 23 nt, Human
uguagagauuuuaugaaaacaaa

SEQ ID NO: 549095 - RNA, 22 nt, Human
uuagauauuuaaauauugugcu

SEQ ID NO: 549096 - RNA, 24 nt, Human
uugugcuaaugauuugaaaagauc

SEQ ID NO: 549097 - RNA, 22 nt, Human
uuugagaagaaaaaaggcaaaa

SEQ ID NO: 549098 - RNA, 21 nt, Human
aaaacaccaaagaaguuguag

SEQ ID NO: 549099 - RNA, 25 nt, Human
aaacaccaaagaaguuguagaauac

SEQ ID NO: 549100 - RNA, 24 nt, Human
aacagcaugggggaaccgccccca

SEQ ID NO: 549101 - RNA, 24 nt, Human
aagaacagcaugggggaaccgccc

SEQ ID NO: 549102 - RNA, 27 nt, Human
aagaacagcaugggggaaccgguaccc

SEQ ID NO: 549103 - RNA, 19 nt, Human
aagcauuccaguccuucuc

SEQ ID NO: 549104 - RNA, 22 nt, Human
aaguagcuccagaaacugcuag

SEQ ID NO: 549105 - RNA, 23 nt, Human
accauauccuacaaggaaugacu

SEQ ID NO: 549106 - RNA, 21 nt, Human
agacagugaagaggaaccaag

SEQ ID NO: 549107 - RNA, 23 nt, Human
agugaagaggaaccaaggcaucu

SEQ ID NO: 549108 - RNA, 19 nt, Human
auggcagacagugaagagg

SEQ ID NO: 549109 - RNA, 24 nt, Human
caaaacaccaaagaaguuguagaa

SEQ ID NO: 549110 - RNA, 19 nt, Human
caagaacagcaugggggaa

SEQ ID NO: 549111 - RNA, 25 nt, Human
caagaacagcaugggggaaccgccc

SEQ ID NO: 549112 - RNA, 18 nt, Human
cacaagaacagcaugggg

SEQ ID NO: 549113 - RNA, 25 nt, Human
cacaagaacagcaugggggaaccgc

SEQ ID NO: 549114 - RNA, 18 nt, Human
cacaccaucuuugcagaa

SEQ ID NO: 549115 - RNA, 25 nt, Human
cacacucagccuuggcaaguagcuc

SEQ ID NO: 549116 - RNA, 22 nt, Human
caccacaccaucuuugcagaag

SEQ ID NO: 549117 - RNA, 22 nt, Human
cagacagugaagaggaaccaag

SEQ ID NO: 549118 - RNA, 23 nt, Human
caggaggagcaaaacaccaaaga

SEQ ID NO: 549119 - RNA, 22 nt, Human
ccaaagaaguuguagaauacag

SEQ ID NO: 549120 - RNA, 21 nt, Human
ccaaccacaggaggagcaaaa

SEQ ID NO: 549121 - RNA, 24 nt, Human
ccaaccacaggaggagcaaaacac

SEQ ID NO: 549122 - RNA, 22 nt, Human
ccaccugaucucucccuugaug

SEQ ID NO: 549123 - RNA, 24 nt, Human
ccagcccauccuuggccagagccc

SEQ ID NO: 549124 - RNA, 24 nt, Human
cccaagauccaauuaccuccaccu

SEQ ID NO: 549125 - RNA, 19 nt, Human
ccuccagcccauccuuggc

SEQ ID NO: 549126 - RNA, 25 nt, Human
ccugaucucucccuugaugugggga

SEQ ID NO: 549127 - RNA, 27 nt, Human
cuaaaccauauccuacaaggaaugacu

SEQ ID NO: 549128 - RNA, 23 nt, Human
cucagcucacacucagccuuggc

SEQ ID NO: 549129 - RNA, 23 nt, Human
cuuggugguggggcaggcucagc

SEQ ID NO: 549130 - RNA, 19 nt, Human
gaaggcaugccaagccaag

SEQ ID NO: 549131 - RNA, 18 nt, Human
gagaaauggccaagcccc

SEQ ID NO: 549132 - RNA, 23 nt, Human
gauaagggagaagagaagaggaa

SEQ ID NO: 549133 - RNA, 23 nt, Human
gcccggagaagcauuccaguccu

SEQ ID NO: 549134 - RNA, 19 nt, Human
gcugggcgaguccaugaug

SEQ ID NO: 549135 - RNA, 18 nt, Human
ggccgaggagagcugggc

SEQ ID NO: 549136 - RNA, 19 nt, Human
ggguguggugaagaguugg

SEQ ID NO: 549137 - RNA, 21 nt, Human
ggugaagaguuggagcccagg

SEQ ID NO: 549138 - RNA, 19 nt, Human
gguggggcaggcucagcuc

SEQ ID NO: 549139 - RNA, 23 nt, Human
guggcaggaaggagaaugaacac

SEQ ID NO: 549140 - RNA, 19 nt, Human
gugguggggcaggcucagc

SEQ ID NO: 549141 - RNA, 22 nt, Human
guuuaauugacucacuguucca

SEQ ID NO: 549142 - RNA, 25 nt, Human
uacaggguguggugaagaguuggag

SEQ ID NO: 549143 - RNA, 19 nt, Human
uaggugggggcacagcuaa

SEQ ID NO: 549144 - RNA, 23 nt, Human
uauaaaaucaucagaucucguga

SEQ ID NO: 549145 - RNA, 21 nt, Human
uaucacaagaacagcaugggg

SEQ ID NO: 549146 - RNA, 20 nt, Human
ucacuguuccacauggcugg

SEQ ID NO: 549147 - RNA, 19 nt, Human
uccacauggcuggggaggc

SEQ ID NO: 549148 - RNA, 18 nt, Human
uccagggaagagacagac

SEQ ID NO: 549149 - RNA, 21 nt, Human
uccuuggccagagccccaggc

SEQ ID NO: 549150 - RNA, 24 nt, Human
ucugagaaggcaugccaagccaag

SEQ ID NO: 549151 - RNA, 18 nt, Human
ugaccuccagcccauccu

SEQ ID NO: 549152 - RNA, 23 nt, Human
ugauauuuuaggugggggcacag

SEQ ID NO: 549153 - RNA, 20 nt, Human
ugccaagccaagguucaggc

SEQ ID NO: 549154 - RNA, 21 nt, Human
uggagaaauggccaagcccca

SEQ ID NO: 549155 - RNA, 20 nt, Human
uggcaaguagcuccagaaac

SEQ ID NO: 549156 - RNA, 20 nt, Human
uggccaagccccaugugguu

SEQ ID NO: 549157 - RNA, 20 nt, Human
uggccaggcugucgucuuuc

SEQ ID NO: 549158 - RNA, 24 nt, Human
ugggggaaccgcccccaagaucca

SEQ ID NO: 549159 - RNA, 24 nt, Human
ugugguuacagggaagccacguac

SEQ ID NO: 549160 - RNA, 19 nt, Human
uuggugguggggcaggcuc

SEQ ID NO: 549161 - RNA, 19 nt, Human
aaaauacaagcagaggaag

SEQ ID NO: 549162 - RNA, 18 nt, Human
aaaauacacaccaaaacc

SEQ ID NO: 549163 - RNA, 24 nt, Human
aaaaugccucucaacaaccacaaa

SEQ ID NO: 549164 - RNA, 21 nt, Human
aaauaaauacuauucuucuug

SEQ ID NO: 549165 - RNA, 22 nt, Human
aacagcuuaagacauaauggug

SEQ ID NO: 549166 - RNA, 18 nt, Human
aacccuuggcucugaaca

SEQ ID NO: 549167 - RNA, 18 nt, Human
aagaaggagacacccaaa

SEQ ID NO: 549168 - RNA, 20 nt, Human
aagaaggagacacccaaaaa

SEQ ID NO: 549169 - RNA, 22 nt, Human
aagaaggagacacccaaaaaca

SEQ ID NO: 549170 - RNA, 20 nt, Human
acaaaacacaaggaaaacaa

SEQ ID NO: 549171 - RNA, 22 nt, Human
acaaaacacaaggaaaacaaag

SEQ ID NO: 549172 - RNA, 20 nt, Human
acaagaaggagacacccaaa

SEQ ID NO: 549173 - RNA, 20 nt, Human
acacaaccacacacaaacac

SEQ ID NO: 549174 - RNA, 24 nt, Human
acacaccaaaaccuuaaugugaaa

SEQ ID NO: 549175 - RNA, 21 nt, Human
acauaccuuccuguuccaucc

SEQ ID NO: 549176 - RNA, 19 nt, Human
acauaugaauggugugaaa

SEQ ID NO: 549177 - RNA, 19 nt, Human
agacacccaaaaacaaugu

SEQ ID NO: 549178 - RNA, 21 nt, Human
agacacccaaaaacaauguaa

SEQ ID NO: 549179 - RNA, 21 nt, Human
agagcacuugucucucuuuuc

SEQ ID NO: 549180 - RNA, 25 nt, Human
agagcacuugucucucuuuucuucc

SEQ ID NO: 549181 - RNA, 24 nt, Human
agagccaaauacuuucuacaccca

SEQ ID NO: 549182 - RNA, 18 nt, Human
agauuuguauuuggguca

SEQ ID NO: 549183 - RNA, 22 nt, Human
agccaaauacuuucuacaccca

SEQ ID NO: 549184 - RNA, 20 nt, Human
agcccaauuuuuccccuacu

SEQ ID NO: 549185 - RNA, 23 nt, Human
aggaaagacaaauagguaaaugu

SEQ ID NO: 549186 - RNA, 21 nt, Human
aggcagcaaauaccaggcuca

SEQ ID NO: 549187 - RNA, 24 nt, Human
auaaauuuauuagaaaaacaugcc

SEQ ID NO: 549188 - RNA, 21 nt, Human
auagauuucugaaacucauaa

SEQ ID NO: 549189 - RNA, 26 nt, Human
aucacagagcauuuccuaccucaaga

SEQ ID NO: 549190 - RNA, 20 nt, Human
auuugcuauaucuuuucugu

SEQ ID NO: 549191 - RNA, 20 nt, Human
auuugcuuuuuaauggaaau

SEQ ID NO: 549192 - RNA, 21 nt, Human
caaaacacaaggaaaacaaag

SEQ ID NO: 549193 - RNA, 22 nt, Human
caaagacacuuuguauaagccc

SEQ ID NO: 549194 - RNA, 24 nt, Human
caaaugcaccgaaacaaaacacaa

SEQ ID NO: 549195 - RNA, 22 nt, Human
caacaaacaugagagaguuaaa

SEQ ID NO: 549196 - RNA, 21 nt, Human
caaccuaguuucuucauauua

SEQ ID NO: 549197 - RNA, 18 nt, Human
cacaagaaggagacaccc

SEQ ID NO: 549198 - RNA, 24 nt, Human
cacacaaccacacacaaacacacu

SEQ ID NO: 549199 - RNA, 22 nt, Human
cacacacaaacacacuugcaca

SEQ ID NO: 549200 - RNA, 22 nt, Human
cacaccaaaaccuuaaugugaa

SEQ ID NO: 549201 - RNA, 22 nt, Human
caccaaucacgauaaugcaauc

SEQ ID NO: 549202 - RNA, 22 nt, Human
caccauugcaaggaccaaguau

SEQ ID NO: 549203 - RNA, 22 nt, Human
cacccaaaaacaauguaaaaac

SEQ ID NO: 549204 - RNA, 21 nt, Human
caccgaaacaaaacacaagga

SEQ ID NO: 549205 - RNA, 25 nt, Human
cacuaaggcuauucugccacuuaac

SEQ ID NO: 549206 - RNA, 22 nt, Human
cacuugucucucuuuucuucug

SEQ ID NO: 549207 - RNA, 21 nt, Human
cagcagcagaacugucccuau

SEQ ID NO: 549208 - RNA, 21 nt, Human
caggguuugaaaaugccucuc

SEQ ID NO: 549209 - RNA, 19 nt, Human
cagguuacaacaaacauga

SEQ ID NO: 549210 - RNA, 21 nt, Human
ccacuacuuuaaaugaaaagc

SEQ ID NO: 549211 - RNA, 21 nt, Human
cccaaaaacaauguaaaaaca

SEQ ID NO: 549212 - RNA, 21 nt, Human
cuaaguaacuuacauaaaggc

SEQ ID NO: 549213 - RNA, 19 nt, Human
cucaagaaauuagcaguga

SEQ ID NO: 549214 - RNA, 22 nt, Human
cucaagaaauuagcagugacuc

SEQ ID NO: 549215 - RNA, 21 nt, Human
cuuaagacauaauggugacaa

SEQ ID NO: 549216 - RNA, 23 nt, Human
cuucaucgcaaaauacaagcaga

SEQ ID NO: 549217 - RNA, 22 nt, Human
cuugucccaucaacauauacuu

SEQ ID NO: 549218 - RNA, 20 nt, Human
cuuguccuucauuuauaacu

SEQ ID NO: 549219 - RNA, 20 nt, Human
cuuuggauguauucuuaguu

SEQ ID NO: 549220 - RNA, 23 nt, Human
cuuuuauauuuguaaaacaguua

SEQ ID NO: 549221 - RNA, 22 nt, Human
gaaaaugccucucaacaaccac

SEQ ID NO: 549222 - RNA, 19 nt, Human
gaccaaguauaaaauauuc

SEQ ID NO: 549223 - RNA, 18 nt, Human
gacuggcaccacuguugu

SEQ ID NO: 549224 - RNA, 26 nt, Human
uaaaacccuccaaauaaaaggaauua

SEQ ID NO: 549225 - RNA, 18 nt, Human
uaacaaaauacacaccaa

SEQ ID NO: 549226 - RNA, 21 nt, Human
uaacaaaauacacaccaaaac

SEQ ID NO: 549227 - RNA, 22 nt, Human
uaacaaaauacacaccaaaacc

SEQ ID NO: 549228 - RNA, 23 nt, Human
uaacagcagcagaacugucccua

SEQ ID NO: 549229 - RNA, 20 nt, Human
uaacucaaacuuuuccuauu

SEQ ID NO: 549230 - RNA, 23 nt, Human
uaaggcauaaagucccaaagaua

SEQ ID NO: 549231 - RNA, 21 nt, Human
uaaguucuuugucuuucaaag

SEQ ID NO: 549232 - RNA, 26 nt, Human
uaaugauuuacuaacaauuuuacuau

SEQ ID NO: 549233 - RNA, 18 nt, Human
uacaaauauauaaauuua

SEQ ID NO: 549234 - RNA, 21 nt, Human
uaccucaagaggguacuugag

SEQ ID NO: 549235 - RNA, 21 nt, Human
uaccucagguuacaacaaaca

SEQ ID NO: 549236 - RNA, 22 nt, Human
uaccucagguuacaacaaacau

SEQ ID NO: 549237 - RNA, 21 nt, Human
uagaaaaacaugccuacuaaa

SEQ ID NO: 549238 - RNA, 19 nt, Human
uagcaaaggcaggaugaca

SEQ ID NO: 549239 - RNA, 23 nt, Human
uaggacgcacuguauguuugaug

SEQ ID NO: 549240 - RNA, 23 nt, Human
uaggauaauuguuuuaugugaaa

SEQ ID NO: 549241 - RNA, 20 nt, Human
uagucugucacaaccuaguu

SEQ ID NO: 549242 - RNA, 22 nt, Human
uauacacaaacauugaaauaug

SEQ ID NO: 549243 - RNA, 19 nt, Human
uaucaaauggucuuugcuu

SEQ ID NO: 549244 - RNA, 21 nt, Human
uauuugcuuuuuaauggaaau

SEQ ID NO: 549245 - RNA, 21 nt, Human
uccaauuuuauuuaccaucac

SEQ ID NO: 549246 - RNA, 18 nt, Human
uccacacaaccacacaca

SEQ ID NO: 549247 - RNA, 25 nt, Human
uccacacaaccacacacaaacacac

SEQ ID NO: 549248 - RNA, 22 nt, Human
ucuauagccuaaaaaguaaggc

SEQ ID NO: 549249 - RNA, 20 nt, Human
ucucucuuuucuucugaauu

SEQ ID NO: 549250 - RNA, 23 nt, Human
ucuguagcauuuggauaccucag

SEQ ID NO: 549251 - RNA, 22 nt, Human
ucuuuggauguauucuuaguuu

SEQ ID NO: 549252 - RNA, 23 nt, Human
ugaaacucauaaccaccaaucac

SEQ ID NO: 549253 - RNA, 22 nt, Human
ugaauggugugaaagaccaaaa

SEQ ID NO: 549254 - RNA, 19 nt, Human
ugaaugguucuugagccca

SEQ ID NO: 549255 - RNA, 22 nt, Human
ugaauuaaaaacacuuaacuca

SEQ ID NO: 549256 - RNA, 22 nt, Human
uguccacacaaccacacacaaa

SEQ ID NO: 549257 - RNA, 19 nt, Human
ugugauuaaucaaagacac

SEQ ID NO: 549258 - RNA, 21 nt, Human
uuaaaugcaauaauccauaaa

SEQ ID NO: 549259 - RNA, 21 nt, Human
uuagaaaaacaugccuacuaa

SEQ ID NO: 549260 - RNA, 20 nt, Human
uuagauacuucaaaaacauc

SEQ ID NO: 549261 - RNA, 19 nt, Human
uuccaucuccuccuugucc

SEQ ID NO: 549262 - RNA, 20 nt, Human
uuccuuaaaauauuucuuca

SEQ ID NO: 549263 - RNA, 21 nt, Human
uucuucacaauaaacccuugg

SEQ ID NO: 549264 - RNA, 18 nt, Human
uugaaggacagcaaucaa

SEQ ID NO: 549265 - RNA, 22 nt, Human
uuuauuauacuuuuauauuugu

SEQ ID NO: 549266 - RNA, 23 nt, Human
uuuccuagagccaaauacuuucu

SEQ ID NO: 549267 - RNA, 21 nt, Human
uuuuccaucuccuccuugucc

SEQ ID NO: 549268 - RNA, 18 nt, Human
uuuuuuuucaaauagguu

SEQ ID NO: 549269 - RNA, 24 nt, Human
aaaaaaaaaaaaagagagaaagag

SEQ ID NO: 549270 - RNA, 18 nt, Human
aaaagauccagagaaaac

SEQ ID NO: 549271 - RNA, 22 nt, Human
aaaauccacaacaaggauccuc

SEQ ID NO: 549272 - RNA, 18 nt, Human
aacccacacccagagucc

SEQ ID NO: 549273 - RNA, 18 nt, Human
aaccuccuacaagcugca

SEQ ID NO: 549274 - RNA, 22 nt, Human
aaggaccaggacacagagggug

SEQ ID NO: 549275 - RNA, 22 nt, Human
aagguguaugucaucacugaca

SEQ ID NO: 549276 - RNA, 22 nt, Human
aaguagcuuguggcagacaagc

SEQ ID NO: 549277 - RNA, 24 nt, Human
aaugucuacuucccuuccuguggc

SEQ ID NO: 549278 - RNA, 18 nt, Human
acaaagagaaggaugggg

SEQ ID NO: 549279 - RNA, 20 nt, Human
acagagagcacacgcauaca

SEQ ID NO: 549280 - RNA, 21 nt, Human
agaaagaaccugguguaugga

SEQ ID NO: 549281 - RNA, 18 nt, Human
agaagaagaaaugauuca

SEQ ID NO: 549282 - RNA, 21 nt, Human
agacagaaaaugacagcaaga

SEQ ID NO: 549283 - RNA, 21 nt, Human
agagcacacgcauacagcacg

SEQ ID NO: 549284 - RNA, 22 nt, Human
agaggaaaaggcuuagcuggga

SEQ ID NO: 549285 - RNA, 18 nt, Human
agagggaggucuccaagc

SEQ ID NO: 549286 - RNA, 19 nt, Human
agcccagugucaagaucca

SEQ ID NO: 549287 - RNA, 20 nt, Human
agccuaugagcaacaucacc

SEQ ID NO: 549288 - RNA, 22 nt, Human
aggacugggagguaaaauggaa

SEQ ID NO: 549289 - RNA, 21 nt, Human
aggauccucccucugaggugu

SEQ ID NO: 549290 - RNA, 19 nt, Human
agggagauaaggacuaagc

SEQ ID NO: 549291 - RNA, 23 nt, Human
agggagauaaggacuaagccagg

SEQ ID NO: 549292 - RNA, 21 nt, Human
agggcaggaagaagguucugu

SEQ ID NO: 549293 - RNA, 21 nt, Human
aggggcggcccccucggcucc

SEQ ID NO: 549294 - RNA, 20 nt, Human
agguagguuuugcagcccag

SEQ ID NO: 549295 - RNA, 19 nt, Human
agguggcacagagaggaug

SEQ ID NO: 549296 - RNA, 20 nt, Human
agguuuugcagcccaguguc

SEQ ID NO: 549297 - RNA, 22 nt, Human
aguagaaaaagacccuggagag

SEQ ID NO: 549298 - RNA, 23 nt, Human
auagcaaaguagaaaaagacccu

SEQ ID NO: 549299 - RNA, 27 nt, Human
auauacauaacuucaaagcacauccgu

SEQ ID NO: 549300 - RNA, 19 nt, Human
auauaucuauauauauaug

SEQ ID NO: 549301 - RNA, 19 nt, Human
auauaucuauaucucuaua

SEQ ID NO: 549302 - RNA, 22 nt, Human
auccagaaaguaagaauccagu

SEQ ID NO: 549303 - RNA, 19 nt, Human
auccagagaaaacaaaaua

SEQ ID NO: 549304 - RNA, 20 nt, Human
aucccugggcuaugccccga

SEQ ID NO: 549305 - RNA, 22 nt, Human
augagaaaccauaagcauacaa

SEQ ID NO: 549306 - RNA, 19 nt, Human
caaaaaagagaaaaggaaa

SEQ ID NO: 549307 - RNA, 25 nt, Human
caaaaaagagaaaaggaaaaguagg

SEQ ID NO: 549308 - RNA, 24 nt, Human
caaaauccacaacaaggauccucc

SEQ ID NO: 549309 - RNA, 19 nt, Human
caaagaugaguuccuagac

SEQ ID NO: 549310 - RNA, 22 nt, Human
caaagccaggugcaaaauccac

SEQ ID NO: 549311 - RNA, 23 nt, Human
caaagccaggugcaaaauccaca

SEQ ID NO: 549312 - RNA, 20 nt, Human
caagcagguaaucaguaaau

SEQ ID NO: 549313 - RNA, 21 nt, Human
caagccaaagggacgcaucua

SEQ ID NO: 549314 - RNA, 23 nt, Human
caccggccugcaccagggggaau

SEQ ID NO: 549315 - RNA, 19 nt, Human
cacugccugcaucuccgua

SEQ ID NO: 549316 - RNA, 18 nt, Human
cagcagcagagucccaga

SEQ ID NO: 549317 - RNA, 20 nt, Human
cagcagcagugcaaggaugc

SEQ ID NO: 549318 - RNA, 19 nt, Human
cagcagugcaaggaugcgg

SEQ ID NO: 549319 - RNA, 25 nt, Human
caggauggucacccagaacuccuaa

SEQ ID NO: 549320 - RNA, 23 nt, Human
caggggagggcuuugcaaaugca

SEQ ID NO: 549321 - RNA, 21 nt, Human
caucugguucuuucugcuuau

SEQ ID NO: 549322 - RNA, 20 nt, Human
ccaaacccugguggcccaua

SEQ ID NO: 549323 - RNA, 23 nt, Human
ccaaucaaccaauuacaaacacc

SEQ ID NO: 549324 - RNA, 26 nt, Human
ccacacacaguauuacuacacugaac

SEQ ID NO: 549325 - RNA, 26 nt, Human
ccacacccagaguccaggucucccca

SEQ ID NO: 549326 - RNA, 23 nt, Human
ccagagaaaacaaaauaagagaa

SEQ ID NO: 549327 - RNA, 21 nt, Human
ccagccccagcagcagugcaa

SEQ ID NO: 549328 - RNA, 23 nt, Human
ccaguaccugagcacagaccagg

SEQ ID NO: 549329 - RNA, 20 nt, Human
ccaugguugaaauauaaagc

SEQ ID NO: 549330 - RNA, 21 nt, Human
cccaaagccaggugcaaaauc

SEQ ID NO: 549331 - RNA, 21 nt, Human
cccacacccagaguccagguc

SEQ ID NO: 549332 - RNA, 25 nt, Human
cccagaacuccuaaccgcccucagg

SEQ ID NO: 549333 - RNA, 19 nt, Human
ccccaaacccugguggccc

SEQ ID NO: 549334 - RNA, 21 nt, Human
ccccaccccuccccaccaauc

SEQ ID NO: 549335 - RNA, 21 nt, Human
ccccccaccccuccccaccaa

SEQ ID NO: 549336 - RNA, 23 nt, Human
ccccucccaccuucuucagccug

SEQ ID NO: 549337 - RNA, 19 nt, Human
ccccuccccaccaaucaac

SEQ ID NO: 549338 - RNA, 22 nt, Human
cccuccccucccaccuucuuca

SEQ ID NO: 549339 - RNA, 18 nt, Human
ccgcccuccccucccacc

SEQ ID NO: 549340 - RNA, 24 nt, Human
ccuccccucccaccuucuucagcc

SEQ ID NO: 549341 - RNA, 18 nt, Human
ccuccucccucguggcac

SEQ ID NO: 549342 - RNA, 24 nt, Human
ccucuggcaggcaggccgcggggc

SEQ ID NO: 549343 - RNA, 19 nt, Human
ccugacuguuacuaccagg

SEQ ID NO: 549344 - RNA, 19 nt, Human
ccugcaaagaugaguuccu

SEQ ID NO: 549345 - RNA, 18 nt, Human
ccuggguggagagguggc

SEQ ID NO: 549346 - RNA, 18 nt, Human
ccuuagcugggccaguuc

SEQ ID NO: 549347 - RNA, 23 nt, Human
cgagaaaggagagaaggguguga

SEQ ID NO: 549348 - RNA, 25 nt, Human
cgggaaacugaggcccaagaggggg

SEQ ID NO: 549349 - RNA, 20 nt, Human
cuccauuagggccccccacc

SEQ ID NO: 549350 - RNA, 24 nt, Human
cuccauuagggccccccaccccuc

SEQ ID NO: 549351 - RNA, 20 nt, Human
cuccucagguuccgcccucc

SEQ ID NO: 549352 - RNA, 24 nt, Human
cucuccauuagggccccccacccc

SEQ ID NO: 549353 - RNA, 19 nt, Human
cucugcggagcagccuguu

SEQ ID NO: 549354 - RNA, 22 nt, Human
cugcaguggcccucagaaggac

SEQ ID NO: 549355 - RNA, 21 nt, Human
cugugagccaacccacaccca

SEQ ID NO: 549356 - RNA, 19 nt, Human
cuguggcaacuucagcagc

SEQ ID NO: 549357 - RNA, 24 nt, Human
cuguucggcgacacccccgcccgc

SEQ ID NO: 549358 - RNA, 23 nt, Human
cuugccaaacccacaccucucca

SEQ ID NO: 549359 - RNA, 24 nt, Human
cuuuuucucauuucaaaggagagu

SEQ ID NO: 549360 - RNA, 19 nt, Human
gaaaggggugagcaaggga

SEQ ID NO: 549361 - RNA, 19 nt, Human
gaaauauaaagcuggcuca

SEQ ID NO: 549362 - RNA, 22 nt, Human
gagagguggcacagagaggaug

SEQ ID NO: 549363 - RNA, 23 nt, Human
gagcaacaucacccgucagucuc

SEQ ID NO: 549364 - RNA, 23 nt, Human
gagccaacccacacccagagucc

SEQ ID NO: 549365 - RNA, 24 nt, Human
gagccaacccacacccagagucca

SEQ ID NO: 549366 - RNA, 18 nt, Human
gagccuaugagcaacauc

SEQ ID NO: 549367 - RNA, 19 nt, Human
gaggaaacagugcccuaga

SEQ ID NO: 549368 - RNA, 23 nt, Human
gaggacugggagguaaaauggaa

SEQ ID NO: 549369 - RNA, 23 nt, Human
gcacagagaggaugagaaacaaa

SEQ ID NO: 549370 - RNA, 21 nt, Human
gcaggcaggccgcggggcggg

SEQ ID NO: 549371 - RNA, 22 nt, Human
gcccaagagggggaauggggau

SEQ ID NO: 549372 - RNA, 20 nt, Human
gcccagagaggauggagcca

SEQ ID NO: 549373 - RNA, 18 nt, Human
gcccauaaacuccacaag

SEQ ID NO: 549374 - RNA, 18 nt, Human
gccccccaccccucccca

SEQ ID NO: 549375 - RNA, 21 nt, Human
gcccgggguuccccaugucgg

SEQ ID NO: 549376 - RNA, 18 nt, Human
gccgcggggcggggcggc

SEQ ID NO: 549377 - RNA, 19 nt, Human
gcggagcagccuguucggc

SEQ ID NO: 549378 - RNA, 20 nt, Human
gcggcccccucggcuccucu

SEQ ID NO: 549379 - RNA, 18 nt, Human
ggaaauguagguguucag

SEQ ID NO: 549380 - RNA, 24 nt, Human
ggaaccucaggauacaucaaucac

SEQ ID NO: 549381 - RNA, 18 nt, Human
ggaagggggaagggggag

SEQ ID NO: 549382 - RNA, 19 nt, Human
ggaagggggaagggggagg

SEQ ID NO: 549383 - RNA, 19 nt, Human
ggauggggaggaaacagug

SEQ ID NO: 549384 - RNA, 18 nt, Human
ggcacuuucugagcucag

SEQ ID NO: 549385 - RNA, 21 nt, Human
ggccuccuggguggagaggug

SEQ ID NO: 549386 - RNA, 24 nt, Human
ggcggcccccucggcuccucuggc

SEQ ID NO: 549387 - RNA, 25 nt, Human
gggaaacugaggcccaagaggggga

SEQ ID NO: 549388 - RNA, 18 nt, Human
gggaagggggaggaggga

SEQ ID NO: 549389 - RNA, 27 nt, Human
gggcaggaagaagguucuguggcuuuu

SEQ ID NO: 549390 - RNA, 20 nt, Human
ggggaaaggggugagcaagg

SEQ ID NO: 549391 - RNA, 19 nt, Human
ggggcggggcggcgcgggg

SEQ ID NO: 549392 - RNA, 19 nt, Human
ggguguggggugggggaag

SEQ ID NO: 549393 - RNA, 22 nt, Human
ggguguggggugggggaagggg

SEQ ID NO: 549394 - RNA, 20 nt, Human
ggucagggaagggcagaaug

SEQ ID NO: 549395 - RNA, 22 nt, Human
ggugauuuccccaaacccuggu

SEQ ID NO: 549396 - RNA, 24 nt, Human
gguucuguggcuuuuccaccagga

SEQ ID NO: 549397 - RNA, 21 nt, Human
guggcuccucagguuccgccc

SEQ ID NO: 549398 - RNA, 24 nt, Human
uacaaacaccacacacaguauuac

SEQ ID NO: 549399 - RNA, 18 nt, Human
uacacugaacccgucagc

SEQ ID NO: 549400 - RNA, 23 nt, Human
uacacugaacccgucagccccua

SEQ ID NO: 549401 - RNA, 24 nt, Human
uacagcacggagcacugagguggg

SEQ ID NO: 549402 - RNA, 20 nt, Human
uaccugagcacagaccaggc

SEQ ID NO: 549403 - RNA, 18 nt, Human
uagaaaaagacccuggag

SEQ ID NO: 549404 - RNA, 21 nt, Human
uagaaaaagacccuggagagc

SEQ ID NO: 549405 - RNA, 24 nt, Human
uagaaagaaccugguguauggaaa

SEQ ID NO: 549406 - RNA, 18 nt, Human
uagaagggaggucacagc

SEQ ID NO: 549407 - RNA, 21 nt, Human
uagguuuugcagcccaguguc

SEQ ID NO: 549408 - RNA, 26 nt, Human
uauaaagcuggcucagguggcuccuc

SEQ ID NO: 549409 - RNA, 19 nt, Human
uauauaucuauauauauau

SEQ ID NO: 549410 - RNA, 18 nt, Human
ucaccccugccccaaagc

SEQ ID NO: 549411 - RNA, 19 nt, Human
ucagaguucagcuguugac

SEQ ID NO: 549412 - RNA, 20 nt, Human
ucagauggaaaagauccaga

SEQ ID NO: 549413 - RNA, 21 nt, Human
ucagcaucaaacacauuuauu

SEQ ID NO: 549414 - RNA, 18 nt, Human
ucagggaagggcagaaug

SEQ ID NO: 549415 - RNA, 19 nt, Human
ucagguggcuccucagguu

SEQ ID NO: 549416 - RNA, 18 nt, Human
ucccugggcuaugccccg

SEQ ID NO: 549417 - RNA, 23 nt, Human
uccucagguuccgcccuccccuc

SEQ ID NO: 549418 - RNA, 20 nt, Human
uccugggacaggggagggcu

SEQ ID NO: 549419 - RNA, 19 nt, Human
uccuggguggagagguggc

SEQ ID NO: 549420 - RNA, 23 nt, Human
ucucuugcuuugcugugcaagug

SEQ ID NO: 549421 - RNA, 24 nt, Human
ucugcaguggcccucagaaggacc

SEQ ID NO: 549422 - RNA, 19 nt, Human
ugacagcaagacauugaga

SEQ ID NO: 549423 - RNA, 20 nt, Human
ugacaguacgucgcagcugg

SEQ ID NO: 549424 - RNA, 22 nt, Human
ugacuguuacuaccaggggggc

SEQ ID NO: 549425 - RNA, 21 nt, Human
ugagaaaccauaagcauacaa

SEQ ID NO: 549426 - RNA, 19 nt, Human
ugagauagcaaaguagaaa

SEQ ID NO: 549427 - RNA, 20 nt, Human
ugagccaacccacacccaga

SEQ ID NO: 549428 - RNA, 18 nt, Human
ugaguaaaaaggaacagg

SEQ ID NO: 549429 - RNA, 20 nt, Human
ugauucagaacaaggaagag

SEQ ID NO: 549430 - RNA, 19 nt, Human
ugauuuccugcccugccuc

SEQ ID NO: 549431 - RNA, 20 nt, Human
ugcagugggacauuuucccu

SEQ ID NO: 549432 - RNA, 21 nt, Human
ugccaagcuugugaugggagc

SEQ ID NO: 549433 - RNA, 20 nt, Human
ugcuuugcugugcaaguguu

SEQ ID NO: 549434 - RNA, 21 nt, Human
uggagagguggcacagagagg

SEQ ID NO: 549435 - RNA, 18 nt, Human
uggaguggacccaccggc

SEQ ID NO: 549436 - RNA, 22 nt, Human
uggcaacuucagcagcagaguc

SEQ ID NO: 549437 - RNA, 21 nt, Human
uggcaggcaggccgcggggcg

SEQ ID NO: 549438 - RNA, 24 nt, Human
uggcuccucagguuccgcccuccc

SEQ ID NO: 549439 - RNA, 21 nt, Human
ugggguaauuucugggcacaa

SEQ ID NO: 549440 - RNA, 19 nt, Human
uggggucagggaagggcag

SEQ ID NO: 549441 - RNA, 21 nt, Human
uggggucagggaagggcagaa

SEQ ID NO: 549442 - RNA, 18 nt, Human
uggggugggggaaggggg

SEQ ID NO: 549443 - RNA, 22 nt, Human
ugguggcccauaaacuccacaa

SEQ ID NO: 549444 - RNA, 18 nt, Human
uguagaaagaaccuggug

SEQ ID NO: 549445 - RNA, 22 nt, Human
uguccugggacaggggagggcu

SEQ ID NO: 549446 - RNA, 19 nt, Human
ugugagccaacccacaccc

SEQ ID NO: 549447 - RNA, 21 nt, Human
uguggcagacaagccugagga

SEQ ID NO: 549448 - RNA, 24 nt, Human
uucagcaucaaacacauuuauuuc

SEQ ID NO: 549449 - RNA, 22 nt, Human
uucagugugcucaggacuccug

SEQ ID NO: 549450 - RNA, 23 nt, Human
uuccuguacccucagauggaaaa

SEQ ID NO: 549451 - RNA, 20 nt, Human
uucgagugauguugcucaug

SEQ ID NO: 549452 - RNA, 18 nt, Human
uugcagguccccuccucc

SEQ ID NO: 549453 - RNA, 21 nt, Human
uugcuuugcugugcaaguguu

SEQ ID NO: 549454 - RNA, 23 nt, Human
uuuguccugggacaggggagggc

SEQ ID NO: 549455 - RNA, 21 nt, Human
uuuuuuuucuugaaaaaaauc

SEQ ID NO: 549456 - RNA, 19 nt, Human
aacugaucgcuccccaucu

SEQ ID NO: 549457 - RNA, 19 nt, Human
acccugagcauccgaagaa

SEQ ID NO: 549458 - RNA, 18 nt, Human
agaaugccugaugcggau

SEQ ID NO: 549459 - RNA, 20 nt, Human
caagaucuguuuuugaauuc

SEQ ID NO: 549460 - RNA, 22 nt, Human
cccagaacccugagcauccgaa

SEQ ID NO: 549461 - RNA, 18 nt, Human
cgcuccccaucugaacac

SEQ ID NO: 549462 - RNA, 20 nt, Human
cugagcauccgaagaauggg

SEQ ID NO: 549463 - RNA, 18 nt, Human
cuguagcauccccagaac

SEQ ID NO: 549464 - RNA, 19 nt, Human
gagaaugccugaugcggau

SEQ ID NO: 549465 - RNA, 21 nt, Human
ugaggcgggaagcuuguauag

SEQ ID NO: 549466 - RNA, 23 nt, Human
uguuuuugaauucacuuccgaga

SEQ ID NO: 549467 - RNA, 21 nt, Human
uuccgagagaacugaucgcuc

SEQ ID NO: 549468 - RNA, 22 nt, Human
uuuauuguuuuugcuguguguu

SEQ ID NO: 549469 - RNA, 24 nt, Human
agugcaguucuucaauuaaagugc

SEQ ID NO: 549470 - RNA, 19 nt, Human
cauggaugagguaaacuaa

SEQ ID NO: 549471 - RNA, 20 nt, Human
uaauuucaagaguuuugagu

SEQ ID NO: 549472 - RNA, 20 nt, Human
ugcauggaugagguaaacua

SEQ ID NO: 549473 - RNA, 19 nt, Human
aaaaucacucuauaaacaa

SEQ ID NO: 549474 - RNA, 23 nt, Human
aaacaauaucaaaacagcacuga

SEQ ID NO: 549475 - RNA, 18 nt, Human
aaggacccaggacaucac

SEQ ID NO: 549476 - RNA, 21 nt, Human
aaguuucuugcaucaguguuc

SEQ ID NO: 549477 - RNA, 21 nt, Human
aauaaagcuuuaaaaacaagc

SEQ ID NO: 549478 - RNA, 22 nt, Human
acagcacugauuaaacagaaua

SEQ ID NO: 549479 - RNA, 22 nt, Human
accugccaauuagcaaacaaua

SEQ ID NO: 549480 - RNA, 23 nt, Human
agaauaaaauggcacaaaaagga

SEQ ID NO: 549481 - RNA, 19 nt, Human
agacaaaaaggagguuaga

SEQ ID NO: 549482 - RNA, 19 nt, Human
aggagguuagagagcucaa

SEQ ID NO: 549483 - RNA, 21 nt, Human
auaguucugcuuucagagacu

SEQ ID NO: 549484 - RNA, 22 nt, Human
auucuuuuuaaaaaauaucaga

SEQ ID NO: 549485 - RNA, 20 nt, Human
caaaaaggagguuagagagc

SEQ ID NO: 549486 - RNA, 22 nt, Human
caaaacagcacugauuaaacag

SEQ ID NO: 549487 - RNA, 24 nt, Human
caaagcuauaaacagcuuucuaaa

SEQ ID NO: 549488 - RNA, 23 nt, Human
ccaaagcuauaaacagcuuucua

SEQ ID NO: 549489 - RNA, 19 nt, Human
cccccccacuccuguucgc

SEQ ID NO: 549490 - RNA, 22 nt, Human
ccuggccaccgaugguggaucc

SEQ ID NO: 549491 - RNA, 24 nt, Human
ccuggccaccgaugguggauccua

SEQ ID NO: 549492 - RNA, 21 nt, Human
cuggccaccgaugguggaucc

SEQ ID NO: 549493 - RNA, 29 nt, Human
cuuauaguauguauggaucauuauugcuu

SEQ ID NO: 549494 - RNA, 19 nt, Human
cuuuuuaaaaaauaucaga

SEQ ID NO: 549495 - RNA, 24 nt, Human
cuuuuuuuaauuucccccccacuc

SEQ ID NO: 549496 - RNA, 19 nt, Human
gguaguacuuuguuuauug

SEQ ID NO: 549497 - RNA, 26 nt, Human
gguuagagagcucaagguguuuggau

SEQ ID NO: 549498 - RNA, 19 nt, Human
guguucacaaacaaaagac

SEQ ID NO: 549499 - RNA, 21 nt, Human
uaaagcuuuaaaaacaagcca

SEQ ID NO: 549500 - RNA, 19 nt, Human
uaacacuaaaaagguccaa

SEQ ID NO: 549501 - RNA, 24 nt, Human
uagcaaacaauaucaaaacagcac

SEQ ID NO: 549502 - RNA, 19 nt, Human
ucaaagguacccaguguag

SEQ ID NO: 549503 - RNA, 25 nt, Human
ucaacuauuuauccuaaauuuccua

SEQ ID NO: 549504 - RNA, 18 nt, Human
ucacuguuggaaggaccc

SEQ ID NO: 549505 - RNA, 20 nt, Human
ugacuaccugccaauuagca

SEQ ID NO: 549506 - RNA, 24 nt, Human
ugauuaaacagaauaaaauggcac

SEQ ID NO: 549507 - RNA, 21 nt, Human
ugcaugagcagguuuuauuuu

SEQ ID NO: 549508 - RNA, 22 nt, Human
ugccuucaccaacauucuucag

SEQ ID NO: 549509 - RNA, 19 nt, Human
uggauccuaaauucccuuu

SEQ ID NO: 549510 - RNA, 22 nt, Human
uguuuuguuuuguuuugaacug

SEQ ID NO: 549511 - RNA, 25 nt, Human
uucucgguccccgaucggcugcucc

SEQ ID NO: 549512 - RNA, 21 nt, Human
uugcaucgauuccccuucucg

SEQ ID NO: 549513 - RNA, 22 nt, Human
uuucccccccacuccuguucgc

SEQ ID NO: 549514 - RNA, 27 nt, Human
uuuugaaauuugagauucuuucaaagg

SEQ ID NO: 549515 - RNA, 21 nt, Human
aaagaacaccccacccuuucc

SEQ ID NO: 549516 - RNA, 20 nt, Human
aaccccaccagaggcagaac

SEQ ID NO: 549517 - RNA, 20 nt, Human
acacaaagaacaccccaccc

SEQ ID NO: 549518 - RNA, 24 nt, Human
accucgaugacgcugccgauaccg

SEQ ID NO: 549519 - RNA, 18 nt, Human
accugugaguguacacag

SEQ ID NO: 549520 - RNA, 19 nt, Human
agacuccagcccagcccag

SEQ ID NO: 549521 - RNA, 23 nt, Human
agagaagucuuuggaagccuggg

SEQ ID NO: 549522 - RNA, 18 nt, Human
agcccaguggccaggcag

SEQ ID NO: 549523 - RNA, 20 nt, Human
agccccgagcaccguguucc

SEQ ID NO: 549524 - RNA, 21 nt, Human
aggaagccuuuggggaauggc

SEQ ID NO: 549525 - RNA, 24 nt, Human
aggaggccccaccccccaggcccc

SEQ ID NO: 549526 - RNA, 19 nt, Human
aggcagaacggaggucagc

SEQ ID NO: 549527 - RNA, 25 nt, Human
agucaauaaaaacagaagagagaga

SEQ ID NO: 549528 - RNA, 18 nt, Human
aguggccaggcagcuugg

SEQ ID NO: 549529 - RNA, 22 nt, Human
aguguacacagguguccgcgua

SEQ ID NO: 549530 - RNA, 26 nt, Human
caaagaacaccccacccuuuccccuc

SEQ ID NO: 549531 - RNA, 21 nt, Human
caaccccaccagaggcagaac

SEQ ID NO: 549532 - RNA, 22 nt, Human
cacaaagaacaccccacccuuu

SEQ ID NO: 549533 - RNA, 19 nt, Human
caccccacccuuuccccuc

SEQ ID NO: 549534 - RNA, 26 nt, Human
caccccacccuuuccccucacaccag

SEQ ID NO: 549535 - RNA, 18 nt, Human
caccccccaggcccuagc

SEQ ID NO: 549536 - RNA, 21 nt, Human
cacccuaacccuggggagcau

SEQ ID NO: 549537 - RNA, 21 nt, Human
cacccuuuccccucacaccag

SEQ ID NO: 549538 - RNA, 22 nt, Human
cagaacagggggcucguuccag

SEQ ID NO: 549539 - RNA, 24 nt, Human
cagaggcagaacggaggucagcgg

SEQ ID NO: 549540 - RNA, 19 nt, Human
cagcggggcagcuggccca

SEQ ID NO: 549541 - RNA, 21 nt, Human
cagcggggcagcuggcccagg

SEQ ID NO: 549542 - RNA, 21 nt, Human
ccaggaagccuuuggggaaug

SEQ ID NO: 549543 - RNA, 18 nt, Human
cccaggaagccuuugggg

SEQ ID NO: 549544 - RNA, 21 nt, Human
ccccaccccccaggcccuagc

SEQ ID NO: 549545 - RNA, 19 nt, Human
cccccaggaggagggggcu

SEQ ID NO: 549546 - RNA, 21 nt, Human
ccccccaggcccuagcuucug

SEQ ID NO: 549547 - RNA, 21 nt, Human
ccccgcccuggaggccuuagc

SEQ ID NO: 549548 - RNA, 22 nt, Human
ccgcccuggaggccuuagcugc

SEQ ID NO: 549549 - RNA, 22 nt, Human
ccucacaccagcacccuaaccc

SEQ ID NO: 549550 - RNA, 18 nt, Human
ccugggucgaggggagag

SEQ ID NO: 549551 - RNA, 30 nt, Human
ccuuccugccgccgcuggaggaccucgauu

SEQ ID NO: 549552 - RNA, 22 nt, Human
cgcgcggacccgaccccgccgc

SEQ ID NO: 549553 - RNA, 23 nt, Human
cuagcaccugcccacuccaccug

SEQ ID NO: 549554 - RNA, 19 nt, Human
cuagccgcgcccgccgccu

SEQ ID NO: 549555 - RNA, 21 nt, Human
cucacaccagcacccuaaccc

SEQ ID NO: 549556 - RNA, 21 nt, Human
cucacaccagcacccuaaccc

SEQ ID NO: 549557 - RNA, 21 nt, Human
cuccagcccagcccaguggcc

SEQ ID NO: 549558 - RNA, 25 nt, Human
cuucugccugcccuggcugggccag

SEQ ID NO: 549559 - RNA, 24 nt, Human
gaaaauaaauaaggaggcucaggc

SEQ ID NO: 549560 - RNA, 25 nt, Human
gaaaauaaauaaggaggcucaggca

SEQ ID NO: 549561 - RNA, 19 nt, Human
gagugccacuguaaagaaa

SEQ ID NO: 549562 - RNA, 22 nt, Human
gcccaguggccaggcagcuugg

SEQ ID NO: 549563 - RNA, 22 nt, Human
gcccuggcugggccagccugag

SEQ ID NO: 549564 - RNA, 20 nt, Human
ggaauggcucaggccucagg

SEQ ID NO: 549565 - RNA, 19 nt, Human
ggagaggcacugucaggac

SEQ ID NO: 549566 - RNA, 23 nt, Human
ggccccaggagggagaggcacug

SEQ ID NO: 549567 - RNA, 21 nt, Human
gggccucaggaagccaggccu

SEQ ID NO: 549568 - RNA, 24 nt, Human
uaacaagucaauaaaaacagaaga

SEQ ID NO: 549569 - RNA, 18 nt, Human
uaaggaaauagcuuagag

SEQ ID NO: 549570 - RNA, 18 nt, Human
ucaggcagaaucuguguu

SEQ ID NO: 549571 - RNA, 18 nt, Human
ucaggcagggacugugca

SEQ ID NO: 549572 - RNA, 18 nt, Human
ucugccugcccuggcugg

SEQ ID NO: 549573 - RNA, 21 nt, Human
ucuuuggaagccugggucgag

SEQ ID NO: 549574 - RNA, 19 nt, Human
ugaaggaggccccaccccc

SEQ ID NO: 549575 - RNA, 21 nt, Human
ugcccacuccaccugugagug

SEQ ID NO: 549576 - RNA, 23 nt, Human
ugccugcacgcagcuuacauaca

SEQ ID NO: 549577 - RNA, 23 nt, Human
ugcucuguugcccaugggccuca

SEQ ID NO: 549578 - RNA, 19 nt, Human
uguugcccaugggccucag

SEQ ID NO: 549579 - RNA, 19 nt, Human
uuauauggagaccccgccc

SEQ ID NO: 549580 - RNA, 19 nt, Human
uuccugccgccgcuggagg

SEQ ID NO: 549581 - RNA, 23 nt, Human
uuccugccgccgcuggaggaccu

SEQ ID NO: 549582 - RNA, 21 nt, Human
uuccuuggaggccccaggagg

SEQ ID NO: 549583 - RNA, 20 nt, Human
uuuuacacaaagaacacccc

SEQ ID NO: 549584 - RNA, 24 nt, Human
aaauacuaaaaaauuaaauuggua

SEQ ID NO: 549585 - RNA, 23 nt, Human
aaaucaauauauuucagagcuag

SEQ ID NO: 549586 - RNA, 23 nt, Human
aagacaccucucccucccaucca

SEQ ID NO: 549587 - RNA, 18 nt, Human
aagggaaauacaggguuu

SEQ ID NO: 549588 - RNA, 21 nt, Human
acagcaagaaaauuaaccuaa

SEQ ID NO: 549589 - RNA, 20 nt, Human
acccugagaauacugugaua

SEQ ID NO: 549590 - RNA, 20 nt, Human
acugugcccuuuauacuaaa

SEQ ID NO: 549591 - RNA, 18 nt, Human
agaaaagaaagcaaucau

SEQ ID NO: 549592 - RNA, 21 nt, Human
agaaaagaaagcaaucauuug

SEQ ID NO: 549593 - RNA, 19 nt, Human
agaaaagccuacagcuuaa

SEQ ID NO: 549594 - RNA, 23 nt, Human
agaaucugggcuauuaucaggug

SEQ ID NO: 549595 - RNA, 21 nt, Human
agacacugaaauaccuggcua

SEQ ID NO: 549596 - RNA, 23 nt, Human
agcacagauaucaccagaaaaga

SEQ ID NO: 549597 - RNA, 24 nt, Human
auaaaaaucaauauauuucagagc

SEQ ID NO: 549598 - RNA, 23 nt, Human
caagaaaaaggccuauaguuggu

SEQ ID NO: 549599 - RNA, 20 nt, Human
caccagaaaagaaagcaauc

SEQ ID NO: 549600 - RNA, 18 nt, Human
caccucucccucccaucc

SEQ ID NO: 549601 - RNA, 19 nt, Human
caccucucccucccaucca

SEQ ID NO: 549602 - RNA, 20 nt, Human
caguaaauucacuggcagau

SEQ ID NO: 549603 - RNA, 20 nt, Human
ccaguuacaagccuuacagc

SEQ ID NO: 549604 - RNA, 20 nt, Human
ccauacaauuuggaauauca

SEQ ID NO: 549605 - RNA, 24 nt, Human
ccuggcuaaaagccgccuuuccug

SEQ ID NO: 549606 - RNA, 25 nt, Human
ccuggcuaaaagccgccuuuccugu

SEQ ID NO: 549607 - RNA, 23 nt, Human
cuuucaguaauuaugagaagcac

SEQ ID NO: 549608 - RNA, 21 nt, Human
cuuuuccaaaguuacuuccaa

SEQ ID NO: 549609 - RNA, 24 nt, Human
gaagaugggggacagugaucccga

SEQ ID NO: 549610 - RNA, 22 nt, Human
gaagcacagauaucaccagaaa

SEQ ID NO: 549611 - RNA, 23 nt, Human
gagacagcagaucucucuaagca

SEQ ID NO: 549612 - RNA, 18 nt, Human
gcaaucauuuggaguaca

SEQ ID NO: 549613 - RNA, 23 nt, Human
gcuuaagacaccucucccuccca

SEQ ID NO: 549614 - RNA, 26 nt, Human
gcuuaagacaccucucccucccaucc

SEQ ID NO: 549615 - RNA, 23 nt, Human
guaagacaguucuuucuucuucc

SEQ ID NO: 549616 - RNA, 19 nt, Human
uaagaaagcagaauguuuu

SEQ ID NO: 549617 - RNA, 19 nt, Human
uaagacuagaaaaucaucc

SEQ ID NO: 549618 - RNA, 22 nt, Human
uacaaacugugcccuuuauacu

SEQ ID NO: 549619 - RNA, 19 nt, Human
uacaaagaaaagccuacag

SEQ ID NO: 549620 - RNA, 18 nt, Human
uaccuagcgccucgugcc

SEQ ID NO: 549621 - RNA, 18 nt, Human
ucacaggucccggcgcuc

SEQ ID NO: 549622 - RNA, 20 nt, Human
ucacauuuugacaaagggca

SEQ ID NO: 549623 - RNA, 21 nt, Human
ucagguggaauauuuccccag

SEQ ID NO: 549624 - RNA, 22 nt, Human
uccccaguuacaagccuuacag

SEQ ID NO: 549625 - RNA, 23 nt, Human
uccugugcgcugcuaccagcccu

SEQ ID NO: 549626 - RNA, 18 nt, Human
ucucuaagcaccgaagag

SEQ ID NO: 549627 - RNA, 20 nt, Human
ugaaauaccuggcuaaaagc

SEQ ID NO: 549628 - RNA, 26 nt, Human
uguguuuuuuuguuuuguuuuugauu

SEQ ID NO: 549629 - RNA, 24 nt, Human
uuacuuccaaguaaauuacauuuc

SEQ ID NO: 549630 - RNA, 24 nt, Human
uuccccaguuacaagccuuacagc

SEQ ID NO: 549631 - RNA, 22 nt, Human
uuugauuuuaagaaggaauucu

SEQ ID NO: 549632 - RNA, 20 nt, Human
aaaaaaagacuauuagauaa

SEQ ID NO: 549633 - RNA, 23 nt, Human
aaaaacaggagcuaaagaaagga

SEQ ID NO: 549634 - RNA, 18 nt, Human
aaaaccagccaccggccu

SEQ ID NO: 549635 - RNA, 26 nt, Human
aaacaggagcuaaagaaaggggaccc

SEQ ID NO: 549636 - RNA, 25 nt, Human
aaagguacacaagcauagagccacg

SEQ ID NO: 549637 - RNA, 26 nt, Human
aacugccauuuccacauuauccccau

SEQ ID NO: 549638 - RNA, 21 nt, Human
aagauggggcagggggcuguc

SEQ ID NO: 549639 - RNA, 19 nt, Human
aagcaccccccaccccacg

SEQ ID NO: 549640 - RNA, 21 nt, Human
aagcaccccccaccccacgcc

SEQ ID NO: 549641 - RNA, 22 nt, Human
aagcaccccccaccccacgccc

SEQ ID NO: 549642 - RNA, 24 nt, Human
aagcaccuuucugggcaagcaucc

SEQ ID NO: 549643 - RNA, 24 nt, Human
aagcauccugccucccaucccauu

SEQ ID NO: 549644 - RNA, 19 nt, Human
aagcuggaguaagaucccu

SEQ ID NO: 549645 - RNA, 27 nt, Human
aauucugcaaacucaaauaugaaacug

SEQ ID NO: 549646 - RNA, 24 nt, Human
acacaggauugggggaaugucccc

SEQ ID NO: 549647 - RNA, 22 nt, Human
acauuauccccaucuuuagccu

SEQ ID NO: 549648 - RNA, 25 nt, Human
accacuaaaaugacacgugccaaca

SEQ ID NO: 549649 - RNA, 22 nt, Human
acccagcacuuagcacugugcc

SEQ ID NO: 549650 - RNA, 20 nt, Human
acucagagccugcauguccc

SEQ ID NO: 549651 - RNA, 18 nt, Human
agacagcccuuucaucag

SEQ ID NO: 549652 - RNA, 24 nt, Human
agagaggggcuggcagguggucag

SEQ ID NO: 549653 - RNA, 19 nt, Human
agagggagguaauauuagu

SEQ ID NO: 549654 - RNA, 21 nt, Human
agauucgaaaagcuggaagcc

SEQ ID NO: 549655 - RNA, 18 nt, Human
aggcaacuggaggcuagg

SEQ ID NO: 549656 - RNA, 21 nt, Human
agggucugaggguuggggcug

SEQ ID NO: 549657 - RNA, 20 nt, Human
agguggaucagggccagccc

SEQ ID NO: 549658 - RNA, 23 nt, Human
agguggucagcugcccuuagagc

SEQ ID NO: 549659 - RNA, 20 nt, Human
auaugaggcuccuguccaca

SEQ ID NO: 549660 - RNA, 22 nt, Human
aucaacagucaacacaaguuca

SEQ ID NO: 549661 - RNA, 21 nt, Human
aucucuuccuuuuaaaauuuu

SEQ ID NO: 549662 - RNA, 20 nt, Human
auggccugugccagaagaug

SEQ ID NO: 549663 - RNA, 20 nt, Human
caaaaacaggagcuaaagaa

SEQ ID NO: 549664 - RNA, 22 nt, Human
caaaaaggcugaaagucaauca

SEQ ID NO: 549665 - RNA, 24 nt, Human
caaacucuuggaucccgucccaca

SEQ ID NO: 549666 - RNA, 24 nt, Human
caaagguacacaagcauagagcca

SEQ ID NO: 549667 - RNA, 22 nt, Human
caaguucaaaaccagccaccgg

SEQ ID NO: 549668 - RNA, 23 nt, Human
cacacgagucaaagaaaaauaaa

SEQ ID NO: 549669 - RNA, 23 nt, Human
cacaggugcucuggguggguccc

SEQ ID NO: 549670 - RNA, 24 nt, Human
caccccccaccccacgcccucggg

SEQ ID NO: 549671 - RNA, 28 nt, Human
caccccccaccccacgcccucgggacaa

SEQ ID NO: 549672 - RNA, 25 nt, Human
cacuuagcacugugcccgacacaga

SEQ ID NO: 549673 - RNA, 21 nt, Human
cagcacaggugcucugggugg

SEQ ID NO: 549674 - RNA, 24 nt, Human
cagcagcccagagaccauuuaaga

SEQ ID NO: 549675 - RNA, 24 nt, Human
cagcccuuucaucaggaagcugga

SEQ ID NO: 549676 - RNA, 27 nt, Human
caggaacagcaugagugggugcagucc

SEQ ID NO: 549677 - RNA, 21 nt, Human
caggcaacauccuggagaccc

SEQ ID NO: 549678 - RNA, 21 nt, Human
cagguagguggaucagggcca

SEQ ID NO: 549679 - RNA, 22 nt, Human
cagucaacacaaguucaaaacc

SEQ ID NO: 549680 - RNA, 22 nt, Human
caucccauugcaccuccccacc

SEQ ID NO: 549681 - RNA, 22 nt, Human
ccaggaccucagugcuuuggag

SEQ ID NO: 549682 - RNA, 20 nt, Human
cccaaaaggugucuuaugga

SEQ ID NO: 549683 - RNA, 18 nt, Human
cccacucagagccugcau

SEQ ID NO: 549684 - RNA, 18 nt, Human
cccaugguggaaaaaggg

SEQ ID NO: 549685 - RNA, 19 nt, Human
ccccaccccacgcccucgg

SEQ ID NO: 549686 - RNA, 21 nt, Human
ccccaccccacgcccucggga

SEQ ID NO: 549687 - RNA, 24 nt, Human
ccccccaccccacgcccucgggac

SEQ ID NO: 549688 - RNA, 21 nt, Human
ccccugucuuagccuagggac

SEQ ID NO: 549689 - RNA, 21 nt, Human
cccuuagccccccaccccugu

SEQ ID NO: 549690 - RNA, 18 nt, Human
ccgacacagaaaugaaca

SEQ ID NO: 549691 - RNA, 21 nt, Human
ccgccgccaccgccgcgucug

SEQ ID NO: 549692 - RNA, 27 nt, Human
ccgccgccaccgccgcgucuggcucag

SEQ ID NO: 549693 - RNA, 21 nt, Human
ccgcggagccgccgccaccgc

SEQ ID NO: 549694 - RNA, 21 nt, Human
ccgggccggcgugggugcgcc

SEQ ID NO: 549695 - RNA, 21 nt, Human
ccuaagacccagccgcaggcc

SEQ ID NO: 549696 - RNA, 22 nt, Human
ccuaauaccccuaauccccaaa

SEQ ID NO: 549697 - RNA, 21 nt, Human
ccuaauccccaaacucuugga

SEQ ID NO: 549698 - RNA, 25 nt, Human
ccuccaccacggugcccaucaggag

SEQ ID NO: 549699 - RNA, 23 nt, Human
ccuccagcacaggugcucugggu

SEQ ID NO: 549700 - RNA, 26 nt, Human
ccucccaucccauugcaccuccccac

SEQ ID NO: 549701 - RNA, 20 nt, Human
ccuccccacccuucccccgg

SEQ ID NO: 549702 - RNA, 22 nt, Human
ccuccgggccggcgugggugcg

SEQ ID NO: 549703 - RNA, 21 nt, Human
ccuggggugucccuagggcug

SEQ ID NO: 549704 - RNA, 23 nt, Human
cgaaaagcuggaagccaugacca

SEQ ID NO: 549705 - RNA, 25 nt, Human
cgagaccagccaccggcuuaccccu

SEQ ID NO: 549706 - RNA, 23 nt, Human
cguccaaggccucagaggagccc

SEQ ID NO: 549707 - RNA, 20 nt, Human
cucucaggaucuagccaaaa

SEQ ID NO: 549708 - RNA, 22 nt, Human
cugaaaagcccuaauaccccua

SEQ ID NO: 549709 - RNA, 20 nt, Human
cugcuccuccgggccggcgu

SEQ ID NO: 549710 - RNA, 24 nt, Human
cuuucaggauguugguauauucgu

SEQ ID NO: 549711 - RNA, 19 nt, Human
gaaaagcuggaagccauga

SEQ ID NO: 549712 - RNA, 22 nt, Human
gaaaugaacacucugcuccucc

SEQ ID NO: 549713 - RNA, 23 nt, Human
gaaccagagaggggcuggcaggu

SEQ ID NO: 549714 - RNA, 20 nt, Human
gaagauggggcagggggcug

SEQ ID NO: 549715 - RNA, 24 nt, Human
gaagcaccccccaccccacgcccu

SEQ ID NO: 549716 - RNA, 24 nt, Human
gacaguaggaguuuggaagaggga

SEQ ID NO: 549717 - RNA, 23 nt, Human
gagggagcacgauggcacaggug

SEQ ID NO: 549718 - RNA, 18 nt, Human
gcaaagguacacaagcau

SEQ ID NO: 549719 - RNA, 20 nt, Human
gcaccccccaccccacgccu

SEQ ID NO: 549720 - RNA, 22 nt, Human
gcaugucccagcagcccagaga

SEQ ID NO: 549721 - RNA, 19 nt, Human
gccagcccuggucccuuag

SEQ ID NO: 549722 - RNA, 24 nt, Human
gccugagcguggauuaagacagag

SEQ ID NO: 549723 - RNA, 18 nt, Human
gccuggggugucccuagg

SEQ ID NO: 549724 - RNA, 21 nt, Human
gcuggucaggaacucuagaca

SEQ ID NO: 549725 - RNA, 22 nt, Human
ggacugagaaacagcuggguga

SEQ ID NO: 549726 - RNA, 24 nt, Human
ggauuuaaaccacuaaaaugacac

SEQ ID NO: 549727 - RNA, 25 nt, Human
ggcaacagggacaugcacucgggaa

SEQ ID NO: 549728 - RNA, 22 nt, Human
ggcagaagguggcuggucagga

SEQ ID NO: 549729 - RNA, 20 nt, Human
ggcagggggcugucuucuug

SEQ ID NO: 549730 - RNA, 18 nt, Human
ggcugggggguggggagg

SEQ ID NO: 549731 - RNA, 18 nt, Human
gggacuggagagggcggc

SEQ ID NO: 549732 - RNA, 24 nt, Human
gggcaacagggacaugcacucggg

SEQ ID NO: 549733 - RNA, 22 nt, Human
gggcaagcauccugccucccau

SEQ ID NO: 549734 - RNA, 19 nt, Human
gggggguggggaggacaaa

SEQ ID NO: 549735 - RNA, 24 nt, Human
gggucccgguggcccaguggcugu

SEQ ID NO: 549736 - RNA, 24 nt, Human
gguggggaggacaaagacaaggcc

SEQ ID NO: 549737 - RNA, 18 nt, Human
ggugggucccaggcccag

SEQ ID NO: 549738 - RNA, 22 nt, Human
uaaaauuuucuuagaguuaaaa

SEQ ID NO: 549739 - RNA, 23 nt, Human
uaaagacagcccuuucaucagga

SEQ ID NO: 549740 - RNA, 29 nt, Human
uaaagcccuucaaacagagaaaccuuccc

SEQ ID NO: 549741 - RNA, 23 nt, Human
uaaauaaguaucaacagucaaca

SEQ ID NO: 549742 - RNA, 26 nt, Human
uaagacagaggagaucacagacacac

SEQ ID NO: 549743 - RNA, 22 nt, Human
uacaaaagaaucacugacccca

SEQ ID NO: 549744 - RNA, 21 nt, Human
uacccaaauggcagcgggagc

SEQ ID NO: 549745 - RNA, 22 nt, Human
uagccaaaaaaagacuauuaga

SEQ ID NO: 549746 - RNA, 24 nt, Human
uauuagauaauucugcaaacucaa

SEQ ID NO: 549747 - RNA, 21 nt, Human
ucaacacaaguucaaaaccag

SEQ ID NO: 549748 - RNA, 23 nt, Human
ucacugaccccaaguagucgagu

SEQ ID NO: 549749 - RNA, 21 nt, Human
ucccacagacgagagucccug

SEQ ID NO: 549750 - RNA, 21 nt, Human
ucccccggcagacgagaccag

SEQ ID NO: 549751 - RNA, 21 nt, Human
ucccuagggcugggggguggg

SEQ ID NO: 549752 - RNA, 19 nt, Human
ucccuuagccccccacccc

SEQ ID NO: 549753 - RNA, 23 nt, Human
uccgggccggcgugggugcgccg

SEQ ID NO: 549754 - RNA, 18 nt, Human
uccuccuuuggagccuca

SEQ ID NO: 549755 - RNA, 27 nt, Human
uccugggccaggcaacauccuggagac

SEQ ID NO: 549756 - RNA, 19 nt, Human
ucuugggucccgguggccc

SEQ ID NO: 549757 - RNA, 22 nt, Human
ugacuccacguccucguccaag

SEQ ID NO: 549758 - RNA, 23 nt, Human
ugaggacaguaggaguuuggaag

SEQ ID NO: 549759 - RNA, 20 nt, Human
ugaggcuccuguccacaagu

SEQ ID NO: 549760 - RNA, 24 nt, Human
ugcaaagguacacaagcauagagg

SEQ ID NO: 549761 - RNA, 22 nt, Human
ugccagaagauggggcaggggg

SEQ ID NO: 549762 - RNA, 19 nt, Human
ugcccgacacagaaaugaa

SEQ ID NO: 549763 - RNA, 23 nt, Human
ugccucccaucccauugcaccuc

SEQ ID NO: 549764 - RNA, 18 nt, Human
ugccuggggugucccuag

SEQ ID NO: 549765 - RNA, 23 nt, Human
ugccuggggugucccuagggcug

SEQ ID NO: 549766 - RNA, 18 nt, Human
ugcucuggguggguccca

SEQ ID NO: 549767 - RNA, 21 nt, Human
uggaaaaagggccagaaacau

SEQ ID NO: 549768 - RNA, 18 nt, Human
uggaaccagagaggggcu

SEQ ID NO: 549769 - RNA, 19 nt, Human
uggaaccagagaggggcug

SEQ ID NO: 549770 - RNA, 20 nt, Human
uggaaggcgagggucugagg

SEQ ID NO: 549771 - RNA, 18 nt, Human
uggaggagguggugagag

SEQ ID NO: 549772 - RNA, 21 nt, Human
uggaggagguggugagagcag

SEQ ID NO: 549773 - RNA, 22 nt, Human
uggcagaagguggcuggucagg

SEQ ID NO: 549774 - RNA, 24 nt, Human
uggcuggucaggaacucuagacac

SEQ ID NO: 549775 - RNA, 20 nt, Human
uggggaggacaaagacaagg

SEQ ID NO: 549776 - RNA, 23 nt, Human
ugggggguggggaggacaaagac

SEQ ID NO: 549777 - RNA, 24 nt, Human
ugguacaaaugauaaauuauauuu

SEQ ID NO: 549778 - RNA, 19 nt, Human
uggugagagcaggccaggc

SEQ ID NO: 549779 - RNA, 23 nt, Human
uguaaagacagcccuuucaucag

SEQ ID NO: 549780 - RNA, 24 nt, Human
ugugccagaagauggggcaggggg

SEQ ID NO: 549781 - RNA, 22 nt, Human
uguuuguuaaaaaucccuccca

SEQ ID NO: 549782 - RNA, 19 nt, Human
uuaaaaauaauaucuggag

SEQ ID NO: 549783 - RNA, 23 nt, Human
uuaaaauuuucuuagaguuaaaa

SEQ ID NO: 549784 - RNA, 20 nt, Human
uuaagacagaggagaucaca

SEQ ID NO: 549785 - RNA, 25 nt, Human
uuagugcauguuuguuaaaaauccc

SEQ ID NO: 549786 - RNA, 22 nt, Human
uuauaaaaauauuagccaaaaa

SEQ ID NO: 549787 - RNA, 23 nt, Human
uucaccaaaaacaggagcuaaag

SEQ ID NO: 549788 - RNA, 19 nt, Human
uuccuccuuuggagccuca

SEQ ID NO: 549789 - RNA, 20 nt, Human
uuggaaggcgagggucugag

SEQ ID NO: 549790 - RNA, 20 nt, Human
uuggaaggcgagggucugag

SEQ ID NO: 549791 - RNA, 24 nt, Human
uuggugagucacauucauacauua

SEQ ID NO: 549792 - RNA, 21 nt, Human
uuguugcuguuguuuuuuuuu

SEQ ID NO: 549793 - RNA, 26 nt, Human
uuuaaaccacuaaaaugacacgugcc

SEQ ID NO: 549794 - RNA, 24 nt, Human
uuuaaagcccuucaaacagagaaa

SEQ ID NO: 549795 - RNA, 21 nt, Human
uuucaucaggaagcuggagcu

SEQ ID NO: 549796 - RNA, 25 nt, Human
uuucugggcaagcauccugccuccc

SEQ ID NO: 549797 - RNA, 19 nt, Human
uuuggaggagguggugaga

SEQ ID NO: 549798 - RNA, 21 nt, Human
aaaaaguccacuuggugagag

SEQ ID NO: 549799 - RNA, 24 nt, Human
aaaugaccgaauugagugacagcc

SEQ ID NO: 549800 - RNA, 22 nt, Human
aaguccacuuggugagagcuga

SEQ ID NO: 549801 - RNA, 20 nt, Human
acagucucgaaggaugggcu

SEQ ID NO: 549802 - RNA, 20 nt, Human
agcaccggcgccccgcccag

SEQ ID NO: 549803 - RNA, 18 nt, Human
agcagagcagcugcaucc

SEQ ID NO: 549804 - RNA, 21 nt, Human
agccuggcagcaucuggaagc

SEQ ID NO: 549805 - RNA, 20 nt, Human
agcugcaguuuccuaaacag

SEQ ID NO: 549806 - RNA, 23 nt, Human
agcuuccagagccgccgcgggau

SEQ ID NO: 549807 - RNA, 19 nt, Human
agguggagggcugagggcc

SEQ ID NO: 549808 - RNA, 22 nt, Human
caccauggacccucgucccaga

SEQ ID NO: 549809 - RNA, 21 nt, Human
caccggcgccccgcccagccc

SEQ ID NO: 549810 - RNA, 22 nt, Human
caccggcgccccgcccagcccc

SEQ ID NO: 549811 - RNA, 18 nt, Human
cacuguggcgaggucaca

SEQ ID NO: 549812 - RNA, 20 nt, Human
cacuguggcgaggucacagu

SEQ ID NO: 549813 - RNA, 18 nt, Human
cagccggugauccacgcu

SEQ ID NO: 549814 - RNA, 21 nt, Human
ccaccauggacccucguccca

SEQ ID NO: 549815 - RNA, 22 nt, Human
ccagagacccaccugcucccag

SEQ ID NO: 549816 - RNA, 19 nt, Human
ccagagccgccgcgggaua

SEQ ID NO: 549817 - RNA, 25 nt, Human
cccaaccccagugcccaugugugau

SEQ ID NO: 549818 - RNA, 24 nt, Human
cccagagacccaccugcucccagg

SEQ ID NO: 549819 - RNA, 22 nt, Human
ccccacagauuauguagccggg

SEQ ID NO: 549820 - RNA, 22 nt, Human
ccccgcccagccccggguccgg

SEQ ID NO: 549821 - RNA, 25 nt, Human
ccccggguccggaggcggggccgac

SEQ ID NO: 549822 - RNA, 20 nt, Human
cccucggccccagccccagc

SEQ ID NO: 549823 - RNA, 22 nt, Human
cccucggccccagccccagccc

SEQ ID NO: 549824 - RNA, 18 nt, Human
ccucagaggggcagcggc

SEQ ID NO: 549825 - RNA, 28 nt, Human
ccucggccccagccccagcccgaguagc

SEQ ID NO: 549826 - RNA, 23 nt, Human
ccucgucccagagacccaccugc

SEQ ID NO: 549827 - RNA, 23 nt, Human
ccucugcggugacccuccgaccu

SEQ ID NO: 549828 - RNA, 25 nt, Human
cgaguagccucugcggugacccucc

SEQ ID NO: 549829 - RNA, 20 nt, Human
cgcaaaaaguccacuuggug

SEQ ID NO: 549830 - RNA, 24 nt, Human
cucccucggccccagccccagccc

SEQ ID NO: 549831 - RNA, 23 nt, Human
cugagggccacuguggcgagguc

SEQ ID NO: 549832 - RNA, 22 nt, Human
cugcaguuuccuaaacagccgg

SEQ ID NO: 549833 - RNA, 24 nt, Human
cuggaauggguagcagcucuuccc

SEQ ID NO: 549834 - RNA, 20 nt, Human
gagcgucuccagagccaucc

SEQ ID NO: 549835 - RNA, 20 nt, Human
gcagcggcagggucccugga

SEQ ID NO: 549836 - RNA, 21 nt, Human
gccccagccccagcccgagua

SEQ ID NO: 549837 - RNA, 25 nt, Human
gccccagccccagcccgaguagccu

SEQ ID NO: 549838 - RNA, 20 nt, Human
gccccggguccggaggcggg

SEQ ID NO: 549839 - RNA, 21 nt, Human
gccgguaugggacggggcggg

SEQ ID NO: 549840 - RNA, 20 nt, Human
gcguucaguuucuagcuccc

SEQ ID NO: 549841 - RNA, 20 nt, Human
ggcagcggcagggucccugg

SEQ ID NO: 549842 - RNA, 19 nt, Human
ggccgugguccgcguccag

SEQ ID NO: 549843 - RNA, 21 nt, Human
ggcguucaguuucuagcuccc

SEQ ID NO: 549844 - RNA, 25 nt, Human
gggcucccucggccccagccccagc

SEQ ID NO: 549845 - RNA, 25 nt, Human
ggggauggaggugaggguugagaag

SEQ ID NO: 549846 - RNA, 21 nt, Human
gggggauggaggugaggguug

SEQ ID NO: 549847 - RNA, 25 nt, Human
gggucccuggaauggguagcagcuc

SEQ ID NO: 549848 - RNA, 19 nt, Human
ggugaggguugagaagagc

SEQ ID NO: 549849 - RNA, 19 nt, Human
guggucgagacccggccgc

SEQ ID NO: 549850 - RNA, 18 nt, Human
gugugauaaaugaaugaa

SEQ ID NO: 549851 - RNA, 21 nt, Human
uaaaugaaugaaaugaccgaa

SEQ ID NO: 549852 - RNA, 19 nt, Human
uagccucugcggugacccu

SEQ ID NO: 549853 - RNA, 20 nt, Human
uagcucccgggccguggucc

SEQ ID NO: 549854 - RNA, 22 nt, Human
ucccgcgugcguuugccuccuu

SEQ ID NO: 549855 - RNA, 21 nt, Human
uccgcguccagcuuccagagc

SEQ ID NO: 549856 - RNA, 20 nt, Human
uccuaaacagccggugaucc

SEQ ID NO: 549857 - RNA, 22 nt, Human
uccuaaacagccggugauccac

SEQ ID NO: 549858 - RNA, 19 nt, Human
ucuccagagccauccacca

SEQ ID NO: 549859 - RNA, 20 nt, Human
ugacccuccgaccugugcag

SEQ ID NO: 549860 - RNA, 23 nt, Human
ugagaagagcuguaaaggaagcg

SEQ ID NO: 549861 - RNA, 18 nt, Human
ugagagcugagaacgugg

SEQ ID NO: 549862 - RNA, 21 nt, Human
ugagugacagccuggcagcau

SEQ ID NO: 549863 - RNA, 19 nt, Human
ugcagcugcaguuuccuaa

SEQ ID NO: 549864 - RNA, 18 nt, Human
uggaauggguagcagcuc

SEQ ID NO: 549865 - RNA, 18 nt, Human
uggaauggguagcagcuc

SEQ ID NO: 549866 - RNA, 21 nt, Human
ugugauaaaugaaugaaauga

SEQ ID NO: 549867 - RNA, 22 nt, Human
uguggucgagacccggccgcca

SEQ ID NO: 549868 - RNA, 19 nt, Human
ugugugauaaaugaaugaa

SEQ ID NO: 549869 - RNA, 19 nt, Human
uuuuuuuuuuugaacaagg

SEQ ID NO: 549870 - RNA, 23 nt, Human
uuuuuuuuuuugaacaaggagcc

SEQ ID NO: 549871 - RNA, 23 nt, Human
uuuuuuuuuuuuuugaacaagga

SEQ ID NO: 549872 - RNA, 18 nt, Human
uuuuuuuuuuuuuuuuug

SEQ ID NO: 549873 - RNA, 23 nt, Human
aaaaggagacaaaaaucccaggg

SEQ ID NO: 549874 - RNA, 19 nt, Human
aaagaagcugggagguuug

SEQ ID NO: 549875 - RNA, 18 nt, Human
aaaggagacaaaaauccc

SEQ ID NO: 549876 - RNA, 22 nt, Human
aaggagacaaaaaucccaggga

SEQ ID NO: 549877 - RNA, 23 nt, Human
agggagugggguggcccggaggc

SEQ ID NO: 549878 - RNA, 24 nt, Human
agguaccaagaggcuaaagaagcu

SEQ ID NO: 549879 - RNA, 22 nt, Human
gcgagggacagagagugugagg

SEQ ID NO: 549880 - RNA, 23 nt, Human
gggaagcugcaagcggaagggag

SEQ ID NO: 549881 - RNA, 18 nt, Human
gguggcccggaggcggag

SEQ ID NO: 549882 - RNA, 21 nt, Human
ucccagggaagcugcaagcgg

SEQ ID NO: 549883 - RNA, 23 nt, Human
ugagaaacuguuuuucuuacaga

SEQ ID NO: 549884 - RNA, 23 nt, Human
uggcaguguagaauaaauaacgc

SEQ ID NO: 549885 - RNA, 22 nt, Human
uuaaaaggagacaaaaauccca

SEQ ID NO: 549886 - RNA, 22 nt, Human
aaaccccacugccuuccagaac

SEQ ID NO: 549887 - RNA, 21 nt, Human
accuugaaggaugaguuugac

SEQ ID NO: 549888 - RNA, 19 nt, Human
aggaggaggacaggcugcc

SEQ ID NO: 549889 - RNA, 20 nt, Human
aggaggagggcaggccagga

SEQ ID NO: 549890 - RNA, 22 nt, Human
aguccguucucccacggggccu

SEQ ID NO: 549891 - RNA, 20 nt, Human
aucaccuugaaggaugaguu

SEQ ID NO: 549892 - RNA, 23 nt, Human
auccuagaagauagggguguucu

SEQ ID NO: 549893 - RNA, 24 nt, Human
augggggaagaccagggccggagc

SEQ ID NO: 549894 - RNA, 22 nt, Human
caaaccccacugccuuccagaa

SEQ ID NO: 549895 - RNA, 21 nt, Human
caccgggaugggggaagacca

SEQ ID NO: 549896 - RNA, 25 nt, Human
ccaccuucauguucuaucuugaccc

SEQ ID NO: 549897 - RNA, 18 nt, Human
ccacugcacccucucggg

SEQ ID NO: 549898 - RNA, 21 nt, Human
ccacugcacccucucgggggu

SEQ ID NO: 549899 - RNA, 22 nt, Human
cccuggguccaaucucaaaccc

SEQ ID NO: 549900 - RNA, 23 nt, Human
cccuggguccaaucucaaacccc

SEQ ID NO: 549901 - RNA, 19 nt, Human
ccguucucccacggggccu

SEQ ID NO: 549902 - RNA, 18 nt, Human
cgcccuccccacucccag

SEQ ID NO: 549903 - RNA, 20 nt, Human
cugccuggaggaggagggcc

SEQ ID NO: 549904 - RNA, 19 nt, Human
gaaucaccuugaaggauga

SEQ ID NO: 549905 - RNA, 20 nt, Human
gaggacacgaggggcucugc

SEQ ID NO: 549906 - RNA, 23 nt, Human
gaggggcucugccaaggccagga

SEQ ID NO: 549907 - RNA, 20 nt, Human
ggaggacacgaggggcucug

SEQ ID NO: 549908 - RNA, 18 nt, Human
gucuccacgcccucccca

SEQ ID NO: 549909 - RNA, 20 nt, Human
uagacugucuccacgcccuc

SEQ ID NO: 549910 - RNA, 22 nt, Human
ucaaaccccacugccuuccaga

SEQ ID NO: 549911 - RNA, 20 nt, Human
ucaccuugaaggaugaguuu

SEQ ID NO: 549912 - RNA, 22 nt, Human
uccaaucucaaaccccacugcc

SEQ ID NO: 549913 - RNA, 23 nt, Human
uccaccgggaugggggaagacca

SEQ ID NO: 549914 - RNA, 19 nt, Human
ucccagguccccugcccuu

SEQ ID NO: 549915 - RNA, 23 nt, Human
ucucccacggggccucgucacuc

SEQ ID NO: 549916 - RNA, 18 nt, Human
ugacccuggguccaaucu

SEQ ID NO: 549917 - RNA, 23 nt, Human
ugccaaggccaggagaggcugcc

SEQ ID NO: 549918 - RNA, 27 nt, Human
ugccaaggccaggagaggcugcuccgc

SEQ ID NO: 549919 - RNA, 20 nt, Human
ugccuggaggaggaggacag

SEQ ID NO: 549920 - RNA, 21 nt, Human
ugcucagggcuccacugcacc

SEQ ID NO: 549921 - RNA, 21 nt, Human
ugcugagggucaggacaggcu

SEQ ID NO: 549922 - RNA, 24 nt, Human
ugcugagggucaggacaggcugcc

SEQ ID NO: 549923 - RNA, 25 nt, Human
uggaggaggaggacaggcugccugg

SEQ ID NO: 549924 - RNA, 18 nt, Human
uuuuuuuuuuuuuuuuug

SEQ ID NO: 549925 - RNA, 20 nt, Human
uuuuuuuuuuuuuuuuugcu

SEQ ID NO: 549926 - RNA, 23 nt, Human
uuuuuuuuuuuuuuuuuugcuaa

SEQ ID NO: 549927 - RNA, 18 nt, Human
agaaggagagggacugaa

SEQ ID NO: 549928 - RNA, 19 nt, Human
aggcuccaacacagccaga

SEQ ID NO: 549929 - RNA, 19 nt, Human
caacacagccagaagggac

SEQ ID NO: 549930 - RNA, 21 nt, Human
caacacagccagaagggacac

SEQ ID NO: 549931 - RNA, 18 nt, Human
cagaucugccaucuugca

SEQ ID NO: 549932 - RNA, 18 nt, Human
ccucugggccuguccauu

SEQ ID NO: 549933 - RNA, 21 nt, Human
ccugguccccccaggaggcug

SEQ ID NO: 549934 - RNA, 21 nt, Human
gagagggacugaacagauucu

SEQ ID NO: 549935 - RNA, 23 nt, Human
ggaauucucggggcucuaauggg

SEQ ID NO: 549936 - RNA, 23 nt, Human
ggagagggacugaacagauucuu

SEQ ID NO: 549937 - RNA, 22 nt, Human
gggacugaacagauucuugguc

SEQ ID NO: 549938 - RNA, 18 nt, Human
gggaggcuccaacacagc

SEQ ID NO: 549939 - RNA, 25 nt, Human
gggaggcuccaacacagccagaagg

SEQ ID NO: 549940 - RNA, 26 nt, Human
ggggaggcuccaacacagccagaagg

SEQ ID NO: 549941 - RNA, 20 nt, Human
ggugccugguccccccagga

SEQ ID NO: 549942 - RNA, 24 nt, Human
ggugguccggugcuggugguggaa

SEQ ID NO: 549943 - RNA, 23 nt, Human
uaaaauaaauaggugguuacugg

SEQ ID NO: 549944 - RNA, 19 nt, Human
uaauggguaucagaucugc

SEQ ID NO: 549945 - RNA, 21 nt, Human
uaggugguuacuggggaggcu

SEQ ID NO: 549946 - RNA, 25 nt, Human
uaggugguuacuggggaggcucccc

SEQ ID NO: 549947 - RNA, 18 nt, Human
uaguggccacaggcagag

SEQ ID NO: 549948 - RNA, 23 nt, Human
ucccugggugccagugaaggccg

SEQ ID NO: 549949 - RNA, 19 nt, Human
ucucugcuaguggccacag

SEQ ID NO: 549950 - RNA, 18 nt, Human
ugagaaggagagggacug

SEQ ID NO: 549951 - RNA, 18 nt, Human
ugcaucagcggggccugg

SEQ ID NO: 549952 - RNA, 19 nt, Human
ugcuaguggccacaggcag

SEQ ID NO: 549953 - RNA, 21 nt, Human
ugcugaggacggcucccuggg

SEQ ID NO: 549954 - RNA, 19 nt, Human
ugcuucagccucugggccu

SEQ ID NO: 549955 - RNA, 19 nt, Human
ugugggguuugcugcaaac

SEQ ID NO: 549956 - RNA, 22 nt, Human
uguuugcuucagccucugggcc

SEQ ID NO: 549957 - RNA, 19 nt, Human
uuuugcugugugagcuggg

SEQ ID NO: 549958 - RNA, 23 nt, Human
uuuuuuuuuacaagcuugaagau

SEQ ID NO: 549959 - RNA, 23 nt, Human
uuuuuuuuuuuuuuuuuuacaag

SEQ ID NO: 549960 - RNA, 23 nt, Human
aaagagacacauagaaaccuggg

SEQ ID NO: 549961 - RNA, 24 nt, Human
aaauaagagauaagaaaaauggaa

SEQ ID NO: 549962 - RNA, 23 nt, Human
aaccggggaagccagaagaccag

SEQ ID NO: 549963 - RNA, 19 nt, Human
aaccugggcagagggagcu

SEQ ID NO: 549964 - RNA, 22 nt, Human
aagaaaaauggaaucuaauggc

SEQ ID NO: 549965 - RNA, 21 nt, Human
aagaaagaggcccagaaacaa

SEQ ID NO: 549966 - RNA, 22 nt, Human
aaggauagcggaagcccaaggc

SEQ ID NO: 549967 - RNA, 23 nt, Human
aaggcugcggcaggugcuggcag

SEQ ID NO: 549968 - RNA, 20 nt, Human
aaguaacucucuggaguccc

SEQ ID NO: 549969 - RNA, 20 nt, Human
acagaaagagacacauagaa

SEQ ID NO: 549970 - RNA, 19 nt, Human
accugcagcgcacaccucc

SEQ ID NO: 549971 - RNA, 21 nt, Human
accugcagcgcacaccuccuu

SEQ ID NO: 549972 - RNA, 27 nt, Human
agaaaaauggaaucuaauggcaaagaa

SEQ ID NO: 549973 - RNA, 20 nt, Human
agaaaccugggcagagggaa

SEQ ID NO: 549974 - RNA, 18 nt, Human
agaaagagacacauagaa

SEQ ID NO: 549975 - RNA, 18 nt, Human
agaaagccaggcaccuga

SEQ ID NO: 549976 - RNA, 22 nt, Human
agacacaaugagaaaaacacag

SEQ ID NO: 549977 - RNA, 24 nt, Human
agacacaaugagaaaaacacaggc

SEQ ID NO: 549978 - RNA, 23 nt, Human
agacagggaggcaggaggccaag

SEQ ID NO: 549979 - RNA, 24 nt, Human
agacagggaggcaggaggccaagg

SEQ ID NO: 549980 - RNA, 21 nt, Human
agagaccuggcgcugagaaau

SEQ ID NO: 549981 - RNA, 23 nt, Human
agcagccugguuccagagccagc

SEQ ID NO: 549982 - RNA, 26 nt, Human
aggaagaaagaggcccagaaacaaaa

SEQ ID NO: 549983 - RNA, 24 nt, Human
aggaagaaccggggaagccagaag

SEQ ID NO: 549984 - RNA, 19 nt, Human
agggacauuaccuuuuuca

SEQ ID NO: 549985 - RNA, 24 nt, Human
agggagcuaggcagagacacaaug

SEQ ID NO: 549986 - RNA, 18 nt, Human
auggggcagccggaugga

SEQ ID NO: 549987 - RNA, 19 nt, Human
caaaacagccccagccuaa

SEQ ID NO: 549988 - RNA, 24 nt, Human
cacaccuccuugagacacaguuug

SEQ ID NO: 549989 - RNA, 24 nt, Human
caccucaggccagaaagccaggca

SEQ ID NO: 549990 - RNA, 21 nt, Human
caccugaagacagauguagcu

SEQ ID NO: 549991 - RNA, 22 nt, Human
cagagccagcucugaucacccc

SEQ ID NO: 549992 - RNA, 19 nt, Human
cagagggagcuaggcagag

SEQ ID NO: 549993 - RNA, 22 nt, Human
caggaagaaccggggaagccag

SEQ ID NO: 549994 - RNA, 22 nt, Human
caggagagauaaggaaccuaac

SEQ ID NO: 549995 - RNA, 23 nt, Human
caggagagauaaggaaccuaaca

SEQ ID NO: 549996 - RNA, 19 nt, Human
cauuucacaugcacucaca

SEQ ID NO: 549997 - RNA, 22 nt, Human
ccaaggaagaaagaggcccaga

SEQ ID NO: 549998 - RNA, 20 nt, Human
ccagaaagccaggcaccuga

SEQ ID NO: 549999 - RNA, 20 nt, Human
cccagaaacaaaaagagacc

SEQ ID NO: 550000 - RNA, 19 nt, Human
cccggcugcagcagcaagg

SEQ ID NO: 550001 - RNA, 21 nt, Human
cucacaacacugaucucccag

SEQ ID NO: 550002 - RNA, 22 nt, Human
cucacaacacugaucucccagg

SEQ ID NO: 550003 - RNA, 22 nt, Human
cucaggccagaaagccaggcac

SEQ ID NO: 550004 - RNA, 21 nt, Human
cuccaagaagccacagaggga

SEQ ID NO: 550005 - RNA, 24 nt, Human
cugcaugcaaagacugggcuccuu

SEQ ID NO: 550006 - RNA, 20 nt, Human
cuggagcagccugguuccag

SEQ ID NO: 550007 - RNA, 22 nt, Human
cugggucccugcugugugccag

SEQ ID NO: 550008 - RNA, 23 nt, Human
cugggucccugcugugugccagg

SEQ ID NO: 550009 - RNA, 22 nt, Human
cugugugccaggugcucgcuca

SEQ ID NO: 550010 - RNA, 25 nt, Human
cuuccaccucaggccagaaagccag

SEQ ID NO: 550011 - RNA, 22 nt, Human
gaaaaacacaggcagcagcaga

SEQ ID NO: 550012 - RNA, 21 nt, Human
gacaguucugacagaaagaga

SEQ ID NO: 550013 - RNA, 23 nt, Human
gagcagccugguuccagagccag

SEQ ID NO: 550014 - RNA, 18 nt, Human
gagccagcucugaucacc

SEQ ID NO: 550015 - RNA, 22 nt, Human
gcagcagauacaagaacauggg

SEQ ID NO: 550016 - RNA, 19 nt, Human
gcagcagcaaggggcacag

SEQ ID NO: 550017 - RNA, 19 nt, Human
ggaagccagaagaccagac

SEQ ID NO: 550018 - RNA, 22 nt, Human
ggagauagggaugacggagaga

SEQ ID NO: 550019 - RNA, 22 nt, Human
ggagauuuucaaagccccgcca

SEQ ID NO: 550020 - RNA, 23 nt, Human
ggagccaggcccccuuccgcccu

SEQ ID NO: 550021 - RNA, 25 nt, Human
ggauagcggaagcccaaggcucagg

SEQ ID NO: 550022 - RNA, 19 nt, Human
gggaagccagaagaccaga

SEQ ID NO: 550023 - RNA, 24 nt, Human
gggcagagggagcuaggcagagac

SEQ ID NO: 550024 - RNA, 18 nt, Human
gucccugcugugugccag

SEQ ID NO: 550025 - RNA, 24 nt, Human
uaagcccaggggagauagggauga

SEQ ID NO: 550026 - RNA, 26 nt, Human
uagaagacaguucugacagaaagaga

SEQ ID NO: 550027 - RNA, 21 nt, Human
uagcggaagcccaaggcucag

SEQ ID NO: 550028 - RNA, 24 nt, Human
uagcuaguuaaaaaguaacucucu

SEQ ID NO: 550029 - RNA, 21 nt, Human
uaugcggcuccaagaagccac

SEQ ID NO: 550030 - RNA, 22 nt, Human
ucacccaucuaugcggcuccaa

SEQ ID NO: 550031 - RNA, 19 nt, Human
uccaagaagccacagaggg

SEQ ID NO: 550032 - RNA, 22 nt, Human
uccaccucaggccagaaagcca

SEQ ID NO: 550033 - RNA, 19 nt, Human
uccagggcggcaggaagaa

SEQ ID NO: 550034 - RNA, 21 nt, Human
uccagggcggcaggaagaaga

SEQ ID NO: 550035 - RNA, 19 nt, Human
ucuaugcggcuccaagaag

SEQ ID NO: 550036 - RNA, 24 nt, Human
ugaagagaugauguaacaaaugca

SEQ ID NO: 550037 - RNA, 21 nt, Human
ugagaagaaauagaagacagu

SEQ ID NO: 550038 - RNA, 19 nt, Human
ugcccggcugcagcagcaa

SEQ ID NO: 550039 - RNA, 22 nt, Human
uggagccaggcccccuuccgcc

SEQ ID NO: 550040 - RNA, 25 nt, Human
uggcaaagaauauaaaauguggguu

SEQ ID NO: 550041 - RNA, 22 nt, Human
ugggcagagggagcuaggcagg

SEQ ID NO: 550042 - RNA, 24 nt, Human
ugggucccugcugugugccaggug

SEQ ID NO: 550043 - RNA, 18 nt, Human
ugugccaggugcucgcuc

SEQ ID NO: 550044 - RNA, 22 nt, Human
uucaacacugcaugcaaagacu

SEQ ID NO: 550045 - RNA, 20 nt, Human
aaaaagcaucucaugaggcu

SEQ ID NO: 550046 - RNA, 20 nt, Human
agaaagacaagccuguagca

SEQ ID NO: 550047 - RNA, 22 nt, Human
agccagucacuccugacugcac

SEQ ID NO: 550048 - RNA, 24 nt, Human
agcuccuccaaacaugcauaaaug

SEQ ID NO: 550049 - RNA, 21 nt, Human
aggagaagccagucacuccug

SEQ ID NO: 550050 - RNA, 21 nt, Human
aggcuuuucgaggucaguuga

SEQ ID NO: 550051 - RNA, 27 nt, Human
agguaaaaacagugaggcugaacaaaa

SEQ ID NO: 550052 - RNA, 22 nt, Human
cacagcccgcgggucccgggcc

SEQ ID NO: 550053 - RNA, 23 nt, Human
caggaaucagcuccuccaaacau

SEQ ID NO: 550054 - RNA, 22 nt, Human
cauuaagaaaaagcaucucaug

SEQ ID NO: 550055 - RNA, 21 nt, Human
ccugaaagcaucaagugacuc

SEQ ID NO: 550056 - RNA, 24 nt, Human
cuaccaacaucacucuaauuauac

SEQ ID NO: 550057 - RNA, 24 nt, Human
uaaaaacagugaggcugaacaaaa

SEQ ID NO: 550058 - RNA, 18 nt, Human
uaaaaagacccccaaagc

SEQ ID NO: 550059 - RNA, 21 nt, Human
uaaaaucuaaaaagaccccca

SEQ ID NO: 550060 - RNA, 23 nt, Human
uaaaaucuaaaaagacccccaaa

SEQ ID NO: 550061 - RNA, 24 nt, Human
uaaaugaggacaaggagaagccag

SEQ ID NO: 550062 - RNA, 25 nt, Human
uaagguaaaaacagugaggcugaac

SEQ ID NO: 550063 - RNA, 21 nt, Human
uagaaagacaagccuguagca

SEQ ID NO: 550064 - RNA, 22 nt, Human
uagaaagacaagccuguagcac

SEQ ID NO: 550065 - RNA, 26 nt, Human
uagcucugauuaaccugaaagcauca

SEQ ID NO: 550066 - RNA, 20 nt, Human
ucuaaaaagacccccaaagc

SEQ ID NO: 550067 - RNA, 18 nt, Human
ugaggacaaggagaagcc

SEQ ID NO: 550068 - RNA, 22 nt, Human
ugaggacaaggagaagccaguc

SEQ ID NO: 550069 - RNA, 19 nt, Human
uuaagguaaaaacagugag

SEQ ID NO: 550070 - RNA, 24 nt, Human
uucacagcccgcgggucccgggcc

SEQ ID NO: 550071 - RNA, 22 nt, Human
uuguguaaaagaauauaagacc

SEQ ID NO: 550072 - RNA, 26 nt, Human
uuuuuuuuuuuuacagaaggaguuca

SEQ ID NO: 550073 - RNA, 19 nt, Human
agaguuucucagagaggag

SEQ ID NO: 550074 - RNA, 20 nt, Human
aggagcacagccuaaggaca

SEQ ID NO: 550075 - RNA, 24 nt, Human
aguggcaggagcacagccuaagga

SEQ ID NO: 550076 - RNA, 19 nt, Human
gaggaggggcugggucccu

SEQ ID NO: 550077 - RNA, 22 nt, Human
gcacagccuaaggacaugaagg

SEQ ID NO: 550078 - RNA, 18 nt, Human
gcacuggucuuuauugag

SEQ ID NO: 550079 - RNA, 21 nt, Human
ggucagaguuucucagagagg

SEQ ID NO: 550080 - RNA, 24 nt, Human
ucucagagaggaggggcugggucc

SEQ ID NO: 550081 - RNA, 24 nt, Human
acuggggagagggaugggguggga

SEQ ID NO: 550082 - RNA, 21 nt, Human
acugugcagacucaacagggc

SEQ ID NO: 550083 - RNA, 23 nt, Human
agcaacagcgacucagggagaaa

SEQ ID NO: 550084 - RNA, 19 nt, Human
aggcagaggaaccaccugg

SEQ ID NO: 550085 - RNA, 21 nt, Human
aggcagggugacauugcuccc

SEQ ID NO: 550086 - RNA, 18 nt, Human
caggaagagaaaucuccc

SEQ ID NO: 550087 - RNA, 22 nt, Human
ccaccuggaaacugagcuaagg

SEQ ID NO: 550088 - RNA, 21 nt, Human
cgacucagggagaaacucugg

SEQ ID NO: 550089 - RNA, 18 nt, Human
gaaccagaaugcuuauau

SEQ ID NO: 550090 - RNA, 20 nt, Human
gacucagggagaaacucugg

SEQ ID NO: 550091 - RNA, 24 nt, Human
gacucagggagaaacucugggccc

SEQ ID NO: 550092 - RNA, 19 nt, Human
gacuggggagagggauggg

SEQ ID NO: 550093 - RNA, 22 nt, Human
gacugugcagacucaacagggc

SEQ ID NO: 550094 - RNA, 21 nt, Human
gagaaacucugggcccauagc

SEQ ID NO: 550095 - RNA, 20 nt, Human
gaggcgcuaccucacucagg

SEQ ID NO: 550096 - RNA, 19 nt, Human
gaggguccccagccaagga

SEQ ID NO: 550097 - RNA, 23 nt, Human
gccagcagcuugagcuggaaugc

SEQ ID NO: 550098 - RNA, 22 nt, Human
ggaaccaccuggaaacugagcu

SEQ ID NO: 550099 - RNA, 22 nt, Human
ggaggguccccagccaaggaca

SEQ ID NO: 550100 - RNA, 22 nt, Human
ggcagguuccuucuuccaacag

SEQ ID NO: 550101 - RNA, 20 nt, Human
uagcuguggugccaggcaga

SEQ ID NO: 550102 - RNA, 19 nt, Human
ucaagaauuggggagcaga

SEQ ID NO: 550103 - RNA, 23 nt, Human
ucaccagugccuggagggucccc

SEQ ID NO: 550104 - RNA, 20 nt, Human
uccaagacuggggagaggga

SEQ ID NO: 550105 - RNA, 23 nt, Human
ucccaccaaugggccaucuucuu

SEQ ID NO: 550106 - RNA, 28 nt, Human
uccccagccaaggacagaaccggggucc

SEQ ID NO: 550107 - RNA, 21 nt, Human
ucucucaccagugccuggagg

SEQ ID NO: 550108 - RNA, 25 nt, Human
ucuucuuagcuacaccuuuguagcu

SEQ ID NO: 550109 - RNA, 18 nt, Human
ugaaagaagugagggcag

SEQ ID NO: 550110 - RNA, 22 nt, Human
ugcccugggagggucaguagag

SEQ ID NO: 550111 - RNA, 22 nt, Human
ugcccugggagggucaguagag

SEQ ID NO: 550112 - RNA, 21 nt, Human
uggggugggagagaucaagaa

SEQ ID NO: 550113 - RNA, 18 nt, Human
ugugcagacucaacaggg

SEQ ID NO: 550114 - RNA, 19 nt, Human
uugcucccaccaaugggcc

SEQ ID NO: 550115 - RNA, 20 nt, Human
uugcucccaccaaugggcca

SEQ ID NO: 550116 - RNA, 26 nt, Human
aaaaacugccgacacauuucagacaa

SEQ ID NO: 550117 - RNA, 20 nt, Human
aaaaauguacgcuuuuauug

SEQ ID NO: 550118 - RNA, 21 nt, Human
aaaaugucuaaaauaggagaa

SEQ ID NO: 550119 - RNA, 24 nt, Human
aaacaaucagggcaaaaaaaauuc

SEQ ID NO: 550120 - RNA, 21 nt, Human
aaacagauuuguucccaaaac

SEQ ID NO: 550121 - RNA, 23 nt, Human
aaagaaaaaaaacugccgacaca

SEQ ID NO: 550122 - RNA, 19 nt, Human
aaagaacacuccgaaaaua

SEQ ID NO: 550123 - RNA, 19 nt, Human
aaagugcugggauuacagg

SEQ ID NO: 550124 - RNA, 24 nt, Human
aaagugcugggauuacaggcaaga

SEQ ID NO: 550125 - RNA, 24 nt, Human
aaauaaaugaaucaagaaaccaag

SEQ ID NO: 550126 - RNA, 24 nt, Human
aaaugaccauuuuguuuuuuucca

SEQ ID NO: 550127 - RNA, 21 nt, Human
aagaaaaaaaacugccgacac

SEQ ID NO: 550128 - RNA, 20 nt, Human
aagcaggauuuguucuaagu

SEQ ID NO: 550129 - RNA, 23 nt, Human
aagcaggauuuguucuaagucua

SEQ ID NO: 550130 - RNA, 18 nt, Human
aagugcugggauuacagg

SEQ ID NO: 550131 - RNA, 19 nt, Human
aagugcugggauuacaggc

SEQ ID NO: 550132 - RNA, 26 nt, Human
aagugcugggauuacaggcaagagcc

SEQ ID NO: 550133 - RNA, 26 nt, Human
aauuauacacucauauauauguauau

SEQ ID NO: 550134 - RNA, 19 nt, Human
acagauauauagauauaug

SEQ ID NO: 550135 - RNA, 19 nt, Human
acauacacacacacauaua

SEQ ID NO: 550136 - RNA, 19 nt, Human
acuaaacuaggucagagug

SEQ ID NO: 550137 - RNA, 22 nt, Human
aggaagugggaguacaaagucu

SEQ ID NO: 550138 - RNA, 18 nt, Human
aggcaggcugggcugggg

SEQ ID NO: 550139 - RNA, 20 nt, Human
aggcaggcugggcuggggcu

SEQ ID NO: 550140 - RNA, 22 nt, Human
aguaagucuuuauuauuauuau

SEQ ID NO: 550141 - RNA, 18 nt, Human
aguaggugggauuacagg

SEQ ID NO: 550142 - RNA, 20 nt, Human
agugauccaccugccucggc

SEQ ID NO: 550143 - RNA, 23 nt, Human
agugauccaccugccucggccuc

SEQ ID NO: 550144 - RNA, 24 nt, Human
agugcaaaguauuugaaaaagucc

SEQ ID NO: 550145 - RNA, 20 nt, Human
agugcaguggcacgaucuug

SEQ ID NO: 550146 - RNA, 23 nt, Human
agugcaguggcacgaucuuggcu

SEQ ID NO: 550147 - RNA, 24 nt, Human
agugcaguggcacgaucuuggcuc

SEQ ID NO: 550148 - RNA, 18 nt, Human
agugcugggauuacaggc

SEQ ID NO: 550149 - RNA, 21 nt, Human
auagagaacacagcaucugga

SEQ ID NO: 550150 - RNA, 24 nt, Human
auauacauacacacacacauauag

SEQ ID NO: 550151 - RNA, 24 nt, Human
auauuuguacuuuuaguagagaug

SEQ ID NO: 550152 - RNA, 24 nt, Human
aucuauaaacacucugauuccucu

SEQ ID NO: 550153 - RNA, 21 nt, Human
auggcagaaaggaagcauugg

SEQ ID NO: 550154 - RNA, 18 nt, Human
augggguuucaccauguu

SEQ ID NO: 550155 - RNA, 22 nt, Human
augggguuucaccauguuggcc

SEQ ID NO: 550156 - RNA, 24 nt, Human
augggguuucaccauguuggccag

SEQ ID NO: 550157 - RNA, 26 nt, Human
auuuuuuuucaaaagcaggauuuguu

SEQ ID NO: 550158 - RNA, 23 nt, Human
caaaagugcaaaguauuugaaaa

SEQ ID NO: 550159 - RNA, 27 nt, Human
caaagugcugggauuacaggcaagagc

SEQ ID NO: 550160 - RNA, 22 nt, Human
caaaguugaguuauaucuuacu

SEQ ID NO: 550161 - RNA, 20 nt, Human
caaccucugcuucccggauu

SEQ ID NO: 550162 - RNA, 22 nt, Human
caagcaauucuccugccucagc

SEQ ID NO: 550163 - RNA, 22 nt, Human
caauuuguucucuuucacaaaa

SEQ ID NO: 550164 - RNA, 19 nt, Human
cacaaaaugucuaaaauag

SEQ ID NO: 550165 - RNA, 25 nt, Human
cacacacauauaucucuauauaccc

SEQ ID NO: 550166 - RNA, 21 nt, Human
caccauguuggccagacuggu

SEQ ID NO: 550167 - RNA, 24 nt, Human
caccauguuggccagacuggucuc

SEQ ID NO: 550168 - RNA, 18 nt, Human
cacccaggcuacagauuu

SEQ ID NO: 550169 - RNA, 23 nt, Human
caccugccucggccucccaaagu

SEQ ID NO: 550170 - RNA, 19 nt, Human
caguggcacgaucuuggcu

SEQ ID NO: 550171 - RNA, 24 nt, Human
cauguuggccagacuggucucaaa

SEQ ID NO: 550172 - RNA, 22 nt, Human
cauuggggugggaugaggcagg

SEQ ID NO: 550173 - RNA, 19 nt, Human
ccaaagugcugggauuaca

SEQ ID NO: 550174 - RNA, 23 nt, Human
ccaaagugcugggauuacaggca

SEQ ID NO: 550175 - RNA, 24 nt, Human
ccaacacauuauuuaacgagcagg

SEQ ID NO: 550176 - RNA, 24 nt, Human
cccaaagugcugggauuacaggca

SEQ ID NO: 550177 - RNA, 21 nt, Human
cccacauacagauauauagau

SEQ ID NO: 550178 - RNA, 23 nt, Human
cccgaguaggugggauuacaggu

SEQ ID NO: 550179 - RNA, 23 nt, Human
cccggauucaagcaauucuccug

SEQ ID NO: 550180 - RNA, 24 nt, Human
ccugccucagccucccgaguaggu

SEQ ID NO: 550181 - RNA, 24 nt, Human
ccugccucggccucccaaagugcu

SEQ ID NO: 550182 - RNA, 24 nt, Human
cucacuacaaccucugcuucccgg

SEQ ID NO: 550183 - RNA, 24 nt, Human
cuucccggauucaagcaauucucc

SEQ ID NO: 550184 - RNA, 24 nt, Human
cuuuuaguagagaugggguuucac

SEQ ID NO: 550185 - RNA, 22 nt, Human
gacacauuaaaagaaaaaaaac

SEQ ID NO: 550186 - RNA, 24 nt, Human
gaccuugagugauccaccugccuc

SEQ ID NO: 550187 - RNA, 24 nt, Human
gaccuugagugauccaccugccuc

SEQ ID NO: 550188 - RNA, 18 nt, Human
gagaugggguuucaccau

SEQ ID NO: 550189 - RNA, 24 nt, Human
gagaugggguuucaccauguuggc

SEQ ID NO: 550190 - RNA, 18 nt, Human
gauuacaggcaagagcca

SEQ ID NO: 550191 - RNA, 24 nt, Human
gauuacaggcaagagccacuaugc

SEQ ID NO: 550192 - RNA, 18 nt, Human
gauuacaggugcccgcca

SEQ ID NO: 550193 - RNA, 21 nt, Human
gcauucaacucauauaucuau

SEQ ID NO: 550194 - RNA, 30 nt, Human
gcauuggggugggaugaggcaggcugggac

SEQ ID NO: 550195 - RNA, 24 nt, Human
ggauuacaggcaagagccacuaug

SEQ ID NO: 550196 - RNA, 19 nt, Human
gggaugaggcaggcugggc

SEQ ID NO: 550197 - RNA, 22 nt, Human
gggguuucaccauguuggccag

SEQ ID NO: 550198 - RNA, 18 nt, Human
ggguuucaccauguuggc

SEQ ID NO: 550199 - RNA, 21 nt, Human
ggguuucaccauguuggccag

SEQ ID NO: 550200 - RNA, 23 nt, Human
guagagaugggguuucaccaugu

SEQ ID NO: 550201 - RNA, 21 nt, Human
gucaauauccauaaaugaagg

SEQ ID NO: 550202 - RNA, 22 nt, Human
gucaauauccauaaaugaaggg

SEQ ID NO: 550203 - RNA, 24 nt, Human
gugauccaccugccucggccuccc

SEQ ID NO: 550204 - RNA, 21 nt, Human
uaaaaaaaaaaaaaccucaua

SEQ ID NO: 550205 - RNA, 24 nt, Human
uaaaagaaaaaaaacugccgacac

SEQ ID NO: 550206 - RNA, 23 nt, Human
uaaauacacaaggcauguauaua

SEQ ID NO: 550207 - RNA, 22 nt, Human
uaaaugaaucaagaaaccaaga

SEQ ID NO: 550208 - RNA, 24 nt, Human
uaaaugguaaacgugauaucauga

SEQ ID NO: 550209 - RNA, 26 nt, Human
uaagacagaggccugcucguuaaugu

SEQ ID NO: 550210 - RNA, 24 nt, Human
uaagacugugagaaaugauguauu

SEQ ID NO: 550211 - RNA, 21 nt, Human
uaaggugaaacugccaguaug

SEQ ID NO: 550212 - RNA, 19 nt, Human
uaauauugguuaaguaagu

SEQ ID NO: 550213 - RNA, 23 nt, Human
uaauauuuguacuuuuaguagag

SEQ ID NO: 550214 - RNA, 24 nt, Human
uaauauuuguacuuuuaguagaga

SEQ ID NO: 550215 - RNA, 19 nt, Human
uacacucauauauauguau

SEQ ID NO: 550216 - RNA, 22 nt, Human
uacaggcaagagccacuaugcc

SEQ ID NO: 550217 - RNA, 26 nt, Human
uacauacacacacacauauaucucua

SEQ ID NO: 550218 - RNA, 26 nt, Human
uaccaaaaauaaaaauugcauucaac

SEQ ID NO: 550219 - RNA, 22 nt, Human
uagagaugggguuucaccaugu

SEQ ID NO: 550220 - RNA, 23 nt, Human
uagagugcaguggcacgaucuug

SEQ ID NO: 550221 - RNA, 24 nt, Human
uagagugcaguggcacgaucuugg

SEQ ID NO: 550222 - RNA, 24 nt, Human
uaguagagaugggguuucaccaug

SEQ ID NO: 550223 - RNA, 26 nt, Human
uaguagagaugggguuucaccauguu

SEQ ID NO: 550224 - RNA, 21 nt, Human
uauacacucauauauauguau

SEQ ID NO: 550225 - RNA, 22 nt, Human
uauacauacacacacacauaua

SEQ ID NO: 550226 - RNA, 29 nt, Human
uauacauacacacacacauauaucucuau

SEQ ID NO: 550227 - RNA, 27 nt, Human
uauaguaucauggacuaaacuagguca

SEQ ID NO: 550228 - RNA, 24 nt, Human
uauauacccacauacagauauaua

SEQ ID NO: 550229 - RNA, 20 nt, Human
uauauguauauguacauaua

SEQ ID NO: 550230 - RNA, 22 nt, Human
uauauguauauguacauauaca

SEQ ID NO: 550231 - RNA, 25 nt, Human
uaucacccuaaacaaucagggcaaa

SEQ ID NO: 550232 - RNA, 21 nt, Human
uaucauggacuaaacuagguc

SEQ ID NO: 550233 - RNA, 24 nt, Human
uaucucuauauacccacauacaga

SEQ ID NO: 550234 - RNA, 18 nt, Human
uaugacagaccauuuuuc

SEQ ID NO: 550235 - RNA, 27 nt, Human
uauguacauauacauacacacacacag

SEQ ID NO: 550236 - RNA, 24 nt, Human
uauguacauauacauacacacagu

SEQ ID NO: 550237 - RNA, 21 nt, Human
ucaaaaauuaccggggaaauu

SEQ ID NO: 550238 - RNA, 24 nt, Human
ucaaauaaaugaaucaagaaacca

SEQ ID NO: 550239 - RNA, 19 nt, Human
ucacaaaaugucuaaaaua

SEQ ID NO: 550240 - RNA, 18 nt, Human
ucacuacaaccucugcuu

SEQ ID NO: 550241 - RNA, 19 nt, Human
ucacuacaaccucugcuuc

SEQ ID NO: 550242 - RNA, 23 nt, Human
ucacuacaaccucugcuucccgg

SEQ ID NO: 550243 - RNA, 24 nt, Human
ucacuacaaccucugcuucccgga

SEQ ID NO: 550244 - RNA, 28 nt, Human
ucacuacaaccucugcuucgggcccucc

SEQ ID NO: 550245 - RNA, 18 nt, Human
ucaguaggagaacuugag

SEQ ID NO: 550246 - RNA, 22 nt, Human
ucagugagucguaaccuugacu

SEQ ID NO: 550247 - RNA, 24 nt, Human
ucauggacuaaacuaggucagagu

SEQ ID NO: 550248 - RNA, 24 nt, Human
ucccaaagugcugggauuacaggc

SEQ ID NO: 550249 - RNA, 23 nt, Human
ucccgaguaggugggauuacagg

SEQ ID NO: 550250 - RNA, 24 nt, Human
ucccgaguaggugggauuacaggu

SEQ ID NO: 550251 - RNA, 21 nt, Human
ucccggauucaagcaauucuc

SEQ ID NO: 550252 - RNA, 24 nt, Human
ucccggauucaagcaauucuccug

SEQ ID NO: 550253 - RNA, 21 nt, Human
ucccuuuuaagacagaggccu

SEQ ID NO: 550254 - RNA, 18 nt, Human
ucggccucccaaagugcu

SEQ ID NO: 550255 - RNA, 24 nt, Human
ucuauaaacacucugauuccucac

SEQ ID NO: 550256 - RNA, 19 nt, Human
ucuauaaauaucaacuuaa

SEQ ID NO: 550257 - RNA, 19 nt, Human
ucuccugccucagccuccc

SEQ ID NO: 550258 - RNA, 23 nt, Human
ucugacaggaggccacuggacaa

SEQ ID NO: 550259 - RNA, 22 nt, Human
ucugacaggaggccacuggacc

SEQ ID NO: 550260 - RNA, 19 nt, Human
ucugcaaugugaucaugcu

SEQ ID NO: 550261 - RNA, 24 nt, Human
ugaccuugagugauccaccugccu

SEQ ID NO: 550262 - RNA, 27 nt, Human
ugaccuugagugauccaccugccucgg

SEQ ID NO: 550263 - RNA, 19 nt, Human
ugagaugauggcagaaagg

SEQ ID NO: 550264 - RNA, 19 nt, Human
ugagucguaaccuugacuc

SEQ ID NO: 550265 - RNA, 22 nt, Human
ugauaugaaugcauuucuuugu

SEQ ID NO: 550266 - RNA, 20 nt, Human
ugauuuaaaaaaugcagaaa

SEQ ID NO: 550267 - RNA, 21 nt, Human
ugcccucugcaucuacuuuau

SEQ ID NO: 550268 - RNA, 24 nt, Human
ugccucagccucccgaguaggugg

SEQ ID NO: 550269 - RNA, 21 nt, Human
ugccucggccucccaaagugc

SEQ ID NO: 550270 - RNA, 24 nt, Human
ugccucggccucccaaagugcugg

SEQ ID NO: 550271 - RNA, 21 nt, Human
ugcugggauuacaggcaagag

SEQ ID NO: 550272 - RNA, 18 nt, Human
uggaaagcuggccuauaa

SEQ ID NO: 550273 - RNA, 22 nt, Human
uggaggaagugggaguacaaag

SEQ ID NO: 550274 - RNA, 24 nt, Human
uggcacgaucuuggcucacuacaa

SEQ ID NO: 550275 - RNA, 21 nt, Human
uggcagaaaggaagcauuggg

SEQ ID NO: 550276 - RNA, 24 nt, Human
uggcagaaaggaagcauuggggug

SEQ ID NO: 550277 - RNA, 21 nt, Human
uggccagacuggucucaaacu

SEQ ID NO: 550278 - RNA, 22 nt, Human
ugggauuacaggcaagagccac

SEQ ID NO: 550279 - RNA, 22 nt, Human
ugggauuacaggcaagagccac

SEQ ID NO: 550280 - RNA, 23 nt, Human
ugggauuacaggcaagagccacu

SEQ ID NO: 550281 - RNA, 23 nt, Human
ugggauuacaggcaagagccacu

SEQ ID NO: 550282 - RNA, 24 nt, Human
ugggauuacaggcaagagccacua

SEQ ID NO: 550283 - RNA, 18 nt, Human
ugggauuacaggugcccg

SEQ ID NO: 550284 - RNA, 21 nt, Human
ugggauuacaggugcccgcca

SEQ ID NO: 550285 - RNA, 22 nt, Human
ugggauuacaggugcccgccac

SEQ ID NO: 550286 - RNA, 20 nt, Human
uggggugggaugaggcaggc

SEQ ID NO: 550287 - RNA, 23 nt, Human
ugggguuucaccauguuggccag

SEQ ID NO: 550288 - RNA, 19 nt, Human
uguauauauccacaguauc

SEQ ID NO: 550289 - RNA, 18 nt, Human
uguauauguacauauaca

SEQ ID NO: 550290 - RNA, 18 nt, Human
ugugagcaaguucauuac

SEQ ID NO: 550291 - RNA, 24 nt, Human
uguuagucaagaguccucaguagg

SEQ ID NO: 550292 - RNA, 21 nt, Human
uuaaaaaaaaaaaaaccucau

SEQ ID NO: 550293 - RNA, 26 nt, Human
uuacugcccucugcaucuacuuuaug

SEQ ID NO: 550294 - RNA, 18 nt, Human
uuaguagagaugggguuu

SEQ ID NO: 550295 - RNA, 22 nt, Human
uuaguagagaugggguuucacc

SEQ ID NO: 550296 - RNA, 24 nt, Human
uuaguagagaugggguuucaccau

SEQ ID NO: 550297 - RNA, 21 nt, Human
uucaagcaauucuccugccuc

SEQ ID NO: 550298 - RNA, 24 nt, Human
uucaagcaauucuccugccucagc

SEQ ID NO: 550299 - RNA, 18 nt, Human
uuccauggcaaauaauag

SEQ ID NO: 550300 - RNA, 21 nt, Human
uucccaaaacauagcacaaaa

SEQ ID NO: 550301 - RNA, 21 nt, Human
uuucaccauguuggccagacu

SEQ ID NO: 550302 - RNA, 24 nt, Human
uuuccauggcaaauaauagcugua

SEQ ID NO: 550303 - RNA, 22 nt, Human
uuuuaaaaaaaaaaaaaccuca

SEQ ID NO: 550304 - RNA, 23 nt, Human
aaaaguugauuugauaccuggug

SEQ ID NO: 550305 - RNA, 20 nt, Human
aaaauauucagacucuccuc

SEQ ID NO: 550306 - RNA, 22 nt, Human
aaaauuaauaauaucuuguaaa

SEQ ID NO: 550307 - RNA, 18 nt, Human
aaaauuagcugggcaugg

SEQ ID NO: 550308 - RNA, 27 nt, Human
aaacauuaaaauauacaccagaaauac

SEQ ID NO: 550309 - RNA, 18 nt, Human
aaagaucuaacuauuuua

SEQ ID NO: 550310 - RNA, 26 nt, Human
aaauaggaaacagaaauaagggaccc

SEQ ID NO: 550311 - RNA, 21 nt, Human
aacacaggaccuauauuugcu

SEQ ID NO: 550312 - RNA, 20 nt, Human
aacagagcgagacuccaucu

SEQ ID NO: 550313 - RNA, 18 nt, Human
aacauggugaaaccccgc

SEQ ID NO: 550314 - RNA, 20 nt, Human
aacauggugaaaccccgccu

SEQ ID NO: 550315 - RNA, 21 nt, Human
aacauggugaaaccccgccuc

SEQ ID NO: 550316 - RNA, 26 nt, Human
aacauuaaaauauacaccagaaauac

SEQ ID NO: 550317 - RNA, 24 nt, Human
aaccugggcaacagagcgagacuc

SEQ ID NO: 550318 - RNA, 22 nt, Human
aaguaaauaguuguuauaaugu

SEQ ID NO: 550319 - RNA, 24 nt, Human
aagugggucagauacagguuuuua

SEQ ID NO: 550320 - RNA, 24 nt, Human
acagagcgagacuccaucucaaaa

SEQ ID NO: 550321 - RNA, 24 nt, Human
acaggacacaucagcugagagcaa

SEQ ID NO: 550322 - RNA, 21 nt, Human
acagguuuuuaaaaacugcau

SEQ ID NO: 550323 - RNA, 20 nt, Human
acaugcuuaagaucaacuga

SEQ ID NO: 550324 - RNA, 24 nt, Human
accccgccucuacuaaaaauacaa

SEQ ID NO: 550325 - RNA, 23 nt, Human
accugggcaacagagcgagacuc

SEQ ID NO: 550326 - RNA, 24 nt, Human
acgugcgguggcucacgccuguaa

SEQ ID NO: 550327 - RNA, 18 nt, Human
acugcacuccaaccuggg

SEQ ID NO: 550328 - RNA, 24 nt, Human
acugcacuccaaccugggcaacag

SEQ ID NO: 550329 - RNA, 23 nt, Human
acuguauuuccaucuuaagacaa

SEQ ID NO: 550330 - RNA, 19 nt, Human
agagugcagaagaaaucuu

SEQ ID NO: 550331 - RNA, 23 nt, Human
agauuuuuuugaaacagccaaga

SEQ ID NO: 550332 - RNA, 20 nt, Human
agcaguuugggaggcugugg

SEQ ID NO: 550333 - RNA, 23 nt, Human
agcugggcaugguggcaugcgcc

SEQ ID NO: 550334 - RNA, 21 nt, Human
agcuuguuucaaauguguagu

SEQ ID NO: 550335 - RNA, 19 nt, Human
aggaaacagaaauaacugu

SEQ ID NO: 550336 - RNA, 19 nt, Human
aggaacauaaaaaacauac

SEQ ID NO: 550337 - RNA, 24 nt, Human
aggcaggaggaucucuugaacccg

SEQ ID NO: 550338 - RNA, 24 nt, Human
aggcugaggcaggaggaucucuug

SEQ ID NO: 550339 - RNA, 20 nt, Human
aggugagguugcagugagcc

SEQ ID NO: 550340 - RNA, 23 nt, Human
aggugagguugcagugagccgag

SEQ ID NO: 550341 - RNA, 18 nt, Human
auacaaaaaugacuuguu

SEQ ID NO: 550342 - RNA, 22 nt, Human
auaccaguauaccaauucuccc

SEQ ID NO: 550343 - RNA, 20 nt, Human
augcauuuaugcauuugugg

SEQ ID NO: 550344 - RNA, 24 nt, Human
caaaauggcucuucaaacuuaaaa

SEQ ID NO: 550345 - RNA, 24 nt, Human
caacauggugaaaccccgccucua

SEQ ID NO: 550346 - RNA, 21 nt, Human
caaguccuggcaccuggugcu

SEQ ID NO: 550347 - RNA, 24 nt, Human
cacgccuguaaucccagcaguuug

SEQ ID NO: 550348 - RNA, 23 nt, Human
cacuccaaccugggcaacagagc

SEQ ID NO: 550349 - RNA, 23 nt, Human
cacugcacuccaaccugggcaac

SEQ ID NO: 550350 - RNA, 24 nt, Human
cacugcacuccaaccugggcaaca

SEQ ID NO: 550351 - RNA, 21 nt, Human
cagcaguuugggaggcugugg

SEQ ID NO: 550352 - RNA, 24 nt, Human
cagcugcucaggaggcugaggcag

SEQ ID NO: 550353 - RNA, 19 nt, Human
cauaaauaaaaaucugacu

SEQ ID NO: 550354 - RNA, 18 nt, Human
cauuuuacauaggcagaa

SEQ ID NO: 550355 - RNA, 20 nt, Human
cauuuuacauaggcagaauc

SEQ ID NO: 550356 - RNA, 23 nt, Human
ccacugcacuccaaccugggcaa

SEQ ID NO: 550357 - RNA, 24 nt, Human
ccacugcacuccaaccugggcaac

SEQ ID NO: 550358 - RNA, 23 nt, Human
ccaggcacacuguuaucccugcc

SEQ ID NO: 550359 - RNA, 19 nt, Human
ccagggagacucuacucaa

SEQ ID NO: 550360 - RNA, 24 nt, Human
ccaucucaaaaagaaaaaaaaaaa

SEQ ID NO: 550361 - RNA, 19 nt, Human
cccaagaaaaauaaauaaa

SEQ ID NO: 550362 - RNA, 18 nt, Human
ccccucauauaacagaau

SEQ ID NO: 550363 - RNA, 22 nt, Human
ccuggccaacauggugaaaccc

SEQ ID NO: 550364 - RNA, 23 nt, Human
ccuggccaacauggugaaacccc

SEQ ID NO: 550365 - RNA, 24 nt, Human
ccuggccaacauggugaaaccccg

SEQ ID NO: 550366 - RNA, 22 nt, Human
ccuguaaucccagcaguuuggg

SEQ ID NO: 550367 - RNA, 19 nt, Human
ccuguagucccagcugcuc

SEQ ID NO: 550368 - RNA, 21 nt, Human
ccuguagucccagcugcucag

SEQ ID NO: 550369 - RNA, 22 nt, Human
ccuguagucccagcugcucagg

SEQ ID NO: 550370 - RNA, 19 nt, Human
ccuugaauaaaagaugaaa

SEQ ID NO: 550371 - RNA, 19 nt, Human
cgagaucgugccacugcac

SEQ ID NO: 550372 - RNA, 24 nt, Human
cgccuguagucccagcugcucagg

SEQ ID NO: 550373 - RNA, 19 nt, Human
cgggaggugagguugcagu

SEQ ID NO: 550374 - RNA, 23 nt, Human
cgggaggugagguugcagugagc

SEQ ID NO: 550375 - RNA, 21 nt, Human
cucacgccuguaaucccagca

SEQ ID NO: 550376 - RNA, 21 nt, Human
cucacgccuguaaucccagca

SEQ ID NO: 550377 - RNA, 21 nt, Human
cucagagugcagaagaaaucc

SEQ ID NO: 550378 - RNA, 21 nt, Human
cucccauaaaauccaaaagug

SEQ ID NO: 550379 - RNA, 20 nt, Human
cucgcggcaguggcuggaga

SEQ ID NO: 550380 - RNA, 20 nt, Human
cucuacuaaaaauacaaaaa

SEQ ID NO: 550381 - RNA, 23 nt, Human
cugaaaauauucagacucuccuc

SEQ ID NO: 550382 - RNA, 18 nt, Human
cugaggcaggaggaucuc

SEQ ID NO: 550383 - RNA, 23 nt, Human
cuucucccaaauucuaauugcau

SEQ ID NO: 550384 - RNA, 19 nt, Human
gaaaccccgccucuacuaa

SEQ ID NO: 550385 - RNA, 23 nt, Human
gaccuaacacuugacccaacaua

SEQ ID NO: 550386 - RNA, 18 nt, Human
gagcgggcgcuggggcuu

SEQ ID NO: 550387 - RNA, 22 nt, Human
gagguugcagugagccgagauc

SEQ ID NO: 550388 - RNA, 23 nt, Human
gagguugcagugagccgagaucg

SEQ ID NO: 550389 - RNA, 24 nt, Human
gccaacauggugaaaccccgccuc

SEQ ID NO: 550390 - RNA, 19 nt, Human
gccacugcacuccaaccug

SEQ ID NO: 550391 - RNA, 24 nt, Human
gccacugcacuccaaccugggcaa

SEQ ID NO: 550392 - RNA, 20 nt, Human
gccgagaucgugccacugca

SEQ ID NO: 550393 - RNA, 21 nt, Human
gcugauuuauugaaaagucaa

SEQ ID NO: 550394 - RNA, 20 nt, Human
gcuuuuuuaagcauucuuaa

SEQ ID NO: 550395 - RNA, 24 nt, Human
ggagagugcacgggcagggcggga

SEQ ID NO: 550396 - RNA, 22 nt, Human
ggcaugguggcaugcgccugua

SEQ ID NO: 550397 - RNA, 19 nt, Human
gguggcagcaguggcuccu

SEQ ID NO: 550398 - RNA, 24 nt, Human
gguggcaugcgccuguagucccag

SEQ ID NO: 550399 - RNA, 23 nt, Human
gguggcucacgccuguaauccca

SEQ ID NO: 550400 - RNA, 24 nt, Human
gguggcucacgccuguaaucccag

SEQ ID NO: 550401 - RNA, 20 nt, Human
guauaugaauauauauacaa

SEQ ID NO: 550402 - RNA, 23 nt, Human
guggcucacgccuguaaucccag

SEQ ID NO: 550403 - RNA, 24 nt, Human
guugcagugagccgagaucgugcc

SEQ ID NO: 550404 - RNA, 23 nt, Human
uaaaauacaguguuauugaccua

SEQ ID NO: 550405 - RNA, 22 nt, Human
uaaaauauacaccagaaauacu

SEQ ID NO: 550406 - RNA, 18 nt, Human
uaagaucaacugaaaaac

SEQ ID NO: 550407 - RNA, 21 nt, Human
uaagguuaagguuaaggaaau

SEQ ID NO: 550408 - RNA, 18 nt, Human
uacagaauggauauugga

SEQ ID NO: 550409 - RNA, 24 nt, Human
uacagagugcaaaauaaaaagaaa

SEQ ID NO: 550410 - RNA, 18 nt, Human
uaccuugguauccacagg

SEQ ID NO: 550411 - RNA, 23 nt, Human
uagcacaugccaggauaaacgua

SEQ ID NO: 550412 - RNA, 20 nt, Human
uagcugggcaugguggcaug

SEQ ID NO: 550413 - RNA, 23 nt, Human
uauaaccuauucacauccuccug

SEQ ID NO: 550414 - RNA, 19 nt, Human
uauaccaauucucccauca

SEQ ID NO: 550415 - RNA, 25 nt, Human
uauauuugcugcauaaaaguugauu

SEQ ID NO: 550416 - RNA, 21 nt, Human
uauuaugccuucguuuacccu

SEQ ID NO: 550417 - RNA, 22 nt, Human
ucaucucagccuccacaggaag

SEQ ID NO: 550418 - RNA, 19 nt, Human
uccaaaaaauaaacaaaug

SEQ ID NO: 550419 - RNA, 21 nt, Human
uccacagauguggaacuaacc

SEQ ID NO: 550420 - RNA, 23 nt, Human
uccaucucaaaaagaaaaaaaaa

SEQ ID NO: 550421 - RNA, 18 nt, Human
ucccagaucgccccccug

SEQ ID NO: 550422 - RNA, 18 nt, Human
ucccauaugaacaagaau

SEQ ID NO: 550423 - RNA, 18 nt, Human
uccuccuguauacuuaaa

SEQ ID NO: 550424 - RNA, 23 nt, Human
ucgugccacugcacuccaaccug

SEQ ID NO: 550425 - RNA, 24 nt, Human
ucucaagguuaggagauugagacc

SEQ ID NO: 550426 - RNA, 20 nt, Human
ugaaaaaccaagauugagag

SEQ ID NO: 550427 - RNA, 18 nt, Human
ugaacacaaacaaauuga

SEQ ID NO: 550428 - RNA, 20 nt, Human
ugaauccacagauguggaac

SEQ ID NO: 550429 - RNA, 18 nt, Human
ugacuuguuuuuaugaau

SEQ ID NO: 550430 - RNA, 24 nt, Human
ugagaccauccuggccaacauggu

SEQ ID NO: 550431 - RNA, 22 nt, Human
ugagccgagaucgugccacugc

SEQ ID NO: 550432 - RNA, 20 nt, Human
ugaggcaggaggaucucuug

SEQ ID NO: 550433 - RNA, 24 nt, Human
ugaggcaggaggaucucuugaacc

SEQ ID NO: 550434 - RNA, 25 nt, Human
ugaggcaggaggaucucuugaaccc

SEQ ID NO: 550435 - RNA, 19 nt, Human
ugagugaagagaccauaga

SEQ ID NO: 550436 - RNA, 21 nt, Human
ugauucccagaucgccccccu

SEQ ID NO: 550437 - RNA, 22 nt, Human
ugauuugaggaacauaaaaaac

SEQ ID NO: 550438 - RNA, 22 nt, Human
ugcauauaaccuauucacaucc

SEQ ID NO: 550439 - RNA, 24 nt, Human
ugccacugcacuccaaccugggca

SEQ ID NO: 550440 - RNA, 23 nt, Human
ugcgccuguagucccagcugcuc

SEQ ID NO: 550441 - RNA, 25 nt, Human
ugcggagagugcacgggcagggcgg

SEQ ID NO: 550442 - RNA, 20 nt, Human
uggaacuaaccacagagggc

SEQ ID NO: 550443 - RNA, 20 nt, Human
uggaggguggaucucaaggu

SEQ ID NO: 550444 - RNA, 21 nt, Human
uggcaugcgccuguaguccca

SEQ ID NO: 550445 - RNA, 18 nt, Human
uggccaacauggugaaac

SEQ ID NO: 550446 - RNA, 22 nt, Human
uggcucacgccuguaaucccag

SEQ ID NO: 550447 - RNA, 24 nt, Human
uggcucacgccuguaaucccagca

SEQ ID NO: 550448 - RNA, 19 nt, Human
uggcuggagagcggcuguc

SEQ ID NO: 550449 - RNA, 24 nt, Human
uggguuauuauguggccuugguug

SEQ ID NO: 550450 - RNA, 18 nt, Human
ugguacagucaaaccaau

SEQ ID NO: 550451 - RNA, 24 nt, Human
ugguggcaugcgccuguaguccca

SEQ ID NO: 550452 - RNA, 22 nt, Human
uguauacauacauguuuguaua

SEQ ID NO: 550453 - RNA, 30 nt, Human
uguauacauacauguuuguauaugaauauu

SEQ ID NO: 550454 - RNA, 18 nt, Human
ugucaaaaauaaaacaaa

SEQ ID NO: 550455 - RNA, 20 nt, Human
ugucaaaaauaaaacaaaaa

SEQ ID NO: 550456 - RNA, 21 nt, Human
ugucaagauacaacuuuaaau

SEQ ID NO: 550457 - RNA, 23 nt, Human
uuacuaaaucgauuugacuauau

SEQ ID NO: 550458 - RNA, 22 nt, Human
uuagcugggcaugguggcaugc

SEQ ID NO: 550459 - RNA, 22 nt, Human
uuaugcauuugugguugcuuug

SEQ ID NO: 550460 - RNA, 23 nt, Human
uucaagucacuuauauaaaaggg

SEQ ID NO: 550461 - RNA, 23 nt, Human
uucaaugcauuuuuauuuauuuc

SEQ ID NO: 550462 - RNA, 22 nt, Human
uucaauucccaagaaaaauaaa

SEQ ID NO: 550463 - RNA, 18 nt, Human
uugcagugagccgagauc

SEQ ID NO: 550464 - RNA, 21 nt, Human
uugcagugagccgagaucgug

SEQ ID NO: 550465 - RNA, 22 nt, Human
uugcagugagccgagaucgugc

SEQ ID NO: 550466 - RNA, 19 nt, Human
uugguugaauccacagaug

SEQ ID NO: 550467 - RNA, 21 nt, Human
uuugugguugcuuugguucuc

SEQ ID NO: 550468 - RNA, 19 nt, Human
uuuuccguccuugguuggu

SEQ ID NO: 550469 - RNA, 25 nt, Human
uuuucuccuucaauaucuuaaggua

SEQ ID NO: 550470 - RNA, 21 nt, Human
aaauugucccucccuccccug

SEQ ID NO: 550471 - RNA, 20 nt, Human
aacuucccccucccuccccc

SEQ ID NO: 550472 - RNA, 23 nt, Human
aagagacaagagagcugcccuca

SEQ ID NO: 550473 - RNA, 21 nt, Human
aagaggcagagaacagggagg

SEQ ID NO: 550474 - RNA, 24 nt, Human
aaguuuuauacaaaauguggggag

SEQ ID NO: 550475 - RNA, 21 nt, Human
aauguggggagggaaaaggga

SEQ ID NO: 550476 - RNA, 22 nt, Human
accccaccccagaggccccagc

SEQ ID NO: 550477 - RNA, 30 nt, Human
acccccuuaacuucccccucccucccccuu

SEQ ID NO: 550478 - RNA, 21 nt, Human
acccccuucccauccccccac

SEQ ID NO: 550479 - RNA, 22 nt, Human
acuccccccacccucagucccc

SEQ ID NO: 550480 - RNA, 21 nt, Human
acuucccccucccucccccua

SEQ ID NO: 550481 - RNA, 18 nt, Human
agccccccaccccacccc

SEQ ID NO: 550482 - RNA, 24 nt, Human
agccccccaccccaccccagaggc

SEQ ID NO: 550483 - RNA, 23 nt, Human
agcccugggcacccacccacccc

SEQ ID NO: 550484 - RNA, 23 nt, Human
aggcacucauggcccccuggagg

SEQ ID NO: 550485 - RNA, 18 nt, Human
agggcuggggcugaggag

SEQ ID NO: 550486 - RNA, 21 nt, Human
agggcuggggcugaggagggc

SEQ ID NO: 550487 - RNA, 23 nt, Human
aggggcagggcaggcagggcugg

SEQ ID NO: 550488 - RNA, 19 nt, Human
agggguacaagaggcagag

SEQ ID NO: 550489 - RNA, 20 nt, Human
agguccccugcccacagccc

SEQ ID NO: 550490 - RNA, 21 nt, Human
auagaaaaguuccuggguguu

SEQ ID NO: 550491 - RNA, 19 nt, Human
auguggggagggaaaaggg

SEQ ID NO: 550492 - RNA, 21 nt, Human
auugucccucccuccccugcu

SEQ ID NO: 550493 - RNA, 20 nt, Human
caccccagaggccccagcug

SEQ ID NO: 550494 - RNA, 22 nt, Human
caccccagaggccccagcuggg

SEQ ID NO: 550495 - RNA, 23 nt, Human
cacccccuucccauccccccacc

SEQ ID NO: 550496 - RNA, 21 nt, Human
caccccucacccuccuccgcc

SEQ ID NO: 550497 - RNA, 23 nt, Human
cacccgccugcccaugggccagu

SEQ ID NO: 550498 - RNA, 19 nt, Human
cacccucaguccccaauac

SEQ ID NO: 550499 - RNA, 21 nt, Human
cacccuccuccgccccccacc

SEQ ID NO: 550500 - RNA, 20 nt, Human
cagccccccaccccacccca

SEQ ID NO: 550501 - RNA, 26 nt, Human
cagccccccaccccaccccagaggcc

SEQ ID NO: 550502 - RNA, 21 nt, Human
cagguccccugcccacagccc

SEQ ID NO: 550503 - RNA, 19 nt, Human
cauccccccacccgccugc

SEQ ID NO: 550504 - RNA, 19 nt, Human
cauggcccccuggaggggc

SEQ ID NO: 550505 - RNA, 22 nt, Human
cauggcccccuggaggggcagg

SEQ ID NO: 550506 - RNA, 23 nt, Human
ccacagagacagggaauagcccc

SEQ ID NO: 550507 - RNA, 23 nt, Human
ccaccccaccccagaggccccag

SEQ ID NO: 550508 - RNA, 21 nt, Human
ccacccccaccauuuuuaaaa

SEQ ID NO: 550509 - RNA, 23 nt, Human
ccagagcuuagaaacccacagag

SEQ ID NO: 550510 - RNA, 22 nt, Human
ccagcggccccucuacuccccc

SEQ ID NO: 550511 - RNA, 22 nt, Human
ccaguccuaggagcagcugggg

SEQ ID NO: 550512 - RNA, 18 nt, Human
cccaauacagaauaaggc

SEQ ID NO: 550513 - RNA, 24 nt, Human
cccacagagacagggaauagcccc

SEQ ID NO: 550514 - RNA, 19 nt, Human
cccaccccaccccagaggc

SEQ ID NO: 550515 - RNA, 23 nt, Human
cccaccccaccccagaggcccca

SEQ ID NO: 550516 - RNA, 21 nt, Human
ccccaccccaccccagaggcc

SEQ ID NO: 550517 - RNA, 21 nt, Human
ccccaccccagaggccccagc

SEQ ID NO: 550518 - RNA, 18 nt, Human
ccccacccucagucccca

SEQ ID NO: 550519 - RNA, 20 nt, Human
ccccacccucaguccccaau

SEQ ID NO: 550520 - RNA, 19 nt, Human
ccccagaauggaggugacc

SEQ ID NO: 550521 - RNA, 26 nt, Human
ccccagaggccccagcugggaggcag

SEQ ID NO: 550522 - RNA, 20 nt, Human
cccccaccauuuuuaaaaaa

SEQ ID NO: 550523 - RNA, 22 nt, Human
ccccccaccccaccccagaggc

SEQ ID NO: 550524 - RNA, 23 nt, Human
ccccccaccccaccccagaggcc

SEQ ID NO: 550525 - RNA, 22 nt, Human
ccccccaccccccaacacaugg

SEQ ID NO: 550526 - RNA, 19 nt, Human
ccccccacccgccugccca

SEQ ID NO: 550527 - RNA, 20 nt, Human
cccccuaccaccaauuugcc

SEQ ID NO: 550528 - RNA, 24 nt, Human
cccccuggaggggcagggcaggca

SEQ ID NO: 550529 - RNA, 21 nt, Human
ccccgucccgucccgcgcccg

SEQ ID NO: 550530 - RNA, 26 nt, Human
ccccuagcccugggcacccacccacc

SEQ ID NO: 550531 - RNA, 20 nt, Human
ccccucccucccccuaccac

SEQ ID NO: 550532 - RNA, 19 nt, Human
ccccucuacuccccccacc

SEQ ID NO: 550533 - RNA, 22 nt, Human
ccccuuaacuucccccucccuc

SEQ ID NO: 550534 - RNA, 20 nt, Human
cccugggcacccacccaccc

SEQ ID NO: 550535 - RNA, 18 nt, Human
ccgccccccaccccccaa

SEQ ID NO: 550536 - RNA, 20 nt, Human
ccgcccucgccgccucaccc

SEQ ID NO: 550537 - RNA, 20 nt, Human
ccgcgcccgucgggccgccc

SEQ ID NO: 550538 - RNA, 21 nt, Human
ccgcgcccgucgggccgcccu

SEQ ID NO: 550539 - RNA, 23 nt, Human
ccgucgggccgcccucgccgccu

SEQ ID NO: 550540 - RNA, 21 nt, Human
ccuaccaccaauuugcccaga

SEQ ID NO: 550541 - RNA, 18 nt, Human
ccuagcccugggcaccca

SEQ ID NO: 550542 - RNA, 18 nt, Human
ccucacccggccucgccu

SEQ ID NO: 550543 - RNA, 21 nt, Human
ccucacccuccuccgcccccc

SEQ ID NO: 550544 - RNA, 21 nt, Human
ccucccucccccuaccaccaa

SEQ ID NO: 550545 - RNA, 21 nt, Human
cgauuccgggccgcggcuccc

SEQ ID NO: 550546 - RNA, 25 nt, Human
cggcucccggcgcccucgcugcccc

SEQ ID NO: 550547 - RNA, 19 nt, Human
cuaggcacucauggccccc

SEQ ID NO: 550548 - RNA, 21 nt, Human
cucacccuccuccgcccccca

SEQ ID NO: 550549 - RNA, 21 nt, Human
cucauggcccccuggaggggc

SEQ ID NO: 550550 - RNA, 23 nt, Human
cucccccuaccaccaauuugccc

SEQ ID NO: 550551 - RNA, 18 nt, Human
cuccgccccccacccccc

SEQ ID NO: 550552 - RNA, 23 nt, Human
cuccuccgccccccaccccccaa

SEQ ID NO: 550553 - RNA, 23 nt, Human
cugggcacccacccacccccacc

SEQ ID NO: 550554 - RNA, 19 nt, Human
cuuccaguuugguuucagg

SEQ ID NO: 550555 - RNA, 24 nt, Human
cuugaccacagccccccaccccac

SEQ ID NO: 550556 - RNA, 25 nt, Human
gaccacagccccccaccccacccca

SEQ ID NO: 550557 - RNA, 24 nt, Human
gagaacagggagggagaccgguac

SEQ ID NO: 550558 - RNA, 20 nt, Human
gagcugcccucaccuccagg

SEQ ID NO: 550559 - RNA, 24 nt, Human
gagggcugggaguggggcagagcg

SEQ ID NO: 550560 - RNA, 24 nt, Human
gcacccccuucccauccccccacc

SEQ ID NO: 550561 - RNA, 21 nt, Human
gccaguccuaggagcagcugg

SEQ ID NO: 550562 - RNA, 26 nt, Human
ggcacccccuucccauccccccaccc

SEQ ID NO: 550563 - RNA, 24 nt, Human
ggcaccccucacccuccuccgccc

SEQ ID NO: 550564 - RNA, 21 nt, Human
ggccccucuacuccccccacc

SEQ ID NO: 550565 - RNA, 22 nt, Human
ggccccucuacuccccccaccc

SEQ ID NO: 550566 - RNA, 18 nt, Human
ggcccggggcgaagcgcc

SEQ ID NO: 550567 - RNA, 21 nt, Human
ggcuugaccacagccccccac

SEQ ID NO: 550568 - RNA, 21 nt, Human
gggaggcagagggggcuucca

SEQ ID NO: 550569 - RNA, 22 nt, Human
gggagggaaaagggaggaggca

SEQ ID NO: 550570 - RNA, 23 nt, Human
gggcccggggcgaagcgccccga

SEQ ID NO: 550571 - RNA, 24 nt, Human
gggcugggaguggggcagagcggg

SEQ ID NO: 550572 - RNA, 19 nt, Human
gggcuuaaggcagcaaaag

SEQ ID NO: 550573 - RNA, 21 nt, Human
ggggcuuaaggcagcaaaaga

SEQ ID NO: 550574 - RNA, 20 nt, Human
gggggugcggggcacacagg

SEQ ID NO: 550575 - RNA, 21 nt, Human
ggguggggagugggagaggga

SEQ ID NO: 550576 - RNA, 18 nt, Human
gguggggagugggagagg

SEQ ID NO: 550577 - RNA, 19 nt, Human
gugcugggguggggagugg

SEQ ID NO: 550578 - RNA, 24 nt, Human
guggggcagagcgggugggucaga

SEQ ID NO: 550579 - RNA, 21 nt, Human
uaacuucccccucccuccccc

SEQ ID NO: 550580 - RNA, 21 nt, Human
uacaaaauguggggagggaaa

SEQ ID NO: 550581 - RNA, 19 nt, Human
uaccaccaauuugcccaga

SEQ ID NO: 550582 - RNA, 25 nt, Human
uagcccugggcacccacccaccccc

SEQ ID NO: 550583 - RNA, 20 nt, Human
uauaaaauugucccucccuc

SEQ ID NO: 550584 - RNA, 22 nt, Human
uccagcggccccucuacucccc

SEQ ID NO: 550585 - RNA, 22 nt, Human
ucccgcgcccgucgggccgccc

SEQ ID NO: 550586 - RNA, 19 nt, Human
ucccggcgcccucgcugcc

SEQ ID NO: 550587 - RNA, 20 nt, Human
ucccggcgcccucgcugccc

SEQ ID NO: 550588 - RNA, 23 nt, Human
uccgccccccaccccccaacaca

SEQ ID NO: 550589 - RNA, 21 nt, Human
ucgccgccucacccggccucg

SEQ ID NO: 550590 - RNA, 19 nt, Human
ugaagggguuggaccggug

SEQ ID NO: 550591 - RNA, 19 nt, Human
ugagaaaccuaggcacuca

SEQ ID NO: 550592 - RNA, 22 nt, Human
ugcccagagcuuagaaacccac

SEQ ID NO: 550593 - RNA, 20 nt, Human
ugcggggcacacaggucccc

SEQ ID NO: 550594 - RNA, 18 nt, Human
ugcugggguggggagugg

SEQ ID NO: 550595 - RNA, 21 nt, Human
ugcugugaccuugugggguau

SEQ ID NO: 550596 - RNA, 23 nt, Human
ugggaggcagagggggcuuccag

SEQ ID NO: 550597 - RNA, 22 nt, Human
ugggaguggggcagagcgggug

SEQ ID NO: 550598 - RNA, 27 nt, Human
ugggcacccacccacccccaccauuuu

SEQ ID NO: 550599 - RNA, 22 nt, Human
ugggcggcaccccucacccucc

SEQ ID NO: 550600 - RNA, 18 nt, Human
uggggagggaaaagggag

SEQ ID NO: 550601 - RNA, 20 nt, Human
uggggagggaaaagggagga

SEQ ID NO: 550602 - RNA, 22 nt, Human
ugggguggggagugggagaggg

SEQ ID NO: 550603 - RNA, 20 nt, Human
uguaauagaaaaguuccugg

SEQ ID NO: 550604 - RNA, 22 nt, Human
uucagggcacccccuucccauc

SEQ ID NO: 550605 - RNA, 21 nt, Human
uucccccucccucccccuacc

SEQ ID NO: 550606 - RNA, 21 nt, Human
uugaccacagccccccacccc

SEQ ID NO: 550607 - RNA, 21 nt, Human
uuucagggcacccccuuccca

SEQ ID NO: 550608 - RNA, 18 nt, Human
aaagucacacccucccuu

SEQ ID NO: 550609 - RNA, 21 nt, Human
aaggauccuuccaggguaucc

SEQ ID NO: 550610 - RNA, 23 nt, Human
agaaaauaaagucacacccuccc

SEQ ID NO: 550611 - RNA, 25 nt, Human
agagggaaucuuuauacuauugcca

SEQ ID NO: 550612 - RNA, 18 nt, Human
agccuucaugaagcagcc

SEQ ID NO: 550613 - RNA, 19 nt, Human
auccagguaaccgccacag

SEQ ID NO: 550614 - RNA, 21 nt, Human
cacacggccacagacuugucc

SEQ ID NO: 550615 - RNA, 21 nt, Human
cagcucagaaacagccuucau

SEQ ID NO: 550616 - RNA, 18 nt, Human
cagggcagagagggaauc

SEQ ID NO: 550617 - RNA, 23 nt, Human
cagggcagagagggaaucuuuau

SEQ ID NO: 550618 - RNA, 19 nt, Human
cauagauggcaagaaaauc

SEQ ID NO: 550619 - RNA, 18 nt, Human
caucaaaauagagacugc

SEQ ID NO: 550620 - RNA, 24 nt, Human
caucaaaauagagacugcuuuuaa

SEQ ID NO: 550621 - RNA, 23 nt, Human
ccaaucaggccagaguuggugga

SEQ ID NO: 550622 - RNA, 20 nt, Human
cccuuucuucccaugacucc

SEQ ID NO: 550623 - RNA, 19 nt, Human
ccuggagaaacaugucuca

SEQ ID NO: 550624 - RNA, 18 nt, Human
ccuucuguucuauccucc

SEQ ID NO: 550625 - RNA, 21 nt, Human
cuccucagcugucagcuccag

SEQ ID NO: 550626 - RNA, 24 nt, Human
cugaauugcgccauagaaaauaaa

SEQ ID NO: 550627 - RNA, 19 nt, Human
gaaacagccuucaugaagc

SEQ ID NO: 550628 - RNA, 19 nt, Human
gccacaguuuggaauagcu

SEQ ID NO: 550629 - RNA, 21 nt, Human
gccacaguuuggaauagcuga

SEQ ID NO: 550630 - RNA, 20 nt, Human
gccauagaaaauaaagucac

SEQ ID NO: 550631 - RNA, 24 nt, Human
gcccuuggucucuccuuuccccag

SEQ ID NO: 550632 - RNA, 22 nt, Human
gccugugugucacuuucaggcc

SEQ ID NO: 550633 - RNA, 20 nt, Human
gcggcuuuggguaauugggg

SEQ ID NO: 550634 - RNA, 22 nt, Human
ggaggggccaucauagauggca

SEQ ID NO: 550635 - RNA, 18 nt, Human
ggaugugaagguggucaa

SEQ ID NO: 550636 - RNA, 25 nt, Human
ggcuggugaaggauccuuccagggu

SEQ ID NO: 550637 - RNA, 23 nt, Human
uaaccgccacaguuuggaauagc

SEQ ID NO: 550638 - RNA, 20 nt, Human
ucaaagcucagcucagaaac

SEQ ID NO: 550639 - RNA, 21 nt, Human
uccagguaaccgccacaguuu

SEQ ID NO: 550640 - RNA, 18 nt, Human
ucccaccuccaccuaccc

SEQ ID NO: 550641 - RNA, 19 nt, Human
ucccaccuccaccuacccu

SEQ ID NO: 550642 - RNA, 19 nt, Human
ucccaccuccaccuacccu

SEQ ID NO: 550643 - RNA, 21 nt, Human
ucuaggcuagagaaugagggc

SEQ ID NO: 550644 - RNA, 24 nt, Human
ucuguucuauccucccuuucuucc

SEQ ID NO: 550645 - RNA, 23 nt, Human
ugaaauggaugugaaggugguca

SEQ ID NO: 550646 - RNA, 21 nt, Human
ugacuccucagcugucagcuc

SEQ ID NO: 550647 - RNA, 20 nt, Human
ugaguccucuucccugacuc

SEQ ID NO: 550648 - RNA, 23 nt, Human
ugauuccaucucuaucuuuccca

SEQ ID NO: 550649 - RNA, 22 nt, Human
uggcaagaaaaucaaauuugca

SEQ ID NO: 550650 - RNA, 24 nt, Human
uggcaagaaaaucaaauuugcacu

SEQ ID NO: 550651 - RNA, 22 nt, Human
uguucuauccucccuuucuucc

SEQ ID NO: 550652 - RNA, 24 nt, Human
uguucuauccucccuuucuuccca

SEQ ID NO: 550653 - RNA, 25 nt, Human
uucauggccuucuguucuauccucc

SEQ ID NO: 550654 - RNA, 24 nt, Human
uucuauccucccuuucuucccaug

SEQ ID NO: 550655 - RNA, 22 nt, Human
uugaaauuucuguccacuggug

SEQ ID NO: 550656 - RNA, 21 nt, Human
uugaaguuuaguuuuaucuug

SEQ ID NO: 550657 - RNA, 26 nt, Human
uuuccagucucauccgccacuacuuc

SEQ ID NO: 550658 - RNA, 23 nt, Human
uuucuaggcuagagaaugagggc

SEQ ID NO: 550659 - RNA, 20 nt, Human
uuuuuuuuuuuugcaggccu

SEQ ID NO: 550660 - RNA, 18 nt, Human
uuuuuuuuuuuuuuuuug

SEQ ID NO: 550661 - RNA, 21 nt, Human
uuuuuuuuuuuuuuuuugcag

SEQ ID NO: 550662 - RNA, 22 nt, Human
uuuuuuuuuuuuuuuuugcagg

SEQ ID NO: 550663 - RNA, 18 nt, Human
acaggguuucaccauguu

SEQ ID NO: 550664 - RNA, 21 nt, Human
acaggguuucaccauguuggc

SEQ ID NO: 550665 - RNA, 24 nt, Human
acaggguuucaccauguuggccag

SEQ ID NO: 550666 - RNA, 24 nt, Human
accauguuggccaggauggucucg

SEQ ID NO: 550667 - RNA, 21 nt, Human
accuugugaucugcccgaugg

SEQ ID NO: 550668 - RNA, 22 nt, Human
agaaggguauccagccccaggc

SEQ ID NO: 550669 - RNA, 21 nt, Human
caagcccccacccaagacacu

SEQ ID NO: 550670 - RNA, 18 nt, Human
caccauguuggccaggau

SEQ ID NO: 550671 - RNA, 22 nt, Human
caccauguuggccaggaugguc

SEQ ID NO: 550672 - RNA, 24 nt, Human
caccauguuggccaggauggucuc

SEQ ID NO: 550673 - RNA, 24 nt, Human
caggguuucaccauguuggccagg

SEQ ID NO: 550674 - RNA, 24 nt, Human
caguagagacaggguuucaccaug

SEQ ID NO: 550675 - RNA, 26 nt, Human
caguagagacaggguuucaccauguu

SEQ ID NO: 550676 - RNA, 21 nt, Human
ccaagcccccacccaagacac

SEQ ID NO: 550677 - RNA, 19 nt, Human
ccacccaagacacugccug

SEQ ID NO: 550678 - RNA, 22 nt, Human
ccagccccaggcaaugccagcc

SEQ ID NO: 550679 - RNA, 18 nt, Human
ccuuuaacgaggugggag

SEQ ID NO: 550680 - RNA, 23 nt, Human
cgugagcgcccucgugccgaauu

SEQ ID NO: 550681 - RNA, 21 nt, Human
cucgugccgaauuacgcgacc

SEQ ID NO: 550682 - RNA, 19 nt, Human
gaccuugugaucugcccga

SEQ ID NO: 550683 - RNA, 25 nt, Human
gccagccuugggccuuugaagcuga

SEQ ID NO: 550684 - RNA, 21 nt, Human
gcugagcuuguacucaaccug

SEQ ID NO: 550685 - RNA, 22 nt, Human
ggguuucaccauguuggccagg

SEQ ID NO: 550686 - RNA, 24 nt, Human
gguuucaccauguuggccaggaug

SEQ ID NO: 550687 - RNA, 24 nt, Human
uaauuuuuguauuuucaguagaga

SEQ ID NO: 550688 - RNA, 21 nt, Human
uagagacaggguuucaccaug

SEQ ID NO: 550689 - RNA, 22 nt, Human
uagagacaggguuucaccaugu

SEQ ID NO: 550690 - RNA, 24 nt, Human
ucaccauguuggccaggauggucu

SEQ ID NO: 550691 - RNA, 24 nt, Human
ucaguagagacaggguuucaccau

SEQ ID NO: 550692 - RNA, 25 nt, Human
ugaccaagcccccacccaagacacu

SEQ ID NO: 550693 - RNA, 18 nt, Human
ugagcgcccucgugccga

SEQ ID NO: 550694 - RNA, 21 nt, Human
uggccaggauggucucgaucu

SEQ ID NO: 550695 - RNA, 19 nt, Human
ugggccuuugaagcugagc

SEQ ID NO: 550696 - RNA, 23 nt, Human
uugaagcugagcuuguacucaac

SEQ ID NO: 550697 - RNA, 19 nt, Human
uuucaccauguuggccagg

SEQ ID NO: 550698 - RNA, 20 nt, Human
uuucaccauguuggccagga

SEQ ID NO: 550699 - RNA, 24 nt, Human
uuuucaguagagacaggguuucac

SEQ ID NO: 550700 - RNA, 22 nt, Human
uuuuguauuuucaguagagaca

SEQ ID NO: 550701 - RNA, 20 nt, Human
uuuuuguauuuucaguagag

SEQ ID NO: 550702 - RNA, 23 nt, Human
uuuuuuuuuuuugagagggaaau

SEQ ID NO: 550703 - RNA, 25 nt, Human
uuuuuuuuuuuugagagggaaauca

SEQ ID NO: 550704 - RNA, 18 nt, Human
uuuuuuuuuuuuuuuuug

SEQ ID NO: 550705 - RNA, 24 nt, Human
uuuuuuuuuuuuuuuuugagaggg

SEQ ID NO: 550706 - RNA, 21 nt, Human
aaaacacaaauaccaaacuuu

SEQ ID NO: 550707 - RNA, 22 nt, Human
aaacuguacaaaagcaaacaaa

SEQ ID NO: 550708 - RNA, 18 nt, Human
aaagggucuggauuuggg

SEQ ID NO: 550709 - RNA, 24 nt, Human
aacacauauucaacaucuccaccu

SEQ ID NO: 550710 - RNA, 24 nt, Human
aaccuugacuaauacaggaacuaa

SEQ ID NO: 550711 - RNA, 23 nt, Human
aacugggucacaagaugcccagc

SEQ ID NO: 550712 - RNA, 23 nt, Human
aacuguguuucccagcucccuga

SEQ ID NO: 550713 - RNA, 18 nt, Human
aagcaaacaaaaaauucc

SEQ ID NO: 550714 - RNA, 23 nt, Human
aauaaccaccgccccccugcccc

SEQ ID NO: 550715 - RNA, 24 nt, Human
acaacagacucaacagacugagcc

SEQ ID NO: 550716 - RNA, 21 nt, Human
acacccaaaaaucaaggucau

SEQ ID NO: 550717 - RNA, 21 nt, Human
acaggcagauuagcuuuugaa

SEQ ID NO: 550718 - RNA, 19 nt, Human
accuaguuaucaucaacag

SEQ ID NO: 550719 - RNA, 23 nt, Human
acugaggccugggagaaaagugg

SEQ ID NO: 550720 - RNA, 21 nt, Human
acuguacaaaagcaaacaaaa

SEQ ID NO: 550721 - RNA, 24 nt, Human
agaauucuuccugccuaauagccu

SEQ ID NO: 550722 - RNA, 23 nt, Human
agcaaacaaaaaauuccacugag

SEQ ID NO: 550723 - RNA, 19 nt, Human
agccugcugccaucagacu

SEQ ID NO: 550724 - RNA, 26 nt, Human
agccuuuggacaggaccaucagcuuu

SEQ ID NO: 550725 - RNA, 19 nt, Human
agcucccugaugugcuccu

SEQ ID NO: 550726 - RNA, 19 nt, Human
aggaaggccuagggaugug

SEQ ID NO: 550727 - RNA, 20 nt, Human
aggaauccucccuccagguc

SEQ ID NO: 550728 - RNA, 21 nt, Human
aggccagaacugagagagaga

SEQ ID NO: 550729 - RNA, 21 nt, Human
aggccugaauagaacaaaaga

SEQ ID NO: 550730 - RNA, 21 nt, Human
agggcaggaugaggcagagaa

SEQ ID NO: 550731 - RNA, 19 nt, Human
agggugcugggcuggaugg

SEQ ID NO: 550732 - RNA, 24 nt, Human
aguaagaagucagggacugggggc

SEQ ID NO: 550733 - RNA, 22 nt, Human
auagaacaaaagagcuaacucu

SEQ ID NO: 550734 - RNA, 23 nt, Human
auagaacaaaagagcuaacucug

SEQ ID NO: 550735 - RNA, 20 nt, Human
aucagcuuuuuccuugccuu

SEQ ID NO: 550736 - RNA, 23 nt, Human
caaaucaguagacugaguaaugc

SEQ ID NO: 550737 - RNA, 21 nt, Human
cacuuuuucuagcuggaccuc

SEQ ID NO: 550738 - RNA, 18 nt, Human
cagcucccugaugugcuc

SEQ ID NO: 550739 - RNA, 19 nt, Human
caucagacuggaacuaaac

SEQ ID NO: 550740 - RNA, 18 nt, Human
caugggguugggccaggc

SEQ ID NO: 550741 - RNA, 22 nt, Human
ccaaacuauguuguaaacagca

SEQ ID NO: 550742 - RNA, 19 nt, Human
ccaccgccccccugcccca

SEQ ID NO: 550743 - RNA, 23 nt, Human
ccucucacaggcaaagcuggagu

SEQ ID NO: 550744 - RNA, 26 nt, Human
ccucucacaggcaaagcuggaguuug

SEQ ID NO: 550745 - RNA, 26 nt, Human
cucuggaaaaccuugacuaauacagg

SEQ ID NO: 550746 - RNA, 22 nt, Human
cugaaggucugggccaagguca

SEQ ID NO: 550747 - RNA, 20 nt, Human
cugaguguuccugugagggu

SEQ ID NO: 550748 - RNA, 20 nt, Human
cugcaauacacacccaaaaa

SEQ ID NO: 550749 - RNA, 18 nt, Human
cugggaacacuccuuccc

SEQ ID NO: 550750 - RNA, 19 nt, Human
cugggaacacuccuucccc

SEQ ID NO: 550751 - RNA, 21 nt, Human
cuuuggacaggaccaucagcu

SEQ ID NO: 550752 - RNA, 19 nt, Human
gaccagggagcaggcaagc

SEQ ID NO: 550753 - RNA, 21 nt, Human
gagaacuucugacaaacagaa

SEQ ID NO: 550754 - RNA, 20 nt, Human
gagggcaggaugaggcagag

SEQ ID NO: 550755 - RNA, 21 nt, Human
gcagagaaagugucuucuaaa

SEQ ID NO: 550756 - RNA, 18 nt, Human
ggaaaaaaaagcuucuac

SEQ ID NO: 550757 - RNA, 23 nt, Human
ggaacuaacggagaacuucugac

SEQ ID NO: 550758 - RNA, 19 nt, Human
ggacaggaccaucagcuuu

SEQ ID NO: 550759 - RNA, 23 nt, Human
gggcagaggccagaacugagaga

SEQ ID NO: 550760 - RNA, 22 nt, Human
guacaaauagaaaccacaaaag

SEQ ID NO: 550761 - RNA, 21 nt, Human
uaaccaccgccccccugcccc

SEQ ID NO: 550762 - RNA, 22 nt, Human
uaaccaccgccccccugcccca

SEQ ID NO: 550763 - RNA, 24 nt, Human
uaagacagucacaacagacucaac

SEQ ID NO: 550764 - RNA, 18 nt, Human
uacguuggugguuaaaac

SEQ ID NO: 550765 - RNA, 23 nt, Human
uagagagcugacuuuggggggca

SEQ ID NO: 550766 - RNA, 19 nt, Human
uagcuuuugaaagcaugua

SEQ ID NO: 550767 - RNA, 18 nt, Human
uauugauucuguuucucu

SEQ ID NO: 550768 - RNA, 18 nt, Human
ucaugggacuccaucuug

SEQ ID NO: 550769 - RNA, 20 nt, Human
uccaugguuaggccagaucg

SEQ ID NO: 550770 - RNA, 22 nt, Human
ucucaugggacuccaucuugcu

SEQ ID NO: 550771 - RNA, 23 nt, Human
ucugcaacuguguuucccagcuc

SEQ ID NO: 550772 - RNA, 21 nt, Human
ucugggccaaggucagagggc

SEQ ID NO: 550773 - RNA, 21 nt, Human
ucuugacuaaagcuugagggc

SEQ ID NO: 550774 - RNA, 18 nt, Human
ugaaaucaauacucucca

SEQ ID NO: 550775 - RNA, 18 nt, Human
ugaagaaagagggaaaga

SEQ ID NO: 550776 - RNA, 18 nt, Human
ugaauagaacaaaagagc

SEQ ID NO: 550777 - RNA, 24 nt, Human
ugacuaauacaggaacuaacggag

SEQ ID NO: 550778 - RNA, 20 nt, Human
ugaguguuccugugagggug

SEQ ID NO: 550779 - RNA, 22 nt, Human
ugcccuaagagaauucuuccug

SEQ ID NO: 550780 - RNA, 18 nt, Human
uggaguuugcaagcuggg

SEQ ID NO: 550781 - RNA, 23 nt, Human
uggauggugaugggagcagguaa

SEQ ID NO: 550782 - RNA, 20 nt, Human
ugggagcagguaauguggca

SEQ ID NO: 550783 - RNA, 21 nt, Human
uggggaaaaaaaagcuucuac

SEQ ID NO: 550784 - RNA, 21 nt, Human
uggggggcagaggccagaacu

SEQ ID NO: 550785 - RNA, 19 nt, Human
ugguacaaauagaaaccac

SEQ ID NO: 550786 - RNA, 23 nt, Human
uggucuuguggggaaaaaaaagc

SEQ ID NO: 550787 - RNA, 22 nt, Human
uggugaugggagcagguaaugu

SEQ ID NO: 550788 - RNA, 24 nt, Human
uguacaaaagcaaacaaaaaauuc

SEQ ID NO: 550789 - RNA, 19 nt, Human
ugucuucuaaauaaccccu

SEQ ID NO: 550790 - RNA, 20 nt, Human
uguggggaaaaaaaagcuuc

SEQ ID NO: 550791 - RNA, 22 nt, Human
uguguauucaucugcaaacuga

SEQ ID NO: 550792 - RNA, 20 nt, Human
uuaacauucaaaucaguaga

SEQ ID NO: 550793 - RNA, 18 nt, Human
uugauucuguuucucugg

SEQ ID NO: 550794 - RNA, 18 nt, Human
uuggacaggaccaucagc

SEQ ID NO: 550795 - RNA, 21 nt, Human
uuggucaaacauuauucugag

SEQ ID NO: 550796 - RNA, 21 nt, Human
uuuacucaucagccuuuccca

SEQ ID NO: 550797 - RNA, 21 nt, Human
uuuccaggaauccucccucca

SEQ ID NO: 550798 - RNA, 20 nt, Human
acagcuggggccaccagaac

SEQ ID NO: 550799 - RNA, 23 nt, Human
accagaacagaggggccgcccuc

SEQ ID NO: 550800 - RNA, 22 nt, Human
aggaauuuaaaaagucugaagc

SEQ ID NO: 550801 - RNA, 21 nt, Human
aggcagcucaaggcacuuggu

SEQ ID NO: 550802 - RNA, 23 nt, Human
cacccucugaacuccguccuccc

SEQ ID NO: 550803 - RNA, 20 nt, Human
cacgcaagcaaaauguacga

SEQ ID NO: 550804 - RNA, 21 nt, Human
cacgcaagcaaaauguacgau

SEQ ID NO: 550805 - RNA, 18 nt, Human
cagacaucaugaccguaa

SEQ ID NO: 550806 - RNA, 24 nt, Human
cagcuggggccaccagaacagagg

SEQ ID NO: 550807 - RNA, 21 nt, Human
ccagcaucuucccaguucccu

SEQ ID NO: 550808 - RNA, 18 nt, Human
ccuggcuccgggggcggu

SEQ ID NO: 550809 - RNA, 18 nt, Human
cgacagcgaggcggugac

SEQ ID NO: 550810 - RNA, 21 nt, Human
cuccucagcaucccccaccuc

SEQ ID NO: 550811 - RNA, 19 nt, Human
cuccuuugcagacaucaug

SEQ ID NO: 550812 - RNA, 21 nt, Human
cucggcccuggcuccgggggc

SEQ ID NO: 550813 - RNA, 24 nt, Human
cugacauuaagcaggaauuuaaaa

SEQ ID NO: 550814 - RNA, 24 nt, Human
cuggcuccgggggcgguacggaca

SEQ ID NO: 550815 - RNA, 19 nt, Human
cugggggugcuacucgcgc

SEQ ID NO: 550816 - RNA, 24 nt, Human
cuggucucccugcaaagccgggag

SEQ ID NO: 550817 - RNA, 23 nt, Human
gcaagcaaaauguacgauucccu

SEQ ID NO: 550818 - RNA, 19 nt, Human
gcuguacuuggugcaucuc

SEQ ID NO: 550819 - RNA, 19 nt, Human
gggcugcagagcaggcagc

SEQ ID NO: 550820 - RNA, 18 nt, Human
gggcuggcuccugcugcc

SEQ ID NO: 550821 - RNA, 18 nt, Human
guagacugacauuaagca

SEQ ID NO: 550822 - RNA, 18 nt, Human
uacgauucccuccucucc

SEQ ID NO: 550823 - RNA, 24 nt, Human
uagcugucccagcacgcaagcaaa

SEQ ID NO: 550824 - RNA, 21 nt, Human
ucaagcucuaauuguggugac

SEQ ID NO: 550825 - RNA, 25 nt, Human
ucagcaucccccaccucucaauucc

SEQ ID NO: 550826 - RNA, 20 nt, Human
ucccagcacgcaagcaaaau

SEQ ID NO: 550827 - RNA, 20 nt, Human
uccucucccuuccugaaagg

SEQ ID NO: 550828 - RNA, 21 nt, Human
uccuggggucagcacuguccu

SEQ ID NO: 550829 - RNA, 23 nt, Human
ugaccaggcccucagucacagcu

SEQ ID NO: 550830 - RNA, 21 nt, Human
ugaucaaugagaaaucucaua

SEQ ID NO: 550831 - RNA, 21 nt, Human
ugugggcugcagagcaggcag

SEQ ID NO: 550832 - RNA, 23 nt, Human
uucccuccucucccuuccugaaa

SEQ ID NO: 550833 - RNA, 19 nt, Human
aaggcuuuccacagucacu

SEQ ID NO: 550834 - RNA, 19 nt, Human
aguucagaauucuugaagu

SEQ ID NO: 550835 - RNA, 20 nt, Human
cacuccgguccggaggcagg

SEQ ID NO: 550836 - RNA, 20 nt, Human
caggcgacgacccaagggga

SEQ ID NO: 550837 - RNA, 18 nt, Human
ccagggucagaggucugc

SEQ ID NO: 550838 - RNA, 27 nt, Human
cccaacacccggccucgugccgguucc

SEQ ID NO: 550839 - RNA, 19 nt, Human
cccacaccgcggccagccg

SEQ ID NO: 550840 - RNA, 21 nt, Human
cccacaccgcggccagccgga

SEQ ID NO: 550841 - RNA, 24 nt, Human
cccacaccgcggccagccggaccc

SEQ ID NO: 550842 - RNA, 22 nt, Human
ccccaacacccggccucgugcc

SEQ ID NO: 550843 - RNA, 22 nt, Human
ccggaggcaggcgacucuuucc

SEQ ID NO: 550844 - RNA, 21 nt, Human
cugcacuccgguccggaggca

SEQ ID NO: 550845 - RNA, 19 nt, Human
gacgacccaaggggacggu

SEQ ID NO: 550846 - RNA, 19 nt, Human
gguccggaggcaggcgacu

SEQ ID NO: 550847 - RNA, 18 nt, Human
guucagaauucuugaagu

SEQ ID NO: 550848 - RNA, 19 nt, Human
ucuacccacaccgcggcca

SEQ ID NO: 550849 - RNA, 19 nt, Human
ugaccucuacccacaccgc

SEQ ID NO: 550850 - RNA, 20 nt, Human
uuuuuuuuuuuuuuuuuugg

SEQ ID NO: 550851 - RNA, 23 nt, Human
uuuuuuuuuuuuuuuuuuguuuu

SEQ ID NO: 550852 - RNA, 25 nt, Human
uuuuuuuuuuuuuuuuuuguuuuaa

SEQ ID NO: 550853 - RNA, 21 nt, Human
aaaauaaauagccuacccuau

SEQ ID NO: 550854 - RNA, 22 nt, Human
aaacaaaaaugaaacuggguau

SEQ ID NO: 550855 - RNA, 23 nt, Human
aaaguguuccccaaauuuuauuu

SEQ ID NO: 550856 - RNA, 23 nt, Human
aacaacccaaucaaaauagcaau

SEQ ID NO: 550857 - RNA, 20 nt, Human
aacacagcaaaaccuugucu

SEQ ID NO: 550858 - RNA, 21 nt, Human
aacacagcaaaaccuugucuc

SEQ ID NO: 550859 - RNA, 22 nt, Human
aaccccacuuuacuacuaaugu

SEQ ID NO: 550860 - RNA, 22 nt, Human
aacccuaaauguacugaaaaau

SEQ ID NO: 550861 - RNA, 25 nt, Human
aagaagaaguauacagcaguguaaa

SEQ ID NO: 550862 - RNA, 20 nt, Human
aagcauaaaacgggcaacaa

SEQ ID NO: 550863 - RNA, 23 nt, Human
aaguguuccccaaauuuuauuua

SEQ ID NO: 550864 - RNA, 23 nt, Human
acacagaagaagaaguauacagc

SEQ ID NO: 550865 - RNA, 21 nt, Human
acagagaaagcaugaaagaua

SEQ ID NO: 550866 - RNA, 20 nt, Human
acccuauuacuauacacauc

SEQ ID NO: 550867 - RNA, 23 nt, Human
agaaacaggcacauaucagcuug

SEQ ID NO: 550868 - RNA, 18 nt, Human
agagaaagcaugaaagau

SEQ ID NO: 550869 - RNA, 24 nt, Human
agcuacuugggaggcugagguggg

SEQ ID NO: 550870 - RNA, 24 nt, Human
agcuugggcaacacagcaaaaccu

SEQ ID NO: 550871 - RNA, 19 nt, Human
aggcugaggugggaagauc

SEQ ID NO: 550872 - RNA, 20 nt, Human
aguauuauuuauucuaaggc

SEQ ID NO: 550873 - RNA, 18 nt, Human
aguuccagaauuguggga

SEQ ID NO: 550874 - RNA, 26 nt, Human
auaaauaaaccccacuuuacuacuaa

SEQ ID NO: 550875 - RNA, 22 nt, Human
auguaaagagggcacgauuuug

SEQ ID NO: 550876 - RNA, 26 nt, Human
caaaaacaacccaaucaaaauagcaa

SEQ ID NO: 550877 - RNA, 19 nt, Human
caaaauagcaauauacuuc

SEQ ID NO: 550878 - RNA, 22 nt, Human
caacacagcaaaaccuugucuc

SEQ ID NO: 550879 - RNA, 24 nt, Human
caacacagcaaaaccuugucucua

SEQ ID NO: 550880 - RNA, 18 nt, Human
caacccaaucaaaauagc

SEQ ID NO: 550881 - RNA, 23 nt, Human
caaguuccagcuugggcaacaca

SEQ ID NO: 550882 - RNA, 27 nt, Human
cacagcaaaaccuugucucuaaaaaaa

SEQ ID NO: 550883 - RNA, 18 nt, Human
cacauaucagcuuguuuu

SEQ ID NO: 550884 - RNA, 23 nt, Human
caccuguauucccagcuacuugg

SEQ ID NO: 550885 - RNA, 24 nt, Human
caccuguauucccagcuacuuggg

SEQ ID NO: 550886 - RNA, 18 nt, Human
cagcaaaaccuugucucu

SEQ ID NO: 550887 - RNA, 21 nt, Human
cagcuacuugggaggcugagg

SEQ ID NO: 550888 - RNA, 24 nt, Human
cagcuacuugggaggcugaggugg

SEQ ID NO: 550889 - RNA, 23 nt, Human
cauuucaacauguuauaccugau

SEQ ID NO: 550890 - RNA, 20 nt, Human
ccaccuccgggccgccuccc

SEQ ID NO: 550891 - RNA, 23 nt, Human
ccaccuccgggccgccucccagg

SEQ ID NO: 550892 - RNA, 22 nt, Human
ccacuaaugaaaaccucccaaa

SEQ ID NO: 550893 - RNA, 23 nt, Human
ccaggcccgccucggcccuccug

SEQ ID NO: 550894 - RNA, 21 nt, Human
cccgcgccggcagcccggggc

SEQ ID NO: 550895 - RNA, 21 nt, Human
ccgccucccaggcccgccucg

SEQ ID NO: 550896 - RNA, 21 nt, Human
ccucccaggcccgccucggcc

SEQ ID NO: 550897 - RNA, 21 nt, Human
ccuccgggccgccucccaggc

SEQ ID NO: 550898 - RNA, 19 nt, Human
ccucucagcgaucgccacc

SEQ ID NO: 550899 - RNA, 21 nt, Human
ccuguauucccagcuacuugg

SEQ ID NO: 550900 - RNA, 22 nt, Human
cgcccgcgccggcagcccgggg

SEQ ID NO: 550901 - RNA, 22 nt, Human
cgccuccauuguccagaaacag

SEQ ID NO: 550902 - RNA, 26 nt, Human
cuaaauccagcaacccuaaauguacu

SEQ ID NO: 550903 - RNA, 25 nt, Human
cucucagcgaucgccaccucgcgac

SEQ ID NO: 550904 - RNA, 20 nt, Human
cuguaccaggccuuagggac

SEQ ID NO: 550905 - RNA, 21 nt, Human
cuguauucccagcuacuuggg

SEQ ID NO: 550906 - RNA, 23 nt, Human
gaaagauaaagcacguaugaaca

SEQ ID NO: 550907 - RNA, 19 nt, Human
gagggcacgauuuugaggu

SEQ ID NO: 550908 - RNA, 20 nt, Human
gauaaaauacaagacuccca

SEQ ID NO: 550909 - RNA, 24 nt, Human
gcgccggcagcccggggcucgugc

SEQ ID NO: 550910 - RNA, 24 nt, Human
ggaaaaauuugugugugugugugu

SEQ ID NO: 550911 - RNA, 23 nt, Human
gggccgccucccaggcccgccuc

SEQ ID NO: 550912 - RNA, 20 nt, Human
guggacgugccgcggcgccc

SEQ ID NO: 550913 - RNA, 20 nt, Human
uaacugacuuucaaaugauu

SEQ ID NO: 550914 - RNA, 18 nt, Human
uacacacaaaaacaaccc

SEQ ID NO: 550915 - RNA, 22 nt, Human
uacacaucaagcauaaaacggg

SEQ ID NO: 550916 - RNA, 23 nt, Human
uauaaguauuuuccaaauauucc

SEQ ID NO: 550917 - RNA, 24 nt, Human
uauacagcaguguaaacugacauu

SEQ ID NO: 550918 - RNA, 21 nt, Human
uauaguuccagaauuguggga

SEQ ID NO: 550919 - RNA, 20 nt, Human
uauguaaagagggcacgauu

SEQ ID NO: 550920 - RNA, 20 nt, Human
uauuacacacugaaguauuu

SEQ ID NO: 550921 - RNA, 23 nt, Human
ucaaaauagcaauauacuucuaa

SEQ ID NO: 550922 - RNA, 23 nt, Human
ucauauaugaauuugauaauccu

SEQ ID NO: 550923 - RNA, 23 nt, Human
uccacuaaugaaaaccucccaaa

SEQ ID NO: 550924 - RNA, 20 nt, Human
uccagcaacccuaaauguac

SEQ ID NO: 550925 - RNA, 21 nt, Human
ucccaggcccgccucggcccu

SEQ ID NO: 550926 - RNA, 26 nt, Human
ucuuaaccacuauauaaauaaacccc

SEQ ID NO: 550927 - RNA, 25 nt, Human
ugaaagauaaagcacguaugaacaa

SEQ ID NO: 550928 - RNA, 23 nt, Human
ugaagcccgugcgggccggcccc

SEQ ID NO: 550929 - RNA, 21 nt, Human
ugagaauaaauauauaaucua

SEQ ID NO: 550930 - RNA, 21 nt, Human
ugaggugggaagaucacuuca

SEQ ID NO: 550931 - RNA, 20 nt, Human
ugggaggcugaggugggaag

SEQ ID NO: 550932 - RNA, 24 nt, Human
ugggaggcugaggugggaagauca

SEQ ID NO: 550933 - RNA, 19 nt, Human
ugggcaacacagcaaaacc

SEQ ID NO: 550934 - RNA, 22 nt, Human
ugguggcagacaccuguauucc

SEQ ID NO: 550935 - RNA, 21 nt, Human
uguguguguguguguguacag

SEQ ID NO: 550936 - RNA, 18 nt, Human
ugugugugugugugugug

SEQ ID NO: 550937 - RNA, 19 nt, Human
ugugugugugugugugugu

SEQ ID NO: 550938 - RNA, 20 nt, Human
ugugugugugugugugugua

SEQ ID NO: 550939 - RNA, 18 nt, Human
uuaaaugcuugucacauu

SEQ ID NO: 550940 - RNA, 23 nt, Human
uuagaaaucuccugugccuuuga

SEQ ID NO: 550941 - RNA, 22 nt, Human
uuagauuggaacuugaaaguau

SEQ ID NO: 550942 - RNA, 20 nt, Human
uucacuuuuaucauauauga

SEQ ID NO: 550943 - RNA, 25 nt, Human
uugggaggcugaggugggaagauca

SEQ ID NO: 550944 - RNA, 18 nt, Human
uuuagggagacaaaggaa

SEQ ID NO: 550945 - RNA, 23 nt, Human
aaaacuauggaaacuuuggauaa

SEQ ID NO: 550946 - RNA, 20 nt, Human
aaagaaaaaaaaaaaagccu

SEQ ID NO: 550947 - RNA, 24 nt, Human
aacaccuauucaucuuuuuaaagc

SEQ ID NO: 550948 - RNA, 20 nt, Human
aaccguguucuucagucugg

SEQ ID NO: 550949 - RNA, 21 nt, Human
aacgcugggguccgugacagg

SEQ ID NO: 550950 - RNA, 18 nt, Human
aagaagcagaaaggcccc

SEQ ID NO: 550951 - RNA, 21 nt, Human
aagaauccaaaaaaauaccac

SEQ ID NO: 550952 - RNA, 24 nt, Human
aagcaaaacagccuuaacauccau

SEQ ID NO: 550953 - RNA, 22 nt, Human
aagcacauacgacacaggaaac

SEQ ID NO: 550954 - RNA, 20 nt, Human
aagcccaauaugcaugaaug

SEQ ID NO: 550955 - RNA, 21 nt, Human
aaguauguuuaaguuacacau

SEQ ID NO: 550956 - RNA, 23 nt, Human
aaguauguuuaaguuacacauua

SEQ ID NO: 550957 - RNA, 23 nt, Human
aaguuucuggcaaugucaccuuu

SEQ ID NO: 550958 - RNA, 23 nt, Human
aauguccucaaaucucugcaauu

SEQ ID NO: 550959 - RNA, 21 nt, Human
acaauauauacuacaaacccc

SEQ ID NO: 550960 - RNA, 23 nt, Human
acacaggaaacaucccuaagucc

SEQ ID NO: 550961 - RNA, 22 nt, Human
accagcucccauuucuuuuucu

SEQ ID NO: 550962 - RNA, 20 nt, Human
acuacaaaccccuuagucug

SEQ ID NO: 550963 - RNA, 20 nt, Human
acugaaaauaccaacagaau

SEQ ID NO: 550964 - RNA, 24 nt, Human
acugaaaucugcuucccugugacu

SEQ ID NO: 550965 - RNA, 19 nt, Human
acugggcuagguuggguug

SEQ ID NO: 550966 - RNA, 22 nt, Human
agaaaggcccccuuuugguucu

SEQ ID NO: 550967 - RNA, 23 nt, Human
agaggccucucacacccucacuu

SEQ ID NO: 550968 - RNA, 22 nt, Human
agagguagcuggcuaagaagca

SEQ ID NO: 550969 - RNA, 24 nt, Human
agcaaaacagccuuaacauccagu

SEQ ID NO: 550970 - RNA, 20 nt, Human
aggcgcuggcggcugggacu

SEQ ID NO: 550971 - RNA, 21 nt, Human
auacaacuauaacaagacucu

SEQ ID NO: 550972 - RNA, 21 nt, Human
auccaaaaaaauaccacuaug

SEQ ID NO: 550973 - RNA, 20 nt, Human
augccaguuuucccuucuuu

SEQ ID NO: 550974 - RNA, 20 nt, Human
auggaucucuucugccuaca

SEQ ID NO: 550975 - RNA, 21 nt, Human
caaaauaaaaauaauguccuc

SEQ ID NO: 550976 - RNA, 18 nt, Human
cacacaaggcccugugug

SEQ ID NO: 550977 - RNA, 18 nt, Human
cacaguacacagugugaa

SEQ ID NO: 550978 - RNA, 18 nt, Human
caccaacccaggcccaga

SEQ ID NO: 550979 - RNA, 19 nt, Human
cacccgggacaacuuccag

SEQ ID NO: 550980 - RNA, 20 nt, Human
cacccgggacaacuuccaga

SEQ ID NO: 550981 - RNA, 27 nt, Human
caccucguccucucgacccgggcucca

SEQ ID NO: 550982 - RNA, 19 nt, Human
cagccacuuuaucaucuua

SEQ ID NO: 550983 - RNA, 22 nt, Human
cagcggcaccucguccucucga

SEQ ID NO: 550984 - RNA, 22 nt, Human
cagcggcaccucguccucucga

SEQ ID NO: 550985 - RNA, 20 nt, Human
cagcucccauuucuuuuucu

SEQ ID NO: 550986 - RNA, 26 nt, Human
caucagagagcucugagaugccuuag

SEQ ID NO: 550987 - RNA, 21 nt, Human
caucccuaaguccucccuacc

SEQ ID NO: 550988 - RNA, 20 nt, Human
ccacauuuuuagacaaacac

SEQ ID NO: 550989 - RNA, 25 nt, Human
ccaggcagcggcaccucguccucuc

SEQ ID NO: 550990 - RNA, 20 nt, Human
cccaaccccaaaugccuuac

SEQ ID NO: 550991 - RNA, 23 nt, Human
ccgacggcagcggaggauucucc

SEQ ID NO: 550992 - RNA, 22 nt, Human
ccuccugagaacaccuauucau

SEQ ID NO: 550993 - RNA, 18 nt, Human
ccucucacacccucacuu

SEQ ID NO: 550994 - RNA, 18 nt, Human
ccugacuaggcugugaac

SEQ ID NO: 550995 - RNA, 23 nt, Human
ccugucuguccucuggcacuggg

SEQ ID NO: 550996 - RNA, 19 nt, Human
ccugugugaccagcuccca

SEQ ID NO: 550997 - RNA, 19 nt, Human
ccuuaucaccuuauuaaca

SEQ ID NO: 550998 - RNA, 18 nt, Human
cgacccgggcuccagcgg

SEQ ID NO: 550999 - RNA, 21 nt, Human
cgacccgggcuccagcggcga

SEQ ID NO: 551000 - RNA, 20 nt, Human
cggggagaaaaaaauuaaaa

SEQ ID NO: 551001 - RNA, 23 nt, Human
cggggagaaaaaaauuaaaaacc

SEQ ID NO: 551002 - RNA, 26 nt, Human
cuaagcccaauaugcaugaaugcuaa

SEQ ID NO: 551003 - RNA, 19 nt, Human
cucuaucuuauuggcuagg

SEQ ID NO: 551004 - RNA, 27 nt, Human
cucucaagccagcucucugcaaccuaa

SEQ ID NO: 551005 - RNA, 20 nt, Human
cugaauaaaugucagacuga

SEQ ID NO: 551006 - RNA, 20 nt, Human
cuggcacagggacccaucuu

SEQ ID NO: 551007 - RNA, 21 nt, Human
cuguccuuucauccaagcacu

SEQ ID NO: 551008 - RNA, 25 nt, Human
cuucugccuacaauauauacuacaa

SEQ ID NO: 551009 - RNA, 18 nt, Human
gaaaucagggaaucuaga

SEQ ID NO: 551010 - RNA, 18 nt, Human
gaaugugaauuuccaugc

SEQ ID NO: 551011 - RNA, 23 nt, Human
gagaaaugagauacugaaaauac

SEQ ID NO: 551012 - RNA, 22 nt, Human
gagguagcuggcuaagaagcag

SEQ ID NO: 551013 - RNA, 23 nt, Human
gagguagcuggcuaagaagcaga

SEQ ID NO: 551014 - RNA, 19 nt, Human
gcacacaaggcccugugug

SEQ ID NO: 551015 - RNA, 21 nt, Human
gcgcuggcggcugggacuggg

SEQ ID NO: 551016 - RNA, 18 nt, Human
gcuuccugauaugacacu

SEQ ID NO: 551017 - RNA, 20 nt, Human
ggaaacaucccuaaguccuc

SEQ ID NO: 551018 - RNA, 19 nt, Human
ggacugggcuagguugggu

SEQ ID NO: 551019 - RNA, 23 nt, Human
ggacugggcuagguuggguuggg

SEQ ID NO: 551020 - RNA, 21 nt, Human
ggagccgacggcagcggagga

SEQ ID NO: 551021 - RNA, 18 nt, Human
gguuggguuaggaaaggg

SEQ ID NO: 551022 - RNA, 22 nt, Human
guccucagugacuucacagucc

SEQ ID NO: 551023 - RNA, 19 nt, Human
gugcugagccccucagggu

SEQ ID NO: 551024 - RNA, 28 nt, Human
uaaaaauacacauagaauuaugaaaaua

SEQ ID NO: 551025 - RNA, 23 nt, Human
uaaaagcaaugaggauaacagaa

SEQ ID NO: 551026 - RNA, 20 nt, Human
uaaaauuacugaaauacaau

SEQ ID NO: 551027 - RNA, 24 nt, Human
uaaaucaugcauaacgaggaauua

SEQ ID NO: 551028 - RNA, 23 nt, Human
uaacuacucucaagccagcucuc

SEQ ID NO: 551029 - RNA, 19 nt, Human
uacacauuaagaauccaaa

SEQ ID NO: 551030 - RNA, 19 nt, Human
uacccaaguauaaaaugac

SEQ ID NO: 551031 - RNA, 19 nt, Human
uaccugaaauggucugauu

SEQ ID NO: 551032 - RNA, 22 nt, Human
uacuuuucauuuucuuuuucuu

SEQ ID NO: 551033 - RNA, 22 nt, Human
uagaaugucaucuaaaaguuuc

SEQ ID NO: 551034 - RNA, 18 nt, Human
uagcaccaacccaggccc

SEQ ID NO: 551035 - RNA, 21 nt, Human
uagguauaauucauucaaagu

SEQ ID NO: 551036 - RNA, 20 nt, Human
uauagcaccaacccaggccc

SEQ ID NO: 551037 - RNA, 21 nt, Human
uaucuaaagacugucccaguc

SEQ ID NO: 551038 - RNA, 20 nt, Human
ucaaaguuuuaaaugccauc

SEQ ID NO: 551039 - RNA, 22 nt, Human
ucaggguaaaaaaguaaccaag

SEQ ID NO: 551040 - RNA, 27 nt, Human
ucagguuuaaaaaagaaaaaaaaaaaa

SEQ ID NO: 551041 - RNA, 22 nt, Human
uccaaaaaaauaccacuaugga

SEQ ID NO: 551042 - RNA, 23 nt, Human
uccauaaucuaaccugaagacca

SEQ ID NO: 551043 - RNA, 19 nt, Human
ucccaagucuucuccaagc

SEQ ID NO: 551044 - RNA, 27 nt, Human
ucccauuucuuuuucuagcuuccccaa

SEQ ID NO: 551045 - RNA, 24 nt, Human
uccgugacagggacaggcgcuggc

SEQ ID NO: 551046 - RNA, 23 nt, Human
uccuaaugagugcugagccccuc

SEQ ID NO: 551047 - RNA, 20 nt, Human
uccuacuuucuuauucacaa

SEQ ID NO: 551048 - RNA, 22 nt, Human
uccucuaaccauuuuauaauga

SEQ ID NO: 551049 - RNA, 18 nt, Human
uccuuguccucagugacu

SEQ ID NO: 551050 - RNA, 21 nt, Human
ucggggagaaaaaaauuaaaa

SEQ ID NO: 551051 - RNA, 21 nt, Human
ucugcaauugagugcuccuuu

SEQ ID NO: 551052 - RNA, 23 nt, Human
ucugccuacaauauauacuacaa

SEQ ID NO: 551053 - RNA, 26 nt, Human
ucugguuuuauucccuggcaguauug

SEQ ID NO: 551054 - RNA, 20 nt, Human
ucuguagcuuuugucaugcc

SEQ ID NO: 551055 - RNA, 21 nt, Human
ucuguagcuuuugucaugcca

SEQ ID NO: 551056 - RNA, 20 nt, Human
ugaaaggcuuacaaacuguu

SEQ ID NO: 551057 - RNA, 19 nt, Human
ugaauuuccaugcugaccc

SEQ ID NO: 551058 - RNA, 18 nt, Human
ugacaaccuggcuucauc

SEQ ID NO: 551059 - RNA, 19 nt, Human
ugauugcaugugcugcucu

SEQ ID NO: 551060 - RNA, 24 nt, Human
ugcaauugagugcuccuuuaugcc

SEQ ID NO: 551061 - RNA, 26 nt, Human
ugccaaauguucugucuuaugacucu

SEQ ID NO: 551062 - RNA, 28 nt, Human
ugccuacaauauauacuacaaaccccuu

SEQ ID NO: 551063 - RNA, 21 nt, Human
uggaauuuucauaagcaauau

SEQ ID NO: 551064 - RNA, 23 nt, Human
uggaauuuucauaagcaauaucc

SEQ ID NO: 551065 - RNA, 20 nt, Human
uggcaguauugaggccuggc

SEQ ID NO: 551066 - RNA, 22 nt, Human
uggcggcugggacugggcuagg

SEQ ID NO: 551067 - RNA, 23 nt, Human
ugggguccgugacagggacaggc

SEQ ID NO: 551068 - RNA, 20 nt, Human
uggguuggguuaggaaaggg

SEQ ID NO: 551069 - RNA, 24 nt, Human
uggguuggguuaggaaagggcugg

SEQ ID NO: 551070 - RNA, 22 nt, Human
uguuucauaaggacaauuccug

SEQ ID NO: 551071 - RNA, 23 nt, Human
uuaaagugaacauacuuccuugc

SEQ ID NO: 551072 - RNA, 23 nt, Human
uuacuguaugcugcaggccuggg

SEQ ID NO: 551073 - RNA, 23 nt, Human
uuccaugcugacccucacagauc

SEQ ID NO: 551074 - RNA, 22 nt, Human
uucccuucuuuugcaaaugauc

SEQ ID NO: 551075 - RNA, 22 nt, Human
uuuaguuuccuuguccucagug

SEQ ID NO: 551076 - RNA, 22 nt, Human
uuuuaaauccuagcagguuuuu

SEQ ID NO: 551077 - RNA, 23 nt, Human
uuuuaaaugccauccauaugcca

SEQ ID NO: 551078 - RNA, 22 nt, Human
uuuuacaggacagauuuaaagu

SEQ ID NO: 551079 - RNA, 29 nt, Human
aaaaaagaaaacauuuucacacagaagag

SEQ ID NO: 551080 - RNA, 21 nt, Human
aaaauuuuucaaaccccaaau

SEQ ID NO: 551081 - RNA, 24 nt, Human
aacaccaaaguauaaaaaauuaaa

SEQ ID NO: 551082 - RNA, 23 nt, Human
aagaaaacauuuucacacagaag

SEQ ID NO: 551083 - RNA, 20 nt, Human
acgcagggcgucugccuccu

SEQ ID NO: 551084 - RNA, 24 nt, Human
agggcgucugccuccucccaccuu

SEQ ID NO: 551085 - RNA, 24 nt, Human
auaaugauaaaaauagauguaucc

SEQ ID NO: 551086 - RNA, 23 nt, Human
auuaaaaaaaaaaaaaaaggaau

SEQ ID NO: 551087 - RNA, 22 nt, Human
ccaaaguauaaaaaauuaaaaa

SEQ ID NO: 551088 - RNA, 22 nt, Human
ccacgcagggcgucugccuccu

SEQ ID NO: 551089 - RNA, 21 nt, Human
cgggggcggagcgcggccucc

SEQ ID NO: 551090 - RNA, 18 nt, Human
cuuugagaaauaaagaaa

SEQ ID NO: 551091 - RNA, 24 nt, Human
gagcaaaaucaacaugauuuggaa

SEQ ID NO: 551092 - RNA, 26 nt, Human
gccggccucggcguggacgccccgac

SEQ ID NO: 551093 - RNA, 24 nt, Human
uaaaaaauuaaaaaaaaaaaaaaa

SEQ ID NO: 551094 - RNA, 22 nt, Human
ucugccuccucccaccuuccgc

SEQ ID NO: 551095 - RNA, 20 nt, Human
ucuggacuaaacuauucagu

SEQ ID NO: 551096 - RNA, 24 nt, Human
ugauaaaaauagauguauccucug

SEQ ID NO: 551097 - RNA, 24 nt, Human
ugccggccucggcguggacgcccc

SEQ ID NO: 551098 - RNA, 23 nt, Human
uggaaaaggaauuuuaaaccuua

SEQ ID NO: 551099 - RNA, 24 nt, Human
aaccuaaccaagccagccugacag

SEQ ID NO: 551100 - RNA, 21 nt, Human
acggaccugcaggugccgagg

SEQ ID NO: 551101 - RNA, 24 nt, Human
agagaccccaaauccuuuagccaa

SEQ ID NO: 551102 - RNA, 18 nt, Human
agagaggugggggcagag

SEQ ID NO: 551103 - RNA, 21 nt, Human
agagauucccuauccucugcc

SEQ ID NO: 551104 - RNA, 22 nt, Human
agaucaagggggccugggagac

SEQ ID NO: 551105 - RNA, 18 nt, Human
aggaaggagagaccccaa

SEQ ID NO: 551106 - RNA, 21 nt, Human
agggagcuggagugggagcca

SEQ ID NO: 551107 - RNA, 24 nt, Human
aggugccgaggcugcgcgacggcc

SEQ ID NO: 551108 - RNA, 23 nt, Human
aggugggggcagaguacuaaggg

SEQ ID NO: 551109 - RNA, 22 nt, Human
agucaggggcgccagccgcggg

SEQ ID NO: 551110 - RNA, 18 nt, Human
cacccagggcggcuccgg

SEQ ID NO: 551111 - RNA, 21 nt, Human
cacuuccucuucuccuucugu

SEQ ID NO: 551112 - RNA, 19 nt, Human
caguaaaaccuaaccaagc

SEQ ID NO: 551113 - RNA, 19 nt, Human
ccacuuccucuucuccuuc

SEQ ID NO: 551114 - RNA, 21 nt, Human
ccagauccacuuccucuucuc

SEQ ID NO: 551115 - RNA, 26 nt, Human
ccucccuggccgggacggagucaggg

SEQ ID NO: 551116 - RNA, 21 nt, Human
ccuuuagccaaugaguggugg

SEQ ID NO: 551117 - RNA, 18 nt, Human
cggccggagcgugcgcgg

SEQ ID NO: 551118 - RNA, 20 nt, Human
cuauccucugccccaguaaa

SEQ ID NO: 551119 - RNA, 22 nt, Human
cucccaauuccagauccacuuc

SEQ ID NO: 551120 - RNA, 22 nt, Human
cuggccgggacggagucagggg

SEQ ID NO: 551121 - RNA, 19 nt, Human
cuuccucuucuccuucugu

SEQ ID NO: 551122 - RNA, 20 nt, Human
gagauucccuauccucugcc

SEQ ID NO: 551123 - RNA, 21 nt, Human
gccgcugacacccagggcggc

SEQ ID NO: 551124 - RNA, 18 nt, Human
gcgugcgcgggagccgag

SEQ ID NO: 551125 - RNA, 20 nt, Human
ggcuucauaaggaggaguca

SEQ ID NO: 551126 - RNA, 18 nt, Human
uaaagagaggugggggca

SEQ ID NO: 551127 - RNA, 21 nt, Human
uaaagagaggugggggcagaa

SEQ ID NO: 551128 - RNA, 25 nt, Human
ucccacaguaaagagaggugggggc

SEQ ID NO: 551129 - RNA, 20 nt, Human
ucccaugacucaggccucug

SEQ ID NO: 551130 - RNA, 22 nt, Human
ugacucaggccucugugcuagg

SEQ ID NO: 551131 - RNA, 20 nt, Human
ugagaugguuuucccacagu

SEQ ID NO: 551132 - RNA, 25 nt, Human
uggagugggagccaagggugguguu

SEQ ID NO: 551133 - RNA, 18 nt, Human
uggccgggacggagucag

SEQ ID NO: 551134 - RNA, 23 nt, Human
uuagauaggggugggguacagau

SEQ ID NO: 551135 - RNA, 24 nt, Human
aaaaaaaaaaaaaauagaaaaccu

SEQ ID NO: 551136 - RNA, 23 nt, Human
aaaaaaccauaccacaaaaggac

SEQ ID NO: 551137 - RNA, 21 nt, Human
aaaaaacuuaauccaauauac

SEQ ID NO: 551138 - RNA, 22 nt, Human
aaaaaccauaccacaaaaggac

SEQ ID NO: 551139 - RNA, 20 nt, Human
aaaaacccaaaacuaaacaa

SEQ ID NO: 551140 - RNA, 25 nt, Human
aaaacaaaacaaaacaaaaaaaaac

SEQ ID NO: 551141 - RNA, 25 nt, Human
aaaacuaaacaacaacaacaaaaac

SEQ ID NO: 551142 - RNA, 25 nt, Human
aaaaggacaggaagccugcagaaau

SEQ ID NO: 551143 - RNA, 23 nt, Human
aaaaguacuguucaacauuaaau

SEQ ID NO: 551144 - RNA, 19 nt, Human
aaacaaaacaaaacaaaaa

SEQ ID NO: 551145 - RNA, 25 nt, Human
aaacaaaacaaaacaaaaaaaaaca

SEQ ID NO: 551146 - RNA, 23 nt, Human
aaacaacaacaacaaaaaccucc

SEQ ID NO: 551147 - RNA, 21 nt, Human
aaacaaugcuuauaucacuaa

SEQ ID NO: 551148 - RNA, 21 nt, Human
aaacagacuagaauuucaagc

SEQ ID NO: 551149 - RNA, 21 nt, Human
aaacccaaaacuaaacaacaa

SEQ ID NO: 551150 - RNA, 23 nt, Human
aaacccaaaacuaaacaacaacc

SEQ ID NO: 551151 - RNA, 23 nt, Human
aaagguuuauggaagagggaaug

SEQ ID NO: 551152 - RNA, 22 nt, Human
aaauacugagugacuacaguac

SEQ ID NO: 551153 - RNA, 18 nt, Human
aacaaaaaaaaacaguca

SEQ ID NO: 551154 - RNA, 23 nt, Human
aacaacaaaaaccuccaggaaaa

SEQ ID NO: 551155 - RNA, 19 nt, Human
aacagguauauuacuugag

SEQ ID NO: 551156 - RNA, 20 nt, Human
aacagguauauuacuugagg

SEQ ID NO: 551157 - RNA, 20 nt, Human
aaccauuugaaucaggcuca

SEQ ID NO: 551158 - RNA, 24 nt, Human
aacuuaauccaauauaccagugag

SEQ ID NO: 551159 - RNA, 23 nt, Human
aagcaaaggauaaaaauucaagg

SEQ ID NO: 551160 - RNA, 23 nt, Human
aagcagaaaaaccauuugaauca

SEQ ID NO: 551161 - RNA, 23 nt, Human
aagccagugaaaauaaggccaaa

SEQ ID NO: 551162 - RNA, 22 nt, Human
aagugcauuauagggagcuuuu

SEQ ID NO: 551163 - RNA, 24 nt, Human
aauaaggccaaaaaaccauaccac

SEQ ID NO: 551164 - RNA, 19 nt, Human
aaugcaaagugcaaacagu

SEQ ID NO: 551165 - RNA, 21 nt, Human
aaugucuguucccuaggugac

SEQ ID NO: 551166 - RNA, 21 nt, Human
acaaaaaaaaacagucacaag

SEQ ID NO: 551167 - RNA, 21 nt, Human
acaaaacaaaaaaaaacaguc

SEQ ID NO: 551168 - RNA, 19 nt, Human
acaaaugaacacauuaaaa

SEQ ID NO: 551169 - RNA, 26 nt, Human
acaacaacaacaaaaaccuccaggaa

SEQ ID NO: 551170 - RNA, 19 nt, Human
acagagccaucucgaguuc

SEQ ID NO: 551171 - RNA, 20 nt, Human
acagaucuuaagauggauaa

SEQ ID NO: 551172 - RNA, 22 nt, Human
acaggaucuauuuagauuuaca

SEQ ID NO: 551173 - RNA, 19 nt, Human
accauaacaccuuaaagca

SEQ ID NO: 551174 - RNA, 23 nt, Human
accccgcgccgggacccuuccgc

SEQ ID NO: 551175 - RNA, 22 nt, Human
accccgcuuucaccuacuccuc

SEQ ID NO: 551176 - RNA, 20 nt, Human
accucuuaccacacaaagug

SEQ ID NO: 551177 - RNA, 21 nt, Human
agaauaucacugacgcucaaa

SEQ ID NO: 551178 - RNA, 19 nt, Human
agagugucacaaagugaaa

SEQ ID NO: 551179 - RNA, 23 nt, Human
auaaagcagaaaaaccauuugaa

SEQ ID NO: 551180 - RNA, 22 nt, Human
augagacuaaggcaagcaucac

SEQ ID NO: 551181 - RNA, 25 nt, Human
auuagguauuucaagaacaguaccg

SEQ ID NO: 551182 - RNA, 24 nt, Human
auucaugagacuaaggcaagcauc

SEQ ID NO: 551183 - RNA, 21 nt, Human
auugcauuaacaggaaaaaac

SEQ ID NO: 551184 - RNA, 24 nt, Human
caaaaaaccauaccacaaaaggac

SEQ ID NO: 551185 - RNA, 23 nt, Human
caaaaacaaggcaugaauauuca

SEQ ID NO: 551186 - RNA, 23 nt, Human
caaaaggacaggaagccugcaga

SEQ ID NO: 551187 - RNA, 24 nt, Human
caacaacaaaaaccuccaggaaaa

SEQ ID NO: 551188 - RNA, 25 nt, Human
caacaacaaaaaccuccaggaaaaa

SEQ ID NO: 551189 - RNA, 25 nt, Human
caagacauauauacauuaaaaacaa

SEQ ID NO: 551190 - RNA, 23 nt, Human
caagcaucacucaucagaaauac

SEQ ID NO: 551191 - RNA, 19 nt, Human
caaguaacagccaagucag

SEQ ID NO: 551192 - RNA, 21 nt, Human
cacacaaaaacaaaacaaaac

SEQ ID NO: 551193 - RNA, 30 nt, Human
cacacaaaaacaaaacaaaacaaaaaaaag

SEQ ID NO: 551194 - RNA, 21 nt, Human
cacacacacaaaaacaaaaca

SEQ ID NO: 551195 - RNA, 22 nt, Human
cacacacacaaaaacaaaacaa

SEQ ID NO: 551196 - RNA, 24 nt, Human
cacacacacaaaaacaaaacaaaa

SEQ ID NO: 551197 - RNA, 21 nt, Human
cacacacacacaaaaacaaaa

SEQ ID NO: 551198 - RNA, 26 nt, Human
cacacacacacaaaaacaaaacaaaa

SEQ ID NO: 551199 - RNA, 20 nt, Human
caccacauuuuccccaacca

SEQ ID NO: 551200 - RNA, 22 nt, Human
caccccgcuuucaccuacuccu

SEQ ID NO: 551201 - RNA, 19 nt, Human
caccugaaaagggaugacu

SEQ ID NO: 551202 - RNA, 19 nt, Human
cagaaaagaauauaggaau

SEQ ID NO: 551203 - RNA, 18 nt, Human
caggggaggggagggaag

SEQ ID NO: 551204 - RNA, 24 nt, Human
cagugccacacacacacacacaaa

SEQ ID NO: 551205 - RNA, 22 nt, Human
caguuguuacuugauugucucc

SEQ ID NO: 551206 - RNA, 22 nt, Human
caugagacuaaggcaagcauca

SEQ ID NO: 551207 - RNA, 19 nt, Human
ccaaaacuaaacaacaaca

SEQ ID NO: 551208 - RNA, 21 nt, Human
ccagugaaaauaaggccaaaa

SEQ ID NO: 551209 - RNA, 27 nt, Human
ccagugccacacacacacacacaaaaa

SEQ ID NO: 551210 - RNA, 23 nt, Human
ccauuagguauuucaagaacagu

SEQ ID NO: 551211 - RNA, 24 nt, Human
cccagugccacacacacacacaca

SEQ ID NO: 551212 - RNA, 20 nt, Human
cccaucacauccaacaggau

SEQ ID NO: 551213 - RNA, 23 nt, Human
ccccgcgccgagaccccaggccc

SEQ ID NO: 551214 - RNA, 28 nt, Human
ccccgcgccgggacccuuccgccccucc

SEQ ID NO: 551215 - RNA, 19 nt, Human
ccccgcgcgccucuggccg

SEQ ID NO: 551216 - RNA, 21 nt, Human
ccccgcgcgccucuggccgcg

SEQ ID NO: 551217 - RNA, 25 nt, Human
ccccgcuuucaccuacuccuccuuc

SEQ ID NO: 551218 - RNA, 24 nt, Human
cccgcgccgagaccccaggccgga

SEQ ID NO: 551219 - RNA, 26 nt, Human
cccgcgccgagaccccaggccggagc

SEQ ID NO: 551220 - RNA, 21 nt, Human
cccgcgccgcgcuccucacca

SEQ ID NO: 551221 - RNA, 18 nt, Human
cccgcgcgccucuggccg

SEQ ID NO: 551222 - RNA, 18 nt, Human
cccuucccuccgcucccc

SEQ ID NO: 551223 - RNA, 25 nt, Human
ccgagaccccaggccggagcgcagg

SEQ ID NO: 551224 - RNA, 19 nt, Human
ccgcgccgcgcuccucacc

SEQ ID NO: 551225 - RNA, 19 nt, Human
cgccgagaccccaggccgg

SEQ ID NO: 551226 - RNA, 19 nt, Human
cgccgcgcucacccgcggc

SEQ ID NO: 551227 - RNA, 18 nt, Human
cgccgggacccuuccgcc

SEQ ID NO: 551228 - RNA, 18 nt, Human
cgggacccuuccgccccu

SEQ ID NO: 551229 - RNA, 19 nt, Human
cgucccuucccuccgcucc

SEQ ID NO: 551230 - RNA, 19 nt, Human
cuccccgcgccgagacccc

SEQ ID NO: 551231 - RNA, 24 nt, Human
cucgaaccguuuacaucagcgaau

SEQ ID NO: 551232 - RNA, 22 nt, Human
cuggccgcggcacccgaccagg

SEQ ID NO: 551233 - RNA, 22 nt, Human
cugugcuguuuccuaagaucaa

SEQ ID NO: 551234 - RNA, 21 nt, Human
gaaaagaauauaggaauagaa

SEQ ID NO: 551235 - RNA, 22 nt, Human
gaaacaagaaaacaaauacugu

SEQ ID NO: 551236 - RNA, 20 nt, Human
gaauagaagaggaaaucaug

SEQ ID NO: 551237 - RNA, 20 nt, Human
gaauuuugucagauaugguu

SEQ ID NO: 551238 - RNA, 23 nt, Human
gagacggcggcagcggcgggaga

SEQ ID NO: 551239 - RNA, 18 nt, Human
gcaaggaugagaccaggc

SEQ ID NO: 551240 - RNA, 23 nt, Human
gcagcccucgccucaccccgcgc

SEQ ID NO: 551241 - RNA, 21 nt, Human
gccgagaccccaggccggagc

SEQ ID NO: 551242 - RNA, 23 nt, Human
ggaaaaguauauucucuguguac

SEQ ID NO: 551243 - RNA, 19 nt, Human
ggacaggaagccugcagaa

SEQ ID NO: 551244 - RNA, 23 nt, Human
ggacaggaagccugcagaaauaa

SEQ ID NO: 551245 - RNA, 20 nt, Human
ggacuucaaguucagaaccc

SEQ ID NO: 551246 - RNA, 19 nt, Human
ggagacggcggcagcggcg

SEQ ID NO: 551247 - RNA, 18 nt, Human
ggagauggggagaggcaa

SEQ ID NO: 551248 - RNA, 19 nt, Human
ggaggggagggaaggaagc

SEQ ID NO: 551249 - RNA, 23 nt, Human
ggccaaaaaaccauaccacaaaa

SEQ ID NO: 551250 - RNA, 27 nt, Human
gggcaaagguguuuaagcuuugucacc

SEQ ID NO: 551251 - RNA, 21 nt, Human
gguggcucaggccaacagaag

SEQ ID NO: 551252 - RNA, 19 nt, Human
guaaaaagcagcaucaucu

SEQ ID NO: 551253 - RNA, 19 nt, Human
guggaacacgcaaggauga

SEQ ID NO: 551254 - RNA, 19 nt, Human
gugggucauguuuacagua

SEQ ID NO: 551255 - RNA, 24 nt, Human
uaaaaaaaaaaaaacccaaaacua

SEQ ID NO: 551256 - RNA, 21 nt, Human
uaaaaaaaaaaggccaugugc

SEQ ID NO: 551257 - RNA, 23 nt, Human
uaaaaacaaaugaacacauuaaa

SEQ ID NO: 551258 - RNA, 21 nt, Human
uaaaagcauuuuaauaaccac

SEQ ID NO: 551259 - RNA, 19 nt, Human
uaaaauaccuugagacuca

SEQ ID NO: 551260 - RNA, 19 nt, Human
uaaacaacaacaacaaaaa

SEQ ID NO: 551261 - RNA, 22 nt, Human
uaaacacaagaauggggcaaga

SEQ ID NO: 551262 - RNA, 20 nt, Human
uaaagcagaaaaaccauuug

SEQ ID NO: 551263 - RNA, 25 nt, Human
uaaagcagaaaaaccauuugaauca

SEQ ID NO: 551264 - RNA, 26 nt, Human
uaaagcagaaaaaccauuugaaucag

SEQ ID NO: 551265 - RNA, 28 nt, Human
uaaauguaguaaaaaaaaaaaaaaaaaa

SEQ ID NO: 551266 - RNA, 19 nt, Human
uaacugugccaccauaaca

SEQ ID NO: 551267 - RNA, 22 nt, Human
uaaggccaaaaaaccauaccac

SEQ ID NO: 551268 - RNA, 22 nt, Human
uacaagucagaaaaucccagcu

SEQ ID NO: 551269 - RNA, 19 nt, Human
uacagcauuuaauaaagua

SEQ ID NO: 551270 - RNA, 18 nt, Human
uaccacaaaaggacagga

SEQ ID NO: 551271 - RNA, 19 nt, Human
uaccacaaaaggacaggaa

SEQ ID NO: 551272 - RNA, 26 nt, Human
uaccucagucaccacauuuuccccaa

SEQ ID NO: 551273 - RNA, 24 nt, Human
uacucaaaccucuuaccacacaaa

SEQ ID NO: 551274 - RNA, 19 nt, Human
uaguaaaaaaaaaaaaaaa

SEQ ID NO: 551275 - RNA, 24 nt, Human
uaguauaaggaaaagcuacaaacc

SEQ ID NO: 551276 - RNA, 22 nt, Human
uauacacaauuaacacaagaau

SEQ ID NO: 551277 - RNA, 20 nt, Human
uauauguuugugaauguaua

SEQ ID NO: 551278 - RNA, 19 nt, Human
uaucaaaaacaaggcauga

SEQ ID NO: 551279 - RNA, 18 nt, Human
uauuucaagaacaguacc

SEQ ID NO: 551280 - RNA, 21 nt, Human
ucagaaaaucccagcuacaga

SEQ ID NO: 551281 - RNA, 25 nt, Human
ucagaaauacucaaacauuuuauaa

SEQ ID NO: 551282 - RNA, 22 nt, Human
ucaguguaauuuuaugaaaccu

SEQ ID NO: 551283 - RNA, 24 nt, Human
ucauauggugagcugcucaugucg

SEQ ID NO: 551284 - RNA, 19 nt, Human
ucaucagaaauacucaaac

SEQ ID NO: 551285 - RNA, 18 nt, Human
ucccauugcaaauaaagu

SEQ ID NO: 551286 - RNA, 19 nt, Human
uccccgcgccgagaccccc

SEQ ID NO: 551287 - RNA, 19 nt, Human
ucccuuagaagccuucaac

SEQ ID NO: 551288 - RNA, 20 nt, Human
ucccuuagaagccuucaacu

SEQ ID NO: 551289 - RNA, 18 nt, Human
uccgccccucaccccgcu

SEQ ID NO: 551290 - RNA, 19 nt, Human
uccuaagaucaaguaacag

SEQ ID NO: 551291 - RNA, 20 nt, Human
uccuccuucgucccuucccu

SEQ ID NO: 551292 - RNA, 22 nt, Human
ucgccgcgcucacccgcggcuc

SEQ ID NO: 551293 - RNA, 23 nt, Human
ucucuaggugacaaugcagagcc

SEQ ID NO: 551294 - RNA, 26 nt, Human
ucuggagauggggagaggcaagugug

SEQ ID NO: 551295 - RNA, 25 nt, Human
ucuggccgcggcacccgaccaggag

SEQ ID NO: 551296 - RNA, 23 nt, Human
ugaaaaagcaaucccccugcuca

SEQ ID NO: 551297 - RNA, 24 nt, Human
ugacugcauuaauauaugugcuuu

SEQ ID NO: 551298 - RNA, 23 nt, Human
ugagcaagacauauauacauuaa

SEQ ID NO: 551299 - RNA, 21 nt, Human
ugccacacacacacacacaaa

SEQ ID NO: 551300 - RNA, 23 nt, Human
ugccacaguugacuuuaaaagca

SEQ ID NO: 551301 - RNA, 18 nt, Human
uggagauggggagaggca

SEQ ID NO: 551302 - RNA, 23 nt, Human
ugguggcucaggccaacagaagu

SEQ ID NO: 551303 - RNA, 23 nt, Human
uguauuaaaaauaguguucuaca

SEQ ID NO: 551304 - RNA, 18 nt, Human
uuacaguauucccuuaga

SEQ ID NO: 551305 - RNA, 20 nt, Human
uuacugcauuaauucuucac

SEQ ID NO: 551306 - RNA, 22 nt, Human
uucaaguucagaaccaaaaagc

SEQ ID NO: 551307 - RNA, 18 nt, Human
uucaaugaaugaaaucac

SEQ ID NO: 551308 - RNA, 19 nt, Human
uucaaugaaugaaaucacg

SEQ ID NO: 551309 - RNA, 23 nt, Human
uucagaaccaaaaagcagagaau

SEQ ID NO: 551310 - RNA, 24 nt, Human
uucagaaccaaaaagcagagaauc

SEQ ID NO: 551311 - RNA, 19 nt, Human
uucaucuggaaaguaaagu

SEQ ID NO: 551312 - RNA, 23 nt, Human
uugaggaaaaguauauucucugu

SEQ ID NO: 551313 - RNA, 19 nt, Human
uuuaauuucucugaagugc

SEQ ID NO: 551314 - RNA, 26 nt, Human
uuuauggaaaacugaaaugaaaaauu

SEQ ID NO: 551315 - RNA, 20 nt, Human
uuucaguuguuacuugauug

SEQ ID NO: 551316 - RNA, 23 nt, Human
uuuccacauccauauauguuuua

SEQ ID NO: 551317 - RNA, 18 nt, Human
uuugucagauaugguuac

SEQ ID NO: 551318 - RNA, 18 nt, Human
uuuugcaguuuagggacc

SEQ ID NO: 551319 - RNA, 23 nt, Human
aaaaaaaaaaaaaaagcacaauu

SEQ ID NO: 551320 - RNA, 22 nt, Human
aaaaaaaaaaagcacaauuaaa

SEQ ID NO: 551321 - RNA, 32 nt, Human
aaaaaaaaaaagcacaauuaaauucuagaggg

SEQ ID NO: 551322 - RNA, 26 nt, Human
aaacaaaaccuaacagcuuaugcagc

SEQ ID NO: 551323 - RNA, 23 nt, Human
aaagccaaaaaaaaaaaaaaagc

SEQ ID NO: 551324 - RNA, 21 nt, Human
aaggaagggcuaaauauuuua

SEQ ID NO: 551325 - RNA, 20 nt, Human
acacacacauuuaacaaauc

SEQ ID NO: 551326 - RNA, 19 nt, Human
accuucauacacacacaaa

SEQ ID NO: 551327 - RNA, 21 nt, Human
acgaaaauagagccuucucuc

SEQ ID NO: 551328 - RNA, 26 nt, Human
acucuguuggccaacuucaagaauaa

SEQ ID NO: 551329 - RNA, 19 nt, Human
agccaaaaaaaaaaaaaaa

SEQ ID NO: 551330 - RNA, 18 nt, Human
auagagccuucucucaga

SEQ ID NO: 551331 - RNA, 20 nt, Human
auagagccuucucucagaaa

SEQ ID NO: 551332 - RNA, 24 nt, Human
caaagccaaaaaaaaaaaaaaagc

SEQ ID NO: 551333 - RNA, 26 nt, Human
caaagccaaaaaaaaaaaaaaagcac

SEQ ID NO: 551334 - RNA, 19 nt, Human
caaggaagggcuaaauauu

SEQ ID NO: 551335 - RNA, 22 nt, Human
cacacaaaccaccaguggguaa

SEQ ID NO: 551336 - RNA, 23 nt, Human
cacacauucacaacucuguuggc

SEQ ID NO: 551337 - RNA, 25 nt, Human
cacccccuccccaucuucuccugcu

SEQ ID NO: 551338 - RNA, 24 nt, Human
ccaaagccaaaaaaaaaaaaaaag

SEQ ID NO: 551339 - RNA, 26 nt, Human
ccaaagccaaaaaaaaaaaaaaagca

SEQ ID NO: 551340 - RNA, 24 nt, Human
cccaaagccaaaaaaaaaaaaaaa

SEQ ID NO: 551341 - RNA, 21 nt, Human
cccacucccacccccucccca

SEQ ID NO: 551342 - RNA, 25 nt, Human
cccuccccaucuucuccugcucuua

SEQ ID NO: 551343 - RNA, 23 nt, Human
cccucuguugcucauuuuuugac

SEQ ID NO: 551344 - RNA, 19 nt, Human
ccuaugccccagaaccguc

SEQ ID NO: 551345 - RNA, 24 nt, Human
ccuccggcucggcucuccagucgu

SEQ ID NO: 551346 - RNA, 22 nt, Human
cuaccaaggaagggcuaaauau

SEQ ID NO: 551347 - RNA, 22 nt, Human
cuaccuaccaaggaagggcuaa

SEQ ID NO: 551348 - RNA, 22 nt, Human
cucuccagucguggucuuugcu

SEQ ID NO: 551349 - RNA, 24 nt, Human
gaaaauagagccuucucucagaaa

SEQ ID NO: 551350 - RNA, 22 nt, Human
gaacaauaauaaacauguccuu

SEQ ID NO: 551351 - RNA, 22 nt, Human
gccccagaaccguccuucagau

SEQ ID NO: 551352 - RNA, 18 nt, Human
gggcuaaauauuuuauuu

SEQ ID NO: 551353 - RNA, 19 nt, Human
gucuucagcuuugccuagc

SEQ ID NO: 551354 - RNA, 19 nt, Human
uaaaacaaaaccuaacagc

SEQ ID NO: 551355 - RNA, 23 nt, Human
uaaaauacuucugagauauuucc

SEQ ID NO: 551356 - RNA, 23 nt, Human
uaacccgggaacuacaucagcag

SEQ ID NO: 551357 - RNA, 22 nt, Human
uaauaaauuuaucaugccucag

SEQ ID NO: 551358 - RNA, 30 nt, Human
uauacacacacauuuaacaaaucuacaugg

SEQ ID NO: 551359 - RNA, 22 nt, Human
ucacugcggucuucagcuuugc

SEQ ID NO: 551360 - RNA, 24 nt, Human
ucagcagccuuuugaaauugcucu

SEQ ID NO: 551361 - RNA, 22 nt, Human
uccauaagcuucaaacaucuua

SEQ ID NO: 551362 - RNA, 21 nt, Human
ucccaaagccaaaaaaaaaaa

SEQ ID NO: 551363 - RNA, 25 nt, Human
ucccaaagccaaaaaaaaaaaaaaa

SEQ ID NO: 551364 - RNA, 27 nt, Human
ucccaaagccaaaaaaaaaaaaaaagc

SEQ ID NO: 551365 - RNA, 18 nt, Human
ucccacccccuccccauc

SEQ ID NO: 551366 - RNA, 19 nt, Human
ucuguuggccaacuucaag

SEQ ID NO: 551367 - RNA, 24 nt, Human
ucuuaagucuucauuccauauccc

SEQ ID NO: 551368 - RNA, 23 nt, Human
ugaacaauaauaaacauguccuu

SEQ ID NO: 551369 - RNA, 24 nt, Human
uggauguuauggauuguaaguauc

SEQ ID NO: 551370 - RNA, 22 nt, Human
uggccaacuucaagaauaaaau

SEQ ID NO: 551371 - RNA, 18 nt, Human
ugguuguuuuauuuugac

SEQ ID NO: 551372 - RNA, 24 nt, Human
uguaagauuaccuaaauugcauuu

SEQ ID NO: 551373 - RNA, 21 nt, Human
uguguguugaacaaucacgaa

SEQ ID NO: 551374 - RNA, 18 nt, Human
uguguuuccuaugcccca

SEQ ID NO: 551375 - RNA, 18 nt, Human
uuaaaacaaaaccuaaca

SEQ ID NO: 551376 - RNA, 23 nt, Human
uucaaauauacuccuaauuccac

SEQ ID NO: 551377 - RNA, 23 nt, Human
uucccacucccacccccucccca

SEQ ID NO: 551378 - RNA, 18 nt, Human
uucccagcugccuccggc

SEQ ID NO: 551379 - RNA, 19 nt, Human
uugccuagcucccucuuug

SEQ ID NO: 551380 - RNA, 21 nt, Human
uuggccaacuucaagaauaaa

SEQ ID NO: 551381 - RNA, 23 nt, Human
uuuaaaacaaaaccuaacagcuu

SEQ ID NO: 551382 - RNA, 18 nt, Human
uuugacauuuuuugaaau

SEQ ID NO: 551383 - RNA, 24 nt, Human
uuuucuggauccaccaugcaucac

SEQ ID NO: 551384 - RNA, 20 nt, Human
aaaagcgacggcaguguucc

SEQ ID NO: 551385 - RNA, 23 nt, Human
aaaccagcuggaggguuggacag

SEQ ID NO: 551386 - RNA, 21 nt, Human
aacagggcuucugcccccuuc

SEQ ID NO: 551387 - RNA, 20 nt, Human
aagcagagaaaagcugcccc

SEQ ID NO: 551388 - RNA, 22 nt, Human
acucuucagccuccuucuggcu

SEQ ID NO: 551389 - RNA, 24 nt, Human
acuuuaaaagaguuauccuaagga

SEQ ID NO: 551390 - RNA, 21 nt, Human
agaagagcucccucucucacc

SEQ ID NO: 551391 - RNA, 21 nt, Human
agaccauggccacuggcauca

SEQ ID NO: 551392 - RNA, 19 nt, Human
agagcucccucucucaccc

SEQ ID NO: 551393 - RNA, 18 nt, Human
agcaaggcggaguguggc

SEQ ID NO: 551394 - RNA, 23 nt, Human
aggcagagggcccucuggggaga

SEQ ID NO: 551395 - RNA, 20 nt, Human
aggcauggaggggcugagca

SEQ ID NO: 551396 - RNA, 20 nt, Human
aggggcugagcaaggcggag

SEQ ID NO: 551397 - RNA, 24 nt, Human
agucgggcagcaacucuucagccu

SEQ ID NO: 551398 - RNA, 21 nt, Human
auaaaacacuggggaaaauca

SEQ ID NO: 551399 - RNA, 18 nt, Human
caaacacaaaacagcuca

SEQ ID NO: 551400 - RNA, 19 nt, Human
caacagggcuucugccccc

SEQ ID NO: 551401 - RNA, 20 nt, Human
caaggugagcuccaagaggc

SEQ ID NO: 551402 - RNA, 21 nt, Human
cacccccaccuucaagucggg

SEQ ID NO: 551403 - RNA, 25 nt, Human
cacugccugagguccuuccuccccg

SEQ ID NO: 551404 - RNA, 23 nt, Human
cacuuuaaaagaguuauccuaag

SEQ ID NO: 551405 - RNA, 19 nt, Human
cagagcucgcccucuuucc

SEQ ID NO: 551406 - RNA, 23 nt, Human
cagagcucgcccucuuuccuagg

SEQ ID NO: 551407 - RNA, 20 nt, Human
cagggcuucugcccccuucc

SEQ ID NO: 551408 - RNA, 24 nt, Human
cauggaggggcugagcaaggcgga

SEQ ID NO: 551409 - RNA, 24 nt, Human
cccagaagagcucccucucucacc

SEQ ID NO: 551410 - RNA, 19 nt, Human
cccccagcugacauagcug

SEQ ID NO: 551411 - RNA, 21 nt, Human
cccgaccugcagcagcuuaac

SEQ ID NO: 551412 - RNA, 23 nt, Human
cccucuggggagaaagaagccca

SEQ ID NO: 551413 - RNA, 21 nt, Human
ccgagccaggcagcaccccca

SEQ ID NO: 551414 - RNA, 19 nt, Human
ccucuggggagaaagaagc

SEQ ID NO: 551415 - RNA, 23 nt, Human
ccugcagcagcuuaacccccagc

SEQ ID NO: 551416 - RNA, 21 nt, Human
ccuuagguaacugugagccuu

SEQ ID NO: 551417 - RNA, 23 nt, Human
ccuugaucagaagcuuggccacu

SEQ ID NO: 551418 - RNA, 26 nt, Human
cgaccugcagcagcuuaacccccagc

SEQ ID NO: 551419 - RNA, 21 nt, Human
cgccccagagcucgcccucuu

SEQ ID NO: 551420 - RNA, 20 nt, Human
cuaggggcuagauugguguu

SEQ ID NO: 551421 - RNA, 22 nt, Human
cucauaguccuggggagcagcc

SEQ ID NO: 551422 - RNA, 21 nt, Human
cucccucucucacccaccaag

SEQ ID NO: 551423 - RNA, 26 nt, Human
cucucacccaccaaggcucugaucac

SEQ ID NO: 551424 - RNA, 22 nt, Human
cucuggggagaaagaagcccag

SEQ ID NO: 551425 - RNA, 20 nt, Human
cugugagccuucuccacugc

SEQ ID NO: 551426 - RNA, 21 nt, Human
gaccugcagcagcuuaacccc

SEQ ID NO: 551427 - RNA, 22 nt, Human
gagaaagaagcccagaagagcu

SEQ ID NO: 551428 - RNA, 18 nt, Human
gagcucccucucucaccc

SEQ ID NO: 551429 - RNA, 19 nt, Human
gcagagucccaaaguugac

SEQ ID NO: 551430 - RNA, 19 nt, Human
gcagcagcuuaacccccag

SEQ ID NO: 551431 - RNA, 19 nt, Human
gcggaguguggccucuggg

SEQ ID NO: 551432 - RNA, 20 nt, Human
gcggaguguggccucugggc

SEQ ID NO: 551433 - RNA, 19 nt, Human
ggaggggcugagcaaggcg

SEQ ID NO: 551434 - RNA, 23 nt, Human
ggccagcucugccagcuccagca

SEQ ID NO: 551435 - RNA, 22 nt, Human
gggcagcaacucuucagccucc

SEQ ID NO: 551436 - RNA, 22 nt, Human
uaagacaaagagaauucguucc

SEQ ID NO: 551437 - RNA, 23 nt, Human
uagcagagucccaaaguugacuc

SEQ ID NO: 551438 - RNA, 21 nt, Human
uagcaucaauaagacagcucc

SEQ ID NO: 551439 - RNA, 22 nt, Human
uccaaagcagagaaaagcugcc

SEQ ID NO: 551440 - RNA, 24 nt, Human
uccaaagcagagaaaagcugcccc

SEQ ID NO: 551441 - RNA, 21 nt, Human
uccaaggugagcuccaagagg

SEQ ID NO: 551442 - RNA, 27 nt, Human
uccaaggugagcuccaagaggcagagg

SEQ ID NO: 551443 - RNA, 23 nt, Human
ucccaaaguugacucuuuugaag

SEQ ID NO: 551444 - RNA, 18 nt, Human
ucuucagccuccuucugg

SEQ ID NO: 551445 - RNA, 19 nt, Human
ugacaccggagagcgcccc

SEQ ID NO: 551446 - RNA, 22 nt, Human
ugagcuccaagaggcagagggc

SEQ ID NO: 551447 - RNA, 19 nt, Human
ugauggcuuugucauggug

SEQ ID NO: 551448 - RNA, 18 nt, Human
ugcucaggacagcugaug

SEQ ID NO: 551449 - RNA, 20 nt, Human
uggagagcaggucaucuagg

SEQ ID NO: 551450 - RNA, 18 nt, Human
ugggaaaaccagcuggag

SEQ ID NO: 551451 - RNA, 19 nt, Human
ugucaugguggcggcucca

SEQ ID NO: 551452 - RNA, 20 nt, Human
uuagcagucagcugcugguu

SEQ ID NO: 551453 - RNA, 19 nt, Human
uucaagucgggcagcaacu

SEQ ID NO: 551454 - RNA, 20 nt, Human
uuggagaagcaaagugagga

SEQ ID NO: 551455 - RNA, 20 nt, Human
uuugaagcuccucaugacac

SEQ ID NO: 551456 - RNA, 19 nt, Human
aaaugucgaggucuuaacu

SEQ ID NO: 551457 - RNA, 18 nt, Human
acagaugcagaaagcaag

SEQ ID NO: 551458 - RNA, 19 nt, Human
agagaugaucacaaauuuc

SEQ ID NO: 551459 - RNA, 18 nt, Human
agauauuaucauuuccac

SEQ ID NO: 551460 - RNA, 18 nt, Human
agcacuuucucagucucu

SEQ ID NO: 551461 - RNA, 20 nt, Human
agggauaacugcaucuuuug

SEQ ID NO: 551462 - RNA, 21 nt, Human
caccuucacaacuagaaacga

SEQ ID NO: 551463 - RNA, 24 nt, Human
caccuucacaacuagaaacgacuc

SEQ ID NO: 551464 - RNA, 26 nt, Human
cagaacucagcccuuggacacccucu

SEQ ID NO: 551465 - RNA, 18 nt, Human
cagcaucaucuucugcua

SEQ ID NO: 551466 - RNA, 24 nt, Human
cauuuccacuuuacagaugcagaa

SEQ ID NO: 551467 - RNA, 19 nt, Human
cgaggaaguuccuuuuuuc

SEQ ID NO: 551468 - RNA, 18 nt, Human
cucagcaucaucuucugc

SEQ ID NO: 551469 - RNA, 22 nt, Human
cuggcuucugcuucucagcauc

SEQ ID NO: 551470 - RNA, 20 nt, Human
gcuggcuucugcuucucagc

SEQ ID NO: 551471 - RNA, 20 nt, Human
ggaaguuccuuuuuucuuuu

SEQ ID NO: 551472 - RNA, 20 nt, Human
uacauucacucucuugguga

SEQ ID NO: 551473 - RNA, 25 nt, Human
uacauucacucucuuggugaccuca

SEQ ID NO: 551474 - RNA, 22 nt, Human
uauuuaauucuuccaggaauca

SEQ ID NO: 551475 - RNA, 27 nt, Human
ucacaacuagaaacgaccaguaacgac

SEQ ID NO: 551476 - RNA, 18 nt, Human
ucacaacuagaaacgacu

SEQ ID NO: 551477 - RNA, 23 nt, Human
ucgaggucuuaacugcuuuaguu

SEQ ID NO: 551478 - RNA, 21 nt, Human
ugaaguaucucagaacucagc

SEQ ID NO: 551479 - RNA, 20 nt, Human
ugacagagcucagucaugca

SEQ ID NO: 551480 - RNA, 22 nt, Human
ugacagagcucagucaugcaga

SEQ ID NO: 551481 - RNA, 24 nt, Human
ugugagcaaaugucgaggucuuaa

SEQ ID NO: 551482 - RNA, 21 nt, Human
uucaccaccagcacuuucuca

SEQ ID NO: 551483 - RNA, 23 nt, Human
aaacauacuccauauccagaaaa

SEQ ID NO: 551484 - RNA, 24 nt, Human
aaagugcugggaccacaggcauga

SEQ ID NO: 551485 - RNA, 25 nt, Human
aacaagagcaggagagagaagaaaa

SEQ ID NO: 551486 - RNA, 22 nt, Human
aacccccgaccucaggcgaucc

SEQ ID NO: 551487 - RNA, 20 nt, Human
aaccuccgccucccaggcuc

SEQ ID NO: 551488 - RNA, 25 nt, Human
aagaaaacauuuacauucuauaaca

SEQ ID NO: 551489 - RNA, 18 nt, Human
aagaauugagauagauga

SEQ ID NO: 551490 - RNA, 26 nt, Human
aagugcugggaccacaggcaugagcc

SEQ ID NO: 551491 - RNA, 19 nt, Human
acauucuauaacaugauua

SEQ ID NO: 551492 - RNA, 24 nt, Human
acuccguugcccagccuggagugc

SEQ ID NO: 551493 - RNA, 19 nt, Human
agcaaaacauacuccauau

SEQ ID NO: 551494 - RNA, 25 nt, Human
agcaaaacauacuccauauccagaa

SEQ ID NO: 551495 - RNA, 20 nt, Human
agcgaauucuccuaccucaa

SEQ ID NO: 551496 - RNA, 18 nt, Human
aggcagcagcccagggca

SEQ ID NO: 551497 - RNA, 18 nt, Human
aggcagcagcccagggca

SEQ ID NO: 551498 - RNA, 23 nt, Human
aggcaugcaccaccaaacccaac

SEQ ID NO: 551499 - RNA, 24 nt, Human
aggcgauccacccaccucagccuc

SEQ ID NO: 551500 - RNA, 24 nt, Human
agugcaauggcacgaucucggcuc

SEQ ID NO: 551501 - RNA, 21 nt, Human
agugcaguggcgcgaucauag

SEQ ID NO: 551502 - RNA, 23 nt, Human
agugcaguggcgcgaucauagcu

SEQ ID NO: 551503 - RNA, 24 nt, Human
agugcaguggcgcgaucauagcuc

SEQ ID NO: 551504 - RNA, 18 nt, Human
auagcucaccgcagccuc

SEQ ID NO: 551505 - RNA, 23 nt, Human
auaucuguaaacuugaacaccaa

SEQ ID NO: 551506 - RNA, 19 nt, Human
auccaggcuggagugcaau

SEQ ID NO: 551507 - RNA, 19 nt, Human
augaaaaacaacaucuuug

SEQ ID NO: 551508 - RNA, 24 nt, Human
caaagugcugggaccacaggcaug

SEQ ID NO: 551509 - RNA, 23 nt, Human
caaccuccgccucccaggcucaa

SEQ ID NO: 551510 - RNA, 24 nt, Human
caacucuggcugauuuaacagucu

SEQ ID NO: 551511 - RNA, 22 nt, Human
caagacagggucucacuccguu

SEQ ID NO: 551512 - RNA, 19 nt, Human
caccaacucuggcugauuu

SEQ ID NO: 551513 - RNA, 18 nt, Human
caccacacccagcuuugc

SEQ ID NO: 551514 - RNA, 18 nt, Human
caccacgcuggccaggcc

SEQ ID NO: 551515 - RNA, 21 nt, Human
caccacgcuggccaggccggu

SEQ ID NO: 551516 - RNA, 27 nt, Human
caccacgcuggccaggccggucucaaa

SEQ ID NO: 551517 - RNA, 22 nt, Human
cacccaccucagccucccaaag

SEQ ID NO: 551518 - RNA, 23 nt, Human
cacccaccucagccucccaaagu

SEQ ID NO: 551519 - RNA, 20 nt, Human
caccgcagccucaaucuccc

SEQ ID NO: 551520 - RNA, 24 nt, Human
caccucagccucccaaagugcugg

SEQ ID NO: 551521 - RNA, 24 nt, Human
cacgcuggccaggccggucucaaa

SEQ ID NO: 551522 - RNA, 24 nt, Human
cacuccguugcccagccuggagug

SEQ ID NO: 551523 - RNA, 24 nt, Human
cacucuugucauccaggcuggagu

SEQ ID NO: 551524 - RNA, 21 nt, Human
cacugcaaccuccgccuccca

SEQ ID NO: 551525 - RNA, 26 nt, Human
cagcagagaugaggcuucaccacgcu

SEQ ID NO: 551526 - RNA, 19 nt, Human
cagcagcccagggcaguca

SEQ ID NO: 551527 - RNA, 27 nt, Human
cagcagcuaggaucacaggcaugcacc

SEQ ID NO: 551528 - RNA, 24 nt, Human
cagccucaaucucccgggcugaag

SEQ ID NO: 551529 - RNA, 19 nt, Human
cagcggagucugagggggc

SEQ ID NO: 551530 - RNA, 24 nt, Human
caggaucuuccaacaagagcagga

SEQ ID NO: 551531 - RNA, 25 nt, Human
cauaucuguaaacuugaacaccaac

SEQ ID NO: 551532 - RNA, 24 nt, Human
caugagccaccgugaccagccuau

SEQ ID NO: 551533 - RNA, 24 nt, Human
ccaaagugcugggaccacaggcau

SEQ ID NO: 551534 - RNA, 26 nt, Human
ccaccaagcucuguguccagcugugu

SEQ ID NO: 551535 - RNA, 26 nt, Human
ccacccaccucagccucccaaagugc

SEQ ID NO: 551536 - RNA, 21 nt, Human
ccagggcagucagcucuccuc

SEQ ID NO: 551537 - RNA, 21 nt, Human
cccaggcucaagcgaauucuc

SEQ ID NO: 551538 - RNA, 22 nt, Human
cccaggcucaagcgaauucucc

SEQ ID NO: 551539 - RNA, 22 nt, Human
cccagggcagucagcucuccuc

SEQ ID NO: 551540 - RNA, 24 nt, Human
cccgaccucaggcgauccacccac

SEQ ID NO: 551541 - RNA, 20 nt, Human
cccgggcugaagcgauccuu

SEQ ID NO: 551542 - RNA, 25 nt, Human
ccuuccgucucagccuccccaacag

SEQ ID NO: 551543 - RNA, 24 nt, Human
cgauccacccaccucagccuccca

SEQ ID NO: 551544 - RNA, 26 nt, Human
cggggcgaagccacugacaauccgcc

SEQ ID NO: 551545 - RNA, 24 nt, Human
cggugcaacaccacacccagcuuu

SEQ ID NO: 551546 - RNA, 24 nt, Human
cgucucagccuccccaacagcugg

SEQ ID NO: 551547 - RNA, 22 nt, Human
cuaccucagccuccccagcagc

SEQ ID NO: 551548 - RNA, 19 nt, Human
cucaaacccccgaccucag

SEQ ID NO: 551549 - RNA, 25 nt, Human
cucaagcgaauucuccuaccucagc

SEQ ID NO: 551550 - RNA, 24 nt, Human
cucacugcaaccuccgccucccag

SEQ ID NO: 551551 - RNA, 25 nt, Human
cuccccagcagcuaggaucacaggc

SEQ ID NO: 551552 - RNA, 23 nt, Human
cugcaaccuccgccucccaggcu

SEQ ID NO: 551553 - RNA, 24 nt, Human
cuugucauccaggcuggagugcaa

SEQ ID NO: 551554 - RNA, 19 nt, Human
gaagcgauccuuccgucuc

SEQ ID NO: 551555 - RNA, 24 nt, Human
gaccucaggcgauccacccaccuc

SEQ ID NO: 551556 - RNA, 21 nt, Human
gaggcaaaugagggcagaagc

SEQ ID NO: 551557 - RNA, 19 nt, Human
gaucauagcucaccgcagc

SEQ ID NO: 551558 - RNA, 18 nt, Human
gcaaaugagggcagaagc

SEQ ID NO: 551559 - RNA, 22 nt, Human
gcaaccuccgccucccaggcuc

SEQ ID NO: 551560 - RNA, 21 nt, Human
gcagucagcucuccucggggc

SEQ ID NO: 551561 - RNA, 23 nt, Human
gccggucucaaacccccgaccuc

SEQ ID NO: 551562 - RNA, 23 nt, Human
gccucccaggcucaagcgaauuc

SEQ ID NO: 551563 - RNA, 27 nt, Human
gcgaauucuccuaccucagccucccca

SEQ ID NO: 551564 - RNA, 24 nt, Human
gcgauccacccaccucagccuccc

SEQ ID NO: 551565 - RNA, 24 nt, Human
gcgauccuuccgucucagccuccc

SEQ ID NO: 551566 - RNA, 19 nt, Human
gcuggagugcaauggcacg

SEQ ID NO: 551567 - RNA, 21 nt, Human
ggaccacaggcaugagccacc

SEQ ID NO: 551568 - RNA, 24 nt, Human
ggaccacaggcaugagccaccgug

SEQ ID NO: 551569 - RNA, 23 nt, Human
ggaguuucacucuugucauccag

SEQ ID NO: 551570 - RNA, 22 nt, Human
ggaucacaggcaugcaccacca

SEQ ID NO: 551571 - RNA, 21 nt, Human
ggcgaagagcagucaggaacg

SEQ ID NO: 551572 - RNA, 23 nt, Human
gggagaggcaaaugagggcagaa

SEQ ID NO: 551573 - RNA, 20 nt, Human
gggccggggucacagggaga

SEQ ID NO: 551574 - RNA, 23 nt, Human
gggccggggucacagggagaggc

SEQ ID NO: 551575 - RNA, 20 nt, Human
gugaccagccuauuauuauu

SEQ ID NO: 551576 - RNA, 24 nt, Human
uaccucagccuccccagcagcuag

SEQ ID NO: 551577 - RNA, 21 nt, Human
uaggaucacaggcaugcacca

SEQ ID NO: 551578 - RNA, 24 nt, Human
uaggaucacaggcaugcaccacca

SEQ ID NO: 551579 - RNA, 26 nt, Human
uauuacauagcaaaacauacuccaua

SEQ ID NO: 551580 - RNA, 23 nt, Human
ucaccgcagccucaaucucccgg

SEQ ID NO: 551581 - RNA, 24 nt, Human
ucaccgcagccucaaucucccggg

SEQ ID NO: 551582 - RNA, 23 nt, Human
ucacucuugucauccaggcugga

SEQ ID NO: 551583 - RNA, 19 nt, Human
ucacugcaaccuccgccuc

SEQ ID NO: 551584 - RNA, 24 nt, Human
ucacugcaaccuccgccucccagg

SEQ ID NO: 551585 - RNA, 25 nt, Human
ucacugcaaccuccgccucccaggc

SEQ ID NO: 551586 - RNA, 27 nt, Human
ucacugcaaccuccgccucccaggcuc

SEQ ID NO: 551587 - RNA, 18 nt, Human
ucagccucccaaagugcu

SEQ ID NO: 551588 - RNA, 18 nt, Human
ucagccuccccaacagcu

SEQ ID NO: 551589 - RNA, 20 nt, Human
ucagccuccccaacagcugg

SEQ ID NO: 551590 - RNA, 18 nt, Human
ucagccuccccagcagcu

SEQ ID NO: 551591 - RNA, 20 nt, Human
ucagccuccccagcagcuag

SEQ ID NO: 551592 - RNA, 19 nt, Human
ucaggaacggcuggacggg

SEQ ID NO: 551593 - RNA, 20 nt, Human
ucaggcgauccacccaccuc

SEQ ID NO: 551594 - RNA, 18 nt, Human
ucauccaggcuggagugc

SEQ ID NO: 551595 - RNA, 21 nt, Human
uccacccaccucagccuccca

SEQ ID NO: 551596 - RNA, 19 nt, Human
uccagcuguguuucugagg

SEQ ID NO: 551597 - RNA, 24 nt, Human
uccauacugaacaucacccaauug

SEQ ID NO: 551598 - RNA, 18 nt, Human
ucccaaagugcugggacc

SEQ ID NO: 551599 - RNA, 24 nt, Human
ucccaaagugcugggaccacaggc

SEQ ID NO: 551600 - RNA, 22 nt, Human
ucccaggcucaagcgaauucuc

SEQ ID NO: 551601 - RNA, 23 nt, Human
uccccagcagcuaggaucacagg

SEQ ID NO: 551602 - RNA, 19 nt, Human
ucgggcucuggcgaaaggg

SEQ ID NO: 551603 - RNA, 24 nt, Human
ucucacuccguugcccagccugga

SEQ ID NO: 551604 - RNA, 25 nt, Human
ucuccuaccucagccuccccagcag

SEQ ID NO: 551605 - RNA, 24 nt, Human
ucucugcauucucagcagagauug

SEQ ID NO: 551606 - RNA, 25 nt, Human
ucugccggaggcagcagcccagggc

SEQ ID NO: 551607 - RNA, 22 nt, Human
ucuucagacggagacgggccuc

SEQ ID NO: 551608 - RNA, 18 nt, Human
ucuugucauccaggcugg

SEQ ID NO: 551609 - RNA, 22 nt, Human
ugaaaaacaacaucuuugaaca

SEQ ID NO: 551610 - RNA, 22 nt, Human
ugaaaugaaaaacaacaucuuu

SEQ ID NO: 551611 - RNA, 21 nt, Human
ugagggcagaagcacucuuca

SEQ ID NO: 551612 - RNA, 22 nt, Human
ugagggggccggggucacaggg

SEQ ID NO: 551613 - RNA, 21 nt, Human
ugcaacaccacacccagcuuu

SEQ ID NO: 551614 - RNA, 24 nt, Human
ugcccagccuggagugcaguggcg

SEQ ID NO: 551615 - RNA, 19 nt, Human
ugcugggaccacaggcaug

SEQ ID NO: 551616 - RNA, 28 nt, Human
uggacggggccgagagacgacgcagcgg

SEQ ID NO: 551617 - RNA, 23 nt, Human
uggagugcaauggcacgaucucg

SEQ ID NO: 551618 - RNA, 24 nt, Human
uggagugcaauggcacgaucucgg

SEQ ID NO: 551619 - RNA, 19 nt, Human
uggagugcaguggcgcgau

SEQ ID NO: 551620 - RNA, 21 nt, Human
uggagugcaguggcgcgauca

SEQ ID NO: 551621 - RNA, 24 nt, Human
uggcgcgaucauagcucaccgcag

SEQ ID NO: 551622 - RNA, 21 nt, Human
ugggaccacaggcaugagcca

SEQ ID NO: 551623 - RNA, 23 nt, Human
ugggaccacaggcaugagccacc

SEQ ID NO: 551624 - RNA, 24 nt, Human
ugggaccacaggcaugagccaccg

SEQ ID NO: 551625 - RNA, 26 nt, Human
ugggaccacaggcaugagccaccgug

SEQ ID NO: 551626 - RNA, 21 nt, Human
uucacucuugucauccaggcu

SEQ ID NO: 551627 - RNA, 24 nt, Human
uucacucuugucauccaggcugga

SEQ ID NO: 551628 - RNA, 23 nt, Human
uucucagcagagaugaggcuuca

SEQ ID NO: 551629 - RNA, 24 nt, Human
uugcccagccuggagugcaguggc

SEQ ID NO: 551630 - RNA, 23 nt, Human
uuucacucuugucauccaggcug

SEQ ID NO: 551631 - RNA, 24 nt, Human
uuucacucuugucauccaggcugg

SEQ ID NO: 551632 - RNA, 26 nt, Human
uuuuuuuuuuuugagauggaguuuca

SEQ ID NO: 551633 - RNA, 22 nt, Human
uuuuuuuuuuuuuugagaugga

SEQ ID NO: 551634 - RNA, 18 nt, Human
uuuuuuuuuuuuuuuuug

SEQ ID NO: 551635 - RNA, 22 nt, Human
aaaccuugacaagaggaaccaa

SEQ ID NO: 551636 - RNA, 21 nt, Human
aacagcagacaccggcggggg

SEQ ID NO: 551637 - RNA, 18 nt, Human
aagaacagcagacaccgg

SEQ ID NO: 551638 - RNA, 23 nt, Human
agcagacaccggcggggguggcg

SEQ ID NO: 551639 - RNA, 23 nt, Human
caacaaagcaagaccuaugggga

SEQ ID NO: 551640 - RNA, 22 nt, Human
caaguccaucccuagacagcaa

SEQ ID NO: 551641 - RNA, 23 nt, Human
cagcucuugggcccccuguaccc

SEQ ID NO: 551642 - RNA, 22 nt, Human
caggagacagccagcccagcuc

SEQ ID NO: 551643 - RNA, 21 nt, Human
ccagcucuugggcccccugua

SEQ ID NO: 551644 - RNA, 22 nt, Human
cccucccuccccaccccuacug

SEQ ID NO: 551645 - RNA, 24 nt, Human
ccggcggggguggcggccucuccc

SEQ ID NO: 551646 - RNA, 20 nt, Human
cggccucucccucccucccc

SEQ ID NO: 551647 - RNA, 19 nt, Human
cggcggggguggcggccuc

SEQ ID NO: 551648 - RNA, 19 nt, Human
cucuugggcccccuguacc

SEQ ID NO: 551649 - RNA, 20 nt, Human
gacaagaggaaccaagucca

SEQ ID NO: 551650 - RNA, 27 nt, Human
ucccaaaccuugacaagaggaaccaag

SEQ ID NO: 551651 - RNA, 20 nt, Human
ucccucccuccccaccccua

SEQ ID NO: 551652 - RNA, 23 nt, Human
ucucccucccuccccaccccuac

SEQ ID NO: 551653 - RNA, 24 nt, Human
uggcggccucucccucccucccca

SEQ ID NO: 551654 - RNA, 22 nt, Human
aaaaacagucucuacuaacuua

SEQ ID NO: 551655 - RNA, 23 nt, Human
acaguuaaugaaaguaaaacuac

SEQ ID NO: 551656 - RNA, 19 nt, Human
accgcaccccgcaccaacg

SEQ ID NO: 551657 - RNA, 23 nt, Human
acuacuuuccucuguauaauauc

SEQ ID NO: 551658 - RNA, 21 nt, Human
agcacuacaaaccgcaccccg

SEQ ID NO: 551659 - RNA, 18 nt, Human
agcgcucucuuugguguu

SEQ ID NO: 551660 - RNA, 20 nt, Human
aggcuuuauaaaagucagca

SEQ ID NO: 551661 - RNA, 24 nt, Human
aguguauaaaaacccuuaagcaac

SEQ ID NO: 551662 - RNA, 26 nt, Human
caccaacggcagccgccauuuugguc

SEQ ID NO: 551663 - RNA, 21 nt, Human
caccgagccgcauuccuccgc

SEQ ID NO: 551664 - RNA, 21 nt, Human
cacgaaccgcgggccgaucuc

SEQ ID NO: 551665 - RNA, 23 nt, Human
cacuacaaaccgcaccccgcacc

SEQ ID NO: 551666 - RNA, 21 nt, Human
cagcacuacaaaccgcacccc

SEQ ID NO: 551667 - RNA, 19 nt, Human
cagcagucuucgugaaguc

SEQ ID NO: 551668 - RNA, 20 nt, Human
cagccgccauuuuggucggu

SEQ ID NO: 551669 - RNA, 25 nt, Human
cauuacauuucucacagagaaauca

SEQ ID NO: 551670 - RNA, 22 nt, Human
ccaccgagccgcauuccuccgc

SEQ ID NO: 551671 - RNA, 19 nt, Human
cccgcagggccacgaaccu

SEQ ID NO: 551672 - RNA, 24 nt, Human
ccgcaccccgcaccaacggcagcc

SEQ ID NO: 551673 - RNA, 18 nt, Human
ccgcauuccuccgccgcc

SEQ ID NO: 551674 - RNA, 18 nt, Human
ccgccuccaccagccgcu

SEQ ID NO: 551675 - RNA, 21 nt, Human
ccgcgggccgaucucagccgc

SEQ ID NO: 551676 - RNA, 19 nt, Human
ccuauggcccgccuccacc

SEQ ID NO: 551677 - RNA, 19 nt, Human
cgcaagcucgugccgaauu

SEQ ID NO: 551678 - RNA, 21 nt, Human
cucacagagaaaucaagaaaa

SEQ ID NO: 551679 - RNA, 23 nt, Human
cucgaguuuuuuuuuuuuuuuuu

SEQ ID NO: 551680 - RNA, 24 nt, Human
cucgaguuuuuuuuuuuuuuuuuc

SEQ ID NO: 551681 - RNA, 26 nt, Human
cuuaagcaacaguuaaugaaaguaaa

SEQ ID NO: 551682 - RNA, 18 nt, Human
cuuccaacuaauauuuca

SEQ ID NO: 551683 - RNA, 27 nt, Human
gaaaaaaaauuuccuaucaaucacaga

SEQ ID NO: 551684 - RNA, 18 nt, Human
gaaccgcgggccgaucuc

SEQ ID NO: 551685 - RNA, 18 nt, Human
gaaccgcgggccgaucuc

SEQ ID NO: 551686 - RNA, 22 nt, Human
gaaguuuuuuauuaggaaaaga

SEQ ID NO: 551687 - RNA, 22 nt, Human
gaguuuuuuuuuuuuuuuuuuu

SEQ ID NO: 551688 - RNA, 20 nt, Human
gaucucagccgccuccuccc

SEQ ID NO: 551689 - RNA, 24 nt, Human
gcaacagcacuacaaaccgcaccc

SEQ ID NO: 551690 - RNA, 21 nt, Human
gcacuacaaaccgcaccccgc

SEQ ID NO: 551691 - RNA, 20 nt, Human
gcagccgccauuuuggucgg

SEQ ID NO: 551692 - RNA, 26 nt, Human
gcccgggaggcccccucucuagcccc

SEQ ID NO: 551693 - RNA, 18 nt, Human
guaaaacuacaaaaacag

SEQ ID NO: 551694 - RNA, 21 nt, Human
uaaaacuacaaaaacagucuc

SEQ ID NO: 551695 - RNA, 20 nt, Human
uaaaguagaaguccaggcuu

SEQ ID NO: 551696 - RNA, 19 nt, Human
uaagcaacaguuaaugaaa

SEQ ID NO: 551697 - RNA, 23 nt, Human
uagaaguccaggcuuuauaaaag

SEQ ID NO: 551698 - RNA, 25 nt, Human
uaggaaaagacauuagaauaggaaa

SEQ ID NO: 551699 - RNA, 25 nt, Human
uagggcaacagcacuacaaaccgca

SEQ ID NO: 551700 - RNA, 24 nt, Human
ucagcagucuucgugaagucuucc

SEQ ID NO: 551701 - RNA, 18 nt, Human
ucccuggcucgaccaccu

SEQ ID NO: 551702 - RNA, 26 nt, Human
uccuccgccgccacuguuuugugcgg

SEQ ID NO: 551703 - RNA, 24 nt, Human
ucucgcugccgcacuggcccggga

SEQ ID NO: 551704 - RNA, 24 nt, Human
ucuggaaguguauaaaaacccuua

SEQ ID NO: 551705 - RNA, 23 nt, Human
ucuuuucacauuuugcaaaggga

SEQ ID NO: 551706 - RNA, 22 nt, Human
ugcaaagggaugaguagggcaa

SEQ ID NO: 551707 - RNA, 24 nt, Human
uggcccgccuccaccagccgcuuu

SEQ ID NO: 551708 - RNA, 20 nt, Human
uguuucauaccuuuccucgg

SEQ ID NO: 551709 - RNA, 24 nt, Human
uucauaucaaccuauguuccuaga

SEQ ID NO: 551710 - RNA, 23 nt, Human
uuccuccgccgccacuguuuugu

SEQ ID NO: 551711 - RNA, 24 nt, Human
uuucuucgggcuagggcugucauc

SEQ ID NO: 551712 - RNA, 21 nt, Human
uuuuuuuuccuuacaaauaaa

SEQ ID NO: 551713 - RNA, 20 nt, Human
acuucucguguuagaaagaa

SEQ ID NO: 551714 - RNA, 22 nt, Human
agaaaaaacaguucauucaaaa

SEQ ID NO: 551715 - RNA, 20 nt, Human
aggugguaggggacuaguuu

SEQ ID NO: 551716 - RNA, 23 nt, Human
aucuuaucauucccuuuucacug

SEQ ID NO: 551717 - RNA, 23 nt, Human
cagugguuuccuucaggacauuc

SEQ ID NO: 551718 - RNA, 23 nt, Human
caguucauucaaaauacaucuua

SEQ ID NO: 551719 - RNA, 21 nt, Human
cccuucauucucuuauguucc

SEQ ID NO: 551720 - RNA, 22 nt, Human
cuucaauuccauugcguauuuc

SEQ ID NO: 551721 - RNA, 23 nt, Human
gccacaggacugaguuaaauuuc

SEQ ID NO: 551722 - RNA, 18 nt, Human
ggagacaaggugucuugg

SEQ ID NO: 551723 - RNA, 25 nt, Human
uacagaaaaaacaguucauucaaaa

SEQ ID NO: 551724 - RNA, 30 nt, Human
uagcauaaacagaaaaacugauuuaaaauu

SEQ ID NO: 551725 - RNA, 20 nt, Human
uaggggacuaguuucaaagg

SEQ ID NO: 551726 - RNA, 21 nt, Human
uaggggacuaguuucaaaggc

SEQ ID NO: 551727 - RNA, 22 nt, Human
uauucugccccuucauucucuu

SEQ ID NO: 551728 - RNA, 20 nt, Human
uccacuuucuguaauggagc

SEQ ID NO: 551729 - RNA, 21 nt, Human
ucuacagaaaaaacaguucau

SEQ ID NO: 551730 - RNA, 21 nt, Human
ugaguuaaauuuccacauuca

SEQ ID NO: 551731 - RNA, 21 nt, Human
uggaaaaaaccacuaggagcg

SEQ ID NO: 551732 - RNA, 21 nt, Human
uguaauggagcucauuaccga

SEQ ID NO: 551733 - RNA, 23 nt, Human
uguaauggagcucauuaccgagg

SEQ ID NO: 551734 - RNA, 19 nt, Human
ugucuuggugcaauuuuga

SEQ ID NO: 551735 - RNA, 20 nt, Human
ugugcaguuguaauuaucca

SEQ ID NO: 551736 - RNA, 20 nt, Human
uucacaaauugugacaccau

SEQ ID NO: 551737 - RNA, 22 nt, Human
uucauuggcgguggccgcagug

SEQ ID NO: 551738 - RNA, 24 nt, Human
uucauuggcgguggccgcaguggu

SEQ ID NO: 551739 - RNA, 19 nt, Human
uuccuucuguguuagugca

SEQ ID NO: 551740 - RNA, 24 nt, Human
uuuuuuuguguuucuucaauucuu

SEQ ID NO: 551741 - RNA, 24 nt, Human
uuuuuuuuuuuuuuuuuuguguuu

SEQ ID NO: 551742 - RNA, 27 nt, Human
uuuuuuuuuuuuuuuuuuuuuuugggg

SEQ ID NO: 551743 - RNA, 23 nt, Human
aaaaacacaacacccaagccucc

SEQ ID NO: 551744 - RNA, 31 nt, Human
aaacaaacaaaacaaaaaacacaacaccccc

SEQ ID NO: 551745 - RNA, 25 nt, Human
aaacaaacaaacaaaacaaaaaaca

SEQ ID NO: 551746 - RNA, 21 nt, Human
aaagguaaacaaagcagaccc

SEQ ID NO: 551747 - RNA, 21 nt, Human
aacaaacaaacaaacaaaaca

SEQ ID NO: 551748 - RNA, 23 nt, Human
aacacccaagccucccuucuccc

SEQ ID NO: 551749 - RNA, 23 nt, Human
aaggcgcccgcgcccccggcuca

SEQ ID NO: 551750 - RNA, 23 nt, Human
acaaaacaaaaaacacaacaccc

SEQ ID NO: 551751 - RNA, 23 nt, Human
acaaacaaacaaaacaaaaaaca

SEQ ID NO: 551752 - RNA, 19 nt, Human
acaaacaaacaaacaaaac

SEQ ID NO: 551753 - RNA, 24 nt, Human
accuccucccaggccccacaccca

SEQ ID NO: 551754 - RNA, 24 nt, Human
agaccaggaacuucucggcugauu

SEQ ID NO: 551755 - RNA, 24 nt, Human
agcggcgggggcucccgggaggga

SEQ ID NO: 551756 - RNA, 18 nt, Human
aggaagcuccccacgccu

SEQ ID NO: 551757 - RNA, 24 nt, Human
aucuuuaaaaacaaacaaacaaac

SEQ ID NO: 551758 - RNA, 22 nt, Human
caaaacaaaaaacacaacaccc

SEQ ID NO: 551759 - RNA, 23 nt, Human
caaacaaaacaaaaaacacaaca

SEQ ID NO: 551760 - RNA, 19 nt, Human
caaagcagacccucagaaa

SEQ ID NO: 551761 - RNA, 23 nt, Human
cacagcccacaguacaaaaugaa

SEQ ID NO: 551762 - RNA, 20 nt, Human
cacccaagccucccuucucc

SEQ ID NO: 551763 - RNA, 19 nt, Human
caccccccaccccuccaca

SEQ ID NO: 551764 - RNA, 25 nt, Human
caccccuccacauucucgugauuca

SEQ ID NO: 551765 - RNA, 21 nt, Human
caccgcacgaaagguaaacaa

SEQ ID NO: 551766 - RNA, 24 nt, Human
caccgcacgaaagguaaacaaagc

SEQ ID NO: 551767 - RNA, 22 nt, Human
caccugugggcgcaggucucug

SEQ ID NO: 551768 - RNA, 21 nt, Human
cacugacaccccccaccccuc

SEQ ID NO: 551769 - RNA, 23 nt, Human
cacugacaccccccaccccucca

SEQ ID NO: 551770 - RNA, 23 nt, Human
cagaaggagagcgaaagguucac

SEQ ID NO: 551771 - RNA, 23 nt, Human
cagagucccucuccgggccucuc

SEQ ID NO: 551772 - RNA, 21 nt, Human
cagcacagcccacaguacaaa

SEQ ID NO: 551773 - RNA, 20 nt, Human
cagcucagccuuaugccuuu

SEQ ID NO: 551774 - RNA, 18 nt, Human
caggauggaggggggugg

SEQ ID NO: 551775 - RNA, 18 nt, Human
ccacugacaccccccacc

SEQ ID NO: 551776 - RNA, 18 nt, Human
ccaggccccacacccacg

SEQ ID NO: 551777 - RNA, 21 nt, Human
ccaguccacuaagacagcacc

SEQ ID NO: 551778 - RNA, 20 nt, Human
cccacaguacaaaaugaagu

SEQ ID NO: 551779 - RNA, 22 nt, Human
cccacgccugccccaugacgca

SEQ ID NO: 551780 - RNA, 22 nt, Human
cccaggauggagggggguggcc

SEQ ID NO: 551781 - RNA, 22 nt, Human
ccccacacccacgcaaggcgac

SEQ ID NO: 551782 - RNA, 19 nt, Human
ccccaccccuccacauucu

SEQ ID NO: 551783 - RNA, 19 nt, Human
ccccaggaccuccucccag

SEQ ID NO: 551784 - RNA, 24 nt, Human
ccccccaccccuccacauucucgu

SEQ ID NO: 551785 - RNA, 18 nt, Human
ccccggcucagacuccuc

SEQ ID NO: 551786 - RNA, 21 nt, Human
cccucuccgggccucucagca

SEQ ID NO: 551787 - RNA, 18 nt, Human
ccgcgcccccggcucaga

SEQ ID NO: 551788 - RNA, 28 nt, Human
ccgcgcccccggcucagacuccucggug

SEQ ID NO: 551789 - RNA, 18 nt, Human
ccggcagcgccgcucggg

SEQ ID NO: 551790 - RNA, 21 nt, Human
ccucagaaacucccuggcaag

SEQ ID NO: 551791 - RNA, 23 nt, Human
cgacucgacggcgacagcggcgg

SEQ ID NO: 551792 - RNA, 18 nt, Human
cgcccccggcucagacuc

SEQ ID NO: 551793 - RNA, 19 nt, Human
cgcccucgggccgacgguu

SEQ ID NO: 551794 - RNA, 21 nt, Human
cgcccucgggccgacgguucg

SEQ ID NO: 551795 - RNA, 21 nt, Human
cgggagggacagaacaggcag

SEQ ID NO: 551796 - RNA, 26 nt, Human
cgggagggacagaacaggcagcaggu

SEQ ID NO: 551797 - RNA, 21 nt, Human
cgggggcucccgggagggaca

SEQ ID NO: 551798 - RNA, 22 nt, Human
cggugccgucccugcacacuga

SEQ ID NO: 551799 - RNA, 25 nt, Human
cucagccuuaugccuuuccacugac

SEQ ID NO: 551800 - RNA, 20 nt, Human
cuccacgguuuucgcgggcg

SEQ ID NO: 551801 - RNA, 19 nt, Human
cucccaggccccacaccca

SEQ ID NO: 551802 - RNA, 23 nt, Human
cucccaggccccacacccacgca

SEQ ID NO: 551803 - RNA, 21 nt, Human
cuccccacugcccagggcggg

SEQ ID NO: 551804 - RNA, 19 nt, Human
cucuccuccccacugccca

SEQ ID NO: 551805 - RNA, 26 nt, Human
cuuuccacugacaccccccaccccuc

SEQ ID NO: 551806 - RNA, 30 nt, Human
gaaaaaccuugaaagggccagcacagcccc

SEQ ID NO: 551807 - RNA, 19 nt, Human
gacucgacggcgacagcgg

SEQ ID NO: 551808 - RNA, 21 nt, Human
gcacgaaagguaaacaaagca

SEQ ID NO: 551809 - RNA, 19 nt, Human
gcagcgccgcucggggucc

SEQ ID NO: 551810 - RNA, 19 nt, Human
gcaggucucugcggaaggc

SEQ ID NO: 551811 - RNA, 25 nt, Human
gccccaggaccuccucccaggcccc

SEQ ID NO: 551812 - RNA, 20 nt, Human
gcgggugcacgccccaggac

SEQ ID NO: 551813 - RNA, 18 nt, Human
ggaaggcgcccgcgcccc

SEQ ID NO: 551814 - RNA, 19 nt, Human
ggaaggcgcccgcgccccc

SEQ ID NO: 551815 - RNA, 21 nt, Human
gugaaguaacucaggccacuc

SEQ ID NO: 551816 - RNA, 20 nt, Human
uaacucaggccacucuccuc

SEQ ID NO: 551817 - RNA, 23 nt, Human
uacaaaaugaaguccgacccuga

SEQ ID NO: 551818 - RNA, 23 nt, Human
uacugggcaccucuaaugcagau

SEQ ID NO: 551819 - RNA, 25 nt, Human
uagacggaguuaaaaagaauccacc

SEQ ID NO: 551820 - RNA, 19 nt, Human
ucagacuccucggugccgu

SEQ ID NO: 551821 - RNA, 22 nt, Human
ucagcggagggggaaggggagu

SEQ ID NO: 551822 - RNA, 19 nt, Human
uccaccgcacgaaagguaa

SEQ ID NO: 551823 - RNA, 25 nt, Human
uccacugacaccccccaccccucca

SEQ ID NO: 551824 - RNA, 24 nt, Human
ucccaguccacuaagacagcaccu

SEQ ID NO: 551825 - RNA, 19 nt, Human
uccccacugcccagggcgg

SEQ ID NO: 551826 - RNA, 27 nt, Human
ucccuucucccaguccagaaggagagc

SEQ ID NO: 551827 - RNA, 18 nt, Human
ucgggccgacgguucgac

SEQ ID NO: 551828 - RNA, 21 nt, Human
ucucugcggaaggcgcccgcg

SEQ ID NO: 551829 - RNA, 19 nt, Human
ugaaagggccagcacagcc

SEQ ID NO: 551830 - RNA, 18 nt, Human
ugaaguccgacccugagg

SEQ ID NO: 551831 - RNA, 19 nt, Human
ugagaaaaacuugagaaug

SEQ ID NO: 551832 - RNA, 24 nt, Human
ugcagaugagaaaaacuugagaau

SEQ ID NO: 551833 - RNA, 20 nt, Human
uggcccaguuucaccagcaa

SEQ ID NO: 551834 - RNA, 19 nt, Human
ugugaaaguagaucagucc

SEQ ID NO: 551835 - RNA, 20 nt, Human
uuggcccaguuucaccagca

SEQ ID NO: 551836 - RNA, 25 nt, Human
aaaaaacaccaauaaaaaaaaaccc

SEQ ID NO: 551837 - RNA, 26 nt, Human
aaaaaacaccaauaaaaaaaaaccca

SEQ ID NO: 551838 - RNA, 25 nt, Human
aaaacaaauuauuuccaaaaagccc

SEQ ID NO: 551839 - RNA, 23 nt, Human
aaacaaaaauaaaaacaaaacag

SEQ ID NO: 551840 - RNA, 22 nt, Human
aaagagacagggucuugccaug

SEQ ID NO: 551841 - RNA, 22 nt, Human
aaagcacaagacaauccuacaa

SEQ ID NO: 551842 - RNA, 23 nt, Human
aaaguggguggaucaccugaggu

SEQ ID NO: 551843 - RNA, 18 nt, Human
aacaaaaauccccaaagc

SEQ ID NO: 551844 - RNA, 23 nt, Human
aacaaacaaacaaacaaacaaac

SEQ ID NO: 551845 - RNA, 18 nt, Human
aacaagcugcaucauguu

SEQ ID NO: 551846 - RNA, 21 nt, Human
aacacagugagacaccugucu

SEQ ID NO: 551847 - RNA, 22 nt, Human
aacacagugagacaccugucuc

SEQ ID NO: 551848 - RNA, 19 nt, Human
aacauagcgaaaccccauc

SEQ ID NO: 551849 - RNA, 21 nt, Human
aacauagcgaaaccccaucuc

SEQ ID NO: 551850 - RNA, 21 nt, Human
aacauagcgaaaccccaucuc

SEQ ID NO: 551851 - RNA, 19 nt, Human
aacauggugaaaccccauc

SEQ ID NO: 551852 - RNA, 20 nt, Human
aacauggugaaaccccaucu

SEQ ID NO: 551853 - RNA, 21 nt, Human
aacauggugaaaccccaucuc

SEQ ID NO: 551854 - RNA, 21 nt, Human
aacauggugaaaccccaucuc

SEQ ID NO: 551855 - RNA, 26 nt, Human
aaccacagguaaguuauuuaaccacc

SEQ ID NO: 551856 - RNA, 21 nt, Human
aacccaggauggcaaugacac

SEQ ID NO: 551857 - RNA, 23 nt, Human
aacuccuaguuuuugacagaaaa

SEQ ID NO: 551858 - RNA, 22 nt, Human
aagaguguuauuucuaguuuuu

SEQ ID NO: 551859 - RNA, 22 nt, Human
aagcaggaaaauugcuugaacc

SEQ ID NO: 551860 - RNA, 24 nt, Human
aagcaggaaaauugcuugaaccug

SEQ ID NO: 551861 - RNA, 19 nt, Human
aagcagggaauugccaggu

SEQ ID NO: 551862 - RNA, 19 nt, Human
aagcggaaguugcagugaa

SEQ ID NO: 551863 - RNA, 20 nt, Human
aagcugcaucauguucagaa

SEQ ID NO: 551864 - RNA, 18 nt, Human
aaggaacuaaauuauuuc

SEQ ID NO: 551865 - RNA, 24 nt, Human
aaguggaaguugcagugagccaag

SEQ ID NO: 551866 - RNA, 23 nt, Human
aauagcauccacuauaccuuuaa

SEQ ID NO: 551867 - RNA, 24 nt, Human
aaucgcuugaacccgggaagugga

SEQ ID NO: 551868 - RNA, 18 nt, Human
aauugcuugaaccuggga

SEQ ID NO: 551869 - RNA, 25 nt, Human
acaaaaauccccaaagcacaagaca

SEQ ID NO: 551870 - RNA, 23 nt, Human
acaaacaaacaaacaaaaaagac

SEQ ID NO: 551871 - RNA, 23 nt, Human
acaaacaaacaaacaaaaaagac

SEQ ID NO: 551872 - RNA, 22 nt, Human
acaccacagcacuccagccugg

SEQ ID NO: 551873 - RNA, 23 nt, Human
acacuuugggaggcugaggcagg

SEQ ID NO: 551874 - RNA, 18 nt, Human
acagcacuccagccuggg

SEQ ID NO: 551875 - RNA, 23 nt, Human
acagcacuccagccugggugaca

SEQ ID NO: 551876 - RNA, 21 nt, Human
acauuaaccauauaccagucu

SEQ ID NO: 551877 - RNA, 21 nt, Human
accacugcacuccagccugag

SEQ ID NO: 551878 - RNA, 24 nt, Human
accccaucucuacuaaaaauacaa

SEQ ID NO: 551879 - RNA, 24 nt, Human
accccaucucuacuaaaaauacaa

SEQ ID NO: 551880 - RNA, 23 nt, Human
accuguagucccagcuacuuggg

SEQ ID NO: 551881 - RNA, 22 nt, Human
accugucaucucagcaaacacu

SEQ ID NO: 551882 - RNA, 22 nt, Human
acgucuaguaaucccagcacuu

SEQ ID NO: 551883 - RNA, 18 nt, Human
acugcacuccagccugag

SEQ ID NO: 551884 - RNA, 23 nt, Human
acugcacuccagccugagugcag

SEQ ID NO: 551885 - RNA, 24 nt, Human
acuugagguuaggaguucgagacc

SEQ ID NO: 551886 - RNA, 23 nt, Human
agacagggucuugccauguugcc

SEQ ID NO: 551887 - RNA, 21 nt, Human
agagacagggucuugccaugu

SEQ ID NO: 551888 - RNA, 20 nt, Human
agcacuaacuaauaugugcu

SEQ ID NO: 551889 - RNA, 24 nt, Human
agcacuuugggaggcugaggcggg

SEQ ID NO: 551890 - RNA, 24 nt, Human
agcacuuugggaggucaaaguggg

SEQ ID NO: 551891 - RNA, 23 nt, Human
agccaaaaaacaaacaaacaaac

SEQ ID NO: 551892 - RNA, 18 nt, Human
agccaggcgugguggugc

SEQ ID NO: 551893 - RNA, 24 nt, Human
agcccagccaacauggugaaaccc

SEQ ID NO: 551894 - RNA, 20 nt, Human
agccugagugcagugagacu

SEQ ID NO: 551895 - RNA, 24 nt, Human
agccuggccaacauagcgaaaccc

SEQ ID NO: 551896 - RNA, 19 nt, Human
agcugacugcaauaacuug

SEQ ID NO: 551897 - RNA, 23 nt, Human
agcugaggcaggagaaucgcuug

SEQ ID NO: 551898 - RNA, 24 nt, Human
aggaccacuugaggccaggaguuc

SEQ ID NO: 551899 - RNA, 23 nt, Human
aggaguucaagaccagccuggac

SEQ ID NO: 551900 - RNA, 23 nt, Human
aggcaagcaaauagcuacaaagg

SEQ ID NO: 551901 - RNA, 24 nt, Human
aggcaggagaaucgcuugaacccg

SEQ ID NO: 551902 - RNA, 18 nt, Human
aggcaggaggaccacuug

SEQ ID NO: 551903 - RNA, 21 nt, Human
aggcggguggaucacuugagg

SEQ ID NO: 551904 - RNA, 21 nt, Human
aggcggguggaucacuugagg

SEQ ID NO: 551905 - RNA, 23 nt, Human
aggcggguggaucacuugagguu

SEQ ID NO: 551906 - RNA, 24 nt, Human
aggcugaggcaggaggaccacuug

SEQ ID NO: 551907 - RNA, 21 nt, Human
aggcugaggcggguggaucac

SEQ ID NO: 551908 - RNA, 24 nt, Human
aggcugaggcggguggaucacuug

SEQ ID NO: 551909 - RNA, 19 nt, Human
agguaauucaaauguaugu

SEQ ID NO: 551910 - RNA, 19 nt, Human
agguaggcugggugcagug

SEQ ID NO: 551911 - RNA, 22 nt, Human
agguaggcugggugcaguggcu

SEQ ID NO: 551912 - RNA, 19 nt, Human
agguuggagugcagugguu

SEQ ID NO: 551913 - RNA, 23 nt, Human
aguagcucgcaccuguaaucccc

SEQ ID NO: 551914 - RNA, 24 nt, Human
aguggcucacaccuguaaucccag

SEQ ID NO: 551915 - RNA, 21 nt, Human
auagaacaaaaacuagagauu

SEQ ID NO: 551916 - RNA, 23 nt, Human
auagagcagcaguaacuuucaag

SEQ ID NO: 551917 - RNA, 19 nt, Human
auauauauauauauauaua

SEQ ID NO: 551918 - RNA, 19 nt, Human
auauauauauauauauaua

SEQ ID NO: 551919 - RNA, 19 nt, Human
auauauauauauauauaua

SEQ ID NO: 551920 - RNA, 19 nt, Human
auauauauauauauauaua

SEQ ID NO: 551921 - RNA, 19 nt, Human
auauauauauauauauaua

SEQ ID NO: 551922 - RNA, 19 nt, Human
auauauauauauauauaua

SEQ ID NO: 551923 - RNA, 24 nt, Human
aucacaccacagcacuccagccug

SEQ ID NO: 551924 - RNA, 24 nt, Human
aucacuugagguuaggaguucgag

SEQ ID NO: 551925 - RNA, 24 nt, Human
aucguaccacugcacuccagccug

SEQ ID NO: 551926 - RNA, 23 nt, Human
caaaaagcccuaaucauaugaua

SEQ ID NO: 551927 - RNA, 23 nt, Human
caaaaauccccaaagcacaagac

SEQ ID NO: 551928 - RNA, 21 nt, Human
caaacaaacaaaaaagacggu

SEQ ID NO: 551929 - RNA, 24 nt, Human
caaaguggguggaucaccugaggu

SEQ ID NO: 551930 - RNA, 24 nt, Human
caacauggugaaaccccaucucua

SEQ ID NO: 551931 - RNA, 24 nt, Human
caagcaaauagcuacaaaaaccuu

SEQ ID NO: 551932 - RNA, 24 nt, Human
cacaccuguaaucccagcacuuug

SEQ ID NO: 551933 - RNA, 23 nt, Human
cacacuuugggaggcugaggcag

SEQ ID NO: 551934 - RNA, 24 nt, Human
cacagcacuccagccugggugaca

SEQ ID NO: 551935 - RNA, 22 nt, Human
cacaugaaauaaaagauuccac

SEQ ID NO: 551936 - RNA, 22 nt, Human
cacauuaaccauauaccagucu

SEQ ID NO: 551937 - RNA, 23 nt, Human
cacauuauaacuuugcuucuugg

SEQ ID NO: 551938 - RNA, 19 nt, Human
caccacagcacuccagccu

SEQ ID NO: 551939 - RNA, 23 nt, Human
caccaggaagguaacugucccaa

SEQ ID NO: 551940 - RNA, 19 nt, Human
caccuguaaucccagcacu

SEQ ID NO: 551941 - RNA, 24 nt, Human
caccuguaaucccagcacuuuggg

SEQ ID NO: 551942 - RNA, 22 nt, Human
caccuguaauccccacacuuug

SEQ ID NO: 551943 - RNA, 23 nt, Human
caccuguaauccccacacuuugg

SEQ ID NO: 551944 - RNA, 24 nt, Human
caccuguaauccccacacuuuggg

SEQ ID NO: 551945 - RNA, 23 nt, Human
caccuguagucccagcuacuugg

SEQ ID NO: 551946 - RNA, 24 nt, Human
caccuguagucccagcuacuuggg

SEQ ID NO: 551947 - RNA, 19 nt, Human
cacuccagccugagugcag

SEQ ID NO: 551948 - RNA, 20 nt, Human
cacuccagccugagugcagu

SEQ ID NO: 551949 - RNA, 18 nt, Human
cacuccagccugggugac

SEQ ID NO: 551950 - RNA, 19 nt, Human
cacuccagccugggugaca

SEQ ID NO: 551951 - RNA, 18 nt, Human
cacugcacuccagccuga

SEQ ID NO: 551952 - RNA, 19 nt, Human
cacugcacuccagccugag

SEQ ID NO: 551953 - RNA, 19 nt, Human
cacugcacuccagccugag

SEQ ID NO: 551954 - RNA, 23 nt, Human
cacugcacuccagccugagugca

SEQ ID NO: 551955 - RNA, 23 nt, Human
cacuugagguuaggaguucgaga

SEQ ID NO: 551956 - RNA, 23 nt, Human
cacuuuucuccccugaauauacu

SEQ ID NO: 551957 - RNA, 21 nt, Human
cagaauuuagccugguguuaa

SEQ ID NO: 551958 - RNA, 24 nt, Human
cagcacuuugggaggcugaggcgg

SEQ ID NO: 551959 - RNA, 24 nt, Human
cagcacuuugggaggucaaagugg

SEQ ID NO: 551960 - RNA, 19 nt, Human
cagccccaaacuccuguac

SEQ ID NO: 551961 - RNA, 22 nt, Human
cagcugaaacccuuucaaaagc

SEQ ID NO: 551962 - RNA, 24 nt, Human
cagggucuugccauguugcccagg

SEQ ID NO: 551963 - RNA, 25 nt, Human
caucucaaaaaacaaaaauaaaaac

SEQ ID NO: 551964 - RNA, 18 nt, Human
cauguugcccagguugga

SEQ ID NO: 551965 - RNA, 22 nt, Human
cauguugcccagguuggagugc

SEQ ID NO: 551966 - RNA, 24 nt, Human
cauguugcccagguuggagugcag

SEQ ID NO: 551967 - RNA, 20 nt, Human
cauuacacacuacagcccca

SEQ ID NO: 551968 - RNA, 20 nt, Human
cauuuucuaaacaagaaaca

SEQ ID NO: 551969 - RNA, 18 nt, Human
ccaaagcacaagacaauc

SEQ ID NO: 551970 - RNA, 24 nt, Human
ccaacaguguuuuugaacaggcau

SEQ ID NO: 551971 - RNA, 24 nt, Human
ccacacuuugggaggcugaggcag

SEQ ID NO: 551972 - RNA, 18 nt, Human
ccacagcacuccagccug

SEQ ID NO: 551973 - RNA, 20 nt, Human
ccacagcacuccagccuggg

SEQ ID NO: 551974 - RNA, 21 nt, Human
ccacagcacuccagccugggu

SEQ ID NO: 551975 - RNA, 23 nt, Human
ccacagcacuccagccuggguga

SEQ ID NO: 551976 - RNA, 24 nt, Human
ccacagcacuccagccugggugac

SEQ ID NO: 551977 - RNA, 20 nt, Human
ccacugcacuccagccugag

SEQ ID NO: 551978 - RNA, 21 nt, Human
ccacugcacuccagccugagu

SEQ ID NO: 551979 - RNA, 23 nt, Human
ccacugcacuccagccugagugc

SEQ ID NO: 551980 - RNA, 18 nt, Human
ccaggauggcaaugacac

SEQ ID NO: 551981 - RNA, 23 nt, Human
cccaaacuccuguacuccaguga

SEQ ID NO: 551982 - RNA, 20 nt, Human
cccaaagcacaagacaaucc

SEQ ID NO: 551983 - RNA, 19 nt, Human
cccagacacaaacagacaa

SEQ ID NO: 551984 - RNA, 24 nt, Human
cccagccaacauggugaaacccca

SEQ ID NO: 551985 - RNA, 19 nt, Human
ccccaaacuccuguacucc

SEQ ID NO: 551986 - RNA, 21 nt, Human
ccuaccacugagcuaaacuga

SEQ ID NO: 551987 - RNA, 24 nt, Human
ccuggccaacauagcgaaacccca

SEQ ID NO: 551988 - RNA, 21 nt, Human
ccuguagucccagcuacuugg

SEQ ID NO: 551989 - RNA, 24 nt, Human
cgagaccagcccagccaacauggu

SEQ ID NO: 551990 - RNA, 20 nt, Human
cuaacaaaaaugagaguaga

SEQ ID NO: 551991 - RNA, 20 nt, Human
cuaguaaucccagcacuuug

SEQ ID NO: 551992 - RNA, 23 nt, Human
cuauugcauccuaaaggccuggg

SEQ ID NO: 551993 - RNA, 25 nt, Human
cucaaaaaacaaaaauaaaaacaaa

SEQ ID NO: 551994 - RNA, 23 nt, Human
cucaaaacagauaaucaugaauu

SEQ ID NO: 551995 - RNA, 20 nt, Human
cucaacucuaaguguuuaac

SEQ ID NO: 551996 - RNA, 22 nt, Human
cucacaccuguaaucccagcac

SEQ ID NO: 551997 - RNA, 24 nt, Human
cucacaccuguaaucccagcacuu

SEQ ID NO: 551998 - RNA, 25 nt, Human
cuccagugauccucccugcccccac

SEQ ID NO: 551999 - RNA, 20 nt, Human
cucccugcccccaccuccuu

SEQ ID NO: 552000 - RNA, 18 nt, Human
cuccuucccaaauaacug

SEQ ID NO: 552001 - RNA, 19 nt, Human
cuccuucccaaauaacugg

SEQ ID NO: 552002 - RNA, 24 nt, Human
cucgcaccuguaauccccacacuu

SEQ ID NO: 552003 - RNA, 19 nt, Human
cugaaagcagucauuuugc

SEQ ID NO: 552004 - RNA, 21 nt, Human
cugaagaagaaaaaccugcau

SEQ ID NO: 552005 - RNA, 21 nt, Human
cuggcagcugacugcaauaac

SEQ ID NO: 552006 - RNA, 23 nt, Human
cuggccaacauagcgaaacccca

SEQ ID NO: 552007 - RNA, 18 nt, Human
gaaaccccaucucuacua

SEQ ID NO: 552008 - RNA, 21 nt, Human
gaaauguucgcugucaauguc

SEQ ID NO: 552009 - RNA, 18 nt, Human
gaaguggaaguugcagug

SEQ ID NO: 552010 - RNA, 18 nt, Human
gaaguugcagugagccaa

SEQ ID NO: 552011 - RNA, 19 nt, Human
gaaguugcagugagccaag

SEQ ID NO: 552012 - RNA, 24 nt, Human
gaccacuugaggccaggaguucaa

SEQ ID NO: 552013 - RNA, 23 nt, Human
gagaaucgcuugaacccgggaag

SEQ ID NO: 552014 - RNA, 21 nt, Human
gaguucuuuccuuucuuucuc

SEQ ID NO: 552015 - RNA, 24 nt, Human
gaucaccugaggucagaaguuuga

SEQ ID NO: 552016 - RNA, 24 nt, Human
gaucacuugagguuaggaguucga

SEQ ID NO: 552017 - RNA, 22 nt, Human
gcagugagacuucaucucaaaa

SEQ ID NO: 552018 - RNA, 21 nt, Human
gccaaaaaacaaacaaacaaa

SEQ ID NO: 552019 - RNA, 24 nt, Human
gccaacauggugaaaccccaucuc

SEQ ID NO: 552020 - RNA, 20 nt, Human
gccaagaucguaccacugca

SEQ ID NO: 552021 - RNA, 24 nt, Human
ggaaguugcagugagccaagaucg

SEQ ID NO: 552022 - RNA, 20 nt, Human
ggagcaguagcucgcaccug

SEQ ID NO: 552023 - RNA, 24 nt, Human
ggcuuacgucuaguaaucccagca

SEQ ID NO: 552024 - RNA, 23 nt, Human
gguaggcugggugcaguggcuca

SEQ ID NO: 552025 - RNA, 23 nt, Human
ggugcaguggcucacaccuguaa

SEQ ID NO: 552026 - RNA, 23 nt, Human
gguuagcaaacuuuuucuguaaa

SEQ ID NO: 552027 - RNA, 23 nt, Human
guaaaauauauauauauauauau

SEQ ID NO: 552028 - RNA, 19 nt, Human
gugagcaugggugugcccc

SEQ ID NO: 552029 - RNA, 18 nt, Human
gugcaguggcucacaccu

SEQ ID NO: 552030 - RNA, 19 nt, Human
guugugguggcgugcaccu

SEQ ID NO: 552031 - RNA, 23 nt, Human
uaaaaaggcagauaagacuguaa

SEQ ID NO: 552032 - RNA, 21 nt, Human
uaaaaauacaaaaauuagcca

SEQ ID NO: 552033 - RNA, 24 nt, Human
uaaaacaaaacuuaaaacucucaa

SEQ ID NO: 552034 - RNA, 23 nt, Human
uaaacugaagaagaaaaaccugc

SEQ ID NO: 552035 - RNA, 31 nt, Human
uaacaaaaaugagaguagaaaguacccagaa

SEQ ID NO: 552036 - RNA, 25 nt, Human
uaacucaaugcaauuuccauuuuau

SEQ ID NO: 552037 - RNA, 21 nt, Human
uaauguggcaugcaucaucuc

SEQ ID NO: 552038 - RNA, 23 nt, Human
uaccugaaggcuuaacuccuagu

SEQ ID NO: 552039 - RNA, 20 nt, Human
uagcaaacuuuuucuguaaa

SEQ ID NO: 552040 - RNA, 22 nt, Human
uagccaaaaaacaaacaaacaa

SEQ ID NO: 552041 - RNA, 23 nt, Human
uagccaaaaaacaaacaaacaaa

SEQ ID NO: 552042 - RNA, 28 nt, Human
uaggcuaacaaaaaugagaguagaaagu

SEQ ID NO: 552043 - RNA, 19 nt, Human
uagugcaaguauaauuugg

SEQ ID NO: 552044 - RNA, 26 nt, Human
uauagaacaaaaacuagagauucuga

SEQ ID NO: 552045 - RNA, 18 nt, Human
uauauauauauauauaca

SEQ ID NO: 552046 - RNA, 21 nt, Human
uauauauauauauauauacau

SEQ ID NO: 552047 - RNA, 19 nt, Human
uauauauauauauauauau

SEQ ID NO: 552048 - RNA, 19 nt, Human
uauauauauauauauauau

SEQ ID NO: 552049 - RNA, 19 nt, Human
uauauauauauauauauau

SEQ ID NO: 552050 - RNA, 24 nt, Human
uauauauauauauauauauauaca

SEQ ID NO: 552051 - RNA, 19 nt, Human
uaucagugacaggcauccu

SEQ ID NO: 552052 - RNA, 22 nt, Human
ucagcaaacacugaauaccuag

SEQ ID NO: 552053 - RNA, 20 nt, Human
ucagugacaggcauccuguc

SEQ ID NO: 552054 - RNA, 20 nt, Human
ucagugguaaagauuuggca

SEQ ID NO: 552055 - RNA, 20 nt, Human
uccaccaacaguguuuuuga

SEQ ID NO: 552056 - RNA, 23 nt, Human
uccacuauaccuuuaaccagaaa

SEQ ID NO: 552057 - RNA, 19 nt, Human
uccagccugagugcaguga

SEQ ID NO: 552058 - RNA, 22 nt, Human
uccagccugggugacaaacuga

SEQ ID NO: 552059 - RNA, 23 nt, Human
ucccaaauaacuggcugauuagu

SEQ ID NO: 552060 - RNA, 22 nt, Human
ucccaagggagcaagcuuucuu

SEQ ID NO: 552061 - RNA, 21 nt, Human
uccgaacaaaaauccccaaag

SEQ ID NO: 552062 - RNA, 21 nt, Human
ucgcuugaacccgggaagugg

SEQ ID NO: 552063 - RNA, 23 nt, Human
ucguaccacugcacuccagccug

SEQ ID NO: 552064 - RNA, 22 nt, Human
ucucaaaaaacaaaaauaaaaa

SEQ ID NO: 552065 - RNA, 19 nt, Human
ucuccaaagauacagauac

SEQ ID NO: 552066 - RNA, 21 nt, Human
ucucuacuaaaaauacaaaaa

SEQ ID NO: 552067 - RNA, 24 nt, Human
ucucuacuaaaaauacaaaaaauu

SEQ ID NO: 552068 - RNA, 23 nt, Human
ucugaagaucauguuaauagauu

SEQ ID NO: 552069 - RNA, 21 nt, Human
ucugcuaguauugaaugcuaa

SEQ ID NO: 552070 - RNA, 23 nt, Human
ucuugccauguugcccagguugg

SEQ ID NO: 552071 - RNA, 24 nt, Human
ucuugccauguugcccagguugga

SEQ ID NO: 552072 - RNA, 20 nt, Human
ucuuuccuuucuuucucccc

SEQ ID NO: 552073 - RNA, 19 nt, Human
ugaaaccccaucucuacua

SEQ ID NO: 552074 - RNA, 24 nt, Human
ugaaccugggaagcggaaguugca

SEQ ID NO: 552075 - RNA, 21 nt, Human
ugaacuucagaaaugguuccc

SEQ ID NO: 552076 - RNA, 24 nt, Human
ugaagcaggaaaauugcuugaacc

SEQ ID NO: 552077 - RNA, 25 nt, Human
ugaagcaggaaaauugcuugaaccu

SEQ ID NO: 552078 - RNA, 18 nt, Human
ugagaucagccuggccaa

SEQ ID NO: 552079 - RNA, 21 nt, Human
ugagaucagccuggccaacau

SEQ ID NO: 552080 - RNA, 20 nt, Human
ugaggcaggagaaucgcuug

SEQ ID NO: 552081 - RNA, 24 nt, Human
ugaggcaggagaaucgcuugaacc

SEQ ID NO: 552082 - RNA, 25 nt, Human
ugaggcaggagaaucgcuugaaccc

SEQ ID NO: 552083 - RNA, 25 nt, Human
ugaggcaggaggaccacuugaggcc

SEQ ID NO: 552084 - RNA, 22 nt, Human
ugaggcggguggaucacuugag

SEQ ID NO: 552085 - RNA, 24 nt, Human
ugaggcggguggaucacuugaggu

SEQ ID NO: 552086 - RNA, 19 nt, Human
ugauauaggaaaaacuggu

SEQ ID NO: 552087 - RNA, 22 nt, Human
ugcaauuucuaaaaaggcuguu

SEQ ID NO: 552088 - RNA, 24 nt, Human
ugcaccuguagucccagcuacuug

SEQ ID NO: 552089 - RNA, 25 nt, Human
ugccauguugcccagguuggagugc

SEQ ID NO: 552090 - RNA, 18 nt, Human
ugcccagguuggagugca

SEQ ID NO: 552091 - RNA, 21 nt, Human
ugcccagguuggagugcagug

SEQ ID NO: 552092 - RNA, 22 nt, Human
ugcccagguuggagugcagugg

SEQ ID NO: 552093 - RNA, 18 nt, Human
uggaaagcaucauaugca

SEQ ID NO: 552094 - RNA, 18 nt, Human
uggaauaagagacuucau

SEQ ID NO: 552095 - RNA, 22 nt, Human
uggagugcagugguuauucuuu

SEQ ID NO: 552096 - RNA, 23 nt, Human
uggaucaccugaggucagaaguu

SEQ ID NO: 552097 - RNA, 24 nt, Human
uggaucaccugaggucagaaguuu

SEQ ID NO: 552098 - RNA, 27 nt, Human
uggaucaccugaggucagaaguuugag

SEQ ID NO: 552099 - RNA, 24 nt, Human
uggaucacuugagguuaggaguuc

SEQ ID NO: 552100 - RNA, 19 nt, Human
uggcaaagauaaaaaggca

SEQ ID NO: 552101 - RNA, 21 nt, Human
uggcaaagauaaaaaggcaga

SEQ ID NO: 552102 - RNA, 20 nt, Human
uggcccaccaauaauuuuca

SEQ ID NO: 552103 - RNA, 22 nt, Human
uggcgugcaccuguagucccag

SEQ ID NO: 552104 - RNA, 21 nt, Human
uggcucacaccuguaauccca

SEQ ID NO: 552105 - RNA, 22 nt, Human
uggcucacaccuguaaucccag

SEQ ID NO: 552106 - RNA, 24 nt, Human
uggcucacaccuguaaucccagca

SEQ ID NO: 552107 - RNA, 23 nt, Human
uggcuuacgucuaguaaucccag

SEQ ID NO: 552108 - RNA, 20 nt, Human
ugggaggcugaggcaggagg

SEQ ID NO: 552109 - RNA, 24 nt, Human
ugggaggcugaggcaggaggacca

SEQ ID NO: 552110 - RNA, 20 nt, Human
ugggaggcugaggcgggugg

SEQ ID NO: 552111 - RNA, 23 nt, Human
ugggaggcugaggcggguggauc

SEQ ID NO: 552112 - RNA, 24 nt, Human
ugggaggcugaggcggguggauca

SEQ ID NO: 552113 - RNA, 21 nt, Human
ugggaggucaaagugggugga

SEQ ID NO: 552114 - RNA, 23 nt, Human
ugggaggucaaaguggguggauc

SEQ ID NO: 552115 - RNA, 19 nt, Human
ugguaaaucagugguaaag

SEQ ID NO: 552116 - RNA, 24 nt, Human
ugguggcgugcaccuguaguccca

SEQ ID NO: 552117 - RNA, 25 nt, Human
ugguggcuuacgucuaguaauccca

SEQ ID NO: 552118 - RNA, 19 nt, Human
uguauccucuacucucagc

SEQ ID NO: 552119 - RNA, 20 nt, Human
uuacacacuacagccccaaa

SEQ ID NO: 552120 - RNA, 24 nt, Human
uucccacauauagauauaguugca

SEQ ID NO: 552121 - RNA, 22 nt, Human
uugaggccaggaguucaagacc

SEQ ID NO: 552122 - RNA, 22 nt, Human
uugcagugagccaagaucguac

SEQ ID NO: 552123 - RNA, 25 nt, Human
uugcccagguuggagugcagugguu

SEQ ID NO: 552124 - RNA, 23 nt, Human
uugcuggaaagccuaguccacag

SEQ ID NO: 552125 - RNA, 21 nt, Human
uugcuugaaccugggaagcgg

SEQ ID NO: 552126 - RNA, 25 nt, Human
uugcuugaaccugggaagcggaagu

SEQ ID NO: 552127 - RNA, 24 nt, Human
uugggagcugaggcaggagaaucg

SEQ ID NO: 552128 - RNA, 25 nt, Human
uugggaggcugaggcggguggauca

SEQ ID NO: 552129 - RNA, 23 nt, Human
uuucuaguuuuuuguuguccaaa

SEQ ID NO: 552130 - RNA, 20 nt, Human
aaagggcagggagagaggaa

SEQ ID NO: 552131 - RNA, 25 nt, Human
aagaggccaaguggcgcugguggga

SEQ ID NO: 552132 - RNA, 20 nt, Human
aagcuccuccuggccugccc

SEQ ID NO: 552133 - RNA, 21 nt, Human
agaccaagaagaccacagcca

SEQ ID NO: 552134 - RNA, 21 nt, Human
agagaagaggggggaaggagg

SEQ ID NO: 552135 - RNA, 22 nt, Human
agaggaauggaggagggagagg

SEQ ID NO: 552136 - RNA, 22 nt, Human
agaggggggaaggaggagacau

SEQ ID NO: 552137 - RNA, 22 nt, Human
aggaauggaggagggagaggga

SEQ ID NO: 552138 - RNA, 18 nt, Human
aggcaggaaaagggcagg

SEQ ID NO: 552139 - RNA, 19 nt, Human
aggcgaggccccccaagcc

SEQ ID NO: 552140 - RNA, 20 nt, Human
aggcgaggccccccaagccc

SEQ ID NO: 552141 - RNA, 22 nt, Human
aggcugggccgcaggagagaga

SEQ ID NO: 552142 - RNA, 22 nt, Human
agggagaaggggggggcugagg

SEQ ID NO: 552143 - RNA, 27 nt, Human
aggggggaaggaggagacauuagggag

SEQ ID NO: 552144 - RNA, 20 nt, Human
auggaggagggagagggagg

SEQ ID NO: 552145 - RNA, 23 nt, Human
augggagggaaggaggagaggaa

SEQ ID NO: 552146 - RNA, 22 nt, Human
caagaagaccacagccaggccc

SEQ ID NO: 552147 - RNA, 21 nt, Human
caagaccaagaagaccacagc

SEQ ID NO: 552148 - RNA, 24 nt, Human
caccaagggggccuggccugcgcc

SEQ ID NO: 552149 - RNA, 23 nt, Human
cacccgcugccucccccaacccc

SEQ ID NO: 552150 - RNA, 19 nt, Human
cagcaagaccaagaagacc

SEQ ID NO: 552151 - RNA, 21 nt, Human
cagccucugcuucaccaaggg

SEQ ID NO: 552152 - RNA, 20 nt, Human
cagcuucagagccaucaccc

SEQ ID NO: 552153 - RNA, 22 nt, Human
cagguccucaccucugcucuuc

SEQ ID NO: 552154 - RNA, 19 nt, Human
ccccaaucuccugagggag

SEQ ID NO: 552155 - RNA, 22 nt, Human
cccuccccaaccagcuucacgg

SEQ ID NO: 552156 - RNA, 18 nt, Human
cccugggccccuggccuc

SEQ ID NO: 552157 - RNA, 20 nt, Human
ccgcugccucccccaacccc

SEQ ID NO: 552158 - RNA, 18 nt, Human
ccugcagcuccucccgca

SEQ ID NO: 552159 - RNA, 22 nt, Human
ccugcucugccuggcccagggg

SEQ ID NO: 552160 - RNA, 21 nt, Human
ccuggcccagggggcaaagag

SEQ ID NO: 552161 - RNA, 20 nt, Human
ccuggccugccccucagggg

SEQ ID NO: 552162 - RNA, 20 nt, Human
cuccuccuggccugccccuc

SEQ ID NO: 552163 - RNA, 18 nt, Human
cugcagcuccucccgcag

SEQ ID NO: 552164 - RNA, 19 nt, Human
cuggccugcgcccaagcuc

SEQ ID NO: 552165 - RNA, 24 nt, Human
cuggguccugcccugggccccugg

SEQ ID NO: 552166 - RNA, 18 nt, Human
gaccacagccaggcccug

SEQ ID NO: 552167 - RNA, 22 nt, Human
gagggaaggaggagaggaagag

SEQ ID NO: 552168 - RNA, 24 nt, Human
gagggagagggaggcugggccgca

SEQ ID NO: 552169 - RNA, 20 nt, Human
gcagggagagaggaauggag

SEQ ID NO: 552170 - RNA, 23 nt, Human
gccuuugggucacagggggcagc

SEQ ID NO: 552171 - RNA, 18 nt, Human
ggaagaggccaaguggcg

SEQ ID NO: 552172 - RNA, 18 nt, Human
ggagagagaagagggggg

SEQ ID NO: 552173 - RNA, 24 nt, Human
ggagagagaagaggggggaaggag

SEQ ID NO: 552174 - RNA, 21 nt, Human
ggagagaggaauggaggaggg

SEQ ID NO: 552175 - RNA, 19 nt, Human
ggagauggcgcuggccggg

SEQ ID NO: 552176 - RNA, 18 nt, Human
ggaggagggagagggagg

SEQ ID NO: 552177 - RNA, 20 nt, Human
ggaggagggagagggaggcu

SEQ ID NO: 552178 - RNA, 25 nt, Human
ggagggagagggaggcugggccgca

SEQ ID NO: 552179 - RNA, 18 nt, Human
ggcagggagagaggaaug

SEQ ID NO: 552180 - RNA, 20 nt, Human
ggcgggagauggcgcuggcc

SEQ ID NO: 552181 - RNA, 22 nt, Human
gggagggaaggaggagaggaag

SEQ ID NO: 552182 - RNA, 22 nt, Human
gggcagggagagaggaauggag

SEQ ID NO: 552183 - RNA, 20 nt, Human
gggccccuggccucuguacc

SEQ ID NO: 552184 - RNA, 18 nt, Human
ggggaaaaggaguuggaa

SEQ ID NO: 552185 - RNA, 20 nt, Human
gugagaccugagaaggaaag

SEQ ID NO: 552186 - RNA, 24 nt, Human
guggcgcugggagagagcagguac

SEQ ID NO: 552187 - RNA, 25 nt, Human
uacacacagugacuuuauuacucua

SEQ ID NO: 552188 - RNA, 19 nt, Human
ucaccaagggggccuggcc

SEQ ID NO: 552189 - RNA, 24 nt, Human
ucacccgcugccucccccaacccc

SEQ ID NO: 552190 - RNA, 22 nt, Human
ucaggcgaggccccccaagccc

SEQ ID NO: 552191 - RNA, 22 nt, Human
ucccagguccucaccucugcuc

SEQ ID NO: 552192 - RNA, 23 nt, Human
uccuagggacaagacccagaccc

SEQ ID NO: 552193 - RNA, 18 nt, Human
uccuucagccucugcuuc

SEQ ID NO: 552194 - RNA, 18 nt, Human
ucggguggugaggaaagg

SEQ ID NO: 552195 - RNA, 19 nt, Human
ugaggaaagggugugcccu

SEQ ID NO: 552196 - RNA, 20 nt, Human
ugagggaggagaauuccuag

SEQ ID NO: 552197 - RNA, 22 nt, Human
ugcccugggccccuggccucug

SEQ ID NO: 552198 - RNA, 23 nt, Human
ugcccugggccccuggccucugu

SEQ ID NO: 552199 - RNA, 19 nt, Human
uggaaaggaauaggaaggc

SEQ ID NO: 552200 - RNA, 20 nt, Human
uggaaaggaauaggaaggcg

SEQ ID NO: 552201 - RNA, 21 nt, Human
uggccucuguaccucaguccu

SEQ ID NO: 552202 - RNA, 23 nt, Human
uggccugccccucagggguccca

SEQ ID NO: 552203 - RNA, 20 nt, Human
ugggaaguucagacaaggga

SEQ ID NO: 552204 - RNA, 19 nt, Human
ugggccccuggccucugua

SEQ ID NO: 552205 - RNA, 25 nt, Human
ugggccccuggccucuguaccucag

SEQ ID NO: 552206 - RNA, 19 nt, Human
uggguucagcuucagagcc

SEQ ID NO: 552207 - RNA, 21 nt, Human
uuagggagaggccccuucaca

SEQ ID NO: 552208 - RNA, 19 nt, Human
aaaauaacauagucucccu

SEQ ID NO: 552209 - RNA, 18 nt, Human
aaaauuaaaaguauggcc

SEQ ID NO: 552210 - RNA, 22 nt, Human
aacaccacauuccugagcuccc

SEQ ID NO: 552211 - RNA, 22 nt, Human
aacauaccccaucagacaccaa

SEQ ID NO: 552212 - RNA, 18 nt, Human
aagacacacaucaagaca

SEQ ID NO: 552213 - RNA, 26 nt, Human
aagcacuaccuaugaagaacauaccc

SEQ ID NO: 552214 - RNA, 22 nt, Human
aagcugcaucuggacuccagga

SEQ ID NO: 552215 - RNA, 21 nt, Human
aaggggccugaggaagucugc

SEQ ID NO: 552216 - RNA, 19 nt, Human
aagugcacuuuggggaaca

SEQ ID NO: 552217 - RNA, 21 nt, Human
aaucacugaagccgauuuuga

SEQ ID NO: 552218 - RNA, 24 nt, Human
acaagcugcaucuggacuccagga

SEQ ID NO: 552219 - RNA, 23 nt, Human
acacacaucaagacacaagcacu

SEQ ID NO: 552220 - RNA, 22 nt, Human
accacauuccugagcuccccug

SEQ ID NO: 552221 - RNA, 21 nt, Human
accacucuaagaaacuuuggc

SEQ ID NO: 552222 - RNA, 18 nt, Human
accugcugcuguuucuuu

SEQ ID NO: 552223 - RNA, 18 nt, Human
agccacacucaccggccu

SEQ ID NO: 552224 - RNA, 23 nt, Human
agggggcaugugugaucagccag

SEQ ID NO: 552225 - RNA, 24 nt, Human
augaagaacauaccccaucagaca

SEQ ID NO: 552226 - RNA, 26 nt, Human
caaaacagaagacuguuuaaaauaac

SEQ ID NO: 552227 - RNA, 23 nt, Human
caaccaguaguaucaaauaacaa

SEQ ID NO: 552228 - RNA, 26 nt, Human
caaccggcaaacuccugccacuuccu

SEQ ID NO: 552229 - RNA, 20 nt, Human
cacagcacugcugacaaagc

SEQ ID NO: 552230 - RNA, 25 nt, Human
cacuaccuaugaagaacauacccca

SEQ ID NO: 552231 - RNA, 19 nt, Human
cagaaccaugagugacaaa

SEQ ID NO: 552232 - RNA, 22 nt, Human
cagacaacuggccaaaacagag

SEQ ID NO: 552233 - RNA, 24 nt, Human
cagauguauauacuuauugaaucc

SEQ ID NO: 552234 - RNA, 25 nt, Human
cagcagcugagcagccaucccucug

SEQ ID NO: 552235 - RNA, 20 nt, Human
cagccagccccuccacaaca

SEQ ID NO: 552236 - RNA, 23 nt, Human
cagccagccccuccacaacaccu

SEQ ID NO: 552237 - RNA, 19 nt, Human
cagcugagcagccaucccu

SEQ ID NO: 552238 - RNA, 20 nt, Human
cagcugagcagccaucccuc

SEQ ID NO: 552239 - RNA, 18 nt, Human
cagugagagcccugcaca

SEQ ID NO: 552240 - RNA, 19 nt, Human
caucuggacuccaggaugu

SEQ ID NO: 552241 - RNA, 25 nt, Human
ccacaacaccacauuccugagcucc

SEQ ID NO: 552242 - RNA, 18 nt, Human
ccagaaccaugagugaca

SEQ ID NO: 552243 - RNA, 25 nt, Human
ccaguaguaucaaauaacaaaauua

SEQ ID NO: 552244 - RNA, 22 nt, Human
cccaacccacggagaaaaugca

SEQ ID NO: 552245 - RNA, 19 nt, Human
cccagucuaaggucuuuug

SEQ ID NO: 552246 - RNA, 22 nt, Human
ccccgaggccgcgcccuccccg

SEQ ID NO: 552247 - RNA, 20 nt, Human
ccccgcagccacacucaccg

SEQ ID NO: 552248 - RNA, 23 nt, Human
ccccugaccccgaguccccaccc

SEQ ID NO: 552249 - RNA, 23 nt, Human
cccgaggccgcgcccuccccggg

SEQ ID NO: 552250 - RNA, 23 nt, Human
cccugaccccgaguccccacccc

SEQ ID NO: 552251 - RNA, 21 nt, Human
ccuccacaacaccacauuccu

SEQ ID NO: 552252 - RNA, 22 nt, Human
ccuccacaacaccacauuccug

SEQ ID NO: 552253 - RNA, 19 nt, Human
ccugaccccgaguccccac

SEQ ID NO: 552254 - RNA, 23 nt, Human
ccugcacgccgucuccccgaggc

SEQ ID NO: 552255 - RNA, 19 nt, Human
ccuugaucuuggacuuccc

SEQ ID NO: 552256 - RNA, 21 nt, Human
cuaccuaugaagaacauaccc

SEQ ID NO: 552257 - RNA, 31 nt, Human
cucacagcacugcugacaaagcgcgcagccu

SEQ ID NO: 552258 - RNA, 18 nt, Human
cuccccuccaccagcucc

SEQ ID NO: 552259 - RNA, 25 nt, Human
cuccccuccaccagcuccacuuucc

SEQ ID NO: 552260 - RNA, 22 nt, Human
cucugcugcccacggugaauag

SEQ ID NO: 552261 - RNA, 21 nt, Human
cugagcagccaucccucugcu

SEQ ID NO: 552262 - RNA, 23 nt, Human
cugcacgccgucuccccgaggcc

SEQ ID NO: 552263 - RNA, 22 nt, Human
cugcuguuuacaaccacgugaa

SEQ ID NO: 552264 - RNA, 22 nt, Human
cuugaaguguccccagauacgu

SEQ ID NO: 552265 - RNA, 25 nt, Human
gaagaacauaccccaucagacacca

SEQ ID NO: 552266 - RNA, 26 nt, Human
gaagaacauaccccaucagacaccaa

SEQ ID NO: 552267 - RNA, 20 nt, Human
gacaagcugcaucuggacuc

SEQ ID NO: 552268 - RNA, 28 nt, Human
gaccacucuaagaaacuuuggcauucaa

SEQ ID NO: 552269 - RNA, 23 nt, Human
gaggaccuuugggaggucaugag

SEQ ID NO: 552270 - RNA, 20 nt, Human
gauguaucugacaaagaggg

SEQ ID NO: 552271 - RNA, 20 nt, Human
ggaaacgguggguggaggga

SEQ ID NO: 552272 - RNA, 24 nt, Human
ggaaggcccucacgcucccaaccc

SEQ ID NO: 552273 - RNA, 23 nt, Human
ggagaugucuccucccuccccuc

SEQ ID NO: 552274 - RNA, 18 nt, Human
gggaggucaugaggucag

SEQ ID NO: 552275 - RNA, 24 nt, Human
guggaacaacuggaaaugccagaa

SEQ ID NO: 552276 - RNA, 20 nt, Human
uaaaaaacguaacagaccac

SEQ ID NO: 552277 - RNA, 25 nt, Human
uacccagucuaaggucuuuuguuac

SEQ ID NO: 552278 - RNA, 24 nt, Human
uagcugcaaaaaucacuauaaaaa

SEQ ID NO: 552279 - RNA, 23 nt, Human
uauauacuuauugaauccaugca

SEQ ID NO: 552280 - RNA, 24 nt, Human
uauuugcuaacucugaaaaaaaaa

SEQ ID NO: 552281 - RNA, 18 nt, Human
ucagacaccaaaucugcc

SEQ ID NO: 552282 - RNA, 20 nt, Human
uccacaacaccacauuccug

SEQ ID NO: 552283 - RNA, 22 nt, Human
uccacaacaccacauuccugag

SEQ ID NO: 552284 - RNA, 24 nt, Human
ucccaacccacggagaaaaugcag

SEQ ID NO: 552285 - RNA, 20 nt, Human
uccccggggccagguuccgg

SEQ ID NO: 552286 - RNA, 21 nt, Human
uccccugaccccgagucccca

SEQ ID NO: 552287 - RNA, 21 nt, Human
uccuagcuugguggcugccag

SEQ ID NO: 552288 - RNA, 19 nt, Human
uccugagcuccccugaccc

SEQ ID NO: 552289 - RNA, 19 nt, Human
uccugagcuccccugaccc

SEQ ID NO: 552290 - RNA, 18 nt, Human
uccugggcaccgccagug

SEQ ID NO: 552291 - RNA, 25 nt, Human
uccugggcaccgccagugagagccc

SEQ ID NO: 552292 - RNA, 24 nt, Human
ucucacagcacugcugacaaagcg

SEQ ID NO: 552293 - RNA, 24 nt, Human
ucucccuuaauuaaaaguuuuauu

SEQ ID NO: 552294 - RNA, 25 nt, Human
ucuguauuauuuauuuguguacacc

SEQ ID NO: 552295 - RNA, 22 nt, Human
ugaaaaaaaaauuuuuccccuc

SEQ ID NO: 552296 - RNA, 19 nt, Human
ugaaccuugaagugucccc

SEQ ID NO: 552297 - RNA, 27 nt, Human
ugaagaacauaccccaucagacaccaa

SEQ ID NO: 552298 - RNA, 22 nt, Human
ugaauaggaagacaggccugcg

SEQ ID NO: 552299 - RNA, 19 nt, Human
ugaccccgaguccccaccc

SEQ ID NO: 552300 - RNA, 20 nt, Human
ugaccccgaguccccacccc

SEQ ID NO: 552301 - RNA, 18 nt, Human
ugagagcccugcacagag

SEQ ID NO: 552302 - RNA, 21 nt, Human
ugcagggaaacggugggugga

SEQ ID NO: 552303 - RNA, 22 nt, Human
ugcagggaaacgguggguggag

SEQ ID NO: 552304 - RNA, 23 nt, Human
ugccagagccuugaucuuggacc

SEQ ID NO: 552305 - RNA, 25 nt, Human
uggccaaaacagaagacuguuuaaa

SEQ ID NO: 552306 - RNA, 23 nt, Human
ugggaggucaugaggucagggcc

SEQ ID NO: 552307 - RNA, 20 nt, Human
uggucuguuggugcuucccu

SEQ ID NO: 552308 - RNA, 19 nt, Human
ugucuccucccuccccucc

SEQ ID NO: 552309 - RNA, 20 nt, Human
ugucuccucccuccccucca

SEQ ID NO: 552310 - RNA, 23 nt, Human
uguuaccagcggccauggcucag

SEQ ID NO: 552311 - RNA, 22 nt, Human
uguuuacaaccacgugaagaca

SEQ ID NO: 552312 - RNA, 18 nt, Human
uugggaggucaugagguc

SEQ ID NO: 552313 - RNA, 23 nt, Human
uugguggcugccagcgugcacug

SEQ ID NO: 552314 - RNA, 23 nt, Human
uuucccgcugaagaaacagagau

SEQ ID NO: 552315 - RNA, 23 nt, Human
uuuccuucuugccccucccacaa

SEQ ID NO: 552316 - RNA, 22 nt, Human
uuuuuuuuuuuuuuucuguauu

SEQ ID NO: 552317 - RNA, 24 nt, Human
uuuuuuuuuuuuuuuuuuucuggg

SEQ ID NO: 552318 - RNA, 20 nt, Human
aacaaaggauaaaagauccc

SEQ ID NO: 552319 - RNA, 20 nt, Human
auaaaaaucaaguacucaug

SEQ ID NO: 552320 - RNA, 21 nt, Human
caacaaaggauaaaagauccc

SEQ ID NO: 552321 - RNA, 25 nt, Human
caccgaguccuucccagcugggucu

SEQ ID NO: 552322 - RNA, 23 nt, Human
ccacacuuuugcaacaaaggaua

SEQ ID NO: 552323 - RNA, 22 nt, Human
cucugaaacuuccauuuacacc

SEQ ID NO: 552324 - RNA, 21 nt, Human
cugccaagcugucaaaagugu

SEQ ID NO: 552325 - RNA, 26 nt, Human
gaaccacuggcaaacuguuggaaaug

SEQ ID NO: 552326 - RNA, 21 nt, Human
uacagugagagaaaaauggaa

SEQ ID NO: 552327 - RNA, 23 nt, Human
uacagugagagaaaaauggaauu

SEQ ID NO: 552328 - RNA, 25 nt, Human
uaucaagaagaggaagaaaaggcuc

SEQ ID NO: 552329 - RNA, 25 nt, Human
uauuuuguccucucugaaacuucca

SEQ ID NO: 552330 - RNA, 21 nt, Human
ucaaaaguguccacacuuuug

SEQ ID NO: 552331 - RNA, 18 nt, Human
ucaagaagaggaagaaaa

SEQ ID NO: 552332 - RNA, 19 nt, Human
ucuccaguuuuuuggcucu

SEQ ID NO: 552333 - RNA, 21 nt, Human
ugcaacaaaggauaaaagauc

SEQ ID NO: 552334 - RNA, 18 nt, Human
uucccagcugggucucau

SEQ ID NO: 552335 - RNA, 24 nt, Human
uuuuuggcucuaagaaauuacacu

SEQ ID NO: 552336 - RNA, 26 nt, Human
acuucaggggacgccugauccgagga

SEQ ID NO: 552337 - RNA, 21 nt, Human
aggcagcaccggggacggacu

SEQ ID NO: 552338 - RNA, 25 nt, Human
caaacaagugaaaggcucacaaaca

SEQ ID NO: 552339 - RNA, 21 nt, Human
cagaccacuagaaaagugcuu

SEQ ID NO: 552340 - RNA, 20 nt, Human
cgagaagagcuccagcgaga

SEQ ID NO: 552341 - RNA, 18 nt, Human
cggcagcccggacggggu

SEQ ID NO: 552342 - RNA, 22 nt, Human
gaaccagcccugaaugcccugg

SEQ ID NO: 552343 - RNA, 23 nt, Human
gaagagcuccagcgagacucagg

SEQ ID NO: 552344 - RNA, 18 nt, Human
gcagcaccggggacggac

SEQ ID NO: 552345 - RNA, 24 nt, Human
gggcgggcgagaagagcuccagcg

SEQ ID NO: 552346 - RNA, 24 nt, Human
uaacagcaaagguuuggggguggg

SEQ ID NO: 552347 - RNA, 19 nt, Human
ugaaaggcucacaaacaga

SEQ ID NO: 552348 - RNA, 21 nt, Human
ugaaaggcucacaaacagacc

SEQ ID NO: 552349 - RNA, 26 nt, Human
ugaacgcgcaggcagcaccggggacg

SEQ ID NO: 552350 - RNA, 23 nt, Human
ugaggugggcgggcgagaagagc

SEQ ID NO: 552351 - RNA, 21 nt, Human
ugucugaaccagcccugaaug

SEQ ID NO: 552352 - RNA, 24 nt, Human
aaaaaaaaggggggggggacaaaa

SEQ ID NO: 552353 - RNA, 20 nt, Human
aaacagaaaaacugaagagc

SEQ ID NO: 552354 - RNA, 19 nt, Human
aagacccuuuacaccucag

SEQ ID NO: 552355 - RNA, 23 nt, Human
aagagcucuuccaagccccgacc

SEQ ID NO: 552356 - RNA, 19 nt, Human
acaaaacuuuaauucaaau

SEQ ID NO: 552357 - RNA, 18 nt, Human
agagcucuuccaagcccc

SEQ ID NO: 552358 - RNA, 21 nt, Human
agagcucuuccaagccccgac

SEQ ID NO: 552359 - RNA, 21 nt, Human
aggaaacagaaaaacugaaga

SEQ ID NO: 552360 - RNA, 23 nt, Human
aggaaacagaaaaacugaagagc

SEQ ID NO: 552361 - RNA, 21 nt, Human
aucaccauuuuccaccuccac

SEQ ID NO: 552362 - RNA, 19 nt, Human
auuugauuuacauuccaaa

SEQ ID NO: 552363 - RNA, 18 nt, Human
caagccccgaccaggaac

SEQ ID NO: 552364 - RNA, 21 nt, Human
caaggauaaccuucuaauuaa

SEQ ID NO: 552365 - RNA, 21 nt, Human
caccuccacaccaaggauaac

SEQ ID NO: 552366 - RNA, 20 nt, Human
cagcaagcagcuccugccuu

SEQ ID NO: 552367 - RNA, 18 nt, Human
cauuuuccaccuccacac

SEQ ID NO: 552368 - RNA, 18 nt, Human
ccuccagugucccucuuu

SEQ ID NO: 552369 - RNA, 26 nt, Human
ccucuuuagagacaggagcggggauu

SEQ ID NO: 552370 - RNA, 20 nt, Human
ccuugcccuuuccccucuuu

SEQ ID NO: 552371 - RNA, 18 nt, Human
cuugaggaaacagaaaaa

SEQ ID NO: 552372 - RNA, 25 nt, Human
guuuauaaaaaaaagggggggggga

SEQ ID NO: 552373 - RNA, 21 nt, Human
uaaaacaugauaaauuuucag

SEQ ID NO: 552374 - RNA, 21 nt, Human
uaaauugcaaacacaccccuc

SEQ ID NO: 552375 - RNA, 19 nt, Human
ucacuuguuuauaaaaaaa

SEQ ID NO: 552376 - RNA, 18 nt, Human
uccugccuucuuauuugg

SEQ ID NO: 552377 - RNA, 19 nt, Human
ugcaaacacaccccuccag

SEQ ID NO: 552378 - RNA, 18 nt, Human
uggucuaauugccacugc

SEQ ID NO: 552379 - RNA, 19 nt, Human
uguuguaauaggauagcac

SEQ ID NO: 552380 - RNA, 19 nt, Human
uuauaaaaaaaaggggggg

SEQ ID NO: 552381 - RNA, 26 nt, Human
uugcaaacacaccccuccaguguccc

SEQ ID NO: 552382 - RNA, 19 nt, Human
aaaaacaaacaacaaaaaa

SEQ ID NO: 552383 - RNA, 23 nt, Human
aaaacaaacaacaaaaaaaaccc

SEQ ID NO: 552384 - RNA, 23 nt, Human
aaacaaacaacaaaaaaaaccca

SEQ ID NO: 552385 - RNA, 18 nt, Human
aaauggcccccuaaaccc

SEQ ID NO: 552386 - RNA, 25 nt, Human
aacaaaaaaaacccaguuuauucau

SEQ ID NO: 552387 - RNA, 22 nt, Human
aacaccuccucccuugccaucu

SEQ ID NO: 552388 - RNA, 25 nt, Human
aagaaaaacgagggaaaaucaacaa

SEQ ID NO: 552389 - RNA, 19 nt, Human
aagcaggaaaacucagacg

SEQ ID NO: 552390 - RNA, 21 nt, Human
aaucccgcacucucccaauga

SEQ ID NO: 552391 - RNA, 18 nt, Human
aauccgggaccccucccc

SEQ ID NO: 552392 - RNA, 18 nt, Human
aaugcaagacaaaguuaa

SEQ ID NO: 552393 - RNA, 25 nt, Human
agaaaaaaaagaagacaguggcaag

SEQ ID NO: 552394 - RNA, 23 nt, Human
agaaaaaacaaacaaacauaaaa

SEQ ID NO: 552395 - RNA, 24 nt, Human
agaugucagaagccaucaaugucu

SEQ ID NO: 552396 - RNA, 19 nt, Human
aggaaagcaggaaaacuca

SEQ ID NO: 552397 - RNA, 22 nt, Human
aggaaagcaggaaaacucagac

SEQ ID NO: 552398 - RNA, 21 nt, Human
aggaacugcagugggacaggu

SEQ ID NO: 552399 - RNA, 18 nt, Human
auaaacacaaauggcaaa

SEQ ID NO: 552400 - RNA, 21 nt, Human
auggcaagauaaacuccccaa

SEQ ID NO: 552401 - RNA, 29 nt, Human
caaacauaaaauccgggaccccucccccc

SEQ ID NO: 552402 - RNA, 22 nt, Human
caagaacaccuccucccuugcc

SEQ ID NO: 552403 - RNA, 24 nt, Human
caagaacaccuccucccuugccau

SEQ ID NO: 552404 - RNA, 19 nt, Human
cacaaccauuagcaaauuu

SEQ ID NO: 552405 - RNA, 21 nt, Human
cacacaaauggcccccuaaac

SEQ ID NO: 552406 - RNA, 18 nt, Human
cagaaggggaggauggca

SEQ ID NO: 552407 - RNA, 24 nt, Human
cagauauaccucagaaucugcacg

SEQ ID NO: 552408 - RNA, 20 nt, Human
cagcgggagccuccuccugu

SEQ ID NO: 552409 - RNA, 25 nt, Human
cagugccgagaggcuguguuguaga

SEQ ID NO: 552410 - RNA, 18 nt, Human
cauuagcaaauuuccgag

SEQ ID NO: 552411 - RNA, 22 nt, Human
ccaacagcguuagguuuuuuuu

SEQ ID NO: 552412 - RNA, 24 nt, Human
ccacacaaauggcccccuaaaccc

SEQ ID NO: 552413 - RNA, 22 nt, Human
ccccccuucuucucuuaaaguc

SEQ ID NO: 552414 - RNA, 22 nt, Human
cccccuaaacccauaaacacaa

SEQ ID NO: 552415 - RNA, 23 nt, Human
cccccuucuucucuuaaagucac

SEQ ID NO: 552416 - RNA, 19 nt, Human
ccuaaacccauaaacacaa

SEQ ID NO: 552417 - RNA, 21 nt, Human
ccuaaacccauaaacacaaau

SEQ ID NO: 552418 - RNA, 18 nt, Human
ccucccuuccucuucucu

SEQ ID NO: 552419 - RNA, 23 nt, Human
ccuuagauauaugagaaaaaaaa

SEQ ID NO: 552420 - RNA, 22 nt, Human
cgaguagauugguccacacaaa

SEQ ID NO: 552421 - RNA, 19 nt, Human
cugaauggggccauuggca

SEQ ID NO: 552422 - RNA, 23 nt, Human
cugcacgaggcaggaaagcagga

SEQ ID NO: 552423 - RNA, 21 nt, Human
cuucaaaugaaaacgaaagga

SEQ ID NO: 552424 - RNA, 21 nt, Human
cuucaagaacaccuccucccu

SEQ ID NO: 552425 - RNA, 23 nt, Human
cuuuccgcuuccgggucccaaca

SEQ ID NO: 552426 - RNA, 23 nt, Human
gaaccagaaggggaggauggcag

SEQ ID NO: 552427 - RNA, 20 nt, Human
gaaggcaccagcccaaucug

SEQ ID NO: 552428 - RNA, 21 nt, Human
gacccggaaguaucgaccuca

SEQ ID NO: 552429 - RNA, 24 nt, Human
gagaaaaaacaaacaaacauaaaa

SEQ ID NO: 552430 - RNA, 20 nt, Human
gagcagcagugccgagaggc

SEQ ID NO: 552431 - RNA, 21 nt, Human
gauggacgggggaaagagaga

SEQ ID NO: 552432 - RNA, 21 nt, Human
gcaggaaagcaggaaaacuca

SEQ ID NO: 552433 - RNA, 21 nt, Human
gcccuuuccgcuuccgggucc

SEQ ID NO: 552434 - RNA, 20 nt, Human
gccucccuuccucuucucuu

SEQ ID NO: 552435 - RNA, 20 nt, Human
ggaaagcaggaaaacucaga

SEQ ID NO: 552436 - RNA, 18 nt, Human
ggaagaauggagcucagg

SEQ ID NO: 552437 - RNA, 21 nt, Human
ggaggaagaauggagcucagg

SEQ ID NO: 552438 - RNA, 20 nt, Human
ggcacguguccuggugggcc

SEQ ID NO: 552439 - RNA, 20 nt, Human
ggcuggaggaagaauggagc

SEQ ID NO: 552440 - RNA, 18 nt, Human
gggaaagagagaaagaaa

SEQ ID NO: 552441 - RNA, 21 nt, Human
ggugacaggaagagagaagaa

SEQ ID NO: 552442 - RNA, 19 nt, Human
gucauggcaguaggguagg

SEQ ID NO: 552443 - RNA, 18 nt, Human
guccuggugggccuggaa

SEQ ID NO: 552444 - RNA, 18 nt, Human
uaaacacaaauggcaaaa

SEQ ID NO: 552445 - RNA, 18 nt, Human
uacaugaggcacaaccug

SEQ ID NO: 552446 - RNA, 18 nt, Human
ucacgcgaggucccggcu

SEQ ID NO: 552447 - RNA, 18 nt, Human
ucacuggcucaagcugua

SEQ ID NO: 552448 - RNA, 18 nt, Human
ucagggccaaaguucaga

SEQ ID NO: 552449 - RNA, 21 nt, Human
ucagggguuggcuggaggaag

SEQ ID NO: 552450 - RNA, 21 nt, Human
ucaggguauucuaggcccaag

SEQ ID NO: 552451 - RNA, 22 nt, Human
ucauuguaccaugugugcauug

SEQ ID NO: 552452 - RNA, 18 nt, Human
uccccgaguagauugguc

SEQ ID NO: 552453 - RNA, 23 nt, Human
uccucuucucuuuucucaucagg

SEQ ID NO: 552454 - RNA, 23 nt, Human
ucgcgggguuugucaacuucgcc

SEQ ID NO: 552455 - RNA, 20 nt, Human
ucuaucauuguaccaugugu

SEQ ID NO: 552456 - RNA, 24 nt, Human
ucugcacgaggcaggaaagcagga

SEQ ID NO: 552457 - RNA, 21 nt, Human
ugaaaacgaaaggaaaaauac

SEQ ID NO: 552458 - RNA, 18 nt, Human
ugaauggggccauuggca

SEQ ID NO: 552459 - RNA, 21 nt, Human
ugacccggaaguaucgaccuc

SEQ ID NO: 552460 - RNA, 21 nt, Human
ugacuccuuugagccuuccuc

SEQ ID NO: 552461 - RNA, 24 nt, Human
ugcagagaaccagaaggggaggau

SEQ ID NO: 552462 - RNA, 18 nt, Human
ugcgaugcaaagagucga

SEQ ID NO: 552463 - RNA, 26 nt, Human
ugcggaaggucauggcaguaggguag

SEQ ID NO: 552464 - RNA, 23 nt, Human
ugcuaaggagaaaaaacaaacaa

SEQ ID NO: 552465 - RNA, 24 nt, Human
ugcuaaggagaaaaaacaaacaaa

SEQ ID NO: 552466 - RNA, 20 nt, Human
ugcuucuuaugucuuccaag

SEQ ID NO: 552467 - RNA, 19 nt, Human
uggaauuccccgaguagau

SEQ ID NO: 552468 - RNA, 21 nt, Human
uggcaagauaaacuccccaaa

SEQ ID NO: 552469 - RNA, 21 nt, Human
uggcacguguccuggugggcc

SEQ ID NO: 552470 - RNA, 21 nt, Human
uggccucccuuccucuucucu

SEQ ID NO: 552471 - RNA, 21 nt, Human
uguagauauggccucccuucc

SEQ ID NO: 552472 - RNA, 21 nt, Human
uuacaaaaacaaacaacaaaa

SEQ ID NO: 552473 - RNA, 19 nt, Human
uucaaaugaaaacgaaagg

SEQ ID NO: 552474 - RNA, 25 nt, Human
uuccucuucucuuuucucaucaggg

SEQ ID NO: 552475 - RNA, 23 nt, Human
uugaaaauaucaaguccuacugc

SEQ ID NO: 552476 - RNA, 22 nt, Human
uuggaggauugaaugugcuggu

SEQ ID NO: 552477 - RNA, 24 nt, Human
uuggcagaaggugacaggaagaga

SEQ ID NO: 552478 - RNA, 23 nt, Human
uuguuuguuuguuuuguuuuuuu

SEQ ID NO: 552479 - RNA, 24 nt, Human
uuuauucaucuuuuaguucuucca

SEQ ID NO: 552480 - RNA, 21 nt, Human
uuuuguuuuuuuccaacccuc

SEQ ID NO: 552481 - RNA, 22 nt, Human
agggcagaggguucaccccggg

SEQ ID NO: 552482 - RNA, 18 nt, Human
cacacugaaaaauaauaa

SEQ ID NO: 552483 - RNA, 19 nt, Human
cccucugucccagcgaggg

SEQ ID NO: 552484 - RNA, 18 nt, Human
ccucugucccagcgaggg

SEQ ID NO: 552485 - RNA, 19 nt, Human
cgccggggcgcacgcggcg

SEQ ID NO: 552486 - RNA, 20 nt, Human
gaaauguugaguuauccucc

SEQ ID NO: 552487 - RNA, 18 nt, Human
gagcagguguagucguau

SEQ ID NO: 552488 - RNA, 20 nt, Human
ggaaauguugaguuauccuc

SEQ ID NO: 552489 - RNA, 21 nt, Human
gugcagcgcggcgacugggcg

SEQ ID NO: 552490 - RNA, 21 nt, Human
uaaaaaauaaugccuucccuc

SEQ ID NO: 552491 - RNA, 20 nt, Human
ucaaucaaauuaaaguugga

SEQ ID NO: 552492 - RNA, 18 nt, Human
ucccuuuacggguaugca

SEQ ID NO: 552493 - RNA, 25 nt, Human
ugaaggggaagacagagcuccuccg

SEQ ID NO: 552494 - RNA, 18 nt, Human
aaaagaugaaagagcuuu

SEQ ID NO: 552495 - RNA, 18 nt, Human
aaagagcuuuuuaaauag

SEQ ID NO: 552496 - RNA, 18 nt, Human
aaagaggugaaaagaaga

SEQ ID NO: 552497 - RNA, 22 nt, Human
aaaguguugggauuacaggcau

SEQ ID NO: 552498 - RNA, 24 nt, Human
aaaguguugggauuacaggcauga

SEQ ID NO: 552499 - RNA, 20 nt, Human
aaccuccaccuccccgguuc

SEQ ID NO: 552500 - RNA, 18 nt, Human
aagccuauuugguuucca

SEQ ID NO: 552501 - RNA, 21 nt, Human
aaguguugggauuacaggcau

SEQ ID NO: 552502 - RNA, 26 nt, Human
aaguguugggauuacaggcaugagcc

SEQ ID NO: 552503 - RNA, 21 nt, Human
acaaagauaaacauagaaguu

SEQ ID NO: 552504 - RNA, 19 nt, Human
acaccacacccaaaaggug

SEQ ID NO: 552505 - RNA, 23 nt, Human
acacccaaaagguggcaaagaau

SEQ ID NO: 552506 - RNA, 18 nt, Human
acacugcuguaggcugag

SEQ ID NO: 552507 - RNA, 23 nt, Human
acagugguucaggugcuuugagg

SEQ ID NO: 552508 - RNA, 19 nt, Human
accaacuaccugcaugugc

SEQ ID NO: 552509 - RNA, 30 nt, Human
accacagucuugaccuuugcccugccugcc

SEQ ID NO: 552510 - RNA, 19 nt, Human
accccugccccaacagcuc

SEQ ID NO: 552511 - RNA, 20 nt, Human
acugcaaccuccaccucccc

SEQ ID NO: 552512 - RNA, 21 nt, Human
agaggcagcuuuuccucucua

SEQ ID NO: 552513 - RNA, 19 nt, Human
agaguuagauacuugaaca

SEQ ID NO: 552514 - RNA, 20 nt, Human
aggaaggaucagcaccuauu

SEQ ID NO: 552515 - RNA, 21 nt, Human
aggauccuucagagccaaaag

SEQ ID NO: 552516 - RNA, 18 nt, Human
aggcagcuuuuccucucu

SEQ ID NO: 552517 - RNA, 21 nt, Human
aggcuccugagucauauuccu

SEQ ID NO: 552518 - RNA, 25 nt, Human
aggcuggagugcaguggugugaucu

SEQ ID NO: 552519 - RNA, 22 nt, Human
agggaugugauaacaaaauugg

SEQ ID NO: 552520 - RNA, 24 nt, Human
aggucauaccuaucccugggcagc

SEQ ID NO: 552521 - RNA, 18 nt, Human
agugaggaagccaaugga

SEQ ID NO: 552522 - RNA, 19 nt, Human
agugcaguggugugaucuc

SEQ ID NO: 552523 - RNA, 21 nt, Human
agugcaguggugugaucucag

SEQ ID NO: 552524 - RNA, 23 nt, Human
agugcaguggugugaucucagcu

SEQ ID NO: 552525 - RNA, 24 nt, Human
agugcaguggugugaucucagcuc

SEQ ID NO: 552526 - RNA, 21 nt, Human
aguggugugaucucagcucgc

SEQ ID NO: 552527 - RNA, 18 nt, Human
auccccucccaaaacuaa

SEQ ID NO: 552528 - RNA, 22 nt, Human
aucuguuuugguaagagcuagg

SEQ ID NO: 552529 - RNA, 19 nt, Human
auuacaggcgcgugccacc

SEQ ID NO: 552530 - RNA, 19 nt, Human
caaaagaccccaauaccac

SEQ ID NO: 552531 - RNA, 21 nt, Human
caaaagaccccaauaccacag

SEQ ID NO: 552532 - RNA, 24 nt, Human
caaaaguguugggauuacaggcau

SEQ ID NO: 552533 - RNA, 18 nt, Human
caaaccucuaaccuucca

SEQ ID NO: 552534 - RNA, 24 nt, Human
caacuccucaauucuaaguuuuug

SEQ ID NO: 552535 - RNA, 21 nt, Human
caacugccuuaucccucugag

SEQ ID NO: 552536 - RNA, 20 nt, Human
caagcgauucuccugccuca

SEQ ID NO: 552537 - RNA, 22 nt, Human
caagcgauucuccugccucagc

SEQ ID NO: 552538 - RNA, 28 nt, Human
caagugauccuccugccuggaccuccca

SEQ ID NO: 552539 - RNA, 20 nt, Human
caccacacccaaaagguggc

SEQ ID NO: 552540 - RNA, 22 nt, Human
caccccaggcuggagugcagug

SEQ ID NO: 552541 - RNA, 23 nt, Human
cacugcuguaggcugagaaggcc

SEQ ID NO: 552542 - RNA, 25 nt, Human
cagcaauagaaaucacaaacuguuc

SEQ ID NO: 552543 - RNA, 20 nt, Human
cagccuccuggguagcuggg

SEQ ID NO: 552544 - RNA, 22 nt, Human
caggauccuucagagccaaaag

SEQ ID NO: 552545 - RNA, 24 nt, Human
ccaaaaguguugggauuacaggca

SEQ ID NO: 552546 - RNA, 22 nt, Human
ccaaauggaaaacaucuaaauc

SEQ ID NO: 552547 - RNA, 22 nt, Human
ccaagugauccuccugccugga

SEQ ID NO: 552548 - RNA, 18 nt, Human
ccacugcauccagcuugc

SEQ ID NO: 552549 - RNA, 21 nt, Human
ccagagucuuccuccucuucu

SEQ ID NO: 552550 - RNA, 18 nt, Human
cccaaagcuacuuggcua

SEQ ID NO: 552551 - RNA, 22 nt, Human
cccaggcuggagugcaguggug

SEQ ID NO: 552552 - RNA, 19 nt, Human
ccccaaacccaacccccuc

SEQ ID NO: 552553 - RNA, 21 nt, Human
ccccaaacccaacccccucug

SEQ ID NO: 552554 - RNA, 22 nt, Human
ccccaaacccaacccccucuga

SEQ ID NO: 552555 - RNA, 23 nt, Human
ccccaauaccacagucuugaccu

SEQ ID NO: 552556 - RNA, 26 nt, Human
ccccaauaccacagucuugaccuuug

SEQ ID NO: 552557 - RNA, 24 nt, Human
ccccaggcuggagugcaguggugu

SEQ ID NO: 552558 - RNA, 23 nt, Human
ccccgguucaagcgauucuccug

SEQ ID NO: 552559 - RNA, 19 nt, Human
cccugccccaacagcuccu

SEQ ID NO: 552560 - RNA, 18 nt, Human
ccuagcuacagcaauaga

SEQ ID NO: 552561 - RNA, 20 nt, Human
ccucaagcuccccucugccu

SEQ ID NO: 552562 - RNA, 24 nt, Human
ccuccccgguucaagcgauucucc

SEQ ID NO: 552563 - RNA, 22 nt, Human
ccuccugccuggaccucccaaa

SEQ ID NO: 552564 - RNA, 18 nt, Human
ccugaggagugguuaaag

SEQ ID NO: 552565 - RNA, 24 nt, Human
ccugccucagccuccuggguagcu

SEQ ID NO: 552566 - RNA, 18 nt, Human
ccugggcccaagugaucc

SEQ ID NO: 552567 - RNA, 22 nt, Human
ccugggcccaagugauccuccu

SEQ ID NO: 552568 - RNA, 23 nt, Human
ccuggguagcugggauuacaggc

SEQ ID NO: 552569 - RNA, 24 nt, Human
ccuggguagcugggauuacaggcg

SEQ ID NO: 552570 - RNA, 19 nt, Human
cgcugcaggcuugaccucc

SEQ ID NO: 552571 - RNA, 20 nt, Human
cuaucaccccaggcuggagu

SEQ ID NO: 552572 - RNA, 24 nt, Human
cuaucaccccaggcuggagugcag

SEQ ID NO: 552573 - RNA, 25 nt, Human
cucacugcaaccuccaccuccccgg

SEQ ID NO: 552574 - RNA, 24 nt, Human
cucagccuccuggguagcugggau

SEQ ID NO: 552575 - RNA, 19 nt, Human
cuccugguucucucuguuc

SEQ ID NO: 552576 - RNA, 19 nt, Human
cugacccuaucccaacaug

SEQ ID NO: 552577 - RNA, 24 nt, Human
cugcaaccuccaccuccccgguuc

SEQ ID NO: 552578 - RNA, 24 nt, Human
cuggaguacaauggcgugaucuca

SEQ ID NO: 552579 - RNA, 24 nt, Human
cuggagugcaguggugugaucuca

SEQ ID NO: 552580 - RNA, 20 nt, Human
cuggguagcugggauuacag

SEQ ID NO: 552581 - RNA, 18 nt, Human
cuggugacaccacaccca

SEQ ID NO: 552582 - RNA, 18 nt, Human
cuuccagacugggcaggg

SEQ ID NO: 552583 - RNA, 18 nt, Human
cuucucccagugucuaaa

SEQ ID NO: 552584 - RNA, 24 nt, Human
cuucugcagcccauucuuccugug

SEQ ID NO: 552585 - RNA, 18 nt, Human
cuugucccaucugcucac

SEQ ID NO: 552586 - RNA, 20 nt, Human
cuugucccaucugcucacuu

SEQ ID NO: 552587 - RNA, 20 nt, Human
gaaaccacugggcauccccu

SEQ ID NO: 552588 - RNA, 21 nt, Human
gaaauuuuagguugggaagca

SEQ ID NO: 552589 - RNA, 20 nt, Human
gacaaaccuaaccuuccaug

SEQ ID NO: 552590 - RNA, 18 nt, Human
gacuucuguguccacccc

SEQ ID NO: 552591 - RNA, 21 nt, Human
gacuuggucuuggcucaauag

SEQ ID NO: 552592 - RNA, 25 nt, Human
gagcugagcucccacagacugaguu

SEQ ID NO: 552593 - RNA, 21 nt, Human
gaguuugagucagaggcuuua

SEQ ID NO: 552594 - RNA, 18 nt, Human
gauuacaggcaugagcca

SEQ ID NO: 552595 - RNA, 22 nt, Human
gauuacaggcaugagccacugc

SEQ ID NO: 552596 - RNA, 23 nt, Human
gauuacaggcaugagccacugca

SEQ ID NO: 552597 - RNA, 18 nt, Human
gauuacaggcgcgugcca

SEQ ID NO: 552598 - RNA, 21 nt, Human
gauucuccugccucagccucc

SEQ ID NO: 552599 - RNA, 19 nt, Human
gcagccuaugcccaaagcu

SEQ ID NO: 552600 - RNA, 20 nt, Human
gcccaggcuggaguacaaug

SEQ ID NO: 552601 - RNA, 24 nt, Human
gcccaggcuggaguacaauggcgu

SEQ ID NO: 552602 - RNA, 24 nt, Human
gcgauucuccugccucagccuccu

SEQ ID NO: 552603 - RNA, 18 nt, Human
gcgcgccgggccagcagg

SEQ ID NO: 552604 - RNA, 19 nt, Human
gcucacuugcuuauggagc

SEQ ID NO: 552605 - RNA, 23 nt, Human
gcucacuugcuuauggagcuaaa

SEQ ID NO: 552606 - RNA, 21 nt, Human
gcuccagagucuuccuccucu

SEQ ID NO: 552607 - RNA, 30 nt, Human
gcucugucgcccaggcuggaguacaauggg

SEQ ID NO: 552608 - RNA, 19 nt, Human
gcuggaguacaauggcgug

SEQ ID NO: 552609 - RNA, 23 nt, Human
gcuuauggagcuaaaagaccccc

SEQ ID NO: 552610 - RNA, 22 nt, Human
gcuugaccuccugggcccaagu

SEQ ID NO: 552611 - RNA, 21 nt, Human
ggaagcgggugugagggcuga

SEQ ID NO: 552612 - RNA, 20 nt, Human
ggacuucuguguccaccccc

SEQ ID NO: 552613 - RNA, 22 nt, Human
ggauuacaggcaugagccacug

SEQ ID NO: 552614 - RNA, 22 nt, Human
ggcuggaguacaauggcgugau

SEQ ID NO: 552615 - RNA, 22 nt, Human
ggcuggagugcaguggugugau

SEQ ID NO: 552616 - RNA, 23 nt, Human
gggaagcaaagggaaaccacugg

SEQ ID NO: 552617 - RNA, 19 nt, Human
gggcccaagugauccuccu

SEQ ID NO: 552618 - RNA, 22 nt, Human
gggcccaagugauccuccugcc

SEQ ID NO: 552619 - RNA, 19 nt, Human
ggguuggagggggaagcgg

SEQ ID NO: 552620 - RNA, 19 nt, Human
ggugacaccacacccaaaa

SEQ ID NO: 552621 - RNA, 18 nt, Human
guagcugggauuacaggc

SEQ ID NO: 552622 - RNA, 22 nt, Human
guagcugggauuacaggcgcgu

SEQ ID NO: 552623 - RNA, 24 nt, Human
gucuugcucugucgcccaggcugg

SEQ ID NO: 552624 - RNA, 19 nt, Human
gugaucucagcucgcugca

SEQ ID NO: 552625 - RNA, 21 nt, Human
guggaggcucugucuuuuccu

SEQ ID NO: 552626 - RNA, 19 nt, Human
guguugggauuacaggcau

SEQ ID NO: 552627 - RNA, 24 nt, Human
guuaaagaggugaaaagaagaggu

SEQ ID NO: 552628 - RNA, 18 nt, Human
uaaaaugaucaauaugcc

SEQ ID NO: 552629 - RNA, 22 nt, Human
uaaagccuauuugguuuccaga

SEQ ID NO: 552630 - RNA, 18 nt, Human
uaagauaccuagcuacag

SEQ ID NO: 552631 - RNA, 22 nt, Human
uaagauaccuagcuacagcaau

SEQ ID NO: 552632 - RNA, 24 nt, Human
uacaggcaugagccacugcaucca

SEQ ID NO: 552633 - RNA, 23 nt, Human
uacaggcgcgugccaccacgccc

SEQ ID NO: 552634 - RNA, 19 nt, Human
uaccugcaugugccaaacu

SEQ ID NO: 552635 - RNA, 20 nt, Human
uagaagauaaaagggaggag

SEQ ID NO: 552636 - RNA, 23 nt, Human
uagaagauaaaagggaggaguuu

SEQ ID NO: 552637 - RNA, 19 nt, Human
uagaugcugcugaagaggc

SEQ ID NO: 552638 - RNA, 19 nt, Human
uagcaccucuuguucucuu

SEQ ID NO: 552639 - RNA, 23 nt, Human
uaguuugagguucucuucuccca

SEQ ID NO: 552640 - RNA, 27 nt, Human
uaucccaacaugccuuaggacgcucau

SEQ ID NO: 552641 - RNA, 19 nt, Human
uauguccccaaacccaacc

SEQ ID NO: 552642 - RNA, 18 nt, Human
ucacaaacuguucugugg

SEQ ID NO: 552643 - RNA, 19 nt, Human
ucacugcaaccuccaccuc

SEQ ID NO: 552644 - RNA, 24 nt, Human
ucacugcaaccuccaccuccccgg

SEQ ID NO: 552645 - RNA, 25 nt, Human
ucacugcaaccuccaccuccccggu

SEQ ID NO: 552646 - RNA, 27 nt, Human
ucacugcaaccuccaccuccccgguuc

SEQ ID NO: 552647 - RNA, 20 nt, Human
ucagccuccuggguagcugg

SEQ ID NO: 552648 - RNA, 25 nt, Human
ucccaaaaguguugggauuacaggc

SEQ ID NO: 552649 - RNA, 18 nt, Human
uccccaaacccaaccccc

SEQ ID NO: 552650 - RNA, 21 nt, Human
uccccgguucaagcgauucuc

SEQ ID NO: 552651 - RNA, 24 nt, Human
uccccgguucaagcgauucuccug

SEQ ID NO: 552652 - RNA, 24 nt, Human
ucccucaagcuccccucugccuug

SEQ ID NO: 552653 - RNA, 18 nt, Human
ucccugggcagcgagcug

SEQ ID NO: 552654 - RNA, 23 nt, Human
ucccugggcagcgagcugagcuc

SEQ ID NO: 552655 - RNA, 26 nt, Human
ucccugggcagcgagcugagcuccca

SEQ ID NO: 552656 - RNA, 23 nt, Human
uccucaugacugauaauuaucuc

SEQ ID NO: 552657 - RNA, 20 nt, Human
uccugccuggaccucccaaa

SEQ ID NO: 552658 - RNA, 21 nt, Human
uccugggcccaagugauccuc

SEQ ID NO: 552659 - RNA, 24 nt, Human
uccuggguagcugggauuacaggc

SEQ ID NO: 552660 - RNA, 22 nt, Human
uccuugacugucugccaucccc

SEQ ID NO: 552661 - RNA, 24 nt, Human
ucgcugcaggcuugaccuccuggg

SEQ ID NO: 552662 - RNA, 20 nt, Human
ucuaucaccccaggcuggag

SEQ ID NO: 552663 - RNA, 24 nt, Human
ucuccugccucagccuccugggua

SEQ ID NO: 552664 - RNA, 18 nt, Human
ucugucgcccaggcugga

SEQ ID NO: 552665 - RNA, 23 nt, Human
ucuugcucugucgcccaggcugg

SEQ ID NO: 552666 - RNA, 24 nt, Human
ucuugcucugucgcccaggcugga

SEQ ID NO: 552667 - RNA, 20 nt, Human
ucuuguucuaucaccccagg

SEQ ID NO: 552668 - RNA, 24 nt, Human
ucuuguucuaucaccccaggcugg

SEQ ID NO: 552669 - RNA, 25 nt, Human
ucuuguucuaucaccccaggcugga

SEQ ID NO: 552670 - RNA, 23 nt, Human
ugaaaguaacaaagauaaacaua

SEQ ID NO: 552671 - RNA, 22 nt, Human
ugaaauggagucuugcucuguc

SEQ ID NO: 552672 - RNA, 25 nt, Human
ugaccuccugggcccaagugauccu

SEQ ID NO: 552673 - RNA, 23 nt, Human
ugacucuggguucaguagguccc

SEQ ID NO: 552674 - RNA, 24 nt, Human
ugacugucugccauccccucccaa

SEQ ID NO: 552675 - RNA, 22 nt, Human
ugagacagggucuuguucuauc

SEQ ID NO: 552676 - RNA, 20 nt, Human
ugagaucacucauuuuacca

SEQ ID NO: 552677 - RNA, 21 nt, Human
ugaggacuuggucuuggcuca

SEQ ID NO: 552678 - RNA, 23 nt, Human
ugccucagccuccuggguagcug

SEQ ID NO: 552679 - RNA, 24 nt, Human
ugccucagccuccuggguagcugg

SEQ ID NO: 552680 - RNA, 20 nt, Human
ugccuggaccucccaaaagu

SEQ ID NO: 552681 - RNA, 21 nt, Human
ugcucacuugcuuauggagcc

SEQ ID NO: 552682 - RNA, 22 nt, Human
ugcucugucgcccaggcuggag

SEQ ID NO: 552683 - RNA, 23 nt, Human
ugcuuugaggacuuggucuuggc

SEQ ID NO: 552684 - RNA, 18 nt, Human
uggaagcaaaggcugugg

SEQ ID NO: 552685 - RNA, 24 nt, Human
uggaagcaaaggcuguggguugga

SEQ ID NO: 552686 - RNA, 19 nt, Human
uggaguacaauggcgugau

SEQ ID NO: 552687 - RNA, 23 nt, Human
uggagucuugcucugucgcccag

SEQ ID NO: 552688 - RNA, 24 nt, Human
uggagucuugcucugucgcccagg

SEQ ID NO: 552689 - RNA, 23 nt, Human
uggagugaggaagccaauggagg

SEQ ID NO: 552690 - RNA, 19 nt, Human
uggagugcaguggugugau

SEQ ID NO: 552691 - RNA, 24 nt, Human
uggagugcaguggugugaucucag

SEQ ID NO: 552692 - RNA, 19 nt, Human
uggccauguaagagaccac

SEQ ID NO: 552693 - RNA, 24 nt, Human
uggcgugaucucagcucacugcaa

SEQ ID NO: 552694 - RNA, 22 nt, Human
uggcuaaacaggcuggugacac

SEQ ID NO: 552695 - RNA, 19 nt, Human
ugggaagcaaagggaaacc

SEQ ID NO: 552696 - RNA, 24 nt, Human
ugggaagcaaagggaaaccacugg

SEQ ID NO: 552697 - RNA, 19 nt, Human
ugggauuacaggcaugagc

SEQ ID NO: 552698 - RNA, 21 nt, Human
ugggauuacaggcaugagcca

SEQ ID NO: 552699 - RNA, 22 nt, Human
ugggauuacaggcaugagccac

SEQ ID NO: 552700 - RNA, 22 nt, Human
ugggauuacaggcaugagccac

SEQ ID NO: 552701 - RNA, 24 nt, Human
ugggauuacaggcaugagccacug

SEQ ID NO: 552702 - RNA, 26 nt, Human
ugggauuacaggcaugagccacugca

SEQ ID NO: 552703 - RNA, 21 nt, Human
ugggauuacaggcgcgugcca

SEQ ID NO: 552704 - RNA, 22 nt, Human
ugggauuacaggcgcgugccac

SEQ ID NO: 552705 - RNA, 24 nt, Human
ugggauuacaggcgcgugccacca

SEQ ID NO: 552706 - RNA, 24 nt, Human
ugggcccaagugauccuccugccu

SEQ ID NO: 552707 - RNA, 21 nt, Human
uggugacaccacacccaaaag

SEQ ID NO: 552708 - RNA, 24 nt, Human
uggugugaucucagcucgcugcag

SEQ ID NO: 552709 - RNA, 19 nt, Human
ugguuuuaaucuuccuauu

SEQ ID NO: 552710 - RNA, 21 nt, Human
ugugucuuuguguugacaaac

SEQ ID NO: 552711 - RNA, 18 nt, Human
uguguugacaaaccuaac

SEQ ID NO: 552712 - RNA, 23 nt, Human
uguucuaucaccccaggcuggag

SEQ ID NO: 552713 - RNA, 25 nt, Human
uguucuaucaccccaggcuggagug

SEQ ID NO: 552714 - RNA, 20 nt, Human
uguuugcucucuggagagau

SEQ ID NO: 552715 - RNA, 22 nt, Human
uuaacuuuauuuuucaacuuca

SEQ ID NO: 552716 - RNA, 21 nt, Human
uucaagcgauucuccugccuc

SEQ ID NO: 552717 - RNA, 23 nt, Human
uucaagcgauucuccugccucag

SEQ ID NO: 552718 - RNA, 24 nt, Human
uucaagcgauucuccugccucagc

SEQ ID NO: 552719 - RNA, 18 nt, Human
uuccagaagaguuagaua

SEQ ID NO: 552720 - RNA, 23 nt, Human
uuccugacucuggguucaguagg

SEQ ID NO: 552721 - RNA, 22 nt, Human
uugagaucacucauuuuaccau

SEQ ID NO: 552722 - RNA, 21 nt, Human
uugcaaaugaggauggagaag

SEQ ID NO: 552723 - RNA, 18 nt, Human
uugcccugccugcuucug

SEQ ID NO: 552724 - RNA, 24 nt, Human
uugcucugucgcccaggcuggagu

SEQ ID NO: 552725 - RNA, 28 nt, Human
uuugagaucacucauuuuaaccccuagg

SEQ ID NO: 552726 - RNA, 20 nt, Human
uuuuuuuugagacagggucu

SEQ ID NO: 552727 - RNA, 20 nt, Human
uuuuuuuuuuugagacaggg

SEQ ID NO: 552728 - RNA, 23 nt, Human
uuuuuuuuuuuugagacaggguc

SEQ ID NO: 552729 - RNA, 24 nt, Human
aaaagcuggagggugggcugagcc

SEQ ID NO: 552730 - RNA, 19 nt, Human
aagaaggggcuaggaggca

SEQ ID NO: 552731 - RNA, 22 nt, Human
aagagcaucugaagaaccaaag

SEQ ID NO: 552732 - RNA, 21 nt, Human
aaggcccagcccugccgcccc

SEQ ID NO: 552733 - RNA, 21 nt, Human
accccaagagcaucugaagaa

SEQ ID NO: 552734 - RNA, 24 nt, Human
accccaccugcaccccuuccccac

SEQ ID NO: 552735 - RNA, 18 nt, Human
acccccuccccagccccu

SEQ ID NO: 552736 - RNA, 18 nt, Human
acuugcccguccccucag

SEQ ID NO: 552737 - RNA, 23 nt, Human
agaaagauccaacaugggguccg

SEQ ID NO: 552738 - RNA, 21 nt, Human
agacucccucccgcucugccu

SEQ ID NO: 552739 - RNA, 23 nt, Human
agccuccaggccagccggccccu

SEQ ID NO: 552740 - RNA, 25 nt, Human
agccuccuccugagacucccucccg

SEQ ID NO: 552741 - RNA, 18 nt, Human
agccuuuggagaaggguc

SEQ ID NO: 552742 - RNA, 22 nt, Human
agcgccguccacacagcagccc

SEQ ID NO: 552743 - RNA, 23 nt, Human
aggagaaagggagaaagauccaa

SEQ ID NO: 552744 - RNA, 23 nt, Human
aggaggcacugggagggccaugg

SEQ ID NO: 552745 - RNA, 18 nt, Human
aggcagauugucacaagg

SEQ ID NO: 552746 - RNA, 21 nt, Human
aggccgggagggucaggggcc

SEQ ID NO: 552747 - RNA, 23 nt, Human
agggagggcaggucccaugaggg

SEQ ID NO: 552748 - RNA, 21 nt, Human
agggccaccgaggcaaggcca

SEQ ID NO: 552749 - RNA, 20 nt, Human
auugccauggcaacccagau

SEQ ID NO: 552750 - RNA, 20 nt, Human
auugucacaaggcccagccc

SEQ ID NO: 552751 - RNA, 21 nt, Human
caagagcaucugaagaaccaa

SEQ ID NO: 552752 - RNA, 21 nt, Human
caagagcaucugaagaaccag

SEQ ID NO: 552753 - RNA, 24 nt, Human
caaggccauguggugaaaggcaga

SEQ ID NO: 552754 - RNA, 21 nt, Human
caaggcccagcccugccgccc

SEQ ID NO: 552755 - RNA, 19 nt, Human
caaguuggggaggcggugg

SEQ ID NO: 552756 - RNA, 19 nt, Human
cacagacggcugccuccca

SEQ ID NO: 552757 - RNA, 19 nt, Human
cacagcagccccgagaugg

SEQ ID NO: 552758 - RNA, 18 nt, Human
cacaggcucaaguugggg

SEQ ID NO: 552759 - RNA, 22 nt, Human
caccccuuccccacgguguccc

SEQ ID NO: 552760 - RNA, 22 nt, Human
caccccuuccccacgguguccc

SEQ ID NO: 552761 - RNA, 19 nt, Human
cacugcggccuccccgcgc

SEQ ID NO: 552762 - RNA, 19 nt, Human
cagaaucuuggaccucagg

SEQ ID NO: 552763 - RNA, 20 nt, Human
cagacaggagagugccugag

SEQ ID NO: 552764 - RNA, 23 nt, Human
cagauugucacaaggcccagccc

SEQ ID NO: 552765 - RNA, 22 nt, Human
cagccccucagggcagccuccu

SEQ ID NO: 552766 - RNA, 19 nt, Human
cagccucucggacaccccu

SEQ ID NO: 552767 - RNA, 22 nt, Human
cagccucucggacaccccucag

SEQ ID NO: 552768 - RNA, 19 nt, Human
cagcgccguccacacagca

SEQ ID NO: 552769 - RNA, 18 nt, Human
caguagcuggggggcaug

SEQ ID NO: 552770 - RNA, 20 nt, Human
caucaccccaccugcacccc

SEQ ID NO: 552771 - RNA, 19 nt, Human
cauggaccgcuggucuccu

SEQ ID NO: 552772 - RNA, 21 nt, Human
caugggguccgugagcagugc

SEQ ID NO: 552773 - RNA, 18 nt, Human
cauucugccucugcgggg

SEQ ID NO: 552774 - RNA, 19 nt, Human
ccagacccauggaccgcug

SEQ ID NO: 552775 - RNA, 23 nt, Human
ccagccucucggacaccccucag

SEQ ID NO: 552776 - RNA, 19 nt, Human
ccagggcccaagguuuggg

SEQ ID NO: 552777 - RNA, 20 nt, Human
cccacggugucccgggggcu

SEQ ID NO: 552778 - RNA, 19 nt, Human
cccagcuccagugcccucc

SEQ ID NO: 552779 - RNA, 23 nt, Human
ccccaagagcaucugaagaaccc

SEQ ID NO: 552780 - RNA, 21 nt, Human
ccccaccuccuccucuucuca

SEQ ID NO: 552781 - RNA, 19 nt, Human
ccccaccugcaccccuucc

SEQ ID NO: 552782 - RNA, 22 nt, Human
ccccaccugcaccccuucccca

SEQ ID NO: 552783 - RNA, 26 nt, Human
cccccaccuccuccucuucucagcuc

SEQ ID NO: 552784 - RNA, 22 nt, Human
cccccgguggccaccucucugc

SEQ ID NO: 552785 - RNA, 23 nt, Human
cccccuccccagccccucagggc

SEQ ID NO: 552786 - RNA, 21 nt, Human
ccccucagaacaaaagcccau

SEQ ID NO: 552787 - RNA, 20 nt, Human
ccccuuccccacgguguccc

SEQ ID NO: 552788 - RNA, 22 nt, Human
cccgcgggccuggggcccugga

SEQ ID NO: 552789 - RNA, 19 nt, Human
cccucagaacaaaagccca

SEQ ID NO: 552790 - RNA, 23 nt, Human
cccucagaacaaaagcccaucau

SEQ ID NO: 552791 - RNA, 19 nt, Human
cccucagcuaccagcaccu

SEQ ID NO: 552792 - RNA, 22 nt, Human
cccucccugacagucagggcca

SEQ ID NO: 552793 - RNA, 20 nt, Human
cccugaggaaaagcuggagg

SEQ ID NO: 552794 - RNA, 24 nt, Human
cccuuccccacggugucccggggg

SEQ ID NO: 552795 - RNA, 20 nt, Human
ccgcgccggcugcucgcugc

SEQ ID NO: 552796 - RNA, 21 nt, Human
ccgcgccggcugcucgcugca

SEQ ID NO: 552797 - RNA, 19 nt, Human
ccgggcccucuucgcuuuc

SEQ ID NO: 552798 - RNA, 21 nt, Human
ccggugugugcagcccgggcc

SEQ ID NO: 552799 - RNA, 20 nt, Human
ccgugcacugcggccucccc

SEQ ID NO: 552800 - RNA, 25 nt, Human
ccuaugaaccccaagagcaucugaa

SEQ ID NO: 552801 - RNA, 18 nt, Human
ccucagcuaccagcaccu

SEQ ID NO: 552802 - RNA, 19 nt, Human
ccuccaggccagccggccc

SEQ ID NO: 552803 - RNA, 22 nt, Human
ccucccagcuccagugcccucc

SEQ ID NO: 552804 - RNA, 19 nt, Human
ccucugcgggggucggggg

SEQ ID NO: 552805 - RNA, 19 nt, Human
ccucugcugagucacaaga

SEQ ID NO: 552806 - RNA, 18 nt, Human
ccugcagccugcagggcc

SEQ ID NO: 552807 - RNA, 25 nt, Human
ccugcccuuccccugaaucuaagaa

SEQ ID NO: 552808 - RNA, 19 nt, Human
ccuggcugcuuagagcugg

SEQ ID NO: 552809 - RNA, 18 nt, Human
cgccggcugcucgcugca

SEQ ID NO: 552810 - RNA, 25 nt, Human
cgcuuucggcuuuugucuucuccua

SEQ ID NO: 552811 - RNA, 18 nt, Human
cggcugagggagggcagg

SEQ ID NO: 552812 - RNA, 24 nt, Human
cuaggcgcccuccccgaaagcccc

SEQ ID NO: 552813 - RNA, 21 nt, Human
cucaggauccucccaggacuu

SEQ ID NO: 552814 - RNA, 22 nt, Human
cucaugagguacccccucccca

SEQ ID NO: 552815 - RNA, 21 nt, Human
cuccaggccagccggccccuc

SEQ ID NO: 552816 - RNA, 21 nt, Human
cuccagugcccuccugcagcc

SEQ ID NO: 552817 - RNA, 24 nt, Human
cuccccgaaagcccccauucugag

SEQ ID NO: 552818 - RNA, 20 nt, Human
cucugccucccuggcccucc

SEQ ID NO: 552819 - RNA, 19 nt, Human
cugcaccccuuccccacgg

SEQ ID NO: 552820 - RNA, 23 nt, Human
cugcccagcugauaacagagccu

SEQ ID NO: 552821 - RNA, 20 nt, Human
cuucccucccuccccucuca

SEQ ID NO: 552822 - RNA, 21 nt, Human
gaaggggcuaggaggcacugg

SEQ ID NO: 552823 - RNA, 24 nt, Human
gacccauggaccgcuggucuccuc

SEQ ID NO: 552824 - RNA, 19 nt, Human
gaggaaaagcuggagggug

SEQ ID NO: 552825 - RNA, 27 nt, Human
gagggcaggucccaugagggcagggug

SEQ ID NO: 552826 - RNA, 18 nt, Human
gagggucaggggcccugc

SEQ ID NO: 552827 - RNA, 21 nt, Human
gagggugggcugagccuccag

SEQ ID NO: 552828 - RNA, 23 nt, Human
gaugggguggaggacucuuccag

SEQ ID NO: 552829 - RNA, 20 nt, Human
gccucccagccggugugugc

SEQ ID NO: 552830 - RNA, 21 nt, Human
gcugggacgagaccucccagc

SEQ ID NO: 552831 - RNA, 22 nt, Human
gcuuucggcuuuugucuucucc

SEQ ID NO: 552832 - RNA, 24 nt, Human
ggacgagaccucccagcuccagug

SEQ ID NO: 552833 - RNA, 24 nt, Human
ggagagugaagccaggccgggagg

SEQ ID NO: 552834 - RNA, 23 nt, Human
ggaggacucuuccagggcccaag

SEQ ID NO: 552835 - RNA, 22 nt, Human
ggaggcacugggagggccaugg

SEQ ID NO: 552836 - RNA, 21 nt, Human
ggcacugggagggccauggcu

SEQ ID NO: 552837 - RNA, 18 nt, Human
ggccauggcugauggcug

SEQ ID NO: 552838 - RNA, 22 nt, Human
ggccgggagggucaggggcccu

SEQ ID NO: 552839 - RNA, 21 nt, Human
gggcagagaguggagguagga

SEQ ID NO: 552840 - RNA, 18 nt, Human
gggcagggugcuaugggg

SEQ ID NO: 552841 - RNA, 24 nt, Human
ggggugaugccuagugaccaggcu

SEQ ID NO: 552842 - RNA, 20 nt, Human
gugaaaggcagauugucaca

SEQ ID NO: 552843 - RNA, 25 nt, Human
gugaugggguggaggacucuuccag

SEQ ID NO: 552844 - RNA, 19 nt, Human
gugggcugagccuccaggc

SEQ ID NO: 552845 - RNA, 18 nt, Human
uaagagaggccucgggua

SEQ ID NO: 552846 - RNA, 22 nt, Human
uacaccagccucucggacaccc

SEQ ID NO: 552847 - RNA, 21 nt, Human
uagacugcaacagcagcucag

SEQ ID NO: 552848 - RNA, 23 nt, Human
uaggaccugccccuaugaacccc

SEQ ID NO: 552849 - RNA, 27 nt, Human
uaggaggcacugggagggccauggcug

SEQ ID NO: 552850 - RNA, 21 nt, Human
uaggggcagagaguggaggua

SEQ ID NO: 552851 - RNA, 21 nt, Human
uaggggcagagaguggaggua

SEQ ID NO: 552852 - RNA, 19 nt, Human
uagggguggggaaguaaca

SEQ ID NO: 552853 - RNA, 24 nt, Human
ucaggacacccugaggaaaagcug

SEQ ID NO: 552854 - RNA, 25 nt, Human
ucaggacacccugaggaaaagcugg

SEQ ID NO: 552855 - RNA, 23 nt, Human
ucaggauccucccaggacuuccc

SEQ ID NO: 552856 - RNA, 21 nt, Human
uccacacagcagccccgagau

SEQ ID NO: 552857 - RNA, 20 nt, Human
uccagcccccaccuccuccu

SEQ ID NO: 552858 - RNA, 20 nt, Human
ucccaggacuucccucccuc

SEQ ID NO: 552859 - RNA, 18 nt, Human
uccccagccccucagggc

SEQ ID NO: 552860 - RNA, 19 nt, Human
uccccgaaagcccccauuc

SEQ ID NO: 552861 - RNA, 18 nt, Human
uccccgcgccggcugcuc

SEQ ID NO: 552862 - RNA, 21 nt, Human
uccccucagcuaccagcaccu

SEQ ID NO: 552863 - RNA, 23 nt, Human
ucccgcucugccucccuggcccu

SEQ ID NO: 552864 - RNA, 18 nt, Human
ucccuccccucucacuug

SEQ ID NO: 552865 - RNA, 22 nt, Human
ucccugaacguggccacugccu

SEQ ID NO: 552866 - RNA, 25 nt, Human
uccucaugagguacccccuccccag

SEQ ID NO: 552867 - RNA, 22 nt, Human
ucuucuccuacuccucccaccg

SEQ ID NO: 552868 - RNA, 21 nt, Human
ugaaaggguggaccaauggca

SEQ ID NO: 552869 - RNA, 20 nt, Human
ugaagagaaaaaggagagga

SEQ ID NO: 552870 - RNA, 22 nt, Human
ugaagagaaaaaggagaggaga

SEQ ID NO: 552871 - RNA, 20 nt, Human
ugaggaaaagcuggagggug

SEQ ID NO: 552872 - RNA, 20 nt, Human
ugaggaaaagcuggagggug

SEQ ID NO: 552873 - RNA, 19 nt, Human
ugagggagggcagguccca

SEQ ID NO: 552874 - RNA, 24 nt, Human
ugaguuguuggugccugcccuucc

SEQ ID NO: 552875 - RNA, 26 nt, Human
ugaugggguggaggacucuuccaggg

SEQ ID NO: 552876 - RNA, 21 nt, Human
ugcagccugcagggcccacgu

SEQ ID NO: 552877 - RNA, 19 nt, Human
uggaauggggcccgugaaa

SEQ ID NO: 552878 - RNA, 22 nt, Human
uggaauggggcccgugaaagcc

SEQ ID NO: 552879 - RNA, 19 nt, Human
uggccagggauuggcuggc

SEQ ID NO: 552880 - RNA, 21 nt, Human
uggcugacggcugagggaggg

SEQ ID NO: 552881 - RNA, 18 nt, Human
uggcugcuuagagcuggg

SEQ ID NO: 552882 - RNA, 22 nt, Human
ugggagggccauggcugauggc

SEQ ID NO: 552883 - RNA, 18 nt, Human
ugggcugagccuccaggc

SEQ ID NO: 552884 - RNA, 24 nt, Human
uggggaggcgguggaauggggccc

SEQ ID NO: 552885 - RNA, 18 nt, Human
ugggguggaggacucuuc

SEQ ID NO: 552886 - RNA, 23 nt, Human
ugggguggaggacucuuccaggg

SEQ ID NO: 552887 - RNA, 23 nt, Human
uucucagcuccacccugguccuc

SEQ ID NO: 552888 - RNA, 20 nt, Human
uuugucuucuccuacuccuc

SEQ ID NO: 552889 - RNA, 19 nt, Human
acaguaccaggagggcagg

SEQ ID NO: 552890 - RNA, 20 nt, Human
accccgagggaagcgaagag

SEQ ID NO: 552891 - RNA, 21 nt, Human
accccgagggaagcgaagagc

SEQ ID NO: 552892 - RNA, 18 nt, Human
aggcccagagccaaggcc

SEQ ID NO: 552893 - RNA, 18 nt, Human
aguaccaggagggcaggc

SEQ ID NO: 552894 - RNA, 23 nt, Human
cagagccaaggccauagggcugc

SEQ ID NO: 552895 - RNA, 20 nt, Human
caggcagggcacccccaggc

SEQ ID NO: 552896 - RNA, 18 nt, Human
ccaggcgguggccgaggu

SEQ ID NO: 552897 - RNA, 18 nt, Human
ccaggcuggccaguggag

SEQ ID NO: 552898 - RNA, 22 nt, Human
cccagagccaaggccauagggc

SEQ ID NO: 552899 - RNA, 23 nt, Human
cccccaggcuggccaguggagga

SEQ ID NO: 552900 - RNA, 22 nt, Human
ccccgcccugccgccgcggccg

SEQ ID NO: 552901 - RNA, 19 nt, Human
ccgccgcccgcugcuccgg

SEQ ID NO: 552902 - RNA, 19 nt, Human
ccgccgccgcccgcugcuc

SEQ ID NO: 552903 - RNA, 22 nt, Human
ccgccgccgcccgcugcuccgg

SEQ ID NO: 552904 - RNA, 21 nt, Human
ccgccgggggcuggcuugguu

SEQ ID NO: 552905 - RNA, 20 nt, Human
ccgcugcuccggccccgccc

SEQ ID NO: 552906 - RNA, 21 nt, Human
ccgcugcuccggccccgcccu

SEQ ID NO: 552907 - RNA, 25 nt, Human
ccgggcgccgccuccgccgccgccc

SEQ ID NO: 552908 - RNA, 20 nt, Human
ccguacgagcgagcgugcgc

SEQ ID NO: 552909 - RNA, 22 nt, Human
ccuccgccgccgcccgcugcuc

SEQ ID NO: 552910 - RNA, 18 nt, Human
ccuggggaucccaggcgg

SEQ ID NO: 552911 - RNA, 22 nt, Human
ccugucccaucaggcccagagc

SEQ ID NO: 552912 - RNA, 21 nt, Human
ccuucccucuaccccuguccc

SEQ ID NO: 552913 - RNA, 22 nt, Human
cgagcaagaccccgagggaagc

SEQ ID NO: 552914 - RNA, 18 nt, Human
cgaucccgccgggggcug

SEQ ID NO: 552915 - RNA, 25 nt, Human
cucaccuucccucuaccccuguccc

SEQ ID NO: 552916 - RNA, 18 nt, Human
cucccgggcgccgccucc

SEQ ID NO: 552917 - RNA, 19 nt, Human
cuccgccgccgcccgcugc

SEQ ID NO: 552918 - RNA, 19 nt, Human
gggaagcgaagagcgcucc

SEQ ID NO: 552919 - RNA, 23 nt, Human
gggcaggcagggcacccccaggc

SEQ ID NO: 552920 - RNA, 20 nt, Human
gggcgccgccuccgccgccg

SEQ ID NO: 552921 - RNA, 21 nt, Human
uaaaaauaacagcuuuccccc

SEQ ID NO: 552922 - RNA, 20 nt, Human
ugcccugagcccuucucugc

SEQ ID NO: 552923 - RNA, 22 nt, Human
ugcuaugcucaccuucccucua

SEQ ID NO: 552924 - RNA, 18 nt, Human
uggcuugguugcuggugc

SEQ ID NO: 552925 - RNA, 21 nt, Human
ugugagggggccgaggggaag

SEQ ID NO: 552926 - RNA, 21 nt, Human
uucccccaauucucgcucuag

SEQ ID NO: 552927 - RNA, 24 nt, Human
uugcuggugcccugagcccuucuc

SEQ ID NO: 552928 - RNA, 25 nt, Human
uuuuuuuuuuuuuuuuuacaucuga

SEQ ID NO: 552929 - RNA, 21 nt, Human
uuuuuuuuuuuuuuuuuuaca

SEQ ID NO: 552930 - RNA, 23 nt, Human
aagcgcgcaccugggaggcagac

SEQ ID NO: 552931 - RNA, 18 nt, Human
aggaagauuggucuggau

SEQ ID NO: 552932 - RNA, 19 nt, Human
agugugacauugaauugag

SEQ ID NO: 552933 - RNA, 20 nt, Human
caccgccgccgccgccgccg

SEQ ID NO: 552934 - RNA, 20 nt, Human
cagcgggcggggcagcgcgg

SEQ ID NO: 552935 - RNA, 21 nt, Human
ccaccgccgccgccgccgccg

SEQ ID NO: 552936 - RNA, 23 nt, Human
ccgccgccgccgccgggcgccga

SEQ ID NO: 552937 - RNA, 18 nt, Human
ccgccgccuccgccccug

SEQ ID NO: 552938 - RNA, 23 nt, Human
ccgccuccgccuccuccgcuucc

SEQ ID NO: 552939 - RNA, 20 nt, Human
ccgcggccgccuccgccucc

SEQ ID NO: 552940 - RNA, 24 nt, Human
ccuccugcgaccgucgccgccacu

SEQ ID NO: 552941 - RNA, 19 nt, Human
cgagcgagcgagcgggcgg

SEQ ID NO: 552942 - RNA, 24 nt, Human
cgccgccgccgccgccgggcgccg

SEQ ID NO: 552943 - RNA, 19 nt, Human
cgcggccgccuccgccucc

SEQ ID NO: 552944 - RNA, 19 nt, Human
cggggaaaccgagcgagcg

SEQ ID NO: 552945 - RNA, 19 nt, Human
cucccuggccgccgccucc

SEQ ID NO: 552946 - RNA, 20 nt, Human
cugcaaccugcggagcccgc

SEQ ID NO: 552947 - RNA, 24 nt, Human
cuuacagucgcgggccaggaugag

SEQ ID NO: 552948 - RNA, 19 nt, Human
gagccggcgggcgggucgg

SEQ ID NO: 552949 - RNA, 23 nt, Human
gccgccgaguuccgcggcuccgg

SEQ ID NO: 552950 - RNA, 18 nt, Human
gcgggcgagccggcgggc

SEQ ID NO: 552951 - RNA, 22 nt, Human
ggagcccgcgucgcagcagccc

SEQ ID NO: 552952 - RNA, 18 nt, Human
ggccgccgccuccgcccc

SEQ ID NO: 552953 - RNA, 19 nt, Human
gggcagcgcgggaagcgcu

SEQ ID NO: 552954 - RNA, 19 nt, Human
ggguggguuggcgaggagc

SEQ ID NO: 552955 - RNA, 23 nt, Human
gucaaggaauggcugguuccacc

SEQ ID NO: 552956 - RNA, 27 nt, Human
uaagcccggcgggggcggggaaaccga

SEQ ID NO: 552957 - RNA, 22 nt, Human
ucaaggaauggcugguuccacc

SEQ ID NO: 552958 - RNA, 19 nt, Human
uccagcaauuuugcaagag

SEQ ID NO: 552959 - RNA, 18 nt, Human
ucccuggccgccgccucc

SEQ ID NO: 552960 - RNA, 20 nt, Human
uccgcggcuccgggagcgaa

SEQ ID NO: 552961 - RNA, 23 nt, Human
uccuccgcuuccucccuggccgc

SEQ ID NO: 552962 - RNA, 28 nt, Human
ucgccgccaccgccgccgccgccgccgg

SEQ ID NO: 552963 - RNA, 25 nt, Human
ucgccgccaccgccgccgccgccgg

SEQ ID NO: 552964 - RNA, 20 nt, Human
ucggcgggccagcgggcggg

SEQ ID NO: 552965 - RNA, 22 nt, Human
ugagacgagcgugugggugggu

SEQ ID NO: 552966 - RNA, 23 nt, Human
ugcgacagcgcgcacccggauac

SEQ ID NO: 552967 - RNA, 21 nt, Human
uggcgggcgagccggcgggcg

SEQ ID NO: 552968 - RNA, 22 nt, Human
ugggaggcagacggcaccuccu

SEQ ID NO: 552969 - RNA, 24 nt, Human
uuccagcaauuuugcaagaggcag

SEQ ID NO: 552970 - RNA, 21 nt, Human
uuugaugggaaaucuuaagua

SEQ ID NO: 552971 - RNA, 23 nt, Human
uuuuuuuuuuuugaugggaaauc

SEQ ID NO: 552972 - RNA, 19 nt, Human
uuuuuuuuuuuuuugaugg

SEQ ID NO: 552973 - RNA, 18 nt, Human
uuuuuuuuuuuuuuuuug

SEQ ID NO: 552974 - RNA, 23 nt, Human
uuuuuuuuuuuuuuuuugauggg

SEQ ID NO: 552975 - RNA, 21 nt, Human
aacacauuuaauuaccacagu

SEQ ID NO: 552976 - RNA, 20 nt, Human
accgcccgccgccgccgccc

SEQ ID NO: 552977 - RNA, 19 nt, Human
agugacuuugguccauauc

SEQ ID NO: 552978 - RNA, 21 nt, Human
cccgccgccgccgcccagaga

SEQ ID NO: 552979 - RNA, 22 nt, Human
cccgcgcgggucucaccgaccg

SEQ ID NO: 552980 - RNA, 24 nt, Human
cccgcgcgggucucaccgaccgcg

SEQ ID NO: 552981 - RNA, 26 nt, Human
ccgaccgcgcagacaccgguuaaaga

SEQ ID NO: 552982 - RNA, 25 nt, Human
ccgcccgccgccgccgcccagagau

SEQ ID NO: 552983 - RNA, 21 nt, Human
cgcgggucucaccgaccgcgc

SEQ ID NO: 552984 - RNA, 23 nt, Human
gauaaguacauacugaacacauu

SEQ ID NO: 552985 - RNA, 18 nt, Human
gguuuuuuuccugacccu

SEQ ID NO: 552986 - RNA, 21 nt, Human
uaaaacauuagugacuuuggu

SEQ ID NO: 552987 - RNA, 23 nt, Human
uaauugguuuuuuuccugacccu

SEQ ID NO: 552988 - RNA, 24 nt, Human
ugacccuuggaauguuaguuucau

SEQ ID NO: 552989 - RNA, 26 nt, Human
ugauaaguacauacugaaaggguuuc

SEQ ID NO: 552990 - RNA, 26 nt, Human
aaaaaauccaaaaugauuaguaaaga

SEQ ID NO: 552991 - RNA, 25 nt, Human
agaaaaaaaauccaaaaugauuagu

SEQ ID NO: 552992 - RNA, 22 nt, Human
caaauuagagcaguaaucuucc

SEQ ID NO: 552993 - RNA, 18 nt, Human
cccaggugcuggcuuggc

SEQ ID NO: 552994 - RNA, 21 nt, Human
cccgguuccaggcccaggugc

SEQ ID NO: 552995 - RNA, 22 nt, Human
cggugggcgaagcuggggggcu

SEQ ID NO: 552996 - RNA, 21 nt, Human
gauuaguaaagaaaaauauaa

SEQ ID NO: 552997 - RNA, 23 nt, Human
ggggggcugcggcccgguuccag

SEQ ID NO: 552998 - RNA, 24 nt, Human
ggggggcugcggcccgguuccagg

SEQ ID NO: 552999 - RNA, 19 nt, Human
guaaagaaaaauauaagaa

SEQ ID NO: 553000 - RNA, 21 nt, Human
guuccaggcccaggugcuggc

SEQ ID NO: 553001 - RNA, 19 nt, Human
guuccaggcccaggugcuu

SEQ ID NO: 553002 - RNA, 18 nt, Human
uaaagcaccccagcucuc

SEQ ID NO: 553003 - RNA, 21 nt, Human
uaagaauuaacagacccuuua

SEQ ID NO: 553004 - RNA, 22 nt, Human
ucaaaugaguuauguuugccuc

SEQ ID NO: 553005 - RNA, 19 nt, Human
ucacucaaauuagagcagu

SEQ ID NO: 553006 - RNA, 25 nt, Human
ugaaugaauacccuaauggcaaacc

SEQ ID NO: 553007 - RNA, 21 nt, Human
ugaucuagguugcuuuuccuu

SEQ ID NO: 553008 - RNA, 21 nt, Human
ugaugagaagguacauugguu

SEQ ID NO: 553009 - RNA, 18 nt, Human
uucaaagaaaaaaaaucc

SEQ ID NO: 553010 - RNA, 20 nt, Human
uugcuuuuccuucagcaagg

SEQ ID NO: 553011 - RNA, 23 nt, Human
aaggaaaaauccacaaugauuag

SEQ ID NO: 553012 - RNA, 20 nt, Human
aauaauuuaaggaaaaaucc

SEQ ID NO: 553013 - RNA, 18 nt, Human
caaagcaccccagcucuc

SEQ ID NO: 553014 - RNA, 22 nt, Human
caaauuagagcaguaaucuucc

SEQ ID NO: 553015 - RNA, 21 nt, Human
cccaguuccaggcccaggugc

SEQ ID NO: 553016 - RNA, 21 nt, Human
gaagcugggggcugcggccca

SEQ ID NO: 553017 - RNA, 23 nt, Human
gagguggugggugaagcuggggg

SEQ ID NO: 553018 - RNA, 21 nt, Human
gauuaguaaagaaaaauauaa

SEQ ID NO: 553019 - RNA, 18 nt, Human
gcggcccaguuccaggcc

SEQ ID NO: 553020 - RNA, 19 nt, Human
gcuggcucggcaugaccgc

SEQ ID NO: 553021 - RNA, 30 nt, Human
ggggagagggguagggauuaucuucaaagg

SEQ ID NO: 553022 - RNA, 22 nt, Human
gggggcugcggcccaguuccag

SEQ ID NO: 553023 - RNA, 24 nt, Human
gguggugggugaagcugggggcug

SEQ ID NO: 553024 - RNA, 19 nt, Human
guaaagaaaaauauaagaa

SEQ ID NO: 553025 - RNA, 23 nt, Human
guuccaggcccaggugcuggcuc

SEQ ID NO: 553026 - RNA, 19 nt, Human
guuccaggcccaggugcuu

SEQ ID NO: 553027 - RNA, 25 nt, Human
uaacagacccuuuaaauuuguuuua

SEQ ID NO: 553028 - RNA, 24 nt, Human
uaacuuuuauuucacucaaauuag

SEQ ID NO: 553029 - RNA, 22 nt, Human
uaagaauuaacagacccuuuaa

SEQ ID NO: 553030 - RNA, 24 nt, Human
uaauaacuuuuauuucacucaaau

SEQ ID NO: 553031 - RNA, 19 nt, Human
ucacucaaauuagagcagu

SEQ ID NO: 553032 - RNA, 19 nt, Human
uccacaaugauuaguaaag

SEQ ID NO: 553033 - RNA, 22 nt, Human
uccacaaugauuaguaaagaaa

SEQ ID NO: 553034 - RNA, 25 nt, Human
ugaaugaauacccuaauggcaaacc

SEQ ID NO: 553035 - RNA, 21 nt, Human
ugaucuagguugcuuuuccuu

SEQ ID NO: 553036 - RNA, 18 nt, Human
ugccucgcacuaauaacu

SEQ ID NO: 553037 - RNA, 22 nt, Human
ugcuggcucggcaugaccgcgc

SEQ ID NO: 553038 - RNA, 21 nt, Human
uggugggugaagcugggggcu

SEQ ID NO: 553039 - RNA, 19 nt, Human
uuguuuuaaauauuugaag

SEQ ID NO: 553040 - RNA, 18 nt, Human
uuuaaaaaguguuuaaag

SEQ ID NO: 553041 - RNA, 23 nt, Human
acaaagugcggcagggcuacccc

SEQ ID NO: 553042 - RNA, 18 nt, Human
accccgggccagccugcu

SEQ ID NO: 553043 - RNA, 21 nt, Human
agagaugcacagugaggggca

SEQ ID NO: 553044 - RNA, 20 nt, Human
agcccccaccaccuugagac

SEQ ID NO: 553045 - RNA, 24 nt, Human
aggcagggcuccucggaaacgcgg

SEQ ID NO: 553046 - RNA, 21 nt, Human
aggcagucaggcucaugaagc

SEQ ID NO: 553047 - RNA, 19 nt, Human
aggggcaggcacccagggc

SEQ ID NO: 553048 - RNA, 22 nt, Human
agugcagaguggcuccagaagg

SEQ ID NO: 553049 - RNA, 24 nt, Human
agugcagaguggcuccagaaggga

SEQ ID NO: 553050 - RNA, 24 nt, Human
augaagcagccaccggguuuggcu

SEQ ID NO: 553051 - RNA, 19 nt, Human
cacuguuugggggcaaagc

SEQ ID NO: 553052 - RNA, 24 nt, Human
cagcccccauagcccccaccaccu

SEQ ID NO: 553053 - RNA, 18 nt, Human
cagcgcgcgugccucccu

SEQ ID NO: 553054 - RNA, 18 nt, Human
caggacucaagaugggga

SEQ ID NO: 553055 - RNA, 24 nt, Human
caggaggggccucaggaacccguu

SEQ ID NO: 553056 - RNA, 18 nt, Human
caggcucaugaagcagcc

SEQ ID NO: 553057 - RNA, 19 nt, Human
ccaggggucccuuccugcu

SEQ ID NO: 553058 - RNA, 23 nt, Human
cccacaggagccuccggggcugg

SEQ ID NO: 553059 - RNA, 21 nt, Human
cccccauagcccccaccaccu

SEQ ID NO: 553060 - RNA, 19 nt, Human
cccccugcagcccccauag

SEQ ID NO: 553061 - RNA, 26 nt, Human
cccgcagugcagaguggcuccagaag

SEQ ID NO: 553062 - RNA, 21 nt, Human
cccgggccagccugcuccagg

SEQ ID NO: 553063 - RNA, 23 nt, Human
cccgugacaaagugcggcagggc

SEQ ID NO: 553064 - RNA, 20 nt, Human
ccucccucggcccgguccug

SEQ ID NO: 553065 - RNA, 23 nt, Human
ccucggagccccgauguguuggg

SEQ ID NO: 553066 - RNA, 19 nt, Human
ccugcugagagcaggcgag

SEQ ID NO: 553067 - RNA, 22 nt, Human
ccugcuggguugggaccgccgg

SEQ ID NO: 553068 - RNA, 22 nt, Human
cgaaaaggaggcggguacccug

SEQ ID NO: 553069 - RNA, 21 nt, Human
cgccccaaccugccgggcugc

SEQ ID NO: 553070 - RNA, 19 nt, Human
cucaagauggggauggaga

SEQ ID NO: 553071 - RNA, 18 nt, Human
cucggcccgguccuggca

SEQ ID NO: 553072 - RNA, 21 nt, Human
cugcagcccccauagccccca

SEQ ID NO: 553073 - RNA, 25 nt, Human
cugccgggcugcucccagagaugca

SEQ ID NO: 553074 - RNA, 20 nt, Human
cugcucccagagaugcacag

SEQ ID NO: 553075 - RNA, 24 nt, Human
cuguuugggggcaaagcggaagga

SEQ ID NO: 553076 - RNA, 23 nt, Human
cuuggucuggccucccucggccc

SEQ ID NO: 553077 - RNA, 23 nt, Human
gagcgcuccugcccggguguggg

SEQ ID NO: 553078 - RNA, 21 nt, Human
gaggggcaggcacccagggcc

SEQ ID NO: 553079 - RNA, 20 nt, Human
gcgcggggaaacccugccug

SEQ ID NO: 553080 - RNA, 22 nt, Human
gcuagaugggcugaccgggggg

SEQ ID NO: 553081 - RNA, 31 nt, Human
ggccaucacuuuauuaaggggucaucuagaa

SEQ ID NO: 553082 - RNA, 22 nt, Human
gggcgcgaucggugcuacgacc

SEQ ID NO: 553083 - RNA, 20 nt, Human
guggggugugagccucagcc

SEQ ID NO: 553084 - RNA, 24 nt, Human
uacuucaccaccccgggccagccu

SEQ ID NO: 553085 - RNA, 23 nt, Human
ucaggcucaugaagcagccaccg

SEQ ID NO: 553086 - RNA, 21 nt, Human
uccaggggucccuuccugcug

SEQ ID NO: 553087 - RNA, 19 nt, Human
ucccagagaugcacaguga

SEQ ID NO: 553088 - RNA, 19 nt, Human
ucccucggcccgguccugg

SEQ ID NO: 553089 - RNA, 18 nt, Human
uccgcccggcagcgcgcg

SEQ ID NO: 553090 - RNA, 18 nt, Human
ucggcccgguccuggcac

SEQ ID NO: 553091 - RNA, 23 nt, Human
ugacaaaccgcgggacugugauc

SEQ ID NO: 553092 - RNA, 19 nt, Human
ugacaaagugcggcagggc

SEQ ID NO: 553093 - RNA, 19 nt, Human
ugagagcaggcgagaggca

SEQ ID NO: 553094 - RNA, 18 nt, Human
ugcccggguguggggugu

SEQ ID NO: 553095 - RNA, 21 nt, Human
uggaaggaaucacacuggaaa

SEQ ID NO: 553096 - RNA, 19 nt, Human
uggccaggaggggccucag

SEQ ID NO: 553097 - RNA, 23 nt, Human
uggccaggaggggccucaggaac

SEQ ID NO: 553098 - RNA, 19 nt, Human
uggcgugaggaauggagga

SEQ ID NO: 553099 - RNA, 20 nt, Human
uggcucacgaucuugcccac

SEQ ID NO: 553100 - RNA, 19 nt, Human
uggggccagggagcgcucc

SEQ ID NO: 553101 - RNA, 23 nt, Human
uggggccagggagcgcuccugcc

SEQ ID NO: 553102 - RNA, 23 nt, Human
ugugcgggaccccugcugggggc

SEQ ID NO: 553103 - RNA, 20 nt, Human
uguuggggccagggagcgcu

SEQ ID NO: 553104 - RNA, 20 nt, Human
uugggugggggucaggggca

SEQ ID NO: 553105 - RNA, 22 nt, Human
aggcgaccgcagccagcggagc

SEQ ID NO: 553106 - RNA, 19 nt, Human
aggugccgcuccccuccug

SEQ ID NO: 553107 - RNA, 18 nt, Human
auaaaaauacugcguacc

SEQ ID NO: 553108 - RNA, 27 nt, Human
cauaaaauacugguauaaaaauacugc

SEQ ID NO: 553109 - RNA, 18 nt, Human
cccaggcgaccgcagcca

SEQ ID NO: 553110 - RNA, 20 nt, Human
cccuggcggcagcucccagg

SEQ ID NO: 553111 - RNA, 18 nt, Human
ccgcuccccuccuggccc

SEQ ID NO: 553112 - RNA, 20 nt, Human
ccgcuccccuccuggcccug

SEQ ID NO: 553113 - RNA, 21 nt, Human
ccugcuaauugacaucuucac

SEQ ID NO: 553114 - RNA, 23 nt, Human
uagaaaaauaagauucuugagcg

SEQ ID NO: 553115 - RNA, 24 nt, Human
ucacuacauaaaauacugguauaa

SEQ ID NO: 553116 - RNA, 19 nt, Human
uggcccuggcggcagcucc

SEQ ID NO: 553117 - RNA, 23 nt, Human
uucuugagcgauuccagcugcau

SEQ ID NO: 553118 - RNA, 24 nt, Human
aaaaaucccaaaaguauacaaaga

SEQ ID NO: 553119 - RNA, 21 nt, Human
aaaagagacaauacucaugca

SEQ ID NO: 553120 - RNA, 20 nt, Human
aaaauauguauuaccauagc

SEQ ID NO: 553121 - RNA, 18 nt, Human
aaauccagcaagcugugg

SEQ ID NO: 553122 - RNA, 21 nt, Human
aagaaaaagaucaugaaaaga

SEQ ID NO: 553123 - RNA, 23 nt, Human
aagaaacaguacuccaaaguuca

SEQ ID NO: 553124 - RNA, 18 nt, Human
aagcaaaaccaagaguau

SEQ ID NO: 553125 - RNA, 18 nt, Human
aagcugccaccuccagcc

SEQ ID NO: 553126 - RNA, 19 nt, Human
acaaagcaaaaccaagagu

SEQ ID NO: 553127 - RNA, 20 nt, Human
acaaauccagcaagcugugg

SEQ ID NO: 553128 - RNA, 18 nt, Human
acacaaauccagcaagcu

SEQ ID NO: 553129 - RNA, 22 nt, Human
acauauauuuaaugcccugaaa

SEQ ID NO: 553130 - RNA, 20 nt, Human
agaauuuuguugugcuuuuc

SEQ ID NO: 553131 - RNA, 22 nt, Human
agcgcucaguccugccggaggc

SEQ ID NO: 553132 - RNA, 23 nt, Human
aggaaagaaaaagaucaugaaaa

SEQ ID NO: 553133 - RNA, 21 nt, Human
aggaagaaacaguacuccaaa

SEQ ID NO: 553134 - RNA, 22 nt, Human
aggaagaaacaguacuccaaag

SEQ ID NO: 553135 - RNA, 25 nt, Human
agguacaucaggagagucggggccc

SEQ ID NO: 553136 - RNA, 21 nt, Human
agguuggggaggggacuuggc

SEQ ID NO: 553137 - RNA, 22 nt, Human
auagaucuucuauauuuuuaug

SEQ ID NO: 553138 - RNA, 21 nt, Human
aucaaaagagacaauacucau

SEQ ID NO: 553139 - RNA, 24 nt, Human
caacuagccaaaucucuuuuuaau

SEQ ID NO: 553140 - RNA, 21 nt, Human
caauauauuuuucacaaacca

SEQ ID NO: 553141 - RNA, 25 nt, Human
cacaaauccagcaagcugugguccu

SEQ ID NO: 553142 - RNA, 25 nt, Human
caccaaaaaucccaaaaguauacaa

SEQ ID NO: 553143 - RNA, 27 nt, Human
caccuccagccucacucuaaauagcuu

SEQ ID NO: 553144 - RNA, 26 nt, Human
caugcacacaccaagauggcugcaug

SEQ ID NO: 553145 - RNA, 24 nt, Human
cauuacacacacaacuagccaaau

SEQ ID NO: 553146 - RNA, 23 nt, Human
cccauagcuaacacaaauccagc

SEQ ID NO: 553147 - RNA, 22 nt, Human
cccgccuuccggccucccagcg

SEQ ID NO: 553148 - RNA, 19 nt, Human
ccuaaaaucccuauuauuc

SEQ ID NO: 553149 - RNA, 22 nt, Human
ccucccgcccgccucuccgccg

SEQ ID NO: 553150 - RNA, 22 nt, Human
ccugaaaacuucugcuuaaaaa

SEQ ID NO: 553151 - RNA, 19 nt, Human
ccugguucuccaguucugu

SEQ ID NO: 553152 - RNA, 20 nt, Human
ccuuccaaaccacuugguca

SEQ ID NO: 553153 - RNA, 20 nt, Human
cuaaaaucccuauuauucca

SEQ ID NO: 553154 - RNA, 25 nt, Human
cuaacacaaauccagcaagcugugg

SEQ ID NO: 553155 - RNA, 23 nt, Human
cuauuaugaaguuagauaaacac

SEQ ID NO: 553156 - RNA, 23 nt, Human
cuccagccucacucuaaauagcu

SEQ ID NO: 553157 - RNA, 23 nt, Human
cucccgcccgccucuccgccgug

SEQ ID NO: 553158 - RNA, 22 nt, Human
cuuacacugugaauggcaguuu

SEQ ID NO: 553159 - RNA, 18 nt, Human
cuucugcuuaaaaacuga

SEQ ID NO: 553160 - RNA, 20 nt, Human
gaaaacuucugcuuaaaaac

SEQ ID NO: 553161 - RNA, 23 nt, Human
gaaaacuucugcuuaaaaacuga

SEQ ID NO: 553162 - RNA, 23 nt, Human
gaacaucugaagguaacaaaaaa

SEQ ID NO: 553163 - RNA, 24 nt, Human
gagccgccgccuccagcucgcgcc

SEQ ID NO: 553164 - RNA, 20 nt, Human
gcaugccuccuuccaaacca

SEQ ID NO: 553165 - RNA, 24 nt, Human
gcccgccucuccgccgugcgcgcc

SEQ ID NO: 553166 - RNA, 19 nt, Human
gcccugaaaacuucugcuu

SEQ ID NO: 553167 - RNA, 20 nt, Human
gcgcucaguccugccggagg

SEQ ID NO: 553168 - RNA, 20 nt, Human
gcugccaccuccagccucac

SEQ ID NO: 553169 - RNA, 21 nt, Human
ggcaguuugaucacuaaauuu

SEQ ID NO: 553170 - RNA, 20 nt, Human
ggccucccagcgcucagucc

SEQ ID NO: 553171 - RNA, 19 nt, Human
gggaaggaaagaaaaagau

SEQ ID NO: 553172 - RNA, 22 nt, Human
guacuccaaaguucaucaauau

SEQ ID NO: 553173 - RNA, 22 nt, Human
uaaaauauguauuaccauagca

SEQ ID NO: 553174 - RNA, 21 nt, Human
uaaagcaugccuccuuccaaa

SEQ ID NO: 553175 - RNA, 23 nt, Human
uaaaguauccacccuaaaauccc

SEQ ID NO: 553176 - RNA, 24 nt, Human
uaacauuacacacacaacuagcca

SEQ ID NO: 553177 - RNA, 25 nt, Human
uaagaaauuauccgaauagcuucca

SEQ ID NO: 553178 - RNA, 23 nt, Human
uacacaacauauauuuaaugccc

SEQ ID NO: 553179 - RNA, 24 nt, Human
uacacaacauauauuuaaugcccu

SEQ ID NO: 553180 - RNA, 21 nt, Human
uacacugugaauggcaguuug

SEQ ID NO: 553181 - RNA, 19 nt, Human
uauaagcaccaaaaauccc

SEQ ID NO: 553182 - RNA, 22 nt, Human
uauaagcaccaaaaaucccaaa

SEQ ID NO: 553183 - RNA, 25 nt, Human
uauaagcaccaaaaaucccaaaagu

SEQ ID NO: 553184 - RNA, 21 nt, Human
uauguagaauuggguauaaag

SEQ ID NO: 553185 - RNA, 26 nt, Human
uauuaugaaguuagauaaacacagga

SEQ ID NO: 553186 - RNA, 24 nt, Human
ucaaaauacacaugcugaauguga

SEQ ID NO: 553187 - RNA, 20 nt, Human
ucacaaagcaaaaccaagag

SEQ ID NO: 553188 - RNA, 21 nt, Human
ucaguuugaaggaagaaacag

SEQ ID NO: 553189 - RNA, 21 nt, Human
ucccagcgcucaguccugccu

SEQ ID NO: 553190 - RNA, 18 nt, Human
ucccauagcuaacacaaa

SEQ ID NO: 553191 - RNA, 21 nt, Human
ucccuauuauuccaugauauu

SEQ ID NO: 553192 - RNA, 24 nt, Human
uccgaauagcuuccaacuugguuu

SEQ ID NO: 553193 - RNA, 20 nt, Human
uccucaguuucuugggaagg

SEQ ID NO: 553194 - RNA, 22 nt, Human
ucuucaauucucuccacauuuc

SEQ ID NO: 553195 - RNA, 18 nt, Human
ugaagcugccaccuccag

SEQ ID NO: 553196 - RNA, 18 nt, Human
ugcccugaaaacuucugc

SEQ ID NO: 553197 - RNA, 18 nt, Human
ugggaaggaaagaaaaag

SEQ ID NO: 553198 - RNA, 23 nt, Human
ugguuuuucaguuuauggcacuu

SEQ ID NO: 553199 - RNA, 22 nt, Human
uguaaaauaacuauucuuuuaa

SEQ ID NO: 553200 - RNA, 21 nt, Human
ugugaugauuauuuacaaugc

SEQ ID NO: 553201 - RNA, 18 nt, Human
uguugugcuuuucacaua

SEQ ID NO: 553202 - RNA, 19 nt, Human
uuaaaugucaaaauacaca

SEQ ID NO: 553203 - RNA, 22 nt, Human
uucacauauccgauguauguuu

SEQ ID NO: 553204 - RNA, 19 nt, Human
uucaguuugaaggaagaaa

SEQ ID NO: 553205 - RNA, 24 nt, Human
uucaguuugaaggaagaaacagua

SEQ ID NO: 553206 - RNA, 19 nt, Human
uuccucaguuucuugggaa

SEQ ID NO: 553207 - RNA, 18 nt, Human
uuggggaggggacuuggc

SEQ ID NO: 553208 - RNA, 24 nt, Human
uuuaaaauauguauuaccauagca

SEQ ID NO: 553209 - RNA, 22 nt, Human
uuuacagaauugagggaaguau

SEQ ID NO: 553210 - RNA, 23 nt, Human
uuuucacaaagcaaaaccaagag

SEQ ID NO: 553211 - RNA, 19 nt, Human
uuuucaguuuauggcacuu

SEQ ID NO: 553212 - RNA, 19 nt, Human
aaggacccucugaggcugg

SEQ ID NO: 553213 - RNA, 22 nt, Human
acgcagcacccccugcuccucc

SEQ ID NO: 553214 - RNA, 20 nt, Human
agacagcugguuccagaagg

SEQ ID NO: 553215 - RNA, 22 nt, Human
agcuucuucaggccccuggcug

SEQ ID NO: 553216 - RNA, 19 nt, Human
cacccccugcuccuccucc

SEQ ID NO: 553217 - RNA, 18 nt, Human
cacccugggccagcuucu

SEQ ID NO: 553218 - RNA, 22 nt, Human
cagcugaccaccacccugggcc

SEQ ID NO: 553219 - RNA, 25 nt, Human
caggaccagccgucagcaguccccu

SEQ ID NO: 553220 - RNA, 22 nt, Human
caggagcuucuucaggccccug

SEQ ID NO: 553221 - RNA, 26 nt, Human
cagucccaccucccaguugcuggagg

SEQ ID NO: 553222 - RNA, 24 nt, Human
ccaccacccugggccagcuucuga

SEQ ID NO: 553223 - RNA, 26 nt, Human
ccagcugaccaccacccugggccaau

SEQ ID NO: 553224 - RNA, 24 nt, Human
ccccauucucuccacagacagcug

SEQ ID NO: 553225 - RNA, 21 nt, Human
ccccugccgggcucugacucc

SEQ ID NO: 553226 - RNA, 24 nt, Human
ccccugcuccuccuccucagcccc

SEQ ID NO: 553227 - RNA, 18 nt, Human
ccccuggcugaggaagag

SEQ ID NO: 553228 - RNA, 21 nt, Human
cccugacccagcugaccacca

SEQ ID NO: 553229 - RNA, 24 nt, Human
ccuccuccucagccccugccgggc

SEQ ID NO: 553230 - RNA, 22 nt, Human
ccugcagcaccuuccacgcagc

SEQ ID NO: 553231 - RNA, 21 nt, Human
cgaaagcaccccauucucucc

SEQ ID NO: 553232 - RNA, 18 nt, Human
cuccuccuccucagcccc

SEQ ID NO: 553233 - RNA, 23 nt, Human
cugacccagcugaccaccacccu

SEQ ID NO: 553234 - RNA, 20 nt, Human
cugcuccuccuccucagccc

SEQ ID NO: 553235 - RNA, 21 nt, Human
cugcuccuccuccucagcccc

SEQ ID NO: 553236 - RNA, 21 nt, Human
cugggccagcuucugacaguc

SEQ ID NO: 553237 - RNA, 18 nt, Human
cuuccggguaggaugugc

SEQ ID NO: 553238 - RNA, 21 nt, Human
gaggagaggcgcgacacagcg

SEQ ID NO: 553239 - RNA, 20 nt, Human
gccagcuucugacaguccca

SEQ ID NO: 553240 - RNA, 20 nt, Human
ggagaaggcgagguggucca

SEQ ID NO: 553241 - RNA, 23 nt, Human
ggguggcuuggggucagcuucca

SEQ ID NO: 553242 - RNA, 21 nt, Human
gguccagcaggugccguaggu

SEQ ID NO: 553243 - RNA, 19 nt, Human
ggucuuccggguaggaugu

SEQ ID NO: 553244 - RNA, 18 nt, Human
gugaaggguggcuugggg

SEQ ID NO: 553245 - RNA, 20 nt, Human
gugaaggguggcuugggguc

SEQ ID NO: 553246 - RNA, 21 nt, Human
gugaaggguggcuugggguca

SEQ ID NO: 553247 - RNA, 20 nt, Human
ucaggccccuggcugaggaa

SEQ ID NO: 553248 - RNA, 22 nt, Human
uccacagacagcugguuccaga

SEQ ID NO: 553249 - RNA, 23 nt, Human
uccaggugaaggguggcuugggg

SEQ ID NO: 553250 - RNA, 20 nt, Human
uccuuccucaggaccagccg

SEQ ID NO: 553251 - RNA, 19 nt, Human
ucuucaggccccuggcuga

SEQ ID NO: 553252 - RNA, 21 nt, Human
ugacccagcugaccaccaccc

SEQ ID NO: 553253 - RNA, 18 nt, Human
ugaggcuggucuuccggg

SEQ ID NO: 553254 - RNA, 25 nt, Human
ugccgggcucugacuccuaagucag

SEQ ID NO: 553255 - RNA, 22 nt, Human
ugccguaggucccugacccagc

SEQ ID NO: 553256 - RNA, 24 nt, Human
uggcugaggaagagccacagccac

SEQ ID NO: 553257 - RNA, 22 nt, Human
ugggcaguuuguccuuccucag

SEQ ID NO: 553258 - RNA, 18 nt, Human
uggggucagcuuccaccc

SEQ ID NO: 553259 - RNA, 18 nt, Human
uuccagaaggacccucug

SEQ ID NO: 553260 - RNA, 20 nt, Human
uucuucaggccccuggcuga

SEQ ID NO: 553261 - RNA, 21 nt, Human
aaaacacaacuggacauuuuc

SEQ ID NO: 553262 - RNA, 21 nt, Human
aaacaccaaagacaauuuccc

SEQ ID NO: 553263 - RNA, 20 nt, Human
aaacacucauuuuguaauuc

SEQ ID NO: 553264 - RNA, 20 nt, Human
aaacuggacuaguuugcuuu

SEQ ID NO: 553265 - RNA, 22 nt, Human
aacaccaaagacaauuucccca

SEQ ID NO: 553266 - RNA, 22 nt, Human
aacuauucaauuaucugagcag

SEQ ID NO: 553267 - RNA, 18 nt, Human
aacuugaauccccagcgg

SEQ ID NO: 553268 - RNA, 22 nt, Human
aagcaggagacuaccuuacaac

SEQ ID NO: 553269 - RNA, 30 nt, Human
aagcaggagacuaccuuacaaccccaagag

SEQ ID NO: 553270 - RNA, 20 nt, Human
aaguacaaaaaauuaaacug

SEQ ID NO: 553271 - RNA, 21 nt, Human
aauuuguguucucauucccuc

SEQ ID NO: 553272 - RNA, 23 nt, Human
acaguuuuaaacgucacagaaaa

SEQ ID NO: 553273 - RNA, 22 nt, Human
agaacaccaccuagauugaucc

SEQ ID NO: 553274 - RNA, 18 nt, Human
agacaauuuccccaggaa

SEQ ID NO: 553275 - RNA, 19 nt, Human
agacuaccuuacaacccca

SEQ ID NO: 553276 - RNA, 20 nt, Human
agggaacugcaguauggauu

SEQ ID NO: 553277 - RNA, 21 nt, Human
aggucugguuccuucuucccu

SEQ ID NO: 553278 - RNA, 21 nt, Human
auaguacuuagaguuaaucau

SEQ ID NO: 553279 - RNA, 22 nt, Human
caaugucagagcuggagaaaau

SEQ ID NO: 553280 - RNA, 22 nt, Human
cacacacacauaauaaaacccc

SEQ ID NO: 553281 - RNA, 21 nt, Human
cacauaauaaaaccccacaau

SEQ ID NO: 553282 - RNA, 18 nt, Human
caccaaagacaauuuccc

SEQ ID NO: 553283 - RNA, 18 nt, Human
cacccucugggauacuug

SEQ ID NO: 553284 - RNA, 22 nt, Human
cagacccaaaaugagcuuaaag

SEQ ID NO: 553285 - RNA, 18 nt, Human
cagcagcacccucuggga

SEQ ID NO: 553286 - RNA, 22 nt, Human
caguauaauaccucgaauccau

SEQ ID NO: 553287 - RNA, 19 nt, Human
caguaugccagauuuuucu

SEQ ID NO: 553288 - RNA, 19 nt, Human
caguggauuauccaauuug

SEQ ID NO: 553289 - RNA, 22 nt, Human
caucaauuaguguaacccaggg

SEQ ID NO: 553290 - RNA, 27 nt, Human
caucuaggaaaagcacacacacauaau

SEQ ID NO: 553291 - RNA, 25 nt, Human
cauuuaauauccauaccccccucaa

SEQ ID NO: 553292 - RNA, 24 nt, Human
ccccaaacuuuagcagacccaaaa

SEQ ID NO: 553293 - RNA, 24 nt, Human
ccccccaaacuuuagcagacccaa

SEQ ID NO: 553294 - RNA, 25 nt, Human
ccugccucacuugucccuuucucuu

SEQ ID NO: 553295 - RNA, 19 nt, Human
cgccuaaauuaacugccaa

SEQ ID NO: 553296 - RNA, 19 nt, Human
cuaaaaacacucauuuugu

SEQ ID NO: 553297 - RNA, 23 nt, Human
cuaauacuuucuucaugcugcac

SEQ ID NO: 553298 - RNA, 18 nt, Human
cuagacgccuaaauuaac

SEQ ID NO: 553299 - RNA, 18 nt, Human
cuuaaaccauaaauagua

SEQ ID NO: 553300 - RNA, 22 nt, Human
gagauuucaaagcugaaaaugc

SEQ ID NO: 553301 - RNA, 22 nt, Human
gauuugaaaacuucagguaagg

SEQ ID NO: 553302 - RNA, 23 nt, Human
gcagacccaaaaugagcuuaaag

SEQ ID NO: 553303 - RNA, 20 nt, Human
gcccuuuauucccaaguagc

SEQ ID NO: 553304 - RNA, 19 nt, Human
ggaaucaaaaucucggugc

SEQ ID NO: 553305 - RNA, 19 nt, Human
ggaucugacugaaccuaca

SEQ ID NO: 553306 - RNA, 20 nt, Human
gggaaugcuagucucucuug

SEQ ID NO: 553307 - RNA, 18 nt, Human
gguucuauuaugaaggca

SEQ ID NO: 553308 - RNA, 18 nt, Human
gguuuuucuucuggacaa

SEQ ID NO: 553309 - RNA, 20 nt, Human
guuaaagugaugaauauguu

SEQ ID NO: 553310 - RNA, 24 nt, Human
guuacugcuccguuucccuccccc

SEQ ID NO: 553311 - RNA, 23 nt, Human
uaaaacacucaagucacugaagg

SEQ ID NO: 553312 - RNA, 23 nt, Human
uaaacaccaaagacaauuucccc

SEQ ID NO: 553313 - RNA, 18 nt, Human
uaaauacauguucaagca

SEQ ID NO: 553314 - RNA, 22 nt, Human
uaaauuuaagaccaagaacacc

SEQ ID NO: 553315 - RNA, 18 nt, Human
uaagugaaauauaauaaa

SEQ ID NO: 553316 - RNA, 24 nt, Human
uacaaccccaagagaaaaauaugu

SEQ ID NO: 553317 - RNA, 19 nt, Human
uaccccccucaaaaagccc

SEQ ID NO: 553318 - RNA, 23 nt, Human
uacuuugacacagaaaaucaggu

SEQ ID NO: 553319 - RNA, 24 nt, Human
uagauugaucccuuaaguaaucaa

SEQ ID NO: 553320 - RNA, 20 nt, Human
uagguguuuacaaaacacaa

SEQ ID NO: 553321 - RNA, 21 nt, Human
uauaaugcauuuuuuucuauc

SEQ ID NO: 553322 - RNA, 19 nt, Human
uaugauacugacaagugaa

SEQ ID NO: 553323 - RNA, 19 nt, Human
ucaaaaagcccuuuauucc

SEQ ID NO: 553324 - RNA, 20 nt, Human
ucaguaugccagauuuuucu

SEQ ID NO: 553325 - RNA, 22 nt, Human
ucaguugggcaauacucuuuau

SEQ ID NO: 553326 - RNA, 19 nt, Human
ucccuuucucuuguagcca

SEQ ID NO: 553327 - RNA, 19 nt, Human
ucuagacgccuaaauuaac

SEQ ID NO: 553328 - RNA, 23 nt, Human
ucucacucagcuugaauacuaaa

SEQ ID NO: 553329 - RNA, 19 nt, Human
ucucucuugcuuuagagag

SEQ ID NO: 553330 - RNA, 20 nt, Human
ucuggaaagcaggagacuac

SEQ ID NO: 553331 - RNA, 21 nt, Human
ugaaaacuuacucccccacca

SEQ ID NO: 553332 - RNA, 19 nt, Human
ugaagacaacuuucuuuug

SEQ ID NO: 553333 - RNA, 24 nt, Human
ugacauguuacuugucugucagau

SEQ ID NO: 553334 - RNA, 23 nt, Human
ugacuaaguauuuauugagacaa

SEQ ID NO: 553335 - RNA, 21 nt, Human
ugagcagaaauuaugaaugaa

SEQ ID NO: 553336 - RNA, 19 nt, Human
ugagggacauuucaacuug

SEQ ID NO: 553337 - RNA, 19 nt, Human
ugcuccguuucccuccccc

SEQ ID NO: 553338 - RNA, 22 nt, Human
uggaaaacaaugucagagcugg

SEQ ID NO: 553339 - RNA, 18 nt, Human
uggaaagcaggagacuac

SEQ ID NO: 553340 - RNA, 22 nt, Human
uggaaagcaggagacuaccuua

SEQ ID NO: 553341 - RNA, 19 nt, Human
uggcauucaaguauaauca

SEQ ID NO: 553342 - RNA, 18 nt, Human
ugucaagaguggccugug

SEQ ID NO: 553343 - RNA, 23 nt, Human
ugucacaguuuuaaacgucacag

SEQ ID NO: 553344 - RNA, 20 nt, Human
uguucccuuauuguuaaagu

SEQ ID NO: 553345 - RNA, 22 nt, Human
uguucucauucccuccucuaaa

SEQ ID NO: 553346 - RNA, 21 nt, Human
uguuuacaaaacacaacugga

SEQ ID NO: 553347 - RNA, 23 nt, Human
uguuuugucauuuuuuuccaaac

SEQ ID NO: 553348 - RNA, 20 nt, Human
uuacaguaaauaugcaacug

SEQ ID NO: 553349 - RNA, 19 nt, Human
uuacgagagggaacugcag

SEQ ID NO: 553350 - RNA, 22 nt, Human
uucucauucccuccucuaaaca

SEQ ID NO: 553351 - RNA, 20 nt, Human
uuucugggaagcuggauuug

SEQ ID NO: 553352 - RNA, 21 nt, Human
uuugcguaacauuucccccca

SEQ ID NO: 553353 - RNA, 18 nt, Human
uuuguguucucauucccu

SEQ ID NO: 553354 - RNA, 20 nt, Human
aacccucgccucucccagcc

SEQ ID NO: 553355 - RNA, 28 nt, Human
aaucaaaucaaaugugaaaagagcugaa

SEQ ID NO: 553356 - RNA, 22 nt, Human
caccuccuccggcgucuuagcc

SEQ ID NO: 553357 - RNA, 21 nt, Human
cccucgccucucccagccgcc

SEQ ID NO: 553358 - RNA, 18 nt, Human
ccgccgccaccuccuccg

SEQ ID NO: 553359 - RNA, 20 nt, Human
ccuccggcgucuuagcccgc

SEQ ID NO: 553360 - RNA, 19 nt, Human
cgaugcuaaaaucggccag

SEQ ID NO: 553361 - RNA, 25 nt, Human
cggccagaacccucgccucucccag

SEQ ID NO: 553362 - RNA, 24 nt, Human
cuauuuuuaauuucugcuucauaa

SEQ ID NO: 553363 - RNA, 22 nt, Human
cucccagccgccgccaccuccu

SEQ ID NO: 553364 - RNA, 21 nt, Human
cucucccagccgccgccaccu

SEQ ID NO: 553365 - RNA, 18 nt, Human
cuguuucugcacccucug

SEQ ID NO: 553366 - RNA, 22 nt, Human
gaaugcaggaccuuaagcugca

SEQ ID NO: 553367 - RNA, 21 nt, Human
gccucuuggcuauuuuuaauu

SEQ ID NO: 553368 - RNA, 20 nt, Human
gcuuuugacauauuaagucc

SEQ ID NO: 553369 - RNA, 21 nt, Human
gugaaaagagcugaaugcagg

SEQ ID NO: 553370 - RNA, 22 nt, Human
uaaccaaauaccucaauaaauu

SEQ ID NO: 553371 - RNA, 20 nt, Human
uagggaucucuucuccacuu

SEQ ID NO: 553372 - RNA, 20 nt, Human
uauagaacaaagaucuuuag

SEQ ID NO: 553373 - RNA, 23 nt, Human
uauuagggaucucuucuccacuu

SEQ ID NO: 553374 - RNA, 19 nt, Human
ucaaucaaaucaaauguga

SEQ ID NO: 553375 - RNA, 20 nt, Human
ucaaugaguucuuccacucu

SEQ ID NO: 553376 - RNA, 22 nt, Human
ucccagccgccgccaccuccuc

SEQ ID NO: 553377 - RNA, 25 nt, Human
ucggccagaacccucgccucuccca

SEQ ID NO: 553378 - RNA, 19 nt, Human
ucucccagccgccgccacc

SEQ ID NO: 553379 - RNA, 23 nt, Human
ucucccagccgccgccaccuccu

SEQ ID NO: 553380 - RNA, 23 nt, Human
ucugcacccucugggagaaaaag

SEQ ID NO: 553381 - RNA, 20 nt, Human
ugaaaagagcugaaugcagg

SEQ ID NO: 553382 - RNA, 24 nt, Human
ugaaaagagcugaaugcaggaccu

SEQ ID NO: 553383 - RNA, 23 nt, Human
ugaaugcaggaccuuaagcugca

SEQ ID NO: 553384 - RNA, 20 nt, Human
ugaguucuuccacucgagcu

SEQ ID NO: 553385 - RNA, 23 nt, Human
uguuucugcacccucugggagaa

SEQ ID NO: 553386 - RNA, 23 nt, Human
uugucauuuucauuaucuuugau

SEQ ID NO: 553387 - RNA, 19 nt, Human
acugccccaggccccaaga

SEQ ID NO: 553388 - RNA, 19 nt, Human
aggaauucuuucuucauuc

SEQ ID NO: 553389 - RNA, 24 nt, Human
aggagcaccagcagcagggccauc

SEQ ID NO: 553390 - RNA, 22 nt, Human
auaaucuauaucuauacuguga

SEQ ID NO: 553391 - RNA, 22 nt, Human
cagaacuucggaaauacucccc

SEQ ID NO: 553392 - RNA, 23 nt, Human
cagcagcagggccaucgccuccu

SEQ ID NO: 553393 - RNA, 19 nt, Human
ccaagaggcgaggagcacc

SEQ ID NO: 553394 - RNA, 25 nt, Human
ccacgcccgccggcccccucacugc

SEQ ID NO: 553395 - RNA, 25 nt, Human
ccagcagcagggccaucgccuccuc

SEQ ID NO: 553396 - RNA, 20 nt, Human
cccaagaggcgaggagcacc

SEQ ID NO: 553397 - RNA, 23 nt, Human
ccccaggccccaagaggcgagga

SEQ ID NO: 553398 - RNA, 21 nt, Human
ccgccggcccccucacugccc

SEQ ID NO: 553399 - RNA, 22 nt, Human
ccggcccccucacugccccagg

SEQ ID NO: 553400 - RNA, 20 nt, Human
cgcccgccggcccccucacu

SEQ ID NO: 553401 - RNA, 19 nt, Human
cgucacagaaucuugugga

SEQ ID NO: 553402 - RNA, 20 nt, Human
cuuauauccucccuucuccc

SEQ ID NO: 553403 - RNA, 24 nt, Human
gagaacuugacauuagauuugacg

SEQ ID NO: 553404 - RNA, 23 nt, Human
gcagcagggccaucgccuccucg

SEQ ID NO: 553405 - RNA, 19 nt, Human
gccccaggccccaagaggc

SEQ ID NO: 553406 - RNA, 20 nt, Human
gccggcccccucacugcccc

SEQ ID NO: 553407 - RNA, 19 nt, Human
gcggccacucggcccacgc

SEQ ID NO: 553408 - RNA, 19 nt, Human
ggcgaggagcaccagcagc

SEQ ID NO: 553409 - RNA, 20 nt, Human
uaagagggcauuagugcucu

SEQ ID NO: 553410 - RNA, 19 nt, Human
uacucagaacuucggaaau

SEQ ID NO: 553411 - RNA, 23 nt, Human
uauuugguucaucuuuccuauca

SEQ ID NO: 553412 - RNA, 19 nt, Human
ucuaccagcucauccauca

SEQ ID NO: 553413 - RNA, 25 nt, Human
ucuuauauccucccuucucccauuc

SEQ ID NO: 553414 - RNA, 18 nt, Human
ucuuguggaaaggaaguu

SEQ ID NO: 553415 - RNA, 22 nt, Human
ucuuucuucauucuugaaguuc

SEQ ID NO: 553416 - RNA, 20 nt, Human
ugccccaggccccaagaggc

SEQ ID NO: 553417 - RNA, 19 nt, Human
uuaagagaacuugacauua

SEQ ID NO: 553418 - RNA, 19 nt, Human
uuagugcucuuauauccuc

SEQ ID NO: 553419 - RNA, 18 nt, Human
uucaucuuuccuaucaaa

SEQ ID NO: 553420 - RNA, 20 nt, Human
uucaucuuuccuaucaaaug

SEQ ID NO: 553421 - RNA, 24 nt, Human
uuuccaguuugaccuugguucacc

SEQ ID NO: 553422 - RNA, 23 nt, Human
uuuguaauauuuauaaucuauau

SEQ ID NO: 553423 - RNA, 20 nt, Human
uuuuuucuuuuuagaaaucu

SEQ ID NO: 553424 - RNA, 25 nt, Human
uuuuuuuuuuuuuuuuuuucuuuuu

SEQ ID NO: 553425 - RNA, 27 nt, Human
aaagaacagcgcccccagcggaugcca

SEQ ID NO: 553426 - RNA, 20 nt, Human
acagcgccggcggcugcggc

SEQ ID NO: 553427 - RNA, 22 nt, Human
agaaaggaaacgucuuccagga

SEQ ID NO: 553428 - RNA, 19 nt, Human
agaagaaaggaaacgucuu

SEQ ID NO: 553429 - RNA, 19 nt, Human
agacaggagagcugcuggg

SEQ ID NO: 553430 - RNA, 22 nt, Human
cagaagaaaggaaacgucuucc

SEQ ID NO: 553431 - RNA, 23 nt, Human
cagcgcccccagcggaugccagg

SEQ ID NO: 553432 - RNA, 18 nt, Human
cagcggaugccaggacug

SEQ ID NO: 553433 - RNA, 20 nt, Human
cagcggaugccaggacugga

SEQ ID NO: 553434 - RNA, 23 nt, Human
ccaggcuucauuaauacagaaga

SEQ ID NO: 553435 - RNA, 21 nt, Human
cugcugggaagccauguuuuu

SEQ ID NO: 553436 - RNA, 18 nt, Human
cuguggagacaggagagc

SEQ ID NO: 553437 - RNA, 21 nt, Human
gaaagcagccacugcggaaac

SEQ ID NO: 553438 - RNA, 21 nt, Human
gcgcccccagcggaugccagg

SEQ ID NO: 553439 - RNA, 21 nt, Human
ucuccacagcgccggcggcug

SEQ ID NO: 553440 - RNA, 19 nt, Human
cugcagccugagugaagug

SEQ ID NO: 553441 - RNA, 19 nt, Human
cuuucagcaaauccuggag

SEQ ID NO: 553442 - RNA, 19 nt, Human
ggagccccaagagggcugc

SEQ ID NO: 553443 - RNA, 20 nt, Human
uuuuuuuuuuucaagagcga

SEQ ID NO: 553444 - RNA, 24 nt, Human
uuuuuuuuuuuuuuuuuuuucaag

SEQ ID NO: 553445 - RNA, 21 nt, Human
aaccugcuacccaguccucug

SEQ ID NO: 553446 - RNA, 22 nt, Human
aauagguggcccacaggucucc

SEQ ID NO: 553447 - RNA, 24 nt, Human
acaggacaacagaaggaaccugcu

SEQ ID NO: 553448 - RNA, 19 nt, Human
acaggucuccucagggccc

SEQ ID NO: 553449 - RNA, 24 nt, Human
acccucacaguagacacaccacac

SEQ ID NO: 553450 - RNA, 21 nt, Human
agacaauagguggcccacagg

SEQ ID NO: 553451 - RNA, 24 nt, Human
aggacaacagaaggaaccgguacc

SEQ ID NO: 553452 - RNA, 22 nt, Human
aggugggaaagaggaagguggg

SEQ ID NO: 553453 - RNA, 24 nt, Human
caacagaaggaaccugcuacccag

SEQ ID NO: 553454 - RNA, 21 nt, Human
cacacaggacaacagaaggaa

SEQ ID NO: 553455 - RNA, 22 nt, Human
cacaguagacacaccacacagg

SEQ ID NO: 553456 - RNA, 19 nt, Human
caccacacaggacaacaga

SEQ ID NO: 553457 - RNA, 21 nt, Human
cacuggccagggaugcaaagg

SEQ ID NO: 553458 - RNA, 18 nt, Human
cagcagcagggacucggg

SEQ ID NO: 553459 - RNA, 18 nt, Human
cagcagggacucggggag

SEQ ID NO: 553460 - RNA, 25 nt, Human
cugucccugggauucugguccuggg

SEQ ID NO: 553461 - RNA, 18 nt, Human
ucccugggauucuggucc

SEQ ID NO: 553462 - RNA, 24 nt, Human
ucugguccugggacaggugggaaa

SEQ ID NO: 553463 - RNA, 18 nt, Human
ugguccugggacaggugg

SEQ ID NO: 553464 - RNA, 23 nt, Human
ugguccugggacaggugggaaag

SEQ ID NO: 553465 - RNA, 18 nt, Human
aaacaaagugcagggcuc

SEQ ID NO: 553466 - RNA, 26 nt, Human
aaaucaaaacacagggaaccaaagug

SEQ ID NO: 553467 - RNA, 26 nt, Human
aaaucaaaacacagggaaccaaagug

SEQ ID NO: 553468 - RNA, 26 nt, Human
aaaucaaaacacagggaaccaaagug

SEQ ID NO: 553469 - RNA, 19 nt, Human
aaccccacaucaaccccuc

SEQ ID NO: 553470 - RNA, 24 nt, Human
aagucgggggccccaacacccacc

SEQ ID NO: 553471 - RNA, 18 nt, Human
acaacggggaaggaaagg

SEQ ID NO: 553472 - RNA, 19 nt, Human
accccugcuucccgagccg

SEQ ID NO: 553473 - RNA, 21 nt, Human
acccugccuccuuuaccucug

SEQ ID NO: 553474 - RNA, 22 nt, Human
acccugcuccccugccucucca

SEQ ID NO: 553475 - RNA, 24 nt, Human
acccugcuccccugccucuccagc

SEQ ID NO: 553476 - RNA, 20 nt, Human
acccugggcaaagcccucug

SEQ ID NO: 553477 - RNA, 20 nt, Human
acgcgggcuccgcggcugga

SEQ ID NO: 553478 - RNA, 19 nt, Human
agaaaggacaccaguagca

SEQ ID NO: 553479 - RNA, 22 nt, Human
agcagcacccggccgucccggc

SEQ ID NO: 553480 - RNA, 20 nt, Human
agcaggaagucuggagggga

SEQ ID NO: 553481 - RNA, 21 nt, Human
agcgcaggcccagggccugga

SEQ ID NO: 553482 - RNA, 21 nt, Human
agcgcaggcccagggccugga

SEQ ID NO: 553483 - RNA, 23 nt, Human
agcgcaggcccagggccuggagc

SEQ ID NO: 553484 - RNA, 23 nt, Human
agcgcaggcccagggccuggagc

SEQ ID NO: 553485 - RNA, 21 nt, Human
agcuggggcaggccucucugg

SEQ ID NO: 553486 - RNA, 23 nt, Human
aggaggcggcggcggcacagagg

SEQ ID NO: 553487 - RNA, 23 nt, Human
aggcagccuggcccugugggcag

SEQ ID NO: 553488 - RNA, 21 nt, Human
aggcccccagcgcaggcccag

SEQ ID NO: 553489 - RNA, 21 nt, Human
aggcccccagcgcaggcccag

SEQ ID NO: 553490 - RNA, 25 nt, Human
agggcucccccacccugccuccuuu

SEQ ID NO: 553491 - RNA, 23 nt, Human
aguggucgcgcccagucuggagc

SEQ ID NO: 553492 - RNA, 23 nt, Human
aguugaugaagccaggggaaaaa

SEQ ID NO: 553493 - RNA, 26 nt, Human
augaagccaggggaaaaaacaaagug

SEQ ID NO: 553494 - RNA, 19 nt, Human
augguggccgagagcuccu

SEQ ID NO: 553495 - RNA, 22 nt, Human
caaaacacagggaaccaaagug

SEQ ID NO: 553496 - RNA, 22 nt, Human
caaaacacagggaaccaaagug

SEQ ID NO: 553497 - RNA, 22 nt, Human
caaaacacagggaaccaaagug

SEQ ID NO: 553498 - RNA, 19 nt, Human
caaagcccucugcugcuuc

SEQ ID NO: 553499 - RNA, 23 nt, Human
caaccccucagcuacuauguccu

SEQ ID NO: 553500 - RNA, 19 nt, Human
cacaacggggaaggaaagg

SEQ ID NO: 553501 - RNA, 24 nt, Human
cacaaucagagcaugaggggugcc

SEQ ID NO: 553502 - RNA, 20 nt, Human
cacagcaccagagcugcugg

SEQ ID NO: 553503 - RNA, 18 nt, Human
cacaucaaccccucagcc

SEQ ID NO: 553504 - RNA, 23 nt, Human
caccacccugcagggggagggac

SEQ ID NO: 553505 - RNA, 21 nt, Human
caccaguagcaggaagggccc

SEQ ID NO: 553506 - RNA, 20 nt, Human
cacccugccuccuuuaccuc

SEQ ID NO: 553507 - RNA, 18 nt, Human
cacccugcuccccugccu

SEQ ID NO: 553508 - RNA, 25 nt, Human
caccggcgugcacucucccgaccac

SEQ ID NO: 553509 - RNA, 18 nt, Human
cagcgcaggcccagggcc

SEQ ID NO: 553510 - RNA, 18 nt, Human
cagcgcaggcccagggcc

SEQ ID NO: 553511 - RNA, 19 nt, Human
cagcgcccaccucgcaggg

SEQ ID NO: 553512 - RNA, 18 nt, Human
cagcucccgcugcccucc

SEQ ID NO: 553513 - RNA, 22 nt, Human
cagggaaccaaagugcaaauca

SEQ ID NO: 553514 - RNA, 22 nt, Human
cagggaaccaaagugcaaauca

SEQ ID NO: 553515 - RNA, 22 nt, Human
cagggaaccaaagugcaaauca

SEQ ID NO: 553516 - RNA, 21 nt, Human
cagggcucccccacccugccu

SEQ ID NO: 553517 - RNA, 19 nt, Human
cagggcuccgucuccccgg

SEQ ID NO: 553518 - RNA, 21 nt, Human
caggggaaaaaacaaagugca

SEQ ID NO: 553519 - RNA, 22 nt, Human
cauccugaaccccacaucaucc

SEQ ID NO: 553520 - RNA, 22 nt, Human
cauccugaaccccacaucaucc

SEQ ID NO: 553521 - RNA, 24 nt, Human
caugggggggccauccugaacccc

SEQ ID NO: 553522 - RNA, 24 nt, Human
caugggggggccauccugaacccc

SEQ ID NO: 553523 - RNA, 24 nt, Human
caugggggggccauccugaacccc

SEQ ID NO: 553524 - RNA, 21 nt, Human
cauuucaccgguggagaaacg

SEQ ID NO: 553525 - RNA, 20 nt, Human
ccaacacccaccccggccca

SEQ ID NO: 553526 - RNA, 20 nt, Human
ccacaucauccccucagccc

SEQ ID NO: 553527 - RNA, 19 nt, Human
ccaccccccaugggggggc

SEQ ID NO: 553528 - RNA, 19 nt, Human
ccaccccccaugggggggc

SEQ ID NO: 553529 - RNA, 19 nt, Human
ccaccccccaugggggggc

SEQ ID NO: 553530 - RNA, 21 nt, Human
ccagccagccauccuggcugc

SEQ ID NO: 553531 - RNA, 23 nt, Human
ccagcggcgugaccuuggacaag

SEQ ID NO: 553532 - RNA, 27 nt, Human
cccaccccggcccagggacgccaggag

SEQ ID NO: 553533 - RNA, 20 nt, Human
ccccaacacccaccccggcc

SEQ ID NO: 553534 - RNA, 22 nt, Human
ccccaacacccaccccggccca

SEQ ID NO: 553535 - RNA, 22 nt, Human
ccccacccugccuccuuuaccu

SEQ ID NO: 553536 - RNA, 22 nt, Human
ccccauccaccuguacuugcag

SEQ ID NO: 553537 - RNA, 18 nt, Human
ccccgggcccugcgcagg

SEQ ID NO: 553538 - RNA, 20 nt, Human
ccccgguauccugggagcuc

SEQ ID NO: 553539 - RNA, 20 nt, Human
ccccuacaugacuccccggg

SEQ ID NO: 553540 - RNA, 21 nt, Human
cccgaccaccucccucuccca

SEQ ID NO: 553541 - RNA, 20 nt, Human
cccgcaacaccagcaccacc

SEQ ID NO: 553542 - RNA, 24 nt, Human
cccgcagcccuccccgcaggcgcc

SEQ ID NO: 553543 - RNA, 20 nt, Human
cccgcaggcgccaccccuaa

SEQ ID NO: 553544 - RNA, 23 nt, Human
cccgcaggcgccaccccuacaug

SEQ ID NO: 553545 - RNA, 24 nt, Human
cccgcaggcgccaccccuacauga

SEQ ID NO: 553546 - RNA, 21 nt, Human
cccgggccugccgccugcccc

SEQ ID NO: 553547 - RNA, 22 nt, Human
cccucagggcccucgagcccag

SEQ ID NO: 553548 - RNA, 19 nt, Human
cccucugcugcuucagggc

SEQ ID NO: 553549 - RNA, 19 nt, Human
cccugcgcaggucgcuccc

SEQ ID NO: 553550 - RNA, 19 nt, Human
cccugcgcaggucgcuccc

SEQ ID NO: 553551 - RNA, 18 nt, Human
ccgcugcccucccgcagc

SEQ ID NO: 553552 - RNA, 20 nt, Human
ccguguccagcagggagagg

SEQ ID NO: 553553 - RNA, 20 nt, Human
ccucaggggcccagccagcc

SEQ ID NO: 553554 - RNA, 20 nt, Human
ccucccgcagcccuccccgc

SEQ ID NO: 553555 - RNA, 19 nt, Human
ccugccccuugcucaccug

SEQ ID NO: 553556 - RNA, 23 nt, Human
ccugccccuugcucaccuguggc

SEQ ID NO: 553557 - RNA, 18 nt, Human
ccuggagcuucugccuca

SEQ ID NO: 553558 - RNA, 18 nt, Human
ccuucggggaaggcgggg

SEQ ID NO: 553559 - RNA, 25 nt, Human
ccuugccccaggcugccccauccac

SEQ ID NO: 553560 - RNA, 22 nt, Human
cgaccaccucccucucccacag

SEQ ID NO: 553561 - RNA, 19 nt, Human
cgcaacaccagcaccaccc

SEQ ID NO: 553562 - RNA, 21 nt, Human
cggagucggcgaagucggggg

SEQ ID NO: 553563 - RNA, 24 nt, Human
cggugaugagaggcuggggaaaga

SEQ ID NO: 553564 - RNA, 18 nt, Human
cgucccggcagaaaugcc

SEQ ID NO: 553565 - RNA, 22 nt, Human
cguggccgcugccgcuaacacc

SEQ ID NO: 553566 - RNA, 19 nt, Human
cuccacggccguguccagc

SEQ ID NO: 553567 - RNA, 18 nt, Human
cucccccacccugccucc

SEQ ID NO: 553568 - RNA, 21 nt, Human
cucccgcagcccuccccgcag

SEQ ID NO: 553569 - RNA, 24 nt, Human
cuccuuuaccucugggcagggucu

SEQ ID NO: 553570 - RNA, 19 nt, Human
cugcccucccgcagcccuc

SEQ ID NO: 553571 - RNA, 25 nt, Human
gaaaucaaaacacagggaaccaaag

SEQ ID NO: 553572 - RNA, 25 nt, Human
gaaaucaaaacacagggaaccaaag

SEQ ID NO: 553573 - RNA, 25 nt, Human
gaaaucaaaacacagggaaccaaag

SEQ ID NO: 553574 - RNA, 21 nt, Human
gacuggggcucugggcugcag

SEQ ID NO: 553575 - RNA, 19 nt, Human
gagcuggggcaggccucuc

SEQ ID NO: 553576 - RNA, 20 nt, Human
gcaaaucauccaccccccau

SEQ ID NO: 553577 - RNA, 20 nt, Human
gcaaaucauccaccccccau

SEQ ID NO: 553578 - RNA, 21 nt, Human
gcaacaccagcaccacccugc

SEQ ID NO: 553579 - RNA, 21 nt, Human
gccagggcucccccacccugc

SEQ ID NO: 553580 - RNA, 18 nt, Human
gcccaggcggcaccggcg

SEQ ID NO: 553581 - RNA, 22 nt, Human
gcgcaaccccucagcuacuaug

SEQ ID NO: 553582 - RNA, 20 nt, Human
ggacuggggcucugggcugc

SEQ ID NO: 553583 - RNA, 21 nt, Human
ggacuggggcucugggcugca

SEQ ID NO: 553584 - RNA, 18 nt, Human
ggagaggagagggcggca

SEQ ID NO: 553585 - RNA, 18 nt, Human
ggcaggaagggguccugg

SEQ ID NO: 553586 - RNA, 18 nt, Human
ggccagggcucccccacc

SEQ ID NO: 553587 - RNA, 23 nt, Human
ggcccaguuuuaugguggccgag

SEQ ID NO: 553588 - RNA, 21 nt, Human
ggccccaacacccaccccggc

SEQ ID NO: 553589 - RNA, 22 nt, Human
ggccguguccagcagggagagg

SEQ ID NO: 553590 - RNA, 18 nt, Human
gggacuggggcucugggc

SEQ ID NO: 553591 - RNA, 20 nt, Human
gggcaggccucucugggacu

SEQ ID NO: 553592 - RNA, 21 nt, Human
gggcagggucucgaguagugg

SEQ ID NO: 553593 - RNA, 18 nt, Human
gggccuggagcuucugcc

SEQ ID NO: 553594 - RNA, 22 nt, Human
gggccuggagcuucugccucag

SEQ ID NO: 553595 - RNA, 18 nt, Human
gggcucccccacccugcc

SEQ ID NO: 553596 - RNA, 18 nt, Human
ggggacuggggcucuggg

SEQ ID NO: 553597 - RNA, 18 nt, Human
ggguccuggguccucacg

SEQ ID NO: 553598 - RNA, 21 nt, Human
gguagcuguggggagaggaga

SEQ ID NO: 553599 - RNA, 21 nt, Human
ggucccucuggcuuuuccacu

SEQ ID NO: 553600 - RNA, 23 nt, Human
ggucucggggcccgggggccggg

SEQ ID NO: 553601 - RNA, 23 nt, Human
gguuaguggucgcgcccagucug

SEQ ID NO: 553602 - RNA, 22 nt, Human
gguuccccccgcggccuccuca

SEQ ID NO: 553603 - RNA, 20 nt, Human
guagcuguggggagaggaga

SEQ ID NO: 553604 - RNA, 24 nt, Human
gucgcgcccagucuggagcccagg

SEQ ID NO: 553605 - RNA, 20 nt, Human
gucuccccgggccugccgcc

SEQ ID NO: 553606 - RNA, 22 nt, Human
gugcaaaucauccaccccccau

SEQ ID NO: 553607 - RNA, 22 nt, Human
gugccaccacccugggcaaagc

SEQ ID NO: 553608 - RNA, 21 nt, Human
guggagcccgagugcaccgcu

SEQ ID NO: 553609 - RNA, 21 nt, Human
uaaccggguuaguggucgcgc

SEQ ID NO: 553610 - RNA, 19 nt, Human
uagccagggcuccgucucc

SEQ ID NO: 553611 - RNA, 21 nt, Human
uagccuggaggcacagucagg

SEQ ID NO: 553612 - RNA, 21 nt, Human
uagcuguggggagaggagagg

SEQ ID NO: 553613 - RNA, 24 nt, Human
uagugccaccacccugggcaaagc

SEQ ID NO: 553614 - RNA, 26 nt, Human
ucaaaacacagggaaccaaagugcaa

SEQ ID NO: 553615 - RNA, 26 nt, Human
ucaaaacacagggaaccaaagugcaa

SEQ ID NO: 553616 - RNA, 26 nt, Human
ucaaaacacagggaaccaaagugcaa

SEQ ID NO: 553617 - RNA, 22 nt, Human
ucaaccccucagcccccuucag

SEQ ID NO: 553618 - RNA, 20 nt, Human
ucagggcccucgagcccagc

SEQ ID NO: 553619 - RNA, 22 nt, Human
ucauccccucagcccccuucag

SEQ ID NO: 553620 - RNA, 21 nt, Human
uccaccuguacuugcagcggg

SEQ ID NO: 553621 - RNA, 18 nt, Human
uccacggccguguccagc

SEQ ID NO: 553622 - RNA, 20 nt, Human
ucccccagcagcuggcgcaa

SEQ ID NO: 553623 - RNA, 19 nt, Human
uccccccgcggccuccuca

SEQ ID NO: 553624 - RNA, 22 nt, Human
uccccccgcggccuccucaucg

SEQ ID NO: 553625 - RNA, 25 nt, Human
uccccucagcccccuucaggccccc

SEQ ID NO: 553626 - RNA, 19 nt, Human
uccccugccucuccagccc

SEQ ID NO: 553627 - RNA, 18 nt, Human
ucccgcaacaccagcacc

SEQ ID NO: 553628 - RNA, 22 nt, Human
ucccgcaacaccagcaccaccc

SEQ ID NO: 553629 - RNA, 21 nt, Human
uccugaaccccacaucaaccc

SEQ ID NO: 553630 - RNA, 22 nt, Human
uccugaaccccacaucaacccc

SEQ ID NO: 553631 - RNA, 22 nt, Human
ucgagcccagcagcacccggcc

SEQ ID NO: 553632 - RNA, 18 nt, Human
ucucccacaggaggcggc

SEQ ID NO: 553633 - RNA, 19 nt, Human
ucuccccgggccugccgcc

SEQ ID NO: 553634 - RNA, 24 nt, Human
ucucccgaccaccucccucuccca

SEQ ID NO: 553635 - RNA, 22 nt, Human
ucucggggcccgggggccgggu

SEQ ID NO: 553636 - RNA, 25 nt, Human
ucugaagggcaggcaccgcaguugg

SEQ ID NO: 553637 - RNA, 21 nt, Human
ucuugagcuggggcaggccuc

SEQ ID NO: 553638 - RNA, 23 nt, Human
ugaaaugaaaacgcagcgccccc

SEQ ID NO: 553639 - RNA, 21 nt, Human
ugaagccaggggaaaaaacaa

SEQ ID NO: 553640 - RNA, 19 nt, Human
ugacugaggagaaaggaca

SEQ ID NO: 553641 - RNA, 25 nt, Human
ugagaaaucaaaacacagggaacca

SEQ ID NO: 553642 - RNA, 25 nt, Human
ugagaaaucaaaacacagggaacca

SEQ ID NO: 553643 - RNA, 25 nt, Human
ugagaaaucaaaacacagggaacca

SEQ ID NO: 553644 - RNA, 23 nt, Human
ugagauucacaacggggaaggaa

SEQ ID NO: 553645 - RNA, 23 nt, Human
ugagauucacaacggggaaggaa

SEQ ID NO: 553646 - RNA, 19 nt, Human
ugagcuggggcaggccucu

SEQ ID NO: 553647 - RNA, 19 nt, Human
ugaggagaaaggacaccag

SEQ ID NO: 553648 - RNA, 20 nt, Human
ugaggggugccuguggggag

SEQ ID NO: 553649 - RNA, 21 nt, Human
ugccaccacccugggcaaagc

SEQ ID NO: 553650 - RNA, 22 nt, Human
ugccccaggcugccccauccac

SEQ ID NO: 553651 - RNA, 22 nt, Human
ugccccauccaccuguacuugc

SEQ ID NO: 553652 - RNA, 25 nt, Human
ugccgcuaacaccagcucccgcugc

SEQ ID NO: 553653 - RNA, 21 nt, Human
ugccucagguagcucuugagc

SEQ ID NO: 553654 - RNA, 23 nt, Human
ugccucagguagcucuugagcug

SEQ ID NO: 553655 - RNA, 19 nt, Human
uggcaggaagggguccugg

SEQ ID NO: 553656 - RNA, 19 nt, Human
uggcucagggcauggcggg

SEQ ID NO: 553657 - RNA, 20 nt, Human
uggcuucgucucucuaaguc

SEQ ID NO: 553658 - RNA, 18 nt, Human
uggggaggcggggacugg

SEQ ID NO: 553659 - RNA, 19 nt, Human
uggucccaggcuggccccu

SEQ ID NO: 553660 - RNA, 20 nt, Human
ugugacugaggagaaaggac

SEQ ID NO: 553661 - RNA, 19 nt, Human
uguggggagaggagagggc

SEQ ID NO: 553662 - RNA, 22 nt, Human
uucacaacggggaaggaaagga

SEQ ID NO: 553663 - RNA, 23 nt, Human
uucauggucccucuggcuuuucc

SEQ ID NO: 553664 - RNA, 18 nt, Human
uuccucgaaggguagcug

SEQ ID NO: 553665 - RNA, 19 nt, Human
uuuuuuuugcuccccgucc

SEQ ID NO: 553666 - RNA, 19 nt, Human
uuuuuuuuuuuuuuuugcu

SEQ ID NO: 553667 - RNA, 19 nt, Human
uuuuuuuuuuuuuuuugcu

SEQ ID NO: 553668 - RNA, 18 nt, Human
uuuuuuuuuuuuuuuuug

SEQ ID NO: 553669 - RNA, 18 nt, Human
uuuuuuuuuuuuuuuuug

SEQ ID NO: 553670 - RNA, 20 nt, Human
uuuuuuuuuuuuuuuuugcu

SEQ ID NO: 553671 - RNA, 20 nt, Human
uuuuuuuuuuuuuuuuugcu

SEQ ID NO: 553672 - RNA, 19 nt, Human
aagaaagaaggggaagcag

SEQ ID NO: 553673 - RNA, 20 nt, Human
aagaaggggaagcagggagg

SEQ ID NO: 553674 - RNA, 22 nt, Human
aagcaaacgagggaggaaaaca

SEQ ID NO: 553675 - RNA, 22 nt, Human
aagcagggagggcuccaauacg

SEQ ID NO: 553676 - RNA, 22 nt, Human
aagccacaccccugcccacaga

SEQ ID NO: 553677 - RNA, 24 nt, Human
aaugauccugacgcuccugagggc

SEQ ID NO: 553678 - RNA, 18 nt, Human
acaaagccacaccccugc

SEQ ID NO: 553679 - RNA, 23 nt, Human
acaaagccacaccccugcccaca

SEQ ID NO: 553680 - RNA, 24 nt, Human
auggcuaaggaugcacagggugcc

SEQ ID NO: 553681 - RNA, 19 nt, Human
cagcagccaggaccuccca

SEQ ID NO: 553682 - RNA, 24 nt, Human
cagcagccaggaccucccagugcc

SEQ ID NO: 553683 - RNA, 18 nt, Human
cagcccacgcaguccucc

SEQ ID NO: 553684 - RNA, 19 nt, Human
caggaacagaggagucaca

SEQ ID NO: 553685 - RNA, 23 nt, Human
cagggugccaggaacagaggagu

SEQ ID NO: 553686 - RNA, 19 nt, Human
cagguaggaggccuaacca

SEQ ID NO: 553687 - RNA, 22 nt, Human
ccagcuguucucuuguaagcua

SEQ ID NO: 553688 - RNA, 24 nt, Human
ccagugcagugaccuggccucccc

SEQ ID NO: 553689 - RNA, 24 nt, Human
ccucccagugcagugaccuggccu

SEQ ID NO: 553690 - RNA, 23 nt, Human
cuguggggcccagaugccgccau

SEQ ID NO: 553691 - RNA, 20 nt, Human
gaaagaaggggaagcaggga

SEQ ID NO: 553692 - RNA, 20 nt, Human
gagggaggaaaacaaagcca

SEQ ID NO: 553693 - RNA, 23 nt, Human
gccaggaccucccagugcaguga

SEQ ID NO: 553694 - RNA, 20 nt, Human
gcccacgcaguccuccucca

SEQ ID NO: 553695 - RNA, 18 nt, Human
ggaaagaaagaaggggaa

SEQ ID NO: 553696 - RNA, 21 nt, Human
ggcccagaugccgccaugcug

SEQ ID NO: 553697 - RNA, 21 nt, Human
gggugccaggaacagaggagu

SEQ ID NO: 553698 - RNA, 22 nt, Human
gguguuacuguggggcccagau

SEQ ID NO: 553699 - RNA, 20 nt, Human
ucgcagcagccaggaccucc

SEQ ID NO: 553700 - RNA, 25 nt, Human
ucucuuguaagcuauggcuaaggau

SEQ ID NO: 553701 - RNA, 24 nt, Human
ugaaaaugauccugacgcuccuga

SEQ ID NO: 553702 - RNA, 21 nt, Human
ugaccuggccuccccagguag

SEQ ID NO: 553703 - RNA, 20 nt, Human
ugccaggaacagaggaguca

SEQ ID NO: 553704 - RNA, 26 nt, Human
uggaagcaaacgagggaggaaaacaa

SEQ ID NO: 553705 - RNA, 25 nt, Human
uggggaaagaggaaagaaagaaggg

SEQ ID NO: 553706 - RNA, 21 nt, Human
uggggcccagaugccgccaug

SEQ ID NO: 553707 - RNA, 20 nt, Human
uuacuguggggcccagaugc

SEQ ID NO: 553708 - RNA, 25 nt, Human
uuuuuuuuugcugcuauggcugaac

SEQ ID NO: 553709 - RNA, 20 nt, Human
uuuuuuuuuuuuuuuugcug

SEQ ID NO: 553710 - RNA, 18 nt, Human
uuuuuuuuuuuuuuuuug

SEQ ID NO: 553711 - RNA, 20 nt, Human
uuuuuuuuuuuuuuuuugcu

SEQ ID NO: 553712 - RNA, 23 nt, Human
aaagaacaucccccacuucccug

SEQ ID NO: 553713 - RNA, 21 nt, Human
aagaugcuuccgcuuaaaccg

SEQ ID NO: 553714 - RNA, 22 nt, Human
acccagagucucagggagcaga

SEQ ID NO: 553715 - RNA, 24 nt, Human
accccuacucccucuuuuuguucu

SEQ ID NO: 553716 - RNA, 21 nt, Human
acucaggcacuugacaggucc

SEQ ID NO: 553717 - RNA, 18 nt, Human
acugcggagaacgugcgc

SEQ ID NO: 553718 - RNA, 20 nt, Human
agugacuccgagccaaaugc

SEQ ID NO: 553719 - RNA, 24 nt, Human
auccagaggggaggcaaguggagg

SEQ ID NO: 553720 - RNA, 23 nt, Human
aucucuguuuguccaucuuugac

SEQ ID NO: 553721 - RNA, 23 nt, Human
caaaagaacaucccccacuuccc

SEQ ID NO: 553722 - RNA, 23 nt, Human
caacacaagaacccgggucuccu

SEQ ID NO: 553723 - RNA, 22 nt, Human
cacagccaagugacuccgagcc

SEQ ID NO: 553724 - RNA, 23 nt, Human
cagcaagugggcacucguccucu

SEQ ID NO: 553725 - RNA, 21 nt, Human
cagggagcagaagccccccuc

SEQ ID NO: 553726 - RNA, 25 nt, Human
caugacucaggcacuugacaggucc

SEQ ID NO: 553727 - RNA, 20 nt, Human
ccaagugacuccgagccaaa

SEQ ID NO: 553728 - RNA, 21 nt, Human
ccccccucgcuggcuuucuuc

SEQ ID NO: 553729 - RNA, 19 nt, Human
cccuacucccucuuuuugu

SEQ ID NO: 553730 - RNA, 18 nt, Human
cuggcaucuccuguggag

SEQ ID NO: 553731 - RNA, 23 nt, Human
cuggcuuucuucacgcggggucc

SEQ ID NO: 553732 - RNA, 22 nt, Human
gacuccgagccaaaugcuggca

SEQ ID NO: 553733 - RNA, 21 nt, Human
gagauggcccaggggcccugc

SEQ ID NO: 553734 - RNA, 20 nt, Human
uagggaguggagaaauggca

SEQ ID NO: 553735 - RNA, 24 nt, Human
ucccugaccagauacauccagagg

SEQ ID NO: 553736 - RNA, 25 nt, Human
ucuccuguggagauggcccaggggc

SEQ ID NO: 553737 - RNA, 18 nt, Human
ucucgguuuaggauagag

SEQ ID NO: 553738 - RNA, 20 nt, Human
ugaacccagagucucaggga

SEQ ID NO: 553739 - RNA, 26 nt, Human
uggagaaauggcagguccagcuuggg

SEQ ID NO: 553740 - RNA, 21 nt, Human
uggcccaggggcccugcgcaa

SEQ ID NO: 553741 - RNA, 24 nt, Human
uguagggaguggagaaauggcagg

SEQ ID NO: 553742 - RNA, 22 nt, Human
uguagggaguggagaaauggcc

SEQ ID NO: 553743 - RNA, 23 nt, Human
uuucagcgugcucugugaagacc

SEQ ID NO: 553744 - RNA, 25 nt, Human
uuuuaucaaaagaacaucccccacu

SEQ ID NO: 553745 - RNA, 18 nt, Human
uuuuuuuuuuuuuuuuug

SEQ ID NO: 553746 - RNA, 23 nt, Human
uuuuuuuuuuuuuuuuugccagu

SEQ ID NO: 553747 - RNA, 21 nt, Human
acacacaucucucgcaauccu

SEQ ID NO: 553748 - RNA, 25 nt, Human
caacaguaucaacacacaucucucg

SEQ ID NO: 553749 - RNA, 21 nt, Human
cccugguuugugcggcuccgg

SEQ ID NO: 553750 - RNA, 19 nt, Human
uagaaaaacacacgugcaa

SEQ ID NO: 553751 - RNA, 20 nt, Human
uuuuuuuuuuuuuugacgga

SEQ ID NO: 553752 - RNA, 18 nt, Human
uuuuuuuuuuuuuuuuug

SEQ ID NO: 553753 - RNA, 22 nt, Human
uuuuuuuuuuuuuuuuugacgg

SEQ ID NO: 553754 - RNA, 26 nt, Human
aaaaaaaaaaaaaacaacaacaaaaa

SEQ ID NO: 553755 - RNA, 22 nt, Human
aaaaacccccaaggaacagccc

SEQ ID NO: 553756 - RNA, 18 nt, Human
aaaaacuggguaaaggac

SEQ ID NO: 553757 - RNA, 24 nt, Human
aaaaauacagacaugauuucacag

SEQ ID NO: 553758 - RNA, 18 nt, Human
aaaguacugcugcgcccu

SEQ ID NO: 553759 - RNA, 19 nt, Human
aaaugaaagcuuuacauga

SEQ ID NO: 553760 - RNA, 19 nt, Human
aacacggugaaacccuguc

SEQ ID NO: 553761 - RNA, 20 nt, Human
aacacggugaaacccugucu

SEQ ID NO: 553762 - RNA, 21 nt, Human
aacacggugaaacccugucuc

SEQ ID NO: 553763 - RNA, 24 nt, Human
aacugaccuccucuaagaagcccg

SEQ ID NO: 553764 - RNA, 25 nt, Human
aagaaacuuggcucuaaaagcaaac

SEQ ID NO: 553765 - RNA, 19 nt, Human
aagccaagcaaagaauaaa

SEQ ID NO: 553766 - RNA, 20 nt, Human
aagccuccaguggaagcucu

SEQ ID NO: 553767 - RNA, 23 nt, Human
aagggugguggcggcgggauccc

SEQ ID NO: 553768 - RNA, 23 nt, Human
aaucgccuuuuacagauucaagc

SEQ ID NO: 553769 - RNA, 19 nt, Human
acaagcgcaugaucuacag

SEQ ID NO: 553770 - RNA, 18 nt, Human
acacuuucacaaaaggca

SEQ ID NO: 553771 - RNA, 21 nt, Human
acagccccaucccuugggacc

SEQ ID NO: 553772 - RNA, 22 nt, Human
acaguggcgaucggccucacac

SEQ ID NO: 553773 - RNA, 21 nt, Human
acauaggacaacugaccuccu

SEQ ID NO: 553774 - RNA, 22 nt, Human
accaaaaggcaucgagaccuuu

SEQ ID NO: 553775 - RNA, 24 nt, Human
accaacacggugaaacccugucuc

SEQ ID NO: 553776 - RNA, 24 nt, Human
acccaggagguggagguuguagug

SEQ ID NO: 553777 - RNA, 22 nt, Human
acccagguucaacauuuaagag

SEQ ID NO: 553778 - RNA, 19 nt, Human
acccgaggcucgcaggcac

SEQ ID NO: 553779 - RNA, 24 nt, Human
acccugucucuacuaaaaauacaa

SEQ ID NO: 553780 - RNA, 24 nt, Human
accugaggucaggaguuugagacc

SEQ ID NO: 553781 - RNA, 26 nt, Human
accugccuugucuccucaggggaccc

SEQ ID NO: 553782 - RNA, 24 nt, Human
acuaaaaauacaaacauuagccgg

SEQ ID NO: 553783 - RNA, 24 nt, Human
acugcacuccagucugaacaauag

SEQ ID NO: 553784 - RNA, 26 nt, Human
acugcacuccagucugaacaauagag

SEQ ID NO: 553785 - RNA, 19 nt, Human
acuggcccggaagcaacac

SEQ ID NO: 553786 - RNA, 19 nt, Human
acuuguauucuucuuccuc

SEQ ID NO: 553787 - RNA, 19 nt, Human
agaaccguuucacauccuc

SEQ ID NO: 553788 - RNA, 22 nt, Human
agaaucgcuggaacccaggagg

SEQ ID NO: 553789 - RNA, 22 nt, Human
agacaaacaggcaacucuagga

SEQ ID NO: 553790 - RNA, 25 nt, Human
agagcacucgcuauaacauucuuuu

SEQ ID NO: 553791 - RNA, 19 nt, Human
agcaaacucaacgaauucc

SEQ ID NO: 553792 - RNA, 19 nt, Human
agcaacacccagguucaac

SEQ ID NO: 553793 - RNA, 24 nt, Human
agcacuuugggaggcugaggcggg

SEQ ID NO: 553794 - RNA, 20 nt, Human
agcccggaguccgcgcggcc

SEQ ID NO: 553795 - RNA, 23 nt, Human
agccgggcgugguggugcacgcc

SEQ ID NO: 553796 - RNA, 19 nt, Human
aggaaggcucacccgaggc

SEQ ID NO: 553797 - RNA, 22 nt, Human
aggagaaucgcuggaacccagg

SEQ ID NO: 553798 - RNA, 22 nt, Human
aggaggaaguguuuucuacagc

SEQ ID NO: 553799 - RNA, 20 nt, Human
aggaguuugagaccagccug

SEQ ID NO: 553800 - RNA, 26 nt, Human
aggcagagccaauaagaaacauggug

SEQ ID NO: 553801 - RNA, 23 nt, Human
aggcaggagaaucgcuggaaccc

SEQ ID NO: 553802 - RNA, 22 nt, Human
aggcgggcggaucaccugaggu

SEQ ID NO: 553803 - RNA, 26 nt, Human
aggcgggcggaucaccugaggucagg

SEQ ID NO: 553804 - RNA, 20 nt, Human
aggcugaggcaggagaaucg

SEQ ID NO: 553805 - RNA, 23 nt, Human
aggcugaggcaggagaaucgcug

SEQ ID NO: 553806 - RNA, 21 nt, Human
aggcugaggcgggcggaucac

SEQ ID NO: 553807 - RNA, 24 nt, Human
aggcugaggcgggcggaucaccug

SEQ ID NO: 553808 - RNA, 18 nt, Human
agggauggggcugcggag

SEQ ID NO: 553809 - RNA, 19 nt, Human
agggauggggcugcggagg

SEQ ID NO: 553810 - RNA, 21 nt, Human
agggauggggcugcggagggg

SEQ ID NO: 553811 - RNA, 19 nt, Human
aggggaccucagguuuucc

SEQ ID NO: 553812 - RNA, 22 nt, Human
agggugguggcggcgggauccc

SEQ ID NO: 553813 - RNA, 21 nt, Human
agguggagguuguagugagcc

SEQ ID NO: 553814 - RNA, 24 nt, Human
agguggagguuguagugagccgag

SEQ ID NO: 553815 - RNA, 22 nt, Human
agguggcccgggcugggcggga

SEQ ID NO: 553816 - RNA, 22 nt, Human
aguccauggcucugccgcaacc

SEQ ID NO: 553817 - RNA, 19 nt, Human
auaaaaacccccaaggaac

SEQ ID NO: 553818 - RNA, 20 nt, Human
auaggacaacugaccuccuc

SEQ ID NO: 553819 - RNA, 24 nt, Human
aucaugccacugcacuccagucug

SEQ ID NO: 553820 - RNA, 21 nt, Human
augauacauaggacaacugac

SEQ ID NO: 553821 - RNA, 27 nt, Human
augccacugcacuccagucugaacaau

SEQ ID NO: 553822 - RNA, 20 nt, Human
augcuaauccuggggcuccu

SEQ ID NO: 553823 - RNA, 18 nt, Human
augcucccagguugaggg

SEQ ID NO: 553824 - RNA, 20 nt, Human
auguuuaguaugaggugcaa

SEQ ID NO: 553825 - RNA, 22 nt, Human
caaaaaaggaagugcuacccuu

SEQ ID NO: 553826 - RNA, 20 nt, Human
caaacucaacgaauuccaca

SEQ ID NO: 553827 - RNA, 19 nt, Human
caaaggaccacgagaggca

SEQ ID NO: 553828 - RNA, 24 nt, Human
caacacggugaaacccugucucua

SEQ ID NO: 553829 - RNA, 20 nt, Human
caacaucagguuaaaauaga

SEQ ID NO: 553830 - RNA, 18 nt, Human
caaguuccucccuuucac

SEQ ID NO: 553831 - RNA, 21 nt, Human
caauuuccugguuuccacaag

SEQ ID NO: 553832 - RNA, 21 nt, Human
cacacagcaaaaugccuccaa

SEQ ID NO: 553833 - RNA, 23 nt, Human
cacacagggaaagaaacuuggcu

SEQ ID NO: 553834 - RNA, 24 nt, Human
cacaccuguaaucucagcacuuug

SEQ ID NO: 553835 - RNA, 27 nt, Human
cacagauuaggggaccucagguuuucc

SEQ ID NO: 553836 - RNA, 21 nt, Human
caccgucucaguggccugcgc

SEQ ID NO: 553837 - RNA, 23 nt, Human
caccuacuuuaaaaacccaaagc

SEQ ID NO: 553838 - RNA, 23 nt, Human
caccugaggucaggaguuugaga

SEQ ID NO: 553839 - RNA, 23 nt, Human
caccuguaaucucagcacuuugg

SEQ ID NO: 553840 - RNA, 24 nt, Human
caccuguaaucucagcacuuuggg

SEQ ID NO: 553841 - RNA, 18 nt, Human
cacgccuguaaucacagc

SEQ ID NO: 553842 - RNA, 24 nt, Human
cacgccuguaaucacagcuauuug

SEQ ID NO: 553843 - RNA, 23 nt, Human
cacggugagcaggauaaaaaccc

SEQ ID NO: 553844 - RNA, 23 nt, Human
cacuccagucugaacaauagagc

SEQ ID NO: 553845 - RNA, 24 nt, Human
cacuccagucugaacaauagagcg

SEQ ID NO: 553846 - RNA, 19 nt, Human
cacugcacuccagucugaa

SEQ ID NO: 553847 - RNA, 21 nt, Human
cacugcacuccagucugaaca

SEQ ID NO: 553848 - RNA, 22 nt, Human
cacugcacuccagucugaacaa

SEQ ID NO: 553849 - RNA, 24 nt, Human
cacugcacuccagucugaacaaua

SEQ ID NO: 553850 - RNA, 24 nt, Human
cagaaaaauacagacaugauuuca

SEQ ID NO: 553851 - RNA, 25 nt, Human
cagagccaauaagaaacaugaaacc

SEQ ID NO: 553852 - RNA, 18 nt, Human
cagauucaagcugcuucc

SEQ ID NO: 553853 - RNA, 18 nt, Human
cagcaagaggaacugagg

SEQ ID NO: 553854 - RNA, 24 nt, Human
cagcacuuugggaggcugaggcgg

SEQ ID NO: 553855 - RNA, 18 nt, Human
cagcagacagucugggac

SEQ ID NO: 553856 - RNA, 19 nt, Human
cagcccaugacaaccuucu

SEQ ID NO: 553857 - RNA, 24 nt, Human
cagcuauuugggaggcugaggcag

SEQ ID NO: 553858 - RNA, 29 nt, Human
caggagguggagguuguagugacaacggu

SEQ ID NO: 553859 - RNA, 24 nt, Human
caggagguggagguuguagugagc

SEQ ID NO: 553860 - RNA, 22 nt, Human
caguaggauucccagaguaaau

SEQ ID NO: 553861 - RNA, 21 nt, Human
caucccuugggaccuguccuu

SEQ ID NO: 553862 - RNA, 18 nt, Human
cauuucguucagguugga

SEQ ID NO: 553863 - RNA, 18 nt, Human
ccaaguccacaaugaucu

SEQ ID NO: 553864 - RNA, 25 nt, Human
ccaaugguuccucuugacuguuucu

SEQ ID NO: 553865 - RNA, 20 nt, Human
ccacgcagacuggcccggaa

SEQ ID NO: 553866 - RNA, 18 nt, Human
ccacugcacuccagucug

SEQ ID NO: 553867 - RNA, 20 nt, Human
ccacugcacuccagucugaa

SEQ ID NO: 553868 - RNA, 21 nt, Human
ccacugcacuccagucugaac

SEQ ID NO: 553869 - RNA, 22 nt, Human
ccaggaaggcucacccgaggcu

SEQ ID NO: 553870 - RNA, 19 nt, Human
ccaggccacugaaaacagg

SEQ ID NO: 553871 - RNA, 20 nt, Human
cccaaagccacuuccucuuc

SEQ ID NO: 553872 - RNA, 21 nt, Human
cccaaagccacuuccucuuca

SEQ ID NO: 553873 - RNA, 19 nt, Human
cccaaggaacagcccauga

SEQ ID NO: 553874 - RNA, 18 nt, Human
cccaggagguggagguug

SEQ ID NO: 553875 - RNA, 26 nt, Human
ccccaggccacugaaaacagggcguc

SEQ ID NO: 553876 - RNA, 25 nt, Human
cccccgagauccccgcgacggcgga

SEQ ID NO: 553877 - RNA, 18 nt, Human
ccccggcgaucccuuugc

SEQ ID NO: 553878 - RNA, 23 nt, Human
cccuugggaccuguccuuuccgu

SEQ ID NO: 553879 - RNA, 18 nt, Human
ccgcaggcuuaucuccac

SEQ ID NO: 553880 - RNA, 19 nt, Human
ccgcaggcuuaucuccacc

SEQ ID NO: 553881 - RNA, 21 nt, Human
ccggcgaucccuuugcccccc

SEQ ID NO: 553882 - RNA, 22 nt, Human
ccugaccaacacggugaaaccc

SEQ ID NO: 553883 - RNA, 24 nt, Human
ccugaccaacacggugaaacccug

SEQ ID NO: 553884 - RNA, 22 nt, Human
ccugaggucaggaguuugagac

SEQ ID NO: 553885 - RNA, 19 nt, Human
ccuggggcuccuggaaagg

SEQ ID NO: 553886 - RNA, 22 nt, Human
cgaaggggcgcuccgcgcggcg

SEQ ID NO: 553887 - RNA, 24 nt, Human
cgccuguaaucacagcuauuuggg

SEQ ID NO: 553888 - RNA, 24 nt, Human
cggaucaccugaggucaggaguuu

SEQ ID NO: 553889 - RNA, 27 nt, Human
cggaucaccugaggucaggaguuugag

SEQ ID NO: 553890 - RNA, 21 nt, Human
cggcuggggcagcagugagcu

SEQ ID NO: 553891 - RNA, 24 nt, Human
cgggcggaucaccugaggucagga

SEQ ID NO: 553892 - RNA, 23 nt, Human
cuaaggcguggcggggggggggg

SEQ ID NO: 553893 - RNA, 23 nt, Human
cuacuuuaaaaacccaaagccac

SEQ ID NO: 553894 - RNA, 22 nt, Human
cucacaccuguaaucucagcac

SEQ ID NO: 553895 - RNA, 24 nt, Human
cucacaccuguaaucucagcacuu

SEQ ID NO: 553896 - RNA, 22 nt, Human
cuccucaggggacccgugauga

SEQ ID NO: 553897 - RNA, 20 nt, Human
cuccuccggcucgcagcucc

SEQ ID NO: 553898 - RNA, 24 nt, Human
cucggcggggugcgguagcucaca

SEQ ID NO: 553899 - RNA, 21 nt, Human
cugaacaauagagcgagacuc

SEQ ID NO: 553900 - RNA, 22 nt, Human
cugaacauagcgugccaagucc

SEQ ID NO: 553901 - RNA, 18 nt, Human
cugaccaacacggugaaa

SEQ ID NO: 553902 - RNA, 24 nt, Human
cugaccaacacggugaaacccugu

SEQ ID NO: 553903 - RNA, 25 nt, Human
cugcaccaaaugagaggaggggcug

SEQ ID NO: 553904 - RNA, 20 nt, Human
cugccccccugccugccaga

SEQ ID NO: 553905 - RNA, 26 nt, Human
cugccccccugccugccagaugcucc

SEQ ID NO: 553906 - RNA, 21 nt, Human
cuuccaguguggaccucccca

SEQ ID NO: 553907 - RNA, 20 nt, Human
cuuucacaaaaggcacugug

SEQ ID NO: 553908 - RNA, 24 nt, Human
cuuugcaaucgcguucaaaucgcc

SEQ ID NO: 553909 - RNA, 19 nt, Human
gaaacccugucucuacuaa

SEQ ID NO: 553910 - RNA, 22 nt, Human
gaacaagcagacggaggcuccu

SEQ ID NO: 553911 - RNA, 21 nt, Human
gaacccaggagguggagguug

SEQ ID NO: 553912 - RNA, 22 nt, Human
gaaguuccugaagaucccuguc

SEQ ID NO: 553913 - RNA, 19 nt, Human
gacaagccgcaggcuuauc

SEQ ID NO: 553914 - RNA, 22 nt, Human
gacuuggugaggucagaaguuc

SEQ ID NO: 553915 - RNA, 18 nt, Human
gagagagagagagaccgc

SEQ ID NO: 553916 - RNA, 19 nt, Human
gagaggaggaaguguuuuc

SEQ ID NO: 553917 - RNA, 23 nt, Human
gagaucaugccacugcacuccag

SEQ ID NO: 553918 - RNA, 22 nt, Human
gaggacuucacagacucaggag

SEQ ID NO: 553919 - RNA, 23 nt, Human
gaggcgggcggaucaccugaggu

SEQ ID NO: 553920 - RNA, 22 nt, Human
gagguuguagugagccgagauc

SEQ ID NO: 553921 - RNA, 24 nt, Human
gaucaccugaggucaggaguuuga

SEQ ID NO: 553922 - RNA, 26 nt, Human
gaugauacauaggacaacugaccucc

SEQ ID NO: 553923 - RNA, 18 nt, Human
gcacgguggcgaagugac

SEQ ID NO: 553924 - RNA, 24 nt, Human
gcacuccagucugaacaauagagc

SEQ ID NO: 553925 - RNA, 22 nt, Human
gcaggagaaucgcuggaaccca

SEQ ID NO: 553926 - RNA, 19 nt, Human
gccaagcaaagaauaaagc

SEQ ID NO: 553927 - RNA, 21 nt, Human
gcccggguggacugagggccc

SEQ ID NO: 553928 - RNA, 20 nt, Human
gccgagaucaugccacugca

SEQ ID NO: 553929 - RNA, 22 nt, Human
gccgcagggagcaugcuggaga

SEQ ID NO: 553930 - RNA, 21 nt, Human
gccucagcgucucugcgcuug

SEQ ID NO: 553931 - RNA, 19 nt, Human
gccugggccucagcgucuc

SEQ ID NO: 553932 - RNA, 22 nt, Human
gcggaggggugggcuguccaca

SEQ ID NO: 553933 - RNA, 23 nt, Human
gcggcgggcgcggcuccucgcgg

SEQ ID NO: 553934 - RNA, 22 nt, Human
gcuggaauucgacuuccagugu

SEQ ID NO: 553935 - RNA, 19 nt, Human
ggagagagagagagaccgc

SEQ ID NO: 553936 - RNA, 18 nt, Human
ggaggcuccuccaggaag

SEQ ID NO: 553937 - RNA, 20 nt, Human
ggagguuguagugagccgag

SEQ ID NO: 553938 - RNA, 22 nt, Human
ggagguuguagugagccgagau

SEQ ID NO: 553939 - RNA, 23 nt, Human
ggagguuguagugagccgagauc

SEQ ID NO: 553940 - RNA, 24 nt, Human
ggagguuguagugagccgagauca

SEQ ID NO: 553941 - RNA, 22 nt, Human
ggaucaccugaggucaggaguu

SEQ ID NO: 553942 - RNA, 22 nt, Human
ggaucaccugaggucaggaguu

SEQ ID NO: 553943 - RNA, 22 nt, Human
ggcaucgagaccuuugcgcugc

SEQ ID NO: 553944 - RNA, 21 nt, Human
ggcggaucaccugaggucagg

SEQ ID NO: 553945 - RNA, 19 nt, Human
gggcagggcgcuggaggcc

SEQ ID NO: 553946 - RNA, 18 nt, Human
gggcccaggaaggagcag

SEQ ID NO: 553947 - RNA, 23 nt, Human
gggccucagcgucucugcgcuug

SEQ ID NO: 553948 - RNA, 24 nt, Human
gggcgugguggugcacgccuguaa

SEQ ID NO: 553949 - RNA, 20 nt, Human
gggcugggcgggagggcagg

SEQ ID NO: 553950 - RNA, 25 nt, Human
gggcugggcgggagggcagggccgc

SEQ ID NO: 553951 - RNA, 19 nt, Human
gggggugguggccacagau

SEQ ID NO: 553952 - RNA, 22 nt, Human
ggggugggcgcuggcgagacuu

SEQ ID NO: 553953 - RNA, 24 nt, Human
gggugcgguagcucacaccuguaa

SEQ ID NO: 553954 - RNA, 24 nt, Human
gguagcucacaccuguaaucucag

SEQ ID NO: 553955 - RNA, 19 nt, Human
ggucaggaguuugagacca

SEQ ID NO: 553956 - RNA, 24 nt, Human
gguggugcacgccuguaaucacag

SEQ ID NO: 553957 - RNA, 18 nt, Human
ggugugccugugggugug

SEQ ID NO: 553958 - RNA, 21 nt, Human
gguguguggucaaccuugguu

SEQ ID NO: 553959 - RNA, 21 nt, Human
gucucaaaaaaaaaaaaaaaa

SEQ ID NO: 553960 - RNA, 19 nt, Human
gugagcaggauaaaaaccc

SEQ ID NO: 553961 - RNA, 23 nt, Human
gugcagaggggagggccucgcuc

SEQ ID NO: 553962 - RNA, 24 nt, Human
guuguagugagccgagaucaugcc

SEQ ID NO: 553963 - RNA, 18 nt, Human
uaaaaaacaggcggagga

SEQ ID NO: 553964 - RNA, 21 nt, Human
uaaaaaacaggcggaggagug

SEQ ID NO: 553965 - RNA, 20 nt, Human
uaaaaauacaaacauuagcc

SEQ ID NO: 553966 - RNA, 22 nt, Human
uacaagcauauccuauacuggg

SEQ ID NO: 553967 - RNA, 20 nt, Human
uacuaaaaauacaaacauua

SEQ ID NO: 553968 - RNA, 18 nt, Human
uagaauccaaaaaggacc

SEQ ID NO: 553969 - RNA, 24 nt, Human
uagagcgagacucccgucucaaaa

SEQ ID NO: 553970 - RNA, 18 nt, Human
uagcacgguggcgaagug

SEQ ID NO: 553971 - RNA, 22 nt, Human
uagcucacaccuguaaucucag

SEQ ID NO: 553972 - RNA, 24 nt, Human
uagcucacaccuguaaucucagca

SEQ ID NO: 553973 - RNA, 23 nt, Human
uaggggaccucagguuuuccuca

SEQ ID NO: 553974 - RNA, 19 nt, Human
ucaccugaggucaggaguu

SEQ ID NO: 553975 - RNA, 23 nt, Human
ucaugccacugcacuccagucug

SEQ ID NO: 553976 - RNA, 22 nt, Human
uccacggugagcaggauaaaaa

SEQ ID NO: 553977 - RNA, 23 nt, Human
uccagucugaacaauagagcgag

SEQ ID NO: 553978 - RNA, 24 nt, Human
uccagucugaacaauagagcgaga

SEQ ID NO: 553979 - RNA, 23 nt, Human
ucccagagcucggugccccagcu

SEQ ID NO: 553980 - RNA, 22 nt, Human
uccccgcgacggcggaaagccc

SEQ ID NO: 553981 - RNA, 24 nt, Human
ucccgucucaaaaaaaaaaaaaaa

SEQ ID NO: 553982 - RNA, 21 nt, Human
uccucaggggacccgugauga

SEQ ID NO: 553983 - RNA, 24 nt, Human
ucgcuggaacccaggagguggagg

SEQ ID NO: 553984 - RNA, 19 nt, Human
ucggccucacacagcaaaa

SEQ ID NO: 553985 - RNA, 22 nt, Human
ucuaaaagcaaacucaacgaau

SEQ ID NO: 553986 - RNA, 22 nt, Human
ucuacagcagacagucugggac

SEQ ID NO: 553987 - RNA, 22 nt, Human
ucuagcacgguggcgaagugac

SEQ ID NO: 553988 - RNA, 18 nt, Human
ucucgaugugcugcugug

SEQ ID NO: 553989 - RNA, 23 nt, Human
ucucuacuaaaaauacaaacauu

SEQ ID NO: 553990 - RNA, 22 nt, Human
ucucuguccuuucuuucacaaa

SEQ ID NO: 553991 - RNA, 25 nt, Human
ucuucuuccuccuucgaguucuuuu

SEQ ID NO: 553992 - RNA, 20 nt, Human
ugaaagugcuaaccucggcg

SEQ ID NO: 553993 - RNA, 21 nt, Human
ugaagagcacgugauaaaaua

SEQ ID NO: 553994 - RNA, 24 nt, Human
ugaccaacacggugaaacccuguc

SEQ ID NO: 553995 - RNA, 21 nt, Human
ugacccgagccaugggggugg

SEQ ID NO: 553996 - RNA, 18 nt, Human
ugacuguuucugcaccaa

SEQ ID NO: 553997 - RNA, 23 nt, Human
ugagaccagccugaccaacacgg

SEQ ID NO: 553998 - RNA, 21 nt, Human
ugagaggaggggcugcucugc

SEQ ID NO: 553999 - RNA, 21 nt, Human
ugagcaggauaaaaaccccca

SEQ ID NO: 554000 - RNA, 22 nt, Human
ugagccgagaucaugccacugc

SEQ ID NO: 554001 - RNA, 18 nt, Human
ugagcuggugcagagggg

SEQ ID NO: 554002 - RNA, 20 nt, Human
ugagcuggugcagaggggag

SEQ ID NO: 554003 - RNA, 23 nt, Human
ugagcuggugcagaggggagggc

SEQ ID NO: 554004 - RNA, 22 nt, Human
ugaggaugcuugaggggaccac

SEQ ID NO: 554005 - RNA, 19 nt, Human
ugaggcaggagaaucgcug

SEQ ID NO: 554006 - RNA, 24 nt, Human
ugaggcaggagaaucgcuggaacc

SEQ ID NO: 554007 - RNA, 25 nt, Human
ugaggcaggagaaucgcuggaaccc

SEQ ID NO: 554008 - RNA, 20 nt, Human
ugaggcgggcggaucaccug

SEQ ID NO: 554009 - RNA, 24 nt, Human
ugaggcgggcggaucaccugaggu

SEQ ID NO: 554010 - RNA, 26 nt, Human
ugaggcgggcggaucaccugagguca

SEQ ID NO: 554011 - RNA, 18 nt, Human
ugagggcauagugaaagg

SEQ ID NO: 554012 - RNA, 18 nt, Human
ugaggucaggaguuugag

SEQ ID NO: 554013 - RNA, 21 nt, Human
ugauuuccucuccuguuucag

SEQ ID NO: 554014 - RNA, 18 nt, Human
ugcaagccuagaauccaa

SEQ ID NO: 554015 - RNA, 19 nt, Human
ugccaggacgagcccgggu

SEQ ID NO: 554016 - RNA, 23 nt, Human
ugccauguucucggagauaacuu

SEQ ID NO: 554017 - RNA, 23 nt, Human
ugccgcaacccugagcgguuugc

SEQ ID NO: 554018 - RNA, 18 nt, Human
uggcccggaagcaacacc

SEQ ID NO: 554019 - RNA, 22 nt, Human
uggcuucuauaggacuuccuuc

SEQ ID NO: 554020 - RNA, 19 nt, Human
ugggaggcugaggcaggag

SEQ ID NO: 554021 - RNA, 23 nt, Human
ugggaggcugaggcaggagaauc

SEQ ID NO: 554022 - RNA, 19 nt, Human
ugggaggcugaggcgggcg

SEQ ID NO: 554023 - RNA, 24 nt, Human
ugggaggcugaggcgggcggauca

SEQ ID NO: 554024 - RNA, 19 nt, Human
uggggaggacaggcguggg

SEQ ID NO: 554025 - RNA, 20 nt, Human
uggggagggggagcgaugag

SEQ ID NO: 554026 - RNA, 20 nt, Human
uggggcugcggagggguggg

SEQ ID NO: 554027 - RNA, 18 nt, Human
uggguguguguguaccug

SEQ ID NO: 554028 - RNA, 19 nt, Human
uggugcacgccuguaauca

SEQ ID NO: 554029 - RNA, 21 nt, Human
uggugggugugccugugggug

SEQ ID NO: 554030 - RNA, 22 nt, Human
uguaaucacagcuauuugggag

SEQ ID NO: 554031 - RNA, 21 nt, Human
ugucccuuuggcuucuauagg

SEQ ID NO: 554032 - RNA, 21 nt, Human
ugugaacugcuccagaaaaau

SEQ ID NO: 554033 - RNA, 19 nt, Human
uguguaugcgcacgcgugu

SEQ ID NO: 554034 - RNA, 18 nt, Human
uguguguguaccugcccc

SEQ ID NO: 554035 - RNA, 21 nt, Human
uguguguguuuuucuaaguug

SEQ ID NO: 554036 - RNA, 23 nt, Human
uguguguguuuuucuaaguuguc

SEQ ID NO: 554037 - RNA, 22 nt, Human
uguuucugcaccaaaugagagg

SEQ ID NO: 554038 - RNA, 19 nt, Human
uuaaaauuagucaucuuac

SEQ ID NO: 554039 - RNA, 20 nt, Human
uuagccgggcgugguggugc

SEQ ID NO: 554040 - RNA, 22 nt, Human
uuagccgggcgugguggugcac

SEQ ID NO: 554041 - RNA, 24 nt, Human
uuagccgggcgugguggugcacgc

SEQ ID NO: 554042 - RNA, 21 nt, Human
uuagugcaacacacauacgaa

SEQ ID NO: 554043 - RNA, 21 nt, Human
uucaagcugcuuccagcaagu

SEQ ID NO: 554044 - RNA, 26 nt, Human
uuccagcaagucucgaugugcugcug

SEQ ID NO: 554045 - RNA, 19 nt, Human
uucgaguucuuuuuagguu

SEQ ID NO: 554046 - RNA, 26 nt, Human
uucuucuuccuccuucgaguucuuuu

SEQ ID NO: 554047 - RNA, 24 nt, Human
uugggaggcugaggcaggagaauc

SEQ ID NO: 554048 - RNA, 25 nt, Human
uugggaggcugaggcgggcggauca

SEQ ID NO: 554049 - RNA, 24 nt, Human
uuggugaggucagaaguuccugaa

SEQ ID NO: 554050 - RNA, 18 nt, Human
uuguagugagccgagauc

SEQ ID NO: 554051 - RNA, 20 nt, Human
uuguagugagccgagaucau

SEQ ID NO: 554052 - RNA, 21 nt, Human
uuguagugagccgagaucaug

SEQ ID NO: 554053 - RNA, 22 nt, Human
uuguauucuucuuccuccuucg

SEQ ID NO: 554054 - RNA, 28 nt, Human
uugucaaacugaucccagagcucggugc

SEQ ID NO: 554055 - RNA, 27 nt, Human
uugucuuucgucugucaagucaguccu

SEQ ID NO: 554056 - RNA, 23 nt, Human
uuuuccucaaaaacccacacagg

SEQ ID NO: 554057 - RNA, 21 nt, Human
aagaagaggcugcuaggggca

SEQ ID NO: 554058 - RNA, 22 nt, Human
aagccagagggggccgggccug

SEQ ID NO: 554059 - RNA, 18 nt, Human
acaugcugcaccucccac

SEQ ID NO: 554060 - RNA, 18 nt, Human
acccugggucuguccauc

SEQ ID NO: 554061 - RNA, 21 nt, Human
accuccccuucccaagcccag

SEQ ID NO: 554062 - RNA, 24 nt, Human
acuuucugaggggcccaggggaac

SEQ ID NO: 554063 - RNA, 24 nt, Human
agagacagauccaggcuggccucc

SEQ ID NO: 554064 - RNA, 24 nt, Human
agcaggacaagaggcaaguuccaa

SEQ ID NO: 554065 - RNA, 24 nt, Human
agccucugggccaaagccaccucu

SEQ ID NO: 554066 - RNA, 23 nt, Human
agcucgacuuucugaggggccca

SEQ ID NO: 554067 - RNA, 18 nt, Human
aggggcaaggguuagagg

SEQ ID NO: 554068 - RNA, 20 nt, Human
aggggcccaggggaacaugc

SEQ ID NO: 554069 - RNA, 20 nt, Human
cacccgaccuggaccccacc

SEQ ID NO: 554070 - RNA, 19 nt, Human
caccuccccuucccaagcc

SEQ ID NO: 554071 - RNA, 21 nt, Human
caccuccccuucccaagccca

SEQ ID NO: 554072 - RNA, 22 nt, Human
caccuccccuucccaagcccag

SEQ ID NO: 554073 - RNA, 21 nt, Human
caccucccugcaccugcacca

SEQ ID NO: 554074 - RNA, 18 nt, Human
caccugguacccaucuag

SEQ ID NO: 554075 - RNA, 24 nt, Human
cagagcacggcccaugagcccacc

SEQ ID NO: 554076 - RNA, 22 nt, Human
cagagcaggucccaauccugcu

SEQ ID NO: 554077 - RNA, 18 nt, Human
cagcccuuuucugacagc

SEQ ID NO: 554078 - RNA, 21 nt, Human
caggucccaauccugcucccc

SEQ ID NO: 554079 - RNA, 20 nt, Human
cauccagggcucaugugucc

SEQ ID NO: 554080 - RNA, 24 nt, Human
caugcaguagggcgaagucaggag

SEQ ID NO: 554081 - RNA, 22 nt, Human
ccaagcccagcccuuuucugac

SEQ ID NO: 554082 - RNA, 21 nt, Human
ccaauccugcuccccaucuac

SEQ ID NO: 554083 - RNA, 20 nt, Human
ccaguugucuugccuguccc

SEQ ID NO: 554084 - RNA, 23 nt, Human
ccaguugucuugccugucccugc

SEQ ID NO: 554085 - RNA, 24 nt, Human
cccaccccacccugggucugucca

SEQ ID NO: 554086 - RNA, 21 nt, Human
cccaggggaacaugcugcacc

SEQ ID NO: 554087 - RNA, 23 nt, Human
cccaugagcccacccuccacuuc

SEQ ID NO: 554088 - RNA, 18 nt, Human
ccccaccccacccugggu

SEQ ID NO: 554089 - RNA, 21 nt, Human
cccggccugagccucugggcc

SEQ ID NO: 554090 - RNA, 20 nt, Human
ccgaccuggaccccaccccc

SEQ ID NO: 554091 - RNA, 22 nt, Human
ccuccaccuccccuucccaagc

SEQ ID NO: 554092 - RNA, 23 nt, Human
ccuccaccuccccuucccaagcc

SEQ ID NO: 554093 - RNA, 18 nt, Human
ccucugggaaccuaaccc

SEQ ID NO: 554094 - RNA, 22 nt, Human
ccucugggaaccuaaccccacc

SEQ ID NO: 554095 - RNA, 25 nt, Human
ccucuucugagcaggcaggcagagc

SEQ ID NO: 554096 - RNA, 18 nt, Human
cuaggggugggguggggg

SEQ ID NO: 554097 - RNA, 22 nt, Human
cuagggguggggugggggcuug

SEQ ID NO: 554098 - RNA, 23 nt, Human
cuagggguggggugggggcuugg

SEQ ID NO: 554099 - RNA, 22 nt, Human
cuccaccuccccuucccaagcc

SEQ ID NO: 554100 - RNA, 22 nt, Human
cuccccuucccaagcccagccc

SEQ ID NO: 554101 - RNA, 18 nt, Human
cucccugcaccugcacca

SEQ ID NO: 554102 - RNA, 23 nt, Human
cucugggccaaagccaccucuuc

SEQ ID NO: 554103 - RNA, 23 nt, Human
cugcccacacugagaggcuccac

SEQ ID NO: 554104 - RNA, 19 nt, Human
cuggccuccaagcucgacu

SEQ ID NO: 554105 - RNA, 22 nt, Human
cuggccuccaccuccccuuccc

SEQ ID NO: 554106 - RNA, 18 nt, Human
cugggccaaagccaccuc

SEQ ID NO: 554107 - RNA, 18 nt, Human
cugucccugcuccgaggg

SEQ ID NO: 554108 - RNA, 19 nt, Human
gaacaugcugcaccuccca

SEQ ID NO: 554109 - RNA, 21 nt, Human
gacaagaggcaaguuccaagg

SEQ ID NO: 554110 - RNA, 19 nt, Human
gagcagcagacaggggcag

SEQ ID NO: 554111 - RNA, 23 nt, Human
gagcagcagacaggggcagagca

SEQ ID NO: 554112 - RNA, 20 nt, Human
gccuggauuugggaggugga

SEQ ID NO: 554113 - RNA, 23 nt, Human
ggacaagaggcaaguuccaaggg

SEQ ID NO: 554114 - RNA, 21 nt, Human
gggagcagcagacaggggcag

SEQ ID NO: 554115 - RNA, 22 nt, Human
ggucuugggaauggcaguucua

SEQ ID NO: 554116 - RNA, 20 nt, Human
uacccugggacauccuguac

SEQ ID NO: 554117 - RNA, 22 nt, Human
uagcuucuggggcuccacugac

SEQ ID NO: 554118 - RNA, 26 nt, Human
uagggcgaagucaggagaacacugcu

SEQ ID NO: 554119 - RNA, 21 nt, Human
ucaaagaacacagguagaaug

SEQ ID NO: 554120 - RNA, 19 nt, Human
uccaagggugguuggcugg

SEQ ID NO: 554121 - RNA, 22 nt, Human
uccacacccgaccuggacccca

SEQ ID NO: 554122 - RNA, 21 nt, Human
uccagcaggacaagaggcaag

SEQ ID NO: 554123 - RNA, 22 nt, Human
uccagggcucauguguccagcu

SEQ ID NO: 554124 - RNA, 18 nt, Human
ucccaagcccagcccuuu

SEQ ID NO: 554125 - RNA, 23 nt, Human
ucccagauuggucagaguuacau

SEQ ID NO: 554126 - RNA, 20 nt, Human
uccucugggaaccuaacccc

SEQ ID NO: 554127 - RNA, 23 nt, Human
uccuguagcugcgcucggccgcc

SEQ ID NO: 554128 - RNA, 24 nt, Human
ugagcccacccuccacuucccaga

SEQ ID NO: 554129 - RNA, 20 nt, Human
ugagccucugggccaaagcc

SEQ ID NO: 554130 - RNA, 21 nt, Human
ugcaguagggcgaagucagga

SEQ ID NO: 554131 - RNA, 21 nt, Human
uggcccgaccccagcaugcga

SEQ ID NO: 554132 - RNA, 22 nt, Human
uggccuccaagcucgacuuucu

SEQ ID NO: 554133 - RNA, 20 nt, Human
uggcuucuggacacccuccu

SEQ ID NO: 554134 - RNA, 25 nt, Human
ugggacauccuguacaggauucccu

SEQ ID NO: 554135 - RNA, 24 nt, Human
ugggagcagcagacaggggcagag

SEQ ID NO: 554136 - RNA, 21 nt, Human
uguacaggauucccucagucc

SEQ ID NO: 554137 - RNA, 20 nt, Human
uugccaguugucuugccugu

SEQ ID NO: 554138 - RNA, 21 nt, Human
uuuuuuuuuuuuuuagacugg

SEQ ID NO: 554139 - RNA, 24 nt, Human
uuuuuuuuuuuuuuuuagacuggg

SEQ ID NO: 554140 - RNA, 20 nt, Human
aaucaagcccaaggucugga

SEQ ID NO: 554141 - RNA, 27 nt, Human
acuuuuggcuguuucgcugcuccugac

SEQ ID NO: 554142 - RNA, 18 nt, Human
agaucaggaugaguggac

SEQ ID NO: 554143 - RNA, 19 nt, Human
aggaugaguggacuuaaaa

SEQ ID NO: 554144 - RNA, 21 nt, Human
caaacucccccagucuagaag

SEQ ID NO: 554145 - RNA, 22 nt, Human
caauuuaccagcugagagagua

SEQ ID NO: 554146 - RNA, 21 nt, Human
cagcgcuacugucaaccuuaa

SEQ ID NO: 554147 - RNA, 19 nt, Human
caggcagcuucugcugacu

SEQ ID NO: 554148 - RNA, 24 nt, Human
ccuacauacagaagaugcacaggc

SEQ ID NO: 554149 - RNA, 27 nt, Human
ccuccuacauacagaagaugcacaggc

SEQ ID NO: 554150 - RNA, 20 nt, Human
cuuggcuguugaaaucaagc

SEQ ID NO: 554151 - RNA, 23 nt, Human
gaugaaguagcugacugguucag

SEQ ID NO: 554152 - RNA, 19 nt, Human
ggacuuaaaagaugaagua

SEQ ID NO: 554153 - RNA, 22 nt, Human
guugagagaagaguagaaccca

SEQ ID NO: 554154 - RNA, 20 nt, Human
uaaaggaaguuacugaaaaa

SEQ ID NO: 554155 - RNA, 21 nt, Human
uagaacccaacuuuuggcugu

SEQ ID NO: 554156 - RNA, 19 nt, Human
ucaaccuuaaagcugacau

SEQ ID NO: 554157 - RNA, 19 nt, Human
ucacaggcagcuucugcug

SEQ ID NO: 554158 - RNA, 20 nt, Human
ucagaaauaugaaaaacuuc

SEQ ID NO: 554159 - RNA, 21 nt, Human
uccaccuccuacauacagaag

SEQ ID NO: 554160 - RNA, 21 nt, Human
uggauggaacaauuuaccagc

SEQ ID NO: 554161 - RNA, 26 nt, Human
uguuucgcugcuccugacaacuggac

SEQ ID NO: 554162 - RNA, 21 nt, Human
uucauuccaccuccuacauac

SEQ ID NO: 554163 - RNA, 21 nt, Human
uuuguaauacuacauggugag

SEQ ID NO: 554164 - RNA, 24 nt, Human
agggugggcaagcuggcugaggug

SEQ ID NO: 554165 - RNA, 23 nt, Human
caagcuggcugaggugucccagg

SEQ ID NO: 554166 - RNA, 25 nt, Human
ggagggugggcaagcuggcugaggu

SEQ ID NO: 554167 - RNA, 19 nt, Human
gggcaagcuggcugaggug

SEQ ID NO: 554168 - RNA, 27 nt, Human
gggcaagcuggcugaggugucccaggu

SEQ ID NO: 554169 - RNA, 18 nt, Human
ucugaaauugggcaaagg

SEQ ID NO: 554170 - RNA, 20 nt, Human
uggagggugggcaagcuggc

SEQ ID NO: 554171 - RNA, 20 nt, Human
uggagggugggcaagcuggc

SEQ ID NO: 554172 - RNA, 18 nt, Human
ugggcaagcuggcugagg

SEQ ID NO: 554173 - RNA, 19 nt, Human
ugggcaagcuggcugaggu

SEQ ID NO: 554174 - RNA, 24 nt, Human
uuuuuuuuuuuuuuuuuuuuuccu

SEQ ID NO: 554175 - RNA, 20 nt, Human
aaaagcaacccgggucaagg

SEQ ID NO: 554176 - RNA, 23 nt, Human
aagcaacccgggucaaggccagg

SEQ ID NO: 554177 - RNA, 26 nt, Human
aagggcauucugggcagcacgguacc

SEQ ID NO: 554178 - RNA, 20 nt, Human
acagaggcaggaagcucaga

SEQ ID NO: 554179 - RNA, 22 nt, Human
acccagggcuuggccagagagc

SEQ ID NO: 554180 - RNA, 20 nt, Human
agcaggagccuguggcggca

SEQ ID NO: 554181 - RNA, 21 nt, Human
agcauuuccaggggccugugg

SEQ ID NO: 554182 - RNA, 18 nt, Human
agccuguggcggcaacac

SEQ ID NO: 554183 - RNA, 19 nt, Human
aggagggcaggcaagaggc

SEQ ID NO: 554184 - RNA, 19 nt, Human
aggcagaggcucugcuccu

SEQ ID NO: 554185 - RNA, 20 nt, Human
aggcagaggcucugcuccuc

SEQ ID NO: 554186 - RNA, 21 nt, Human
agggaggccucuuucugaucu

SEQ ID NO: 554187 - RNA, 19 nt, Human
auguucccucugggcugcc

SEQ ID NO: 554188 - RNA, 23 nt, Human
caaaaagcaacccgggucaaggc

SEQ ID NO: 554189 - RNA, 22 nt, Human
caaggccaggguuggagacugg

SEQ ID NO: 554190 - RNA, 22 nt, Human
cacccccaguccuagagggucu

SEQ ID NO: 554191 - RNA, 19 nt, Human
caggccccggcucacggcc

SEQ ID NO: 554192 - RNA, 21 nt, Human
cagggcugguuacugaccugg

SEQ ID NO: 554193 - RNA, 23 nt, Human
caggggccuguggcagcgacgug

SEQ ID NO: 554194 - RNA, 18 nt, Human
ccacugagguccagggag

SEQ ID NO: 554195 - RNA, 18 nt, Human
ccagcaccagacccugcc

SEQ ID NO: 554196 - RNA, 19 nt, Human
ccagggagguaaggccugg

SEQ ID NO: 554197 - RNA, 20 nt, Human
cccacccccaguccuagagg

SEQ ID NO: 554198 - RNA, 23 nt, Human
cccacccccaguccuagaggguc

SEQ ID NO: 554199 - RNA, 22 nt, Human
cccccaguccuagagggucugc

SEQ ID NO: 554200 - RNA, 20 nt, Human
cccgcugggggccuggccuc

SEQ ID NO: 554201 - RNA, 24 nt, Human
ccucccagcaccagacccugcccg

SEQ ID NO: 554202 - RNA, 25 nt, Human
ccucugggcugcccuggauuggccc

SEQ ID NO: 554203 - RNA, 27 nt, Human
ccucugggcugcccuggauuggccgac

SEQ ID NO: 554204 - RNA, 21 nt, Human
cgguaccaagcccaacucacg

SEQ ID NO: 554205 - RNA, 22 nt, Human
cguguagcuggaaagaggcuaa

SEQ ID NO: 554206 - RNA, 24 nt, Human
cucacggccaagagcgccccaucu

SEQ ID NO: 554207 - RNA, 18 nt, Human
cugaagcucagugcacac

SEQ ID NO: 554208 - RNA, 24 nt, Human
cugcccuggauuggccccaccccc

SEQ ID NO: 554209 - RNA, 18 nt, Human
gacuccgccaucgcaucc

SEQ ID NO: 554210 - RNA, 19 nt, Human
gacuccgccaucgcauccc

SEQ ID NO: 554211 - RNA, 20 nt, Human
gcaaaaagcaacccggguca

SEQ ID NO: 554212 - RNA, 19 nt, Human
gcacgguaccaagcccaac

SEQ ID NO: 554213 - RNA, 19 nt, Human
ggccagagagcaggagccu

SEQ ID NO: 554214 - RNA, 20 nt, Human
gggccuggccucccacccag

SEQ ID NO: 554215 - RNA, 22 nt, Human
gggucaaggccaggguuggaga

SEQ ID NO: 554216 - RNA, 21 nt, Human
gguaccaagcccaacucacga

SEQ ID NO: 554217 - RNA, 19 nt, Human
gugcugggagagucccaca

SEQ ID NO: 554218 - RNA, 18 nt, Human
uacugccaggcggugugg

SEQ ID NO: 554219 - RNA, 21 nt, Human
uagcuggaaagaggcuacugc

SEQ ID NO: 554220 - RNA, 18 nt, Human
uaucuggaauguuuaauc

SEQ ID NO: 554221 - RNA, 19 nt, Human
uccccaggcucaggcgccg

SEQ ID NO: 554222 - RNA, 21 nt, Human
ucugagcagccacugaggucc

SEQ ID NO: 554223 - RNA, 20 nt, Human
ugagaggagggcaggcaaga

SEQ ID NO: 554224 - RNA, 26 nt, Human
ugccaggcgguguggcaggauguucc

SEQ ID NO: 554225 - RNA, 23 nt, Human
uggaaagaggcuacugccaggcg

SEQ ID NO: 554226 - RNA, 22 nt, Human
ugggcagcacgguaccaagccc

SEQ ID NO: 554227 - RNA, 21 nt, Human
aaccuaugccaacaaaacuuc

SEQ ID NO: 554228 - RNA, 19 nt, Human
acccgacccgccccgcccc

SEQ ID NO: 554229 - RNA, 26 nt, Human
acccgccccgccccgccucuggcccc

SEQ ID NO: 554230 - RNA, 20 nt, Human
accgcgccucuuaaaggccc

SEQ ID NO: 554231 - RNA, 21 nt, Human
acggaucuacauucuagaagc

SEQ ID NO: 554232 - RNA, 21 nt, Human
acuuuguggcaagcacugugc

SEQ ID NO: 554233 - RNA, 20 nt, Human
agaggaggagccggagcgcu

SEQ ID NO: 554234 - RNA, 20 nt, Human
agcggaccgaggaggcuggg

SEQ ID NO: 554235 - RNA, 21 nt, Human
aggagccggagcgcugcgggc

SEQ ID NO: 554236 - RNA, 25 nt, Human
aggcccccgacccgacccgccccgc

SEQ ID NO: 554237 - RNA, 23 nt, Human
aggccuaucuacccucgaccuuu

SEQ ID NO: 554238 - RNA, 23 nt, Human
aggcugggaaaggucaggagucg

SEQ ID NO: 554239 - RNA, 28 nt, Human
agucguuuuuuuuccaacuggggagggg

SEQ ID NO: 554240 - RNA, 21 nt, Human
ccaacaaaacuucucucuccc

SEQ ID NO: 554241 - RNA, 24 nt, Human
ccccgccucuggccccgcgcccgg

SEQ ID NO: 554242 - RNA, 19 nt, Human
ccccgcgcccggccgcccc

SEQ ID NO: 554243 - RNA, 19 nt, Human
cccgacccgccccgccccg

SEQ ID NO: 554244 - RNA, 18 nt, Human
cccgccccgccccgccuc

SEQ ID NO: 554245 - RNA, 23 nt, Human
ccgacccgccccgccccgccucu

SEQ ID NO: 554246 - RNA, 19 nt, Human
ccgccccgccucuggcccc

SEQ ID NO: 554247 - RNA, 20 nt, Human
ccgcgucugugucggucccg

SEQ ID NO: 554248 - RNA, 18 nt, Human
ccggcgaccgcgccucuu

SEQ ID NO: 554249 - RNA, 25 nt, Human
ccuaugccaacaaaacuucucucuc

SEQ ID NO: 554250 - RNA, 18 nt, Human
ccuuugccccuccaggca

SEQ ID NO: 554251 - RNA, 23 nt, Human
cgccccgcagucccagcagucug

SEQ ID NO: 554252 - RNA, 19 nt, Human
cucacggaucuacauucua

SEQ ID NO: 554253 - RNA, 23 nt, Human
cucgaccuuugccccuccaggca

SEQ ID NO: 554254 - RNA, 21 nt, Human
cucucucccugcucaggggcu

SEQ ID NO: 554255 - RNA, 19 nt, Human
cugggggagaguggaggca

SEQ ID NO: 554256 - RNA, 21 nt, Human
gaggauguguggcuuggggaa

SEQ ID NO: 554257 - RNA, 19 nt, Human
gcagcugggggagagugga

SEQ ID NO: 554258 - RNA, 22 nt, Human
gcucaggggcugggaucggagc

SEQ ID NO: 554259 - RNA, 20 nt, Human
ggaggaggauguguggcuug

SEQ ID NO: 554260 - RNA, 23 nt, Human
gggacugcugggaggaggcggcu

SEQ ID NO: 554261 - RNA, 18 nt, Human
ucgcuccugggggacugc

SEQ ID NO: 554262 - RNA, 19 nt, Human
ucuacauucuagaagccgg

SEQ ID NO: 554263 - RNA, 20 nt, Human
ucuacauucuagaagccggc

SEQ ID NO: 554264 - RNA, 19 nt, Human
ucucccugcucaggggcug

SEQ ID NO: 554265 - RNA, 18 nt, Human
ugccccuccaggcagcug

SEQ ID NO: 554266 - RNA, 19 nt, Human
ugcucgaggcccggggcug

SEQ ID NO: 554267 - RNA, 20 nt, Human
ugcugggaggaggcggcuac

SEQ ID NO: 554268 - RNA, 18 nt, Human
uggcaagcacugugcuag

SEQ ID NO: 554269 - RNA, 18 nt, Human
uggcaagcacugugcuag

SEQ ID NO: 554270 - RNA, 19 nt, Human
uggcaagcacugugcuagg

SEQ ID NO: 554271 - RNA, 20 nt, Human
ugggaaaggucaggagucgu

SEQ ID NO: 554272 - RNA, 19 nt, Human
ugggaggaggcggcuacgg

SEQ ID NO: 554273 - RNA, 23 nt, Human
uguggcaagcacugugcuaggug

SEQ ID NO: 554274 - RNA, 20 nt, Human
uuuuuuccaacuggggaggg

SEQ ID NO: 554275 - RNA, 19 nt, Human
uuuuuuuuuuuuuuuuugg

SEQ ID NO: 554276 - RNA, 26 nt, Human
aaaaaggaaaucaaucaaaccagaaa

SEQ ID NO: 554277 - RNA, 22 nt, Human
aaacaagcagcaggcauucaac

SEQ ID NO: 554278 - RNA, 18 nt, Human
aaagacauucucucucuu

SEQ ID NO: 554279 - RNA, 19 nt, Human
aagacagaaugucacaaac

SEQ ID NO: 554280 - RNA, 26 nt, Human
aagagaaaagaaguugcuauauccaa

SEQ ID NO: 554281 - RNA, 20 nt, Human
aaucaaaccagaaaaccaaa

SEQ ID NO: 554282 - RNA, 21 nt, Human
acacagugccuuucagauuaa

SEQ ID NO: 554283 - RNA, 20 nt, Human
acagggcuuuuuaaaaugga

SEQ ID NO: 554284 - RNA, 24 nt, Human
acauugucuuugcagcuggggaag

SEQ ID NO: 554285 - RNA, 20 nt, Human
acucuaaggaauaacaagag

SEQ ID NO: 554286 - RNA, 18 nt, Human
acugcaugcagauggaca

SEQ ID NO: 554287 - RNA, 23 nt, Human
acuuuuuuucccuucaaaaccuu

SEQ ID NO: 554288 - RNA, 24 nt, Human
agacaggugcagagacaggccccu

SEQ ID NO: 554289 - RNA, 22 nt, Human
agagacaggccccuaacgcccc

SEQ ID NO: 554290 - RNA, 21 nt, Human
agccagugccguccgaacaca

SEQ ID NO: 554291 - RNA, 19 nt, Human
aggcaaccagcacuacugg

SEQ ID NO: 554292 - RNA, 26 nt, Human
aggcuucguccugcugccgucaggac

SEQ ID NO: 554293 - RNA, 18 nt, Human
aggcuuucccagaagacg

SEQ ID NO: 554294 - RNA, 23 nt, Human
aggugauacaggcuuccuggagc

SEQ ID NO: 554295 - RNA, 20 nt, Human
caaaguaacuagguccuaac

SEQ ID NO: 554296 - RNA, 24 nt, Human
caacaauugcaacucucagcaugc

SEQ ID NO: 554297 - RNA, 23 nt, Human
caacacgcacaucuccuuucaca

SEQ ID NO: 554298 - RNA, 24 nt, Human
caacuaacuucaggguaaaaagac

SEQ ID NO: 554299 - RNA, 21 nt, Human
caagcauacaagccaugccac

SEQ ID NO: 554300 - RNA, 19 nt, Human
cacaacuuuaccucugaau

SEQ ID NO: 554301 - RNA, 18 nt, Human
cacacaguccucacucgg

SEQ ID NO: 554302 - RNA, 20 nt, Human
cacagagaaaucagaaggaa

SEQ ID NO: 554303 - RNA, 19 nt, Human
caccacaggacaagcauac

SEQ ID NO: 554304 - RNA, 27 nt, Human
cacggucaggcuuucccagaagacgcc

SEQ ID NO: 554305 - RNA, 21 nt, Human
cacuacaaaaagaacccauca

SEQ ID NO: 554306 - RNA, 19 nt, Human
cagaaugucacaaacuguc

SEQ ID NO: 554307 - RNA, 21 nt, Human
cagcagcagcaaaggugcaau

SEQ ID NO: 554308 - RNA, 24 nt, Human
cagcagcagcaaaggugcaauguc

SEQ ID NO: 554309 - RNA, 27 nt, Human
caggacaagcauacaagccaugccacu

SEQ ID NO: 554310 - RNA, 20 nt, Human
caggucccgagggcuccgug

SEQ ID NO: 554311 - RNA, 23 nt, Human
caggucccgagggcuccguggag

SEQ ID NO: 554312 - RNA, 18 nt, Human
caggugcagagacaggcc

SEQ ID NO: 554313 - RNA, 19 nt, Human
cagucuagauacauaugua

SEQ ID NO: 554314 - RNA, 26 nt, Human
cauacaagccaugccacugacacagu

SEQ ID NO: 554315 - RNA, 19 nt, Human
caucuccuuucacacaagu

SEQ ID NO: 554316 - RNA, 22 nt, Human
ccaaggaaauguucugagacaa

SEQ ID NO: 554317 - RNA, 20 nt, Human
ccagcacuacugguggagug

SEQ ID NO: 554318 - RNA, 21 nt, Human
ccccaugaagcauucaugaag

SEQ ID NO: 554319 - RNA, 19 nt, Human
cgggaccgaacacguucca

SEQ ID NO: 554320 - RNA, 25 nt, Human
cggucaggcuuucccagaagacgcc

SEQ ID NO: 554321 - RNA, 23 nt, Human
cugauuacaaaagcaaaaccuca

SEQ ID NO: 554322 - RNA, 18 nt, Human
cuguccagccaaggaaau

SEQ ID NO: 554323 - RNA, 23 nt, Human
cuuucccagaagacgccacaaca

SEQ ID NO: 554324 - RNA, 19 nt, Human
gaaaucaaucaaaccagaa

SEQ ID NO: 554325 - RNA, 26 nt, Human
gaaaucaaucaaaccagaaaaccaac

SEQ ID NO: 554326 - RNA, 18 nt, Human
gaagagaaaagaaguugc

SEQ ID NO: 554327 - RNA, 19 nt, Human
gaugcugccaagauagcac

SEQ ID NO: 554328 - RNA, 20 nt, Human
gauuacaaaagcaaaaccuc

SEQ ID NO: 554329 - RNA, 19 nt, Human
gcaauguccucucuagacu

SEQ ID NO: 554330 - RNA, 19 nt, Human
gcacaucuccuuucacaca

SEQ ID NO: 554331 - RNA, 22 nt, Human
gcggagagcaacauugucuuug

SEQ ID NO: 554332 - RNA, 20 nt, Human
gcuuuccaaaccuuggucac

SEQ ID NO: 554333 - RNA, 22 nt, Human
ggacaagcauacaagccaugcc

SEQ ID NO: 554334 - RNA, 24 nt, Human
ggaccgaacacguuccacagagaa

SEQ ID NO: 554335 - RNA, 23 nt, Human
uaaaacacuugaaaucuguguuu

SEQ ID NO: 554336 - RNA, 24 nt, Human
uaaaaccaucuuucuugacuuuga

SEQ ID NO: 554337 - RNA, 24 nt, Human
uaacaagaggugugaaaccacuuu

SEQ ID NO: 554338 - RNA, 25 nt, Human
uaacuagguccuaacuucggaaguu

SEQ ID NO: 554339 - RNA, 24 nt, Human
uaagaaaaaaggaaaucaaucaaa

SEQ ID NO: 554340 - RNA, 22 nt, Human
uaaugcaucucauucauauuaa

SEQ ID NO: 554341 - RNA, 19 nt, Human
uacaaaaagaacccaucac

SEQ ID NO: 554342 - RNA, 23 nt, Human
uagcagcagcagcaaaggugcaa

SEQ ID NO: 554343 - RNA, 19 nt, Human
ucaaucaaaccagaaaacc

SEQ ID NO: 554344 - RNA, 26 nt, Human
ucagguggcuuuccaaaccuugguca

SEQ ID NO: 554345 - RNA, 25 nt, Human
uccaaaacacguuuuuagaaaaaua

SEQ ID NO: 554346 - RNA, 21 nt, Human
uccugauuacaaaagcaaaaa

SEQ ID NO: 554347 - RNA, 24 nt, Human
uccuggugcagcaggucccgaggg

SEQ ID NO: 554348 - RNA, 24 nt, Human
ugaaaguaguguacaauccuccca

SEQ ID NO: 554349 - RNA, 24 nt, Human
ugacuuuggauuugacugaugagg

SEQ ID NO: 554350 - RNA, 23 nt, Human
ugcaacuaacuucaggguaaaaa

SEQ ID NO: 554351 - RNA, 18 nt, Human
ugcagagacaggccccua

SEQ ID NO: 554352 - RNA, 18 nt, Human
ugccgucaggacccuggc

SEQ ID NO: 554353 - RNA, 19 nt, Human
uggacagacaggugcagag

SEQ ID NO: 554354 - RNA, 20 nt, Human
uggacagacaggugcagaga

SEQ ID NO: 554355 - RNA, 21 nt, Human
uggacagacaggugcagagac

SEQ ID NO: 554356 - RNA, 24 nt, Human
uggcggcuuggaaaagcagauucc

SEQ ID NO: 554357 - RNA, 23 nt, Human
uguacaaaaaaaucuuggcauuc

SEQ ID NO: 554358 - RNA, 26 nt, Human
uguagaugaguauggaaaaauccauu

SEQ ID NO: 554359 - RNA, 23 nt, Human
ugucacaaacugucaccacagga

SEQ ID NO: 554360 - RNA, 21 nt, Human
ugugaaaccacuuuuuuuccc

SEQ ID NO: 554361 - RNA, 21 nt, Human
ugugucuaagaaaaaaggaaa

SEQ ID NO: 554362 - RNA, 23 nt, Human
uguugagagcaaaguaacuaggu

SEQ ID NO: 554363 - RNA, 18 nt, Human
uucacacaaguccaacac

SEQ ID NO: 554364 - RNA, 25 nt, Human
uucacacaaguccaacacucuucaa

SEQ ID NO: 554365 - RNA, 23 nt, Human
uucauauuaauuaauuccguauu

SEQ ID NO: 554366 - RNA, 21 nt, Human
uuccaaaggguaaacaagcag

SEQ ID NO: 554367 - RNA, 21 nt, Human
uugaagaccauggaguaugac

SEQ ID NO: 554368 - RNA, 22 nt, Human
uugcagcuggggaagagcacac

SEQ ID NO: 554369 - RNA, 23 nt, Human
uuggaagauagcagcagcagcaa

SEQ ID NO: 554370 - RNA, 18 nt, Human
uuuaaacuuaguaggagg

SEQ ID NO: 554371 - RNA, 19 nt, Human
uuuauuagaguacaggauc

SEQ ID NO: 554372 - RNA, 21 nt, Human
uuucacacaaguccaacacuc

SEQ ID NO: 554373 - RNA, 19 nt, Human
uuuggucuuugaagaccau

SEQ ID NO: 554374 - RNA, 24 nt, Human
uuuuuggucuuugaagaccauggg

SEQ ID NO: 554375 - RNA, 22 nt, Human
aaagauacacucuaaccaugug

SEQ ID NO: 554376 - RNA, 24 nt, Human
aaccccaaagugacaaaaccugag

SEQ ID NO: 554377 - RNA, 25 nt, Human
aagcaaaagccuuaguaacaaaaaa

SEQ ID NO: 554378 - RNA, 24 nt, Human
aagccuuaguaacaaaaaagaucc

SEQ ID NO: 554379 - RNA, 19 nt, Human
accauguguuuccuuuaaa

SEQ ID NO: 554380 - RNA, 20 nt, Human
agaauuuccaaaaaccagua

SEQ ID NO: 554381 - RNA, 24 nt, Human
aggaggugacacauugaggucaca

SEQ ID NO: 554382 - RNA, 27 nt, Human
aggcaaugucaaauuuuaaggagaaug

SEQ ID NO: 554383 - RNA, 23 nt, Human
caaaaaagauccacaauuuuuaa

SEQ ID NO: 554384 - RNA, 23 nt, Human
caaagugacaaaaccugagacca

SEQ ID NO: 554385 - RNA, 25 nt, Human
caaugucuacuacaaaauggaauga

SEQ ID NO: 554386 - RNA, 22 nt, Human
cagaauuuccaaaaaccaguac

SEQ ID NO: 554387 - RNA, 25 nt, Human
cagcccgccggaaccaguccuacgg

SEQ ID NO: 554388 - RNA, 22 nt, Human
cauaaagauacacucuaaccau

SEQ ID NO: 554389 - RNA, 21 nt, Human
ccaaagugacaaaaccugaga

SEQ ID NO: 554390 - RNA, 18 nt, Human
ccccaaagugacaaaacc

SEQ ID NO: 554391 - RNA, 23 nt, Human
cgccggaaccaguccuacggcgg

SEQ ID NO: 554392 - RNA, 18 nt, Human
cugucaaaggaaagauca

SEQ ID NO: 554393 - RNA, 26 nt, Human
cuuuaaaggaggaaacuagaaaggag

SEQ ID NO: 554394 - RNA, 27 nt, Human
gacacauugaggucacacagaguacca

SEQ ID NO: 554395 - RNA, 18 nt, Human
gcaagacauucuguggaa

SEQ ID NO: 554396 - RNA, 18 nt, Human
ggaggugacacauugagg

SEQ ID NO: 554397 - RNA, 22 nt, Human
uaagccccuuagccaagacccu

SEQ ID NO: 554398 - RNA, 19 nt, Human
ucacacagaguaccacauc

SEQ ID NO: 554399 - RNA, 25 nt, Human
ucaguaagccccuuagccaaugucu

SEQ ID NO: 554400 - RNA, 20 nt, Human
ugacaaaaccugagaccauu

SEQ ID NO: 554401 - RNA, 23 nt, Human
ugaccaaacagauuugggaacug

SEQ ID NO: 554402 - RNA, 22 nt, Human
ugccauaaagauacacucuaac

SEQ ID NO: 554403 - RNA, 20 nt, Human
ugucacagguaaugcuauuc

SEQ ID NO: 554404 - RNA, 18 nt, Human
ugugacucaaggaaguuc

SEQ ID NO: 554405 - RNA, 21 nt, Human
uguggaaaaaaguuuugugac

SEQ ID NO: 554406 - RNA, 19 nt, Human
uuaaccccaaagugacaaa

SEQ ID NO: 554407 - RNA, 19 nt, Human
uucaaaagaucuaauacag

SEQ ID NO: 554408 - RNA, 22 nt, Human
aaggaggcacuccccuugggcc

SEQ ID NO: 554409 - RNA, 23 nt, Human
acacagagggaccuugacuugga

SEQ ID NO: 554410 - RNA, 24 nt, Human
accuugacuuggagcuugacgaag

SEQ ID NO: 554411 - RNA, 18 nt, Human
agaagaggcagguccaga

SEQ ID NO: 554412 - RNA, 18 nt, Human
agggggauuaggucucag

SEQ ID NO: 554413 - RNA, 23 nt, Human
auugcuccuuagucccuggccug

SEQ ID NO: 554414 - RNA, 23 nt, Human
auugcuccuuagucccuggccug

SEQ ID NO: 554415 - RNA, 24 nt, Human
cacacagagggaccuugacuugga

SEQ ID NO: 554416 - RNA, 23 nt, Human
cacagccgcagcccagcagcucc

SEQ ID NO: 554417 - RNA, 21 nt, Human
cacccccgccuccuucagccc

SEQ ID NO: 554418 - RNA, 18 nt, Human
cacccccuagcaaccccu

SEQ ID NO: 554419 - RNA, 18 nt, Human
cacccccuagcaaccccu

SEQ ID NO: 554420 - RNA, 23 nt, Human
cacccuacgaucuccuucaucuu

SEQ ID NO: 554421 - RNA, 24 nt, Human
cagcagcuccuugcugaacucuga

SEQ ID NO: 554422 - RNA, 20 nt, Human
cagccccacagccgcagccc

SEQ ID NO: 554423 - RNA, 23 nt, Human
cagggccucccagaagaaguccu

SEQ ID NO: 554424 - RNA, 21 nt, Human
cagguaacaaaccuggggaca

SEQ ID NO: 554425 - RNA, 18 nt, Human
ccacccccgccuccuuca

SEQ ID NO: 554426 - RNA, 18 nt, Human
ccacccccuagcaacccc

SEQ ID NO: 554427 - RNA, 22 nt, Human
ccacccccuagcaaccccuucc

SEQ ID NO: 554428 - RNA, 18 nt, Human
cccacacgcaugugcaca

SEQ ID NO: 554429 - RNA, 18 nt, Human
cccacacgcaugugcaca

SEQ ID NO: 554430 - RNA, 20 nt, Human
cccacacgcaugugcacaau

SEQ ID NO: 554431 - RNA, 20 nt, Human
cccacacgcaugugcacaau

SEQ ID NO: 554432 - RNA, 19 nt, Human
cccacagccgcagcccagc

SEQ ID NO: 554433 - RNA, 25 nt, Human
ccccacccccuagcaaccccuuccc

SEQ ID NO: 554434 - RNA, 25 nt, Human
ccccacccccuagcaaccccuuccc

SEQ ID NO: 554435 - RNA, 22 nt, Human
cccccagccccacagccgcagc

SEQ ID NO: 554436 - RNA, 22 nt, Human
cccccgggguccuggggugcuc

SEQ ID NO: 554437 - RNA, 18 nt, Human
cccccuagcaaccccuuc

SEQ ID NO: 554438 - RNA, 18 nt, Human
cccccuagcaaccccuuc

SEQ ID NO: 554439 - RNA, 22 nt, Human
ccccgccuccuucagcccucug

SEQ ID NO: 554440 - RNA, 20 nt, Human
ccccgggguccuggggugcc

SEQ ID NO: 554441 - RNA, 20 nt, Human
ccccuugggccagccuggga

SEQ ID NO: 554442 - RNA, 22 nt, Human
ccucgguccauuuuguccccug

SEQ ID NO: 554443 - RNA, 18 nt, Human
ccuucagcccucugcagc

SEQ ID NO: 554444 - RNA, 20 nt, Human
cggcccccagccccacagcc

SEQ ID NO: 554445 - RNA, 19 nt, Human
cgguguccccuccucuugg

SEQ ID NO: 554446 - RNA, 25 nt, Human
cugcagcauguccagggccucccuc

SEQ ID NO: 554447 - RNA, 26 nt, Human
cugcagguaacaaaccuggggacaca

SEQ ID NO: 554448 - RNA, 20 nt, Human
cuggcccccaggcugggcuc

SEQ ID NO: 554449 - RNA, 25 nt, Human
cuugcggucccucggcccguuuucc

SEQ ID NO: 554450 - RNA, 23 nt, Human
gcacaggcacacagagggaccuu

SEQ ID NO: 554451 - RNA, 21 nt, Human
gccagccugggaggcggcccc

SEQ ID NO: 554452 - RNA, 19 nt, Human
gccccuccugggcagcccc

SEQ ID NO: 554453 - RNA, 19 nt, Human
gccccuccugggcagcccc

SEQ ID NO: 554454 - RNA, 20 nt, Human
gcgguccugcaacguuuggc

SEQ ID NO: 554455 - RNA, 20 nt, Human
ggacuaggcacccccugcuu

SEQ ID NO: 554456 - RNA, 23 nt, Human
ggcccccagccccacagccgcag

SEQ ID NO: 554457 - RNA, 26 nt, Human
ggcccccagccccacagccgcagccc

SEQ ID NO: 554458 - RNA, 19 nt, Human
ggccuggggccggacuccc

SEQ ID NO: 554459 - RNA, 19 nt, Human
ggccuggggccggacuccc

SEQ ID NO: 554460 - RNA, 19 nt, Human
gggccccuccugggcagcc

SEQ ID NO: 554461 - RNA, 19 nt, Human
gggccccuccugggcagcc

SEQ ID NO: 554462 - RNA, 18 nt, Human
gguacuccucgcaggccu

SEQ ID NO: 554463 - RNA, 18 nt, Human
guagagccgucccucaga

SEQ ID NO: 554464 - RNA, 22 nt, Human
guagagccgucccucagagaag

SEQ ID NO: 554465 - RNA, 18 nt, Human
guggagugccgguguccc

SEQ ID NO: 554466 - RNA, 18 nt, Human
uagcaugagggggauuag

SEQ ID NO: 554467 - RNA, 18 nt, Human
uccagggccucccagaag

SEQ ID NO: 554468 - RNA, 19 nt, Human
uccauuuuguccccuguuc

SEQ ID NO: 554469 - RNA, 20 nt, Human
uccccacccccuagcaaccc

SEQ ID NO: 554470 - RNA, 20 nt, Human
uccccacccccuagcaaccc

SEQ ID NO: 554471 - RNA, 20 nt, Human
uccccuugggccagccuggg

SEQ ID NO: 554472 - RNA, 22 nt, Human
ucccugguggcacagagggcac

SEQ ID NO: 554473 - RNA, 23 nt, Human
ucccuguguggguuccccucggu

SEQ ID NO: 554474 - RNA, 22 nt, Human
uccuuagucccuggccuggggc

SEQ ID NO: 554475 - RNA, 22 nt, Human
uccuuagucccuggccuggggc

SEQ ID NO: 554476 - RNA, 19 nt, Human
uccuucagcccucugcagc

SEQ ID NO: 554477 - RNA, 20 nt, Human
ucugcagcauguccagggcc

SEQ ID NO: 554478 - RNA, 22 nt, Human
ugacagucacucgccuguaucu

SEQ ID NO: 554479 - RNA, 25 nt, Human
ugcagguaacaaaccuggggacaca

SEQ ID NO: 554480 - RNA, 21 nt, Human
ugcugaacucugagcucuggc

SEQ ID NO: 554481 - RNA, 23 nt, Human
ugcugaacucugagcucuggcuc

SEQ ID NO: 554482 - RNA, 18 nt, Human
uggagugccggugucccc

SEQ ID NO: 554483 - RNA, 21 nt, Human
uggcacagagggcacaggcac

SEQ ID NO: 554484 - RNA, 21 nt, Human
uggcagguggcgauagggggc

SEQ ID NO: 554485 - RNA, 21 nt, Human
uggcuggcagguggcgauagg

SEQ ID NO: 554486 - RNA, 19 nt, Human
uggggacacacggccaggg

SEQ ID NO: 554487 - RNA, 18 nt, Human
ugggggacgaggacuagg

SEQ ID NO: 554488 - RNA, 22 nt, Human
ugguagguagagccgucccuuc

SEQ ID NO: 554489 - RNA, 21 nt, Human
ugguuagccguccccaccccc

SEQ ID NO: 554490 - RNA, 21 nt, Human
ugguuagccguccccaccccc

SEQ ID NO: 554491 - RNA, 22 nt, Human
ugguuagccguccccacccccu

SEQ ID NO: 554492 - RNA, 22 nt, Human
ugguuagccguccccacccccu

SEQ ID NO: 554493 - RNA, 21 nt, Human
uguccccuccucuugguugga

SEQ ID NO: 554494 - RNA, 23 nt, Human
ugucguggcuggacaggauguau

SEQ ID NO: 554495 - RNA, 18 nt, Human
ugugcacaauggucauug

SEQ ID NO: 554496 - RNA, 18 nt, Human
ugugcacaauggucauug

SEQ ID NO: 554497 - RNA, 21 nt, Human
uguuccuagcugcccguaucu

SEQ ID NO: 554498 - RNA, 27 nt, Human
uucccacacgcaugugcacaaugguca

SEQ ID NO: 554499 - RNA, 27 nt, Human
uucccacacgcaugugcacaaugguca

SEQ ID NO: 554500 - RNA, 24 nt, Human
uucccuucggaggcucuaauuggc

SEQ ID NO: 554501 - RNA, 22 nt, Human
uugacgaaggaggcacuccccu

SEQ ID NO: 554502 - RNA, 19 nt, Human
uuggagcuugacgaaggag

SEQ ID NO: 554503 - RNA, 18 nt, Human
uuggcaacuguggaucug

SEQ ID NO: 554504 - RNA, 18 nt, Human
uuuuuuuuuuuuuuuucg

SEQ ID NO: 554505 - RNA, 18 nt, Human
uuuuuuuuuuuuuuuucg

SEQ ID NO: 554506 - RNA, 21 nt, Human
uuuuuuuuuuuuuuuuucgcu

SEQ ID NO: 554507 - RNA, 21 nt, Human
uuuuuuuuuuuuuuuuucgcu

SEQ ID NO: 554508 - RNA, 21 nt, Human
acaagauucacaucucuucca

SEQ ID NO: 554509 - RNA, 23 nt, Human
acagacagcaggauucacaaucu

SEQ ID NO: 554510 - RNA, 19 nt, Human
agggauggcaggggcagcc

SEQ ID NO: 554511 - RNA, 18 nt, Human
caacuccauccaggagau

SEQ ID NO: 554512 - RNA, 25 nt, Human
caaguuucugacuacaagauucaca

SEQ ID NO: 554513 - RNA, 20 nt, Human
cacagaacacucacuaugag

SEQ ID NO: 554514 - RNA, 19 nt, Human
cacagacagcaggauucac

SEQ ID NO: 554515 - RNA, 21 nt, Human
cagaacacucacuaugagccc

SEQ ID NO: 554516 - RNA, 22 nt, Human
ccaaaaauggcauaguucuccu

SEQ ID NO: 554517 - RNA, 20 nt, Human
ccaucuucugucuuaaucca

SEQ ID NO: 554518 - RNA, 23 nt, Human
cccaccucacagaacacucacua

SEQ ID NO: 554519 - RNA, 20 nt, Human
cccugcacagacagcaggau

SEQ ID NO: 554520 - RNA, 18 nt, Human
ccugacccaaaaauggca

SEQ ID NO: 554521 - RNA, 18 nt, Human
cugacccaaaaauggcau

SEQ ID NO: 554522 - RNA, 18 nt, Human
cuucccaggcuuucugga

SEQ ID NO: 554523 - RNA, 24 nt, Human
uaaagaaguagaaaugauuucguu

SEQ ID NO: 554524 - RNA, 19 nt, Human
uaagauaaugcugugacug

SEQ ID NO: 554525 - RNA, 20 nt, Human
uaagauaaugcugugacuga

SEQ ID NO: 554526 - RNA, 21 nt, Human
uacaaugguuauucucucuuu

SEQ ID NO: 554527 - RNA, 22 nt, Human
ucccaggcuuucuggaagcagg

SEQ ID NO: 554528 - RNA, 23 nt, Human
ucuccaauagggauggcaggggc

SEQ ID NO: 554529 - RNA, 22 nt, Human
ucuccacccaccucacagaaca

SEQ ID NO: 554530 - RNA, 22 nt, Human
ucuccaguccugacccaaaaau

SEQ ID NO: 554531 - RNA, 19 nt, Human
ucuuucaaguuucugacua

SEQ ID NO: 554532 - RNA, 24 nt, Human
uggaagcaggggcuuccgaggagu

SEQ ID NO: 554533 - RNA, 21 nt, Human
uucacaucucuuccagccauc

SEQ ID NO: 554534 - RNA, 24 nt, Human
uucacaucucuuccagccaucuuc

SEQ ID NO: 554535 - RNA, 23 nt, Human
uuugcagaagggcaguucuuccc

SEQ ID NO: 554536 - RNA, 19 nt, Human
aaacaugucacagugcugc

SEQ ID NO: 554537 - RNA, 28 nt, Human
aacucccgagcuccagugauccucccuc

SEQ ID NO: 554538 - RNA, 22 nt, Human
aagaaaauuugcaggcaaauga

SEQ ID NO: 554539 - RNA, 25 nt, Human
aagcuggucuuuuuuuuuuuuuuuu

SEQ ID NO: 554540 - RNA, 20 nt, Human
aagugcugggauuccacagg

SEQ ID NO: 554541 - RNA, 21 nt, Human
aagugcugggauuccacaggu

SEQ ID NO: 554542 - RNA, 22 nt, Human
aagugcugggauuccacaggug

SEQ ID NO: 554543 - RNA, 23 nt, Human
aagugcugggauuccacaggugu

SEQ ID NO: 554544 - RNA, 25 nt, Human
aagugcugggauuccacagguguga

SEQ ID NO: 554545 - RNA, 19 nt, Human
aauaaagggaugggcugaa

SEQ ID NO: 554546 - RNA, 21 nt, Human
acccaagccuccugaguagcu

SEQ ID NO: 554547 - RNA, 24 nt, Human
acuauguugcccaggcuggucuug

SEQ ID NO: 554548 - RNA, 25 nt, Human
acuauguugcccaggcuggucuuga

SEQ ID NO: 554549 - RNA, 18 nt, Human
acugcagccucaaccucc

SEQ ID NO: 554550 - RNA, 23 nt, Human
acugcagccucaaccuccugguc

SEQ ID NO: 554551 - RNA, 21 nt, Human
agccagaguccuggcgggcug

SEQ ID NO: 554552 - RNA, 23 nt, Human
agcggaccucugcucccugccca

SEQ ID NO: 554553 - RNA, 25 nt, Human
agcuggucuuuuuuuuuuuuuuuuu

SEQ ID NO: 554554 - RNA, 19 nt, Human
aggcaauccucccacccaa

SEQ ID NO: 554555 - RNA, 25 nt, Human
aggcaauccucccacccaagccucc

SEQ ID NO: 554556 - RNA, 24 nt, Human
aggcggcagcggcgggcuaagcuu

SEQ ID NO: 554557 - RNA, 21 nt, Human
agggaugggcugaaauaaagg

SEQ ID NO: 554558 - RNA, 19 nt, Human
agggggccccgggaccggc

SEQ ID NO: 554559 - RNA, 23 nt, Human
agggucuugcuuucucacccagg

SEQ ID NO: 554560 - RNA, 23 nt, Human
agguguggagugggaaaucaggg

SEQ ID NO: 554561 - RNA, 18 nt, Human
aguagcugggacuacagg

SEQ ID NO: 554562 - RNA, 19 nt, Human
aguagcugggacuacaggc

SEQ ID NO: 554563 - RNA, 21 nt, Human
auccugguuuagccuuuguuu

SEQ ID NO: 554564 - RNA, 21 nt, Human
augucacagugcugcagagau

SEQ ID NO: 554565 - RNA, 22 nt, Human
auugacagcaagccagugauaa

SEQ ID NO: 554566 - RNA, 22 nt, Human
caaagcuggucuuuuuuuuuuu

SEQ ID NO: 554567 - RNA, 22 nt, Human
caacaccagagauuuccccaaa

SEQ ID NO: 554568 - RNA, 22 nt, Human
caaccuccuggucucaggcaau

SEQ ID NO: 554569 - RNA, 22 nt, Human
cacaggugugagccacugcacc

SEQ ID NO: 554570 - RNA, 20 nt, Human
cacccaagccuccugaguag

SEQ ID NO: 554571 - RNA, 24 nt, Human
cacccaagccuccugaguagcugg

SEQ ID NO: 554572 - RNA, 24 nt, Human
caccucggccuccugaagugcugg

SEQ ID NO: 554573 - RNA, 21 nt, Human
caccugggagcccuacugucc

SEQ ID NO: 554574 - RNA, 19 nt, Human
cacgauggccaccacacug

SEQ ID NO: 554575 - RNA, 19 nt, Human
cacuauguugcccaggcug

SEQ ID NO: 554576 - RNA, 24 nt, Human
cacuauguugcccaggcuggucuu

SEQ ID NO: 554577 - RNA, 27 nt, Human
cacuauguugcccaggcuggucuugaa

SEQ ID NO: 554578 - RNA, 21 nt, Human
cacugcaccuggcugcaaggc

SEQ ID NO: 554579 - RNA, 19 nt, Human
cacugcagccucaaccucc

SEQ ID NO: 554580 - RNA, 23 nt, Human
cagccucaaccuccuggucucag

SEQ ID NO: 554581 - RNA, 18 nt, Human
caguagccagaguccugg

SEQ ID NO: 554582 - RNA, 19 nt, Human
caguagccagaguccuggc

SEQ ID NO: 554583 - RNA, 21 nt, Human
ccacaggugugagccacugca

SEQ ID NO: 554584 - RNA, 28 nt, Human
ccaccacacugaagcagcagcaagcaga

SEQ ID NO: 554585 - RNA, 23 nt, Human
ccacccaagccuccugaguagcu

SEQ ID NO: 554586 - RNA, 19 nt, Human
ccaccgagauccuugcagg

SEQ ID NO: 554587 - RNA, 19 nt, Human
ccacugcaccuggcugcaa

SEQ ID NO: 554588 - RNA, 20 nt, Human
ccacugcaccuggcugcaag

SEQ ID NO: 554589 - RNA, 20 nt, Human
ccacugcaccuggcugcaag

SEQ ID NO: 554590 - RNA, 21 nt, Human
ccacugcaccuggcugcaagg

SEQ ID NO: 554591 - RNA, 22 nt, Human
ccaguagccagaguccuggcgg

SEQ ID NO: 554592 - RNA, 27 nt, Human
ccagugauccucccaccucggccuccu

SEQ ID NO: 554593 - RNA, 22 nt, Human
cccaaaacaugccggcaagucu

SEQ ID NO: 554594 - RNA, 26 nt, Human
cccaacaccagagauuuccccaaaca

SEQ ID NO: 554595 - RNA, 21 nt, Human
cccacauauuuauugacagca

SEQ ID NO: 554596 - RNA, 23 nt, Human
cccacgaucauuacccccaaaac

SEQ ID NO: 554597 - RNA, 26 nt, Human
ccccaaaacaugccggcaagucucug

SEQ ID NO: 554598 - RNA, 23 nt, Human
cccccaaaacaugccggcaaguc

SEQ ID NO: 554599 - RNA, 24 nt, Human
ccucccacccaagccuccugagua

SEQ ID NO: 554600 - RNA, 23 nt, Human
ccugacacuccccuucugggggg

SEQ ID NO: 554601 - RNA, 23 nt, Human
ccugaguagcugggacuacaggc

SEQ ID NO: 554602 - RNA, 23 nt, Human
ccugaguagcugggacuacaggc

SEQ ID NO: 554603 - RNA, 23 nt, Human
ccuuucccacuuuguucugggag

SEQ ID NO: 554604 - RNA, 22 nt, Human
cggcaccaccaugccuggcuaa

SEQ ID NO: 554605 - RNA, 25 nt, Human
cggcggucugggcggucgguccucu

SEQ ID NO: 554606 - RNA, 24 nt, Human
cucacugcagccucaaccuccugg

SEQ ID NO: 554607 - RNA, 24 nt, Human
cucaggcaauccucccacccaagc

SEQ ID NO: 554608 - RNA, 24 nt, Human
cuccagugauccucccaccucggc

SEQ ID NO: 554609 - RNA, 26 nt, Human
cugaagugcugggauuccacaggugu

SEQ ID NO: 554610 - RNA, 20 nt, Human
cugcucccugcccacgauca

SEQ ID NO: 554611 - RNA, 19 nt, Human
cugcucccugcgucggcag

SEQ ID NO: 554612 - RNA, 19 nt, Human
cugggcggucgguccucuc

SEQ ID NO: 554613 - RNA, 22 nt, Human
cuuccugacacuccccuucugg

SEQ ID NO: 554614 - RNA, 22 nt, Human
cuuucccacuuuguucugggag

SEQ ID NO: 554615 - RNA, 22 nt, Human
gaagugcugggauuccacagga

SEQ ID NO: 554616 - RNA, 23 nt, Human
gacuacaggcggcaccaccaugc

SEQ ID NO: 554617 - RNA, 25 nt, Human
gaguagcugggacuacaggcggcac

SEQ ID NO: 554618 - RNA, 18 nt, Human
gccuccugaagugcuggg

SEQ ID NO: 554619 - RNA, 27 nt, Human
gcggcagcggcgggcuaagcuucccuu

SEQ ID NO: 554620 - RNA, 22 nt, Human
gcuaagcuucccuuucccacuu

SEQ ID NO: 554621 - RNA, 21 nt, Human
gcucggaggcggcagcggcgg

SEQ ID NO: 554622 - RNA, 23 nt, Human
gcugaaauaaagggaugggucug

SEQ ID NO: 554623 - RNA, 18 nt, Human
ggagugggaaaucagggg

SEQ ID NO: 554624 - RNA, 22 nt, Human
ggauuccacaggugugagccac

SEQ ID NO: 554625 - RNA, 22 nt, Human
ggauuccacaggugugagccac

SEQ ID NO: 554626 - RNA, 24 nt, Human
ggauuccacaggugugagccacug

SEQ ID NO: 554627 - RNA, 19 nt, Human
ggcaagucucugcucccug

SEQ ID NO: 554628 - RNA, 24 nt, Human
ggcuggucuugaacucccgagcuc

SEQ ID NO: 554629 - RNA, 20 nt, Human
ggucuugaacucccgagcuc

SEQ ID NO: 554630 - RNA, 24 nt, Human
gguguggagugggaaaucaggggu

SEQ ID NO: 554631 - RNA, 21 nt, Human
gguuucacuauguugcccagg

SEQ ID NO: 554632 - RNA, 24 nt, Human
gucuugcuuucucacccaggcugg

SEQ ID NO: 554633 - RNA, 24 nt, Human
gugauccucccaccucggccuccu

SEQ ID NO: 554634 - RNA, 18 nt, Human
gugcugggauuccacagg

SEQ ID NO: 554635 - RNA, 20 nt, Human
guggagacgguuucacuaug

SEQ ID NO: 554636 - RNA, 24 nt, Human
guuucacuauguugcccaggcugg

SEQ ID NO: 554637 - RNA, 18 nt, Human
uaaacccacaaccuucag

SEQ ID NO: 554638 - RNA, 21 nt, Human
uaagcgguuuuccgcccuggg

SEQ ID NO: 554639 - RNA, 24 nt, Human
uagggucuugcuuucucacccagg

SEQ ID NO: 554640 - RNA, 23 nt, Human
uauguugcccaggcuggucuuga

SEQ ID NO: 554641 - RNA, 24 nt, Human
uauguugcccaggcuggucuugaa

SEQ ID NO: 554642 - RNA, 24 nt, Human
ucacacagcacgauggccaccaca

SEQ ID NO: 554643 - RNA, 21 nt, Human
ucacuauguugcccaggcugg

SEQ ID NO: 554644 - RNA, 22 nt, Human
ucacuauguugcccaggcuggu

SEQ ID NO: 554645 - RNA, 19 nt, Human
ucacugcagccucaaccuc

SEQ ID NO: 554646 - RNA, 23 nt, Human
ucacugcagccucaaccuccugg

SEQ ID NO: 554647 - RNA, 24 nt, Human
ucacugcagccucaaccuccuggu

SEQ ID NO: 554648 - RNA, 18 nt, Human
ucagcggaccucugcucc

SEQ ID NO: 554649 - RNA, 26 nt, Human
ucaggaaccccuuuaagcgguuuucc

SEQ ID NO: 554650 - RNA, 23 nt, Human
ucccaacaccagagauuucccca

SEQ ID NO: 554651 - RNA, 21 nt, Human
ucccgagcuccagugauccuc

SEQ ID NO: 554652 - RNA, 20 nt, Human
ucccuggguauccucuggcu

SEQ ID NO: 554653 - RNA, 21 nt, Human
ucccuggguauccucuggcuu

SEQ ID NO: 554654 - RNA, 22 nt, Human
uccucuggcuucuggcugcaaa

SEQ ID NO: 554655 - RNA, 18 nt, Human
uccugaagugcugggauu

SEQ ID NO: 554656 - RNA, 26 nt, Human
uccugaagugcugggauuccacaggu

SEQ ID NO: 554657 - RNA, 24 nt, Human
uccugaguagcugggacuacaggc

SEQ ID NO: 554658 - RNA, 19 nt, Human
uccugguuuagccuuuguu

SEQ ID NO: 554659 - RNA, 22 nt, Human
ucguuccaguaaacccacaacc

SEQ ID NO: 554660 - RNA, 27 nt, Human
ucugcagcaggaacaugucguuaaggc

SEQ ID NO: 554661 - RNA, 21 nt, Human
ucuugaacucccgagcuccag

SEQ ID NO: 554662 - RNA, 19 nt, Human
ucuugcuuucucacccagg

SEQ ID NO: 554663 - RNA, 23 nt, Human
ucuugcuuucucacccaggcugg

SEQ ID NO: 554664 - RNA, 24 nt, Human
ucuugcuuucucacccaggcugga

SEQ ID NO: 554665 - RNA, 23 nt, Human
ugaaaucacggcucacugcagcc

SEQ ID NO: 554666 - RNA, 22 nt, Human
ugaacagagauuuacccacaua

SEQ ID NO: 554667 - RNA, 28 nt, Human
ugaagcagcagcaagcagauucauggaa

SEQ ID NO: 554668 - RNA, 24 nt, Human
ugagagccuugaacagagauuuac

SEQ ID NO: 554669 - RNA, 21 nt, Human
ugcccaggcuggucuugaacu

SEQ ID NO: 554670 - RNA, 19 nt, Human
ugccucagcggaccucugc

SEQ ID NO: 554671 - RNA, 19 nt, Human
uggccaccacacugaagca

SEQ ID NO: 554672 - RNA, 20 nt, Human
uggccagauuugggggccug

SEQ ID NO: 554673 - RNA, 23 nt, Human
uggccaguuuuggggccaguuua

SEQ ID NO: 554674 - RNA, 18 nt, Human
uggcccagggggccccgg

SEQ ID NO: 554675 - RNA, 19 nt, Human
uggcgggcugcucggaggc

SEQ ID NO: 554676 - RNA, 24 nt, Human
uggcuucuggcugcaaagcugguc

SEQ ID NO: 554677 - RNA, 25 nt, Human
uggcuucuggcugcaaagcuggucu

SEQ ID NO: 554678 - RNA, 21 nt, Human
ugggacuacaggcggcaccac

SEQ ID NO: 554679 - RNA, 23 nt, Human
ugggacuacaggcggcaccacca

SEQ ID NO: 554680 - RNA, 20 nt, Human
ugggccagguguuccucgcc

SEQ ID NO: 554681 - RNA, 21 nt, Human
uggucuuuuuuuuuuuuuuuu

SEQ ID NO: 554682 - RNA, 24 nt, Human
uugcuuucucacccaggcuggagu

SEQ ID NO: 554683 - RNA, 22 nt, Human
uuggggccaguuuauggccaga

SEQ ID NO: 554684 - RNA, 22 nt, Human
uuguggagacgguuucacuaug

SEQ ID NO: 554685 - RNA, 25 nt, Human
uuuauugacagcaagccagugauaa

SEQ ID NO: 554686 - RNA, 21 nt, Human
uuuguggagacgguuucacua

SEQ ID NO: 554687 - RNA, 27 nt, Human
uuuuuaaaaauuauuuguggagacggu

SEQ ID NO: 554688 - RNA, 21 nt, Human
uuuuuuuuuuuuuuuuucauu

SEQ ID NO: 554689 - RNA, 24 nt, Human
aaagugcagggauuacagguguga

SEQ ID NO: 554690 - RNA, 24 nt, Human
aaagugcugggauuacaggcauga

SEQ ID NO: 554691 - RNA, 23 nt, Human
aagaggucaguggugcggagggg

SEQ ID NO: 554692 - RNA, 24 nt, Human
aaguagcuuggacuacaggugugu

SEQ ID NO: 554693 - RNA, 19 nt, Human
aagugcugggauuacaggc

SEQ ID NO: 554694 - RNA, 21 nt, Human
aagugcugggauuacaggcau

SEQ ID NO: 554695 - RNA, 26 nt, Human
aagugcugggauuacaggcaugagcc

SEQ ID NO: 554696 - RNA, 19 nt, Human
acauugcccaggcuggucu

SEQ ID NO: 554697 - RNA, 24 nt, Human
accauguuggccaggcuggucuug

SEQ ID NO: 554698 - RNA, 24 nt, Human
acccaggcuggagugcagugguau

SEQ ID NO: 554699 - RNA, 18 nt, Human
accugggcacaaaugauc

SEQ ID NO: 554700 - RNA, 24 nt, Human
acggagucucgcuguguugcccag

SEQ ID NO: 554701 - RNA, 18 nt, Human
acgggguuucaccauguu

SEQ ID NO: 554702 - RNA, 23 nt, Human
acgggguuucaccauguuggcca

SEQ ID NO: 554703 - RNA, 24 nt, Human
acgggguuucaccauguuggccag

SEQ ID NO: 554704 - RNA, 19 nt, Human
acuacagguguguacuacu

SEQ ID NO: 554705 - RNA, 25 nt, Human
acuacauugcccaggcuggucuuga

SEQ ID NO: 554706 - RNA, 19 nt, Human
acuucagccucccaaguag

SEQ ID NO: 554707 - RNA, 19 nt, Human
agaaacaacaggagacaag

SEQ ID NO: 554708 - RNA, 20 nt, Human
agaagagaggggagggcaag

SEQ ID NO: 554709 - RNA, 25 nt, Human
agcugcaugaccuggucccagcccu

SEQ ID NO: 554710 - RNA, 23 nt, Human
aggcaugagccacugugccuggc

SEQ ID NO: 554711 - RNA, 25 nt, Human
aggcuggagugcaguggcaugaucu

SEQ ID NO: 554712 - RNA, 22 nt, Human
agggauuacaggugugagccac

SEQ ID NO: 554713 - RNA, 25 nt, Human
agggauuacaggugugagccacccu

SEQ ID NO: 554714 - RNA, 19 nt, Human
agggcugggacucucugag

SEQ ID NO: 554715 - RNA, 21 nt, Human
aggggaugguacagaggggcc

SEQ ID NO: 554716 - RNA, 24 nt, Human
aggugauccgccugccucagccuc

SEQ ID NO: 554717 - RNA, 18 nt, Human
aguagcuggaauuacagg

SEQ ID NO: 554718 - RNA, 20 nt, Human
agugcaguggcaugaucuug

SEQ ID NO: 554719 - RNA, 23 nt, Human
agugcaguggcaugaucuugguu

SEQ ID NO: 554720 - RNA, 24 nt, Human
agugcaguggcaugaucuugguuc

SEQ ID NO: 554721 - RNA, 20 nt, Human
agugcagugguaugaucaug

SEQ ID NO: 554722 - RNA, 23 nt, Human
agugcagugguaugaucauggcu

SEQ ID NO: 554723 - RNA, 24 nt, Human
agugcagugguaugaucauggcuc

SEQ ID NO: 554724 - RNA, 24 nt, Human
aguggcaugaucuugguucacugc

SEQ ID NO: 554725 - RNA, 23 nt, Human
agugggcagaaccaucuccaaau

SEQ ID NO: 554726 - RNA, 18 nt, Human
aguggugcggaggggagg

SEQ ID NO: 554727 - RNA, 24 nt, Human
caaagugcagggauuacaggugug

SEQ ID NO: 554728 - RNA, 24 nt, Human
caaagugcugggauuacaggcaug

SEQ ID NO: 554729 - RNA, 27 nt, Human
caaaugauccucccacuucagccuccc

SEQ ID NO: 554730 - RNA, 22 nt, Human
caagcaauucuccugccucagc

SEQ ID NO: 554731 - RNA, 19 nt, Human
caaggaagucccuguggca

SEQ ID NO: 554732 - RNA, 24 nt, Human
cacaaaugauccucccacuucagc

SEQ ID NO: 554733 - RNA, 21 nt, Human
caccaagcccggcuaauuuuu

SEQ ID NO: 554734 - RNA, 21 nt, Human
caccauguuggccaggcuggu

SEQ ID NO: 554735 - RNA, 23 nt, Human
caccauguuggccaggcuggucu

SEQ ID NO: 554736 - RNA, 24 nt, Human
caccauguuggccaggcuggucuu

SEQ ID NO: 554737 - RNA, 27 nt, Human
caccauguuggccaggcuggucuugaa

SEQ ID NO: 554738 - RNA, 23 nt, Human
cacugcagccucugccucccggg

SEQ ID NO: 554739 - RNA, 23 nt, Human
cagccucugccucccgggcucaa

SEQ ID NO: 554740 - RNA, 22 nt, Human
caggugauccgccugccucagc

SEQ ID NO: 554741 - RNA, 21 nt, Human
cagugguaugaucauggcuca

SEQ ID NO: 554742 - RNA, 24 nt, Human
cauguuggccaggcuggucuugaa

SEQ ID NO: 554743 - RNA, 22 nt, Human
cauugcccaggcuggucuugaa

SEQ ID NO: 554744 - RNA, 21 nt, Human
ccaaagugcagggauuacagg

SEQ ID NO: 554745 - RNA, 24 nt, Human
ccaaagugcagggauuacaggugu

SEQ ID NO: 554746 - RNA, 23 nt, Human
ccaaagugcugggauuacaggca

SEQ ID NO: 554747 - RNA, 24 nt, Human
ccaaagugcugggauuacaggcau

SEQ ID NO: 554748 - RNA, 18 nt, Human
ccacacaauuacaggucc

SEQ ID NO: 554749 - RNA, 24 nt, Human
ccaggcuggucuugaacucugggg

SEQ ID NO: 554750 - RNA, 24 nt, Human
cccaaagugcugggauuacaggca

SEQ ID NO: 554751 - RNA, 24 nt, Human
cccaaguagcuuggacuacaggug

SEQ ID NO: 554752 - RNA, 20 nt, Human
cccacuucagccucccaagu

SEQ ID NO: 554753 - RNA, 19 nt, Human
cccaggcuggagugcagug

SEQ ID NO: 554754 - RNA, 23 nt, Human
cccaggcuggagugcaguggcau

SEQ ID NO: 554755 - RNA, 23 nt, Human
cccgaguagcuggaauuacaggu

SEQ ID NO: 554756 - RNA, 23 nt, Human
cccgggcucaagcaauucuccug

SEQ ID NO: 554757 - RNA, 26 nt, Human
ccgccugccucagccucccaaagugc

SEQ ID NO: 554758 - RNA, 22 nt, Human
ccggcuguggcccggggccugg

SEQ ID NO: 554759 - RNA, 19 nt, Human
ccucccaaagugcagggau

SEQ ID NO: 554760 - RNA, 20 nt, Human
ccucccaaagugcagggauu

SEQ ID NO: 554761 - RNA, 26 nt, Human
ccucccaccuuggccucccaaagugc

SEQ ID NO: 554762 - RNA, 26 nt, Human
ccucccacuucagccucccaaguagc

SEQ ID NO: 554763 - RNA, 24 nt, Human
ccucccgggcucaagcaauucucc

SEQ ID NO: 554764 - RNA, 18 nt, Human
ccucguuuuuucagagaa

SEQ ID NO: 554765 - RNA, 18 nt, Human
ccugaccucaggugaucc

SEQ ID NO: 554766 - RNA, 21 nt, Human
ccugaccucaggugauccgcc

SEQ ID NO: 554767 - RNA, 23 nt, Human
ccugaccucaggugauccgccug

SEQ ID NO: 554768 - RNA, 23 nt, Human
ccugccucagccucccgaguagc

SEQ ID NO: 554769 - RNA, 24 nt, Human
ccugccucagccucccgaguagcu

SEQ ID NO: 554770 - RNA, 27 nt, Human
ccuggucccagcccuguagccgguucc

SEQ ID NO: 554771 - RNA, 24 nt, Human
ccuguggcagaaacaacaggagac

SEQ ID NO: 554772 - RNA, 24 nt, Human
cgcucugucacccaggcuggagug

SEQ ID NO: 554773 - RNA, 24 nt, Human
cggagucucgcuguguugcccagg

SEQ ID NO: 554774 - RNA, 24 nt, Human
cgggguuucaccauguuggccagg

SEQ ID NO: 554775 - RNA, 24 nt, Human
cucaacugauccucccaccuuggc

SEQ ID NO: 554776 - RNA, 24 nt, Human
cucaagcaauucuccugccucagc

SEQ ID NO: 554777 - RNA, 19 nt, Human
cucacuauagccucaaccu

SEQ ID NO: 554778 - RNA, 23 nt, Human
cucaggugauccgccugccucag

SEQ ID NO: 554779 - RNA, 23 nt, Human
cuccaggaugggcauucccccau

SEQ ID NO: 554780 - RNA, 25 nt, Human
cucccgggcucaagcaauucuccug

SEQ ID NO: 554781 - RNA, 26 nt, Human
cuccugaccucaggugauccgccugc

SEQ ID NO: 554782 - RNA, 24 nt, Human
cucgcucugucacccaggcuggag

SEQ ID NO: 554783 - RNA, 23 nt, Human
cugcagccucugccucccgggcu

SEQ ID NO: 554784 - RNA, 23 nt, Human
cugccucagccucccaaagugcu

SEQ ID NO: 554785 - RNA, 24 nt, Human
cugccucagccucccaaagugcug

SEQ ID NO: 554786 - RNA, 24 nt, Human
cuggagugcaguggcaugaucuug

SEQ ID NO: 554787 - RNA, 21 nt, Human
cuggucccagcccuguagcuc

SEQ ID NO: 554788 - RNA, 20 nt, Human
cuguguugcccaggcuggag

SEQ ID NO: 554789 - RNA, 24 nt, Human
gaauuaccucguuuuuucagagaa

SEQ ID NO: 554790 - RNA, 24 nt, Human
gaccucaggugauccgccugccuc

SEQ ID NO: 554791 - RNA, 21 nt, Human
gacuacagguguguacuacug

SEQ ID NO: 554792 - RNA, 18 nt, Human
gagaaaccagagugggca

SEQ ID NO: 554793 - RNA, 21 nt, Human
gagaagagaggggagggcaag

SEQ ID NO: 554794 - RNA, 24 nt, Human
gagacgggguuucaccauguuggc

SEQ ID NO: 554795 - RNA, 26 nt, Human
gaguagcuggaauuacaggugcacac

SEQ ID NO: 554796 - RNA, 19 nt, Human
gaucauggcucacuauagc

SEQ ID NO: 554797 - RNA, 21 nt, Human
gauccgccugccucagccucc

SEQ ID NO: 554798 - RNA, 18 nt, Human
gauuacaggcaugagcca

SEQ ID NO: 554799 - RNA, 21 nt, Human
gauuacaggcaugagccacug

SEQ ID NO: 554800 - RNA, 24 nt, Human
gauuacaggcaugagccacugugc

SEQ ID NO: 554801 - RNA, 18 nt, Human
gauuacaggugugagcca

SEQ ID NO: 554802 - RNA, 20 nt, Human
gauuacaggugugagccacc

SEQ ID NO: 554803 - RNA, 24 nt, Human
gauuacaggugugagccacccugc

SEQ ID NO: 554804 - RNA, 19 nt, Human
gcacaccaccaagcccggc

SEQ ID NO: 554805 - RNA, 23 nt, Human
gcagaaacaacaggagacaagag

SEQ ID NO: 554806 - RNA, 18 nt, Human
gccaggcccggcuguggc

SEQ ID NO: 554807 - RNA, 24 nt, Human
gcccaaacuuuuuuuuuuuaacgu

SEQ ID NO: 554808 - RNA, 20 nt, Human
gcccaggcuggagugcagug

SEQ ID NO: 554809 - RNA, 25 nt, Human
gcucugucacccaggcuggagugca

SEQ ID NO: 554810 - RNA, 19 nt, Human
gcuggagugcaguggcaug

SEQ ID NO: 554811 - RNA, 23 nt, Human
gcuggucuugaacuccugaccuc

SEQ ID NO: 554812 - RNA, 20 nt, Human
ggacccaggaauucucagua

SEQ ID NO: 554813 - RNA, 25 nt, Human
ggaggugagguucacacccuuaggg

SEQ ID NO: 554814 - RNA, 24 nt, Human
ggauuacaggcaugagccacugug

SEQ ID NO: 554815 - RNA, 21 nt, Human
ggcaagaauucuucuccagga

SEQ ID NO: 554816 - RNA, 19 nt, Human
ggccuggcggcgcuccucg

SEQ ID NO: 554817 - RNA, 24 nt, Human
ggcuggucuugaacuccugaccuc

SEQ ID NO: 554818 - RNA, 18 nt, Human
gggauuacaggugugagc

SEQ ID NO: 554819 - RNA, 20 nt, Human
gggauuacaggugugagcca

SEQ ID NO: 554820 - RNA, 24 nt, Human
gggggucuuacuacauugcccagg

SEQ ID NO: 554821 - RNA, 23 nt, Human
gggguuucaccauguuggccagg

SEQ ID NO: 554822 - RNA, 20 nt, Human
gguccuugaggaucaggguu

SEQ ID NO: 554823 - RNA, 19 nt, Human
ggucuugaacuccugaccu

SEQ ID NO: 554824 - RNA, 23 nt, Human
guagagacgggguuucaccaugu

SEQ ID NO: 554825 - RNA, 18 nt, Human
gugauccgccugccucag

SEQ ID NO: 554826 - RNA, 24 nt, Human
gugauccgccugccucagccuccc

SEQ ID NO: 554827 - RNA, 21 nt, Human
guguugcccaggcuggagugc

SEQ ID NO: 554828 - RNA, 24 nt, Human
uaauuuuuuggauuuuuaguagag

SEQ ID NO: 554829 - RNA, 25 nt, Human
uaauuuuuuggauuuuuaguagaga

SEQ ID NO: 554830 - RNA, 22 nt, Human
uacaggcaugagccacugugcc

SEQ ID NO: 554831 - RNA, 18 nt, Human
uacaggugugagccaccc

SEQ ID NO: 554832 - RNA, 19 nt, Human
uacaggugugagccacccu

SEQ ID NO: 554833 - RNA, 22 nt, Human
uacaggugugagccacccugcc

SEQ ID NO: 554834 - RNA, 20 nt, Human
uacauugcccaggcuggucu

SEQ ID NO: 554835 - RNA, 24 nt, Human
uacauugcccaggcuggucuugaa

SEQ ID NO: 554836 - RNA, 21 nt, Human
uaccacacaauuacagguccu

SEQ ID NO: 554837 - RNA, 27 nt, Human
uacuacauugcccaggcuggucuugaa

SEQ ID NO: 554838 - RNA, 22 nt, Human
uagagacgggguuucaccaugu

SEQ ID NO: 554839 - RNA, 24 nt, Human
uagauaagauggaagaagcuucuu

SEQ ID NO: 554840 - RNA, 27 nt, Human
uagccucaaccugggcacaaaugaucc

SEQ ID NO: 554841 - RNA, 24 nt, Human
uaguagagacgggguuucaccaug

SEQ ID NO: 554842 - RNA, 26 nt, Human
uaguagagacgggguuucaccauguu

SEQ ID NO: 554843 - RNA, 22 nt, Human
uauuuuuuguagcgaugggggu

SEQ ID NO: 554844 - RNA, 25 nt, Human
ucaacugauccucccaccuuggccu

SEQ ID NO: 554845 - RNA, 24 nt, Human
ucacccaggcuggagugcaguggu

SEQ ID NO: 554846 - RNA, 21 nt, Human
ucacuauagccucaaccuggg

SEQ ID NO: 554847 - RNA, 19 nt, Human
ucacugcagccucugccuc

SEQ ID NO: 554848 - RNA, 20 nt, Human
ucacugcagccucugccucc

SEQ ID NO: 554849 - RNA, 23 nt, Human
ucacugcagccucugccucccgg

SEQ ID NO: 554850 - RNA, 24 nt, Human
ucacugcagccucugccucccggg

SEQ ID NO: 554851 - RNA, 25 nt, Human
ucacugcagccucugccucccgggc

SEQ ID NO: 554852 - RNA, 24 nt, Human
ucagagaaaccagagugggcagaa

SEQ ID NO: 554853 - RNA, 19 nt, Human
ucagccucccaaguagcuu

SEQ ID NO: 554854 - RNA, 21 nt, Human
ucagccucccaaguagcuugg

SEQ ID NO: 554855 - RNA, 22 nt, Human
ucagccucccgaguagcuggaa

SEQ ID NO: 554856 - RNA, 22 nt, Human
ucaggugauccgccugccucag

SEQ ID NO: 554857 - RNA, 23 nt, Human
uccaaacuuuuucuuuuugagac

SEQ ID NO: 554858 - RNA, 23 nt, Human
ucccaaagugcagggauuacagg

SEQ ID NO: 554859 - RNA, 24 nt, Human
ucccaaagugcugggauuacaggc

SEQ ID NO: 554860 - RNA, 24 nt, Human
ucccaaguagcuuggacuacaggu

SEQ ID NO: 554861 - RNA, 22 nt, Human
ucccaggcccuggaaggcacag

SEQ ID NO: 554862 - RNA, 23 nt, Human
ucccgaguagcuggaauuacagg

SEQ ID NO: 554863 - RNA, 24 nt, Human
ucccgaguagcuggaauuacaggu

SEQ ID NO: 554864 - RNA, 21 nt, Human
ucccgggcucaagcaauucuc

SEQ ID NO: 554865 - RNA, 24 nt, Human
ucccgggcucaagcaauucuccug

SEQ ID NO: 554866 - RNA, 19 nt, Human
ucccugaagggaccaagga

SEQ ID NO: 554867 - RNA, 21 nt, Human
ucgccgggaugcccuagcugu

SEQ ID NO: 554868 - RNA, 23 nt, Human
ucgccgggaugcccuagcugugc

SEQ ID NO: 554869 - RNA, 24 nt, Human
ucgcucugucacccaggcuggagu

SEQ ID NO: 554870 - RNA, 24 nt, Human
ucgcuguguugcccaggcuggagu

SEQ ID NO: 554871 - RNA, 21 nt, Human
ucuagaaccugaagacagggc

SEQ ID NO: 554872 - RNA, 24 nt, Human
ucuccugccucagccucccgagua

SEQ ID NO: 554873 - RNA, 19 nt, Human
ucucgcucugucacccagg

SEQ ID NO: 554874 - RNA, 23 nt, Human
ucucgcucugucacccaggcugg

SEQ ID NO: 554875 - RNA, 24 nt, Human
ucucgcucugucacccaggcugga

SEQ ID NO: 554876 - RNA, 26 nt, Human
ucucgcucugucacccaggcuggagu

SEQ ID NO: 554877 - RNA, 27 nt, Human
ucucgcucugucacccaggcuggagug

SEQ ID NO: 554878 - RNA, 23 nt, Human
ucucgcuguguugcccaggcugg

SEQ ID NO: 554879 - RNA, 24 nt, Human
ucucgcuguguugcccaggcugga

SEQ ID NO: 554880 - RNA, 24 nt, Human
ucugucacccaggcuggagugcag

SEQ ID NO: 554881 - RNA, 23 nt, Human
ucuuacuacauugcccaggcugg

SEQ ID NO: 554882 - RNA, 23 nt, Human
ucuugaacuccugaccucaggug

SEQ ID NO: 554883 - RNA, 18 nt, Human
ugaccucaggugauccgc

SEQ ID NO: 554884 - RNA, 24 nt, Human
ugaccucaggugauccgccugccu

SEQ ID NO: 554885 - RNA, 22 nt, Human
ugaccuggucccagcccuguag

SEQ ID NO: 554886 - RNA, 22 nt, Human
ugagacagggucucgcucuguc

SEQ ID NO: 554887 - RNA, 21 nt, Human
ugagggcuucccugaagggac

SEQ ID NO: 554888 - RNA, 23 nt, Human
ugauuggcagauacaugcugcug

SEQ ID NO: 554889 - RNA, 18 nt, Human
ugcccaggcuggagugca

SEQ ID NO: 554890 - RNA, 22 nt, Human
ugcccaggcuggagugcagugg

SEQ ID NO: 554891 - RNA, 24 nt, Human
ugcccaggcuggagugcaguggca

SEQ ID NO: 554892 - RNA, 23 nt, Human
ugcccaggcuggucuugaacucu

SEQ ID NO: 554893 - RNA, 24 nt, Human
ugccucagccucccaaagugcugg

SEQ ID NO: 554894 - RNA, 24 nt, Human
ugccucagccucccgaguagcugg

SEQ ID NO: 554895 - RNA, 22 nt, Human
ugccucccgggcucaagcaauu

SEQ ID NO: 554896 - RNA, 19 nt, Human
ugcggaggggaggggaugg

SEQ ID NO: 554897 - RNA, 21 nt, Human
uggaagaagcuucuucuggua

SEQ ID NO: 554898 - RNA, 24 nt, Human
uggaauuacaggugcacaccacca

SEQ ID NO: 554899 - RNA, 18 nt, Human
uggacuacagguguguac

SEQ ID NO: 554900 - RNA, 19 nt, Human
uggagugcaguggcaugau

SEQ ID NO: 554901 - RNA, 24 nt, Human
uggagugcaguggcaugaucuugg

SEQ ID NO: 554902 - RNA, 19 nt, Human
uggagugcagugguaugau

SEQ ID NO: 554903 - RNA, 21 nt, Human
uggagugcagugguaugauca

SEQ ID NO: 554904 - RNA, 24 nt, Human
uggagugcagugguaugaucaugg

SEQ ID NO: 554905 - RNA, 19 nt, Human
uggcaugaucuugguucac

SEQ ID NO: 554906 - RNA, 21 nt, Human
uggcaugaucuugguucacug

SEQ ID NO: 554907 - RNA, 24 nt, Human
uggccaggcuggucuugaacuccu

SEQ ID NO: 554908 - RNA, 18 nt, Human
uggcccggggccuggcgg

SEQ ID NO: 554909 - RNA, 18 nt, Human
ugggauuacaggcaugag

SEQ ID NO: 554910 - RNA, 21 nt, Human
ugggauuacaggcaugagcca

SEQ ID NO: 554911 - RNA, 22 nt, Human
ugggauuacaggcaugagccac

SEQ ID NO: 554912 - RNA, 22 nt, Human
ugggauuacaggcaugagccac

SEQ ID NO: 554913 - RNA, 22 nt, Human
ugggauuacaggcaugagccac

SEQ ID NO: 554914 - RNA, 23 nt, Human
ugggauuacaggcaugagccacu

SEQ ID NO: 554915 - RNA, 24 nt, Human
ugggauuacaggcaugagccacug

SEQ ID NO: 554916 - RNA, 18 nt, Human
uggggcucaacugauccu

SEQ ID NO: 554917 - RNA, 18 nt, Human
uggggcuggaucggaggg

SEQ ID NO: 554918 - RNA, 24 nt, Human
ugguaugaucauggcucacuauag

SEQ ID NO: 554919 - RNA, 23 nt, Human
uggugcggaggggaggggauggu

SEQ ID NO: 554920 - RNA, 18 nt, Human
uguguugcccaggcugga

SEQ ID NO: 554921 - RNA, 24 nt, Human
uguguugcccaggcuggagugcag

SEQ ID NO: 554922 - RNA, 18 nt, Human
uuaguagagacgggguuu

SEQ ID NO: 554923 - RNA, 22 nt, Human
uuaguagagacgggguuucacc

SEQ ID NO: 554924 - RNA, 24 nt, Human
uuaguagagacgggguuucaccau

SEQ ID NO: 554925 - RNA, 24 nt, Human
uucuuuuuuuuuuuugagacaggg

SEQ ID NO: 554926 - RNA, 22 nt, Human
uugagacagggucucgcucugu

SEQ ID NO: 554927 - RNA, 24 nt, Human
uuucaccauguuggccaggcuggu

SEQ ID NO: 554928 - RNA, 24 nt, Human
uuuuuaguagagacgggguuucac

SEQ ID NO: 554929 - RNA, 21 nt, Human
uuuuuggauuuuuaguagaga

SEQ ID NO: 554930 - RNA, 24 nt, Human
uuuuuuggauuuuuaguagagacg

SEQ ID NO: 554931 - RNA, 24 nt, Human
uuuuuuuuuugagacagggucucg

SEQ ID NO: 554932 - RNA, 20 nt, Human
uuuuuuuuuuugagacaggg

SEQ ID NO: 554933 - RNA, 23 nt, Human
uuuuuuuuuuuugagacaggguc

SEQ ID NO: 554934 - RNA, 25 nt, Human
uuuuuuuuuuuugagacagggucuc

SEQ ID NO: 554935 - RNA, 26 nt, Human
accccaaguaaauacagggaaaagga

SEQ ID NO: 554936 - RNA, 22 nt, Human
agacggccugcagggcuggagc

SEQ ID NO: 554937 - RNA, 20 nt, Human
agcugaggccaggguggcca

SEQ ID NO: 554938 - RNA, 22 nt, Human
agugcaggggucagggagaugc

SEQ ID NO: 554939 - RNA, 21 nt, Human
caccccaaguaaauacaggga

SEQ ID NO: 554940 - RNA, 18 nt, Human
ccaaguaaauacagggaa

SEQ ID NO: 554941 - RNA, 20 nt, Human
ccaccugugaagaggugccu

SEQ ID NO: 554942 - RNA, 21 nt, Human
ccucggaggaaaagagguaag

SEQ ID NO: 554943 - RNA, 19 nt, Human
ccugcagggcuggagcugg

SEQ ID NO: 554944 - RNA, 22 nt, Human
ccugcagggcuggagcugggag

SEQ ID NO: 554945 - RNA, 23 nt, Human
ccugcagggcuggagcugggagg

SEQ ID NO: 554946 - RNA, 21 nt, Human
ccuuggaggccaggaacaagc

SEQ ID NO: 554947 - RNA, 22 nt, Human
gagcccuggcacacgccagcuu

SEQ ID NO: 554948 - RNA, 20 nt, Human
gaggaaaagagguaaggggc

SEQ ID NO: 554949 - RNA, 19 nt, Human
gaguuggcagcacguggga

SEQ ID NO: 554950 - RNA, 20 nt, Human
gcugcuuucuuccccuaaau

SEQ ID NO: 554951 - RNA, 20 nt, Human
gggaaggaggcuauguuuga

SEQ ID NO: 554952 - RNA, 24 nt, Human
gggagggcggacacacagaagcug

SEQ ID NO: 554953 - RNA, 22 nt, Human
gggcggagagcgacagggcgau

SEQ ID NO: 554954 - RNA, 23 nt, Human
gucacagaagagcaccccaagua

SEQ ID NO: 554955 - RNA, 19 nt, Human
uacuggaaggugguggugg

SEQ ID NO: 554956 - RNA, 22 nt, Human
ugaagaaaaaguacagcucuac

SEQ ID NO: 554957 - RNA, 21 nt, Human
ugaggccaggguggccagcug

SEQ ID NO: 554958 - RNA, 22 nt, Human
ugaggccaggguggccagcugg

SEQ ID NO: 554959 - RNA, 22 nt, Human
ugagggagcugaggccagggug

SEQ ID NO: 554960 - RNA, 18 nt, Human
ugcugucaggcauggcac

SEQ ID NO: 554961 - RNA, 23 nt, Human
ugcuuucuuccccuaaauguuua

SEQ ID NO: 554962 - RNA, 18 nt, Human
uggaagguggugguggca

SEQ ID NO: 554963 - RNA, 27 nt, Human
uggaagguggugguggcaagugucaca

SEQ ID NO: 554964 - RNA, 21 nt, Human
uggagcugggagggcggacac

SEQ ID NO: 554965 - RNA, 23 nt, Human
ugggcugcuuucuuccccuaaau

SEQ ID NO: 554966 - RNA, 25 nt, Human
uucccauuuuucuccuugcucccaa

SEQ ID NO: 554967 - RNA, 22 nt, Human
uuugaguuggcagcacguggga

SEQ ID NO: 554968 - RNA, 22 nt, Human
aaaaaaaauccaaguuucagga

SEQ ID NO: 554969 - RNA, 25 nt, Human
aaaaacacaaagcaaacccaaacaa

SEQ ID NO: 554970 - RNA, 26 nt, Human
aaaaucucuaggguucucuggaacac

SEQ ID NO: 554971 - RNA, 23 nt, Human
aaacacaaagcaaacccaaacaa

SEQ ID NO: 554972 - RNA, 21 nt, Human
aaacagaagcaguauuuacaa

SEQ ID NO: 554973 - RNA, 24 nt, Human
aacaaauucacaugacccccaaga

SEQ ID NO: 554974 - RNA, 24 nt, Human
aacauacuuaauccuaacauaaaa

SEQ ID NO: 554975 - RNA, 25 nt, Human
aagaaguuguuuucccagucuuaaa

SEQ ID NO: 554976 - RNA, 22 nt, Human
aaggagaaacaaaacagaagca

SEQ ID NO: 554977 - RNA, 21 nt, Human
auagaacccagggccugaaac

SEQ ID NO: 554978 - RNA, 25 nt, Human
caaaaacacaaagcaaacccaaaca

SEQ ID NO: 554979 - RNA, 19 nt, Human
caaaaacacuguaagaagu

SEQ ID NO: 554980 - RNA, 19 nt, Human
cacaaagcaaacccaaaca

SEQ ID NO: 554981 - RNA, 21 nt, Human
cacugaacagugaaaaacaag

SEQ ID NO: 554982 - RNA, 27 nt, Human
cagggccugaaacaauauuucaugcua

SEQ ID NO: 554983 - RNA, 19 nt, Human
caguguuaacccuacaaag

SEQ ID NO: 554984 - RNA, 23 nt, Human
caguucccucuccauuucuagau

SEQ ID NO: 554985 - RNA, 26 nt, Human
caugacccccaagauacuuucucaaa

SEQ ID NO: 554986 - RNA, 21 nt, Human
cucauaaucuacauuuaggcc

SEQ ID NO: 554987 - RNA, 20 nt, Human
cuccuggaagagaaaaaaaa

SEQ ID NO: 554988 - RNA, 22 nt, Human
cugcaagaagucuuuucacaga

SEQ ID NO: 554989 - RNA, 20 nt, Human
cuuuaaauuaaauccaagga

SEQ ID NO: 554990 - RNA, 20 nt, Human
gaacccagggccugaaacaa

SEQ ID NO: 554991 - RNA, 25 nt, Human
gcagagaacaauuuaguuauuuaca

SEQ ID NO: 554992 - RNA, 23 nt, Human
gccacugaacagugaaaaacaaa

SEQ ID NO: 554993 - RNA, 20 nt, Human
gguuagagacuauggagccc

SEQ ID NO: 554994 - RNA, 22 nt, Human
uaaaacagcagaaauucucugg

SEQ ID NO: 554995 - RNA, 20 nt, Human
uaaaggagaaacaaaacaga

SEQ ID NO: 554996 - RNA, 19 nt, Human
uagaacccagggccugaaa

SEQ ID NO: 554997 - RNA, 26 nt, Human
uauauaauuacaaaaaaaauccaagu

SEQ ID NO: 554998 - RNA, 21 nt, Human
ucaacaaauucacaugacccc

SEQ ID NO: 554999 - RNA, 24 nt, Human
ucaggaaaacauacuuaauccuaa

SEQ ID NO: 555000 - RNA, 23 nt, Human
ucucugguuagagacuauggagc

SEQ ID NO: 555001 - RNA, 18 nt, Human
ugaaaaacaaguugaauc

SEQ ID NO: 555002 - RNA, 22 nt, Human
ugaaaaacaaguugaaucuuua

SEQ ID NO: 555003 - RNA, 25 nt, Human
ugaaucuuuaaaacagcagaaauuc

SEQ ID NO: 555004 - RNA, 22 nt, Human
uguaagaaguuguuuucccagu

SEQ ID NO: 555005 - RNA, 22 nt, Human
uguauaaaggagaaacaaaaca

SEQ ID NO: 555006 - RNA, 28 nt, Human
uguccauuucucucaacaaauucacaug

SEQ ID NO: 555007 - RNA, 20 nt, Human
ugucuaaggacaaaccacua

SEQ ID NO: 555008 - RNA, 18 nt, Human
ugugaguacaaaauauua

SEQ ID NO: 555009 - RNA, 18 nt, Human
uuaaaacagcagaaauuc

SEQ ID NO: 555010 - RNA, 26 nt, Human
uuaauccuaacauaaaauucauguca

SEQ ID NO: 555011 - RNA, 27 nt, Human
uucacagaaugagucacauaguuucuc

SEQ ID NO: 555012 - RNA, 18 nt, Human
uucccagucuuaaagcug

SEQ ID NO: 555013 - RNA, 18 nt, Human
uugacauuaaauuggaag

SEQ ID NO: 555014 - RNA, 23 nt, Human
uugccuggcuuaucugcaguguu

SEQ ID NO: 555015 - RNA, 26 nt, Human
uuuaaacuacaugagauguugugaac

SEQ ID NO: 555016 - RNA, 22 nt, Human
uuuuuuuuuuuuuuuuuccuuu

SEQ ID NO: 555017 - RNA, 22 nt, Human
aaaaaagagaacagcaaaaugu

SEQ ID NO: 555018 - RNA, 24 nt, Human
aaaaaagagaacagcaaaaugugu

SEQ ID NO: 555019 - RNA, 25 nt, Human
aaaaaagagaacagcaaaaugugua

SEQ ID NO: 555020 - RNA, 24 nt, Human
aaaaacaaugaauuuuaaaaagca

SEQ ID NO: 555021 - RNA, 21 nt, Human
aaagaugcaauucuuacuuuc

SEQ ID NO: 555022 - RNA, 20 nt, Human
aaauauauaauaccaggagc

SEQ ID NO: 555023 - RNA, 21 nt, Human
aacaaaaaagaaagcugcaca

SEQ ID NO: 555024 - RNA, 18 nt, Human
aacaaauaaauuggucag

SEQ ID NO: 555025 - RNA, 19 nt, Human
aacugcauuaccaaacuuu

SEQ ID NO: 555026 - RNA, 21 nt, Human
aacuguacuaaggacuucauc

SEQ ID NO: 555027 - RNA, 23 nt, Human
aagaaccaaaauaugcacaccac

SEQ ID NO: 555028 - RNA, 22 nt, Human
aagcaaaaauuuaagaaccaaa

SEQ ID NO: 555029 - RNA, 18 nt, Human
aaggacuucauccaacca

SEQ ID NO: 555030 - RNA, 21 nt, Human
aaggacuucauccaaccaaaa

SEQ ID NO: 555031 - RNA, 19 nt, Human
aaguuaaugcuugugcuau

SEQ ID NO: 555032 - RNA, 20 nt, Human
acacauucuucagcaaaacu

SEQ ID NO: 555033 - RNA, 18 nt, Human
acaccacugaaaauacua

SEQ ID NO: 555034 - RNA, 22 nt, Human
acaguugaaaaagaaauuuuaa

SEQ ID NO: 555035 - RNA, 20 nt, Human
acugugccauuaggcaaagc

SEQ ID NO: 555036 - RNA, 21 nt, Human
agaaaacaacaaauaaauugg

SEQ ID NO: 555037 - RNA, 23 nt, Human
agaacagcaaaauguguaaaaga

SEQ ID NO: 555038 - RNA, 19 nt, Human
agucuuuaaugcucuguuu

SEQ ID NO: 555039 - RNA, 23 nt, Human
caaaacaaaucuuaagcuucaga

SEQ ID NO: 555040 - RNA, 26 nt, Human
caaaacaauugauuagucuuuaaugc

SEQ ID NO: 555041 - RNA, 19 nt, Human
caaaucuuaagcuucagaa

SEQ ID NO: 555042 - RNA, 20 nt, Human
caacccacagaaaacaacaa

SEQ ID NO: 555043 - RNA, 19 nt, Human
caccauuucagacuaccaa

SEQ ID NO: 555044 - RNA, 22 nt, Human
cagcaaaacuuuaaaaggcaga

SEQ ID NO: 555045 - RNA, 23 nt, Human
cagcaaguuccaaaaauuucaca

SEQ ID NO: 555046 - RNA, 21 nt, Human
caggauuuuuuuaguuuaaga

SEQ ID NO: 555047 - RNA, 20 nt, Human
cagggacaaauguaggaaga

SEQ ID NO: 555048 - RNA, 22 nt, Human
cauuucagacuaccaaaugcua

SEQ ID NO: 555049 - RNA, 23 nt, Human
cauuucagacuaccaaaugcuaa

SEQ ID NO: 555050 - RNA, 18 nt, Human
ccacagacacauucuuca

SEQ ID NO: 555051 - RNA, 22 nt, Human
ccuguccagcaaguuccaaaaa

SEQ ID NO: 555052 - RNA, 22 nt, Human
cugcacauggucacucugugug

SEQ ID NO: 555053 - RNA, 20 nt, Human
cuuacuuucuugguggugaa

SEQ ID NO: 555054 - RNA, 22 nt, Human
cuuuucuguuguuuuuuccaca

SEQ ID NO: 555055 - RNA, 19 nt, Human
gacuggugaggcaaaacaa

SEQ ID NO: 555056 - RNA, 21 nt, Human
gagcaguuucaaauuaaauua

SEQ ID NO: 555057 - RNA, 18 nt, Human
gcacuaaaagacaaaaac

SEQ ID NO: 555058 - RNA, 23 nt, Human
gcuugcuuuuuguuuguuuuugc

SEQ ID NO: 555059 - RNA, 20 nt, Human
guccagcaaguuccaaaaau

SEQ ID NO: 555060 - RNA, 20 nt, Human
guggcaucuaacaaaaaaga

SEQ ID NO: 555061 - RNA, 25 nt, Human
uaaaagaaauauaagguggaaaaau

SEQ ID NO: 555062 - RNA, 23 nt, Human
uaaaaugacuggugaggcaaaac

SEQ ID NO: 555063 - RNA, 20 nt, Human
uaacaaaaaagagaacagca

SEQ ID NO: 555064 - RNA, 19 nt, Human
uaacaaguaaucugucacc

SEQ ID NO: 555065 - RNA, 24 nt, Human
uaagaagcaaaaauuuaagaacca

SEQ ID NO: 555066 - RNA, 25 nt, Human
uaaguauauauucccaccuuugcaa

SEQ ID NO: 555067 - RNA, 19 nt, Human
uauccuaaccacagacaca

SEQ ID NO: 555068 - RNA, 22 nt, Human
uaugcacaccacugaaaauacu

SEQ ID NO: 555069 - RNA, 27 nt, Human
ucaaaggcaaacauuuaauagucaagc

SEQ ID NO: 555070 - RNA, 20 nt, Human
ucagcaaaacuuuaaaaggc

SEQ ID NO: 555071 - RNA, 21 nt, Human
ucagcaaaacuuuaaaaggca

SEQ ID NO: 555072 - RNA, 18 nt, Human
ucagggacaaauguagga

SEQ ID NO: 555073 - RNA, 22 nt, Human
ucucagggacaaauguaggaag

SEQ ID NO: 555074 - RNA, 21 nt, Human
ugauugucauuuuacaaagau

SEQ ID NO: 555075 - RNA, 19 nt, Human
uggcauaacaauaacaaaa

SEQ ID NO: 555076 - RNA, 26 nt, Human
uggcauaacaauaacaaaaaagagaa

SEQ ID NO: 555077 - RNA, 24 nt, Human
uguccagcaaguuccaaaaauuuc

SEQ ID NO: 555078 - RNA, 18 nt, Human
uuaaugcucuguuuuuca

SEQ ID NO: 555079 - RNA, 20 nt, Human
uuauaugaaaaaccuaugcu

SEQ ID NO: 555080 - RNA, 22 nt, Human
uucagaacucucuaaugcuuaa

SEQ ID NO: 555081 - RNA, 21 nt, Human
uucuugguggugaagccuaug

SEQ ID NO: 555082 - RNA, 22 nt, Human
uucuugguggugaagccuaugg

SEQ ID NO: 555083 - RNA, 18 nt, Human
uugguggugaagccuaug

SEQ ID NO: 555084 - RNA, 23 nt, Human
uuuaaaacauuagauaacuagca

SEQ ID NO: 555085 - RNA, 20 nt, Human
uuuaagcacugagaaauaag

SEQ ID NO: 555086 - RNA, 18 nt, Human
uuucuugguggugaagcc

SEQ ID NO: 555087 - RNA, 24 nt, Human
uuucuugguggugaagccuauggg

SEQ ID NO: 555088 - RNA, 22 nt, Human
uuuuccacagaaauagagacug

SEQ ID NO: 555089 - RNA, 19 nt, Human
uuuuguuuguuuuugcuuu

SEQ ID NO: 555090 - RNA, 23 nt, Human
uuuuguuuguuuuugcuuugucc

SEQ ID NO: 555091 - RNA, 21 nt, Human
uuuuucaacuguacuaaggac

SEQ ID NO: 555092 - RNA, 19 nt, Human
aacggcgcggggcacccug

SEQ ID NO: 555093 - RNA, 20 nt, Human
aacugcauuucuccccucca

SEQ ID NO: 555094 - RNA, 18 nt, Human
acaaaugaaguguccaaa

SEQ ID NO: 555095 - RNA, 19 nt, Human
acccugcgggguggcgggc

SEQ ID NO: 555096 - RNA, 21 nt, Human
agacggauggggagacggggc

SEQ ID NO: 555097 - RNA, 25 nt, Human
cauuucuccccuccaauguccucuc

SEQ ID NO: 555098 - RNA, 24 nt, Human
ccaauguccucuccaugacuuauc

SEQ ID NO: 555099 - RNA, 22 nt, Human
cccgcgacgggggcggcggggc

SEQ ID NO: 555100 - RNA, 23 nt, Human
cgggaacggcgcggggcacccug

SEQ ID NO: 555101 - RNA, 18 nt, Human
cugcauuucuccccucca

SEQ ID NO: 555102 - RNA, 27 nt, Human
cugcauuucuccccuccaauguccucu

SEQ ID NO: 555103 - RNA, 21 nt, Human
ggauggggagacggggccggc

SEQ ID NO: 555104 - RNA, 19 nt, Human
gggggcggcggggcggcgg

SEQ ID NO: 555105 - RNA, 24 nt, Human
gguggcgggcgcggagaggaucuc

SEQ ID NO: 555106 - RNA, 28 nt, Human
uccaaaugccauauucccagcucuccag

SEQ ID NO: 555107 - RNA, 22 nt, Human
ugaaguguugucgugugcuggg

SEQ ID NO: 555108 - RNA, 24 nt, Human
ugccacccggggcggaugcucggg

SEQ ID NO: 555109 - RNA, 18 nt, Human
ugccauauucccagcucu

SEQ ID NO: 555110 - RNA, 23 nt, Human
uggggagacggggccggccuggu

SEQ ID NO: 555111 - RNA, 18 nt, Human
uucuagugagaaguucac

SEQ ID NO: 555112 - RNA, 18 nt, Human
aaacagaugcccaaaucu

SEQ ID NO: 555113 - RNA, 23 nt, Human
aacagaaaguaauugcaacugcu

SEQ ID NO: 555114 - RNA, 25 nt, Human
aacuaaucuacuuaacacccuacca

SEQ ID NO: 555115 - RNA, 18 nt, Human
aagcagacaaaaugucag

SEQ ID NO: 555116 - RNA, 19 nt, Human
aagccagaagcagacaaaa

SEQ ID NO: 555117 - RNA, 26 nt, Human
acuuaacacccuaccaucacaucucu

SEQ ID NO: 555118 - RNA, 19 nt, Human
agacagaaaauauaaaaau

SEQ ID NO: 555119 - RNA, 27 nt, Human
agacagaaaauauaaaaauuaccaaaa

SEQ ID NO: 555120 - RNA, 24 nt, Human
agauuauuugaauaaagccagaag

SEQ ID NO: 555121 - RNA, 23 nt, Human
agccacgcuagcgcgucagccuc

SEQ ID NO: 555122 - RNA, 23 nt, Human
auagcccuguaauaacagaaagu

SEQ ID NO: 555123 - RNA, 18 nt, Human
augcagaagcauaaagca

SEQ ID NO: 555124 - RNA, 27 nt, Human
cacaacccaaaucuaggaauaaaaucc

SEQ ID NO: 555125 - RNA, 18 nt, Human
cacacaacccaaaucuag

SEQ ID NO: 555126 - RNA, 21 nt, Human
cagaaaguaauugcaacugcu

SEQ ID NO: 555127 - RNA, 19 nt, Human
cagaagcauaaagcaaaaa

SEQ ID NO: 555128 - RNA, 21 nt, Human
cagaugcccaaaucugauuca

SEQ ID NO: 555129 - RNA, 20 nt, Human
caguucccaagaucugaaaa

SEQ ID NO: 555130 - RNA, 23 nt, Human
cccaaaucuaggaauaaaaucca

SEQ ID NO: 555131 - RNA, 22 nt, Human
cuuagagccacgcuagcgcguc

SEQ ID NO: 555132 - RNA, 19 nt, Human
gaaagccuaucugcaaaaa

SEQ ID NO: 555133 - RNA, 19 nt, Human
gaagcauaaagcaaaaaaa

SEQ ID NO: 555134 - RNA, 20 nt, Human
gacaaggugggcugacugag

SEQ ID NO: 555135 - RNA, 23 nt, Human
gcaggacaaggugggcugacuga

SEQ ID NO: 555136 - RNA, 19 nt, Human
uaaaaaacacagcaguuau

SEQ ID NO: 555137 - RNA, 24 nt, Human
uaacagaaaguaauugcaacugcu

SEQ ID NO: 555138 - RNA, 23 nt, Human
uaauacacacaaaagugugagaa

SEQ ID NO: 555139 - RNA, 22 nt, Human
uaauaguaagggucagaaaauc

SEQ ID NO: 555140 - RNA, 23 nt, Human
uacacacaaaagugugagaacac

SEQ ID NO: 555141 - RNA, 26 nt, Human
uauaaaaaacacagcaguuauagcug

SEQ ID NO: 555142 - RNA, 19 nt, Human
ucaaaaagaugcagaagca

SEQ ID NO: 555143 - RNA, 21 nt, Human
ucaugccuaacagaucacagg

SEQ ID NO: 555144 - RNA, 23 nt, Human
ucuuuucuuguaauugauuuaug

SEQ ID NO: 555145 - RNA, 19 nt, Human
ugagcaaauauucacauca

SEQ ID NO: 555146 - RNA, 19 nt, Human
ugauaaaauaagccaucaa

SEQ ID NO: 555147 - RNA, 21 nt, Human
uggaaaaaacagaugcccaaa

SEQ ID NO: 555148 - RNA, 26 nt, Human
uggaaaaaacagaugcccaaaucuga

SEQ ID NO: 555149 - RNA, 19 nt, Human
ugggaaagauauuauaaua

SEQ ID NO: 555150 - RNA, 27 nt, Human
uuaacacccuaccaucacaucucuuua

SEQ ID NO: 555151 - RNA, 24 nt, Human
uuuccagaauuuaauauuuuuaaa

SEQ ID NO: 555152 - RNA, 23 nt, Human
uuugauuucacacaaaaauagca

SEQ ID NO: 555153 - RNA, 24 nt, Human
uuuuuuuuuuuuuguuuuuuccag

SEQ ID NO: 555154 - RNA, 24 nt, Human
uuuuuuuuuuuuuuuugcuucuaa

SEQ ID NO: 555155 - RNA, 18 nt, Human
uuuuuuuuuuuuuuuuug

SEQ ID NO: 555156 - RNA, 21 nt, Human
uuuuuuuuuuuuuuuuugcuu

SEQ ID NO: 555157 - RNA, 23 nt, Human
uuuuuuuuuuuuuuuuuguuuuu

SEQ ID NO: 555158 - RNA, 20 nt, Human
uuuuuuuuuuuuuuuuuugg

SEQ ID NO: 555159 - RNA, 18 nt, Human
aacagauggaaaaccaga

SEQ ID NO: 555160 - RNA, 23 nt, Human
aaccugccugcuucacagaccug

SEQ ID NO: 555161 - RNA, 20 nt, Human
acauauaaaaaauacagaaa

SEQ ID NO: 555162 - RNA, 18 nt, Human
agaaauaaggaaaacaag

SEQ ID NO: 555163 - RNA, 18 nt, Human
cagauggaaaaccagaca

SEQ ID NO: 555164 - RNA, 22 nt, Human
cagcugagcaaccugccugcuu

SEQ ID NO: 555165 - RNA, 24 nt, Human
cuaacagauggaaaaccagacaua

SEQ ID NO: 555166 - RNA, 19 nt, Human
gaaaaaaagcuuuagaaag

SEQ ID NO: 555167 - RNA, 19 nt, Human
ggaaaaccagacauauuua

SEQ ID NO: 555168 - RNA, 23 nt, Human
ggaaauacacacaaugaaaaaaa

SEQ ID NO: 555169 - RNA, 24 nt, Human
gggaaauacacacaaugaaaaaaa

SEQ ID NO: 555170 - RNA, 22 nt, Human
uaaaaugucugaaaugcuaaca

SEQ ID NO: 555171 - RNA, 18 nt, Human
uaagaggaacauaaaaug

SEQ ID NO: 555172 - RNA, 24 nt, Human
uacaaaaauauuaaaacagauuuc

SEQ ID NO: 555173 - RNA, 24 nt, Human
uacuacaccgauuucaacauaaaa

SEQ ID NO: 555174 - RNA, 21 nt, Human
uauguacauacaagagacaua

SEQ ID NO: 555175 - RNA, 24 nt, Human
ucaguaacaauugauuuaauaaga

SEQ ID NO: 555176 - RNA, 25 nt, Human
uccgggggcagcugagcaaccugcc

SEQ ID NO: 555177 - RNA, 21 nt, Human
ugucugaaaugcuaacagaug

SEQ ID NO: 555178 - RNA, 18 nt, Human
uucagaaauaaggaaaac

SEQ ID NO: 555179 - RNA, 20 nt, Human
uugcauggguuuccuuuacc

SEQ ID NO: 555180 - RNA, 21 nt, Human
uuuuuuuuuuuuuuuuuuaag

SEQ ID NO: 555181 - RNA, 24 nt, Human
aaagugcugggauuacaggcguga

SEQ ID NO: 555182 - RNA, 19 nt, Human
aagugcugggauuacaggc

SEQ ID NO: 555183 - RNA, 19 nt, Human
aagugcugggauuacaggc

SEQ ID NO: 555184 - RNA, 26 nt, Human
aagugcugggauuacaggcgugagcc

SEQ ID NO: 555185 - RNA, 23 nt, Human
acaaaacgucagagcuaugugac

SEQ ID NO: 555186 - RNA, 23 nt, Human
acaggcgcccgccaccacgcccg

SEQ ID NO: 555187 - RNA, 18 nt, Human
acaggguuucaccguguu

SEQ ID NO: 555188 - RNA, 23 nt, Human
acaggguuucaccguguuggcca

SEQ ID NO: 555189 - RNA, 24 nt, Human
acaggguuucaccguguuggccag

SEQ ID NO: 555190 - RNA, 24 nt, Human
acccaggcuggagugcaguggcgu

SEQ ID NO: 555191 - RNA, 19 nt, Human
acugcaagcucugccuucc

SEQ ID NO: 555192 - RNA, 18 nt, Human
agacaggguuucaccgug

SEQ ID NO: 555193 - RNA, 19 nt, Human
agagacaggguuucaccgu

SEQ ID NO: 555194 - RNA, 23 nt, Human
aggcgugagccacagugcccggc

SEQ ID NO: 555195 - RNA, 25 nt, Human
aggcuggagugcaguggcgugaucu

SEQ ID NO: 555196 - RNA, 20 nt, Human
aguagagacaggguuucacc

SEQ ID NO: 555197 - RNA, 18 nt, Human
aguagcugggacuacagg

SEQ ID NO: 555198 - RNA, 19 nt, Human
aguagcugggacuacaggc

SEQ ID NO: 555199 - RNA, 19 nt, Human
agugcaguggcgugaucuc

SEQ ID NO: 555200 - RNA, 20 nt, Human
agugcaguggcgugaucucg

SEQ ID NO: 555201 - RNA, 23 nt, Human
agugcaguggcgugaucucggcu

SEQ ID NO: 555202 - RNA, 24 nt, Human
agugcaguggcgugaucucggcuc

SEQ ID NO: 555203 - RNA, 18 nt, Human
agugcugggauuacaggc

SEQ ID NO: 555204 - RNA, 24 nt, Human
augcucagcuccugccuuccucgg

SEQ ID NO: 555205 - RNA, 24 nt, Human
caaagugcugggauuacaggcgug

SEQ ID NO: 555206 - RNA, 21 nt, Human
cacagugcccggccugaaaac

SEQ ID NO: 555207 - RNA, 24 nt, Human
cacccaggcuggagugcaguggcg

SEQ ID NO: 555208 - RNA, 19 nt, Human
caccccaugcucagcuccu

SEQ ID NO: 555209 - RNA, 21 nt, Human
caccccaugcucagcuccugc

SEQ ID NO: 555210 - RNA, 18 nt, Human
caccguguuggccaggau

SEQ ID NO: 555211 - RNA, 21 nt, Human
caccguguuggccaggauggu

SEQ ID NO: 555212 - RNA, 24 nt, Human
caccguguuggccaggauggucuc

SEQ ID NO: 555213 - RNA, 23 nt, Human
caccugccucggucucccaaagu

SEQ ID NO: 555214 - RNA, 23 nt, Human
cacugcaagcucugccuuccggg

SEQ ID NO: 555215 - RNA, 22 nt, Human
caggauggucucugucuccuga

SEQ ID NO: 555216 - RNA, 21 nt, Human
caggcgcccgccaccacgccc

SEQ ID NO: 555217 - RNA, 24 nt, Human
caggguuucaccguguuggccagg

SEQ ID NO: 555218 - RNA, 22 nt, Human
ccaaagugcugggauuacaggc

SEQ ID NO: 555219 - RNA, 22 nt, Human
ccaaagugcugggauuacaggc

SEQ ID NO: 555220 - RNA, 24 nt, Human
ccaaagugcugggauuacaggcgu

SEQ ID NO: 555221 - RNA, 22 nt, Human
ccacaccugcacccgccucccc

SEQ ID NO: 555222 - RNA, 23 nt, Human
cccgaguagcugggacuacaggc

SEQ ID NO: 555223 - RNA, 24 nt, Human
cccgaguagcugggacuacaggcg

SEQ ID NO: 555224 - RNA, 22 nt, Human
ccggguucacgccauucuucug

SEQ ID NO: 555225 - RNA, 21 nt, Human
ccuccaggcggcgggcggcuc

SEQ ID NO: 555226 - RNA, 19 nt, Human
ccugaccucgugauccacc

SEQ ID NO: 555227 - RNA, 21 nt, Human
ccugaccucgugauccaccug

SEQ ID NO: 555228 - RNA, 22 nt, Human
ccugcacccgccuccuacgcaa

SEQ ID NO: 555229 - RNA, 22 nt, Human
ccuuccggguucacgccauucu

SEQ ID NO: 555230 - RNA, 24 nt, Human
cgcucugucacccaggcuggagug

SEQ ID NO: 555231 - RNA, 20 nt, Human
cuacgcagggccgaagcucc

SEQ ID NO: 555232 - RNA, 24 nt, Human
cucacugcaagcucugccuuccgg

SEQ ID NO: 555233 - RNA, 18 nt, Human
cuccaggcggcgggcggc

SEQ ID NO: 555234 - RNA, 24 nt, Human
cuccugaccucgugauccaccugc

SEQ ID NO: 555235 - RNA, 24 nt, Human
cucgcucugucacccaggcuggag

SEQ ID NO: 555236 - RNA, 22 nt, Human
cugcacccgccuccuacgcagg

SEQ ID NO: 555237 - RNA, 23 nt, Human
cugcaucagccucccgaguagcu

SEQ ID NO: 555238 - RNA, 23 nt, Human
cugccucggucucccaaagugcu

SEQ ID NO: 555239 - RNA, 24 nt, Human
cugccucggucucccaaagugcug

SEQ ID NO: 555240 - RNA, 19 nt, Human
gaaccucuggcugacccag

SEQ ID NO: 555241 - RNA, 22 nt, Human
gaccucgugauccaccugccuc

SEQ ID NO: 555242 - RNA, 22 nt, Human
gaccucgugauccaccugccuc

SEQ ID NO: 555243 - RNA, 24 nt, Human
gaccucgugauccaccugccucgg

SEQ ID NO: 555244 - RNA, 25 nt, Human
gaguagcugggacuacaggcgcccg

SEQ ID NO: 555245 - RNA, 20 nt, Human
gaucccccgggcccgggccc

SEQ ID NO: 555246 - RNA, 18 nt, Human
gauuacaggcgugagcca

SEQ ID NO: 555247 - RNA, 19 nt, Human
gauuacaggcgugagccac

SEQ ID NO: 555248 - RNA, 19 nt, Human
gauuacaggcgugagccac

SEQ ID NO: 555249 - RNA, 20 nt, Human
gcaucagccucccgaguagc

SEQ ID NO: 555250 - RNA, 23 nt, Human
gcccggcuaauuuuuuguauuuu

SEQ ID NO: 555251 - RNA, 24 nt, Human
gccucggucucccaaagugcuggg

SEQ ID NO: 555252 - RNA, 20 nt, Human
gccugggaucccccgggccc

SEQ ID NO: 555253 - RNA, 25 nt, Human
gcucugucacccaggcuggagugca

SEQ ID NO: 555254 - RNA, 24 nt, Human
ggauggucucugucuccugaccuc

SEQ ID NO: 555255 - RNA, 22 nt, Human
ggcuggagugcaguggcgugau

SEQ ID NO: 555256 - RNA, 22 nt, Human
gggaucccccgggcccgggccc

SEQ ID NO: 555257 - RNA, 21 nt, Human
gggcggcucagcacccacacc

SEQ ID NO: 555258 - RNA, 22 nt, Human
ggguuucaccguguuggccagg

SEQ ID NO: 555259 - RNA, 24 nt, Human
gugauccaccugccucggucuccc

SEQ ID NO: 555260 - RNA, 21 nt, Human
gugaucucggcucacugcaag

SEQ ID NO: 555261 - RNA, 21 nt, Human
uaaguuaccacaagcugguag

SEQ ID NO: 555262 - RNA, 24 nt, Human
uaauuuuuuguauuuuuaguagag

SEQ ID NO: 555263 - RNA, 25 nt, Human
uaauuuuuuguauuuuuaguagaga

SEQ ID NO: 555264 - RNA, 23 nt, Human
uacaggcgcccgccaccacgccc

SEQ ID NO: 555265 - RNA, 23 nt, Human
uacaggcgugagccacagugccc

SEQ ID NO: 555266 - RNA, 22 nt, Human
uagagacaggguuucaccgugu

SEQ ID NO: 555267 - RNA, 21 nt, Human
uaguagagacaggguuucacc

SEQ ID NO: 555268 - RNA, 24 nt, Human
uaguagagacaggguuucaccgug

SEQ ID NO: 555269 - RNA, 26 nt, Human
uaguagagacaggguuucaccguguu

SEQ ID NO: 555270 - RNA, 24 nt, Human
ucacccaggcuggagugcaguggc

SEQ ID NO: 555271 - RNA, 24 nt, Human
ucaccguguuggccaggauggucu

SEQ ID NO: 555272 - RNA, 18 nt, Human
ucacugcaagcucugccu

SEQ ID NO: 555273 - RNA, 24 nt, Human
ucacugcaagcucugccuuccggg

SEQ ID NO: 555274 - RNA, 23 nt, Human
ucagagcuaugugacaguaaguu

SEQ ID NO: 555275 - RNA, 23 nt, Human
ucagccucccgaguagcugggac

SEQ ID NO: 555276 - RNA, 24 nt, Human
ucccaaagugcugggauuacaggc

SEQ ID NO: 555277 - RNA, 24 nt, Human
ucccgaguagcugggacuacaggc

SEQ ID NO: 555278 - RNA, 22 nt, Human
uccugaagcugucucccccucc

SEQ ID NO: 555279 - RNA, 24 nt, Human
ucgcucugucacccaggcuggagu

SEQ ID NO: 555280 - RNA, 19 nt, Human
ucucgcucugucacccagg

SEQ ID NO: 555281 - RNA, 23 nt, Human
ucucgcucugucacccaggcugg

SEQ ID NO: 555282 - RNA, 24 nt, Human
ucucgcucugucacccaggcugga

SEQ ID NO: 555283 - RNA, 26 nt, Human
ucucgcucugucacccaggcuggagu

SEQ ID NO: 555284 - RNA, 27 nt, Human
ucucgcucugucacccaggcuggagug

SEQ ID NO: 555285 - RNA, 24 nt, Human
ucugucacccaggcuggagugcag

SEQ ID NO: 555286 - RNA, 22 nt, Human
ugaagcugucucccccuccagg

SEQ ID NO: 555287 - RNA, 23 nt, Human
ugacccagacacaggauggacag

SEQ ID NO: 555288 - RNA, 23 nt, Human
ugaccucgugauccaccugccuc

SEQ ID NO: 555289 - RNA, 22 nt, Human
ugcaguggcgugaucucggcuc

SEQ ID NO: 555290 - RNA, 24 nt, Human
ugcaucagccucccgaguagcugg

SEQ ID NO: 555291 - RNA, 19 nt, Human
ugccuuccggguucacgcc

SEQ ID NO: 555292 - RNA, 25 nt, Human
ugcugggauuacaggcgugagccac

SEQ ID NO: 555293 - RNA, 19 nt, Human
uggagugcaguggcgugau

SEQ ID NO: 555294 - RNA, 23 nt, Human
uggagugcaguggcgugaucucg

SEQ ID NO: 555295 - RNA, 24 nt, Human
uggagugcaguggcgugaucucgg

SEQ ID NO: 555296 - RNA, 24 nt, Human
uggccaggauggucucugucuccu

SEQ ID NO: 555297 - RNA, 20 nt, Human
uggcgugaucucggcucacu

SEQ ID NO: 555298 - RNA, 21 nt, Human
ugggacuacaggcgcccgcca

SEQ ID NO: 555299 - RNA, 22 nt, Human
ugggacuacaggcgcccgccac

SEQ ID NO: 555300 - RNA, 24 nt, Human
ugggacuacaggcgcccgccacca

SEQ ID NO: 555301 - RNA, 18 nt, Human
ugggauuacaggcgugag

SEQ ID NO: 555302 - RNA, 19 nt, Human
ugggauuacaggcgugagc

SEQ ID NO: 555303 - RNA, 21 nt, Human
ugggauuacaggcgugagcca

SEQ ID NO: 555304 - RNA, 22 nt, Human
ugggauuacaggcgugagccac

SEQ ID NO: 555305 - RNA, 22 nt, Human
ugggauuacaggcgugagccac

SEQ ID NO: 555306 - RNA, 22 nt, Human
ugggauuacaggcgugagccac

SEQ ID NO: 555307 - RNA, 23 nt, Human
ugggauuacaggcgugagccaca

SEQ ID NO: 555308 - RNA, 26 nt, Human
ugggauuacaggcgugagccacagug

SEQ ID NO: 555309 - RNA, 27 nt, Human
ugggauuacaggcgugagccacagugc

SEQ ID NO: 555310 - RNA, 22 nt, Human
uuaguagagacaggguuucacc

SEQ ID NO: 555311 - RNA, 24 nt, Human
uuaguagagacaggguuucaccgu

SEQ ID NO: 555312 - RNA, 19 nt, Human
uuucaccguguuggccagg

SEQ ID NO: 555313 - RNA, 22 nt, Human
uuuuguauuuuuaguagagaca

SEQ ID NO: 555314 - RNA, 24 nt, Human
uuuuuaguagagacaggguuucac

SEQ ID NO: 555315 - RNA, 21 nt, Human
uuuuuguauuuuuaguagaga

SEQ ID NO: 555316 - RNA, 19 nt, Human
uuuuuuuuuuuuacugaaa

SEQ ID NO: 555317 - RNA, 23 nt, Human
uuuuuuuuuuuuuuuuuuacuga

SEQ ID NO: 555318 - RNA, 24 nt, Human
aaacagcacuacgacccucagaac

SEQ ID NO: 555319 - RNA, 27 nt, Human
aaacagcacuacgacccucagaacuca

SEQ ID NO: 555320 - RNA, 20 nt, Human
aacugaaguccuagcaauug

SEQ ID NO: 555321 - RNA, 19 nt, Human
acaaaauuaggaaaaauuc

SEQ ID NO: 555322 - RNA, 19 nt, Human
acugaaguccuagcaauug

SEQ ID NO: 555323 - RNA, 18 nt, Human
agaaacagcacuacgacc

SEQ ID NO: 555324 - RNA, 21 nt, Human
agaaacagcacuacgacccuc

SEQ ID NO: 555325 - RNA, 21 nt, Human
agacaauaguuucagaucaga

SEQ ID NO: 555326 - RNA, 20 nt, Human
aucccaauuuugacguuucc

SEQ ID NO: 555327 - RNA, 21 nt, Human
cauggagaagcugauucaaac

SEQ ID NO: 555328 - RNA, 19 nt, Human
cucagccgggaacuggugc

SEQ ID NO: 555329 - RNA, 18 nt, Human
cugaaguaaaaacugaag

SEQ ID NO: 555330 - RNA, 25 nt, Human
cugaaguaaaaacugaaguccuagc

SEQ ID NO: 555331 - RNA, 23 nt, Human
cugagcgaccugcgaucuccacc

SEQ ID NO: 555332 - RNA, 20 nt, Human
cugggcggggacuuuuagcc

SEQ ID NO: 555333 - RNA, 23 nt, Human
cuuaccgagacuugauuaaccca

SEQ ID NO: 555334 - RNA, 24 nt, Human
cuuaccgagacuugauuaacccag

SEQ ID NO: 555335 - RNA, 18 nt, Human
gaaacagcacuacgaccc

SEQ ID NO: 555336 - RNA, 18 nt, Human
gaccgcgaugagaauacc

SEQ ID NO: 555337 - RNA, 18 nt, Human
gagacuugauuaacccag

SEQ ID NO: 555338 - RNA, 19 nt, Human
guuaacagcuguguuagac

SEQ ID NO: 555339 - RNA, 22 nt, Human
uaaacaaaauuaggaaaaauuc

SEQ ID NO: 555340 - RNA, 18 nt, Human
uaacagcuguguuagaca

SEQ ID NO: 555341 - RNA, 21 nt, Human
uaacugccaguuuugcauagu

SEQ ID NO: 555342 - RNA, 24 nt, Human
uaauauaguaacaaaucaacacuc

SEQ ID NO: 555343 - RNA, 22 nt, Human
uacuuguccacaccgguagagg

SEQ ID NO: 555344 - RNA, 21 nt, Human
ucagaucuaacuuuuacgaag

SEQ ID NO: 555345 - RNA, 19 nt, Human
ucaggguaccuccagcugc

SEQ ID NO: 555346 - RNA, 18 nt, Human
uccaccgccgccgcgacg

SEQ ID NO: 555347 - RNA, 19 nt, Human
uccuuggguagcuuuaguc

SEQ ID NO: 555348 - RNA, 21 nt, Human
ucuaaugcacaaauacaccau

SEQ ID NO: 555349 - RNA, 21 nt, Human
ugagaauaccagaaacagcac

SEQ ID NO: 555350 - RNA, 19 nt, Human
ugcccaggccauggagaag

SEQ ID NO: 555351 - RNA, 26 nt, Human
uggaaauggauaaaguuuuucaggca

SEQ ID NO: 555352 - RNA, 19 nt, Human
uggcaaaagaaaaaaaggu

SEQ ID NO: 555353 - RNA, 22 nt, Human
uggcucagccgggaacuggugc

SEQ ID NO: 555354 - RNA, 25 nt, Human
uguacacauuacaugguauuuguau

SEQ ID NO: 555355 - RNA, 26 nt, Human
uguacacauuacaugguauuuguaua

SEQ ID NO: 555356 - RNA, 21 nt, Human
uuagacaguggcucugcuuug

SEQ ID NO: 555357 - RNA, 20 nt, Human
uuuaaaauaaaaaaucaaau

SEQ ID NO: 555358 - RNA, 21 nt, Human
uuuaaaggacuuaccgagacu

SEQ ID NO: 555359 - RNA, 22 nt, Human
uuuuuuuuuuuuuuuuaccaga

SEQ ID NO: 555360 - RNA, 25 nt, Human
uuuuuuuuuuuuuuuuuuuuaccag

SEQ ID NO: 555361 - RNA, 25 nt, Human
aaacaacaaaaccaaaucugaauca

SEQ ID NO: 555362 - RNA, 26 nt, Human
aaacagugaaauuucucaacagucac

SEQ ID NO: 555363 - RNA, 24 nt, Human
aaaguauugggauuauagguguga

SEQ ID NO: 555364 - RNA, 24 nt, Human
aaagugcugggauuauaggcauga

SEQ ID NO: 555365 - RNA, 26 nt, Human
aaauagcugggacuacaggugcaugc

SEQ ID NO: 555366 - RNA, 20 nt, Human
aagaacuccaacaauuuaaa

SEQ ID NO: 555367 - RNA, 24 nt, Human
aagcaauccuccugccuuggccuc

SEQ ID NO: 555368 - RNA, 25 nt, Human
aagcaauccuccugccuuggccucc

SEQ ID NO: 555369 - RNA, 18 nt, Human
aaguauugggauuauagg

SEQ ID NO: 555370 - RNA, 19 nt, Human
aagugcugggauuauaggc

SEQ ID NO: 555371 - RNA, 21 nt, Human
aagugcugggauuauaggcau

SEQ ID NO: 555372 - RNA, 21 nt, Human
aaguucaaacauccacugagc

SEQ ID NO: 555373 - RNA, 22 nt, Human
aaguucaaacauccacugagcu

SEQ ID NO: 555374 - RNA, 19 nt, Human
acaaaaccaaaucugaauc

SEQ ID NO: 555375 - RNA, 20 nt, Human
acaacaaaaccaaaucugaa

SEQ ID NO: 555376 - RNA, 21 nt, Human
acacacacacgcacacacaca

SEQ ID NO: 555377 - RNA, 25 nt, Human
acacacacgcacacacacacauuua

SEQ ID NO: 555378 - RNA, 24 nt, Human
acaguuuuccuagguggcuggugc

SEQ ID NO: 555379 - RNA, 20 nt, Human
accacaccuggccaacucuc

SEQ ID NO: 555380 - RNA, 24 nt, Human
accaguugcccucugcaaucuaca

SEQ ID NO: 555381 - RNA, 22 nt, Human
acccagcuagaggcaaugauuc

SEQ ID NO: 555382 - RNA, 19 nt, Human
acgguguuuugccauguug

SEQ ID NO: 555383 - RNA, 24 nt, Human
acgguguuuugccauguugcccag

SEQ ID NO: 555384 - RNA, 19 nt, Human
acuacaggugcaugccacc

SEQ ID NO: 555385 - RNA, 18 nt, Human
acuguguugcucaggcug

SEQ ID NO: 555386 - RNA, 21 nt, Human
agagaugaggucuugcuaugu

SEQ ID NO: 555387 - RNA, 24 nt, Human
agagcuccauuuuguucuucuucu

SEQ ID NO: 555388 - RNA, 19 nt, Human
agccgaggcgggggauugu

SEQ ID NO: 555389 - RNA, 22 nt, Human
agccgcccugagaagcaucgaa

SEQ ID NO: 555390 - RNA, 21 nt, Human
aggacuguuacugggcagggg

SEQ ID NO: 555391 - RNA, 24 nt, Human
aggcaauucuccugccccagccuc

SEQ ID NO: 555392 - RNA, 19 nt, Human
aggcaugagccaccacgcc

SEQ ID NO: 555393 - RNA, 23 nt, Human
aggggugcuggguguccgggugu

SEQ ID NO: 555394 - RNA, 23 nt, Human
agggucucacuguguugcucagg

SEQ ID NO: 555395 - RNA, 24 nt, Human
aggugaucugccugucuuagccuc

SEQ ID NO: 555396 - RNA, 19 nt, Human
aggugugagucaccacacc

SEQ ID NO: 555397 - RNA, 23 nt, Human
aggugugagucaccacaccuggc

SEQ ID NO: 555398 - RNA, 19 nt, Human
auaaagaccaaugaugaaa

SEQ ID NO: 555399 - RNA, 18 nt, Human
auaauuucaaacaaaucc

SEQ ID NO: 555400 - RNA, 19 nt, Human
auauauauauauauauaua

SEQ ID NO: 555401 - RNA, 19 nt, Human
auauauauauauauauaua

SEQ ID NO: 555402 - RNA, 19 nt, Human
auauauauauauauauaua

SEQ ID NO: 555403 - RNA, 19 nt, Human
auauauauauauauauaua

SEQ ID NO: 555404 - RNA, 19 nt, Human
auauauauauauauauaua

SEQ ID NO: 555405 - RNA, 19 nt, Human
auauauauauauauauaua

SEQ ID NO: 555406 - RNA, 19 nt, Human
auauauauauauauauaua

SEQ ID NO: 555407 - RNA, 19 nt, Human
auauauauauauauauaua

SEQ ID NO: 555408 - RNA, 19 nt, Human
auauauauauauauauaua

SEQ ID NO: 555409 - RNA, 19 nt, Human
auauauauauauauauaua

SEQ ID NO: 555410 - RNA, 19 nt, Human
auauauauauauauauaua

SEQ ID NO: 555411 - RNA, 19 nt, Human
auauauauauauauauaua

SEQ ID NO: 555412 - RNA, 19 nt, Human
auauauauauauauauaua

SEQ ID NO: 555413 - RNA, 19 nt, Human
auauauauauauauauaua

SEQ ID NO: 555414 - RNA, 19 nt, Human
auauauauauauauauaua

SEQ ID NO: 555415 - RNA, 19 nt, Human
auauauauauauauauaua

SEQ ID NO: 555416 - RNA, 19 nt, Human
auauauauauauauauaua

SEQ ID NO: 555417 - RNA, 19 nt, Human
auauauauauauauauaua

SEQ ID NO: 555418 - RNA, 19 nt, Human
auauauauauauauauaua

SEQ ID NO: 555419 - RNA, 19 nt, Human
auauauauauauauauaua

SEQ ID NO: 555420 - RNA, 19 nt, Human
auauauauauauauauaua

SEQ ID NO: 555421 - RNA, 19 nt, Human
auauauauauauauauaua

SEQ ID NO: 555422 - RNA, 19 nt, Human
auauauauauauauauaua

SEQ ID NO: 555423 - RNA, 19 nt, Human
auauauauauauauauaua

SEQ ID NO: 555424 - RNA, 19 nt, Human
auauauauauauauauaua

SEQ ID NO: 555425 - RNA, 18 nt, Human
auguuguccaggcugguc

SEQ ID NO: 555426 - RNA, 21 nt, Human
auuccauauauauauauauau

SEQ ID NO: 555427 - RNA, 26 nt, Human
auuccugggcuuaagcuauucuccug

SEQ ID NO: 555428 - RNA, 24 nt, Human
auuuuuuuuuuuuuuuuuuuuggg

SEQ ID NO: 555429 - RNA, 22 nt, Human
caaaacaccccaggaaucaacu

SEQ ID NO: 555430 - RNA, 24 nt, Human
caaaguauugggauuauaggugug

SEQ ID NO: 555431 - RNA, 24 nt, Human
caaagugcugggauuauaggcaug

SEQ ID NO: 555432 - RNA, 20 nt, Human
caaauuccugggcuuaagcu

SEQ ID NO: 555433 - RNA, 22 nt, Human
caagcaauccuccugccuuggc

SEQ ID NO: 555434 - RNA, 27 nt, Human
caagcaauccuccugccuuggccuccc

SEQ ID NO: 555435 - RNA, 27 nt, Human
caagcaauccuccugccuuggccuccc

SEQ ID NO: 555436 - RNA, 20 nt, Human
caccacacccagcuagaggc

SEQ ID NO: 555437 - RNA, 22 nt, Human
caccaguugcccucugcaaucu

SEQ ID NO: 555438 - RNA, 20 nt, Human
caccuggccaacucucuucc

SEQ ID NO: 555439 - RNA, 26 nt, Human
cacgcacacacacacauuuauaacuu

SEQ ID NO: 555440 - RNA, 21 nt, Human
cagaagacgacuuaugugaca

SEQ ID NO: 555441 - RNA, 23 nt, Human
cagacacaaacucugaaauuaaa

SEQ ID NO: 555442 - RNA, 18 nt, Human
cagcaggacuuucauuuu

SEQ ID NO: 555443 - RNA, 23 nt, Human
cagcccuacuggagaccccggac

SEQ ID NO: 555444 - RNA, 21 nt, Human
cauacaguuuuccuagguggc

SEQ ID NO: 555445 - RNA, 20 nt, Human
cauauauauauauauauaua

SEQ ID NO: 555446 - RNA, 19 nt, Human
caugccaccacacccagcu

SEQ ID NO: 555447 - RNA, 23 nt, Human
cauguugcccaggcuggucuugg

SEQ ID NO: 555448 - RNA, 23 nt, Human
cauguugcccaggcuggucuugg

SEQ ID NO: 555449 - RNA, 24 nt, Human
cauguugcccaggcuggucuugga

SEQ ID NO: 555450 - RNA, 21 nt, Human
ccaaaguauugggauuauagg

SEQ ID NO: 555451 - RNA, 24 nt, Human
ccaaaguauugggauuauaggugu

SEQ ID NO: 555452 - RNA, 24 nt, Human
ccaaagugcugggauuauaggcau

SEQ ID NO: 555453 - RNA, 23 nt, Human
ccacacccagcuagaggcagugg

SEQ ID NO: 555454 - RNA, 19 nt, Human
ccauccaaauauauuuucu

SEQ ID NO: 555455 - RNA, 19 nt, Human
ccauguugcccaggcuggu

SEQ ID NO: 555456 - RNA, 21 nt, Human
ccauguugcccaggcuggucu

SEQ ID NO: 555457 - RNA, 21 nt, Human
ccauguugcccaggcuggucu

SEQ ID NO: 555458 - RNA, 24 nt, Human
cccaaauagcugggacuacaggug

SEQ ID NO: 555459 - RNA, 22 nt, Human
cccaaguagcugcgacuauagg

SEQ ID NO: 555460 - RNA, 18 nt, Human
cccaugcuggacucaaac

SEQ ID NO: 555461 - RNA, 21 nt, Human
cccaugcuggacucaaacucc

SEQ ID NO: 555462 - RNA, 21 nt, Human
cccgcgccaggaaugcaggaa

SEQ ID NO: 555463 - RNA, 19 nt, Human
cccggacgccgccgcggag

SEQ ID NO: 555464 - RNA, 22 nt, Human
cccugagaagcaucgaacugga

SEQ ID NO: 555465 - RNA, 19 nt, Human
ccgccccccggaggagggg

SEQ ID NO: 555466 - RNA, 21 nt, Human
ccgccgcggagcugcccccuc

SEQ ID NO: 555467 - RNA, 22 nt, Human
ccggcguacggcagccaucuuc

SEQ ID NO: 555468 - RNA, 27 nt, Human
ccuauuuuuuuuuuuuuuaauuuuuag

SEQ ID NO: 555469 - RNA, 19 nt, Human
ccuccugccuuggccuccc

SEQ ID NO: 555470 - RNA, 25 nt, Human
ccucuugcugcucugcaaggucgau

SEQ ID NO: 555471 - RNA, 18 nt, Human
ccugaccucaagcaaucc

SEQ ID NO: 555472 - RNA, 18 nt, Human
ccugagcucaggugaucu

SEQ ID NO: 555473 - RNA, 21 nt, Human
ccugagcucaggugaucugcc

SEQ ID NO: 555474 - RNA, 23 nt, Human
ccugccccagccucccaaguagc

SEQ ID NO: 555475 - RNA, 22 nt, Human
ccugucuuagccucccaaagug

SEQ ID NO: 555476 - RNA, 23 nt, Human
ccuguuacuuuaaaaaggccauc

SEQ ID NO: 555477 - RNA, 22 nt, Human
cggcaauaacugcgggcccggc

SEQ ID NO: 555478 - RNA, 24 nt, Human
cgguguuuugccauguugcccagg

SEQ ID NO: 555479 - RNA, 20 nt, Human
cuacuggagaccccggacgc

SEQ ID NO: 555480 - RNA, 24 nt, Human
cucaagcaauccuccugccuuggc

SEQ ID NO: 555481 - RNA, 21 nt, Human
cucacuguguugcucaggcug

SEQ ID NO: 555482 - RNA, 20 nt, Human
cucagguuuacaugauccuc

SEQ ID NO: 555483 - RNA, 24 nt, Human
cucccaaauagcugggacuacagg

SEQ ID NO: 555484 - RNA, 30 nt, Human
cugacaguaucagaaugacaaucuuccucu

SEQ ID NO: 555485 - RNA, 19 nt, Human
cugcaccgccccccggagg

SEQ ID NO: 555486 - RNA, 20 nt, Human
cugccggggacucggggagu

SEQ ID NO: 555487 - RNA, 22 nt, Human
cugccggggacucggggagugg

SEQ ID NO: 555488 - RNA, 20 nt, Human
cugcucugacaguaucagaa

SEQ ID NO: 555489 - RNA, 20 nt, Human
cugggguggcggcggcugcc

SEQ ID NO: 555490 - RNA, 18 nt, Human
cuguaugcacauuucacc

SEQ ID NO: 555491 - RNA, 23 nt, Human
cugucuuagccucccaaagugcu

SEQ ID NO: 555492 - RNA, 24 nt, Human
cugucuuagccucccaaagugcug

SEQ ID NO: 555493 - RNA, 20 nt, Human
cuuggacuccugagcucagg

SEQ ID NO: 555494 - RNA, 23 nt, Human
cuuucauacuggaacaagaguua

SEQ ID NO: 555495 - RNA, 22 nt, Human
cuuuucuucuuuugccuguucu

SEQ ID NO: 555496 - RNA, 21 nt, Human
gagagcacagacagacuggag

SEQ ID NO: 555497 - RNA, 20 nt, Human
gagccuuuucuucuuuugcc

SEQ ID NO: 555498 - RNA, 24 nt, Human
gagcucaggugaucugccugucuu

SEQ ID NO: 555499 - RNA, 21 nt, Human
gauuauaggcaugagccacca

SEQ ID NO: 555500 - RNA, 22 nt, Human
gauuauaggcaugagccaccac

SEQ ID NO: 555501 - RNA, 22 nt, Human
gauuauaggugugagucaccac

SEQ ID NO: 555502 - RNA, 22 nt, Human
gcaacuuccacuucccaggcuc

SEQ ID NO: 555503 - RNA, 22 nt, Human
gcaauucuccugccccagccuc

SEQ ID NO: 555504 - RNA, 20 nt, Human
gcaucagccucccaaauagc

SEQ ID NO: 555505 - RNA, 20 nt, Human
gcauugaaauauuaggauac

SEQ ID NO: 555506 - RNA, 20 nt, Human
gccauguugcccaggcuggu

SEQ ID NO: 555507 - RNA, 27 nt, Human
gcccaggcuggucuuggacuccugagc

SEQ ID NO: 555508 - RNA, 20 nt, Human
gcccccucugcaccgccccc

SEQ ID NO: 555509 - RNA, 19 nt, Human
gcccugagaagcaucgaac

SEQ ID NO: 555510 - RNA, 22 nt, Human
gcgccaggaaugcaggaaaaca

SEQ ID NO: 555511 - RNA, 18 nt, Human
gcgcugggguggcggcgg

SEQ ID NO: 555512 - RNA, 19 nt, Human
gcuacauauaaagaccaau

SEQ ID NO: 555513 - RNA, 23 nt, Human
gcuggucuaaaacuccugaccuc

SEQ ID NO: 555514 - RNA, 18 nt, Human
gcuuuuaggaagaguucu

SEQ ID NO: 555515 - RNA, 21 nt, Human
ggaggggugcuggguguccgg

SEQ ID NO: 555516 - RNA, 19 nt, Human
ggauuauaggcaugagcca

SEQ ID NO: 555517 - RNA, 24 nt, Human
ggcuggucuaaaacuccugaccuc

SEQ ID NO: 555518 - RNA, 24 nt, Human
ggcuggucuuggacuccugagcuc

SEQ ID NO: 555519 - RNA, 21 nt, Human
gggcucuccgugcccccucug

SEQ ID NO: 555520 - RNA, 24 nt, Human
ggggacucggggaguggagggacg

SEQ ID NO: 555521 - RNA, 23 nt, Human
ggggcgcgcugggguggcggcgg

SEQ ID NO: 555522 - RNA, 20 nt, Human
gggucuuguuauguugccca

SEQ ID NO: 555523 - RNA, 23 nt, Human
gguguuuugccauguugcccagg

SEQ ID NO: 555524 - RNA, 18 nt, Human
guacaugagaauuugucu

SEQ ID NO: 555525 - RNA, 21 nt, Human
guagagacgguguuuugccau

SEQ ID NO: 555526 - RNA, 22 nt, Human
guagagacgguguuuugccaug

SEQ ID NO: 555527 - RNA, 19 nt, Human
guccucggagccucuggcu

SEQ ID NO: 555528 - RNA, 24 nt, Human
gugaucugccugucuuagccuccc

SEQ ID NO: 555529 - RNA, 23 nt, Human
guuccaguccuaagggauucacu

SEQ ID NO: 555530 - RNA, 24 nt, Human
guuuugccauguugcccaggcugg

SEQ ID NO: 555531 - RNA, 22 nt, Human
uaaaaagccuaucccauacuga

SEQ ID NO: 555532 - RNA, 21 nt, Human
uaaaaugcuuauccaguggag

SEQ ID NO: 555533 - RNA, 23 nt, Human
uaaagcaagccgcccugagaagc

SEQ ID NO: 555534 - RNA, 23 nt, Human
uaauuucaaacaaauccagaaca

SEQ ID NO: 555535 - RNA, 19 nt, Human
uacaacccaaauuuagggg

SEQ ID NO: 555536 - RNA, 22 nt, Human
uacacacacacgcacacacaca

SEQ ID NO: 555537 - RNA, 24 nt, Human
uacaggugcaugccaccacaccca

SEQ ID NO: 555538 - RNA, 22 nt, Human
uacuuuaaaaaggccauccaaa

SEQ ID NO: 555539 - RNA, 24 nt, Human
uagaagagaugaggucuugcuaug

SEQ ID NO: 555540 - RNA, 22 nt, Human
uagagacgguguuuugccaugu

SEQ ID NO: 555541 - RNA, 21 nt, Human
uagagagcuccauuuuguucu

SEQ ID NO: 555542 - RNA, 25 nt, Human
uauacacacacacgcacacacacac

SEQ ID NO: 555543 - RNA, 23 nt, Human
uauaggugugagucaccacaccu

SEQ ID NO: 555544 - RNA, 25 nt, Human
uauauacacacacacgcacacacac

SEQ ID NO: 555545 - RNA, 25 nt, Human
uauauacacacacacgcacacacag

SEQ ID NO: 555546 - RNA, 27 nt, Human
uauauauauauauacacacacacggca

SEQ ID NO: 555547 - RNA, 18 nt, Human
uauauauauauauauaca

SEQ ID NO: 555548 - RNA, 19 nt, Human
uauauauauauauauauau

SEQ ID NO: 555549 - RNA, 19 nt, Human
uauauauauauauauauau

SEQ ID NO: 555550 - RNA, 19 nt, Human
uauauauauauauauauau

SEQ ID NO: 555551 - RNA, 19 nt, Human
uauauauauauauauauau

SEQ ID NO: 555552 - RNA, 19 nt, Human
uauauauauauauauauau

SEQ ID NO: 555553 - RNA, 19 nt, Human
uauauauauauauauauau

SEQ ID NO: 555554 - RNA, 19 nt, Human
uauauauauauauauauau

SEQ ID NO: 555555 - RNA, 19 nt, Human
uauauauauauauauauau

SEQ ID NO: 555556 - RNA, 19 nt, Human
uauauauauauauauauau

SEQ ID NO: 555557 - RNA, 19 nt, Human
uauauauauauauauauau

SEQ ID NO: 555558 - RNA, 19 nt, Human
uauauauauauauauauau

SEQ ID NO: 555559 - RNA, 19 nt, Human
uauauauauauauauauau

SEQ ID NO: 555560 - RNA, 19 nt, Human
uauauauauauauauauau

SEQ ID NO: 555561 - RNA, 23 nt, Human
uauauauauauauauauauauac

SEQ ID NO: 555562 - RNA, 18 nt, Human
uauguugcccaugcugga

SEQ ID NO: 555563 - RNA, 22 nt, Human
uauguugcccaugcuggacuca

SEQ ID NO: 555564 - RNA, 24 nt, Human
uauguugcccaugcuggacucaaa

SEQ ID NO: 555565 - RNA, 23 nt, Human
uauguuguccaggcuggucuaaa

SEQ ID NO: 555566 - RNA, 19 nt, Human
uauucuccugcaucagccu

SEQ ID NO: 555567 - RNA, 25 nt, Human
ucaaaaauuuuuacaacccaaauuu

SEQ ID NO: 555568 - RNA, 21 nt, Human
ucaaaacaccccaggaaucaa

SEQ ID NO: 555569 - RNA, 24 nt, Human
ucacugcaacuuccacuucccagg

SEQ ID NO: 555570 - RNA, 20 nt, Human
ucagccucccaaauagcugg

SEQ ID NO: 555571 - RNA, 21 nt, Human
ucaucaucugcucugacagua

SEQ ID NO: 555572 - RNA, 22 nt, Human
ucauuuucuucaucaucaucug

SEQ ID NO: 555573 - RNA, 25 nt, Human
uccaauuccauauauauauauauau

SEQ ID NO: 555574 - RNA, 25 nt, Human
uccacugagcucggaacagcggacc

SEQ ID NO: 555575 - RNA, 23 nt, Human
ucccaaaguauugggauuauagg

SEQ ID NO: 555576 - RNA, 24 nt, Human
ucccaaagugcugggauuauaggc

SEQ ID NO: 555577 - RNA, 23 nt, Human
ucccaaauagcugggacuacagg

SEQ ID NO: 555578 - RNA, 24 nt, Human
ucccaaguagcugcgacuauaggu

SEQ ID NO: 555579 - RNA, 19 nt, Human
ucccagacucaaauuccug

SEQ ID NO: 555580 - RNA, 23 nt, Human
ucccagacucaaauuccugggcu

SEQ ID NO: 555581 - RNA, 21 nt, Human
ucccaggcucaggcaauucuc

SEQ ID NO: 555582 - RNA, 24 nt, Human
ucccaggcucaggcaauucuccug

SEQ ID NO: 555583 - RNA, 25 nt, Human
ucccccaacuuucauacuggaacaa

SEQ ID NO: 555584 - RNA, 21 nt, Human
uccugggcuuaagcuauucuc

SEQ ID NO: 555585 - RNA, 22 nt, Human
uccugggcuuaagcuauucucc

SEQ ID NO: 555586 - RNA, 24 nt, Human
uccugggcuuaagcuauucuccug

SEQ ID NO: 555587 - RNA, 25 nt, Human
ucuaaaacuccugaccucaagcaau

SEQ ID NO: 555588 - RNA, 18 nt, Human
ucuacauuucucauucag

SEQ ID NO: 555589 - RNA, 22 nt, Human
ucuaccagacacaaacucugaa

SEQ ID NO: 555590 - RNA, 19 nt, Human
ucucacuguguugcucagg

SEQ ID NO: 555591 - RNA, 23 nt, Human
ucucacuguguugcucaggcugg

SEQ ID NO: 555592 - RNA, 24 nt, Human
ucucacuguguugcucaggcugga

SEQ ID NO: 555593 - RNA, 26 nt, Human
ucucacuguguugcucaggcuggagu

SEQ ID NO: 555594 - RNA, 22 nt, Human
ucuccgugcccccucugcaccc

SEQ ID NO: 555595 - RNA, 22 nt, Human
ucuccugcaucagccucccaaa

SEQ ID NO: 555596 - RNA, 26 nt, Human
ucuccugccccagccucccaaguagc

SEQ ID NO: 555597 - RNA, 21 nt, Human
ucugcucugacaguaucagaa

SEQ ID NO: 555598 - RNA, 23 nt, Human
ucuguaugcacauuucaccuuua

SEQ ID NO: 555599 - RNA, 19 nt, Human
ucuugcuauguuguccagg

SEQ ID NO: 555600 - RNA, 23 nt, Human
ucuugcuauguuguccaggcugg

SEQ ID NO: 555601 - RNA, 24 nt, Human
ucuugcuauguuguccaggcuggu

SEQ ID NO: 555602 - RNA, 23 nt, Human
ucuuggacuccugagcucaggug

SEQ ID NO: 555603 - RNA, 23 nt, Human
ucuuguuauguugcccaugcugg

SEQ ID NO: 555604 - RNA, 24 nt, Human
ucuuguuauguugcccaugcugga

SEQ ID NO: 555605 - RNA, 21 nt, Human
ugaaacaacaaaaccaaaucu

SEQ ID NO: 555606 - RNA, 20 nt, Human
ugaccucaagcaauccuccu

SEQ ID NO: 555607 - RNA, 21 nt, Human
ugaccucaagcaauccuccug

SEQ ID NO: 555608 - RNA, 24 nt, Human
ugaccucaagcaauccuccugccu

SEQ ID NO: 555609 - RNA, 18 nt, Human
ugagagcacagacagacu

SEQ ID NO: 555610 - RNA, 22 nt, Human
ugagagcacagacagacuggag

SEQ ID NO: 555611 - RNA, 19 nt, Human
ugagauagggucucacugu

SEQ ID NO: 555612 - RNA, 23 nt, Human
ugagauagggucucacuguguug

SEQ ID NO: 555613 - RNA, 19 nt, Human
ugagcucaggugaucugcc

SEQ ID NO: 555614 - RNA, 24 nt, Human
ugagcucaggugaucugccugucu

SEQ ID NO: 555615 - RNA, 24 nt, Human
ugaggucuugcuauguuguccagg

SEQ ID NO: 555616 - RNA, 26 nt, Human
ugaguaaaaagguaacauuguaauga

SEQ ID NO: 555617 - RNA, 24 nt, Human
ugcaucagccucccaaauagcugg

SEQ ID NO: 555618 - RNA, 20 nt, Human
ugcaugccaccacacccagc

SEQ ID NO: 555619 - RNA, 21 nt, Human
ugcauugaaauauuaggauac

SEQ ID NO: 555620 - RNA, 20 nt, Human
ugccaugcgggaaauaaaau

SEQ ID NO: 555621 - RNA, 31 nt, Human
ugccauguugcccaggcuggucuuggacucc

SEQ ID NO: 555622 - RNA, 22 nt, Human
ugcccaggcuggucuuggacuc

SEQ ID NO: 555623 - RNA, 24 nt, Human
ugcccaggcuggucuuggacuccu

SEQ ID NO: 555624 - RNA, 25 nt, Human
ugccccagccucccaaguagcugcg

SEQ ID NO: 555625 - RNA, 19 nt, Human
ugcccccucugcaccgccc

SEQ ID NO: 555626 - RNA, 20 nt, Human
ugcccccucugcaccgcccc

SEQ ID NO: 555627 - RNA, 20 nt, Human
ugccugucucugcagcggag

SEQ ID NO: 555628 - RNA, 20 nt, Human
ugccuguucuuguuuuccuu

SEQ ID NO: 555629 - RNA, 21 nt, Human
ugcucaggcuggaguggaaug

SEQ ID NO: 555630 - RNA, 24 nt, Human
ugcucaggcuggaguggaauggca

SEQ ID NO: 555631 - RNA, 21 nt, Human
uggagagagccucuugcugcu

SEQ ID NO: 555632 - RNA, 19 nt, Human
uggaguggaauggcacgau

SEQ ID NO: 555633 - RNA, 24 nt, Human
uggaguggaauggcacgaucuugg

SEQ ID NO: 555634 - RNA, 25 nt, Human
uggcuaauuuuuuuuuuuuuuuuuu

SEQ ID NO: 555635 - RNA, 18 nt, Human
uggcuagagucccgcgcc

SEQ ID NO: 555636 - RNA, 21 nt, Human
ugggacuacaggugcaugcca

SEQ ID NO: 555637 - RNA, 22 nt, Human
ugggacuacaggugcaugccac

SEQ ID NO: 555638 - RNA, 24 nt, Human
ugggacuacaggugcaugccacca

SEQ ID NO: 555639 - RNA, 18 nt, Human
ugggauuauaggcaugag

SEQ ID NO: 555640 - RNA, 19 nt, Human
ugggauuauaggcaugagc

SEQ ID NO: 555641 - RNA, 22 nt, Human
ugggauuauaggcaugagccac

SEQ ID NO: 555642 - RNA, 23 nt, Human
ugggauuauaggcaugagccacc

SEQ ID NO: 555643 - RNA, 24 nt, Human
ugggauuauaggcaugagccacca

SEQ ID NO: 555644 - RNA, 18 nt, Human
ugggauuauaggugugag

SEQ ID NO: 555645 - RNA, 18 nt, Human
ugggauuauaggugugag

SEQ ID NO: 555646 - RNA, 22 nt, Human
ugggauuauaggugugagucac

SEQ ID NO: 555647 - RNA, 23 nt, Human
ugggauuauaggugugagucacc

SEQ ID NO: 555648 - RNA, 24 nt, Human
ugggauuauaggugugagucacca

SEQ ID NO: 555649 - RNA, 24 nt, Human
uggggucuuguuauguugcccaug

SEQ ID NO: 555650 - RNA, 23 nt, Human
ugggguggcggcggcugccgggg

SEQ ID NO: 555651 - RNA, 24 nt, Human
uggucuuggacuccugagcucagg

SEQ ID NO: 555652 - RNA, 24 nt, Human
uguagagacgguguuuugccaugu

SEQ ID NO: 555653 - RNA, 24 nt, Human
uguccaggcuggucuaaaacuccu

SEQ ID NO: 555654 - RNA, 24 nt, Human
uguccgggugucuacuccugccug

SEQ ID NO: 555655 - RNA, 22 nt, Human
uguguugcucaggcuggagugg

SEQ ID NO: 555656 - RNA, 24 nt, Human
uguuauguugcccaugcuggacuc

SEQ ID NO: 555657 - RNA, 23 nt, Human
uuaaaaguaacaguggcugcaga

SEQ ID NO: 555658 - RNA, 23 nt, Human
uuauuuuuuugagauagggucuc

SEQ ID NO: 555659 - RNA, 23 nt, Human
uucaaacauccacugagcucgga

SEQ ID NO: 555660 - RNA, 25 nt, Human
uucccaggcucaggcaauucuccug

SEQ ID NO: 555661 - RNA, 20 nt, Human
uucucgagccuuuucuucuu

SEQ ID NO: 555662 - RNA, 24 nt, Human
uucuucaucaucaucugcucugac

SEQ ID NO: 555663 - RNA, 21 nt, Human
uugccauguugcccaggcugg

SEQ ID NO: 555664 - RNA, 21 nt, Human
uugcucaggcuggaguggaau

SEQ ID NO: 555665 - RNA, 24 nt, Human
uugcucaggcuggaguggaauggc

SEQ ID NO: 555666 - RNA, 24 nt, Human
uugggauuauaggugugagucacc

SEQ ID NO: 555667 - RNA, 24 nt, Human
uuguagagacgguguuuugccaug

SEQ ID NO: 555668 - RNA, 24 nt, Human
uuuguagagacgguguuuugccau

SEQ ID NO: 555669 - RNA, 23 nt, Human
uuuugccauguugcccaggcugg

SEQ ID NO: 555670 - RNA, 21 nt, Human
uuuuuuguagagacgguguuu

SEQ ID NO: 555671 - RNA, 22 nt, Human
uuuuuuuguagagacgguguuu

SEQ ID NO: 555672 - RNA, 22 nt, Human
uuuuuuuuucuuuuaauaaggg

SEQ ID NO: 555673 - RNA, 20 nt, Human
uuuuuuuuuucuuuugcgcu

SEQ ID NO: 555674 - RNA, 18 nt, Human
uuuuuuuuuuuucuuuug

SEQ ID NO: 555675 - RNA, 22 nt, Human
uuuuuuuuuuuucuuuugcgcu

SEQ ID NO: 555676 - RNA, 24 nt, Human
uuuuuuuuuuuuuuuuuuucuuuu

SEQ ID NO: 555677 - RNA, 24 nt, Human
uuuuuuuuuuuuuuuuuuuucuuu

SEQ ID NO: 555678 - RNA, 27 nt, Human
uuuuuuuuuuuuuuuuuuuuuuucuuu

SEQ ID NO: 555679 - RNA, 19 nt, Human
aaaaagcuuuaauaacaga

SEQ ID NO: 555680 - RNA, 21 nt, Human
aaaacaagcccucccccaccc

SEQ ID NO: 555681 - RNA, 26 nt, Human
aacaagcccucccccaccccgagccc

SEQ ID NO: 555682 - RNA, 19 nt, Human
aacacugaccaacauaacu

SEQ ID NO: 555683 - RNA, 24 nt, Human
aacccaaaaugcauccucuaacac

SEQ ID NO: 555684 - RNA, 22 nt, Human
aagaaagaugaacccaaaaugc

SEQ ID NO: 555685 - RNA, 19 nt, Human
acccaaaacccgcagcccc

SEQ ID NO: 555686 - RNA, 18 nt, Human
accccgagcccuggcccc

SEQ ID NO: 555687 - RNA, 24 nt, Human
agccgugcuccuuccacaacacca

SEQ ID NO: 555688 - RNA, 22 nt, Human
agcuacuaggcacgcucggacc

SEQ ID NO: 555689 - RNA, 19 nt, Human
auaaaacaagcccuccccc

SEQ ID NO: 555690 - RNA, 23 nt, Human
caaaacccgcagccccggcaccc

SEQ ID NO: 555691 - RNA, 19 nt, Human
caagcccucccccaccccg

SEQ ID NO: 555692 - RNA, 21 nt, Human
caauaaaacaagcccuccccc

SEQ ID NO: 555693 - RNA, 23 nt, Human
caccaggugaauacuguggucag

SEQ ID NO: 555694 - RNA, 20 nt, Human
cacccaaagucagucagcgg

SEQ ID NO: 555695 - RNA, 23 nt, Human
cacucaagaaagaugaacccaaa

SEQ ID NO: 555696 - RNA, 23 nt, Human
ccacucaagaaagaugaacccaa

SEQ ID NO: 555697 - RNA, 19 nt, Human
ccagagccuugcagcggcc

SEQ ID NO: 555698 - RNA, 22 nt, Human
ccagagccuugcagcggccggg

SEQ ID NO: 555699 - RNA, 21 nt, Human
cccaaaaugcauccucuaaca

SEQ ID NO: 555700 - RNA, 20 nt, Human
ccccaccccgagcccuggcc

SEQ ID NO: 555701 - RNA, 22 nt, Human
ccccaccccgagcccuggcccc

SEQ ID NO: 555702 - RNA, 19 nt, Human
ccccggggcccgggaccuc

SEQ ID NO: 555703 - RNA, 19 nt, Human
cccgagcccuggccccugg

SEQ ID NO: 555704 - RNA, 28 nt, Human
ccucccccaccccgagcccuggccccug

SEQ ID NO: 555705 - RNA, 19 nt, Human
cgagcgccccggggcccgg

SEQ ID NO: 555706 - RNA, 18 nt, Human
cgccagagccuugcagcg

SEQ ID NO: 555707 - RNA, 19 nt, Human
gagcccuggccccuggcaa

SEQ ID NO: 555708 - RNA, 18 nt, Human
gagcgagcgccccggggc

SEQ ID NO: 555709 - RNA, 21 nt, Human
gagcgccccggggcccgggac

SEQ ID NO: 555710 - RNA, 20 nt, Human
gauaaaugauugugcacugc

SEQ ID NO: 555711 - RNA, 20 nt, Human
gccagagccuugcagcggcc

SEQ ID NO: 555712 - RNA, 24 nt, Human
gugaauacuguggucaggcaugcu

SEQ ID NO: 555713 - RNA, 18 nt, Human
guggucaggcaugcuggu

SEQ ID NO: 555714 - RNA, 18 nt, Human
uaaaacaagcccuccccc

SEQ ID NO: 555715 - RNA, 19 nt, Human
uaacacugaccaacauaac

SEQ ID NO: 555716 - RNA, 18 nt, Human
uagcaugcugcguuguau

SEQ ID NO: 555717 - RNA, 23 nt, Human
ucagucagcggugguggcucaug

SEQ ID NO: 555718 - RNA, 27 nt, Human
ucagucagcggugguggcucauggugu

SEQ ID NO: 555719 - RNA, 23 nt, Human
ucccccaccccgagcccuggccc

SEQ ID NO: 555720 - RNA, 24 nt, Human
uccuuccacaacaccaggugaaua

SEQ ID NO: 555721 - RNA, 18 nt, Human
ugagaacuuugguucaug

SEQ ID NO: 555722 - RNA, 19 nt, Human
uggaaaaauuuaccugagc

SEQ ID NO: 555723 - RNA, 22 nt, Human
ugugcacugcgugaugauacca

SEQ ID NO: 555724 - RNA, 23 nt, Human
uugcacccaaaacccgcagcccc

SEQ ID NO: 555725 - RNA, 21 nt, Human
uugcagcggccggguccgcuc

SEQ ID NO: 555726 - RNA, 20 nt, Human
uuuaccugagcgagcgcccc

SEQ ID NO: 555727 - RNA, 22 nt, Human
agcaggguaggagcacaugaug

SEQ ID NO: 555728 - RNA, 26 nt, Human
ccaccgcaaccuccagagggaccagg

SEQ ID NO: 555729 - RNA, 19 nt, Human
gguagagcaggguaggagc

SEQ ID NO: 555730 - RNA, 26 nt, Human
ucugugacccagaaaagcgguagagc

SEQ ID NO: 555731 - RNA, 28 nt, Human
aaacggacacaacaggcuggccuuccga

SEQ ID NO: 555732 - RNA, 18 nt, Human
acagaaguaaggcccggu

SEQ ID NO: 555733 - RNA, 20 nt, Human
agcacacauccucucucacc

SEQ ID NO: 555734 - RNA, 23 nt, Human
cacaguaucguuacagaaguaag

SEQ ID NO: 555735 - RNA, 21 nt, Human
cucuccccgcccuugcaaucu

SEQ ID NO: 555736 - RNA, 21 nt, Human
gucucggcccccuuccuccaa

SEQ ID NO: 555737 - RNA, 23 nt, Human
ucggcccccuuccuccaaggccc

SEQ ID NO: 555738 - RNA, 19 nt, Human
aaaaaaacaaacacaccaa

SEQ ID NO: 555739 - RNA, 24 nt, Human
aaaaaaacaaacacaccaacaaaa

SEQ ID NO: 555740 - RNA, 19 nt, Human
aaaaacaaacacaccaaca

SEQ ID NO: 555741 - RNA, 23 nt, Human
aaacaaacacaccaacaaaagac

SEQ ID NO: 555742 - RNA, 19 nt, Human
aaccuccacauggugaaac

SEQ ID NO: 555743 - RNA, 21 nt, Human
aagaauagggaagacagucau

SEQ ID NO: 555744 - RNA, 19 nt, Human
aagaguuuggcuccugggu

SEQ ID NO: 555745 - RNA, 18 nt, Human
aagcaucccgggggccug

SEQ ID NO: 555746 - RNA, 22 nt, Human
aagcugccuuccaccaucugcc

SEQ ID NO: 555747 - RNA, 18 nt, Human
aauaggagcugggagcaa

SEQ ID NO: 555748 - RNA, 21 nt, Human
aauggcuuauuaacaccaccu

SEQ ID NO: 555749 - RNA, 21 nt, Human
aauuuacagaccagugucccu

SEQ ID NO: 555750 - RNA, 25 nt, Human
acacaacucccaugcaggagaagcc

SEQ ID NO: 555751 - RNA, 26 nt, Human
acaccaacaaaagacacaugugcguc

SEQ ID NO: 555752 - RNA, 22 nt, Human
acccgacacccucccccagccu

SEQ ID NO: 555753 - RNA, 20 nt, Human
accggaauggcagagcuccg

SEQ ID NO: 555754 - RNA, 22 nt, Human
acugcaaaaaaagguuccuuga

SEQ ID NO: 555755 - RNA, 21 nt, Human
acuggcucuggggugcugggg

SEQ ID NO: 555756 - RNA, 24 nt, Human
acuggcucuggggugcuggggaaa

SEQ ID NO: 555757 - RNA, 18 nt, Human
agaaaaccuggaauacug

SEQ ID NO: 555758 - RNA, 22 nt, Human
agaaaggauuacaauuuacaga

SEQ ID NO: 555759 - RNA, 19 nt, Human
agaacagaccccuggcucu

SEQ ID NO: 555760 - RNA, 20 nt, Human
agaaggacaaggaugggagg

SEQ ID NO: 555761 - RNA, 24 nt, Human
agacgaacgcagauaaacccuucg

SEQ ID NO: 555762 - RNA, 19 nt, Human
agagacccacgggcugccu

SEQ ID NO: 555763 - RNA, 21 nt, Human
agcaaggcaggcgugcugcca

SEQ ID NO: 555764 - RNA, 19 nt, Human
agcccggaaggcccuggug

SEQ ID NO: 555765 - RNA, 23 nt, Human
agcugggagcaagagccggucca

SEQ ID NO: 555766 - RNA, 20 nt, Human
aggaaggggagggcaggggc

SEQ ID NO: 555767 - RNA, 22 nt, Human
aggcagaaucaaaccaaaaaca

SEQ ID NO: 555768 - RNA, 20 nt, Human
aggcaggcgugcugccagcc

SEQ ID NO: 555769 - RNA, 18 nt, Human
agggacugcccuccaccc

SEQ ID NO: 555770 - RNA, 23 nt, Human
aggggcccucaugggacuguggc

SEQ ID NO: 555771 - RNA, 24 nt, Human
agucaccugggcagcggggggagg

SEQ ID NO: 555772 - RNA, 24 nt, Human
auagacacuaauaagacuuaacca

SEQ ID NO: 555773 - RNA, 22 nt, Human
auaucuguaaauaugaacccac

SEQ ID NO: 555774 - RNA, 24 nt, Human
auuacaaauucacaagauauuugg

SEQ ID NO: 555775 - RNA, 18 nt, Human
auugacacuucugcaugg

SEQ ID NO: 555776 - RNA, 19 nt, Human
caaaaaaagguuccuugaa

SEQ ID NO: 555777 - RNA, 23 nt, Human
caaggcaggcgugcugccagcca

SEQ ID NO: 555778 - RNA, 25 nt, Human
caauaauacugcaaaaaaagguucc

SEQ ID NO: 555779 - RNA, 19 nt, Human
caaugggccuauccgagcc

SEQ ID NO: 555780 - RNA, 21 nt, Human
cacagcccagcuuccucccuu

SEQ ID NO: 555781 - RNA, 19 nt, Human
caccaggugauaggagcca

SEQ ID NO: 555782 - RNA, 22 nt, Human
cacccagugcaguuccacagcc

SEQ ID NO: 555783 - RNA, 22 nt, Human
cacccucccccagccuugccac

SEQ ID NO: 555784 - RNA, 21 nt, Human
caccuccagcucagcccuucc

SEQ ID NO: 555785 - RNA, 21 nt, Human
caccugggcagcggggggagg

SEQ ID NO: 555786 - RNA, 22 nt, Human
cacgccggcucacuugcaccca

SEQ ID NO: 555787 - RNA, 20 nt, Human
cacuacguggcagucgcagc

SEQ ID NO: 555788 - RNA, 22 nt, Human
cacugcaccggaauggcagagc

SEQ ID NO: 555789 - RNA, 25 nt, Human
cagcaaagcuggcuccccgcucccu

SEQ ID NO: 555790 - RNA, 26 nt, Human
cagcaggccuucaaguuaagccaagc

SEQ ID NO: 555791 - RNA, 20 nt, Human
cagcaucacaaagaggcgga

SEQ ID NO: 555792 - RNA, 24 nt, Human
cagcggggggaggggagaaccuug

SEQ ID NO: 555793 - RNA, 19 nt, Human
ccaccccaaccugcuggca

SEQ ID NO: 555794 - RNA, 20 nt, Human
ccaccgcggcaaggugaggg

SEQ ID NO: 555795 - RNA, 22 nt, Human
ccacuaaacacacccauuuccu

SEQ ID NO: 555796 - RNA, 20 nt, Human
ccacugccugccaccuguug

SEQ ID NO: 555797 - RNA, 22 nt, Human
ccagccaggcccaagggggugg

SEQ ID NO: 555798 - RNA, 19 nt, Human
cccaaagcaucccgggggc

SEQ ID NO: 555799 - RNA, 25 nt, Human
cccaaagcaucccgggggccugcag

SEQ ID NO: 555800 - RNA, 21 nt, Human
cccacagcguucuaggagguc

SEQ ID NO: 555801 - RNA, 23 nt, Human
cccagagccccgcugucgggccc

SEQ ID NO: 555802 - RNA, 20 nt, Human
cccagccuugccacuuucaa

SEQ ID NO: 555803 - RNA, 21 nt, Human
cccagugcaguuccacagcca

SEQ ID NO: 555804 - RNA, 22 nt, Human
cccagugcaguuccacagccac

SEQ ID NO: 555805 - RNA, 21 nt, Human
ccccauacuggcccugccguc

SEQ ID NO: 555806 - RNA, 24 nt, Human
cccccagaaggagacagcaggccu

SEQ ID NO: 555807 - RNA, 19 nt, Human
cccccugcccucuucccuc

SEQ ID NO: 555808 - RNA, 18 nt, Human
ccccggagguuggaggcu

SEQ ID NO: 555809 - RNA, 19 nt, Human
cccuaagaauagggaagac

SEQ ID NO: 555810 - RNA, 21 nt, Human
cccucagugagcucccugagg

SEQ ID NO: 555811 - RNA, 20 nt, Human
cccucuacccgacacccucc

SEQ ID NO: 555812 - RNA, 22 nt, Human
cccucuacccgacacccucccc

SEQ ID NO: 555813 - RNA, 21 nt, Human
cccugacccccagaaggagac

SEQ ID NO: 555814 - RNA, 21 nt, Human
cccugcccaccuccagcucag

SEQ ID NO: 555815 - RNA, 21 nt, Human
cccuggaaaaaaacaaacaca

SEQ ID NO: 555816 - RNA, 18 nt, Human
cccuggcuaggggcccuc

SEQ ID NO: 555817 - RNA, 23 nt, Human
cccuggcuaggggcccucauggg

SEQ ID NO: 555818 - RNA, 22 nt, Human
cccuggcucugcugcgcucucc

SEQ ID NO: 555819 - RNA, 20 nt, Human
ccggcucacuugcacccaca

SEQ ID NO: 555820 - RNA, 18 nt, Human
ccgggggccugcagcucc

SEQ ID NO: 555821 - RNA, 19 nt, Human
ccguugggcaccuaugacc

SEQ ID NO: 555822 - RNA, 21 nt, Human
ccuccacauggugaaacuuca

SEQ ID NO: 555823 - RNA, 22 nt, Human
ccugcagauggccucugagucc

SEQ ID NO: 555824 - RNA, 25 nt, Human
ccugccaccuguuggguccugaggc

SEQ ID NO: 555825 - RNA, 25 nt, Human
ccuggcccuggccgcagagaggagc

SEQ ID NO: 555826 - RNA, 22 nt, Human
cgccccagggucccacgugcac

SEQ ID NO: 555827 - RNA, 23 nt, Human
cggcaaggugaggggcuguggcc

SEQ ID NO: 555828 - RNA, 18 nt, Human
cggcagccaggaacagaa

SEQ ID NO: 555829 - RNA, 19 nt, Human
cggcucuagcgugccuccu

SEQ ID NO: 555830 - RNA, 21 nt, Human
cggcugagacggcccggugcc

SEQ ID NO: 555831 - RNA, 18 nt, Human
cgggccuaauaggagcug

SEQ ID NO: 555832 - RNA, 21 nt, Human
cgugcacaaccaugcugcccc

SEQ ID NO: 555833 - RNA, 19 nt, Human
cguucuaggaggucgcggc

SEQ ID NO: 555834 - RNA, 23 nt, Human
cuccaccccugcaggccugggcu

SEQ ID NO: 555835 - RNA, 25 nt, Human
cuccagcucagcccuuccuguggcu

SEQ ID NO: 555836 - RNA, 19 nt, Human
cucccugugggacagaggg

SEQ ID NO: 555837 - RNA, 20 nt, Human
cuccgugcauuuggcaaagc

SEQ ID NO: 555838 - RNA, 25 nt, Human
cuccucccccugcacugcucugacc

SEQ ID NO: 555839 - RNA, 18 nt, Human
cugaaugucugaaugaca

SEQ ID NO: 555840 - RNA, 21 nt, Human
cugaggcugggacugccucug

SEQ ID NO: 555841 - RNA, 19 nt, Human
cugaggcuucugagggaga

SEQ ID NO: 555842 - RNA, 18 nt, Human
cugcccaccuccagcuca

SEQ ID NO: 555843 - RNA, 19 nt, Human
cugcccaccuccagcucag

SEQ ID NO: 555844 - RNA, 25 nt, Human
cugcugggccugacccagggggugc

SEQ ID NO: 555845 - RNA, 18 nt, Human
cugggcagcggggggagg

SEQ ID NO: 555846 - RNA, 23 nt, Human
cugugugcuggcagcaucucccc

SEQ ID NO: 555847 - RNA, 21 nt, Human
cuuccuguggcuuggcccugc

SEQ ID NO: 555848 - RNA, 18 nt, Human
cuugggacuugucccuaa

SEQ ID NO: 555849 - RNA, 20 nt, Human
gaacccaccuggcccuggcc

SEQ ID NO: 555850 - RNA, 19 nt, Human
gaaggggagggcaggggcc

SEQ ID NO: 555851 - RNA, 18 nt, Human
gaaugcaggcagaugggc

SEQ ID NO: 555852 - RNA, 19 nt, Human
gacaagccuggggaaaggg

SEQ ID NO: 555853 - RNA, 18 nt, Human
gagcaaugggaaacuggg

SEQ ID NO: 555854 - RNA, 22 nt, Human
gagcugagaggaggccaaggug

SEQ ID NO: 555855 - RNA, 18 nt, Human
gagcugggcuggagaaag

SEQ ID NO: 555856 - RNA, 21 nt, Human
gaggccaaggugcuuggggca

SEQ ID NO: 555857 - RNA, 24 nt, Human
gaggggcuguggccugugccaugg

SEQ ID NO: 555858 - RNA, 19 nt, Human
gaguccuccccuagccccc

SEQ ID NO: 555859 - RNA, 22 nt, Human
gcacaaccaugcugccccaugc

SEQ ID NO: 555860 - RNA, 26 nt, Human
gcaguccuaguuucuuccuccucugg

SEQ ID NO: 555861 - RNA, 18 nt, Human
gcauggccauccucuggg

SEQ ID NO: 555862 - RNA, 18 nt, Human
gccaagcacaucauggcu

SEQ ID NO: 555863 - RNA, 19 nt, Human
gcccaaagcaucccggggg

SEQ ID NO: 555864 - RNA, 23 nt, Human
gcccagcuuccucccuuucuccu

SEQ ID NO: 555865 - RNA, 21 nt, Human
gccccagggucccacgugcac

SEQ ID NO: 555866 - RNA, 23 nt, Human
gcccugcccaccuccagcucagc

SEQ ID NO: 555867 - RNA, 18 nt, Human
gcccugggaacacggcug

SEQ ID NO: 555868 - RNA, 23 nt, Human
gcccuggugggccaagcacauca

SEQ ID NO: 555869 - RNA, 27 nt, Human
gcugggagcaagagccgguccaucuuc

SEQ ID NO: 555870 - RNA, 19 nt, Human
gcuugggacgaggcuaggc

SEQ ID NO: 555871 - RNA, 18 nt, Human
ggaaaacucuuccagaaa

SEQ ID NO: 555872 - RNA, 23 nt, Human
ggaacacaacucccaugcaggag

SEQ ID NO: 555873 - RNA, 22 nt, Human
ggaaggcccuggugggccaagc

SEQ ID NO: 555874 - RNA, 20 nt, Human
ggaaugcaggcagaugggcc

SEQ ID NO: 555875 - RNA, 21 nt, Human
ggaccacacagcccagcuucc

SEQ ID NO: 555876 - RNA, 22 nt, Human
ggagagggagggggccccauac

SEQ ID NO: 555877 - RNA, 22 nt, Human
ggagcuccauucuucuccagcc

SEQ ID NO: 555878 - RNA, 18 nt, Human
ggagcucucaugccuguc

SEQ ID NO: 555879 - RNA, 21 nt, Human
ggagcugcgucccugaccccc

SEQ ID NO: 555880 - RNA, 18 nt, Human
ggaggaaggggagggcag

SEQ ID NO: 555881 - RNA, 19 nt, Human
ggaugggaggaaggggagg

SEQ ID NO: 555882 - RNA, 21 nt, Human
ggccccaaggcaagggcggag

SEQ ID NO: 555883 - RNA, 24 nt, Human
ggcccggugcccacgcugggcuca

SEQ ID NO: 555884 - RNA, 23 nt, Human
ggcucagggguggggagcggcag

SEQ ID NO: 555885 - RNA, 20 nt, Human
ggcuggaagagaaggucgcc

SEQ ID NO: 555886 - RNA, 24 nt, Human
gggagaaccuugggggucaggagc

SEQ ID NO: 555887 - RNA, 19 nt, Human
gggaggaaggggagggcag

SEQ ID NO: 555888 - RNA, 21 nt, Human
gggaugcccagagccccgcug

SEQ ID NO: 555889 - RNA, 23 nt, Human
gggccuaauaggagcugggagca

SEQ ID NO: 555890 - RNA, 20 nt, Human
gggccucagcugucuccucg

SEQ ID NO: 555891 - RNA, 19 nt, Human
ggggagggcaggggccugg

SEQ ID NO: 555892 - RNA, 21 nt, Human
ggggaggggagaaccuugggg

SEQ ID NO: 555893 - RNA, 23 nt, Human
ggggccccauacuggcccugccg

SEQ ID NO: 555894 - RNA, 25 nt, Human
gggggaggggagaaccuugggggug

SEQ ID NO: 555895 - RNA, 19 nt, Human
gggggugggaaugcaggca

SEQ ID NO: 555896 - RNA, 21 nt, Human
gguguggccgaccaggacugg

SEQ ID NO: 555897 - RNA, 24 nt, Human
gucaagauggaagagcgcuccucu

SEQ ID NO: 555898 - RNA, 23 nt, Human
gucccuuuccccacuaaacacac

SEQ ID NO: 555899 - RNA, 18 nt, Human
gucugcaccccgucccuu

SEQ ID NO: 555900 - RNA, 21 nt, Human
uaaaauaaaugcuaagcucug

SEQ ID NO: 555901 - RNA, 24 nt, Human
uaaauaagagaccuuaagcaaugc

SEQ ID NO: 555902 - RNA, 22 nt, Human
uaacaccaccuggaaaaguucc

SEQ ID NO: 555903 - RNA, 20 nt, Human
uacacugaggcugcgagauc

SEQ ID NO: 555904 - RNA, 18 nt, Human
uacagaccagugucccug

SEQ ID NO: 555905 - RNA, 19 nt, Human
uagaaaauaaauucaauaa

SEQ ID NO: 555906 - RNA, 21 nt, Human
uagcgugccuccucggcgagc

SEQ ID NO: 555907 - RNA, 21 nt, Human
uauuagcaaagaaaagagaaa

SEQ ID NO: 555908 - RNA, 18 nt, Human
ucaaagcuguguaaggca

SEQ ID NO: 555909 - RNA, 22 nt, Human
ucagcugucuccucgcggcucc

SEQ ID NO: 555910 - RNA, 23 nt, Human
uccagcucagcccuuccuguggc

SEQ ID NO: 555911 - RNA, 20 nt, Human
uccaguggagccucaggcua

SEQ ID NO: 555912 - RNA, 26 nt, Human
uccaucuucucuuuggugaggucucc

SEQ ID NO: 555913 - RNA, 18 nt, Human
uccccagcuuuuguauuc

SEQ ID NO: 555914 - RNA, 18 nt, Human
ucccugacccccagaagg

SEQ ID NO: 555915 - RNA, 18 nt, Human
ucccuggaaaaaaacaaa

SEQ ID NO: 555916 - RNA, 21 nt, Human
ucccugugggacagagggcuc

SEQ ID NO: 555917 - RNA, 21 nt, Human
uccuggucaagauggaagagc

SEQ ID NO: 555918 - RNA, 19 nt, Human
ucuaaaaaccucaaugggc

SEQ ID NO: 555919 - RNA, 23 nt, Human
ucuccaggcuucacccccugguc

SEQ ID NO: 555920 - RNA, 23 nt, Human
ucuccgcgggccucagcugucuc

SEQ ID NO: 555921 - RNA, 19 nt, Human
ucugaguccuccccuagcc

SEQ ID NO: 555922 - RNA, 26 nt, Human
ucugcccgccacccagugcaguucca

SEQ ID NO: 555923 - RNA, 19 nt, Human
ucuguaaauaugaacccac

SEQ ID NO: 555924 - RNA, 24 nt, Human
ucugugcccagcugcugugcaggg

SEQ ID NO: 555925 - RNA, 21 nt, Human
ucuucccucuacccgacaccc

SEQ ID NO: 555926 - RNA, 21 nt, Human
ucuuugggacacugguguggc

SEQ ID NO: 555927 - RNA, 20 nt, Human
ugaagacaccuggugcuucu

SEQ ID NO: 555928 - RNA, 20 nt, Human
ugacccagggggugcuucaa

SEQ ID NO: 555929 - RNA, 19 nt, Human
ugaccucuggucccacccc

SEQ ID NO: 555930 - RNA, 21 nt, Human
ugaccucuggucccaccccgg

SEQ ID NO: 555931 - RNA, 23 nt, Human
ugagacagagacccacgggcugc

SEQ ID NO: 555932 - RNA, 23 nt, Human
ugagaggaggccaaggugcuugg

SEQ ID NO: 555933 - RNA, 24 nt, Human
ugaggcuucugagggagagaagga

SEQ ID NO: 555934 - RNA, 26 nt, Human
ugagggacugcccuccaccccugcag

SEQ ID NO: 555935 - RNA, 19 nt, Human
ugaguccuccccuagcccc

SEQ ID NO: 555936 - RNA, 25 nt, Human
ugaguccuccccuagcccccugccc

SEQ ID NO: 555937 - RNA, 23 nt, Human
ugauaggagccaaaccuccacag

SEQ ID NO: 555938 - RNA, 21 nt, Human
ugcaaccccugggccuuacaa

SEQ ID NO: 555939 - RNA, 23 nt, Human
ugcaggcagaugggccaagguca

SEQ ID NO: 555940 - RNA, 20 nt, Human
ugccauggacucccagcagc

SEQ ID NO: 555941 - RNA, 25 nt, Human
ugccauggacucccagcagcauccc

SEQ ID NO: 555942 - RNA, 25 nt, Human
ugcccuccaccccugcaggccuggg

SEQ ID NO: 555943 - RNA, 19 nt, Human
ugccuggagcagcccugcc

SEQ ID NO: 555944 - RNA, 18 nt, Human
ugccugggauccagccag

SEQ ID NO: 555945 - RNA, 20 nt, Human
ugccugggauccagccaggc

SEQ ID NO: 555946 - RNA, 21 nt, Human
ugcucugaccugccuggagca

SEQ ID NO: 555947 - RNA, 23 nt, Human
ugcugggccugacccagggggug

SEQ ID NO: 555948 - RNA, 19 nt, Human
uggaaaaaaacaaacacac

SEQ ID NO: 555949 - RNA, 22 nt, Human
uggaaaaaaacaaacacaccaa

SEQ ID NO: 555950 - RNA, 24 nt, Human
uggagugggggcagggggguggcu

SEQ ID NO: 555951 - RNA, 18 nt, Human
uggcaccagaccucugcc

SEQ ID NO: 555952 - RNA, 22 nt, Human
uggcaccagaccucugccaggc

SEQ ID NO: 555953 - RNA, 23 nt, Human
uggcacugauaaaacaaagagaa

SEQ ID NO: 555954 - RNA, 20 nt, Human
uggcagaaugcacaggacuc

SEQ ID NO: 555955 - RNA, 19 nt, Human
uggcagcaggagggccccu

SEQ ID NO: 555956 - RNA, 18 nt, Human
uggcagcaucuccccagg

SEQ ID NO: 555957 - RNA, 18 nt, Human
uggcauguggagcuccau

SEQ ID NO: 555958 - RNA, 23 nt, Human
uggccucugaguccuccccuagc

SEQ ID NO: 555959 - RNA, 19 nt, Human
uggcuccuggguccgcccc

SEQ ID NO: 555960 - RNA, 21 nt, Human
uggcucugcugcgcucuccuc

SEQ ID NO: 555961 - RNA, 18 nt, Human
ugggaacacggcugagac

SEQ ID NO: 555962 - RNA, 20 nt, Human
ugggacaagccuggggaaag

SEQ ID NO: 555963 - RNA, 21 nt, Human
ugggacaagccuggggaaagg

SEQ ID NO: 555964 - RNA, 20 nt, Human
ugggacagagggcucccacc

SEQ ID NO: 555965 - RNA, 20 nt, Human
ugggaggaaggggagggcaa

SEQ ID NO: 555966 - RNA, 23 nt, Human
ugggaggaaggggagggcagggg

SEQ ID NO: 555967 - RNA, 21 nt, Human
ugggcagcggggggaggggag

SEQ ID NO: 555968 - RNA, 22 nt, Human
uggggagcggcagugcugggac

SEQ ID NO: 555969 - RNA, 21 nt, Human
uggggcgggcacccuguccac

SEQ ID NO: 555970 - RNA, 23 nt, Human
uggggcucucgcugucugcaggu

SEQ ID NO: 555971 - RNA, 19 nt, Human
ugggguccuggcucagggg

SEQ ID NO: 555972 - RNA, 20 nt, Human
uggugaggguggagcugcgu

SEQ ID NO: 555973 - RNA, 18 nt, Human
ugguggguccuugggaga

SEQ ID NO: 555974 - RNA, 18 nt, Human
uuaacacagcccaacugg

SEQ ID NO: 555975 - RNA, 23 nt, Human
uucaauaauacugcaaaaaaagg

SEQ ID NO: 555976 - RNA, 22 nt, Human
uucccaaugagaccaauuugau

SEQ ID NO: 555977 - RNA, 19 nt, Human
uuccccacuaaacacaccc

SEQ ID NO: 555978 - RNA, 22 nt, Human
uuccuguggcuuggcccugcag

SEQ ID NO: 555979 - RNA, 19 nt, Human
uucgcaaggccugcacugc

SEQ ID NO: 555980 - RNA, 18 nt, Human
uuggcaaagcuauggagc

SEQ ID NO: 555981 - RNA, 25 nt, Human
uuggguccugaggcuucugagggag

SEQ ID NO: 555982 - RNA, 21 nt, Human
acugccuccuccugcgcuuuc

SEQ ID NO: 555983 - RNA, 18 nt, Human
aggcagcagugcggccca

SEQ ID NO: 555984 - RNA, 22 nt, Human
aggcggagacgcagaggaggcc

SEQ ID NO: 555985 - RNA, 24 nt, Human
aggucccaggcgccggcccuggac

SEQ ID NO: 555986 - RNA, 20 nt, Human
cacagcccauucaacagggc

SEQ ID NO: 555987 - RNA, 20 nt, Human
cacccggccuaaggccuaac

SEQ ID NO: 555988 - RNA, 18 nt, Human
caccgcugcagcugccgg

SEQ ID NO: 555989 - RNA, 22 nt, Human
cagggccgcccgccaggucccc

SEQ ID NO: 555990 - RNA, 21 nt, Human
ccaggucccaggcgccggccc

SEQ ID NO: 555991 - RNA, 21 nt, Human
ccccggagauccucgcguagg

SEQ ID NO: 555992 - RNA, 19 nt, Human
ccccggaggccgcguucgc

SEQ ID NO: 555993 - RNA, 22 nt, Human
ccccgggccucaggccggaccc

SEQ ID NO: 555994 - RNA, 23 nt, Human
ccccgggccucaggccggacccc

SEQ ID NO: 555995 - RNA, 23 nt, Human
cccgggccucaggccggaccccu

SEQ ID NO: 555996 - RNA, 22 nt, Human
ccgccccgggccucaggccgga

SEQ ID NO: 555997 - RNA, 19 nt, Human
ccgcccuucgccgucccug

SEQ ID NO: 555998 - RNA, 22 nt, Human
ccgccgccaacuccaacacccg

SEQ ID NO: 555999 - RNA, 20 nt, Human
ccgcugcagcugccgugcgc

SEQ ID NO: 556000 - RNA, 20 nt, Human
ccucaggccggaccccuccu

SEQ ID NO: 556001 - RNA, 21 nt, Human
ccuccuccugcgcuuuccgcc

SEQ ID NO: 556002 - RNA, 22 nt, Human
ccucgcgcaccccggauggcga

SEQ ID NO: 556003 - RNA, 20 nt, Human
cgccaccgcugcagcugccg

SEQ ID NO: 556004 - RNA, 24 nt, Human
cgccccgggccucaggccggaccc

SEQ ID NO: 556005 - RNA, 24 nt, Human
cgccgccccgggccucaggccgga

SEQ ID NO: 556006 - RNA, 19 nt, Human
cgccgucgccgccgccgcg

SEQ ID NO: 556007 - RNA, 19 nt, Human
cggaggccgcguucgccag

SEQ ID NO: 556008 - RNA, 19 nt, Human
cgugcgcccccggaggccg

SEQ ID NO: 556009 - RNA, 22 nt, Human
cuccaacacccguuuggucgcc

SEQ ID NO: 556010 - RNA, 18 nt, Human
cuccauggcggacgccgc

SEQ ID NO: 556011 - RNA, 21 nt, Human
cuccugcgcuuuccgcccuuc

SEQ ID NO: 556012 - RNA, 22 nt, Human
cugcagcugccgugcgcccccg

SEQ ID NO: 556013 - RNA, 18 nt, Human
gacccagcccgcgcaggg

SEQ ID NO: 556014 - RNA, 23 nt, Human
gaccccuccuuccugcgggaugc

SEQ ID NO: 556015 - RNA, 20 nt, Human
gagugccgcgaagggcacgu

SEQ ID NO: 556016 - RNA, 18 nt, Human
gcccaggcagcagugcgg

SEQ ID NO: 556017 - RNA, 21 nt, Human
gcccuggaccgaggggaucuc

SEQ ID NO: 556018 - RNA, 19 nt, Human
gcgaugcggaacgcucccg

SEQ ID NO: 556019 - RNA, 26 nt, Human
gcuuuccgcccuucgccgucccugac

SEQ ID NO: 556020 - RNA, 26 nt, Human
uccgccgagcucagaagugccaggcg

SEQ ID NO: 556021 - RNA, 19 nt, Human
ucgccgccgccgcgcccag

SEQ ID NO: 556022 - RNA, 21 nt, Human
ucuccauggcggacgccgccc

SEQ ID NO: 556023 - RNA, 25 nt, Human
ucuccugacccggcccacccggccu

SEQ ID NO: 556024 - RNA, 18 nt, Human
ugacccggcccacccggc

SEQ ID NO: 556025 - RNA, 18 nt, Human
ugacuggaggaaaccugc

SEQ ID NO: 556026 - RNA, 21 nt, Human
ugacuggaggaaaccugcagg

SEQ ID NO: 556027 - RNA, 22 nt, Human
ugccaggcgcugccaacggccc

SEQ ID NO: 556028 - RNA, 24 nt, Human
ugccgcgaagggcacguccgcgac

SEQ ID NO: 556029 - RNA, 18 nt, Human
uuuuuuuuuuuuuuuuug

SEQ ID NO: 556030 - RNA, 20 nt, Human
uuuuuuuuuuuuuuuuuugu

SEQ ID NO: 556031 - RNA, 26 nt, Human
aaaaaaaaucaaacacacaaauacug

SEQ ID NO: 556032 - RNA, 21 nt, Human
aaaaaaacccacaaaaacaga

SEQ ID NO: 556033 - RNA, 25 nt, Human
aaaaaaucaaacacacaaauacugg

SEQ ID NO: 556034 - RNA, 23 nt, Human
aaagaaaaaugauaggccuggug

SEQ ID NO: 556035 - RNA, 21 nt, Human
aacaagucuucccucccccag

SEQ ID NO: 556036 - RNA, 19 nt, Human
aagagaaacaacugaagca

SEQ ID NO: 556037 - RNA, 21 nt, Human
acaaaugccccaaaacacacc

SEQ ID NO: 556038 - RNA, 24 nt, Human
acaagcaaggaauguuuuauugug

SEQ ID NO: 556039 - RNA, 18 nt, Human
acacagugcccaaaagcu

SEQ ID NO: 556040 - RNA, 21 nt, Human
acagaacccacaaauaggagc

SEQ ID NO: 556041 - RNA, 26 nt, Human
acagccacaagaacccuggaaggccc

SEQ ID NO: 556042 - RNA, 24 nt, Human
acagugcccaaaagcuuuaaaugc

SEQ ID NO: 556043 - RNA, 18 nt, Human
accauaucuuauagaaac

SEQ ID NO: 556044 - RNA, 24 nt, Human
agagauuuacgauguaaugaauaa

SEQ ID NO: 556045 - RNA, 26 nt, Human
aggaauuugggggaaagggaagaaug

SEQ ID NO: 556046 - RNA, 21 nt, Human
agucuucccucccccagcucc

SEQ ID NO: 556047 - RNA, 23 nt, Human
augaacaauagcuuuugcuaguu

SEQ ID NO: 556048 - RNA, 19 nt, Human
augucaaacggucacauuu

SEQ ID NO: 556049 - RNA, 25 nt, Human
auugcagaggcucaucuuggugguc

SEQ ID NO: 556050 - RNA, 24 nt, Human
auuucuucucuuccucauccuggu

SEQ ID NO: 556051 - RNA, 23 nt, Human
caaaaaaaaaaaaaacccacaaa

SEQ ID NO: 556052 - RNA, 25 nt, Human
caaaaaaaaaaaaaacccacaaaaa

SEQ ID NO: 556053 - RNA, 20 nt, Human
caaaacuuaccacuacucaa

SEQ ID NO: 556054 - RNA, 24 nt, Human
caaauuuaguccuuuaguuuuauc

SEQ ID NO: 556055 - RNA, 19 nt, Human
cacaaaaacagaacccaca

SEQ ID NO: 556056 - RNA, 22 nt, Human
cacaaaugccccaaaacacacc

SEQ ID NO: 556057 - RNA, 25 nt, Human
caccauaaaaaaguuuugcccuagg

SEQ ID NO: 556058 - RNA, 18 nt, Human
cacuauauaguaacagau

SEQ ID NO: 556059 - RNA, 21 nt, Human
cagaacccacaaauaggagca

SEQ ID NO: 556060 - RNA, 19 nt, Human
cagaucucuuuaagaaguu

SEQ ID NO: 556061 - RNA, 20 nt, Human
caucacagugguggcugggu

SEQ ID NO: 556062 - RNA, 24 nt, Human
caucagccuaucuguacuuuucuu

SEQ ID NO: 556063 - RNA, 24 nt, Human
ccaacacagugaugcaguacugag

SEQ ID NO: 556064 - RNA, 19 nt, Human
ccacaaaaacagaacccac

SEQ ID NO: 556065 - RNA, 27 nt, Human
ccagucaaaaaaggcuauagagaaaaa

SEQ ID NO: 556066 - RNA, 19 nt, Human
cccacaaaaacagaaccca

SEQ ID NO: 556067 - RNA, 22 nt, Human
cccacuucuauaaaaauaucac

SEQ ID NO: 556068 - RNA, 21 nt, Human
ccccuugcuuccccagucaaa

SEQ ID NO: 556069 - RNA, 23 nt, Human
ccuguggcauacuggcugggaag

SEQ ID NO: 556070 - RNA, 22 nt, Human
cgaaaacucuaaggaacaacaa

SEQ ID NO: 556071 - RNA, 21 nt, Human
cuaaaacucauuugcuagcuc

SEQ ID NO: 556072 - RNA, 21 nt, Human
cucccauguuaacagcaccau

SEQ ID NO: 556073 - RNA, 20 nt, Human
cucuaaggaacaacaaaacc

SEQ ID NO: 556074 - RNA, 23 nt, Human
cugacaacagccacaagaacccu

SEQ ID NO: 556075 - RNA, 21 nt, Human
cuguacaaauuagccugcaua

SEQ ID NO: 556076 - RNA, 18 nt, Human
cuucucuuccucauccuc

SEQ ID NO: 556077 - RNA, 21 nt, Human
gaacaagucuucccuccccca

SEQ ID NO: 556078 - RNA, 21 nt, Human
gacugccuuuguuauuacaga

SEQ ID NO: 556079 - RNA, 20 nt, Human
gcaaagaacaguuuucuagc

SEQ ID NO: 556080 - RNA, 18 nt, Human
gcacuaccugaaaauaac

SEQ ID NO: 556081 - RNA, 20 nt, Human
gcgugacccccuuuccuuuc

SEQ ID NO: 556082 - RNA, 19 nt, Human
ggacugggcuguuucaggc

SEQ ID NO: 556083 - RNA, 26 nt, Human
gggaagagaaacaacugaagcaagcc

SEQ ID NO: 556084 - RNA, 18 nt, Human
ggggaaguuuugcugaag

SEQ ID NO: 556085 - RNA, 21 nt, Human
gggggaaagggaagaaugcgg

SEQ ID NO: 556086 - RNA, 22 nt, Human
guggagcugcuguucuuaggug

SEQ ID NO: 556087 - RNA, 20 nt, Human
guguggacgccgcccagcuc

SEQ ID NO: 556088 - RNA, 20 nt, Human
uaacacgaaaacucuaagga

SEQ ID NO: 556089 - RNA, 19 nt, Human
uaacauucaacauugugcu

SEQ ID NO: 556090 - RNA, 26 nt, Human
uaacugaacuaaaauuaauacaggaa

SEQ ID NO: 556091 - RNA, 20 nt, Human
uaccuaaugcuauaggggua

SEQ ID NO: 556092 - RNA, 25 nt, Human
uagaaacauagcuaguacaagaaca

SEQ ID NO: 556093 - RNA, 26 nt, Human
uagcaucucugggauacacagggcac

SEQ ID NO: 556094 - RNA, 18 nt, Human
uaggagauaccauaucca

SEQ ID NO: 556095 - RNA, 19 nt, Human
uaggagcaaagaacaguuu

SEQ ID NO: 556096 - RNA, 23 nt, Human
uaggaggcacuauaauaacuuua

SEQ ID NO: 556097 - RNA, 19 nt, Human
uaguaauauacauuuugca

SEQ ID NO: 556098 - RNA, 21 nt, Human
uauccuuuagguagcaggaca

SEQ ID NO: 556099 - RNA, 24 nt, Human
uaucuguacaaauuagccugcaua

SEQ ID NO: 556100 - RNA, 20 nt, Human
uauggaguaaacucagcagc

SEQ ID NO: 556101 - RNA, 26 nt, Human
uauucuauuuuccuuucaggaauuca

SEQ ID NO: 556102 - RNA, 18 nt, Human
uauuguaaacugcagaaa

SEQ ID NO: 556103 - RNA, 19 nt, Human
ucaaaaaaaaucaaacaca

SEQ ID NO: 556104 - RNA, 24 nt, Human
ucaaaaaaaaucaaacacacaaau

SEQ ID NO: 556105 - RNA, 21 nt, Human
ucaaaauaaggcaauaaccau

SEQ ID NO: 556106 - RNA, 18 nt, Human
ucaaacacacaaauacug

SEQ ID NO: 556107 - RNA, 23 nt, Human
ucaaacggucacauuuuacagaa

SEQ ID NO: 556108 - RNA, 24 nt, Human
ucagucauuacuaauggcaaugag

SEQ ID NO: 556109 - RNA, 26 nt, Human
uccacaaaugccccaaaacacaccuu

SEQ ID NO: 556110 - RNA, 24 nt, Human
ucggcauuuccuuaccacauauau

SEQ ID NO: 556111 - RNA, 24 nt, Human
ucuaaaaagaaaaaugauaggccu

SEQ ID NO: 556112 - RNA, 18 nt, Human
ucucaaaaaaaaaaaaaa

SEQ ID NO: 556113 - RNA, 24 nt, Human
ucucaaaaaaaaaaaaaacccaca

SEQ ID NO: 556114 - RNA, 22 nt, Human
ucuccacuuacuuccauauccc

SEQ ID NO: 556115 - RNA, 22 nt, Human
ucuguacaaauuagccugcaua

SEQ ID NO: 556116 - RNA, 19 nt, Human
ugaagugucuguacuugug

SEQ ID NO: 556117 - RNA, 18 nt, Human
ugacaacagccacaagaa

SEQ ID NO: 556118 - RNA, 26 nt, Human
ugacaacagccacaagaacccuggaa

SEQ ID NO: 556119 - RNA, 21 nt, Human
ugagagggacuucauuuggug

SEQ ID NO: 556120 - RNA, 24 nt, Human
ugcagaggcucaucuuggaacaag

SEQ ID NO: 556121 - RNA, 22 nt, Human
ugcauauucaggaauggaacaa

SEQ ID NO: 556122 - RNA, 18 nt, Human
ugcccuaggaauuugggg

SEQ ID NO: 556123 - RNA, 20 nt, Human
uggagcugcgugagagggac

SEQ ID NO: 556124 - RNA, 24 nt, Human
uggagcugcgugagagggacuuca

SEQ ID NO: 556125 - RNA, 19 nt, Human
uggaugauuauagcucugg

SEQ ID NO: 556126 - RNA, 19 nt, Human
uguagaggauauucacaua

SEQ ID NO: 556127 - RNA, 21 nt, Human
ugucacacagccauuaagaca

SEQ ID NO: 556128 - RNA, 19 nt, Human
uguccauucacgagacagc

SEQ ID NO: 556129 - RNA, 22 nt, Human
ugugcgugacccccuuuccuuu

SEQ ID NO: 556130 - RNA, 22 nt, Human
uguuaggaaagcaauuuaugag

SEQ ID NO: 556131 - RNA, 19 nt, Human
uucacuacacauuagcugu

SEQ ID NO: 556132 - RNA, 18 nt, Human
uucaggaauggaacaacc

SEQ ID NO: 556133 - RNA, 19 nt, Human
uuccccagucaaaaaaggc

SEQ ID NO: 556134 - RNA, 24 nt, Human
uuccuuaaucccuaucuguacaaa

SEQ ID NO: 556135 - RNA, 21 nt, Human
uucguaaguuccuaaugccac

SEQ ID NO: 556136 - RNA, 21 nt, Human
uugcugaaguaauuccagucu

SEQ ID NO: 556137 - RNA, 19 nt, Human
uuuuguuugauuuuuuguc

SEQ ID NO: 556138 - RNA, 28 nt, Human
aaaagcugaagucuagaaccgaagacac

SEQ ID NO: 556139 - RNA, 18 nt, Human
aaacgaaguggagacucg

SEQ ID NO: 556140 - RNA, 20 nt, Human
acauccauacaaaauauagc

SEQ ID NO: 556141 - RNA, 23 nt, Human
accuugaaaaauauuuugaaaaa

SEQ ID NO: 556142 - RNA, 24 nt, Human
aguggagacucgggcgcuggagcu

SEQ ID NO: 556143 - RNA, 20 nt, Human
auuuagcaauuuccaaaagc

SEQ ID NO: 556144 - RNA, 20 nt, Human
caaauaugaaguauaucacc

SEQ ID NO: 556145 - RNA, 20 nt, Human
cuacagaggcaggauucucu

SEQ ID NO: 556146 - RNA, 18 nt, Human
gagcuccgggucgcaccg

SEQ ID NO: 556147 - RNA, 19 nt, Human
gcagagauuuuugaauucu

SEQ ID NO: 556148 - RNA, 20 nt, Human
gcagagauuuuugaauucua

SEQ ID NO: 556149 - RNA, 18 nt, Human
ggcguaaccugcuacugg

SEQ ID NO: 556150 - RNA, 25 nt, Human
uagcaauuuccaaaagcugaagucu

SEQ ID NO: 556151 - RNA, 24 nt, Human
uauagcaaugguugugggcauaaa

SEQ ID NO: 556152 - RNA, 21 nt, Human
uccgggucgcaccgcccuggg

SEQ ID NO: 556153 - RNA, 19 nt, Human
ugacauggcguaaccugcu

SEQ ID NO: 556154 - RNA, 24 nt, Human
uggagacucgggcgcuggagcucc

SEQ ID NO: 556155 - RNA, 27 nt, Human
uuagaaaauaaaacuuuuaauacuuaa

SEQ ID NO: 556156 - RNA, 21 nt, Human
uugcuggaugacucuugaaau

SEQ ID NO: 556157 - RNA, 20 nt, Human
uuuuuuuuuuuuuaaaggug

SEQ ID NO: 556158 - RNA, 22 nt, Human
uuuuuuuuuuuuuuuuuaaagg

SEQ ID NO: 556159 - RNA, 20 nt, Human
aacauggugaaacccugucu

SEQ ID NO: 556160 - RNA, 21 nt, Human
aacauggugaaacccugucuc

SEQ ID NO: 556161 - RNA, 18 nt, Human
aagaagacaaaggucuuc

SEQ ID NO: 556162 - RNA, 18 nt, Human
aagacaaaggucuucagc

SEQ ID NO: 556163 - RNA, 18 nt, Human
aagcggaacacaaagcgc

SEQ ID NO: 556164 - RNA, 18 nt, Human
aagucuugaccacugagc

SEQ ID NO: 556165 - RNA, 24 nt, Human
aaucgcuugaacccaggaggugga

SEQ ID NO: 556166 - RNA, 24 nt, Human
aaucgcuugaacccaggaggugga

SEQ ID NO: 556167 - RNA, 24 nt, Human
acccugucucuacuaaaaauauaa

SEQ ID NO: 556168 - RNA, 18 nt, Human
acugcacuccaaccuggg

SEQ ID NO: 556169 - RNA, 18 nt, Human
acugcacuccaaccuggg

SEQ ID NO: 556170 - RNA, 24 nt, Human
acugcacuccaaccugggagacag

SEQ ID NO: 556171 - RNA, 24 nt, Human
acugcacuccaaccugggagacag

SEQ ID NO: 556172 - RNA, 24 nt, Human
acuugaggucagggguucaagacc

SEQ ID NO: 556173 - RNA, 19 nt, Human
agaaagacuuccaggagca

SEQ ID NO: 556174 - RNA, 22 nt, Human
agaaucgcuugaacccaggagg

SEQ ID NO: 556175 - RNA, 19 nt, Human
agaccaggaggaggaagac

SEQ ID NO: 556176 - RNA, 24 nt, Human
agcacuuugggaggcagagguggg

SEQ ID NO: 556177 - RNA, 19 nt, Human
agcagcaccaguagcagca

SEQ ID NO: 556178 - RNA, 20 nt, Human
agccgagaucgugccacugc

SEQ ID NO: 556179 - RNA, 20 nt, Human
agccgagaucgugccacugc

SEQ ID NO: 556180 - RNA, 22 nt, Human
agccuggacaacauggugaaac

SEQ ID NO: 556181 - RNA, 24 nt, Human
agccuggacaacauggugaaaccc

SEQ ID NO: 556182 - RNA, 18 nt, Human
agcuggacaugggggccc

SEQ ID NO: 556183 - RNA, 18 nt, Human
agcuggacaugggggccc

SEQ ID NO: 556184 - RNA, 28 nt, Human
aggcagaaaaagaagaugcgucagcugg

SEQ ID NO: 556185 - RNA, 21 nt, Human
aggcagagguggguggaucac

SEQ ID NO: 556186 - RNA, 23 nt, Human
aggcaggagaaucgcuugaaccc

SEQ ID NO: 556187 - RNA, 23 nt, Human
aggcaggagaaucgcuugaaccc

SEQ ID NO: 556188 - RNA, 24 nt, Human
aggcaggagaaucgcuugaaccca

SEQ ID NO: 556189 - RNA, 24 nt, Human
aggcaggagaaucgcuugaaccca

SEQ ID NO: 556190 - RNA, 22 nt, Human
aggcauugaaggguuggcaccu

SEQ ID NO: 556191 - RNA, 20 nt, Human
aggcugaggcaggagaaucg

SEQ ID NO: 556192 - RNA, 20 nt, Human
aggcugaggcaggagaaucg

SEQ ID NO: 556193 - RNA, 24 nt, Human
aggcugaggcaggagaaucgcuug

SEQ ID NO: 556194 - RNA, 24 nt, Human
aggcugaggcaggagaaucgcuug

SEQ ID NO: 556195 - RNA, 21 nt, Human
aggucagggguucaagaccag

SEQ ID NO: 556196 - RNA, 21 nt, Human
agguggagguugcagucagcc

SEQ ID NO: 556197 - RNA, 24 nt, Human
agguggagguugcagucagccgag

SEQ ID NO: 556198 - RNA, 24 nt, Human
agguggagguugcagucagccgag

SEQ ID NO: 556199 - RNA, 23 nt, Human
agguggguggaucacuugagguc

SEQ ID NO: 556200 - RNA, 19 nt, Human
agucagccgagaucgugcc

SEQ ID NO: 556201 - RNA, 19 nt, Human
agucagccgagaucgugcc

SEQ ID NO: 556202 - RNA, 19 nt, Human
auaguacuuggacccccag

SEQ ID NO: 556203 - RNA, 24 nt, Human
aucacuugaggucagggguucaag

SEQ ID NO: 556204 - RNA, 22 nt, Human
aucccugggggcagggucuccg

SEQ ID NO: 556205 - RNA, 24 nt, Human
aucgugccacugcacuccaaccug

SEQ ID NO: 556206 - RNA, 24 nt, Human
aucgugccacugcacuccaaccug

SEQ ID NO: 556207 - RNA, 22 nt, Human
augaagacaugaggucuagguu

SEQ ID NO: 556208 - RNA, 22 nt, Human
caacauggugaaacccugucuc

SEQ ID NO: 556209 - RNA, 24 nt, Human
caacauggugaaacccugucucua

SEQ ID NO: 556210 - RNA, 20 nt, Human
caaccccuucacccagcucu

SEQ ID NO: 556211 - RNA, 24 nt, Human
cacaccuguaaucccagcacuuug

SEQ ID NO: 556212 - RNA, 18 nt, Human
cacauugccacccauguc

SEQ ID NO: 556213 - RNA, 23 nt, Human
caccuguaaucccagcacuuugg

SEQ ID NO: 556214 - RNA, 24 nt, Human
caccuguaaucccagcacuuuggg

SEQ ID NO: 556215 - RNA, 23 nt, Human
cacgccuguaaucccagcuacug

SEQ ID NO: 556216 - RNA, 23 nt, Human
cacgccuguaaucccagcuacug

SEQ ID NO: 556217 - RNA, 23 nt, Human
cacuccaaccugggagacagagc

SEQ ID NO: 556218 - RNA, 23 nt, Human
cacuccaaccugggagacagagc

SEQ ID NO: 556219 - RNA, 24 nt, Human
cacugcacuccaaccugggagaca

SEQ ID NO: 556220 - RNA, 24 nt, Human
cacugcacuccaaccugggagaca

SEQ ID NO: 556221 - RNA, 18 nt, Human
cacugcaggcugccggaa

SEQ ID NO: 556222 - RNA, 23 nt, Human
cacuugaggucagggguucaaga

SEQ ID NO: 556223 - RNA, 23 nt, Human
cagagcucggggccccgggcccc

SEQ ID NO: 556224 - RNA, 27 nt, Human
cagagguggguggaucacuugagguca

SEQ ID NO: 556225 - RNA, 18 nt, Human
cagaugagaaaacagacu

SEQ ID NO: 556226 - RNA, 21 nt, Human
cagcaccagggugcgccagua

SEQ ID NO: 556227 - RNA, 18 nt, Human
cagcaccaguagcagcag

SEQ ID NO: 556228 - RNA, 21 nt, Human
cagcacuuugggaggcagagg

SEQ ID NO: 556229 - RNA, 24 nt, Human
cagcacuuugggaggcagaggugg

SEQ ID NO: 556230 - RNA, 20 nt, Human
cagcagcaccagggugcgcc

SEQ ID NO: 556231 - RNA, 19 nt, Human
cagcgaaacagauugcacc

SEQ ID NO: 556232 - RNA, 21 nt, Human
cagcgaaacagauugcaccuc

SEQ ID NO: 556233 - RNA, 25 nt, Human
caggaccagcacugcaggcugccgg

SEQ ID NO: 556234 - RNA, 18 nt, Human
caguggcgguggguggga

SEQ ID NO: 556235 - RNA, 20 nt, Human
cauaaaaaaagaaagcgguc

SEQ ID NO: 556236 - RNA, 26 nt, Human
cauccagaaccacauccuccguguuc

SEQ ID NO: 556237 - RNA, 22 nt, Human
caucucuccggugaguggauuc

SEQ ID NO: 556238 - RNA, 18 nt, Human
ccacagcguuggcacagc

SEQ ID NO: 556239 - RNA, 19 nt, Human
ccacgccuguaaucccagc

SEQ ID NO: 556240 - RNA, 19 nt, Human
ccacgccuguaaucccagc

SEQ ID NO: 556241 - RNA, 20 nt, Human
ccacugcacuccaaccuggg

SEQ ID NO: 556242 - RNA, 20 nt, Human
ccacugcacuccaaccuggg

SEQ ID NO: 556243 - RNA, 22 nt, Human
ccacugcacuccaaccugggag

SEQ ID NO: 556244 - RNA, 22 nt, Human
ccacugcacuccaaccugggag

SEQ ID NO: 556245 - RNA, 24 nt, Human
ccacugcacuccaaccugggagac

SEQ ID NO: 556246 - RNA, 24 nt, Human
ccacugcacuccaaccugggagac

SEQ ID NO: 556247 - RNA, 19 nt, Human
ccaggagcaggcauugaag

SEQ ID NO: 556248 - RNA, 20 nt, Human
cccacgccuguaaucccagc

SEQ ID NO: 556249 - RNA, 20 nt, Human
cccacgccuguaaucccagc

SEQ ID NO: 556250 - RNA, 23 nt, Human
cccacgccuguaaucccagcuac

SEQ ID NO: 556251 - RNA, 23 nt, Human
cccacgccuguaaucccagcuac

SEQ ID NO: 556252 - RNA, 21 nt, Human
cccaggagguggagguugcag

SEQ ID NO: 556253 - RNA, 21 nt, Human
cccaggagguggagguugcag

SEQ ID NO: 556254 - RNA, 20 nt, Human
cccccagucgagcuccucug

SEQ ID NO: 556255 - RNA, 23 nt, Human
cccgugaggauguacacauugcc

SEQ ID NO: 556256 - RNA, 19 nt, Human
cccuggagcuccugcagcg

SEQ ID NO: 556257 - RNA, 26 nt, Human
ccgacucccaagcccaagucuugacc

SEQ ID NO: 556258 - RNA, 19 nt, Human
ccuccacagucagcagcuc

SEQ ID NO: 556259 - RNA, 21 nt, Human
ccuccuucagcuucacuaccg

SEQ ID NO: 556260 - RNA, 24 nt, Human
ccugcaggaccagcacugcaggcu

SEQ ID NO: 556261 - RNA, 22 nt, Human
ccuggacaacauggugaaaccc

SEQ ID NO: 556262 - RNA, 24 nt, Human
ccuggacaacauggugaaacccug

SEQ ID NO: 556263 - RNA, 18 nt, Human
ccuguaaucccagcuacu

SEQ ID NO: 556264 - RNA, 22 nt, Human
ccuguaaucccagcuacugggg

SEQ ID NO: 556265 - RNA, 22 nt, Human
ccuguaaucccagcuacugggg

SEQ ID NO: 556266 - RNA, 19 nt, Human
cgagaucgugccacugcac

SEQ ID NO: 556267 - RNA, 22 nt, Human
cgccuguaaucccagcuacugg

SEQ ID NO: 556268 - RNA, 23 nt, Human
cgccuguaaucccagcuacuggg

SEQ ID NO: 556269 - RNA, 23 nt, Human
cgccuguaaucccagcuacuggg

SEQ ID NO: 556270 - RNA, 19 nt, Human
cggcccggccccauugcgg

SEQ ID NO: 556271 - RNA, 21 nt, Human
cggcgccagaugaagaagaca

SEQ ID NO: 556272 - RNA, 20 nt, Human
cggugggugggagggucccc

SEQ ID NO: 556273 - RNA, 22 nt, Human
cucacaccuguaaucccagcac

SEQ ID NO: 556274 - RNA, 24 nt, Human
cucacaccuguaaucccagcacuu

SEQ ID NO: 556275 - RNA, 22 nt, Human
cuccaaccccuucacccagcuc

SEQ ID NO: 556276 - RNA, 23 nt, Human
cucggcccggccccauugcgggc

SEQ ID NO: 556277 - RNA, 18 nt, Human
cucggggccccgggcccc

SEQ ID NO: 556278 - RNA, 22 nt, Human
cugccccuggagcuccugcaac

SEQ ID NO: 556279 - RNA, 24 nt, Human
cuggacaacauggugaaacccugu

SEQ ID NO: 556280 - RNA, 21 nt, Human
cuggccggcccuuccuccucc

SEQ ID NO: 556281 - RNA, 19 nt, Human
cuuggacccccagucgagc

SEQ ID NO: 556282 - RNA, 21 nt, Human
cuugguuggcaguggcggugg

SEQ ID NO: 556283 - RNA, 19 nt, Human
gaacuccaggucuucuggc

SEQ ID NO: 556284 - RNA, 23 nt, Human
gagaaaacagacuugaagagguu

SEQ ID NO: 556285 - RNA, 23 nt, Human
gagaaucgcuugaacccaggagg

SEQ ID NO: 556286 - RNA, 18 nt, Human
gagaucgugccacugcac

SEQ ID NO: 556287 - RNA, 19 nt, Human
gaggaagacggugagcagc

SEQ ID NO: 556288 - RNA, 30 nt, Human
gaggcagagguggguggaucacuugagguu

SEQ ID NO: 556289 - RNA, 19 nt, Human
gaggcuugaugucaacugg

SEQ ID NO: 556290 - RNA, 24 nt, Human
gagguggguggaucacuugagguu

SEQ ID NO: 556291 - RNA, 23 nt, Human
gagguugcagucagccgagaucg

SEQ ID NO: 556292 - RNA, 23 nt, Human
gagguugcagucagccgagaucg

SEQ ID NO: 556293 - RNA, 23 nt, Human
gaucacuugaggucagggguuca

SEQ ID NO: 556294 - RNA, 24 nt, Human
gaucacuugaggucagggguucaa

SEQ ID NO: 556295 - RNA, 19 nt, Human
gaucugggaugucuuccuc

SEQ ID NO: 556296 - RNA, 22 nt, Human
gaugagaaaacagacuugaaga

SEQ ID NO: 556297 - RNA, 18 nt, Human
gcaaaggguccagaccug

SEQ ID NO: 556298 - RNA, 22 nt, Human
gcagcaccaguagcagcagcac

SEQ ID NO: 556299 - RNA, 22 nt, Human
gcaggagaaucgcuugaaccca

SEQ ID NO: 556300 - RNA, 22 nt, Human
gcaggagaaucgcuugaaccca

SEQ ID NO: 556301 - RNA, 23 nt, Human
gccagacgcucaccucccgcucc

SEQ ID NO: 556302 - RNA, 19 nt, Human
gccuggcaugguggcucac

SEQ ID NO: 556303 - RNA, 18 nt, Human
gcgaaacagauugcaccu

SEQ ID NO: 556304 - RNA, 20 nt, Human
gcugcaacuccagggauccu

SEQ ID NO: 556305 - RNA, 18 nt, Human
gcuuccgccccuucccca

SEQ ID NO: 556306 - RNA, 19 nt, Human
ggagcaggcauugaagggu

SEQ ID NO: 556307 - RNA, 23 nt, Human
ggagguugcagucagccgagauc

SEQ ID NO: 556308 - RNA, 24 nt, Human
ggagguugcagucagccgagaucg

SEQ ID NO: 556309 - RNA, 24 nt, Human
ggagguugcagucagccgagaucg

SEQ ID NO: 556310 - RNA, 22 nt, Human
ggaucacuugaggucagggguu

SEQ ID NO: 556311 - RNA, 21 nt, Human
ggccacagcguuggcacagcc

SEQ ID NO: 556312 - RNA, 21 nt, Human
ggcccacgccuguaaucccag

SEQ ID NO: 556313 - RNA, 21 nt, Human
ggcccacgccuguaaucccag

SEQ ID NO: 556314 - RNA, 19 nt, Human
ggcggcggcagcgaaacag

SEQ ID NO: 556315 - RNA, 21 nt, Human
ggcucacaccuguaaucccag

SEQ ID NO: 556316 - RNA, 26 nt, Human
gggaggccacagcguuggcacagccc

SEQ ID NO: 556317 - RNA, 22 nt, Human
gggaggcugaggcaggagaauc

SEQ ID NO: 556318 - RNA, 22 nt, Human
gggaggcugaggcaggagaauc

SEQ ID NO: 556319 - RNA, 23 nt, Human
gggccccacgcaccaugucuggu

SEQ ID NO: 556320 - RNA, 24 nt, Human
gggggcccacgccuguaaucccag

SEQ ID NO: 556321 - RNA, 24 nt, Human
gggggcccacgccuguaaucccag

SEQ ID NO: 556322 - RNA, 21 nt, Human
gguggaucacuugaggucagg

SEQ ID NO: 556323 - RNA, 24 nt, Human
gguggcucacaccuguaaucccag

SEQ ID NO: 556324 - RNA, 20 nt, Human
gguguagaagaccaggagga

SEQ ID NO: 556325 - RNA, 19 nt, Human
ggugucaggaagacuuugc

SEQ ID NO: 556326 - RNA, 24 nt, Human
gucagcuggggcugguguagggac

SEQ ID NO: 556327 - RNA, 21 nt, Human
gugaaacccugucucuacuaa

SEQ ID NO: 556328 - RNA, 26 nt, Human
guggagcaggcacaucuugaggaaag

SEQ ID NO: 556329 - RNA, 19 nt, Human
guggugucaggaagacuuu

SEQ ID NO: 556330 - RNA, 19 nt, Human
uacugaucuuauuaccucu

SEQ ID NO: 556331 - RNA, 22 nt, Human
uaggaucuggagacacaaaagg

SEQ ID NO: 556332 - RNA, 19 nt, Human
uauuaccucuguuuugcag

SEQ ID NO: 556333 - RNA, 23 nt, Human
ucagccgagaucgugccacugca

SEQ ID NO: 556334 - RNA, 23 nt, Human
ucagccgagaucgugccacugca

SEQ ID NO: 556335 - RNA, 21 nt, Human
uccacagucagcagcucaaac

SEQ ID NO: 556336 - RNA, 18 nt, Human
uccagaccugcgccagac

SEQ ID NO: 556337 - RNA, 21 nt, Human
ucccaagcccaagucuugacc

SEQ ID NO: 556338 - RNA, 21 nt, Human
ucccugggggcagggucuccg

SEQ ID NO: 556339 - RNA, 24 nt, Human
ucccugggggcagggucuccggug

SEQ ID NO: 556340 - RNA, 24 nt, Human
ucgcuugaacccaggagguggagg

SEQ ID NO: 556341 - RNA, 24 nt, Human
ucgcuugaacccaggagguggagg

SEQ ID NO: 556342 - RNA, 23 nt, Human
ucgugccacugcacuccaaccug

SEQ ID NO: 556343 - RNA, 23 nt, Human
ucgugccacugcacuccaaccug

SEQ ID NO: 556344 - RNA, 18 nt, Human
ucuccagaggcucuggcu

SEQ ID NO: 556345 - RNA, 19 nt, Human
ucuccagaggcucuggcug

SEQ ID NO: 556346 - RNA, 21 nt, Human
ucucuacuaaaaauauaaaaa

SEQ ID NO: 556347 - RNA, 22 nt, Human
ucugcuuucgcuucuucuugcc

SEQ ID NO: 556348 - RNA, 20 nt, Human
ugaaaucauaggaucuggag

SEQ ID NO: 556349 - RNA, 24 nt, Human
ugaagugaacgucugucuccugcu

SEQ ID NO: 556350 - RNA, 23 nt, Human
ugagaaaacagacuugaagaggu

SEQ ID NO: 556351 - RNA, 20 nt, Human
ugaggcaggagaaucgcuug

SEQ ID NO: 556352 - RNA, 20 nt, Human
ugaggcaggagaaucgcuug

SEQ ID NO: 556353 - RNA, 24 nt, Human
ugaggcaggagaaucgcuugaacc

SEQ ID NO: 556354 - RNA, 24 nt, Human
ugaggcaggagaaucgcuugaacc

SEQ ID NO: 556355 - RNA, 25 nt, Human
ugaggcaggagaaucgcuugaaccc

SEQ ID NO: 556356 - RNA, 25 nt, Human
ugaggcaggagaaucgcuugaaccc

SEQ ID NO: 556357 - RNA, 22 nt, Human
ugccagccugagccuccugcgc

SEQ ID NO: 556358 - RNA, 19 nt, Human
ugcugcccaccuugacagc

SEQ ID NO: 556359 - RNA, 21 nt, Human
ugcuugucaugcuccaacccc

SEQ ID NO: 556360 - RNA, 24 nt, Human
uggacaacauggugaaacccuguc

SEQ ID NO: 556361 - RNA, 24 nt, Human
uggaucacuugaggucagggguuc

SEQ ID NO: 556362 - RNA, 24 nt, Human
uggcaugguggcucacaccuguaa

SEQ ID NO: 556363 - RNA, 24 nt, Human
uggcggugggugggaggguccccu

SEQ ID NO: 556364 - RNA, 21 nt, Human
uggcucacaccuguaauccca

SEQ ID NO: 556365 - RNA, 22 nt, Human
uggcucacaccuguaaucccag

SEQ ID NO: 556366 - RNA, 24 nt, Human
uggcucacaccuguaaucccagca

SEQ ID NO: 556367 - RNA, 19 nt, Human
ugggaggcagaggugggug

SEQ ID NO: 556368 - RNA, 20 nt, Human
ugggaggcagaggugggugg

SEQ ID NO: 556369 - RNA, 24 nt, Human
ugggaggcagagguggguggauca

SEQ ID NO: 556370 - RNA, 22 nt, Human
uggggcugguguagggacacag

SEQ ID NO: 556371 - RNA, 24 nt, Human
ugggggcccacgccuguaauccca

SEQ ID NO: 556372 - RNA, 24 nt, Human
ugggggcccacgccuguaauccca

SEQ ID NO: 556373 - RNA, 24 nt, Human
ugguggcucacaccuguaauccca

SEQ ID NO: 556374 - RNA, 21 nt, Human
ugguguagggacacagcuggg

SEQ ID NO: 556375 - RNA, 23 nt, Human
ugguguagggacacagcugggcc

SEQ ID NO: 556376 - RNA, 21 nt, Human
ugucaugcuccaaccccuuca

SEQ ID NO: 556377 - RNA, 18 nt, Human
ugugaagagaucccuggg

SEQ ID NO: 556378 - RNA, 21 nt, Human
ugugagcuugaauguguuugg

SEQ ID NO: 556379 - RNA, 22 nt, Human
ugugagcuugaauguguuuggc

SEQ ID NO: 556380 - RNA, 21 nt, Human
uucaaaacucccaacgggaga

SEQ ID NO: 556381 - RNA, 24 nt, Human
uugaacccaggagguggagguugc

SEQ ID NO: 556382 - RNA, 24 nt, Human
uugaacccaggagguggagguugc

SEQ ID NO: 556383 - RNA, 21 nt, Human
uugaauguguuuggccagaaa

SEQ ID NO: 556384 - RNA, 22 nt, Human
uugcagucagccgagaucgugc

SEQ ID NO: 556385 - RNA, 22 nt, Human
uugcagucagccgagaucgugc

SEQ ID NO: 556386 - RNA, 20 nt, Human
uugggaggcagaggugggug

SEQ ID NO: 556387 - RNA, 21 nt, Human
uugggaggcagaggugggugg

SEQ ID NO: 556388 - RNA, 21 nt, Human
uuuugcagaugagaaaacaga

SEQ ID NO: 556389 - RNA, 19 nt, Human
aaaaacacacaggcaugaa

SEQ ID NO: 556390 - RNA, 21 nt, Human
aaaacacacaggcaugaauaa

SEQ ID NO: 556391 - RNA, 19 nt, Human
aaaacaguguugguucuuu

SEQ ID NO: 556392 - RNA, 27 nt, Human
aaacaagcagcaagcuacaaaauccau

SEQ ID NO: 556393 - RNA, 26 nt, Human
aagcuacaaaauccaucaccaccaac

SEQ ID NO: 556394 - RNA, 22 nt, Human
aauacaagauucuaaaagugaa

SEQ ID NO: 556395 - RNA, 24 nt, Human
aauagcaagaaggguaaugguagc

SEQ ID NO: 556396 - RNA, 22 nt, Human
acaaaauccaucaccaccaaca

SEQ ID NO: 556397 - RNA, 23 nt, Human
acaguaaugagaaugggcaguuc

SEQ ID NO: 556398 - RNA, 22 nt, Human
accaguggugaaacaagcagca

SEQ ID NO: 556399 - RNA, 19 nt, Human
acuuaaauacaagauucua

SEQ ID NO: 556400 - RNA, 20 nt, Human
aguggugaaacaagcagcaa

SEQ ID NO: 556401 - RNA, 24 nt, Human
caaaauagugcccauauuuccguu

SEQ ID NO: 556402 - RNA, 19 nt, Human
caucaccaccaacaguuuc

SEQ ID NO: 556403 - RNA, 23 nt, Human
cauugauuugacuggaaccagca

SEQ ID NO: 556404 - RNA, 23 nt, Human
ccaguggugaaacaagcagcaag

SEQ ID NO: 556405 - RNA, 24 nt, Human
cucucuuaaucuacuaagagaaca

SEQ ID NO: 556406 - RNA, 20 nt, Human
gcccaccgcagauaaaguug

SEQ ID NO: 556407 - RNA, 19 nt, Human
ggcaauuuaaugguuaaaa

SEQ ID NO: 556408 - RNA, 28 nt, Human
uaaaaaaguacaauucuucacagacaca

SEQ ID NO: 556409 - RNA, 23 nt, Human
uaaaucucccaaggcuuuaaucu

SEQ ID NO: 556410 - RNA, 19 nt, Human
uaagaaaaacacacaggca

SEQ ID NO: 556411 - RNA, 25 nt, Human
uaagaaaaacacacaggcaugaaua

SEQ ID NO: 556412 - RNA, 20 nt, Human
uaaucuaguucaucagugca

SEQ ID NO: 556413 - RNA, 20 nt, Human
uacaaaauccaucaccacca

SEQ ID NO: 556414 - RNA, 26 nt, Human
uagaauucaaaauagugcccauauuu

SEQ ID NO: 556415 - RNA, 22 nt, Human
uagccagcucucagaauaaugc

SEQ ID NO: 556416 - RNA, 22 nt, Human
uaguauaaaucucccaaggcuu

SEQ ID NO: 556417 - RNA, 21 nt, Human
ucggaaaucuagcuuggagcc

SEQ ID NO: 556418 - RNA, 22 nt, Human
ucuagaauucaaaauagugccc

SEQ ID NO: 556419 - RNA, 27 nt, Human
ugaaacaagcagcaagcuacaaaaucc

SEQ ID NO: 556420 - RNA, 24 nt, Human
uggugaaacaagcagcaagcuaca

SEQ ID NO: 556421 - RNA, 25 nt, Human
uugguucuugccaucacugaauuua

SEQ ID NO: 556422 - RNA, 26 nt, Human
uuuuuuuuuuuuuuuuuacuucuuaa

SEQ ID NO: 556423 - RNA, 25 nt, Human
aagcaagucacgauucagcucacac

SEQ ID NO: 556424 - RNA, 20 nt, Human
acagcacagguccaaugugg

SEQ ID NO: 556425 - RNA, 22 nt, Human
acagcacagguccaauguggug

SEQ ID NO: 556426 - RNA, 18 nt, Human
agacaggcugggcagagg

SEQ ID NO: 556427 - RNA, 19 nt, Human
agacaggcugggcagaggc

SEQ ID NO: 556428 - RNA, 22 nt, Human
agcacagguccaaugugguggu

SEQ ID NO: 556429 - RNA, 20 nt, Human
agcaguccagggcgcucuuc

SEQ ID NO: 556430 - RNA, 21 nt, Human
agcaucaggaacagccacaaa

SEQ ID NO: 556431 - RNA, 21 nt, Human
agccacaaaucucaugcgccu

SEQ ID NO: 556432 - RNA, 21 nt, Human
aggacagcacagguccaaugu

SEQ ID NO: 556433 - RNA, 20 nt, Human
aggauggggcaggcccaccu

SEQ ID NO: 556434 - RNA, 22 nt, Human
aucaggaacagccacaaaucuc

SEQ ID NO: 556435 - RNA, 20 nt, Human
cacugcuggggcuggaggcc

SEQ ID NO: 556436 - RNA, 20 nt, Human
cagauaagcacugugugcca

SEQ ID NO: 556437 - RNA, 19 nt, Human
cagccuuucugaggaggau

SEQ ID NO: 556438 - RNA, 19 nt, Human
caggauguggcugucccug

SEQ ID NO: 556439 - RNA, 22 nt, Human
caggauguggcugucccuggca

SEQ ID NO: 556440 - RNA, 23 nt, Human
cagugcccaugcugccucuuucu

SEQ ID NO: 556441 - RNA, 21 nt, Human
cauggggccuccaacaccacc

SEQ ID NO: 556442 - RNA, 20 nt, Human
ccaaugugguggugugcagg

SEQ ID NO: 556443 - RNA, 20 nt, Human
ccaggacagcacagguccaa

SEQ ID NO: 556444 - RNA, 19 nt, Human
ccaugcugccucuuucugc

SEQ ID NO: 556445 - RNA, 22 nt, Human
cccagcagguucaaaguagagc

SEQ ID NO: 556446 - RNA, 18 nt, Human
ccccaaagccaagugucc

SEQ ID NO: 556447 - RNA, 21 nt, Human
ccccccaaagccaaguguccc

SEQ ID NO: 556448 - RNA, 22 nt, Human
ccucagcaguccagggcgcucu

SEQ ID NO: 556449 - RNA, 20 nt, Human
ccucaguuuccuucccccca

SEQ ID NO: 556450 - RNA, 21 nt, Human
ccuccaacaccaccucccagg

SEQ ID NO: 556451 - RNA, 24 nt, Human
ccucucugggccucaguuuccuuc

SEQ ID NO: 556452 - RNA, 20 nt, Human
ccugagcucugggcuguugg

SEQ ID NO: 556453 - RNA, 21 nt, Human
ccugccacucaguggcugggg

SEQ ID NO: 556454 - RNA, 23 nt, Human
ccuugaaaaucucuuccuugccc

SEQ ID NO: 556455 - RNA, 22 nt, Human
ccuuggccagugguugccccuc

SEQ ID NO: 556456 - RNA, 27 nt, Human
cgagcgaguuucuccucugggcugaac

SEQ ID NO: 556457 - RNA, 19 nt, Human
cgcugcagaccagcaggau

SEQ ID NO: 556458 - RNA, 21 nt, Human
cgggguggaccacgcugcaga

SEQ ID NO: 556459 - RNA, 18 nt, Human
cgguguagacaggcuggg

SEQ ID NO: 556460 - RNA, 20 nt, Human
cucaggagaggacagagaaa

SEQ ID NO: 556461 - RNA, 22 nt, Human
cucaggagaggacagagaaagg

SEQ ID NO: 556462 - RNA, 26 nt, Human
cuggcagugcccaugcugccucuuuc

SEQ ID NO: 556463 - RNA, 18 nt, Human
cugucuucugaaggcgag

SEQ ID NO: 556464 - RNA, 19 nt, Human
gaaccaugaguccagcuag

SEQ ID NO: 556465 - RNA, 21 nt, Human
gauggggcaggcccaccuccu

SEQ ID NO: 556466 - RNA, 28 nt, Human
gcagaaccucaggagaggagggaacgcc

SEQ ID NO: 556467 - RNA, 21 nt, Human
gcuggggcuggaggccaggcu

SEQ ID NO: 556468 - RNA, 18 nt, Human
ggcaggagcuugcacacg

SEQ ID NO: 556469 - RNA, 22 nt, Human
ggccaggcucuuagccaaaacu

SEQ ID NO: 556470 - RNA, 21 nt, Human
gggaagcaagucacgauucag

SEQ ID NO: 556471 - RNA, 24 nt, Human
gggguggaccacgcugcagaccag

SEQ ID NO: 556472 - RNA, 19 nt, Human
gggguuggccggcaggagc

SEQ ID NO: 556473 - RNA, 19 nt, Human
ggguaaguccuagcagagc

SEQ ID NO: 556474 - RNA, 19 nt, Human
uaggauggggcaggcccac

SEQ ID NO: 556475 - RNA, 24 nt, Human
uaggauggggcaggcccaccuccu

SEQ ID NO: 556476 - RNA, 21 nt, Human
uccugagcucugggcuguugg

SEQ ID NO: 556477 - RNA, 24 nt, Human
ucggccccugcucugggccacacu

SEQ ID NO: 556478 - RNA, 21 nt, Human
ucugaaggcgagcgaguuucu

SEQ ID NO: 556479 - RNA, 22 nt, Human
ucugaggaggaugcugaggguc

SEQ ID NO: 556480 - RNA, 23 nt, Human
ucugggccucaguuuccuucccc

SEQ ID NO: 556481 - RNA, 22 nt, Human
ugaaggcgagcgaguuucuccu

SEQ ID NO: 556482 - RNA, 19 nt, Human
ugagcucacugggcucagg

SEQ ID NO: 556483 - RNA, 23 nt, Human
ugcccaugcugccucuuucugcc

SEQ ID NO: 556484 - RNA, 24 nt, Human
ugcucugggccacacugcuggggc

SEQ ID NO: 556485 - RNA, 22 nt, Human
ugcuggggcuggaggccaggcu

SEQ ID NO: 556486 - RNA, 26 nt, Human
ugggaagcaagucacgauucagcuca

SEQ ID NO: 556487 - RNA, 19 nt, Human
uggugugcagggcaguggg

SEQ ID NO: 556488 - RNA, 18 nt, Human
ugugguggugugcagggc

SEQ ID NO: 556489 - RNA, 23 nt, Human
ugugugccacuagcaucaggaac

SEQ ID NO: 556490 - RNA, 21 nt, Human
uuaaagcugagcucacugggc

SEQ ID NO: 556491 - RNA, 20 nt, Human
uucauggggccuccaacacc

SEQ ID NO: 556492 - RNA, 19 nt, Human
uugcugggugacccuuggc

SEQ ID NO: 556493 - RNA, 22 nt, Human
uuggccagugguugccccucuc

SEQ ID NO: 556494 - RNA, 21 nt, Human
aaacagaacguggacucagga

SEQ ID NO: 556495 - RNA, 20 nt, Human
aaauauaauuugggggcaua

SEQ ID NO: 556496 - RNA, 24 nt, Human
aacuggccucagggggaauucuca

SEQ ID NO: 556497 - RNA, 22 nt, Human
aagaggcccgggcauggucuca

SEQ ID NO: 556498 - RNA, 24 nt, Human
aagcuaaacagaacguggacucag

SEQ ID NO: 556499 - RNA, 26 nt, Human
accccgccuccggccccagccccagc

SEQ ID NO: 556500 - RNA, 23 nt, Human
acgcugcagguaccacagccccu

SEQ ID NO: 556501 - RNA, 19 nt, Human
acggcgcggcggcuccggg

SEQ ID NO: 556502 - RNA, 18 nt, Human
acuuacauacauaaauau

SEQ ID NO: 556503 - RNA, 24 nt, Human
agaaugggggcccaggcagcagcu

SEQ ID NO: 556504 - RNA, 21 nt, Human
agccggggugaccccgcccag

SEQ ID NO: 556505 - RNA, 26 nt, Human
aggaagugaguuccccaucgauggaa

SEQ ID NO: 556506 - RNA, 18 nt, Human
aggcaggcggcggcuucu

SEQ ID NO: 556507 - RNA, 24 nt, Human
aggcggcggcuucuugucccagcc

SEQ ID NO: 556508 - RNA, 24 nt, Human
aguagcgccuuacgggccccacgg

SEQ ID NO: 556509 - RNA, 22 nt, Human
agugaugagaaaaaauuagaga

SEQ ID NO: 556510 - RNA, 23 nt, Human
auccaugacagaacuggccucag

SEQ ID NO: 556511 - RNA, 21 nt, Human
caaaacaaaccucacuuacau

SEQ ID NO: 556512 - RNA, 22 nt, Human
caacuucuagauguuucuuccu

SEQ ID NO: 556513 - RNA, 22 nt, Human
caagcagaacugagacagugca

SEQ ID NO: 556514 - RNA, 21 nt, Human
caagccuccgccccccgcaca

SEQ ID NO: 556515 - RNA, 24 nt, Human
cacacacccacucacaccccgccu

SEQ ID NO: 556516 - RNA, 22 nt, Human
caccgcgcagcggccccgaggu

SEQ ID NO: 556517 - RNA, 21 nt, Human
cacucacaccccgccuccggc

SEQ ID NO: 556518 - RNA, 21 nt, Human
cagccccagcccccuccccgg

SEQ ID NO: 556519 - RNA, 18 nt, Human
cagugcagcagcuugucc

SEQ ID NO: 556520 - RNA, 21 nt, Human
cauguuggaaaaccaagugcu

SEQ ID NO: 556521 - RNA, 19 nt, Human
ccaccgcgcagcggccccg

SEQ ID NO: 556522 - RNA, 20 nt, Human
ccacgcugcagguaccacag

SEQ ID NO: 556523 - RNA, 20 nt, Human
ccagccggggugaccccgcc

SEQ ID NO: 556524 - RNA, 22 nt, Human
cccacaugggguugagugaaau

SEQ ID NO: 556525 - RNA, 21 nt, Human
cccacgcugcagguaccacag

SEQ ID NO: 556526 - RNA, 22 nt, Human
cccacggguaggugcccaagac

SEQ ID NO: 556527 - RNA, 19 nt, Human
cccagcccccuccccgggc

SEQ ID NO: 556528 - RNA, 21 nt, Human
ccccacggguaggugcccaag

SEQ ID NO: 556529 - RNA, 21 nt, Human
ccccagccccagcccccuccc

SEQ ID NO: 556530 - RNA, 19 nt, Human
cccccuccccgggcccggg

SEQ ID NO: 556531 - RNA, 23 nt, Human
ccccgcacacacccacucacacc

SEQ ID NO: 556532 - RNA, 25 nt, Human
ccccgccuccggccccagccccagc

SEQ ID NO: 556533 - RNA, 21 nt, Human
ccccgcugcuuccacacagca

SEQ ID NO: 556534 - RNA, 19 nt, Human
ccccgggcccgggcaggca

SEQ ID NO: 556535 - RNA, 24 nt, Human
ccccuggcagcagugaagaggccc

SEQ ID NO: 556536 - RNA, 24 nt, Human
cccgcacacacccacucacacccc

SEQ ID NO: 556537 - RNA, 25 nt, Human
cccgcacacacccacucacaccccg

SEQ ID NO: 556538 - RNA, 24 nt, Human
cccuagauccuggacgcagcgcuc

SEQ ID NO: 556539 - RNA, 24 nt, Human
ccuacuccugaagccuggugggcc

SEQ ID NO: 556540 - RNA, 23 nt, Human
ccuccgccccccgcacacaccca

SEQ ID NO: 556541 - RNA, 18 nt, Human
ccugaaauuaaaacuacu

SEQ ID NO: 556542 - RNA, 21 nt, Human
cgcacacacccacucacaccc

SEQ ID NO: 556543 - RNA, 18 nt, Human
cgccccccgcacacaccc

SEQ ID NO: 556544 - RNA, 24 nt, Human
cgccuccggccccagccccagccc

SEQ ID NO: 556545 - RNA, 21 nt, Human
cgcugcggggcugugagugcc

SEQ ID NO: 556546 - RNA, 21 nt, Human
cggcagccuuauauaguagcg

SEQ ID NO: 556547 - RNA, 23 nt, Human
cggccggguuucggggaacuccu

SEQ ID NO: 556548 - RNA, 22 nt, Human
cggcuccgggccggcagccuua

SEQ ID NO: 556549 - RNA, 22 nt, Human
cucacaccccgccuccggcccc

SEQ ID NO: 556550 - RNA, 29 nt, Human
cucacaccccgccuccggccccagcccca

SEQ ID NO: 556551 - RNA, 23 nt, Human
cuccggccccagccccagccccc

SEQ ID NO: 556552 - RNA, 21 nt, Human
cuccggccccagccccagccu

SEQ ID NO: 556553 - RNA, 21 nt, Human
cuccugcucugacggcgcggc

SEQ ID NO: 556554 - RNA, 23 nt, Human
cugacggcgcggcggcuccgggc

SEQ ID NO: 556555 - RNA, 20 nt, Human
cuuguagaagcacguccccc

SEQ ID NO: 556556 - RNA, 23 nt, Human
gaagcacgucccccacgcugcag

SEQ ID NO: 556557 - RNA, 18 nt, Human
gacuuggggucuucaaau

SEQ ID NO: 556558 - RNA, 19 nt, Human
gauccuggacgcagcgcuc

SEQ ID NO: 556559 - RNA, 19 nt, Human
gaucugcgggaggaggagg

SEQ ID NO: 556560 - RNA, 20 nt, Human
gcaucaagccuccgcccccc

SEQ ID NO: 556561 - RNA, 28 nt, Human
gccccagccccagcccccuccccgggcc

SEQ ID NO: 556562 - RNA, 18 nt, Human
gccccgagguucuuggcu

SEQ ID NO: 556563 - RNA, 20 nt, Human
gccccgagguucuuggcugg

SEQ ID NO: 556564 - RNA, 21 nt, Human
gcccuagauccuggacgcagc

SEQ ID NO: 556565 - RNA, 22 nt, Human
gccggggugaccccgcccaggc

SEQ ID NO: 556566 - RNA, 19 nt, Human
gccuccgccccccgcacac

SEQ ID NO: 556567 - RNA, 18 nt, Human
gcuccuggggaagugaug

SEQ ID NO: 556568 - RNA, 22 nt, Human
ggaaaacucugaauauguacaa

SEQ ID NO: 556569 - RNA, 18 nt, Human
ggaggaggaggccucgcu

SEQ ID NO: 556570 - RNA, 22 nt, Human
ggagggauuugggaagggcaaa

SEQ ID NO: 556571 - RNA, 20 nt, Human
ggcaggcaggcggcggcuuc

SEQ ID NO: 556572 - RNA, 18 nt, Human
ggcuggugggcugggaga

SEQ ID NO: 556573 - RNA, 22 nt, Human
gggaagggcaaauggucccugg

SEQ ID NO: 556574 - RNA, 19 nt, Human
gggaggccccaauccaugg

SEQ ID NO: 556575 - RNA, 24 nt, Human
gggaggcugggcggcgaccgggau

SEQ ID NO: 556576 - RNA, 23 nt, Human
gggcagagggcuggugggcuggg

SEQ ID NO: 556577 - RNA, 23 nt, Human
gggccccacggguaggugcccaa

SEQ ID NO: 556578 - RNA, 22 nt, Human
gggcuccaggcuuccccuacuc

SEQ ID NO: 556579 - RNA, 22 nt, Human
ggggggccugggaggccccaau

SEQ ID NO: 556580 - RNA, 21 nt, Human
ggggugcgggaggcugggcgg

SEQ ID NO: 556581 - RNA, 19 nt, Human
gugggcugggagauggaag

SEQ ID NO: 556582 - RNA, 24 nt, Human
uaauauacaaaacaaaccucacuu

SEQ ID NO: 556583 - RNA, 23 nt, Human
uagauccuggacgcagcgcuccu

SEQ ID NO: 556584 - RNA, 20 nt, Human
uagcgccuuacgggccccac

SEQ ID NO: 556585 - RNA, 19 nt, Human
uaucaaaauaaauuacuca

SEQ ID NO: 556586 - RNA, 18 nt, Human
ucccagggcuggaguggg

SEQ ID NO: 556587 - RNA, 21 nt, Human
ucccagggcuggaguggggcu

SEQ ID NO: 556588 - RNA, 18 nt, Human
uccgccccccgcacacac

SEQ ID NO: 556589 - RNA, 21 nt, Human
uccgccccccgcacacaccca

SEQ ID NO: 556590 - RNA, 20 nt, Human
uccuggacgcagcgcuccug

SEQ ID NO: 556591 - RNA, 18 nt, Human
ucuucuggcugcuccugg

SEQ ID NO: 556592 - RNA, 23 nt, Human
ugagacagugcagcagcuugucc

SEQ ID NO: 556593 - RNA, 22 nt, Human
ugcgcugcggggcugugagugc

SEQ ID NO: 556594 - RNA, 26 nt, Human
uggaguggggcuccaggcuuccccua

SEQ ID NO: 556595 - RNA, 23 nt, Human
uggcacugccaauggaaaacucu

SEQ ID NO: 556596 - RNA, 23 nt, Human
uggcagcagugaagaggcccggg

SEQ ID NO: 556597 - RNA, 18 nt, Human
ugggaagggcaaaugguc

SEQ ID NO: 556598 - RNA, 21 nt, Human
ugggaagggcaaauggucccu

SEQ ID NO: 556599 - RNA, 22 nt, Human
ugggcagagggcuggugggcug

SEQ ID NO: 556600 - RNA, 22 nt, Human
uggggcucucggcgcagcuccg

SEQ ID NO: 556601 - RNA, 25 nt, Human
ugggggcccaggcagcagcugggca

SEQ ID NO: 556602 - RNA, 18 nt, Human
ugggguugagugaaauuu

SEQ ID NO: 556603 - RNA, 19 nt, Human
uggugggccaugccugcuc

SEQ ID NO: 556604 - RNA, 22 nt, Human
uucaaaucuuuucuuuuccuga

SEQ ID NO: 556605 - RNA, 19 nt, Human
uucucaggacagcauccau

SEQ ID NO: 556606 - RNA, 23 nt, Human
uuuuaauauacaaaacaaaccuc

SEQ ID NO: 556607 - RNA, 21 nt, Human
uuuuacagaguggaucaccug

SEQ ID NO: 556608 - RNA, 21 nt, Human
aaaacauucuaauauugcuaa

SEQ ID NO: 556609 - RNA, 27 nt, Human
aaaagaccagaaaaguaacagugggca

SEQ ID NO: 556610 - RNA, 19 nt, Human
aaacagaaaagaacaugcc

SEQ ID NO: 556611 - RNA, 21 nt, Human
aaaggagagcucauuuuaaaa

SEQ ID NO: 556612 - RNA, 23 nt, Human
aaagucaaaaguuaccgcguacu

SEQ ID NO: 556613 - RNA, 18 nt, Human
aacuuguucccuaaacug

SEQ ID NO: 556614 - RNA, 18 nt, Human
aagaacaugccaacguug

SEQ ID NO: 556615 - RNA, 18 nt, Human
aaggaaaauaacaguggc

SEQ ID NO: 556616 - RNA, 24 nt, Human
acacgaugccaaguguaucuucuu

SEQ ID NO: 556617 - RNA, 21 nt, Human
acagaaaagaacaugccaacg

SEQ ID NO: 556618 - RNA, 21 nt, Human
acccuguauucaugcaggcca

SEQ ID NO: 556619 - RNA, 20 nt, Human
accgauuuuauagcaaaaua

SEQ ID NO: 556620 - RNA, 25 nt, Human
acugcaguugcauccuguuugcacu

SEQ ID NO: 556621 - RNA, 18 nt, Human
agacaaaaucguggcaug

SEQ ID NO: 556622 - RNA, 23 nt, Human
agacaaaaucguggcauguucuu

SEQ ID NO: 556623 - RNA, 21 nt, Human
agagcgggagacacuguugcc

SEQ ID NO: 556624 - RNA, 27 nt, Human
auacuagugaaugccucucacagagca

SEQ ID NO: 556625 - RNA, 25 nt, Human
aucauacugccgcaguaaccuggcu

SEQ ID NO: 556626 - RNA, 22 nt, Human
auggcuaaaacaaaauuccuuc

SEQ ID NO: 556627 - RNA, 21 nt, Human
augggacaaucacaauggcag

SEQ ID NO: 556628 - RNA, 21 nt, Human
cacaugauacagacaugcaca

SEQ ID NO: 556629 - RNA, 21 nt, Human
caccuggaaucguuccugauc

SEQ ID NO: 556630 - RNA, 27 nt, Human
caccuggcucuggcaucggcagcuuca

SEQ ID NO: 556631 - RNA, 23 nt, Human
cacguaaacacaugauacagaca

SEQ ID NO: 556632 - RNA, 20 nt, Human
cacugcaguugcauccuguu

SEQ ID NO: 556633 - RNA, 21 nt, Human
cagaaagacaaaaucguggca

SEQ ID NO: 556634 - RNA, 18 nt, Human
cagaaauucucugaccca

SEQ ID NO: 556635 - RNA, 22 nt, Human
cagaaguaguagaaugugaaac

SEQ ID NO: 556636 - RNA, 24 nt, Human
cagcacgauggcaaaucgcuccuc

SEQ ID NO: 556637 - RNA, 18 nt, Human
caggaaaccaggugggcc

SEQ ID NO: 556638 - RNA, 19 nt, Human
caguacucuccacacuuuc

SEQ ID NO: 556639 - RNA, 23 nt, Human
cauugaacuuuggaaaacagcug

SEQ ID NO: 556640 - RNA, 22 nt, Human
ccaagaagauaagccagaagca

SEQ ID NO: 556641 - RNA, 24 nt, Human
cccacauucauacuagugaaugcc

SEQ ID NO: 556642 - RNA, 22 nt, Human
cccgcagguggcaguuuaaucu

SEQ ID NO: 556643 - RNA, 20 nt, Human
ccgcaguaaccuggcuuugu

SEQ ID NO: 556644 - RNA, 24 nt, Human
ccgucugaauuucuuccugguuac

SEQ ID NO: 556645 - RNA, 22 nt, Human
cgcagugcagaaugucuuccag

SEQ ID NO: 556646 - RNA, 21 nt, Human
cgccggggccgggggcugcuc

SEQ ID NO: 556647 - RNA, 23 nt, Human
cgccgucugaauuucuuccuggu

SEQ ID NO: 556648 - RNA, 20 nt, Human
cggcugccgcccgcaggcgc

SEQ ID NO: 556649 - RNA, 20 nt, Human
cgggagacacuguugcccac

SEQ ID NO: 556650 - RNA, 22 nt, Human
cguagcacauaaaguucaugug

SEQ ID NO: 556651 - RNA, 18 nt, Human
cuccccgcccuccgccgc

SEQ ID NO: 556652 - RNA, 21 nt, Human
cugaagaacacaguacugcaa

SEQ ID NO: 556653 - RNA, 26 nt, Human
cugauuacugagauguuaauuuuaau

SEQ ID NO: 556654 - RNA, 19 nt, Human
cuuauaguuaaauauauau

SEQ ID NO: 556655 - RNA, 18 nt, Human
cuuugauuuguccaccga

SEQ ID NO: 556656 - RNA, 18 nt, Human
gaaagacaaaaucguggc

SEQ ID NO: 556657 - RNA, 19 nt, Human
gaacagcucccggcggucg

SEQ ID NO: 556658 - RNA, 23 nt, Human
gaagaacacaguacugcaaauaa

SEQ ID NO: 556659 - RNA, 20 nt, Human
gaauguugaguccacagaaa

SEQ ID NO: 556660 - RNA, 20 nt, Human
gaauuucuuccugguuacag

SEQ ID NO: 556661 - RNA, 21 nt, Human
gagcucuccacaguacucucc

SEQ ID NO: 556662 - RNA, 22 nt, Human
gcgggagacacuguugcccaca

SEQ ID NO: 556663 - RNA, 20 nt, Human
gggccccuagcgugcgcguc

SEQ ID NO: 556664 - RNA, 23 nt, Human
guguaaaaagauaccuaaucaaa

SEQ ID NO: 556665 - RNA, 24 nt, Human
guugaaaggagagcucauuuuaaa

SEQ ID NO: 556666 - RNA, 23 nt, Human
uaaaaaacugcaccgauuuuaua

SEQ ID NO: 556667 - RNA, 23 nt, Human
uaaaaaccauaaaaaacugcacc

SEQ ID NO: 556668 - RNA, 27 nt, Human
uaaaaagcugccucuagcugaagaaca

SEQ ID NO: 556669 - RNA, 24 nt, Human
uacaacaucaggaaaccagguggg

SEQ ID NO: 556670 - RNA, 23 nt, Human
uaugggaaugugcccgcaggugg

SEQ ID NO: 556671 - RNA, 19 nt, Human
uauuaugaaaaguacaaau

SEQ ID NO: 556672 - RNA, 25 nt, Human
uauugcuaagaagcaggcccauuaa

SEQ ID NO: 556673 - RNA, 24 nt, Human
ucaaagaaauuuccaguucucuua

SEQ ID NO: 556674 - RNA, 24 nt, Human
ucaccuggaaucguuccugaucac

SEQ ID NO: 556675 - RNA, 24 nt, Human
ucagaaauucucugacccauccaa

SEQ ID NO: 556676 - RNA, 23 nt, Human
ucauauaacuacacauccaagga

SEQ ID NO: 556677 - RNA, 24 nt, Human
uccaaauugcaaguaaaauacaaa

SEQ ID NO: 556678 - RNA, 23 nt, Human
uccaaggaaaagggaccuucacc

SEQ ID NO: 556679 - RNA, 21 nt, Human
uccacagaaagacaaaaucgu

SEQ ID NO: 556680 - RNA, 22 nt, Human
uccccacauucauacuagugaa

SEQ ID NO: 556681 - RNA, 22 nt, Human
ucccggcggucggcugccgccc

SEQ ID NO: 556682 - RNA, 18 nt, Human
ucggcugccgcccgcagg

SEQ ID NO: 556683 - RNA, 25 nt, Human
ugaaaccauaccugauaauucauga

SEQ ID NO: 556684 - RNA, 23 nt, Human
ugaaaggagagcucauuuuaaaa

SEQ ID NO: 556685 - RNA, 19 nt, Human
ugaaaucggucugcugcga

SEQ ID NO: 556686 - RNA, 19 nt, Human
ugacccauccaaugugguu

SEQ ID NO: 556687 - RNA, 23 nt, Human
ugagugaccuuugugccacugca

SEQ ID NO: 556688 - RNA, 23 nt, Human
ugccagagaggaaggaaaauaac

SEQ ID NO: 556689 - RNA, 26 nt, Human
ugccaugaaaagaccagaaaaguaac

SEQ ID NO: 556690 - RNA, 25 nt, Human
ugcuccgggccccuagcgugcgcgu

SEQ ID NO: 556691 - RNA, 18 nt, Human
uggaucaagugcccugcc

SEQ ID NO: 556692 - RNA, 24 nt, Human
uggcuaaaacaaaauuccuucgaa

SEQ ID NO: 556693 - RNA, 21 nt, Human
ugucagaggagaguaaggcca

SEQ ID NO: 556694 - RNA, 21 nt, Human
uguguucaaggcugcaguuaa

SEQ ID NO: 556695 - RNA, 23 nt, Human
uuaaaaagaucauauaacuacac

SEQ ID NO: 556696 - RNA, 20 nt, Human
uucaccaagggguucacaua

SEQ ID NO: 556697 - RNA, 23 nt, Human
uucaccuggaaucguuccugauc

SEQ ID NO: 556698 - RNA, 21 nt, Human
uucagaaauucucugacccau

SEQ ID NO: 556699 - RNA, 25 nt, Human
uucuucaccuggaaucguuccugau

SEQ ID NO: 556700 - RNA, 21 nt, Human
uugcucccucugugcaggucc

SEQ ID NO: 556701 - RNA, 22 nt, Human
uugugccacugcaguugcaucc

SEQ ID NO: 556702 - RNA, 22 nt, Human
uuuaaaaagaucauauaacuac

SEQ ID NO: 556703 - RNA, 20 nt, Human
uuucaaagucaaaaguuacc

SEQ ID NO: 556704 - RNA, 25 nt, Human
uuugcucauaugccaugaaaagacc

SEQ ID NO: 556705 - RNA, 22 nt, Human
caacaauaucagaagcuaucuu

SEQ ID NO: 556706 - RNA, 19 nt, Human
cuaucuuugcaagcuuuga

SEQ ID NO: 556707 - RNA, 19 nt, Human
ugagaaguggaaaagugga

SEQ ID NO: 556708 - RNA, 24 nt, Human
ugcaaauugaaacuauuauauuaa

SEQ ID NO: 556709 - RNA, 18 nt, Human
uggaaaaguggaaguugg

SEQ ID NO: 556710 - RNA, 22 nt, Human
uugcaaauugaaacuauuauau

SEQ ID NO: 556711 - RNA, 20 nt, Human
uuugcaagcuuugagaccau

SEQ ID NO: 556712 - RNA, 19 nt, Human
uuuuuuuuuuuauaagagu

SEQ ID NO: 556713 - RNA, 20 nt, Human
uuuuuuuuuuuuauaagagu

SEQ ID NO: 556714 - RNA, 27 nt, Human
uuuuuuuuuuuuuuuuuuuuuauaaga

SEQ ID NO: 556715 - RNA, 19 nt, Human
aaaaguuucaguugcacug

SEQ ID NO: 556716 - RNA, 22 nt, Human
caacaauaucagaagcuaucuu

SEQ ID NO: 556717 - RNA, 20 nt, Human
uaagagugagaagugaaguu

SEQ ID NO: 556718 - RNA, 19 nt, Human
ucaguaguauaguaaugca

SEQ ID NO: 556719 - RNA, 24 nt, Human
ugcaaauugaaacuauuauauuaa

SEQ ID NO: 556720 - RNA, 22 nt, Human
uugcaaauugaaacuauuauau

SEQ ID NO: 556721 - RNA, 21 nt, Human
acaaacaggagggauuagaug

SEQ ID NO: 556722 - RNA, 18 nt, Human
acccucaccagaggcagc

SEQ ID NO: 556723 - RNA, 24 nt, Human
accugaaagaauaaaagaaguaac

SEQ ID NO: 556724 - RNA, 25 nt, Human
agaagacccucaccagaggcagccc

SEQ ID NO: 556725 - RNA, 22 nt, Human
aggaacaauuugaguuucuccu

SEQ ID NO: 556726 - RNA, 22 nt, Human
auuuaugaauaaaauuccccau

SEQ ID NO: 556727 - RNA, 22 nt, Human
caccagaggcagccccaccauc

SEQ ID NO: 556728 - RNA, 25 nt, Human
cauguacaugcucuuuugccacgug

SEQ ID NO: 556729 - RNA, 27 nt, Human
ccuauaauuugagacaaaccggggucc

SEQ ID NO: 556730 - RNA, 19 nt, Human
ccuccccggcccccgccac

SEQ ID NO: 556731 - RNA, 21 nt, Human
ccuccccggcccccgccacuc

SEQ ID NO: 556732 - RNA, 22 nt, Human
cgagaagacccucaccagaggc

SEQ ID NO: 556733 - RNA, 20 nt, Human
cuccuccccggcccccgcca

SEQ ID NO: 556734 - RNA, 24 nt, Human
cucugucucucucucucuuuuucu

SEQ ID NO: 556735 - RNA, 30 nt, Human
cugaagauagagacuaaaauaacaucuacu

SEQ ID NO: 556736 - RNA, 20 nt, Human
cuugcuacaaccacaaaagu

SEQ ID NO: 556737 - RNA, 23 nt, Human
cuuuuagauuuaugaaacaaaua

SEQ ID NO: 556738 - RNA, 22 nt, Human
gaauaaaagaaguaacuacaga

SEQ ID NO: 556739 - RNA, 19 nt, Human
gauuguuaucucaggagug

SEQ ID NO: 556740 - RNA, 20 nt, Human
guggugucuuuauaaaggau

SEQ ID NO: 556741 - RNA, 24 nt, Human
uaaagcucuaaaaauccagaguuc

SEQ ID NO: 556742 - RNA, 21 nt, Human
uaaccugaagauagagacuaa

SEQ ID NO: 556743 - RNA, 23 nt, Human
uaacuaaaaauacuccagugaug

SEQ ID NO: 556744 - RNA, 21 nt, Human
uaagugaaacauuguucucuc

SEQ ID NO: 556745 - RNA, 22 nt, Human
uacagaauuggcuacauaaugg

SEQ ID NO: 556746 - RNA, 24 nt, Human
uccagugauggugguguugcuuuu

SEQ ID NO: 556747 - RNA, 21 nt, Human
ucgagaagacccucaccagag

SEQ ID NO: 556748 - RNA, 19 nt, Human
ucucucucucuuuuucucu

SEQ ID NO: 556749 - RNA, 19 nt, Human
ucuuuugccacgugauccc

SEQ ID NO: 556750 - RNA, 22 nt, Human
ugaauaaaauuccccauguugu

SEQ ID NO: 556751 - RNA, 25 nt, Human
ugagacaaacaggagggauuagaug

SEQ ID NO: 556752 - RNA, 23 nt, Human
ugcuacaaccacaaaaguugaca

SEQ ID NO: 556753 - RNA, 19 nt, Human
ugcucuuuugccacgugau

SEQ ID NO: 556754 - RNA, 20 nt, Human
uggugguguugcuuuaaauc

SEQ ID NO: 556755 - RNA, 22 nt, Human
uguguccccgaaaguuuacgug

SEQ ID NO: 556756 - RNA, 24 nt, Human
uuaaacaacaccugaaagaauaaa

SEQ ID NO: 556757 - RNA, 22 nt, Human
uuaaugucauuaucaugggauu

SEQ ID NO: 556758 - RNA, 23 nt, Human
uuugaauguguccccgaaaguuu

SEQ ID NO: 556759 - RNA, 22 nt, Human
uuuugccacgugaucccuucca

SEQ ID NO: 556760 - RNA, 23 nt, Human
uuuuuuuuuuuuuuuuuccguuu

SEQ ID NO: 556761 - RNA, 27 nt, Human
uuuuuuuuuuuuuuuuuuuuuccgggg

SEQ ID NO: 556762 - RNA, 21 nt, Human
aaaagcagaaaucacaaagaa

SEQ ID NO: 556763 - RNA, 20 nt, Human
aaacaggaaggaagagaggg

SEQ ID NO: 556764 - RNA, 19 nt, Human
aaagaaaaaagcaggagag

SEQ ID NO: 556765 - RNA, 23 nt, Human
aaagaacaaaaagaggauauaug

SEQ ID NO: 556766 - RNA, 20 nt, Human
aaagauggguggaagauuug

SEQ ID NO: 556767 - RNA, 19 nt, Human
aacaggcucaaaacaagcc

SEQ ID NO: 556768 - RNA, 23 nt, Human
aacuucagcuacccuggcugcac

SEQ ID NO: 556769 - RNA, 26 nt, Human
aacuugugagaccauauacccccuuu

SEQ ID NO: 556770 - RNA, 21 nt, Human
aagagaaauucuccuuucccc

SEQ ID NO: 556771 - RNA, 22 nt, Human
aagcuucagccagaugaucugg

SEQ ID NO: 556772 - RNA, 19 nt, Human
aagggacaaggaagaccuc

SEQ ID NO: 556773 - RNA, 22 nt, Human
aaggggaggggaaacugaggcc

SEQ ID NO: 556774 - RNA, 19 nt, Human
aaucuccagucccagaccc

SEQ ID NO: 556775 - RNA, 25 nt, Human
acaagaaaaaguaguauucuuuuca

SEQ ID NO: 556776 - RNA, 20 nt, Human
acacaucacccaauacaaca

SEQ ID NO: 556777 - RNA, 20 nt, Human
acccgggggaggaggggagg

SEQ ID NO: 556778 - RNA, 18 nt, Human
acugcccuaucuugcccc

SEQ ID NO: 556779 - RNA, 21 nt, Human
acuggguccccugaggaugag

SEQ ID NO: 556780 - RNA, 22 nt, Human
acuucagccucacuggcacuuc

SEQ ID NO: 556781 - RNA, 19 nt, Human
acuucagcuacccuggcug

SEQ ID NO: 556782 - RNA, 19 nt, Human
agaaaagagaagugaucau

SEQ ID NO: 556783 - RNA, 18 nt, Human
agaaagaacaaaaagagg

SEQ ID NO: 556784 - RNA, 22 nt, Human
agaacaggcucaaaacaagcca

SEQ ID NO: 556785 - RNA, 22 nt, Human
agaccauauacccccuucccag

SEQ ID NO: 556786 - RNA, 19 nt, Human
agagugauaauggguuacu

SEQ ID NO: 556787 - RNA, 21 nt, Human
agcaggagagcggaacgccaa

SEQ ID NO: 556788 - RNA, 18 nt, Human
agcuaucauggcuucauc

SEQ ID NO: 556789 - RNA, 22 nt, Human
agcuggaaucucaggaggccua

SEQ ID NO: 556790 - RNA, 19 nt, Human
aggagggggagggggagga

SEQ ID NO: 556791 - RNA, 21 nt, Human
agggaugggaagaucauucgu

SEQ ID NO: 556792 - RNA, 21 nt, Human
agggggagggggaggagaagg

SEQ ID NO: 556793 - RNA, 24 nt, Human
agggggagggggaggagaaggagg

SEQ ID NO: 556794 - RNA, 24 nt, Human
aggguuuagaaaagagaagugauc

SEQ ID NO: 556795 - RNA, 21 nt, Human
agguaaacuggagucuaaaac

SEQ ID NO: 556796 - RNA, 22 nt, Human
augaaaagcagaaaucacaaag

SEQ ID NO: 556797 - RNA, 22 nt, Human
caaagccuacuugcaaaagcuu

SEQ ID NO: 556798 - RNA, 18 nt, Human
caaccaggaguugucucu

SEQ ID NO: 556799 - RNA, 26 nt, Human
caauacaacaauaaugacuacacuuu

SEQ ID NO: 556800 - RNA, 22 nt, Human
cacacccugcuuguuacccggg

SEQ ID NO: 556801 - RNA, 25 nt, Human
caccaaucuccuucaccccucaaag

SEQ ID NO: 556802 - RNA, 24 nt, Human
caccaccaucaucacuuucacccu

SEQ ID NO: 556803 - RNA, 19 nt, Human
caccccccacacccugcuu

SEQ ID NO: 556804 - RNA, 24 nt, Human
cagagugauaauggguuacuuuuu

SEQ ID NO: 556805 - RNA, 18 nt, Human
caggugacggcucucauc

SEQ ID NO: 556806 - RNA, 18 nt, Human
ccagaaaaugagggaaga

SEQ ID NO: 556807 - RNA, 23 nt, Human
ccccacacccugcuuguuacccg

SEQ ID NO: 556808 - RNA, 23 nt, Human
cccccacacccugcuuguuaccc

SEQ ID NO: 556809 - RNA, 24 nt, Human
cccccuugggggaguuccccuccu

SEQ ID NO: 556810 - RNA, 21 nt, Human
ccccucaaagccuacuugcaa

SEQ ID NO: 556811 - RNA, 20 nt, Human
ccccucccccccaaacugga

SEQ ID NO: 556812 - RNA, 19 nt, Human
ccccucuccagaaggcuga

SEQ ID NO: 556813 - RNA, 21 nt, Human
ccccucuccagaaggcugaaa

SEQ ID NO: 556814 - RNA, 20 nt, Human
cccgggggaggaggggagga

SEQ ID NO: 556815 - RNA, 20 nt, Human
cccuaccauagaagcagagu

SEQ ID NO: 556816 - RNA, 19 nt, Human
cccugugccacguagcaag

SEQ ID NO: 556817 - RNA, 20 nt, Human
ccucacugaacucuugccuc

SEQ ID NO: 556818 - RNA, 19 nt, Human
ccucuuauaggcagugagc

SEQ ID NO: 556819 - RNA, 20 nt, Human
ccuggccugaaacugauggg

SEQ ID NO: 556820 - RNA, 19 nt, Human
cgccaaaccucuuggaaau

SEQ ID NO: 556821 - RNA, 23 nt, Human
cggcagcaucuugcaguggcuuc

SEQ ID NO: 556822 - RNA, 20 nt, Human
cuacccuggcugcacgccag

SEQ ID NO: 556823 - RNA, 22 nt, Human
cucagaggacagaauuagcacc

SEQ ID NO: 556824 - RNA, 21 nt, Human
cuccaccaaucuccuucaccc

SEQ ID NO: 556825 - RNA, 22 nt, Human
cuccuuuugucccucuccucca

SEQ ID NO: 556826 - RNA, 25 nt, Human
cucucauauauaacccccuuccaaa

SEQ ID NO: 556827 - RNA, 19 nt, Human
cuggagauaggagcggagg

SEQ ID NO: 556828 - RNA, 23 nt, Human
cuuccaaaaaaaggaaaggggug

SEQ ID NO: 556829 - RNA, 19 nt, Human
cuugccccuuuacuucagc

SEQ ID NO: 556830 - RNA, 19 nt, Human
gaaaagcagaaaucacaaa

SEQ ID NO: 556831 - RNA, 22 nt, Human
gaaaagcagaaaucacaaagaa

SEQ ID NO: 556832 - RNA, 19 nt, Human
gaagggagcuggaaucuca

SEQ ID NO: 556833 - RNA, 22 nt, Human
gagggggagggggaggagaagg

SEQ ID NO: 556834 - RNA, 24 nt, Human
gagggggagggggaggagaaggag

SEQ ID NO: 556835 - RNA, 19 nt, Human
gaugaaagaaaaaagcagg

SEQ ID NO: 556836 - RNA, 18 nt, Human
gcagcaucuugcaguggc

SEQ ID NO: 556837 - RNA, 19 nt, Human
gcccuaccauagaagcaga

SEQ ID NO: 556838 - RNA, 20 nt, Human
gcgaggucuuccccucucca

SEQ ID NO: 556839 - RNA, 18 nt, Human
ggaaaaaacaggaaggaa

SEQ ID NO: 556840 - RNA, 18 nt, Human
ggaagguggcacaccccc

SEQ ID NO: 556841 - RNA, 18 nt, Human
ggagggggaggagaagga

SEQ ID NO: 556842 - RNA, 23 nt, Human
ggagggggagggggaggagaagg

SEQ ID NO: 556843 - RNA, 24 nt, Human
ggagguccuacuuggggaaggugg

SEQ ID NO: 556844 - RNA, 18 nt, Human
ggcuugguggaagggagc

SEQ ID NO: 556845 - RNA, 20 nt, Human
gggaaaaagggaugggaaga

SEQ ID NO: 556846 - RNA, 23 nt, Human
gggaaacugaggcccaaagggag

SEQ ID NO: 556847 - RNA, 21 nt, Human
gggaagaaaaaagaugggugg

SEQ ID NO: 556848 - RNA, 19 nt, Human
gggcaaaggcauuuugcca

SEQ ID NO: 556849 - RNA, 18 nt, Human
ggggaaacugaggcccaa

SEQ ID NO: 556850 - RNA, 21 nt, Human
ggggaagggacgggcuggggu

SEQ ID NO: 556851 - RNA, 19 nt, Human
ggggaggagaaggaggucc

SEQ ID NO: 556852 - RNA, 21 nt, Human
ggggagggggaggagaaggga

SEQ ID NO: 556853 - RNA, 19 nt, Human
ggugggaaugagauuccca

SEQ ID NO: 556854 - RNA, 20 nt, Human
gguuccuccggcaaagggag

SEQ ID NO: 556855 - RNA, 21 nt, Human
gugggauuagcauugaguuuc

SEQ ID NO: 556856 - RNA, 23 nt, Human
uaaaauaauaugcaugaaaagca

SEQ ID NO: 556857 - RNA, 22 nt, Human
uaaaugcaaauaagagccacaa

SEQ ID NO: 556858 - RNA, 18 nt, Human
uaagucauggccaccccu

SEQ ID NO: 556859 - RNA, 18 nt, Human
uacuugcaaaagcuucag

SEQ ID NO: 556860 - RNA, 23 nt, Human
uagagaacaggcucaaaacaagg

SEQ ID NO: 556861 - RNA, 21 nt, Human
uauauaaccaauaauaauaau

SEQ ID NO: 556862 - RNA, 20 nt, Human
uaucuugccccuuuacuuca

SEQ ID NO: 556863 - RNA, 22 nt, Human
uauuaugucauacuucaacccc

SEQ ID NO: 556864 - RNA, 24 nt, Human
ucaacaaucaacauuaaauauaca

SEQ ID NO: 556865 - RNA, 22 nt, Human
ucaagguuggaggagggggagg

SEQ ID NO: 556866 - RNA, 26 nt, Human
ucaguggcucuuccuggacgaggcug

SEQ ID NO: 556867 - RNA, 20 nt, Human
ucauacuucaaccccacuaa

SEQ ID NO: 556868 - RNA, 21 nt, Human
ucauuucaugaaggggagggg

SEQ ID NO: 556869 - RNA, 23 nt, Human
uccaagaagcuaaaaccaugcug

SEQ ID NO: 556870 - RNA, 18 nt, Human
uccaagagaagcaucugc

SEQ ID NO: 556871 - RNA, 25 nt, Human
uccaccaaucuccuucaccccucaa

SEQ ID NO: 556872 - RNA, 23 nt, Human
uccaucccuuccaauggucucca

SEQ ID NO: 556873 - RNA, 24 nt, Human
uccaucccuuccaauggucuccaa

SEQ ID NO: 556874 - RNA, 21 nt, Human
ucccagacccaaacuucagcu

SEQ ID NO: 556875 - RNA, 21 nt, Human
uccccucccccccaaacugga

SEQ ID NO: 556876 - RNA, 22 nt, Human
uccucaugcccuaccauagaag

SEQ ID NO: 556877 - RNA, 19 nt, Human
uccuccaccaaucuccuuc

SEQ ID NO: 556878 - RNA, 18 nt, Human
uccuccuaccaccaacac

SEQ ID NO: 556879 - RNA, 21 nt, Human
ucuauaccaaauaauuacucc

SEQ ID NO: 556880 - RNA, 20 nt, Human
ucucaggaggccuaauggcc

SEQ ID NO: 556881 - RNA, 21 nt, Human
ucuccaguccuggccugaaac

SEQ ID NO: 556882 - RNA, 23 nt, Human
ucuccccauccuccuaccaccaa

SEQ ID NO: 556883 - RNA, 27 nt, Human
ucucuuauuuccucuuauaggcaguga

SEQ ID NO: 556884 - RNA, 19 nt, Human
ucugacagagaaagaacaa

SEQ ID NO: 556885 - RNA, 19 nt, Human
ucugcaguuuugcacacau

SEQ ID NO: 556886 - RNA, 19 nt, Human
ucuguagcuaucauggcuu

SEQ ID NO: 556887 - RNA, 19 nt, Human
ugaaaagcagaaaucacaa

SEQ ID NO: 556888 - RNA, 22 nt, Human
ugaaaagcagaaaucacaaaga

SEQ ID NO: 556889 - RNA, 20 nt, Human
ugacuuauauuccaucccuu

SEQ ID NO: 556890 - RNA, 20 nt, Human
ugaggagcagggacugagga

SEQ ID NO: 556891 - RNA, 21 nt, Human
ugauaggaaauacagacuggc

SEQ ID NO: 556892 - RNA, 19 nt, Human
ugaugggaacaaaaaacaa

SEQ ID NO: 556893 - RNA, 21 nt, Human
ugcacacaucacccaauacaa

SEQ ID NO: 556894 - RNA, 22 nt, Human
ugcacacaucacccaauacaac

SEQ ID NO: 556895 - RNA, 25 nt, Human
ugcaccaccaucaucacuuucaccc

SEQ ID NO: 556896 - RNA, 18 nt, Human
ugcauguaugauccuacc

SEQ ID NO: 556897 - RNA, 21 nt, Human
uggagauaggagcggaggggc

SEQ ID NO: 556898 - RNA, 23 nt, Human
uggagggcucuuucugucugcug

SEQ ID NO: 556899 - RNA, 22 nt, Human
uggcucugcuaugagagguggg

SEQ ID NO: 556900 - RNA, 20 nt, Human
uggcuucucugacagagaaa

SEQ ID NO: 556901 - RNA, 23 nt, Human
ugggggaguuccccuccccccca

SEQ ID NO: 556902 - RNA, 18 nt, Human
ugggugguggcacaaagg

SEQ ID NO: 556903 - RNA, 23 nt, Human
ugggugguggcacaaaggacuca

SEQ ID NO: 556904 - RNA, 19 nt, Human
ugguacuggaguuuggggu

SEQ ID NO: 556905 - RNA, 21 nt, Human
ugguacuggaguuugggguug

SEQ ID NO: 556906 - RNA, 21 nt, Human
uggugaggggaacuggguccc

SEQ ID NO: 556907 - RNA, 20 nt, Human
uguagggacaggagacuaug

SEQ ID NO: 556908 - RNA, 23 nt, Human
uguagggacaggagacuauggac

SEQ ID NO: 556909 - RNA, 23 nt, Human
uguccagcaaugcuagaccaaca

SEQ ID NO: 556910 - RNA, 19 nt, Human
ugucucuucccccuugggg

SEQ ID NO: 556911 - RNA, 22 nt, Human
uguggccucuccaguccuggcc

SEQ ID NO: 556912 - RNA, 19 nt, Human
uucagaggcaggugacggc

SEQ ID NO: 556913 - RNA, 18 nt, Human
uuccaaaaaaaggaaagg

SEQ ID NO: 556914 - RNA, 21 nt, Human
uugcauguaugauccuacccu

SEQ ID NO: 556915 - RNA, 26 nt, Human
uuuaaaaccuccaaauucuuggcugc

SEQ ID NO: 556916 - RNA, 28 nt, Human
uuucucucuuauuuccucuuauaggcag

SEQ ID NO: 556917 - RNA, 20 nt, Human
uuugucccucuccuccacuu

SEQ ID NO: 556918 - RNA, 23 nt, Human
accaaggaaggcacacaaaacag

SEQ ID NO: 556919 - RNA, 24 nt, Human
agcagucuuuuuuauuauuauuau

SEQ ID NO: 556920 - RNA, 20 nt, Human
agggguugggcagggcaggg

SEQ ID NO: 556921 - RNA, 22 nt, Human
aucacugauauguccuguuaga

SEQ ID NO: 556922 - RNA, 19 nt, Human
cacacaaaacagaguguag

SEQ ID NO: 556923 - RNA, 23 nt, Human
cacaugagauuuuuaaaaaacca

SEQ ID NO: 556924 - RNA, 23 nt, Human
cagaaguaccaaggaaggcacag

SEQ ID NO: 556925 - RNA, 18 nt, Human
cagaauaaucuuugggaa

SEQ ID NO: 556926 - RNA, 25 nt, Human
cagaggguuuccucucagaguaacu

SEQ ID NO: 556927 - RNA, 20 nt, Human
cagaguaacucaucagacuc

SEQ ID NO: 556928 - RNA, 21 nt, Human
ccaaacucgaaucccuccagg

SEQ ID NO: 556929 - RNA, 21 nt, Human
ccuaagcacugugcucagucc

SEQ ID NO: 556930 - RNA, 18 nt, Human
cuacacuacuguaaacca

SEQ ID NO: 556931 - RNA, 24 nt, Human
cuagaccauacuucaagauaugac

SEQ ID NO: 556932 - RNA, 21 nt, Human
cuuggaaucucugaacuagca

SEQ ID NO: 556933 - RNA, 24 nt, Human
gaaaauaccucagaaguaccaagg

SEQ ID NO: 556934 - RNA, 19 nt, Human
gagaaucagacggggacaa

SEQ ID NO: 556935 - RNA, 19 nt, Human
gauucugaauuaguuguuc

SEQ ID NO: 556936 - RNA, 23 nt, Human
gccaagauugcaacuguucaaga

SEQ ID NO: 556937 - RNA, 19 nt, Human
ggaaguaacugcuccagug

SEQ ID NO: 556938 - RNA, 25 nt, Human
ggacaagcaccaaacucgaaucccu

SEQ ID NO: 556939 - RNA, 21 nt, Human
gggcagggcagggaugcggca

SEQ ID NO: 556940 - RNA, 20 nt, Human
gguugggcagggcagggaug

SEQ ID NO: 556941 - RNA, 21 nt, Human
uaaaaaaccaaaucuguccca

SEQ ID NO: 556942 - RNA, 22 nt, Human
uaaaaaaccaaaucugucccac

SEQ ID NO: 556943 - RNA, 20 nt, Human
uaauauauauacacuucaua

SEQ ID NO: 556944 - RNA, 24 nt, Human
uaaucuggaagggggcuugauugc

SEQ ID NO: 556945 - RNA, 22 nt, Human
uaccaaggaaggcacacaaaac

SEQ ID NO: 556946 - RNA, 23 nt, Human
uaccaaggaaggcacacaaaaca

SEQ ID NO: 556947 - RNA, 24 nt, Human
uauuaaaauuuuuaaaguuccaug

SEQ ID NO: 556948 - RNA, 24 nt, Human
ucugaauuaguuguucuuguuuuu

SEQ ID NO: 556949 - RNA, 25 nt, Human
ucugucccacugguaucuuuaaaaa

SEQ ID NO: 556950 - RNA, 25 nt, Human
ucuuuuuuuucccccucuuuuuccc

SEQ ID NO: 556951 - RNA, 20 nt, Human
ugaaaauaauauccuuguuc

SEQ ID NO: 556952 - RNA, 20 nt, Human
ugacaggaaaauaaacaaaa

SEQ ID NO: 556953 - RNA, 19 nt, Human
ugagaaucagacggggaca

SEQ ID NO: 556954 - RNA, 21 nt, Human
ugcucaaaaacucuauuugau

SEQ ID NO: 556955 - RNA, 21 nt, Human
ugcucaguccuccucaacaac

SEQ ID NO: 556956 - RNA, 19 nt, Human
ugggaucaugaaaauaccu

SEQ ID NO: 556957 - RNA, 18 nt, Human
uguucaagagacaguaau

SEQ ID NO: 556958 - RNA, 22 nt, Human
uucagaauaaucuuugggaagu

SEQ ID NO: 556959 - RNA, 20 nt, Human
uucuuguuuuucguuguuug

SEQ ID NO: 556960 - RNA, 19 nt, Human
uucuuuuuuuucccccucu

SEQ ID NO: 556961 - RNA, 22 nt, Human
uuguucugaauguucaaucaag

SEQ ID NO: 556962 - RNA, 23 nt, Human
uuucaagcugccaagauugcaac

SEQ ID NO: 556963 - RNA, 19 nt, Human
uuucuuuuuuuucccccuc

SEQ ID NO: 556964 - RNA, 23 nt, Human
uuuuucccccucuuuuucccccu

SEQ ID NO: 556965 - RNA, 20 nt, Human
aaaaaagaaaaggggaaaag

SEQ ID NO: 556966 - RNA, 24 nt, Human
aaaagaaggggaggagauggagag

SEQ ID NO: 556967 - RNA, 21 nt, Human
aaaauccuuccauuucuacuu

SEQ ID NO: 556968 - RNA, 21 nt, Human
aaaaugccacuuaugccaugg

SEQ ID NO: 556969 - RNA, 21 nt, Human
aaacaaaaaauaaagcaccac

SEQ ID NO: 556970 - RNA, 26 nt, Human
aaacaaaaaauaaagcaccacuccag

SEQ ID NO: 556971 - RNA, 25 nt, Human
aaaguaacauguuuggcaagcuaca

SEQ ID NO: 556972 - RNA, 26 nt, Human
aagaaaacaaaguaacauguuuggca

SEQ ID NO: 556973 - RNA, 20 nt, Human
aagagauaacuugcaaacua

SEQ ID NO: 556974 - RNA, 21 nt, Human
aagcaggagcacuacagccca

SEQ ID NO: 556975 - RNA, 26 nt, Human
aagcauuaaaggauacaaagaacaac

SEQ ID NO: 556976 - RNA, 23 nt, Human
acagcacggcaagucuauaagcu

SEQ ID NO: 556977 - RNA, 24 nt, Human
acauuuucacuuaauuaucaagga

SEQ ID NO: 556978 - RNA, 20 nt, Human
accaccacuaccaccuaugc

SEQ ID NO: 556979 - RNA, 24 nt, Human
accaccaucaccaccacuaccacc

SEQ ID NO: 556980 - RNA, 25 nt, Human
accaccaucaccaccacuaccaccu

SEQ ID NO: 556981 - RNA, 22 nt, Human
accaucaccaccacuaccaccu

SEQ ID NO: 556982 - RNA, 19 nt, Human
acuaagaacucuugcaguu

SEQ ID NO: 556983 - RNA, 18 nt, Human
acuaccaccaccaucacc

SEQ ID NO: 556984 - RNA, 22 nt, Human
acuaccaccaccaucaccacca

SEQ ID NO: 556985 - RNA, 19 nt, Human
acugcagaaauuaaggucc

SEQ ID NO: 556986 - RNA, 21 nt, Human
agaaaaggggaaaaaacccag

SEQ ID NO: 556987 - RNA, 18 nt, Human
agaaauaaagcaggagca

SEQ ID NO: 556988 - RNA, 21 nt, Human
agaaggggaggagauggagag

SEQ ID NO: 556989 - RNA, 22 nt, Human
agaaggggaggagauggagagg

SEQ ID NO: 556990 - RNA, 18 nt, Human
agcacaugccaccaaugu

SEQ ID NO: 556991 - RNA, 24 nt, Human
agcauuaaaggauacaaagaacaa

SEQ ID NO: 556992 - RNA, 23 nt, Human
aggaauacuguugcucuuaaaau

SEQ ID NO: 556993 - RNA, 23 nt, Human
agggguggggcugguagacugag

SEQ ID NO: 556994 - RNA, 23 nt, Human
aguaaaagaacuuaaaaaaaucc

SEQ ID NO: 556995 - RNA, 20 nt, Human
agucaaaaagaaggggagga

SEQ ID NO: 556996 - RNA, 20 nt, Human
auaaagcaccacuccaggca

SEQ ID NO: 556997 - RNA, 23 nt, Human
auaaagcaggagcacuacagccc

SEQ ID NO: 556998 - RNA, 19 nt, Human
auacugcagaacagacagg

SEQ ID NO: 556999 - RNA, 19 nt, Human
auagaaugacaccauuccc

SEQ ID NO: 557000 - RNA, 18 nt, Human
augcuuucugucaucugg

SEQ ID NO: 557001 - RNA, 24 nt, Human
auugcauuuauuuaaauuuuuuua

SEQ ID NO: 557002 - RNA, 21 nt, Human
caaaaaauaaagcaccacucc

SEQ ID NO: 557003 - RNA, 27 nt, Human
caaaaugagaagcaaaauugcacugac

SEQ ID NO: 557004 - RNA, 21 nt, Human
caaaaugccggaauacuucuc

SEQ ID NO: 557005 - RNA, 24 nt, Human
caaaaugccggaauacuucucugc

SEQ ID NO: 557006 - RNA, 23 nt, Human
caaacaaaaaauaaagcaccacu

SEQ ID NO: 557007 - RNA, 22 nt, Human
caaacuaccaccaccaucaccu

SEQ ID NO: 557008 - RNA, 19 nt, Human
caaaguaacauguuuggca

SEQ ID NO: 557009 - RNA, 24 nt, Human
caacuuaaucgucaucuuccccag

SEQ ID NO: 557010 - RNA, 18 nt, Human
caagaguggagucaaaaa

SEQ ID NO: 557011 - RNA, 26 nt, Human
caccaccaucaccaccacuaccaccu

SEQ ID NO: 557012 - RNA, 23 nt, Human
caccaucaccaccacuaccaccu

SEQ ID NO: 557013 - RNA, 22 nt, Human
cagacaagaacauuaaaagaaa

SEQ ID NO: 557014 - RNA, 21 nt, Human
cagcagaauggaaucaacaca

SEQ ID NO: 557015 - RNA, 19 nt, Human
caggagcacuacagcccag

SEQ ID NO: 557016 - RNA, 20 nt, Human
caguccacuggagguccuug

SEQ ID NO: 557017 - RNA, 26 nt, Human
caguccacuggagguccuugggugau

SEQ ID NO: 557018 - RNA, 19 nt, Human
caguguaccuuuuaagaac

SEQ ID NO: 557019 - RNA, 19 nt, Human
cauuuuaauauaaaguaac

SEQ ID NO: 557020 - RNA, 23 nt, Human
ccaaacaucagcccacuaucaau

SEQ ID NO: 557021 - RNA, 18 nt, Human
ccaaauaaaaggaugcuc

SEQ ID NO: 557022 - RNA, 21 nt, Human
ccaccaucaccaccacuacca

SEQ ID NO: 557023 - RNA, 22 nt, Human
ccaccuaugcaauaaaaaggca

SEQ ID NO: 557024 - RNA, 18 nt, Human
ccacuggagguccuuggg

SEQ ID NO: 557025 - RNA, 18 nt, Human
ccuaaacaggucuugugg

SEQ ID NO: 557026 - RNA, 20 nt, Human
ccuuccauuucuacuuuaaa

SEQ ID NO: 557027 - RNA, 26 nt, Human
cgagaccagcaaugucauuccagucc

SEQ ID NO: 557028 - RNA, 22 nt, Human
cgagguaaggccgucaguccac

SEQ ID NO: 557029 - RNA, 23 nt, Human
cgagguaaggccgucaguccacu

SEQ ID NO: 557030 - RNA, 19 nt, Human
cuaacaaaaaucaccgagg

SEQ ID NO: 557031 - RNA, 18 nt, Human
cuagacacuaacacaaac

SEQ ID NO: 557032 - RNA, 22 nt, Human
cugacaggucuagacacuaaca

SEQ ID NO: 557033 - RNA, 19 nt, Human
cuggcgacaccuggccaca

SEQ ID NO: 557034 - RNA, 21 nt, Human
cuugcaaacuaccaccaccau

SEQ ID NO: 557035 - RNA, 22 nt, Human
cuuuauauuagcacaugccacc

SEQ ID NO: 557036 - RNA, 21 nt, Human
gaaaaaugccacuuaugccau

SEQ ID NO: 557037 - RNA, 18 nt, Human
gaggagauggagagguuc

SEQ ID NO: 557038 - RNA, 19 nt, Human
gcaauaaaaaggcagucau

SEQ ID NO: 557039 - RNA, 23 nt, Human
gcagaacagacaggauugaggaa

SEQ ID NO: 557040 - RNA, 25 nt, Human
gcagaacagacaggauugaggaaua

SEQ ID NO: 557041 - RNA, 18 nt, Human
gccauaaaaccuccucuu

SEQ ID NO: 557042 - RNA, 20 nt, Human
ggaggagauggagagguucu

SEQ ID NO: 557043 - RNA, 25 nt, Human
ggaggagauggagagguucuuugug

SEQ ID NO: 557044 - RNA, 21 nt, Human
ggagucaaaaagaaggggagg

SEQ ID NO: 557045 - RNA, 26 nt, Human
ggcaguggcuguggaaagcuacagcc

SEQ ID NO: 557046 - RNA, 18 nt, Human
gggcugguagacugaggu

SEQ ID NO: 557047 - RNA, 18 nt, Human
ggggaggagauggagagg

SEQ ID NO: 557048 - RNA, 21 nt, Human
ggggaggagauggagagguuc

SEQ ID NO: 557049 - RNA, 20 nt, Human
gguagggguggggcugguag

SEQ ID NO: 557050 - RNA, 23 nt, Human
guaauuuuccuugcuauuuucca

SEQ ID NO: 557051 - RNA, 18 nt, Human
guccaaauaaaaggaugc

SEQ ID NO: 557052 - RNA, 19 nt, Human
guccaaauaaaaggaugcu

SEQ ID NO: 557053 - RNA, 21 nt, Human
guccagaaccggcaauuuuga

SEQ ID NO: 557054 - RNA, 22 nt, Human
gugaaagauggaagaaaacaaa

SEQ ID NO: 557055 - RNA, 23 nt, Human
gugaaagauggaagaaaacaaag

SEQ ID NO: 557056 - RNA, 22 nt, Human
gugaggcaaacaaaaaauaaag

SEQ ID NO: 557057 - RNA, 25 nt, Human
guggagucaaaaagaaggggaggag

SEQ ID NO: 557058 - RNA, 20 nt, Human
uaaaaggaugcuccgaggua

SEQ ID NO: 557059 - RNA, 19 nt, Human
uaaaaugccagugcuuugc

SEQ ID NO: 557060 - RNA, 21 nt, Human
uaaacuaaaaaaagaaaaggg

SEQ ID NO: 557061 - RNA, 22 nt, Human
uaaagcaggagcacuacagccc

SEQ ID NO: 557062 - RNA, 24 nt, Human
uaaagcauuaaaggauacaaagaa

SEQ ID NO: 557063 - RNA, 27 nt, Human
uaaagcauuaaaggauacaaagaacaa

SEQ ID NO: 557064 - RNA, 21 nt, Human
uaaguugguuuguugguuggu

SEQ ID NO: 557065 - RNA, 31 nt, Human
uacagcccagauuucaaaaugagaagcaaag

SEQ ID NO: 557066 - RNA, 19 nt, Human
uaccaccaccaucaccacc

SEQ ID NO: 557067 - RNA, 24 nt, Human
uacccugacucuaaagaugcaacu

SEQ ID NO: 557068 - RNA, 20 nt, Human
uagcacaugccaccaaugua

SEQ ID NO: 557069 - RNA, 18 nt, Human
uagcuugaacagaacuga

SEQ ID NO: 557070 - RNA, 18 nt, Human
uauauauauguguaugua

SEQ ID NO: 557071 - RNA, 25 nt, Human
uaucacacuucaguauuuuucuggg

SEQ ID NO: 557072 - RNA, 18 nt, Human
ucaaaaagaaggggagga

SEQ ID NO: 557073 - RNA, 19 nt, Human
ucaaaguaauuuuccuugc

SEQ ID NO: 557074 - RNA, 22 nt, Human
ucaacacacuugcaccuugcuc

SEQ ID NO: 557075 - RNA, 23 nt, Human
ucaacacacuugcaccuugcucu

SEQ ID NO: 557076 - RNA, 22 nt, Human
uccaagagaaauguaacaaaac

SEQ ID NO: 557077 - RNA, 25 nt, Human
uccacaggaccuuccaaaaugccgg

SEQ ID NO: 557078 - RNA, 25 nt, Human
uccucuuuaaugacagccuucacca

SEQ ID NO: 557079 - RNA, 21 nt, Human
uccuugggugauaaucucauu

SEQ ID NO: 557080 - RNA, 24 nt, Human
ucuaaacuaaaaaaagaaaagggg

SEQ ID NO: 557081 - RNA, 24 nt, Human
ucuaucaaacagcacggcaagucu

SEQ ID NO: 557082 - RNA, 18 nt, Human
ucucgagaacagcagaau

SEQ ID NO: 557083 - RNA, 24 nt, Human
ugaacagaacugagcauccacaua

SEQ ID NO: 557084 - RNA, 23 nt, Human
ugacauaaagaauuauucugcuc

SEQ ID NO: 557085 - RNA, 22 nt, Human
ugaggaauacuguugcucuuaa

SEQ ID NO: 557086 - RNA, 18 nt, Human
ugcaaacuaccaccacca

SEQ ID NO: 557087 - RNA, 23 nt, Human
ugcagaacagacaggauugagga

SEQ ID NO: 557088 - RNA, 19 nt, Human
uggagucaaaaagaagggg

SEQ ID NO: 557089 - RNA, 22 nt, Human
uggauauauauauguguaugua

SEQ ID NO: 557090 - RNA, 18 nt, Human
uggcaagcuacauugcag

SEQ ID NO: 557091 - RNA, 19 nt, Human
uggcugacaggucuagaca

SEQ ID NO: 557092 - RNA, 23 nt, Human
uggggcugguagacugaggugga

SEQ ID NO: 557093 - RNA, 24 nt, Human
uguggauauauauauguguaugua

SEQ ID NO: 557094 - RNA, 25 nt, Human
uguuuugccugucccccgaggucca

SEQ ID NO: 557095 - RNA, 20 nt, Human
uguuuugguugcuauccucu

SEQ ID NO: 557096 - RNA, 22 nt, Human
uuaccaggucgaugaggugcgu

SEQ ID NO: 557097 - RNA, 23 nt, Human
uuaugccauggguaggggugggg

SEQ ID NO: 557098 - RNA, 25 nt, Human
uucaacacauuccuuugagguacug

SEQ ID NO: 557099 - RNA, 19 nt, Human
uucacuuaauuaucaagga

SEQ ID NO: 557100 - RNA, 24 nt, Human
uucacuuucauuuuuccgaccguu

SEQ ID NO: 557101 - RNA, 23 nt, Human
uuccccaguacccuuugcaauuu

SEQ ID NO: 557102 - RNA, 22 nt, Human
uucccuauguagcagguuuuau

SEQ ID NO: 557103 - RNA, 24 nt, Human
uuccugaguuuuugcagacaagaa

SEQ ID NO: 557104 - RNA, 24 nt, Human
uuuccuccaaaucuacccugacuc

SEQ ID NO: 557105 - RNA, 19 nt, Human
uuugaaaaauguggccccc

SEQ ID NO: 557106 - RNA, 23 nt, Human
uuuguggauauauauauguguau

SEQ ID NO: 557107 - RNA, 20 nt, Human
uuuguugguugguuuuuguu

SEQ ID NO: 557108 - RNA, 20 nt, Human
uuuuuuuuuucuaaagaagu

SEQ ID NO: 557109 - RNA, 23 nt, Human
aaaaauacaauuaacacaucccc

SEQ ID NO: 557110 - RNA, 19 nt, Human
agagaugccuugauuccaa

SEQ ID NO: 557111 - RNA, 24 nt, Human
augcaaaacgggaguuaagagcac

SEQ ID NO: 557112 - RNA, 19 nt, Human
caaaacgggaguuaagagc

SEQ ID NO: 557113 - RNA, 23 nt, Human
caagcaguuucacuccagguacu

SEQ ID NO: 557114 - RNA, 18 nt, Human
cagagaugccuugauucc

SEQ ID NO: 557115 - RNA, 27 nt, Human
ccagcagugacugcaggaaaaucucuu

SEQ ID NO: 557116 - RNA, 18 nt, Human
ccugcggcugguguggga

SEQ ID NO: 557117 - RNA, 23 nt, Human
cuaugcuaaaaaauaaagaagac

SEQ ID NO: 557118 - RNA, 25 nt, Human
cuccuugaugcugcuauccaagcac

SEQ ID NO: 557119 - RNA, 24 nt, Human
cugccgguuuucaccugcggcugg

SEQ ID NO: 557120 - RNA, 22 nt, Human
gcacagggucuggagccaggcu

SEQ ID NO: 557121 - RNA, 25 nt, Human
ggcugccugcuuucaaauccuggcu

SEQ ID NO: 557122 - RNA, 22 nt, Human
uaaaaaauaaagaagacuguaa

SEQ ID NO: 557123 - RNA, 19 nt, Human
uaagagcacagggucugga

SEQ ID NO: 557124 - RNA, 25 nt, Human
uacugugcacuucugcauguacaca

SEQ ID NO: 557125 - RNA, 21 nt, Human
uaugcuaaaaaauaaagaaga

SEQ ID NO: 557126 - RNA, 19 nt, Human
ucacuccagguacugugca

SEQ ID NO: 557127 - RNA, 20 nt, Human
ucuugaugcaaaacgggagu

SEQ ID NO: 557128 - RNA, 18 nt, Human
ugagaucacacagccagu

SEQ ID NO: 557129 - RNA, 18 nt, Human
ugcuaaaaaauaaagaag

SEQ ID NO: 557130 - RNA, 21 nt, Human
uggugugggacgcuggcagcc

SEQ ID NO: 557131 - RNA, 26 nt, Human
uucaccugcggcugguguccgaguac

SEQ ID NO: 557132 - RNA, 19 nt, Human
uucaccugcggcuggugug

SEQ ID NO: 557133 - RNA, 20 nt, Human
acacuuuaugcacauauaua

SEQ ID NO: 557134 - RNA, 23 nt, Human
acagcgugggauugaaagaaagg

SEQ ID NO: 557135 - RNA, 23 nt, Human
accacacuuuaugcacauauaua

SEQ ID NO: 557136 - RNA, 19 nt, Human
agcccaggcacccgggucc

SEQ ID NO: 557137 - RNA, 22 nt, Human
agccuucaggccaaaaugacaa

SEQ ID NO: 557138 - RNA, 19 nt, Human
aucucucucuuuuccuccc

SEQ ID NO: 557139 - RNA, 27 nt, Human
auuugacuuagugcauacagcugaccc

SEQ ID NO: 557140 - RNA, 22 nt, Human
cacagggacggccacucggggg

SEQ ID NO: 557141 - RNA, 21 nt, Human
cacucgggggccaaaccccag

SEQ ID NO: 557142 - RNA, 23 nt, Human
caggcacccgggucccggggagg

SEQ ID NO: 557143 - RNA, 23 nt, Human
ccacagggacggccacucggggg

SEQ ID NO: 557144 - RNA, 22 nt, Human
ccagaucucucucuuuuccucc

SEQ ID NO: 557145 - RNA, 21 nt, Human
cccagccccagaucucucucu

SEQ ID NO: 557146 - RNA, 23 nt, Human
ccccagagucuggagguccugcu

SEQ ID NO: 557147 - RNA, 21 nt, Human
ccccccaucauccauaccccg

SEQ ID NO: 557148 - RNA, 19 nt, Human
cggaaagggaaugaggggg

SEQ ID NO: 557149 - RNA, 19 nt, Human
cggaaagggaaugaggggg

SEQ ID NO: 557150 - RNA, 21 nt, Human
cuaucgcgagccgucccccug

SEQ ID NO: 557151 - RNA, 31 nt, Human
cuccccagagucuggagguccugcucucuuu

SEQ ID NO: 557152 - RNA, 21 nt, Human
cuccggggccaccagcgcucu

SEQ ID NO: 557153 - RNA, 21 nt, Human
cuggaacaaagggagaacaca

SEQ ID NO: 557154 - RNA, 24 nt, Human
cuucaagccgagcccaggcacccc

SEQ ID NO: 557155 - RNA, 19 nt, Human
gagaacacaggaaggggcc

SEQ ID NO: 557156 - RNA, 20 nt, Human
gagcccaggcacccgggucc

SEQ ID NO: 557157 - RNA, 19 nt, Human
gccggugcgccgccgccgc

SEQ ID NO: 557158 - RNA, 22 nt, Human
gcgccgccgccgcuucaagccg

SEQ ID NO: 557159 - RNA, 22 nt, Human
gcggcgcuggaacaaagggaga

SEQ ID NO: 557160 - RNA, 22 nt, Human
gcuccggggcuucgggcgcuuc

SEQ ID NO: 557161 - RNA, 19 nt, Human
ggcgcuggaacaaagggag

SEQ ID NO: 557162 - RNA, 22 nt, Human
gggggcccaagaauggggugca

SEQ ID NO: 557163 - RNA, 22 nt, Human
ggggugcaucucccacagggac

SEQ ID NO: 557164 - RNA, 21 nt, Human
gguccugcucucuuuguccua

SEQ ID NO: 557165 - RNA, 23 nt, Human
uagaaaauugcagaauuagcuca

SEQ ID NO: 557166 - RNA, 24 nt, Human
ucaggccaaaaugacaagagguca

SEQ ID NO: 557167 - RNA, 25 nt, Human
uccccccaucauccauaccccagga

SEQ ID NO: 557168 - RNA, 26 nt, Human
ucccgcggcugugccggugcgccgcc

SEQ ID NO: 557169 - RNA, 19 nt, Human
ucccugacaguggcagagg

SEQ ID NO: 557170 - RNA, 22 nt, Human
uccuaucgcgagccgucccccu

SEQ ID NO: 557171 - RNA, 18 nt, Human
ugaaagaaaggggcaggu

SEQ ID NO: 557172 - RNA, 19 nt, Human
ugaggggggcccaagaaug

SEQ ID NO: 557173 - RNA, 25 nt, Human
ugaggggggcccaagaauggggugc

SEQ ID NO: 557174 - RNA, 27 nt, Human
ugcgagagggaggaagaaauucauuau

SEQ ID NO: 557175 - RNA, 21 nt, Human
ugcgggugggcguuggccggc

SEQ ID NO: 557176 - RNA, 21 nt, Human
uggcacaguaaagaauccuuu

SEQ ID NO: 557177 - RNA, 20 nt, Human
uggggugcaucucccacagg

SEQ ID NO: 557178 - RNA, 24 nt, Human
ugugccggugcgccgccgccgcuu

SEQ ID NO: 557179 - RNA, 23 nt, Human
uuccccccaucauccauacccca

SEQ ID NO: 557180 - RNA, 20 nt, Human
uuccuuuuucggaaagggaa

SEQ ID NO: 557181 - RNA, 18 nt, Human
uucuggugaacaucaucg

SEQ ID NO: 557182 - RNA, 22 nt, Human
gcggggcagggagccggggcac

SEQ ID NO: 557183 - RNA, 22 nt, Human
ucggguggcggcagcuaggacc

SEQ ID NO: 557184 - RNA, 25 nt, Human
ucggguggcggcagcuaggacccuc

SEQ ID NO: 557185 - RNA, 20 nt, Human
uguucggguggcggcagcua

SEQ ID NO: 557186 - RNA, 24 nt, Human
uuuuuuuuuuuuuuuuaaguuuuu

SEQ ID NO: 557187 - RNA, 19 nt, Human
uuuuuuuuuuuuuuuuuaa

SEQ ID NO: 557188 - RNA, 23 nt, Human
aaaaaacaaagcaagaaagaaca

SEQ ID NO: 557189 - RNA, 20 nt, Human
aaagaagucccuacaaaagc

SEQ ID NO: 557190 - RNA, 24 nt, Human
aaagugcugggauuacaggcauga

SEQ ID NO: 557191 - RNA, 24 nt, Human
aaagugcugggauuacaggcauga

SEQ ID NO: 557192 - RNA, 24 nt, Human
aaccucaggugauccgcccgccuc

SEQ ID NO: 557193 - RNA, 19 nt, Human
aagaaacucacacauaaau

SEQ ID NO: 557194 - RNA, 25 nt, Human
aagcaagaaagaacauuguauaagg

SEQ ID NO: 557195 - RNA, 19 nt, Human
aagcagaaauauagggugc

SEQ ID NO: 557196 - RNA, 19 nt, Human
aagugcugggauuacaggc

SEQ ID NO: 557197 - RNA, 19 nt, Human
aagugcugggauuacaggc

SEQ ID NO: 557198 - RNA, 21 nt, Human
aagugcugggauuacaggcau

SEQ ID NO: 557199 - RNA, 21 nt, Human
aagugcugggauuacaggcau

SEQ ID NO: 557200 - RNA, 26 nt, Human
aagugcugggauuacaggcaugagcc

SEQ ID NO: 557201 - RNA, 26 nt, Human
aagugcugggauuacaggcaugagcc

SEQ ID NO: 557202 - RNA, 20 nt, Human
aauaggccaccaaucacuag

SEQ ID NO: 557203 - RNA, 18 nt, Human
acaaagcaagaaagaaca

SEQ ID NO: 557204 - RNA, 20 nt, Human
acaaagcaagaaagaacauu

SEQ ID NO: 557205 - RNA, 24 nt, Human
acaagguuucaccauguuggccag

SEQ ID NO: 557206 - RNA, 24 nt, Human
accauguuggccaggcuggucuug

SEQ ID NO: 557207 - RNA, 22 nt, Human
accauuuuccucugguccuccu

SEQ ID NO: 557208 - RNA, 18 nt, Human
acccuccuuggcccccaa

SEQ ID NO: 557209 - RNA, 25 nt, Human
acccuccuuggcccccaaagugcug

SEQ ID NO: 557210 - RNA, 21 nt, Human
accgcaaccuccgccuccggg

SEQ ID NO: 557211 - RNA, 23 nt, Human
accgcaaccuccgccuccggguu

SEQ ID NO: 557212 - RNA, 18 nt, Human
acuacccauuaaagaacc

SEQ ID NO: 557213 - RNA, 22 nt, Human
acuuuuguauuuuuaguagaga

SEQ ID NO: 557214 - RNA, 24 nt, Human
acuuuuguauuuuuaguagagaua

SEQ ID NO: 557215 - RNA, 21 nt, Human
agaaagaaauggguacuuaga

SEQ ID NO: 557216 - RNA, 23 nt, Human
agacagaaaugggaaaauguaga

SEQ ID NO: 557217 - RNA, 25 nt, Human
aggcuggagugcaguggcacaaucu

SEQ ID NO: 557218 - RNA, 22 nt, Human
aggguuucuccguguuggucag

SEQ ID NO: 557219 - RNA, 24 nt, Human
aggugauccgcccgccucagccuc

SEQ ID NO: 557220 - RNA, 22 nt, Human
agguuucaccauguuggccagg

SEQ ID NO: 557221 - RNA, 18 nt, Human
aguagcugggacuacagg

SEQ ID NO: 557222 - RNA, 24 nt, Human
agugauucugccgccucagccuuc

SEQ ID NO: 557223 - RNA, 20 nt, Human
agugcaguggcacaaucuug

SEQ ID NO: 557224 - RNA, 24 nt, Human
agugcaguggcacaaucuuggcuc

SEQ ID NO: 557225 - RNA, 18 nt, Human
agugcugggauuacaggc

SEQ ID NO: 557226 - RNA, 18 nt, Human
agugcugggauuacaggc

SEQ ID NO: 557227 - RNA, 22 nt, Human
auauuaaaaggguagauguauc

SEQ ID NO: 557228 - RNA, 22 nt, Human
auccacccuccuuggcccccaa

SEQ ID NO: 557229 - RNA, 24 nt, Human
caaagugcugggauuacaggcaug

SEQ ID NO: 557230 - RNA, 24 nt, Human
caaagugcugggauuacaggcaug

SEQ ID NO: 557231 - RNA, 25 nt, Human
caagaaagaacauuguauaaaaaua

SEQ ID NO: 557232 - RNA, 24 nt, Human
caagguuucaccauguuggccagg

SEQ ID NO: 557233 - RNA, 24 nt, Human
caagugauccacccuccuuggccc

SEQ ID NO: 557234 - RNA, 22 nt, Human
caagugauucugccgccucagc

SEQ ID NO: 557235 - RNA, 21 nt, Human
caaugcauacauauuuauaug

SEQ ID NO: 557236 - RNA, 22 nt, Human
caccaccacgccuggcuaauuu

SEQ ID NO: 557237 - RNA, 24 nt, Human
caccacgccuggcuaauuuuugua

SEQ ID NO: 557238 - RNA, 21 nt, Human
caccauguuggccaggcuggu

SEQ ID NO: 557239 - RNA, 24 nt, Human
caccauguuggccaggcuggucuu

SEQ ID NO: 557240 - RNA, 27 nt, Human
caccauguuggccaggcuggucuugaa

SEQ ID NO: 557241 - RNA, 20 nt, Human
cacccuccuuggcccccaaa

SEQ ID NO: 557242 - RNA, 21 nt, Human
cacugcaaccuccgccucccg

SEQ ID NO: 557243 - RNA, 23 nt, Human
cacugcaaccuccgccucccggg

SEQ ID NO: 557244 - RNA, 18 nt, Human
cagcuaacuucaguuuuu

SEQ ID NO: 557245 - RNA, 20 nt, Human
cagcuuaaguccuagguagc

SEQ ID NO: 557246 - RNA, 21 nt, Human
caggcacgcaucaccacgccc

SEQ ID NO: 557247 - RNA, 23 nt, Human
caugagccaccaugccuggcuau

SEQ ID NO: 557248 - RNA, 24 nt, Human
cauguuggccaggcuggucuugaa

SEQ ID NO: 557249 - RNA, 23 nt, Human
ccaaagugcugggauuacaggca

SEQ ID NO: 557250 - RNA, 23 nt, Human
ccaaagugcugggauuacaggca

SEQ ID NO: 557251 - RNA, 24 nt, Human
ccaaagugcugggauuacaggcau

SEQ ID NO: 557252 - RNA, 24 nt, Human
ccaaagugcugggauuacaggcau

SEQ ID NO: 557253 - RNA, 23 nt, Human
ccagaagucuucuauucaaagac

SEQ ID NO: 557254 - RNA, 24 nt, Human
cccaaagugcugggauuacaggca

SEQ ID NO: 557255 - RNA, 24 nt, Human
cccaaagugcugggauuacaggca

SEQ ID NO: 557256 - RNA, 20 nt, Human
cccaaccucaggugauccgc

SEQ ID NO: 557257 - RNA, 24 nt, Human
cccaaccucaggugauccgcccgc

SEQ ID NO: 557258 - RNA, 24 nt, Human
ccccaaagugcugggauuacaggc

SEQ ID NO: 557259 - RNA, 23 nt, Human
cccgaguagcugggacuacaggu

SEQ ID NO: 557260 - RNA, 24 nt, Human
cccgaguagcugggacuacaggug

SEQ ID NO: 557261 - RNA, 23 nt, Human
cccggguucaagcaaaucucccc

SEQ ID NO: 557262 - RNA, 23 nt, Human
cccggguucaagcaaaucuccug

SEQ ID NO: 557263 - RNA, 23 nt, Human
ccgcaaccuccgccuccggguuc

SEQ ID NO: 557264 - RNA, 26 nt, Human
ccgcccgccucagccucccaaagugc

SEQ ID NO: 557265 - RNA, 24 nt, Human
ccgccucagccucccaaagugcug

SEQ ID NO: 557266 - RNA, 24 nt, Human
ccgccucagccuuccuggguagcu

SEQ ID NO: 557267 - RNA, 18 nt, Human
ccggguucaagugauucu

SEQ ID NO: 557268 - RNA, 19 nt, Human
ccguguuggucaggcuggu

SEQ ID NO: 557269 - RNA, 22 nt, Human
ccguguuggucaggcuggucuc

SEQ ID NO: 557270 - RNA, 23 nt, Human
ccguguuggucaggcuggucucg

SEQ ID NO: 557271 - RNA, 24 nt, Human
ccucugguccucaagcagagacug

SEQ ID NO: 557272 - RNA, 24 nt, Human
ccugaucucaagugauccacccuc

SEQ ID NO: 557273 - RNA, 23 nt, Human
ccuggguagcugggauuacaggc

SEQ ID NO: 557274 - RNA, 24 nt, Human
ccuggguagcugggauuacaggca

SEQ ID NO: 557275 - RNA, 21 nt, Human
cgcaucaccacgcccggcuac

SEQ ID NO: 557276 - RNA, 24 nt, Human
cgccucagccucccaaagugcugg

SEQ ID NO: 557277 - RNA, 21 nt, Human
cgccuccggguucaagugauu

SEQ ID NO: 557278 - RNA, 19 nt, Human
cuacccauuaaagaaccag

SEQ ID NO: 557279 - RNA, 24 nt, Human
cuagccuuaagaaguaaauauuga

SEQ ID NO: 557280 - RNA, 25 nt, Human
cucacacauaaaugauuuguccuau

SEQ ID NO: 557281 - RNA, 24 nt, Human
cucacugcaaccuccgccucccgg

SEQ ID NO: 557282 - RNA, 24 nt, Human
cucagccucccgaguagcugggac

SEQ ID NO: 557283 - RNA, 23 nt, Human
cucugucacccaggcuggagugc

SEQ ID NO: 557284 - RNA, 23 nt, Human
cugcaaccuccgccucccggguu

SEQ ID NO: 557285 - RNA, 24 nt, Human
cugcaaccuccgccucccggguuc

SEQ ID NO: 557286 - RNA, 20 nt, Human
cuggguagcugggauuacag

SEQ ID NO: 557287 - RNA, 23 nt, Human
cugucucagccucccgaguagcu

SEQ ID NO: 557288 - RNA, 21 nt, Human
cuugcucugucacccaggcug

SEQ ID NO: 557289 - RNA, 24 nt, Human
cuugcucugucacccaggcuggag

SEQ ID NO: 557290 - RNA, 21 nt, Human
cuuuaaagaugacugcccucu

SEQ ID NO: 557291 - RNA, 20 nt, Human
cuuuuguauuuuuaguagag

SEQ ID NO: 557292 - RNA, 22 nt, Human
gaaaauagagggaagcagaaau

SEQ ID NO: 557293 - RNA, 18 nt, Human
gaaaauagcaagccuugg

SEQ ID NO: 557294 - RNA, 19 nt, Human
gaagcagaaauauagggug

SEQ ID NO: 557295 - RNA, 21 nt, Human
gagaaaauagagggaagcaga

SEQ ID NO: 557296 - RNA, 25 nt, Human
gagaaaauagagggaagccgguacc

SEQ ID NO: 557297 - RNA, 24 nt, Human
gagauaggguuucuccguguuggu

SEQ ID NO: 557298 - RNA, 21 nt, Human
gagauggagucuugcucuguc

SEQ ID NO: 557299 - RNA, 24 nt, Human
gaguagcugggacuacaggugugc

SEQ ID NO: 557300 - RNA, 21 nt, Human
gauccacccuccuuggccccc

SEQ ID NO: 557301 - RNA, 24 nt, Human
gaucucaagugauccacccuccuu

SEQ ID NO: 557302 - RNA, 18 nt, Human
gauuacaggcaugagcca

SEQ ID NO: 557303 - RNA, 18 nt, Human
gauuacaggcaugagcca

SEQ ID NO: 557304 - RNA, 21 nt, Human
gauuacaggcaugagccacca

SEQ ID NO: 557305 - RNA, 21 nt, Human
gauuacaggcaugagccacca

SEQ ID NO: 557306 - RNA, 22 nt, Human
gauuacaggcaugagccaccac

SEQ ID NO: 557307 - RNA, 24 nt, Human
gauuacaggcaugagccaccaugc

SEQ ID NO: 557308 - RNA, 18 nt, Human
gccgccucagccuuccug

SEQ ID NO: 557309 - RNA, 21 nt, Human
gccucagccuuccuggguagc

SEQ ID NO: 557310 - RNA, 24 nt, Human
gccucagccuuccuggguagcugg

SEQ ID NO: 557311 - RNA, 21 nt, Human
gccuccggguucaagugauuc

SEQ ID NO: 557312 - RNA, 19 nt, Human
gcuggagugcaguggcaca

SEQ ID NO: 557313 - RNA, 23 nt, Human
gcuggucucgaacucccaaccuc

SEQ ID NO: 557314 - RNA, 19 nt, Human
ggauuacaggcaugagcca

SEQ ID NO: 557315 - RNA, 24 nt, Human
ggauuacaggcaugagccaccaug

SEQ ID NO: 557316 - RNA, 24 nt, Human
ggcuggucuugaacuccugaucuc

SEQ ID NO: 557317 - RNA, 24 nt, Human
ggguagcugggauuacaggcacgc

SEQ ID NO: 557318 - RNA, 18 nt, Human
guagcugggauuacaggc

SEQ ID NO: 557319 - RNA, 19 nt, Human
guagcugggauuacaggca

SEQ ID NO: 557320 - RNA, 22 nt, Human
gugauccacccuccuuggcccc

SEQ ID NO: 557321 - RNA, 24 nt, Human
gugauccgcccgccucagccuccc

SEQ ID NO: 557322 - RNA, 24 nt, Human
gugauucugccgccucagccuucc

SEQ ID NO: 557323 - RNA, 25 nt, Human
guuucuccguguuggucaggcuggu

SEQ ID NO: 557324 - RNA, 21 nt, Human
uaaccuggucucaugucgugg

SEQ ID NO: 557325 - RNA, 27 nt, Human
uaacuuaucagaaagaaaggccaaugg

SEQ ID NO: 557326 - RNA, 25 nt, Human
uaacuuaucagaaagaaauggguac

SEQ ID NO: 557327 - RNA, 20 nt, Human
uaaguccuagguagcauguc

SEQ ID NO: 557328 - RNA, 18 nt, Human
uaauaggccaccaaucac

SEQ ID NO: 557329 - RNA, 31 nt, Human
uaauaggccaccaaucacuaggagccaagcc

SEQ ID NO: 557330 - RNA, 24 nt, Human
uaauuuuuguauuuuuaguagaga

SEQ ID NO: 557331 - RNA, 24 nt, Human
uacaggcaugagccaccacaccca

SEQ ID NO: 557332 - RNA, 22 nt, Human
uacaggcaugagccaccaugcc

SEQ ID NO: 557333 - RNA, 22 nt, Human
uacaggugugcaccaccacgcc

SEQ ID NO: 557334 - RNA, 22 nt, Human
uaccgcaaccuccgccuccggg

SEQ ID NO: 557335 - RNA, 22 nt, Human
uagagacaagguuucaccaugu

SEQ ID NO: 557336 - RNA, 24 nt, Human
uaggguuucuccguguuggucagg

SEQ ID NO: 557337 - RNA, 24 nt, Human
uaguagagacaagguuucaccaug

SEQ ID NO: 557338 - RNA, 26 nt, Human
uaguagagacaagguuucaccauguu

SEQ ID NO: 557339 - RNA, 21 nt, Human
uaguagagauaggguuucucc

SEQ ID NO: 557340 - RNA, 24 nt, Human
uaguagagauaggguuucuccgug

SEQ ID NO: 557341 - RNA, 26 nt, Human
uaguagagauaggguuucuccguguu

SEQ ID NO: 557342 - RNA, 24 nt, Human
uauaaauauaacuuucuaccucau

SEQ ID NO: 557343 - RNA, 24 nt, Human
uauauaaaaauaaaaaacaaagca

SEQ ID NO: 557344 - RNA, 24 nt, Human
ucaaauguugaccucuaacuugga

SEQ ID NO: 557345 - RNA, 18 nt, Human
ucaaggcuuacggacaag

SEQ ID NO: 557346 - RNA, 24 nt, Human
ucacccaggcuggagugcaguggc

SEQ ID NO: 557347 - RNA, 23 nt, Human
ucacugcaaccuccgccucccgg

SEQ ID NO: 557348 - RNA, 24 nt, Human
ucacugcaaccuccgccucccggg

SEQ ID NO: 557349 - RNA, 25 nt, Human
ucacugcaaccuccgccucccgggu

SEQ ID NO: 557350 - RNA, 27 nt, Human
ucacugcaaccuccgccucccggguuc

SEQ ID NO: 557351 - RNA, 23 nt, Human
ucagccucccgaguagcugggac

SEQ ID NO: 557352 - RNA, 21 nt, Human
ucagccuuccuggguagcugg

SEQ ID NO: 557353 - RNA, 21 nt, Human
ucagguccaacaaccauuuuc

SEQ ID NO: 557354 - RNA, 19 nt, Human
uccacccuccuuggccccc

SEQ ID NO: 557355 - RNA, 20 nt, Human
uccacccuccuuggccccca

SEQ ID NO: 557356 - RNA, 24 nt, Human
ucccaaagugcugggauuacaggc

SEQ ID NO: 557357 - RNA, 23 nt, Human
ucccgaguagcugggacuacagg

SEQ ID NO: 557358 - RNA, 24 nt, Human
ucccgaguagcugggacuacaggu

SEQ ID NO: 557359 - RNA, 21 nt, Human
ucccggguucaagcaaaucuc

SEQ ID NO: 557360 - RNA, 24 nt, Human
ucccggguucaagcaaaucuccug

SEQ ID NO: 557361 - RNA, 20 nt, Human
ucccucgacuucauagauuu

SEQ ID NO: 557362 - RNA, 21 nt, Human
uccgcccgccucagccuccca

SEQ ID NO: 557363 - RNA, 23 nt, Human
uccgccuccggguucaagugauu

SEQ ID NO: 557364 - RNA, 24 nt, Human
uccuggguagcugggauuacaggc

SEQ ID NO: 557365 - RNA, 20 nt, Human
uccuuggcccccaaagugcu

SEQ ID NO: 557366 - RNA, 23 nt, Human
ucucaagugauccacccuccuug

SEQ ID NO: 557367 - RNA, 24 nt, Human
ucuccugucucagccucccgagua

SEQ ID NO: 557368 - RNA, 24 nt, Human
ucugucacccaggcuggagugcag

SEQ ID NO: 557369 - RNA, 21 nt, Human
ucuugaacuccugaucucaag

SEQ ID NO: 557370 - RNA, 23 nt, Human
ucuugcucugucacccaggcugg

SEQ ID NO: 557371 - RNA, 24 nt, Human
ucuugcucugucacccaggcugga

SEQ ID NO: 557372 - RNA, 19 nt, Human
ucuuuuuuucgagacagag

SEQ ID NO: 557373 - RNA, 21 nt, Human
ugaucucaagugauccacccu

SEQ ID NO: 557374 - RNA, 22 nt, Human
ugaucucaagugauccacccuc

SEQ ID NO: 557375 - RNA, 22 nt, Human
ugcaguggcacaaucuuggcuc

SEQ ID NO: 557376 - RNA, 24 nt, Human
ugcucugucacccaggcuggagug

SEQ ID NO: 557377 - RNA, 19 nt, Human
uggagucuugcucugucac

SEQ ID NO: 557378 - RNA, 23 nt, Human
uggagugcaguggcacaaucuug

SEQ ID NO: 557379 - RNA, 24 nt, Human
uggagugcaguggcacaaucuugg

SEQ ID NO: 557380 - RNA, 24 nt, Human
uggcacaaucuuggcucacugcaa

SEQ ID NO: 557381 - RNA, 24 nt, Human
uggccaggcuggucuugaacuccu

SEQ ID NO: 557382 - RNA, 18 nt, Human
ugggaaaauguagacugg

SEQ ID NO: 557383 - RNA, 21 nt, Human
ugggacuacaggugugcacca

SEQ ID NO: 557384 - RNA, 24 nt, Human
ugggacuacaggugugcaccacca

SEQ ID NO: 557385 - RNA, 21 nt, Human
ugggauuacaggcacgcauca

SEQ ID NO: 557386 - RNA, 24 nt, Human
ugggauuacaggcacgcaucacca

SEQ ID NO: 557387 - RNA, 18 nt, Human
ugggauuacaggcaugag

SEQ ID NO: 557388 - RNA, 18 nt, Human
ugggauuacaggcaugag

SEQ ID NO: 557389 - RNA, 19 nt, Human
ugggauuacaggcaugagc

SEQ ID NO: 557390 - RNA, 22 nt, Human
ugggauuacaggcaugagccac

SEQ ID NO: 557391 - RNA, 22 nt, Human
ugggauuacaggcaugagccac

SEQ ID NO: 557392 - RNA, 23 nt, Human
ugggauuacaggcaugagccacc

SEQ ID NO: 557393 - RNA, 23 nt, Human
ugggauuacaggcaugagccacc

SEQ ID NO: 557394 - RNA, 24 nt, Human
ugggauuacaggcaugagccacca

SEQ ID NO: 557395 - RNA, 24 nt, Human
ugggauuacaggcaugagccacca

SEQ ID NO: 557396 - RNA, 24 nt, Human
ugggauuacaggcaugagccacca

SEQ ID NO: 557397 - RNA, 25 nt, Human
ugggauuacaggcaugagccaccau

SEQ ID NO: 557398 - RNA, 22 nt, Human
uggguacuuagaaaccuaaggg

SEQ ID NO: 557399 - RNA, 23 nt, Human
uggucaggcuggucucgaacucc

SEQ ID NO: 557400 - RNA, 24 nt, Human
uguauaaaaauaaaauguucuuua

SEQ ID NO: 557401 - RNA, 22 nt, Human
uguccaggcuggaggugaucuc

SEQ ID NO: 557402 - RNA, 23 nt, Human
ugucgugguauauucccaguugc

SEQ ID NO: 557403 - RNA, 24 nt, Human
ugucucagccucccgaguagcugg

SEQ ID NO: 557404 - RNA, 23 nt, Human
uuaccgcaaccuccgccuccggg

SEQ ID NO: 557405 - RNA, 24 nt, Human
uuaccgcaaccuccgccuccgggu

SEQ ID NO: 557406 - RNA, 24 nt, Human
uuaguagagacaagguuucaccau

SEQ ID NO: 557407 - RNA, 18 nt, Human
uuaguagagauaggguuu

SEQ ID NO: 557408 - RNA, 24 nt, Human
uuaguagagauaggguuucuccgu

SEQ ID NO: 557409 - RNA, 23 nt, Human
uucaagugauucugccgccucag

SEQ ID NO: 557410 - RNA, 24 nt, Human
uugcucugucacccaggcuggagu

SEQ ID NO: 557411 - RNA, 18 nt, Human
uuggagaaaauagaggga

SEQ ID NO: 557412 - RNA, 24 nt, Human
uuucaccauguuggccaggcuggu

SEQ ID NO: 557413 - RNA, 22 nt, Human
uuuuguauuuuuaguagagaca

SEQ ID NO: 557414 - RNA, 24 nt, Human
uuuuuaguagagacaagguuucac

SEQ ID NO: 557415 - RNA, 19 nt, Human
uuuuuaguagagauagggu

SEQ ID NO: 557416 - RNA, 20 nt, Human
uuuuuguauuuuuaguagag

SEQ ID NO: 557417 - RNA, 24 nt, Human
acaguggaucaauuuuuauugagc

SEQ ID NO: 557418 - RNA, 24 nt, Human
aggcagcuaugccuuuaaagucca

SEQ ID NO: 557419 - RNA, 22 nt, Human
cccacauuuaaggcagcuaugc

SEQ ID NO: 557420 - RNA, 22 nt, Human
ccccgcugccuccgcuuuacug

SEQ ID NO: 557421 - RNA, 18 nt, Human
ccccuagggcggggcggg

SEQ ID NO: 557422 - RNA, 22 nt, Human
ccgccgcaguucggcaucgccc

SEQ ID NO: 557423 - RNA, 21 nt, Human
ccuuagagcugaagcacugcu

SEQ ID NO: 557424 - RNA, 20 nt, Human
cgauucugaauuagacaccu

SEQ ID NO: 557425 - RNA, 22 nt, Human
cggaggucgaggggcgggccuc

SEQ ID NO: 557426 - RNA, 18 nt, Human
cuagagaucuucgauucu

SEQ ID NO: 557427 - RNA, 21 nt, Human
cuccuugaauuuuccaguuga

SEQ ID NO: 557428 - RNA, 18 nt, Human
gccccgcccccuagggcg

SEQ ID NO: 557429 - RNA, 20 nt, Human
gcuaauauccuuagagcuga

SEQ ID NO: 557430 - RNA, 24 nt, Human
guaacaaguucuaacuaguugugu

SEQ ID NO: 557431 - RNA, 19 nt, Human
uaucaaccauuacccacau

SEQ ID NO: 557432 - RNA, 18 nt, Human
ucaaccauuacccacauu

SEQ ID NO: 557433 - RNA, 18 nt, Human
ucauuguugcuaauaucc

SEQ ID NO: 557434 - RNA, 22 nt, Human
ucccccgcugccuccgcuuuac

SEQ ID NO: 557435 - RNA, 18 nt, Human
ucucaaaagcugggacca

SEQ ID NO: 557436 - RNA, 27 nt, Human
ucuucgauucugaauuagacaccuuac

SEQ ID NO: 557437 - RNA, 21 nt, Human
ugaguagaagaccgcuagaga

SEQ ID NO: 557438 - RNA, 21 nt, Human
uguaaauuucuucaaggccaa

SEQ ID NO: 557439 - RNA, 19 nt, Human
uguguaaauuucuucaagg

SEQ ID NO: 557440 - RNA, 23 nt, Human
uuaaaguccagucuauaaccuau

SEQ ID NO: 557441 - RNA, 20 nt, Human
uuacugagccagcccgccgc

SEQ ID NO: 557442 - RNA, 23 nt, Human
uucuucaaggccaaguuuuauca

SEQ ID NO: 557443 - RNA, 22 nt, Human
uugcuaauauccuuagagcuga

SEQ ID NO: 557444 - RNA, 19 nt, Human
uuuacacagcuguaggaaa

SEQ ID NO: 557445 - RNA, 22 nt, Human
uuuaucucucaaaagcugggac

SEQ ID NO: 557446 - RNA, 19 nt, Human
uuuuacacagcuguaggaa

SEQ ID NO: 557447 - RNA, 23 nt, Human
uuuuuuuuuuuuuugacagugga

SEQ ID NO: 557448 - RNA, 18 nt, Human
uuuuuuuuuuuuuuuuug

SEQ ID NO: 557449 - RNA, 22 nt, Human
uuuuuuuuuuuuuuuuugacag

SEQ ID NO: 557450 - RNA, 25 nt, Human
aaacggcugcccaggagucucccuc

SEQ ID NO: 557451 - RNA, 21 nt, Human
aaacugacaggggaaauacca

SEQ ID NO: 557452 - RNA, 20 nt, Human
aagaggcugaggggauuuug

SEQ ID NO: 557453 - RNA, 24 nt, Human
aaggucuaauucacucaaaauucu

SEQ ID NO: 557454 - RNA, 18 nt, Human
acaggggaaauaccagaa

SEQ ID NO: 557455 - RNA, 19 nt, Human
accucaaucccccagccua

SEQ ID NO: 557456 - RNA, 22 nt, Human
agcuggugccggcgcgagcgca

SEQ ID NO: 557457 - RNA, 24 nt, Human
aggaagggaacagagagaagaaau

SEQ ID NO: 557458 - RNA, 23 nt, Human
agggaacaggggguggucaccau

SEQ ID NO: 557459 - RNA, 18 nt, Human
agggcugguggagagggg

SEQ ID NO: 557460 - RNA, 23 nt, Human
auaccagaacagggaacaggggg

SEQ ID NO: 557461 - RNA, 22 nt, Human
caacgugcagagaagaggcuga

SEQ ID NO: 557462 - RNA, 18 nt, Human
caccuuucccccuucccc

SEQ ID NO: 557463 - RNA, 19 nt, Human
cagugguuuuucccauguc

SEQ ID NO: 557464 - RNA, 20 nt, Human
caugacaccagaagacauca

SEQ ID NO: 557465 - RNA, 18 nt, Human
ccaugucccuagcaccca

SEQ ID NO: 557466 - RNA, 19 nt, Human
ccccaccucaaucccccag

SEQ ID NO: 557467 - RNA, 21 nt, Human
ccccuaaagccaccauccacc

SEQ ID NO: 557468 - RNA, 24 nt, Human
cggaccgcgaggaggcuugagcaa

SEQ ID NO: 557469 - RNA, 26 nt, Human
cuaauucacucaaaauucuucaguuu

SEQ ID NO: 557470 - RNA, 24 nt, Human
gaacagagagaagaaauggcauag

SEQ ID NO: 557471 - RNA, 21 nt, Human
gaagggaacagagagaagaaa

SEQ ID NO: 557472 - RNA, 19 nt, Human
gaggaaaacggcugcccag

SEQ ID NO: 557473 - RNA, 21 nt, Human
gaggcaagccuggaccuucag

SEQ ID NO: 557474 - RNA, 22 nt, Human
gaggcaagccuggaccuucagc

SEQ ID NO: 557475 - RNA, 20 nt, Human
gcagagaagaggcugagggg

SEQ ID NO: 557476 - RNA, 20 nt, Human
gcggcgcgccguuuauccgg

SEQ ID NO: 557477 - RNA, 22 nt, Human
ggagcuggugccggcgcgagcg

SEQ ID NO: 557478 - RNA, 19 nt, Human
ggaguggggagacuggggg

SEQ ID NO: 557479 - RNA, 20 nt, Human
ggaguggggagacugggggg

SEQ ID NO: 557480 - RNA, 24 nt, Human
gggaacagagagaagaaauggcau

SEQ ID NO: 557481 - RNA, 25 nt, Human
gggaacaggggguggucaccaugac

SEQ ID NO: 557482 - RNA, 20 nt, Human
gggcgcuaccugcggggcgu

SEQ ID NO: 557483 - RNA, 22 nt, Human
ggugaggaagggaacagagaga

SEQ ID NO: 557484 - RNA, 21 nt, Human
gugcagagaagaggcugaggg

SEQ ID NO: 557485 - RNA, 21 nt, Human
uaaaaugauuccccaccucaa

SEQ ID NO: 557486 - RNA, 19 nt, Human
uaccagaacagggaacagg

SEQ ID NO: 557487 - RNA, 19 nt, Human
ucaaucccccagccuacac

SEQ ID NO: 557488 - RNA, 25 nt, Human
uccacuuuauugcucaagcauggaa

SEQ ID NO: 557489 - RNA, 19 nt, Human
uccccaccucaauccccca

SEQ ID NO: 557490 - RNA, 20 nt, Human
ucccccagccuacaccuuuc

SEQ ID NO: 557491 - RNA, 20 nt, Human
ucccccuuccccuaaagcca

SEQ ID NO: 557492 - RNA, 24 nt, Human
ucuacccuuagaaaauggaccuaa

SEQ ID NO: 557493 - RNA, 19 nt, Human
ucucccucuccacccuggg

SEQ ID NO: 557494 - RNA, 21 nt, Human
ugaggaaaacggcugcccagg

SEQ ID NO: 557495 - RNA, 20 nt, Human
ugauuccccaccucaauccc

SEQ ID NO: 557496 - RNA, 18 nt, Human
ugcagagaagaggcugag

SEQ ID NO: 557497 - RNA, 23 nt, Human
ugcccaggagucucccucuccac

SEQ ID NO: 557498 - RNA, 19 nt, Human
uggaaauggacugggagag

SEQ ID NO: 557499 - RNA, 22 nt, Human
uggaacuugaggcaagccugga

SEQ ID NO: 557500 - RNA, 24 nt, Human
uggaacuugaggcaagccuggacc

SEQ ID NO: 557501 - RNA, 20 nt, Human
uggacugggagagggaaagg

SEQ ID NO: 557502 - RNA, 21 nt, Human
uggaggaagggaagaggggcu

SEQ ID NO: 557503 - RNA, 21 nt, Human
uggaggaagggaagaggggcu

SEQ ID NO: 557504 - RNA, 22 nt, Human
uggaggaagggaagaggggcug

SEQ ID NO: 557505 - RNA, 23 nt, Human
uggaguggggagacuggggggca

SEQ ID NO: 557506 - RNA, 21 nt, Human
uggauggacauauguucaugu

SEQ ID NO: 557507 - RNA, 21 nt, Human
uggcauagcagugguuuuucc

SEQ ID NO: 557508 - RNA, 23 nt, Human
ugucugacacccagguuuuauug

SEQ ID NO: 557509 - RNA, 23 nt, Human
uucaugugcaauggaggaaggga

SEQ ID NO: 557510 - RNA, 19 nt, Human
uuuacaaaacuaacagggu

SEQ ID NO: 557511 - RNA, 22 nt, Human
uuuucccaugucccuagcaccc

SEQ ID NO: 557512 - RNA, 19 nt, Human
uuuuuugucugacacccag

SEQ ID NO: 557513 - RNA, 19 nt, Human
uuuuuuuuuuuuuuugucu

SEQ ID NO: 557514 - RNA, 18 nt, Human
uuuuuuuuuuuuuuuuug

SEQ ID NO: 557515 - RNA, 19 nt, Human
uuuuuuuuuuuuuuuuugu

SEQ ID NO: 557516 - RNA, 23 nt, Human
aaaaaagacaaaagcauaaauga

SEQ ID NO: 557517 - RNA, 24 nt, Human
aaaaacaaaagcuuauccuccuuc

SEQ ID NO: 557518 - RNA, 21 nt, Human
aaaaagacaaaagcauaaagg

SEQ ID NO: 557519 - RNA, 19 nt, Human
aaaaaggugagauguucca

SEQ ID NO: 557520 - RNA, 23 nt, Human
aaaacaaaagcuuauccuccuuc

SEQ ID NO: 557521 - RNA, 23 nt, Human
aaaccugcaggugaaaccccuag

SEQ ID NO: 557522 - RNA, 23 nt, Human
aaagaacacacaaaaaagugcau

SEQ ID NO: 557523 - RNA, 24 nt, Human
aaagcgagcaacugcgugucaaac

SEQ ID NO: 557524 - RNA, 18 nt, Human
aaagcuaauccagaaacu

SEQ ID NO: 557525 - RNA, 22 nt, Human
aagaaauauuucauaaaaaaga

SEQ ID NO: 557526 - RNA, 21 nt, Human
aagaacacacaaaaaagugca

SEQ ID NO: 557527 - RNA, 20 nt, Human
aaggaggcuggcugaggagg

SEQ ID NO: 557528 - RNA, 19 nt, Human
aaguacuggagauuuaggc

SEQ ID NO: 557529 - RNA, 22 nt, Human
aaguggccucugagguucuggc

SEQ ID NO: 557530 - RNA, 18 nt, Human
aagugucuucuugagugg

SEQ ID NO: 557531 - RNA, 22 nt, Human
aauaaaguuccauaaaccagua

SEQ ID NO: 557532 - RNA, 18 nt, Human
aaugaaagaagaagcuga

SEQ ID NO: 557533 - RNA, 18 nt, Human
acaaaaaaagcugcaugg

SEQ ID NO: 557534 - RNA, 20 nt, Human
acacccuuccccuccccaca

SEQ ID NO: 557535 - RNA, 20 nt, Human
acagagcuuucccaacagga

SEQ ID NO: 557536 - RNA, 22 nt, Human
acccuuccccuccccacacaca

SEQ ID NO: 557537 - RNA, 18 nt, Human
acuguguauugaauauua

SEQ ID NO: 557538 - RNA, 19 nt, Human
agcuaauccagaaacucuc

SEQ ID NO: 557539 - RNA, 19 nt, Human
agcuacugguuuugccauu

SEQ ID NO: 557540 - RNA, 25 nt, Human
aggaaaggagaaauucaugaagcau

SEQ ID NO: 557541 - RNA, 21 nt, Human
aggaauagaggaggggagaaa

SEQ ID NO: 557542 - RNA, 23 nt, Human
aggaggcuaagucagcaagcaag

SEQ ID NO: 557543 - RNA, 22 nt, Human
aggaggcuggcugaggaggggg

SEQ ID NO: 557544 - RNA, 20 nt, Human
agguuuaagcaaaugguucc

SEQ ID NO: 557545 - RNA, 18 nt, Human
aguacuaaaaagucaaaa

SEQ ID NO: 557546 - RNA, 23 nt, Human
aguuuagcaaguaagcaaaauca

SEQ ID NO: 557547 - RNA, 24 nt, Human
augcagccuaaaaggugguugaaa

SEQ ID NO: 557548 - RNA, 24 nt, Human
caaaugguuccuuggguugccaac

SEQ ID NO: 557549 - RNA, 23 nt, Human
caacagacuacauuuauagcacu

SEQ ID NO: 557550 - RNA, 21 nt, Human
caccacagucauuucuguuug

SEQ ID NO: 557551 - RNA, 23 nt, Human
cacccuuccccuccccacacaca

SEQ ID NO: 557552 - RNA, 21 nt, Human
cacucccuccacaccacaguc

SEQ ID NO: 557553 - RNA, 25 nt, Human
cagaacagagaagcuugacagggca

SEQ ID NO: 557554 - RNA, 18 nt, Human
cagcagcaggggggcugu

SEQ ID NO: 557555 - RNA, 21 nt, Human
cagcagcaggggggcuguuuu

SEQ ID NO: 557556 - RNA, 26 nt, Human
cagcaggccgcccgcgcgccggacac

SEQ ID NO: 557557 - RNA, 21 nt, Human
cauaaaaaagacaaaagcaua

SEQ ID NO: 557558 - RNA, 19 nt, Human
ccauugaggaggggccgag

SEQ ID NO: 557559 - RNA, 21 nt, Human
ccccuaguguagaagagcaac

SEQ ID NO: 557560 - RNA, 23 nt, Human
cccgugccaccccucagugaacc

SEQ ID NO: 557561 - RNA, 24 nt, Human
cccuacccuacccaacuguaggaa

SEQ ID NO: 557562 - RNA, 23 nt, Human
ccgcgcgccggacaccgccgccc

SEQ ID NO: 557563 - RNA, 19 nt, Human
ccugaguugggggaaagcc

SEQ ID NO: 557564 - RNA, 22 nt, Human
ccuucagcccgcccagcaggcc

SEQ ID NO: 557565 - RNA, 18 nt, Human
cgcgccggacaccgccgc

SEQ ID NO: 557566 - RNA, 21 nt, Human
cgggggcucgccgacuccguc

SEQ ID NO: 557567 - RNA, 20 nt, Human
cgucugugacacugcugugg

SEQ ID NO: 557568 - RNA, 19 nt, Human
cugaggagggggacuuugg

SEQ ID NO: 557569 - RNA, 21 nt, Human
cuggcugaggagggggacuuu

SEQ ID NO: 557570 - RNA, 19 nt, Human
cugggaggaaguacugugu

SEQ ID NO: 557571 - RNA, 19 nt, Human
cuuccccuacccuacccaa

SEQ ID NO: 557572 - RNA, 22 nt, Human
cuugagugguaaugggcacccu

SEQ ID NO: 557573 - RNA, 23 nt, Human
gagacagcuggcaucaucugagu

SEQ ID NO: 557574 - RNA, 18 nt, Human
gagcaguagcaaugcugg

SEQ ID NO: 557575 - RNA, 23 nt, Human
gagguucuggcuuucacgucugu

SEQ ID NO: 557576 - RNA, 22 nt, Human
gcaugggaagcugucuucaacu

SEQ ID NO: 557577 - RNA, 21 nt, Human
gcugcuggcucacucccucca

SEQ ID NO: 557578 - RNA, 18 nt, Human
gcuggcucacucccucca

SEQ ID NO: 557579 - RNA, 23 nt, Human
gcuguuuuugggaagcuacuggu

SEQ ID NO: 557580 - RNA, 18 nt, Human
ggaaaagcuaauccagaa

SEQ ID NO: 557581 - RNA, 18 nt, Human
ggagggggacuuugggag

SEQ ID NO: 557582 - RNA, 18 nt, Human
ggccucugagguucuggc

SEQ ID NO: 557583 - RNA, 20 nt, Human
gggcagcagcaggggggcug

SEQ ID NO: 557584 - RNA, 19 nt, Human
guaagcacaagucuuaaau

SEQ ID NO: 557585 - RNA, 19 nt, Human
gugccaccccucagugaac

SEQ ID NO: 557586 - RNA, 23 nt, Human
uaaaaccuaacagccccacauug

SEQ ID NO: 557587 - RNA, 21 nt, Human
uaaaaggaauagaggagggga

SEQ ID NO: 557588 - RNA, 25 nt, Human
uaaauagauccacuccaggucaaaa

SEQ ID NO: 557589 - RNA, 20 nt, Human
uaacccuucagcccgcccag

SEQ ID NO: 557590 - RNA, 19 nt, Human
uaaguagagaaccugucgc

SEQ ID NO: 557591 - RNA, 22 nt, Human
uacccguaaggacugaaauuca

SEQ ID NO: 557592 - RNA, 22 nt, Human
uagaaagccacucucacaagga

SEQ ID NO: 557593 - RNA, 24 nt, Human
uagaaugaaagaagaagcugagca

SEQ ID NO: 557594 - RNA, 21 nt, Human
uaggaaaagcuaauccagaaa

SEQ ID NO: 557595 - RNA, 25 nt, Human
uaggaugaucuccagggacccugaa

SEQ ID NO: 557596 - RNA, 18 nt, Human
ucaaagguaaaaccuaac

SEQ ID NO: 557597 - RNA, 21 nt, Human
ucacaaauugaucccauuugu

SEQ ID NO: 557598 - RNA, 20 nt, Human
ucauaaaaaagacaaaagca

SEQ ID NO: 557599 - RNA, 24 nt, Human
ucccuaaaaggaauagaggagggg

SEQ ID NO: 557600 - RNA, 21 nt, Human
uccugaguugggggaaagccc

SEQ ID NO: 557601 - RNA, 18 nt, Human
ucgccgcgggggcucgcc

SEQ ID NO: 557602 - RNA, 20 nt, Human
ucuuggaauagcuuucuugu

SEQ ID NO: 557603 - RNA, 18 nt, Human
ugaaagaagaagcugagc

SEQ ID NO: 557604 - RNA, 21 nt, Human
ugagaccccucuacugugggu

SEQ ID NO: 557605 - RNA, 21 nt, Human
ugagcuggacuuaagcugcug

SEQ ID NO: 557606 - RNA, 24 nt, Human
ugccaguucccccuggugaaccau

SEQ ID NO: 557607 - RNA, 26 nt, Human
ugcuccgcuaacccuucagcccgccc

SEQ ID NO: 557608 - RNA, 23 nt, Human
uggcagcgcccgcgagccggccc

SEQ ID NO: 557609 - RNA, 25 nt, Human
uggcugaggagggggacuuugggag

SEQ ID NO: 557610 - RNA, 18 nt, Human
uggucccgugccaccccu

SEQ ID NO: 557611 - RNA, 19 nt, Human
ugguuuugccauuugcuuc

SEQ ID NO: 557612 - RNA, 22 nt, Human
uguaaauaaaguuccauaaacc

SEQ ID NO: 557613 - RNA, 18 nt, Human
uguaaauagauccacucc

SEQ ID NO: 557614 - RNA, 18 nt, Human
uguuuuaggaaugacaga

SEQ ID NO: 557615 - RNA, 20 nt, Human
uuauaaaaggaaauaacuug

SEQ ID NO: 557616 - RNA, 21 nt, Human
uucaaagguaaaaccuaacag

SEQ ID NO: 557617 - RNA, 20 nt, Human
uucaacucuuucacaacuca

SEQ ID NO: 557618 - RNA, 22 nt, Human
uucacugggacucuucccuccu

SEQ ID NO: 557619 - RNA, 18 nt, Human
uucaguaucucagaacuu

SEQ ID NO: 557620 - RNA, 20 nt, Human
uugacagggcaggaaaagcg

SEQ ID NO: 557621 - RNA, 18 nt, Human
uugcugaaggguguuuua

SEQ ID NO: 557622 - RNA, 23 nt, Human
uuuaagcaaaugguuccuugggu

SEQ ID NO: 557623 - RNA, 19 nt, Human
uuucuuguuuguuaucugc

SEQ ID NO: 557624 - RNA, 19 nt, Human
uuuuuaguaucaaauuuca

SEQ ID NO: 557625 - RNA, 20 nt, Human
aaaaaaaguagaaauacaaa

SEQ ID NO: 557626 - RNA, 18 nt, Human
agcagaacacugcucucc

SEQ ID NO: 557627 - RNA, 19 nt, Human
aguaaauagcuaaaaaaaa

SEQ ID NO: 557628 - RNA, 18 nt, Human
caaaacagccucacauuu

SEQ ID NO: 557629 - RNA, 18 nt, Human
cacugcucucccucccgc

SEQ ID NO: 557630 - RNA, 19 nt, Human
cagaacacugcucucccuc

SEQ ID NO: 557631 - RNA, 22 nt, Human
cagcagaacacugcucucccuc

SEQ ID NO: 557632 - RNA, 24 nt, Human
cauaaaguacaguaaauagcuaaa

SEQ ID NO: 557633 - RNA, 21 nt, Human
cccguggaugucccgcggccg

SEQ ID NO: 557634 - RNA, 21 nt, Human
cucccgcgugucacucgcgcc

SEQ ID NO: 557635 - RNA, 21 nt, Human
cucgcgccccguggauguccc

SEQ ID NO: 557636 - RNA, 21 nt, Human
gcagaacacugcucucccucc

SEQ ID NO: 557637 - RNA, 19 nt, Human
uacaacuuggagaaaagug

SEQ ID NO: 557638 - RNA, 24 nt, Human
uacaguaaauagcuaaaaaaaaaa

SEQ ID NO: 557639 - RNA, 22 nt, Human
uagcuaaaaaaaaaaaguagaa

SEQ ID NO: 557640 - RNA, 24 nt, Human
ucacucgcgccccguggauguccc

SEQ ID NO: 557641 - RNA, 18 nt, Human
agaaacugaggccagccc

SEQ ID NO: 557642 - RNA, 23 nt, Human
agaggggguggcagccaccuagg

SEQ ID NO: 557643 - RNA, 23 nt, Human
aggccagcccuggcggagaccua

SEQ ID NO: 557644 - RNA, 21 nt, Human
aggcggggacuaggcagggga

SEQ ID NO: 557645 - RNA, 18 nt, Human
agggcaguggacagggag

SEQ ID NO: 557646 - RNA, 23 nt, Human
agggcccccucccucugggcuuu

SEQ ID NO: 557647 - RNA, 21 nt, Human
agggggcggcaggcggggugg

SEQ ID NO: 557648 - RNA, 26 nt, Human
agggugggggaaaacugggucugaag

SEQ ID NO: 557649 - RNA, 22 nt, Human
cccucugggcuuuccuccuaga

SEQ ID NO: 557650 - RNA, 18 nt, Human
ccuccucuuccuccuccu

SEQ ID NO: 557651 - RNA, 20 nt, Human
ccuccucuuccuccuccucu

SEQ ID NO: 557652 - RNA, 21 nt, Human
cgacccccaauccuugcuccc

SEQ ID NO: 557653 - RNA, 19 nt, Human
cggaggagggggccagacc

SEQ ID NO: 557654 - RNA, 22 nt, Human
cuaacccggaggagggggccag

SEQ ID NO: 557655 - RNA, 22 nt, Human
cuagagggccucagucccuccu

SEQ ID NO: 557656 - RNA, 21 nt, Human
cuccuccucuuccuccucacc

SEQ ID NO: 557657 - RNA, 22 nt, Human
cuguggcggggagggaaccugg

SEQ ID NO: 557658 - RNA, 19 nt, Human
gaaccuggacagggggcgg

SEQ ID NO: 557659 - RNA, 18 nt, Human
gacagggagccuggggga

SEQ ID NO: 557660 - RNA, 21 nt, Human
gacagggggcggcaggcgggg

SEQ ID NO: 557661 - RNA, 21 nt, Human
gaccagggagggcaguggaca

SEQ ID NO: 557662 - RNA, 18 nt, Human
gacccccaauccuugcuc

SEQ ID NO: 557663 - RNA, 20 nt, Human
gacccccaauccuugcuccc

SEQ ID NO: 557664 - RNA, 18 nt, Human
gaggccagcccuggcgga

SEQ ID NO: 557665 - RNA, 21 nt, Human
gcggcaggcgggguggggggc

SEQ ID NO: 557666 - RNA, 22 nt, Human
ggagccugggggaguuggggag

SEQ ID NO: 557667 - RNA, 19 nt, Human
ggaggagggggccagacca

SEQ ID NO: 557668 - RNA, 19 nt, Human
ggagggugggggaaaacug

SEQ ID NO: 557669 - RNA, 19 nt, Human
gggcaggguccauggugug

SEQ ID NO: 557670 - RNA, 23 nt, Human
gggcggcaggcgggguggggggc

SEQ ID NO: 557671 - RNA, 18 nt, Human
ggggagcgcagggcaggg

SEQ ID NO: 557672 - RNA, 20 nt, Human
gggguaaggaggguggggga

SEQ ID NO: 557673 - RNA, 24 nt, Human
ggugggggaaaacugggucugaag

SEQ ID NO: 557674 - RNA, 24 nt, Human
guaaggagggugggggaaaacugg

SEQ ID NO: 557675 - RNA, 28 nt, Human
guccauggugugcagaggggguggcagg

SEQ ID NO: 557676 - RNA, 22 nt, Human
uaaggagggugggggaaaacug

SEQ ID NO: 557677 - RNA, 18 nt, Human
ucagucccuccugcuggc

SEQ ID NO: 557678 - RNA, 27 nt, Human
uccauggugugcagaggggguggcagg

SEQ ID NO: 557679 - RNA, 20 nt, Human
uccuccucuuccuccucacc

SEQ ID NO: 557680 - RNA, 18 nt, Human
uccugcuggcugggcugc

SEQ ID NO: 557681 - RNA, 20 nt, Human
ucuuccuccuccucuucccc

SEQ ID NO: 557682 - RNA, 18 nt, Human
ucuuccuccucuuccucc

SEQ ID NO: 557683 - RNA, 25 nt, Human
ugaggagaaacugaggccagcccug

SEQ ID NO: 557684 - RNA, 21 nt, Human
uggggggcuggcacucaggcg

SEQ ID NO: 557685 - RNA, 22 nt, Human
uuccuccuccucuuccuccuca

SEQ ID NO: 557686 - RNA, 22 nt, Human
uuccuccucuuccuccuccucc

SEQ ID NO: 557687 - RNA, 22 nt, Human
uuucacuguggcggggagggaa

SEQ ID NO: 557688 - RNA, 19 nt, Human
uuuuuuuuuuuugcagggu

SEQ ID NO: 557689 - RNA, 22 nt, Human
uuuuuuuuuuuuuugcagggug

SEQ ID NO: 557690 - RNA, 19 nt, Human
uuuuuuuuuuuuuuuuugc

SEQ ID NO: 557691 - RNA, 21 nt, Human
uuuuuuuuuuuuuuuuugcag

SEQ ID NO: 557692 - RNA, 27 nt, Human
uuuuuuuuuuuuuuuuuuuuugcaggg

SEQ ID NO: 557693 - RNA, 21 nt, Human
aaaaaaaaaagaaaggaaaag

SEQ ID NO: 557694 - RNA, 20 nt, Human
aaaaggcucuuuuaaccucc

SEQ ID NO: 557695 - RNA, 20 nt, Human
aacacggugaaaccccgucu

SEQ ID NO: 557696 - RNA, 21 nt, Human
aacacggugaaaccccgucuc

SEQ ID NO: 557697 - RNA, 22 nt, Human
aacacguugaaaguggagucuc

SEQ ID NO: 557698 - RNA, 24 nt, Human
aacacuuugggaggccgagguggg

SEQ ID NO: 557699 - RNA, 21 nt, Human
aaccccgucucuaccaaaaau

SEQ ID NO: 557700 - RNA, 21 nt, Human
aacuaaguggcuaggcauggu

SEQ ID NO: 557701 - RNA, 20 nt, Human
aaggaaaagcuaagcagaug

SEQ ID NO: 557702 - RNA, 19 nt, Human
aaggcccucugcacagauu

SEQ ID NO: 557703 - RNA, 19 nt, Human
accagguacuaugugaccc

SEQ ID NO: 557704 - RNA, 26 nt, Human
accagguacuaugugaccccccaugg

SEQ ID NO: 557705 - RNA, 24 nt, Human
accccgucucuaccaaaaauacaa

SEQ ID NO: 557706 - RNA, 24 nt, Human
accucacaaaaucagacaccugga

SEQ ID NO: 557707 - RNA, 19 nt, Human
acugcacuccagccuggcg

SEQ ID NO: 557708 - RNA, 23 nt, Human
acugcacuccagccuggcgacaa

SEQ ID NO: 557709 - RNA, 20 nt, Human
acuuccaucucggccaaggg

SEQ ID NO: 557710 - RNA, 24 nt, Human
agacaggagaaucgcuugaauacg

SEQ ID NO: 557711 - RNA, 20 nt, Human
agacagugcugcagugagcc

SEQ ID NO: 557712 - RNA, 20 nt, Human
agacagugcugcagugagcc

SEQ ID NO: 557713 - RNA, 20 nt, Human
agaguuccguccaggaacgu

SEQ ID NO: 557714 - RNA, 20 nt, Human
agccuggcgacaaacggaga

SEQ ID NO: 557715 - RNA, 20 nt, Human
agccuggcgacaaacggaga

SEQ ID NO: 557716 - RNA, 24 nt, Human
aggcauggugauucaugccuguaa

SEQ ID NO: 557717 - RNA, 21 nt, Human
aggccgaggugggcggaucac

SEQ ID NO: 557718 - RNA, 21 nt, Human
aggcggaggcugcagugagcc

SEQ ID NO: 557719 - RNA, 24 nt, Human
aggcggaggcugcagugagccgag

SEQ ID NO: 557720 - RNA, 24 nt, Human
aggcugagacaggagaaucgcuug

SEQ ID NO: 557721 - RNA, 18 nt, Human
agugcugcagugagccga

SEQ ID NO: 557722 - RNA, 23 nt, Human
auaaaguaguuucaaagggaaau

SEQ ID NO: 557723 - RNA, 21 nt, Human
auccuggccaacacggugaaa

SEQ ID NO: 557724 - RNA, 19 nt, Human
augccuguaaucccaacac

SEQ ID NO: 557725 - RNA, 24 nt, Human
auggcaccacugcacuccagccug

SEQ ID NO: 557726 - RNA, 24 nt, Human
caacacggugaaaccccgucucua

SEQ ID NO: 557727 - RNA, 24 nt, Human
caacacuuugggaggccgaggugg

SEQ ID NO: 557728 - RNA, 18 nt, Human
caacuucugaaagacccu

SEQ ID NO: 557729 - RNA, 22 nt, Human
caauacuggacacaucccaugc

SEQ ID NO: 557730 - RNA, 19 nt, Human
cacaccuguaguccuagcu

SEQ ID NO: 557731 - RNA, 20 nt, Human
cacaucccaacaagagccug

SEQ ID NO: 557732 - RNA, 21 nt, Human
caccagaaacuccuucacuuc

SEQ ID NO: 557733 - RNA, 22 nt, Human
caccagguacuaugugacccac

SEQ ID NO: 557734 - RNA, 19 nt, Human
caccccauauaucaaccca

SEQ ID NO: 557735 - RNA, 23 nt, Human
caccccauauaucaacccacccc

SEQ ID NO: 557736 - RNA, 24 nt, Human
caccuguaguccuagcuacucagg

SEQ ID NO: 557737 - RNA, 22 nt, Human
caccuuguugaugcucagcagc

SEQ ID NO: 557738 - RNA, 18 nt, Human
cacugcacuccagccugg

SEQ ID NO: 557739 - RNA, 18 nt, Human
cacugcacuccagccugg

SEQ ID NO: 557740 - RNA, 22 nt, Human
cacugcacuccagccuggcgac

SEQ ID NO: 557741 - RNA, 23 nt, Human
cacugcacuccagccuggcgaca

SEQ ID NO: 557742 - RNA, 24 nt, Human
cacugcacuccagccuggcgacaa

SEQ ID NO: 557743 - RNA, 21 nt, Human
cagaauuccaaauauccauca

SEQ ID NO: 557744 - RNA, 21 nt, Human
cagccuggcgacaaacggaga

SEQ ID NO: 557745 - RNA, 20 nt, Human
caugccuguaaucccaacac

SEQ ID NO: 557746 - RNA, 20 nt, Human
ccaaaaaaaaaaaaaaaaaa

SEQ ID NO: 557747 - RNA, 23 nt, Human
ccaaaaaaaaaaaaaaaaaaaaa

SEQ ID NO: 557748 - RNA, 19 nt, Human
ccacugcacuccagccugg

SEQ ID NO: 557749 - RNA, 19 nt, Human
ccacugcacuccagccugg

SEQ ID NO: 557750 - RNA, 22 nt, Human
ccacugcacuccagccuggcga

SEQ ID NO: 557751 - RNA, 23 nt, Human
ccacugcacuccagccuggcgac

SEQ ID NO: 557752 - RNA, 20 nt, Human
ccagcccccagcccuauuua

SEQ ID NO: 557753 - RNA, 23 nt, Human
cccauauaucaacccaccccgau

SEQ ID NO: 557754 - RNA, 20 nt, Human
ccuccaaaaaaaaaaaaaaa

SEQ ID NO: 557755 - RNA, 23 nt, Human
ccuggccaacacggugaaacccc

SEQ ID NO: 557756 - RNA, 24 nt, Human
ccuggccaacacggugaaaccccg

SEQ ID NO: 557757 - RNA, 20 nt, Human
ccuguaaucccaacacuuug

SEQ ID NO: 557758 - RNA, 22 nt, Human
ccuguaaucccaacacuuuggg

SEQ ID NO: 557759 - RNA, 25 nt, Human
cgaggugggcggaucacgaggucga

SEQ ID NO: 557760 - RNA, 18 nt, Human
cuaugggauagaaaggug

SEQ ID NO: 557761 - RNA, 22 nt, Human
cucaccccauauaucaacccac

SEQ ID NO: 557762 - RNA, 18 nt, Human
cucccuggcaccaucugg

SEQ ID NO: 557763 - RNA, 19 nt, Human
cucuauuuguggucugaga

SEQ ID NO: 557764 - RNA, 22 nt, Human
cugcagugagccgagacagugc

SEQ ID NO: 557765 - RNA, 22 nt, Human
cugcagugagccgagauggcac

SEQ ID NO: 557766 - RNA, 18 nt, Human
cuggccaacacggugaaa

SEQ ID NO: 557767 - RNA, 21 nt, Human
cuucaggguaccaccgucucc

SEQ ID NO: 557768 - RNA, 23 nt, Human
cuugcagcagcuggccucugccu

SEQ ID NO: 557769 - RNA, 23 nt, Human
gagaaucgcuugaauacgggagg

SEQ ID NO: 557770 - RNA, 19 nt, Human
gagacagugcugcagugag

SEQ ID NO: 557771 - RNA, 22 nt, Human
gagaugccuuuuccuggcccag

SEQ ID NO: 557772 - RNA, 23 nt, Human
gagauggcaccacugcacuccag

SEQ ID NO: 557773 - RNA, 19 nt, Human
gaugcaacuucugaaagac

SEQ ID NO: 557774 - RNA, 20 nt, Human
gcaugaugugcgugugcgug

SEQ ID NO: 557775 - RNA, 24 nt, Human
gccaacacggugaaaccccgucuc

SEQ ID NO: 557776 - RNA, 22 nt, Human
gcuaggcauggugauucaugcc

SEQ ID NO: 557777 - RNA, 23 nt, Human
gcuuggugucacguacucccugg

SEQ ID NO: 557778 - RNA, 18 nt, Human
ggaggcugcagugagccg

SEQ ID NO: 557779 - RNA, 22 nt, Human
ggaggcugcagugagccgagac

SEQ ID NO: 557780 - RNA, 22 nt, Human
ggcgugguggugcacaccugua

SEQ ID NO: 557781 - RNA, 22 nt, Human
ggcuaggcauggugauucaugc

SEQ ID NO: 557782 - RNA, 24 nt, Human
gggaaugacaaaaaacuaaguggc

SEQ ID NO: 557783 - RNA, 20 nt, Human
gggaggccgaggugggcgga

SEQ ID NO: 557784 - RNA, 25 nt, Human
gggcaagcaagcccuuugacucucc

SEQ ID NO: 557785 - RNA, 22 nt, Human
gggcagcagaaaaaugucaccu

SEQ ID NO: 557786 - RNA, 18 nt, Human
ggggcggggugugaugag

SEQ ID NO: 557787 - RNA, 20 nt, Human
ggggucaucaucagaauuug

SEQ ID NO: 557788 - RNA, 19 nt, Human
ggugauucaugccuguaau

SEQ ID NO: 557789 - RNA, 24 nt, Human
gguggugcacaccuguaguccuag

SEQ ID NO: 557790 - RNA, 19 nt, Human
gugcacagcauuuucauga

SEQ ID NO: 557791 - RNA, 22 nt, Human
uaagcagaugacuuauguggca

SEQ ID NO: 557792 - RNA, 26 nt, Human
uaagcagaugacuuauguuguaauga

SEQ ID NO: 557793 - RNA, 24 nt, Human
uacgcacaucccaacaagagccug

SEQ ID NO: 557794 - RNA, 18 nt, Human
uagcggggcgugguggug

SEQ ID NO: 557795 - RNA, 18 nt, Human
uaggugugaaucugaacc

SEQ ID NO: 557796 - RNA, 18 nt, Human
uaucacuggcgaucagcc

SEQ ID NO: 557797 - RNA, 22 nt, Human
ucacgaggucgagauugagacc

SEQ ID NO: 557798 - RNA, 21 nt, Human
ucacugcacguucugccacac

SEQ ID NO: 557799 - RNA, 20 nt, Human
ucaggauaagugccaccacc

SEQ ID NO: 557800 - RNA, 23 nt, Human
ucaugccuguaaucccaacacuu

SEQ ID NO: 557801 - RNA, 23 nt, Human
uccaaaaaaaaaaaaaaaaaaaa

SEQ ID NO: 557802 - RNA, 20 nt, Human
ucccugugaucagcuguccu

SEQ ID NO: 557803 - RNA, 24 nt, Human
ucgcuugaauacgggaggcggagg

SEQ ID NO: 557804 - RNA, 21 nt, Human
ucuaaaauguuuuaaccagca

SEQ ID NO: 557805 - RNA, 20 nt, Human
ucugaaagacccuugcaccc

SEQ ID NO: 557806 - RNA, 24 nt, Human
ucugccuccaaaaaaaaaaaaaaa

SEQ ID NO: 557807 - RNA, 20 nt, Human
ugagacaggagaaucgcuug

SEQ ID NO: 557808 - RNA, 25 nt, Human
ugagacaggagaaucgcuugaauac

SEQ ID NO: 557809 - RNA, 24 nt, Human
ugagaccauccuggccaacacggu

SEQ ID NO: 557810 - RNA, 19 nt, Human
ugagaugccuuuuccuggc

SEQ ID NO: 557811 - RNA, 21 nt, Human
ugagccgagacagugcugcag

SEQ ID NO: 557812 - RNA, 21 nt, Human
ugauucaugccuguaauccca

SEQ ID NO: 557813 - RNA, 23 nt, Human
ugccuccaaaaaaaaaaaaaaaa

SEQ ID NO: 557814 - RNA, 23 nt, Human
ugccuguaaucccaacacuuugg

SEQ ID NO: 557815 - RNA, 20 nt, Human
uggcaccacugcacuccagc

SEQ ID NO: 557816 - RNA, 21 nt, Human
uggcaccaucugguucgugcc

SEQ ID NO: 557817 - RNA, 19 nt, Human
uggcgaucagccuaaacuu

SEQ ID NO: 557818 - RNA, 19 nt, Human
ugggaagagccauggcugu

SEQ ID NO: 557819 - RNA, 20 nt, Human
ugggaagagccauggcuguc

SEQ ID NO: 557820 - RNA, 19 nt, Human
ugggaggccgaggugggcg

SEQ ID NO: 557821 - RNA, 24 nt, Human
ugggaggccgaggugggcggauca

SEQ ID NO: 557822 - RNA, 19 nt, Human
uggggcggggugugaugag

SEQ ID NO: 557823 - RNA, 24 nt, Human
uggugauucaugccuguaauccca

SEQ ID NO: 557824 - RNA, 18 nt, Human
uggugcacaccuguaguc

SEQ ID NO: 557825 - RNA, 22 nt, Human
ugguggugcacaccuguagucc

SEQ ID NO: 557826 - RNA, 23 nt, Human
uguagugguaccucacaaaauca

SEQ ID NO: 557827 - RNA, 22 nt, Human
uguccaaaaggcucuuuuaacc

SEQ ID NO: 557828 - RNA, 19 nt, Human
ugugaaucugaacccgguc

SEQ ID NO: 557829 - RNA, 22 nt, Human
uguguacaccagguacuaugug

SEQ ID NO: 557830 - RNA, 20 nt, Human
uuagcggggcgugguggugc

SEQ ID NO: 557831 - RNA, 22 nt, Human
uuagcggggcgugguggugcac

SEQ ID NO: 557832 - RNA, 19 nt, Human
uucaggauaagugccacca

SEQ ID NO: 557833 - RNA, 24 nt, Human
uuccaaauauccaucagaaguaca

SEQ ID NO: 557834 - RNA, 21 nt, Human
uucuaugggauagaaaggugg

SEQ ID NO: 557835 - RNA, 22 nt, Human
uugcacccucacugcacguucu

SEQ ID NO: 557836 - RNA, 25 nt, Human
uugggaggccgaggugggcggauca

SEQ ID NO: 557837 - RNA, 21 nt, Human
uuucuuaugguuccuccaaga

SEQ ID NO: 557838 - RNA, 24 nt, Human
uuuucuuaugguuccuccaagaug

SEQ ID NO: 557839 - RNA, 23 nt, Human
agaguaaaucccaagaggcccug

SEQ ID NO: 557840 - RNA, 20 nt, Human
cacccccaaguuuguccgga

SEQ ID NO: 557841 - RNA, 25 nt, Human
cacccccaaguuuguccggaggccc

SEQ ID NO: 557842 - RNA, 26 nt, Human
cagaguaaaucccaagaggcccugcu

SEQ ID NO: 557843 - RNA, 21 nt, Human
cagcuuccagggcuggcgucc

SEQ ID NO: 557844 - RNA, 19 nt, Human
ccaggcucagcccggaggg

SEQ ID NO: 557845 - RNA, 22 nt, Human
ccaggcugcugggaccugcugg

SEQ ID NO: 557846 - RNA, 23 nt, Human
ccccucacccccaaguuuguccg

SEQ ID NO: 557847 - RNA, 21 nt, Human
cccggagggugagggaccugc

SEQ ID NO: 557848 - RNA, 22 nt, Human
ccugcugggucaggcucagcuu

SEQ ID NO: 557849 - RNA, 19 nt, Human
ccuggcugagcaccgcuuc

SEQ ID NO: 557850 - RNA, 25 nt, Human
cugggucaggcucagcuuccagggc

SEQ ID NO: 557851 - RNA, 19 nt, Human
gaguaaaucccaagaggcc

SEQ ID NO: 557852 - RNA, 22 nt, Human
gcccugagagccacagaguaaa

SEQ ID NO: 557853 - RNA, 20 nt, Human
gcccugcuuccccucacccc

SEQ ID NO: 557854 - RNA, 20 nt, Human
uccuuggcucaccagggcug

SEQ ID NO: 557855 - RNA, 21 nt, Human
uccuuggcucaccagggcugg

SEQ ID NO: 557856 - RNA, 19 nt, Human
ucugugugguuguccuugg

SEQ ID NO: 557857 - RNA, 21 nt, Human
ugagagccacagaguaaaucc

SEQ ID NO: 557858 - RNA, 18 nt, Human
ugggaccugcugggucag

SEQ ID NO: 557859 - RNA, 23 nt, Human
ugggucaggcucagcuuccaggg

SEQ ID NO: 557860 - RNA, 18 nt, Human
uguccggaggccccaggg

SEQ ID NO: 557861 - RNA, 19 nt, Human
uuggcccugagagccacag

SEQ ID NO: 557862 - RNA, 24 nt, Human
uuuauuggcccugagagccacaga

SEQ ID NO: 557863 - RNA, 20 nt, Human
aaacuccaggucgccuaggc

SEQ ID NO: 557864 - RNA, 25 nt, Human
aaagaagcaccagcuggaacucaaa

SEQ ID NO: 557865 - RNA, 18 nt, Human
aaauaguccugugguucc

SEQ ID NO: 557866 - RNA, 25 nt, Human
aacaaagaauccaaagaauauugca

SEQ ID NO: 557867 - RNA, 22 nt, Human
aagaagcaccagcuggaacuca

SEQ ID NO: 557868 - RNA, 19 nt, Human
agguaagguacauuaaaug

SEQ ID NO: 557869 - RNA, 25 nt, Human
auccaaauaguccugugguuccaau

SEQ ID NO: 557870 - RNA, 19 nt, Human
augaauacaauuuuguugg

SEQ ID NO: 557871 - RNA, 20 nt, Human
auguaaccuggaagaggguc

SEQ ID NO: 557872 - RNA, 21 nt, Human
cacagcgucacaaacuccagg

SEQ ID NO: 557873 - RNA, 22 nt, Human
cagaaaaugauggcacccagaa

SEQ ID NO: 557874 - RNA, 22 nt, Human
cagaaaaugauggcacccagau

SEQ ID NO: 557875 - RNA, 21 nt, Human
cagaaccagaaaaugauggcu

SEQ ID NO: 557876 - RNA, 21 nt, Human
caucacagcgucacaaacucc

SEQ ID NO: 557877 - RNA, 22 nt, Human
cuccaggucgccuaggcgcugc

SEQ ID NO: 557878 - RNA, 20 nt, Human
cugcgcaggaagcgcuugcc

SEQ ID NO: 557879 - RNA, 23 nt, Human
gaagcaccagcuggaacucaaaa

SEQ ID NO: 557880 - RNA, 23 nt, Human
gagggucaucaacagaaccagaa

SEQ ID NO: 557881 - RNA, 18 nt, Human
gcgcaggaagcgcuugcc

SEQ ID NO: 557882 - RNA, 19 nt, Human
uaaaacacuaaagcacuca

SEQ ID NO: 557883 - RNA, 24 nt, Human
uaaaucaacaaagaauccaaagaa

SEQ ID NO: 557884 - RNA, 26 nt, Human
uaaaugaccuucccauuauaauuucu

SEQ ID NO: 557885 - RNA, 26 nt, Human
uaaccuggaagagggucaucaacagg

SEQ ID NO: 557886 - RNA, 22 nt, Human
uaauagauggcagcacaugcca

SEQ ID NO: 557887 - RNA, 21 nt, Human
uccaaagaauauugcaugagg

SEQ ID NO: 557888 - RNA, 20 nt, Human
uccugugguuccaauauccu

SEQ ID NO: 557889 - RNA, 21 nt, Human
ugaggaugcaagauguaagcu

SEQ ID NO: 557890 - RNA, 22 nt, Human
ugugaaaaaagaaaacauccuu

SEQ ID NO: 557891 - RNA, 22 nt, Human
ugugugaaaaaagaaaacaucc

SEQ ID NO: 557892 - RNA, 23 nt, Human
uuaaaacacuaaagcacucacug

SEQ ID NO: 557893 - RNA, 22 nt, Human
uuuaaacaaaucuagaaauaag

SEQ ID NO: 557894 - RNA, 18 nt, Human
uuuacagaaaauucacag

SEQ ID NO: 557895 - RNA, 27 nt, Human
uuuucagaaauaauuuuucgggucacc

SEQ ID NO: 557896 - RNA, 23 nt, Human
aaagugcugagauucaggcauga

SEQ ID NO: 557897 - RNA, 25 nt, Human
aagugcugagauucaggcaugagcc

SEQ ID NO: 557898 - RNA, 18 nt, Human
acaggguuucaucauguu

SEQ ID NO: 557899 - RNA, 21 nt, Human
acaggguuucaucauguuggc

SEQ ID NO: 557900 - RNA, 24 nt, Human
acaggguuucaucauguuggccag

SEQ ID NO: 557901 - RNA, 19 nt, Human
accuaccauuauuauuacc

SEQ ID NO: 557902 - RNA, 26 nt, Human
accucagaugaucugccugccuuggc

SEQ ID NO: 557903 - RNA, 26 nt, Human
acucugucacccaggcuggagugccg

SEQ ID NO: 557904 - RNA, 27 nt, Human
acucugucacccaggcuggagugccgu

SEQ ID NO: 557905 - RNA, 24 nt, Human
agacaccaaaaaaguugcuuucag

SEQ ID NO: 557906 - RNA, 24 nt, Human
agaugaucugccugccuuggccuc

SEQ ID NO: 557907 - RNA, 21 nt, Human
agauucaggcaugagccaccg

SEQ ID NO: 557908 - RNA, 18 nt, Human
aguaacugggauuacagg

SEQ ID NO: 557909 - RNA, 22 nt, Human
aguagagacaggguuucaucau

SEQ ID NO: 557910 - RNA, 24 nt, Human
agugauucuccugccucagccucc

SEQ ID NO: 557911 - RNA, 21 nt, Human
agugccguggugcaaucucag

SEQ ID NO: 557912 - RNA, 24 nt, Human
aucauguuggccaggcuggucucg

SEQ ID NO: 557913 - RNA, 25 nt, Human
aucauguuggccaggcuggucucga

SEQ ID NO: 557914 - RNA, 24 nt, Human
auuuuuguauuuuuaguagagaca

SEQ ID NO: 557915 - RNA, 23 nt, Human
caaagugcugagauucaggcaug

SEQ ID NO: 557916 - RNA, 20 nt, Human
caagugauucuccugccuca

SEQ ID NO: 557917 - RNA, 22 nt, Human
caagugauucuccugccucagc

SEQ ID NO: 557918 - RNA, 22 nt, Human
caccaccaugcccagcuaauuu

SEQ ID NO: 557919 - RNA, 24 nt, Human
caccaugcccagcuaauuuuugua

SEQ ID NO: 557920 - RNA, 22 nt, Human
cacucugucacccaggcuggag

SEQ ID NO: 557921 - RNA, 22 nt, Human
cacugaacucucuuuucuguuu

SEQ ID NO: 557922 - RNA, 20 nt, Human
cagccuccugaguaacuggg

SEQ ID NO: 557923 - RNA, 24 nt, Human
caggguuucaucauguuggccagg

SEQ ID NO: 557924 - RNA, 18 nt, Human
cauguuggccaggcuggu

SEQ ID NO: 557925 - RNA, 21 nt, Human
cauguuggccaggcuggucuc

SEQ ID NO: 557926 - RNA, 24 nt, Human
cauguuggccaggcuggucucgaa

SEQ ID NO: 557927 - RNA, 21 nt, Human
ccaaaaaaguugcuuucagau

SEQ ID NO: 557928 - RNA, 23 nt, Human
ccaaagugcugagauucaggcau

SEQ ID NO: 557929 - RNA, 24 nt, Human
ccgccuucuggauucaagugauuc

SEQ ID NO: 557930 - RNA, 19 nt, Human
ccugaguaacugggauuac

SEQ ID NO: 557931 - RNA, 22 nt, Human
ccugaguaacugggauuacagg

SEQ ID NO: 557932 - RNA, 22 nt, Human
ccugaguaacugggauuacagg

SEQ ID NO: 557933 - RNA, 24 nt, Human
ccugccucagccuccugaguaacu

SEQ ID NO: 557934 - RNA, 22 nt, Human
ccugccuuggccucccaaagug

SEQ ID NO: 557935 - RNA, 21 nt, Human
ccuucuggauucaagugauuc

SEQ ID NO: 557936 - RNA, 24 nt, Human
ccuucuggauucaagugauucucc

SEQ ID NO: 557937 - RNA, 24 nt, Human
cucacucugucacccaggcuggag

SEQ ID NO: 557938 - RNA, 19 nt, Human
cucacugcaaccuccgccu

SEQ ID NO: 557939 - RNA, 26 nt, Human
cucaugaccucagaugaucugccugc

SEQ ID NO: 557940 - RNA, 21 nt, Human
cugaguaacugggauuacagg

SEQ ID NO: 557941 - RNA, 23 nt, Human
cugaguaacugggauuacaggug

SEQ ID NO: 557942 - RNA, 24 nt, Human
cugaguaacugggauuacaggugu

SEQ ID NO: 557943 - RNA, 24 nt, Human
cugcaaccuccgccuucuggauuc

SEQ ID NO: 557944 - RNA, 23 nt, Human
cugccuuggccucccaaagugcu

SEQ ID NO: 557945 - RNA, 24 nt, Human
gaaaucagagccaucuuccacuga

SEQ ID NO: 557946 - RNA, 23 nt, Human
gaccucagaugaucugccugccu

SEQ ID NO: 557947 - RNA, 24 nt, Human
gaccucagaugaucugccugccuu

SEQ ID NO: 557948 - RNA, 19 nt, Human
gaguaacugggauuacagg

SEQ ID NO: 557949 - RNA, 24 nt, Human
gaguaacugggauuacaggugugc

SEQ ID NO: 557950 - RNA, 24 nt, Human
gauuacaggugugcaccaccaugc

SEQ ID NO: 557951 - RNA, 22 nt, Human
gcccaaaacacuguauuuugau

SEQ ID NO: 557952 - RNA, 22 nt, Human
gcccagcuaauuuuuguauuuu

SEQ ID NO: 557953 - RNA, 22 nt, Human
gccuuggccucccaaagugcug

SEQ ID NO: 557954 - RNA, 24 nt, Human
ggauuacaggugugcaccaccaug

SEQ ID NO: 557955 - RNA, 20 nt, Human
ggauucaagugauucuccug

SEQ ID NO: 557956 - RNA, 22 nt, Human
ggguuucaucauguuggccagg

SEQ ID NO: 557957 - RNA, 24 nt, Human
gugauucuccugccucagccuccu

SEQ ID NO: 557958 - RNA, 21 nt, Human
gugugcaccaccaugcccagc

SEQ ID NO: 557959 - RNA, 24 nt, Human
uaauuuuuguauuuuuaguagaga

SEQ ID NO: 557960 - RNA, 24 nt, Human
uacccugaaaucagagccaucuuc

SEQ ID NO: 557961 - RNA, 27 nt, Human
uacugucuuuuuuuuuucauccaacaa

SEQ ID NO: 557962 - RNA, 22 nt, Human
uagagacaggguuucaucaugu

SEQ ID NO: 557963 - RNA, 24 nt, Human
uaguagagacaggguuucaucaug

SEQ ID NO: 557964 - RNA, 18 nt, Human
uauuacccugaaaucaga

SEQ ID NO: 557965 - RNA, 19 nt, Human
ucaagugauucuccugccu

SEQ ID NO: 557966 - RNA, 18 nt, Human
ucacccaggcuggagugc

SEQ ID NO: 557967 - RNA, 24 nt, Human
ucacucugucacccaggcuggagu

SEQ ID NO: 557968 - RNA, 18 nt, Human
ucacugcaaccuccgccu

SEQ ID NO: 557969 - RNA, 19 nt, Human
ucacugcaaccuccgccuu

SEQ ID NO: 557970 - RNA, 23 nt, Human
ucacugcaaccuccgccuucugg

SEQ ID NO: 557971 - RNA, 24 nt, Human
ucacugcaaccuccgccuucugga

SEQ ID NO: 557972 - RNA, 27 nt, Human
ucacugcaaccuccgccuucuggauuc

SEQ ID NO: 557973 - RNA, 25 nt, Human
ucaucugagacaccaaaaaaguugc

SEQ ID NO: 557974 - RNA, 23 nt, Human
ucccaaagugcugagauucaggc

SEQ ID NO: 557975 - RNA, 24 nt, Human
uccugaguaacugggauuacaggu

SEQ ID NO: 557976 - RNA, 23 nt, Human
ucucacucugucacccaggcugg

SEQ ID NO: 557977 - RNA, 24 nt, Human
ucucacucugucacccaggcugga

SEQ ID NO: 557978 - RNA, 24 nt, Human
ucuccugccucagccuccugagua

SEQ ID NO: 557979 - RNA, 23 nt, Human
ucuggauucaagugauucuccug

SEQ ID NO: 557980 - RNA, 18 nt, Human
ucugucacccaggcugga

SEQ ID NO: 557981 - RNA, 22 nt, Human
ugaaaucagagccaucuuccac

SEQ ID NO: 557982 - RNA, 18 nt, Human
ugaccucagaugaucugc

SEQ ID NO: 557983 - RNA, 19 nt, Human
ugaccucagaugaucugcc

SEQ ID NO: 557984 - RNA, 27 nt, Human
ugaccucagaugaucugccugccuugg

SEQ ID NO: 557985 - RNA, 25 nt, Human
ugagacaccaaaaaaguuggagacc

SEQ ID NO: 557986 - RNA, 18 nt, Human
ugagacagagucucacuc

SEQ ID NO: 557987 - RNA, 22 nt, Human
ugagacagagucucacucuguc

SEQ ID NO: 557988 - RNA, 22 nt, Human
ugagauucaggcaugagccacc

SEQ ID NO: 557989 - RNA, 23 nt, Human
ugagauucaggcaugagccaccg

SEQ ID NO: 557990 - RNA, 20 nt, Human
ugauucuccugccucagccu

SEQ ID NO: 557991 - RNA, 22 nt, Human
ugccguggugcaaucucagcuc

SEQ ID NO: 557992 - RNA, 24 nt, Human
ugccucagccuccugaguaacugg

SEQ ID NO: 557993 - RNA, 18 nt, Human
ugccugccuuggccuccc

SEQ ID NO: 557994 - RNA, 19 nt, Human
uggagugccguggugcaau

SEQ ID NO: 557995 - RNA, 23 nt, Human
uggauucaagugauucuccugcc

SEQ ID NO: 557996 - RNA, 24 nt, Human
uggauucaagugauucuccugccu

SEQ ID NO: 557997 - RNA, 24 nt, Human
uggccaggcuggucucgaacucau

SEQ ID NO: 557998 - RNA, 21 nt, Human
ugggauuacaggugugcacca

SEQ ID NO: 557999 - RNA, 22 nt, Human
ugggauuacaggugugcaccac

SEQ ID NO: 558000 - RNA, 24 nt, Human
ugggauuacaggugugcaccacca

SEQ ID NO: 558001 - RNA, 25 nt, Human
ugggauuacaggugugcaccaccau

SEQ ID NO: 558002 - RNA, 25 nt, Human
ugggauuacaggugugcaccaccau

SEQ ID NO: 558003 - RNA, 24 nt, Human
uggugcaaucucagcucacugcaa

SEQ ID NO: 558004 - RNA, 24 nt, Human
uuacccugaaaucagagccaucuu

SEQ ID NO: 558005 - RNA, 24 nt, Human
uuaguagagacaggguuucaucau

SEQ ID NO: 558006 - RNA, 22 nt, Human
uucaaaccaagcugcaguuacu

SEQ ID NO: 558007 - RNA, 21 nt, Human
uucaagugauucuccugccuc

SEQ ID NO: 558008 - RNA, 23 nt, Human
uucaagugauucuccugccucag

SEQ ID NO: 558009 - RNA, 24 nt, Human
uucaagugauucuccugccucagc

SEQ ID NO: 558010 - RNA, 24 nt, Human
uucuggauucaagugauucuccug

SEQ ID NO: 558011 - RNA, 23 nt, Human
uugauagaaugcuguaaagaagg

SEQ ID NO: 558012 - RNA, 18 nt, Human
uuggccucccaaagugcu

SEQ ID NO: 558013 - RNA, 19 nt, Human
uuucaaaccaagcugcagu

SEQ ID NO: 558014 - RNA, 23 nt, Human
uuucaucauguuggccaggcugu

SEQ ID NO: 558015 - RNA, 24 nt, Human
uuuuuaguagagacaggguuucau

SEQ ID NO: 558016 - RNA, 20 nt, Human
uuuuuguauuuuuaguagag

SEQ ID NO: 558017 - RNA, 25 nt, Human
aaaagguuauggaaagaaagcagag

SEQ ID NO: 558018 - RNA, 22 nt, Human
aaagggacugcaguuaguaggu

SEQ ID NO: 558019 - RNA, 23 nt, Human
aauagcaagaaccagggccuggg

SEQ ID NO: 558020 - RNA, 23 nt, Human
acccucccgggucauuuccccca

SEQ ID NO: 558021 - RNA, 19 nt, Human
agagagcccacgaacuugg

SEQ ID NO: 558022 - RNA, 25 nt, Human
agcaugaaagcagucgaugaaggga

SEQ ID NO: 558023 - RNA, 18 nt, Human
aguuagaacuguggccca

SEQ ID NO: 558024 - RNA, 21 nt, Human
caaaagggacugcaguuagua

SEQ ID NO: 558025 - RNA, 25 nt, Human
caagcuagauaaacguuggggacca

SEQ ID NO: 558026 - RNA, 23 nt, Human
cacccacccccaugggccagagc

SEQ ID NO: 558027 - RNA, 23 nt, Human
caccccagccugggaaacaaccu

SEQ ID NO: 558028 - RNA, 22 nt, Human
caccucugcuccguccugagga

SEQ ID NO: 558029 - RNA, 23 nt, Human
cagaaagcagcuccuccggcccc

SEQ ID NO: 558030 - RNA, 24 nt, Human
cagaaagcagcuccuccggccccc

SEQ ID NO: 558031 - RNA, 26 nt, Human
cagaaagcagcuccuccggcccccuc

SEQ ID NO: 558032 - RNA, 23 nt, Human
cagaggcgcagucagccgggccc

SEQ ID NO: 558033 - RNA, 19 nt, Human
cagcaugaaagcagucgau

SEQ ID NO: 558034 - RNA, 19 nt, Human
cagccgggcccgccggcca

SEQ ID NO: 558035 - RNA, 21 nt, Human
cagcuucucucccuacccucc

SEQ ID NO: 558036 - RNA, 23 nt, Human
ccaggaaauagcaagaaccaggg

SEQ ID NO: 558037 - RNA, 22 nt, Human
cccacgaacuuggauucagaaa

SEQ ID NO: 558038 - RNA, 19 nt, Human
cccaugaucaucccuacuu

SEQ ID NO: 558039 - RNA, 21 nt, Human
cccaugggccagagcucugga

SEQ ID NO: 558040 - RNA, 18 nt, Human
ccccucucuccgccccuc

SEQ ID NO: 558041 - RNA, 19 nt, Human
cccuccuccagcuuuuguc

SEQ ID NO: 558042 - RNA, 20 nt, Human
cccugugcuagccuuugucc

SEQ ID NO: 558043 - RNA, 22 nt, Human
ccgcaugggacccucccggguc

SEQ ID NO: 558044 - RNA, 24 nt, Human
ccucccgggucauuucccccagcc

SEQ ID NO: 558045 - RNA, 21 nt, Human
ccuuggagucaaauaggccuc

SEQ ID NO: 558046 - RNA, 19 nt, Human
cggcccccucucuccgccc

SEQ ID NO: 558047 - RNA, 20 nt, Human
cggcccccucucuccgcccc

SEQ ID NO: 558048 - RNA, 21 nt, Human
cguucgggcacccuagugucc

SEQ ID NO: 558049 - RNA, 23 nt, Human
cuauagccgcucacccaccccca

SEQ ID NO: 558050 - RNA, 23 nt, Human
cucagcuucucucccuacccucc

SEQ ID NO: 558051 - RNA, 18 nt, Human
cuccuccagcuuuugucu

SEQ ID NO: 558052 - RNA, 19 nt, Human
cuccuccagcuuuugucuc

SEQ ID NO: 558053 - RNA, 24 nt, Human
cuccuccggcccccucucuccgcc

SEQ ID NO: 558054 - RNA, 18 nt, Human
cucucccuacccuccucc

SEQ ID NO: 558055 - RNA, 19 nt, Human
cucugcacugaacuaaguc

SEQ ID NO: 558056 - RNA, 23 nt, Human
cugccaauuuuauguagccgcau

SEQ ID NO: 558057 - RNA, 22 nt, Human
cuggaagaaguggagaauccug

SEQ ID NO: 558058 - RNA, 18 nt, Human
cuggugccugcaccucug

SEQ ID NO: 558059 - RNA, 22 nt, Human
cuggugccugcaccucuguguc

SEQ ID NO: 558060 - RNA, 19 nt, Human
cuuggauucagaaagcagc

SEQ ID NO: 558061 - RNA, 20 nt, Human
cuuuucaagagcagggauga

SEQ ID NO: 558062 - RNA, 23 nt, Human
cuuuucaagagcagggaugaaca

SEQ ID NO: 558063 - RNA, 19 nt, Human
gaaccagggccugggagga

SEQ ID NO: 558064 - RNA, 19 nt, Human
gaagaugaguuuggggaaa

SEQ ID NO: 558065 - RNA, 22 nt, Human
gaagaugaguuuggggaaaggg

SEQ ID NO: 558066 - RNA, 20 nt, Human
gaaguggagaauccuggugg

SEQ ID NO: 558067 - RNA, 21 nt, Human
gaauccuggugccugcaccuc

SEQ ID NO: 558068 - RNA, 23 nt, Human
gacccugcuccccuuuccagguc

SEQ ID NO: 558069 - RNA, 21 nt, Human
gaggcgcagucagccgggccc

SEQ ID NO: 558070 - RNA, 19 nt, Human
gagucaaauaggccuccca

SEQ ID NO: 558071 - RNA, 20 nt, Human
gcccccaccccagccuggga

SEQ ID NO: 558072 - RNA, 18 nt, Human
gcccccucucuccgcccc

SEQ ID NO: 558073 - RNA, 19 nt, Human
gcccugugcuagccuuugu

SEQ ID NO: 558074 - RNA, 21 nt, Human
gcucaggcccccaccccagcc

SEQ ID NO: 558075 - RNA, 18 nt, Human
ggagguccuacuggccag

SEQ ID NO: 558076 - RNA, 19 nt, Human
ggagguccuacuggccagg

SEQ ID NO: 558077 - RNA, 18 nt, Human
gggaugaacacuauagcc

SEQ ID NO: 558078 - RNA, 20 nt, Human
gggucauuucccccagcccc

SEQ ID NO: 558079 - RNA, 23 nt, Human
ggucuuuucaagagcagggauga

SEQ ID NO: 558080 - RNA, 22 nt, Human
gugccuagcccugugcuagccu

SEQ ID NO: 558081 - RNA, 19 nt, Human
uagccgcucacccaccccc

SEQ ID NO: 558082 - RNA, 22 nt, Human
uaguucuaaggcugccaauuuu

SEQ ID NO: 558083 - RNA, 22 nt, Human
ucagcuucucucccuacccucc

SEQ ID NO: 558084 - RNA, 18 nt, Human
ucaugcuccgcuguucuc

SEQ ID NO: 558085 - RNA, 18 nt, Human
ucccuacccuccuccagc

SEQ ID NO: 558086 - RNA, 21 nt, Human
ucucucucuuguacaaaagac

SEQ ID NO: 558087 - RNA, 20 nt, Human
ucuggaagaugaguuugggg

SEQ ID NO: 558088 - RNA, 18 nt, Human
ugaggacuucugagagag

SEQ ID NO: 558089 - RNA, 20 nt, Human
ugccuagcccugugcuagcc

SEQ ID NO: 558090 - RNA, 21 nt, Human
ugcuagccuuuguccaauaca

SEQ ID NO: 558091 - RNA, 21 nt, Human
ugcucaggcccccaccccagc

SEQ ID NO: 558092 - RNA, 18 nt, Human
uggaaagaaagcagaggc

SEQ ID NO: 558093 - RNA, 21 nt, Human
uggaagaugaguuuggggaaa

SEQ ID NO: 558094 - RNA, 22 nt, Human
uggaagaugaguuuggggaaag

SEQ ID NO: 558095 - RNA, 19 nt, Human
ugggaggaagggcaguuag

SEQ ID NO: 558096 - RNA, 18 nt, Human
uuggagguccuacuggcc

SEQ ID NO: 558097 - RNA, 19 nt, Human
uuuuuuuuuuuuuuucugu

SEQ ID NO: 558098 - RNA, 27 nt, Human
uuuuuuuuuuuuuuuuuuuuucugggg

SEQ ID NO: 558099 - RNA, 22 nt, Human
aaguaaauuuuuuuuuuuuucc

SEQ ID NO: 558100 - RNA, 20 nt, Human
aggcuuuaaugaauuugaau

SEQ ID NO: 558101 - RNA, 19 nt, Human
ccccaggaauaaacgaacc

SEQ ID NO: 558102 - RNA, 20 nt, Human
ccuuuucuguccaccuacca

SEQ ID NO: 558103 - RNA, 22 nt, Human
cuugcaaguaaauuuuuuuuuu

SEQ ID NO: 558104 - RNA, 28 nt, Human
cuuuagucuuuuugcuuuuuuuuuuuuu

SEQ ID NO: 558105 - RNA, 27 nt, Human
gcaaguaaauuuuuuuuuuuuuccuuu

SEQ ID NO: 558106 - RNA, 23 nt, Human
guaaauacaucuccauuuuacgu

SEQ ID NO: 558107 - RNA, 28 nt, Human
ugcaaguaaauuuuuuuuuuuuuccuuu

SEQ ID NO: 558108 - RNA, 29 nt, Human
aaaaauaguaaugagaagaggaggccggu

SEQ ID NO: 558109 - RNA, 24 nt, Human
aaaagcucccaacagugaccagaa

SEQ ID NO: 558110 - RNA, 22 nt, Human
aaagaugucucaucuaaaagcu

SEQ ID NO: 558111 - RNA, 21 nt, Human
aaaucaguugaaugaaacuag

SEQ ID NO: 558112 - RNA, 23 nt, Human
aagaaaaacugacuuugacccca

SEQ ID NO: 558113 - RNA, 25 nt, Human
aagggauaguaacccccuuccccca

SEQ ID NO: 558114 - RNA, 18 nt, Human
aaucauccaaaucaaagc

SEQ ID NO: 558115 - RNA, 21 nt, Human
aauccuuucuucgccccaccc

SEQ ID NO: 558116 - RNA, 23 nt, Human
aauuaaacuugaguaaaagccug

SEQ ID NO: 558117 - RNA, 21 nt, Human
acccugagacaagccaaucuu

SEQ ID NO: 558118 - RNA, 19 nt, Human
acucgaggagaaggaaggg

SEQ ID NO: 558119 - RNA, 19 nt, Human
acuucccacccugagacaa

SEQ ID NO: 558120 - RNA, 21 nt, Human
agacaagccaaucuuaucaga

SEQ ID NO: 558121 - RNA, 19 nt, Human
agcagcauuuggcuuuaag

SEQ ID NO: 558122 - RNA, 24 nt, Human
aucccauuuuuaugaaagcuccau

SEQ ID NO: 558123 - RNA, 20 nt, Human
cacccucccacuucccaccc

SEQ ID NO: 558124 - RNA, 19 nt, Human
cagugaccagaacaaggua

SEQ ID NO: 558125 - RNA, 23 nt, Human
ccauacuaacccuucuacuccug

SEQ ID NO: 558126 - RNA, 24 nt, Human
cccaaaagaaucacaaucaauucc

SEQ ID NO: 558127 - RNA, 24 nt, Human
cccaucacuaguucuguccucaau

SEQ ID NO: 558128 - RNA, 20 nt, Human
ccccacccucccacuuccca

SEQ ID NO: 558129 - RNA, 20 nt, Human
ccucccacuucccacccuga

SEQ ID NO: 558130 - RNA, 19 nt, Human
ccuggccucaccugggcag

SEQ ID NO: 558131 - RNA, 19 nt, Human
ccugggcagcccuucacuu

SEQ ID NO: 558132 - RNA, 23 nt, Human
ccuuuggaaguugggcuccacug

SEQ ID NO: 558133 - RNA, 22 nt, Human
gccccacccucccacuucccac

SEQ ID NO: 558134 - RNA, 24 nt, Human
uaaaagccuggagaaugcuaaaaa

SEQ ID NO: 558135 - RNA, 22 nt, Human
uaacccaagguucagccaaugg

SEQ ID NO: 558136 - RNA, 19 nt, Human
uaguaaugagaagaggagg

SEQ ID NO: 558137 - RNA, 24 nt, Human
uauaaaauuuuaguaaaacccuca

SEQ ID NO: 558138 - RNA, 22 nt, Human
ucaauuuuaaaagaaaaacuga

SEQ ID NO: 558139 - RNA, 21 nt, Human
uccaugagcagcauuuggcuu

SEQ ID NO: 558140 - RNA, 24 nt, Human
uccaugagcagcauuuggcuuuaa

SEQ ID NO: 558141 - RNA, 23 nt, Human
ucgccccacccucccacuuccca

SEQ ID NO: 558142 - RNA, 23 nt, Human
ucuucgccccacccucccacuuc

SEQ ID NO: 558143 - RNA, 30 nt, Human
ugagaagaggaggcuguagagcagagaguu

SEQ ID NO: 558144 - RNA, 21 nt, Human
ugagacaagccaaucuuauca

SEQ ID NO: 558145 - RNA, 19 nt, Human
ugaguaaaagccuggagaa

SEQ ID NO: 558146 - RNA, 22 nt, Human
ugaguaaaagccuggagaaugc

SEQ ID NO: 558147 - RNA, 22 nt, Human
ugcguuguacuuucacauuuac

SEQ ID NO: 558148 - RNA, 23 nt, Human
ugggcagcccuucacuuugcucu

SEQ ID NO: 558149 - RNA, 21 nt, Human
uguuaguugggaugccaaagg

SEQ ID NO: 558150 - RNA, 21 nt, Human
uucuuuauuguuaguugggau

SEQ ID NO: 558151 - RNA, 19 nt, Human
uugaccuuuggaaguuggg

SEQ ID NO: 558152 - RNA, 24 nt, Human
uuuaguaaaacccucaugcaaaau

SEQ ID NO: 558153 - RNA, 18 nt, Human
aagggggggaagggaggg

SEQ ID NO: 558154 - RNA, 25 nt, Human
aauccugccccuccaccaagcccag

SEQ ID NO: 558155 - RNA, 23 nt, Human
acagcccgggcauggccccgggc

SEQ ID NO: 558156 - RNA, 22 nt, Human
accaagcccacggaaucuugcu

SEQ ID NO: 558157 - RNA, 19 nt, Human
acccaggcuggagugcagu

SEQ ID NO: 558158 - RNA, 23 nt, Human
agaaaucugcugaggcagcccuc

SEQ ID NO: 558159 - RNA, 18 nt, Human
agagcccgccaccugaga

SEQ ID NO: 558160 - RNA, 21 nt, Human
aggcugcagaggggcccugug

SEQ ID NO: 558161 - RNA, 18 nt, Human
aggcuggagugcaguggc

SEQ ID NO: 558162 - RNA, 20 nt, Human
agggcccccaguugcccucc

SEQ ID NO: 558163 - RNA, 19 nt, Human
agggggggaagggagggca

SEQ ID NO: 558164 - RNA, 20 nt, Human
agugcaguggcgcgauuucg

SEQ ID NO: 558165 - RNA, 23 nt, Human
agugcaguggcgcgauuucggcu

SEQ ID NO: 558166 - RNA, 24 nt, Human
agugcaguggcgcgauuucggcuc

SEQ ID NO: 558167 - RNA, 24 nt, Human
cacccaggcuggagugcaguggcg

SEQ ID NO: 558168 - RNA, 23 nt, Human
ccaccugagaggcaaggcuccug

SEQ ID NO: 558169 - RNA, 22 nt, Human
ccagggcccccaguugcccucc

SEQ ID NO: 558170 - RNA, 22 nt, Human
cccccaguugcccuccuccugc

SEQ ID NO: 558171 - RNA, 18 nt, Human
cccgggcgcaaaagucac

SEQ ID NO: 558172 - RNA, 23 nt, Human
ccgggccagggcccccaguugcc

SEQ ID NO: 558173 - RNA, 18 nt, Human
ccugcggggugcagcguc

SEQ ID NO: 558174 - RNA, 22 nt, Human
cggaauccugccccuccaccaa

SEQ ID NO: 558175 - RNA, 20 nt, Human
cuccucaggaggacaaugcc

SEQ ID NO: 558176 - RNA, 18 nt, Human
cugucacccaggcuggag

SEQ ID NO: 558177 - RNA, 19 nt, Human
cugucacccaggcuggagu

SEQ ID NO: 558178 - RNA, 21 nt, Human
cuugcucugucacccaggcug

SEQ ID NO: 558179 - RNA, 26 nt, Human
gaauccugccccuccaccaagcccac

SEQ ID NO: 558180 - RNA, 25 nt, Human
gcacagcccgggcauggccccgggc

SEQ ID NO: 558181 - RNA, 25 nt, Human
gcucugucacccaggcuggagugca

SEQ ID NO: 558182 - RNA, 19 nt, Human
gcuggagugcaguggcgcg

SEQ ID NO: 558183 - RNA, 19 nt, Human
ggaauccugccccuccacc

SEQ ID NO: 558184 - RNA, 24 nt, Human
ggaugguccugagauagcagcagg

SEQ ID NO: 558185 - RNA, 19 nt, Human
ggccagggcccccaguugc

SEQ ID NO: 558186 - RNA, 30 nt, Human
gggaggcccuggccagcuuugcacagcccc

SEQ ID NO: 558187 - RNA, 20 nt, Human
ggggaaagggggggaaggga

SEQ ID NO: 558188 - RNA, 18 nt, Human
ggucugagaaaucugcug

SEQ ID NO: 558189 - RNA, 20 nt, Human
uagcagcagggcccagcauc

SEQ ID NO: 558190 - RNA, 19 nt, Human
ucacagggucgcagagccc

SEQ ID NO: 558191 - RNA, 24 nt, Human
ucacccaggcuggagugcaguggc

SEQ ID NO: 558192 - RNA, 23 nt, Human
uccggggaaagggggggaaggga

SEQ ID NO: 558193 - RNA, 27 nt, Human
uccguggucugagaaaucugcugaggc

SEQ ID NO: 558194 - RNA, 21 nt, Human
ucugcugaggcagcccucccc

SEQ ID NO: 558195 - RNA, 22 nt, Human
ucugcugaggcagcccucccca

SEQ ID NO: 558196 - RNA, 24 nt, Human
ucugucacccaggcuggagugcag

SEQ ID NO: 558197 - RNA, 23 nt, Human
ucuugcucugucacccaggcugg

SEQ ID NO: 558198 - RNA, 24 nt, Human
ucuugcucugucacccaggcugga

SEQ ID NO: 558199 - RNA, 18 nt, Human
ugagauagcagcagggcc

SEQ ID NO: 558200 - RNA, 22 nt, Human
ugcaguggcgcgauuucggcuc

SEQ ID NO: 558201 - RNA, 21 nt, Human
ugccccuccaccaagcccacg

SEQ ID NO: 558202 - RNA, 18 nt, Human
ugccgggccagggccccc

SEQ ID NO: 558203 - RNA, 24 nt, Human
ugcucugucacccaggcuggagug

SEQ ID NO: 558204 - RNA, 23 nt, Human
uggagugcaguggcgcgauuucg

SEQ ID NO: 558205 - RNA, 24 nt, Human
uggagugcaguggcgcgauuucgg

SEQ ID NO: 558206 - RNA, 18 nt, Human
ugggaggcccuggccagc

SEQ ID NO: 558207 - RNA, 18 nt, Human
ugggaggcccuggccagc

SEQ ID NO: 558208 - RNA, 21 nt, Human
uggucugagaaaucugcugag

SEQ ID NO: 558209 - RNA, 18 nt, Human
ugugggaggcccuggcca

SEQ ID NO: 558210 - RNA, 25 nt, Human
aauccugccccgccgccaagcccac

SEQ ID NO: 558211 - RNA, 25 nt, Human
aggcuggagugcaguggcgcgaucu

SEQ ID NO: 558212 - RNA, 20 nt, Human
agugcaguggcgcgaucucg

SEQ ID NO: 558213 - RNA, 23 nt, Human
agugcaguggcgcgaucucggcu

SEQ ID NO: 558214 - RNA, 24 nt, Human
agugcaguggcgcgaucucggcuc

SEQ ID NO: 558215 - RNA, 19 nt, Human
cagagcccgccaccugaga

SEQ ID NO: 558216 - RNA, 23 nt, Human
ccaccugagaggcaaggcuccug

SEQ ID NO: 558217 - RNA, 22 nt, Human
ccugccccgccgccaagcccac

SEQ ID NO: 558218 - RNA, 24 nt, Human
cgcccaggcuggagugcaguggcg

SEQ ID NO: 558219 - RNA, 24 nt, Human
cgcucugucgcccaggcuggagug

SEQ ID NO: 558220 - RNA, 24 nt, Human
cucgcucugucgcccaggcuggag

SEQ ID NO: 558221 - RNA, 19 nt, Human
gcccaggcuggagugcagu

SEQ ID NO: 558222 - RNA, 20 nt, Human
gcccaggcuggagugcagug

SEQ ID NO: 558223 - RNA, 25 nt, Human
gcucugucgcccaggcuggagugca

SEQ ID NO: 558224 - RNA, 19 nt, Human
ucgcagggucgcagagccc

SEQ ID NO: 558225 - RNA, 22 nt, Human
ucgcccaggcuggagugcagug

SEQ ID NO: 558226 - RNA, 24 nt, Human
ucgcucugucgcccaggcuggagu

SEQ ID NO: 558227 - RNA, 19 nt, Human
ucucgcucugucgcccagg

SEQ ID NO: 558228 - RNA, 23 nt, Human
ucucgcucugucgcccaggcugg

SEQ ID NO: 558229 - RNA, 24 nt, Human
ucucgcucugucgcccaggcugga

SEQ ID NO: 558230 - RNA, 26 nt, Human
ucucgcucugucgcccaggcuggagu

SEQ ID NO: 558231 - RNA, 27 nt, Human
ucucgcucugucgcccaggcuggagug

SEQ ID NO: 558232 - RNA, 24 nt, Human
ucugucgcccaggcuggagugcag

SEQ ID NO: 558233 - RNA, 18 nt, Human
ugagaggcaaggcuccug

SEQ ID NO: 558234 - RNA, 19 nt, Human
ugagaggcaaggcuccugc

SEQ ID NO: 558235 - RNA, 23 nt, Human
uggagugcaguggcgcgaucucg

SEQ ID NO: 558236 - RNA, 24 nt, Human
uggagugcaguggcgcgaucucgg

SEQ ID NO: 558237 - RNA, 23 nt, Human
auagcaguaagauagagcagaac

SEQ ID NO: 558238 - RNA, 24 nt, Human
auauguucugauguacuugcauuu

SEQ ID NO: 558239 - RNA, 22 nt, Human
caauaaucguggaucguaaugc

SEQ ID NO: 558240 - RNA, 25 nt, Human
caugucaacaucaauaaucguggau

SEQ ID NO: 558241 - RNA, 18 nt, Human
cuucccuguggcuugggu

SEQ ID NO: 558242 - RNA, 22 nt, Human
uaagauagagcagaacugaaaa

SEQ ID NO: 558243 - RNA, 18 nt, Human
uccccauagcaguaagau

SEQ ID NO: 558244 - RNA, 19 nt, Human
ucguaaugcuccaaauagg

SEQ ID NO: 558245 - RNA, 19 nt, Human
ucuagagaaacuaucuuug

SEQ ID NO: 558246 - RNA, 20 nt, Human
ugcuccaaauagguccugcu

SEQ ID NO: 558247 - RNA, 19 nt, Human
uguucugauguacuugcau

SEQ ID NO: 558248 - RNA, 20 nt, Human
uguuuugcaaguucuucccu

SEQ ID NO: 558249 - RNA, 23 nt, Human
uugcaaguucuucccuguggcuu

SEQ ID NO: 558250 - RNA, 19 nt, Human
aagccagcacagccuaaac

SEQ ID NO: 558251 - RNA, 20 nt, Human
aguucaguggcgugaucuug

SEQ ID NO: 558252 - RNA, 24 nt, Human
aguucaguggcgugaucuuggcuc

SEQ ID NO: 558253 - RNA, 20 nt, Human
cagcacagccuaaacagcag

SEQ ID NO: 558254 - RNA, 23 nt, Human
cagccuggaccucccaggccaaa

SEQ ID NO: 558255 - RNA, 24 nt, Human
cagccuggaccucccaggccaaag

SEQ ID NO: 558256 - RNA, 22 nt, Human
cagggucuugcugucucccagg

SEQ ID NO: 558257 - RNA, 20 nt, Human
caguggcgugaucuuggcuc

SEQ ID NO: 558258 - RNA, 19 nt, Human
cccaggcuggaguucagug

SEQ ID NO: 558259 - RNA, 20 nt, Human
ccucccaggccaaaggacua

SEQ ID NO: 558260 - RNA, 18 nt, Human
ccuggaccucccaggcca

SEQ ID NO: 558261 - RNA, 21 nt, Human
cucauugcagccuggaccucc

SEQ ID NO: 558262 - RNA, 21 nt, Human
gccagcacagccuaaacagca

SEQ ID NO: 558263 - RNA, 21 nt, Human
gcucauugcagccuggaccuc

SEQ ID NO: 558264 - RNA, 22 nt, Human
ggcuggaguucaguggcgugau

SEQ ID NO: 558265 - RNA, 23 nt, Human
gucuugcugucucccaggcugga

SEQ ID NO: 558266 - RNA, 24 nt, Human
ucauugcagccuggaccucccagg

SEQ ID NO: 558267 - RNA, 24 nt, Human
ucccaggcuggaguucaguggcgu

SEQ ID NO: 558268 - RNA, 18 nt, Human
ucucccaggcuggaguuc

SEQ ID NO: 558269 - RNA, 20 nt, Human
ucuugcugucucccaggcug

SEQ ID NO: 558270 - RNA, 21 nt, Human
ucuugcugucucccaggcugg

SEQ ID NO: 558271 - RNA, 22 nt, Human
ucuugcugucucccaggcugga

SEQ ID NO: 558272 - RNA, 23 nt, Human
ucuugcugucucccaggcuggag

SEQ ID NO: 558273 - RNA, 24 nt, Human
ucuugcugucucccaggcuggagu

SEQ ID NO: 558274 - RNA, 19 nt, Human
ugcagccuggaccucccag

SEQ ID NO: 558275 - RNA, 22 nt, Human
ugcugucucccaggcuggaguu

SEQ ID NO: 558276 - RNA, 23 nt, Human
uggaccucccaggccaagacccu

SEQ ID NO: 558277 - RNA, 19 nt, Human
uggaguucaguggcgugau

SEQ ID NO: 558278 - RNA, 24 nt, Human
uggcucauugcagccuggaccucc

SEQ ID NO: 558279 - RNA, 23 nt, Human
uugcagccuggaccucccaggcc

SEQ ID NO: 558280 - RNA, 25 nt, Human
aaaaaaaaaagaauccacagcaaaa

SEQ ID NO: 558281 - RNA, 18 nt, Human
aaaagacacccaaaagaa

SEQ ID NO: 558282 - RNA, 21 nt, Human
aaaagacacccaaaagaaucc

SEQ ID NO: 558283 - RNA, 26 nt, Human
aaaagacacccaaaagaauccacagc

SEQ ID NO: 558284 - RNA, 18 nt, Human
aaacaaaagacacccaaa

SEQ ID NO: 558285 - RNA, 22 nt, Human
aaacaaaagacacccaaaagaa

SEQ ID NO: 558286 - RNA, 24 nt, Human
aaacugcagaguaaugcaaacagg

SEQ ID NO: 558287 - RNA, 31 nt, Human
aaagccaggcacgguggcucaugccuguaaa

SEQ ID NO: 558288 - RNA, 23 nt, Human
aacuuuucaggaaaacaggcucc

SEQ ID NO: 558289 - RNA, 26 nt, Human
acaaaagacacccaaaagaauccaca

SEQ ID NO: 558290 - RNA, 20 nt, Human
acagcuggagaagcuaaagc

SEQ ID NO: 558291 - RNA, 18 nt, Human
accaaaacccuugcucua

SEQ ID NO: 558292 - RNA, 22 nt, Human
accaugcugcuuaacaagcauc

SEQ ID NO: 558293 - RNA, 21 nt, Human
acccaaaagaauccacagcaa

SEQ ID NO: 558294 - RNA, 24 nt, Human
accugggugcaguucugcccuugg

SEQ ID NO: 558295 - RNA, 24 nt, Human
agacugagguaggaggaucacuug

SEQ ID NO: 558296 - RNA, 18 nt, Human
agagccuguugucuuccu

SEQ ID NO: 558297 - RNA, 19 nt, Human
agaggaaacaggaaccugg

SEQ ID NO: 558298 - RNA, 18 nt, Human
agaguaaugcaaacagga

SEQ ID NO: 558299 - RNA, 24 nt, Human
agcacuuugggagacugagguagg

SEQ ID NO: 558300 - RNA, 23 nt, Human
agccaggcacgguggcucaugcc

SEQ ID NO: 558301 - RNA, 22 nt, Human
agccugggcaacaaagugagac

SEQ ID NO: 558302 - RNA, 21 nt, Human
aggaaaacaaaagacacccaa

SEQ ID NO: 558303 - RNA, 23 nt, Human
aggaacuuuucaggaaaacaggc

SEQ ID NO: 558304 - RNA, 23 nt, Human
aggaguucaagaccagccugggc

SEQ ID NO: 558305 - RNA, 24 nt, Human
aggaucacuugagcucaggaguuc

SEQ ID NO: 558306 - RNA, 20 nt, Human
aggcagagugcugacuugug

SEQ ID NO: 558307 - RNA, 18 nt, Human
agguaggaggaucacuug

SEQ ID NO: 558308 - RNA, 23 nt, Human
agguaggaggaucacuugagcuc

SEQ ID NO: 558309 - RNA, 19 nt, Human
auccacagcaaagccaggc

SEQ ID NO: 558310 - RNA, 19 nt, Human
augccuguaaucccagcac

SEQ ID NO: 558311 - RNA, 21 nt, Human
auggaaacugcagaguaaugc

SEQ ID NO: 558312 - RNA, 20 nt, Human
caaaagacacccaaaagaag

SEQ ID NO: 558313 - RNA, 22 nt, Human
caaaagacacccaaaagaaucc

SEQ ID NO: 558314 - RNA, 23 nt, Human
caaaagacacccaaaagaaucca

SEQ ID NO: 558315 - RNA, 19 nt, Human
caaacagcugcuucagaac

SEQ ID NO: 558316 - RNA, 26 nt, Human
caacccuuacacagauggucaagaca

SEQ ID NO: 558317 - RNA, 20 nt, Human
caccaugcugcuuaacaagc

SEQ ID NO: 558318 - RNA, 23 nt, Human
cacccaaaagaauccacagcaaa

SEQ ID NO: 558319 - RNA, 22 nt, Human
cagaggaaacaggaaccugggu

SEQ ID NO: 558320 - RNA, 20 nt, Human
cagcaaagccaggcacggug

SEQ ID NO: 558321 - RNA, 21 nt, Human
cagcacuuugggagacugagg

SEQ ID NO: 558322 - RNA, 25 nt, Human
cagcacuuugggagacugagguagg

SEQ ID NO: 558323 - RNA, 18 nt, Human
caggugacugaggcagag

SEQ ID NO: 558324 - RNA, 20 nt, Human
caugccuguaaucccagcac

SEQ ID NO: 558325 - RNA, 24 nt, Human
caugccuguaaucccagcacuuug

SEQ ID NO: 558326 - RNA, 20 nt, Human
ccacagcaaagccaggcacu

SEQ ID NO: 558327 - RNA, 24 nt, Human
cccacagcaacauuuccuuuaaaa

SEQ ID NO: 558328 - RNA, 21 nt, Human
cccaguauauaugauuauucc

SEQ ID NO: 558329 - RNA, 22 nt, Human
cccucuaaaaaaaaaaaaaaaa

SEQ ID NO: 558330 - RNA, 24 nt, Human
cccucuaaaaaaaaaaaaaaaaaa

SEQ ID NO: 558331 - RNA, 24 nt, Human
ccgaucuaguauccuuucagucac

SEQ ID NO: 558332 - RNA, 20 nt, Human
ccucuaaaaaaaaaaaaaaa

SEQ ID NO: 558333 - RNA, 20 nt, Human
ccucugagucaugaucaucc

SEQ ID NO: 558334 - RNA, 23 nt, Human
ccucugagucaugaucauccacc

SEQ ID NO: 558335 - RNA, 20 nt, Human
ccugggugcaguucugcccu

SEQ ID NO: 558336 - RNA, 23 nt, Human
cucaugccuguaaucccagcacu

SEQ ID NO: 558337 - RNA, 24 nt, Human
cucaugccuguaaucccagcacuu

SEQ ID NO: 558338 - RNA, 19 nt, Human
cucuaaaaaaaaaaaaaaa

SEQ ID NO: 558339 - RNA, 23 nt, Human
cuugagcucaggaguucaagacc

SEQ ID NO: 558340 - RNA, 20 nt, Human
gacucgcucagacuucccuu

SEQ ID NO: 558341 - RNA, 23 nt, Human
gaucacuugagcucaggaguuca

SEQ ID NO: 558342 - RNA, 24 nt, Human
gaucacuugagcucaggaguucaa

SEQ ID NO: 558343 - RNA, 19 nt, Human
ggaaaacaaaagacaccca

SEQ ID NO: 558344 - RNA, 22 nt, Human
ggaaguggacuuugcugcagcu

SEQ ID NO: 558345 - RNA, 23 nt, Human
ggaucacuugagcucaggaguuc

SEQ ID NO: 558346 - RNA, 23 nt, Human
gguggcucaugccuguaauccca

SEQ ID NO: 558347 - RNA, 24 nt, Human
gguggcucaugccuguaaucccag

SEQ ID NO: 558348 - RNA, 25 nt, Human
guaggaaaacaaaagacacccaaaa

SEQ ID NO: 558349 - RNA, 18 nt, Human
gucaagacaaauuuccuc

SEQ ID NO: 558350 - RNA, 23 nt, Human
uaagcggacaacccuuacacaga

SEQ ID NO: 558351 - RNA, 22 nt, Human
uaggaaaacaaaagacacccaa

SEQ ID NO: 558352 - RNA, 22 nt, Human
uauuaucucucaccaaaacccu

SEQ ID NO: 558353 - RNA, 23 nt, Human
ucacuugagcucaggaguucaag

SEQ ID NO: 558354 - RNA, 18 nt, Human
uccacagcaaagccaggc

SEQ ID NO: 558355 - RNA, 33 nt, Human
uccacagcaaagccaggcacgguggcucauggu

SEQ ID NO: 558356 - RNA, 24 nt, Human
uccucuauaaaucguguaggaaaa

SEQ ID NO: 558357 - RNA, 28 nt, Human
ucguguaggaaaacaaaagacacccaaa

SEQ ID NO: 558358 - RNA, 21 nt, Human
ucuaaaaaaaaaaaaaaaaaa

SEQ ID NO: 558359 - RNA, 25 nt, Human
ucuaacagcuagcucaucccuuuuu

SEQ ID NO: 558360 - RNA, 20 nt, Human
ugaaucccccacagcaacau

SEQ ID NO: 558361 - RNA, 20 nt, Human
ugagguaggaggaucacuug

SEQ ID NO: 558362 - RNA, 21 nt, Human
ugagguaggaggaucacuuga

SEQ ID NO: 558363 - RNA, 23 nt, Human
ugagguaggaggaucacuugagc

SEQ ID NO: 558364 - RNA, 24 nt, Human
ugagguaggaggaucacuugagcu

SEQ ID NO: 558365 - RNA, 26 nt, Human
ugcccuugggccccccagacugcagc

SEQ ID NO: 558366 - RNA, 23 nt, Human
ugccuguaaucccagcacuuugg

SEQ ID NO: 558367 - RNA, 23 nt, Human
ugccuguaaucccagcacuuugg

SEQ ID NO: 558368 - RNA, 24 nt, Human
ugccuguaaucccagcacuuuggg

SEQ ID NO: 558369 - RNA, 22 nt, Human
uggaaguggacuuugcugcagc

SEQ ID NO: 558370 - RNA, 19 nt, Human
uggcagaggaaacaggaac

SEQ ID NO: 558371 - RNA, 23 nt, Human
uggcagaggaaacaggaaccugg

SEQ ID NO: 558372 - RNA, 22 nt, Human
uggcucaugccuguaaucccag

SEQ ID NO: 558373 - RNA, 24 nt, Human
uggcucaugccuguaaucccagca

SEQ ID NO: 558374 - RNA, 24 nt, Human
ugggagacugagguaggaggauca

SEQ ID NO: 558375 - RNA, 20 nt, Human
ugggccccccagacugcagc

SEQ ID NO: 558376 - RNA, 19 nt, Human
uggucaagacaaauuuccu

SEQ ID NO: 558377 - RNA, 24 nt, Human
uuacaaugaaucccccacagcaac

SEQ ID NO: 558378 - RNA, 25 nt, Human
uugggagacugagguaggaggauca

SEQ ID NO: 558379 - RNA, 22 nt, Human
uuuuuuuuuuuuuuuuuuguuc

SEQ ID NO: 558380 - RNA, 27 nt, Human
uuuuuuuuuuuuuuuuuuuuuuugggg

SEQ ID NO: 558381 - RNA, 19 nt, Human
aaaagcuaccacagacacc

SEQ ID NO: 558382 - RNA, 24 nt, Human
aaaagcuaccacagacaccaacuc

SEQ ID NO: 558383 - RNA, 19 nt, Human
aaacagaaagggcagcccc

SEQ ID NO: 558384 - RNA, 20 nt, Human
aaagaggccuggggccugga

SEQ ID NO: 558385 - RNA, 21 nt, Human
aacucugacaaggagcaaaga

SEQ ID NO: 558386 - RNA, 19 nt, Human
aacuggacuggaaacagaa

SEQ ID NO: 558387 - RNA, 20 nt, Human
aagacccuucacauuuccaa

SEQ ID NO: 558388 - RNA, 23 nt, Human
aagacccuucacauuuccaaggg

SEQ ID NO: 558389 - RNA, 23 nt, Human
aagccuccacauccaagagccaa

SEQ ID NO: 558390 - RNA, 26 nt, Human
aagcugccguuuacuacaacguuccg

SEQ ID NO: 558391 - RNA, 19 nt, Human
aaguggccagagcucugcc

SEQ ID NO: 558392 - RNA, 20 nt, Human
acaauguccccagggaggcc

SEQ ID NO: 558393 - RNA, 23 nt, Human
acacacacacacacacacacaca

SEQ ID NO: 558394 - RNA, 23 nt, Human
acacacacacacacacacacaca

SEQ ID NO: 558395 - RNA, 23 nt, Human
acacacacacauauacacacaca

SEQ ID NO: 558396 - RNA, 23 nt, Human
acacacauauacacacacacaca

SEQ ID NO: 558397 - RNA, 25 nt, Human
acacacgcaugugcgugcacacaca

SEQ ID NO: 558398 - RNA, 22 nt, Human
acacaggcacaugcuuguccuc

SEQ ID NO: 558399 - RNA, 20 nt, Human
acaggcacaugcuuguccuc

SEQ ID NO: 558400 - RNA, 18 nt, Human
accggcagggcccagugg

SEQ ID NO: 558401 - RNA, 20 nt, Human
acuuguucccgucagcagau

SEQ ID NO: 558402 - RNA, 24 nt, Human
agagagccuggccuagagccuggc

SEQ ID NO: 558403 - RNA, 21 nt, Human
agagcucugcccucugcccuc

SEQ ID NO: 558404 - RNA, 22 nt, Human
agagcucugcccucugcccucc

SEQ ID NO: 558405 - RNA, 24 nt, Human
agccggcgccgcagcucgagcgcg

SEQ ID NO: 558406 - RNA, 20 nt, Human
agcucugcccucugcccucc

SEQ ID NO: 558407 - RNA, 18 nt, Human
aggaucagcgacccugga

SEQ ID NO: 558408 - RNA, 18 nt, Human
aggcaaacgcaccugggg

SEQ ID NO: 558409 - RNA, 20 nt, Human
aggcaauaaaugguggguua

SEQ ID NO: 558410 - RNA, 19 nt, Human
aggccagcugaagacagga

SEQ ID NO: 558411 - RNA, 23 nt, Human
aggcggcaggaggaggcgggggc

SEQ ID NO: 558412 - RNA, 19 nt, Human
aggguccagcggcgcugcc

SEQ ID NO: 558413 - RNA, 19 nt, Human
agguuuuuggaggacaacu

SEQ ID NO: 558414 - RNA, 21 nt, Human
agugaagaucgggguggcaga

SEQ ID NO: 558415 - RNA, 20 nt, Human
caaagaacaucuacuuccag

SEQ ID NO: 558416 - RNA, 21 nt, Human
caacggcuuaguggggucugc

SEQ ID NO: 558417 - RNA, 22 nt, Human
caacucugacaaggagcaaaga

SEQ ID NO: 558418 - RNA, 21 nt, Human
caagaaccugcaggcugggau

SEQ ID NO: 558419 - RNA, 18 nt, Human
cacacacacacacacaca

SEQ ID NO: 558420 - RNA, 20 nt, Human
cacacacacacacacacaca

SEQ ID NO: 558421 - RNA, 20 nt, Human
cacacacacacacacacaca

SEQ ID NO: 558422 - RNA, 20 nt, Human
cacacacacacacacacaca

SEQ ID NO: 558423 - RNA, 24 nt, Human
cacacacacauauacacacacaca

SEQ ID NO: 558424 - RNA, 18 nt, Human
cacacaggcacaugcuug

SEQ ID NO: 558425 - RNA, 22 nt, Human
cacagagugaggcagcccuucg

SEQ ID NO: 558426 - RNA, 21 nt, Human
cacagcccagugccugacacc

SEQ ID NO: 558427 - RNA, 24 nt, Human
cacccgaggagccacggcagacau

SEQ ID NO: 558428 - RNA, 18 nt, Human
cacccuugcuguugggcu

SEQ ID NO: 558429 - RNA, 19 nt, Human
cacccuugcuguugggcuu

SEQ ID NO: 558430 - RNA, 22 nt, Human
caccugcuccuuaucaccuuug

SEQ ID NO: 558431 - RNA, 24 nt, Human
caccugcuccuuaucaccuuugug

SEQ ID NO: 558432 - RNA, 24 nt, Human
caccugcuucuccaagaaccugca

SEQ ID NO: 558433 - RNA, 21 nt, Human
caccuggagcuauuguuggca

SEQ ID NO: 558434 - RNA, 18 nt, Human
cagaaagcaacaaccccu

SEQ ID NO: 558435 - RNA, 19 nt, Human
cagaaggcaauaaauggug

SEQ ID NO: 558436 - RNA, 18 nt, Human
cagaaguggccagagcuc

SEQ ID NO: 558437 - RNA, 23 nt, Human
cagagcucugcccucugcccucc

SEQ ID NO: 558438 - RNA, 20 nt, Human
cagagggugucccugugguc

SEQ ID NO: 558439 - RNA, 18 nt, Human
cagcaaagcaccugcucc

SEQ ID NO: 558440 - RNA, 22 nt, Human
cagcaacugcaggagggcaugc

SEQ ID NO: 558441 - RNA, 23 nt, Human
cagccaccacugccuaggcaaac

SEQ ID NO: 558442 - RNA, 26 nt, Human
cagccgcugcguggcugccaggccug

SEQ ID NO: 558443 - RNA, 24 nt, Human
cagcucgacaggggccugcagcgg

SEQ ID NO: 558444 - RNA, 20 nt, Human
cagcucgagcgcgagccuca

SEQ ID NO: 558445 - RNA, 22 nt, Human
caggaagagacucaacggcuua

SEQ ID NO: 558446 - RNA, 18 nt, Human
caggagccggcgccgcag

SEQ ID NO: 558447 - RNA, 21 nt, Human
cagugugggagggagggcugg

SEQ ID NO: 558448 - RNA, 20 nt, Human
caguucuccugcacgagccc

SEQ ID NO: 558449 - RNA, 23 nt, Human
caguucuccugcacgagccccac

SEQ ID NO: 558450 - RNA, 19 nt, Human
caucagugggggcuguggg

SEQ ID NO: 558451 - RNA, 21 nt, Human
ccaagucagccucuucaacuc

SEQ ID NO: 558452 - RNA, 21 nt, Human
ccacccgaggagccacggcag

SEQ ID NO: 558453 - RNA, 24 nt, Human
ccacugccuaggcaaacgcaccug

SEQ ID NO: 558454 - RNA, 23 nt, Human
ccagccuggcagcccccucccug

SEQ ID NO: 558455 - RNA, 21 nt, Human
ccaggaagagacucaacggcu

SEQ ID NO: 558456 - RNA, 20 nt, Human
ccaggccugacacagucaca

SEQ ID NO: 558457 - RNA, 20 nt, Human
cccaaaagacagaaacgcuc

SEQ ID NO: 558458 - RNA, 22 nt, Human
cccaaagaugucagguccccau

SEQ ID NO: 558459 - RNA, 24 nt, Human
cccacagaugccugcaggcucugg

SEQ ID NO: 558460 - RNA, 23 nt, Human
cccacuggguucucaucucucca

SEQ ID NO: 558461 - RNA, 22 nt, Human
cccagaaagcaacaaccccucc

SEQ ID NO: 558462 - RNA, 22 nt, Human
cccaggaccugcagcaggaggc

SEQ ID NO: 558463 - RNA, 19 nt, Human
ccccacagaugccugcagg

SEQ ID NO: 558464 - RNA, 23 nt, Human
ccccagaaagcaacaaccccucc

SEQ ID NO: 558465 - RNA, 19 nt, Human
ccccagaaccacacuggcu

SEQ ID NO: 558466 - RNA, 20 nt, Human
ccccagggccacuggcuucu

SEQ ID NO: 558467 - RNA, 24 nt, Human
cccccaaccgcagcaucaagccuc

SEQ ID NO: 558468 - RNA, 22 nt, Human
ccccgagggauggcagccacca

SEQ ID NO: 558469 - RNA, 20 nt, Human
cccgagggauggcagccacc

SEQ ID NO: 558470 - RNA, 21 nt, Human
cccgggucagggcacggggcu

SEQ ID NO: 558471 - RNA, 19 nt, Human
cccuaaugaagugggcaga

SEQ ID NO: 558472 - RNA, 18 nt, Human
cccuccugcugcccccac

SEQ ID NO: 558473 - RNA, 19 nt, Human
cccuuccucuccugcagcc

SEQ ID NO: 558474 - RNA, 21 nt, Human
cccuugccaaguacaagaguc

SEQ ID NO: 558475 - RNA, 19 nt, Human
ccgagggauggcagccacc

SEQ ID NO: 558476 - RNA, 21 nt, Human
ccuaggcaaagcugccggccc

SEQ ID NO: 558477 - RNA, 20 nt, Human
ccucccuuuccucccguucc

SEQ ID NO: 558478 - RNA, 20 nt, Human
ccucugagccuccuaggguc

SEQ ID NO: 558479 - RNA, 23 nt, Human
ccucuucccagucaugggggcgg

SEQ ID NO: 558480 - RNA, 19 nt, Human
ccucuuggccagcugcgcc

SEQ ID NO: 558481 - RNA, 26 nt, Human
ccucuuguccucucaccgaccugcaa

SEQ ID NO: 558482 - RNA, 19 nt, Human
ccugcagcggcaucagugg

SEQ ID NO: 558483 - RNA, 20 nt, Human
ccuggccaggaacaggugcu

SEQ ID NO: 558484 - RNA, 20 nt, Human
ccugugggugccacagggcu

SEQ ID NO: 558485 - RNA, 21 nt, Human
ccuuagcugggagaacaaagc

SEQ ID NO: 558486 - RNA, 19 nt, Human
ccuuguccuucccucccac

SEQ ID NO: 558487 - RNA, 20 nt, Human
cgaaaagaggugaaggacaa

SEQ ID NO: 558488 - RNA, 19 nt, Human
cgcugcguggcugccaggc

SEQ ID NO: 558489 - RNA, 20 nt, Human
cggccagggcaacugcccgg

SEQ ID NO: 558490 - RNA, 19 nt, Human
cggcuuaguggggucugcc

SEQ ID NO: 558491 - RNA, 22 nt, Human
cggggcugaggcaccuggagcu

SEQ ID NO: 558492 - RNA, 22 nt, Human
cgggggcaggggugcugggaag

SEQ ID NO: 558493 - RNA, 19 nt, Human
cucacccaccucucagaag

SEQ ID NO: 558494 - RNA, 22 nt, Human
cucaucucuccaaguggcggag

SEQ ID NO: 558495 - RNA, 21 nt, Human
cuccagcucgcuugaguccau

SEQ ID NO: 558496 - RNA, 18 nt, Human
cucccacaccacugccuc

SEQ ID NO: 558497 - RNA, 22 nt, Human
cuccccagaaagcaacaacccc

SEQ ID NO: 558498 - RNA, 20 nt, Human
cugccaggagucacccuugc

SEQ ID NO: 558499 - RNA, 18 nt, Human
cugccucccuuuccuccc

SEQ ID NO: 558500 - RNA, 21 nt, Human
cugcugcccccaccugccagg

SEQ ID NO: 558501 - RNA, 22 nt, Human
cugcuggggcagugugggaggg

SEQ ID NO: 558502 - RNA, 23 nt, Human
cuggagaguccuaggcaaagcug

SEQ ID NO: 558503 - RNA, 19 nt, Human
cugggcggccagggcaacu

SEQ ID NO: 558504 - RNA, 25 nt, Human
gaaaaguacucucccaaaagacaga

SEQ ID NO: 558505 - RNA, 18 nt, Human
gaagugcuguggggggac

SEQ ID NO: 558506 - RNA, 22 nt, Human
gaccccacuggguucucaucuc

SEQ ID NO: 558507 - RNA, 18 nt, Human
gagagaaaggggaggcgg

SEQ ID NO: 558508 - RNA, 21 nt, Human
gagcggagggagccggugggc

SEQ ID NO: 558509 - RNA, 29 nt, Human
gagcuauuguuggcaugugguuguugcaa

SEQ ID NO: 558510 - RNA, 22 nt, Human
gaggaagauggguccacaaaga

SEQ ID NO: 558511 - RNA, 23 nt, Human
gaggaagauggguccacaaagag

SEQ ID NO: 558512 - RNA, 23 nt, Human
gaggcggcaggaggaggcggggg

SEQ ID NO: 558513 - RNA, 21 nt, Human
gaguggcaggaggaggccggg

SEQ ID NO: 558514 - RNA, 18 nt, Human
gcagugugggagggaggg

SEQ ID NO: 558515 - RNA, 22 nt, Human
gcagugugggagggagggcugg

SEQ ID NO: 558516 - RNA, 18 nt, Human
gcccaggaccugcagcag

SEQ ID NO: 558517 - RNA, 23 nt, Human
gccccgcccgccucuuggccagc

SEQ ID NO: 558518 - RNA, 22 nt, Human
gccguucuggagggacagaggc

SEQ ID NO: 558519 - RNA, 23 nt, Human
gcgcugccacaggccucuuccca

SEQ ID NO: 558520 - RNA, 18 nt, Human
gcgggggcaccuggcugg

SEQ ID NO: 558521 - RNA, 20 nt, Human
gcugcgccguccggcgcugc

SEQ ID NO: 558522 - RNA, 22 nt, Human
gcugcuuccucaaggcccuccu

SEQ ID NO: 558523 - RNA, 20 nt, Human
gcugugccacccaggagucc

SEQ ID NO: 558524 - RNA, 21 nt, Human
ggaagugcuguggggggaccu

SEQ ID NO: 558525 - RNA, 19 nt, Human
ggacuggaaacagaaaggg

SEQ ID NO: 558526 - RNA, 30 nt, Human
ggagcuauuguuggcaugugguuguugcaa

SEQ ID NO: 558527 - RNA, 24 nt, Human
ggaggaagauggguccacaaagag

SEQ ID NO: 558528 - RNA, 22 nt, Human
ggaggaucagcgacccuggaga

SEQ ID NO: 558529 - RNA, 23 nt, Human
ggcaggaggaggccgggccaccc

SEQ ID NO: 558530 - RNA, 22 nt, Human
ggcagggcccaguggcggccgg

SEQ ID NO: 558531 - RNA, 18 nt, Human
ggcaggguccaccccagg

SEQ ID NO: 558532 - RNA, 20 nt, Human
ggccagcccugcuggggcag

SEQ ID NO: 558533 - RNA, 24 nt, Human
ggccuuagcugggagaacaaagcc

SEQ ID NO: 558534 - RNA, 22 nt, Human
ggcggcgguggucuccccgcag

SEQ ID NO: 558535 - RNA, 20 nt, Human
gggaggggccgggcccgggg

SEQ ID NO: 558536 - RNA, 22 nt, Human
gggcccggggcccaggcggcag

SEQ ID NO: 558537 - RNA, 22 nt, Human
ggggccgggcccggggcccagg

SEQ ID NO: 558538 - RNA, 26 nt, Human
gggggcggagugaagggccccuggca

SEQ ID NO: 558539 - RNA, 22 nt, Human
gggggcugugggagccccuucc

SEQ ID NO: 558540 - RNA, 25 nt, Human
ggguggcagaggaggaagauggguc

SEQ ID NO: 558541 - RNA, 19 nt, Human
gggugucagugaggccagc

SEQ ID NO: 558542 - RNA, 18 nt, Human
gguaggugacaggaggga

SEQ ID NO: 558543 - RNA, 21 nt, Human
ggucagagggaccuuucagaa

SEQ ID NO: 558544 - RNA, 24 nt, Human
gguccagcggcgcugccacaggcc

SEQ ID NO: 558545 - RNA, 22 nt, Human
ggugacuccguggugagugagg

SEQ ID NO: 558546 - RNA, 20 nt, Human
ggugagggccugggccccga

SEQ ID NO: 558547 - RNA, 18 nt, Human
uacugugggcugcccagg

SEQ ID NO: 558548 - RNA, 18 nt, Human
uagagccuggccaggaac

SEQ ID NO: 558549 - RNA, 26 nt, Human
uaugaacaauguccccagggaggccg

SEQ ID NO: 558550 - RNA, 19 nt, Human
ucaaccguccuccucccca

SEQ ID NO: 558551 - RNA, 24 nt, Human
ucaaggcccuccuuugcuuucauc

SEQ ID NO: 558552 - RNA, 23 nt, Human
ucagaguggcaggaggaggccgg

SEQ ID NO: 558553 - RNA, 20 nt, Human
uccaaagggcaggguccacc

SEQ ID NO: 558554 - RNA, 18 nt, Human
uccacagaaaucaagagg

SEQ ID NO: 558555 - RNA, 19 nt, Human
uccaggccugacacaguca

SEQ ID NO: 558556 - RNA, 20 nt, Human
ucccaaaagacagaaacgcu

SEQ ID NO: 558557 - RNA, 23 nt, Human
uccccagggaggccgggguguca

SEQ ID NO: 558558 - RNA, 22 nt, Human
uccccgacuuccaggcgacugg

SEQ ID NO: 558559 - RNA, 23 nt, Human
ucccuuuccucccguuccucugg

SEQ ID NO: 558560 - RNA, 20 nt, Human
uccgggccagcccugcuggg

SEQ ID NO: 558561 - RNA, 19 nt, Human
uccucccaugucuucucag

SEQ ID NO: 558562 - RNA, 24 nt, Human
uccugcugcugugccacccaggag

SEQ ID NO: 558563 - RNA, 21 nt, Human
ucucagagggugucccugugg

SEQ ID NO: 558564 - RNA, 20 nt, Human
ucuuccuuguccaggccuga

SEQ ID NO: 558565 - RNA, 18 nt, Human
ugaagaucgggguggcag

SEQ ID NO: 558566 - RNA, 21 nt, Human
ugaagugggcagaaguggcca

SEQ ID NO: 558567 - RNA, 20 nt, Human
ugacaccacagagugaggca

SEQ ID NO: 558568 - RNA, 18 nt, Human
ugagcgccuggcguggcc

SEQ ID NO: 558569 - RNA, 19 nt, Human
ugagcgccuggcguggccu

SEQ ID NO: 558570 - RNA, 23 nt, Human
ugagcucagccgcugcguggcug

SEQ ID NO: 558571 - RNA, 22 nt, Human
ugaggcagaggcuuccacggac

SEQ ID NO: 558572 - RNA, 20 nt, Human
ugagggccugggccccgagg

SEQ ID NO: 558573 - RNA, 20 nt, Human
ugagugagguuuuuggagga

SEQ ID NO: 558574 - RNA, 22 nt, Human
ugcaguuuguccucuuccuggu

SEQ ID NO: 558575 - RNA, 18 nt, Human
ugccacaggccucuuccc

SEQ ID NO: 558576 - RNA, 20 nt, Human
ugccacagggcuccucaggu

SEQ ID NO: 558577 - RNA, 20 nt, Human
ugccaggccugggggcugcu

SEQ ID NO: 558578 - RNA, 20 nt, Human
ugcccgugugccuguauccu

SEQ ID NO: 558579 - RNA, 24 nt, Human
ugcccuccugcugcccccaccugc

SEQ ID NO: 558580 - RNA, 20 nt, Human
ugcgugcacacacacacaua

SEQ ID NO: 558581 - RNA, 21 nt, Human
ugcguggcugccaggccuggg

SEQ ID NO: 558582 - RNA, 18 nt, Human
ugcucugcgcccacugca

SEQ ID NO: 558583 - RNA, 21 nt, Human
ugcuggggcagugugggaggg

SEQ ID NO: 558584 - RNA, 21 nt, Human
uggagaguccuaggcaaagcu

SEQ ID NO: 558585 - RNA, 22 nt, Human
uggaggacaacuggucaucaca

SEQ ID NO: 558586 - RNA, 20 nt, Human
uggcagaggaggaagauggg

SEQ ID NO: 558587 - RNA, 21 nt, Human
uggcaggaggaggccgggcca

SEQ ID NO: 558588 - RNA, 20 nt, Human
uggcuggcccugccucugcc

SEQ ID NO: 558589 - RNA, 19 nt, Human
uggggacccaaagauguca

SEQ ID NO: 558590 - RNA, 22 nt, Human
uggguccacaaagaggccuggg

SEQ ID NO: 558591 - RNA, 23 nt, Human
ugggugccacagggcuccucagg

SEQ ID NO: 558592 - RNA, 23 nt, Human
uguauccuccuggggccagcacc

SEQ ID NO: 558593 - RNA, 23 nt, Human
uuagcagugggccaagucagccu

SEQ ID NO: 558594 - RNA, 18 nt, Human
uuccucaaggcccuccuu

SEQ ID NO: 558595 - RNA, 22 nt, Human
uuccucccguuccucugggccu

SEQ ID NO: 558596 - RNA, 23 nt, Human
uuguugcacagaugagcccuugg

SEQ ID NO: 558597 - RNA, 18 nt, Human
uuuguucuuggacuuggg

SEQ ID NO: 558598 - RNA, 23 nt, Human
aaagacaagaaaaaauggggcuc

SEQ ID NO: 558599 - RNA, 23 nt, Human
aaccccagugacccuggcaucca

SEQ ID NO: 558600 - RNA, 20 nt, Human
aagaaaaaauggggcuuggg

SEQ ID NO: 558601 - RNA, 18 nt, Human
aaucucaucuucccauca

SEQ ID NO: 558602 - RNA, 20 nt, Human
aaucugagaaggccuccccu

SEQ ID NO: 558603 - RNA, 23 nt, Human
accacuguguucucugugggcag

SEQ ID NO: 558604 - RNA, 21 nt, Human
accccagagcuucugcagagc

SEQ ID NO: 558605 - RNA, 19 nt, Human
agaggggagggccaagcag

SEQ ID NO: 558606 - RNA, 18 nt, Human
agauagggacagcagcau

SEQ ID NO: 558607 - RNA, 23 nt, Human
agaugauagaacaaugggaaaaa

SEQ ID NO: 558608 - RNA, 23 nt, Human
agccaagcaaaccagacacuucu

SEQ ID NO: 558609 - RNA, 20 nt, Human
agcuggacacagcuugaaca

SEQ ID NO: 558610 - RNA, 23 nt, Human
aggaaggaaaaagccgcccccgg

SEQ ID NO: 558611 - RNA, 19 nt, Human
aggagcuggggcucuggug

SEQ ID NO: 558612 - RNA, 23 nt, Human
aggagcuggggcucugguggggg

SEQ ID NO: 558613 - RNA, 19 nt, Human
aggcaaaugggcagccaag

SEQ ID NO: 558614 - RNA, 18 nt, Human
aggcggucagccacugga

SEQ ID NO: 558615 - RNA, 19 nt, Human
agggaaaggggggcugagg

SEQ ID NO: 558616 - RNA, 21 nt, Human
agggaaaggggggcugaggga

SEQ ID NO: 558617 - RNA, 19 nt, Human
aggguggggaaagaggugg

SEQ ID NO: 558618 - RNA, 23 nt, Human
agucucuucuccuuccccugccu

SEQ ID NO: 558619 - RNA, 23 nt, Human
aguugcacagucucaggcugggg

SEQ ID NO: 558620 - RNA, 21 nt, Human
aucaccuacuuaaacuauuua

SEQ ID NO: 558621 - RNA, 18 nt, Human
aucaggcaccugauccca

SEQ ID NO: 558622 - RNA, 24 nt, Human
augcugaaagaacguaagaaacaa

SEQ ID NO: 558623 - RNA, 18 nt, Human
auucccaaggccuguucc

SEQ ID NO: 558624 - RNA, 24 nt, Human
caaaagugggccuuggcucuuucc

SEQ ID NO: 558625 - RNA, 23 nt, Human
caaaccagacacuucugaucacc

SEQ ID NO: 558626 - RNA, 25 nt, Human
caacaggcugccugccccgccuucc

SEQ ID NO: 558627 - RNA, 21 nt, Human
caauggcugcccucugcuugc

SEQ ID NO: 558628 - RNA, 18 nt, Human
cacagucucaggcugggg

SEQ ID NO: 558629 - RNA, 22 nt, Human
cacauugagaagcgcuauggac

SEQ ID NO: 558630 - RNA, 19 nt, Human
caccaaacucaggaugucc

SEQ ID NO: 558631 - RNA, 22 nt, Human
caccagguaggaaaacacagcc

SEQ ID NO: 558632 - RNA, 18 nt, Human
cacccuuggaggugaggg

SEQ ID NO: 558633 - RNA, 19 nt, Human
caccgcuccggugcccuuc

SEQ ID NO: 558634 - RNA, 19 nt, Human
caccgcuccggugcccuuc

SEQ ID NO: 558635 - RNA, 22 nt, Human
caccguaggcccccugcccucu

SEQ ID NO: 558636 - RNA, 18 nt, Human
caccuccugggccggcuu

SEQ ID NO: 558637 - RNA, 22 nt, Human
cagaauggaggacucagggaca

SEQ ID NO: 558638 - RNA, 24 nt, Human
cagcaagaggccuccacuuguccg

SEQ ID NO: 558639 - RNA, 19 nt, Human
cagcagauccgccucccuc

SEQ ID NO: 558640 - RNA, 19 nt, Human
cagccaagcaaaccagaca

SEQ ID NO: 558641 - RNA, 22 nt, Human
cagccccucagucucuucuccu

SEQ ID NO: 558642 - RNA, 19 nt, Human
cagccgcagcaagaggccu

SEQ ID NO: 558643 - RNA, 21 nt, Human
cagccucugaguugugguccu

SEQ ID NO: 558644 - RNA, 22 nt, Human
cagcuccugauucccaaggccu

SEQ ID NO: 558645 - RNA, 24 nt, Human
caggaagcgaagcuuucaccuccu

SEQ ID NO: 558646 - RNA, 18 nt, Human
caggacggagcccccucc

SEQ ID NO: 558647 - RNA, 24 nt, Human
cagucucuucuccuuccccugccu

SEQ ID NO: 558648 - RNA, 19 nt, Human
cagugcaccugggcucugc

SEQ ID NO: 558649 - RNA, 19 nt, Human
caucuccgcuccagcaagg

SEQ ID NO: 558650 - RNA, 23 nt, Human
caugaagggaaauggaaauguua

SEQ ID NO: 558651 - RNA, 22 nt, Human
ccaagcccagggcugcccacuc

SEQ ID NO: 558652 - RNA, 19 nt, Human
ccacuggacagcacugccc

SEQ ID NO: 558653 - RNA, 18 nt, Human
ccagacacuucugaucac

SEQ ID NO: 558654 - RNA, 18 nt, Human
ccaggggguggucagggg

SEQ ID NO: 558655 - RNA, 23 nt, Human
cccaacaccucgcuccauaugau

SEQ ID NO: 558656 - RNA, 21 nt, Human
cccaaccccagugacccuggc

SEQ ID NO: 558657 - RNA, 23 nt, Human
cccagcccaaccccagugacccu

SEQ ID NO: 558658 - RNA, 26 nt, Human
cccagcccaaccccagugacccuggc

SEQ ID NO: 558659 - RNA, 20 nt, Human
cccagcugagggaccagcuc

SEQ ID NO: 558660 - RNA, 22 nt, Human
cccagugacccuggcauccaga

SEQ ID NO: 558661 - RNA, 23 nt, Human
cccaucaucacacagugcaccug

SEQ ID NO: 558662 - RNA, 18 nt, Human
ccccacagacaggagcug

SEQ ID NO: 558663 - RNA, 25 nt, Human
ccccagagauuucaggcauuucacc

SEQ ID NO: 558664 - RNA, 18 nt, Human
ccccagcccaaccccagu

SEQ ID NO: 558665 - RNA, 20 nt, Human
ccccagguccuagccagccc

SEQ ID NO: 558666 - RNA, 22 nt, Human
ccccagugacccuggcauccag

SEQ ID NO: 558667 - RNA, 18 nt, Human
ccccaguguucccucccc

SEQ ID NO: 558668 - RNA, 21 nt, Human
ccccccagcugagggaccagc

SEQ ID NO: 558669 - RNA, 27 nt, Human
cccccgaguaaacugcaggcuuagccu

SEQ ID NO: 558670 - RNA, 24 nt, Human
cccccugagaggccacagccccag

SEQ ID NO: 558671 - RNA, 18 nt, Human
cccccugcccucuuagca

SEQ ID NO: 558672 - RNA, 18 nt, Human
ccccgccuuccccaacac

SEQ ID NO: 558673 - RNA, 20 nt, Human
ccccugagaggccacagccc

SEQ ID NO: 558674 - RNA, 21 nt, Human
cccguggugggccccuaaagc

SEQ ID NO: 558675 - RNA, 26 nt, Human
cccuccacuggacagcacugcccccc

SEQ ID NO: 558676 - RNA, 21 nt, Human
cccugcccguggugggccccu

SEQ ID NO: 558677 - RNA, 18 nt, Human
ccgcccccggacagggga

SEQ ID NO: 558678 - RNA, 21 nt, Human
ccgguccuagagaugauagaa

SEQ ID NO: 558679 - RNA, 19 nt, Human
ccguaggcccccugcccuc

SEQ ID NO: 558680 - RNA, 29 nt, Human
ccucacuccccuccucccugcuguccagg

SEQ ID NO: 558681 - RNA, 21 nt, Human
ccuccagcagauccgccuccc

SEQ ID NO: 558682 - RNA, 22 nt, Human
ccuccagccugcaggacggagc

SEQ ID NO: 558683 - RNA, 18 nt, Human
ccucccagguuccgggug

SEQ ID NO: 558684 - RNA, 21 nt, Human
ccuccccuaccuuaggccaga

SEQ ID NO: 558685 - RNA, 22 nt, Human
ccuccccuuucucucagguguc

SEQ ID NO: 558686 - RNA, 24 nt, Human
ccucccucugcugccaggucugaa

SEQ ID NO: 558687 - RNA, 24 nt, Human
ccucugcuugcuguaggaucugau

SEQ ID NO: 558688 - RNA, 23 nt, Human
ccugccccgccuuccccaacacc

SEQ ID NO: 558689 - RNA, 20 nt, Human
ccuggcauccagaguggggg

SEQ ID NO: 558690 - RNA, 22 nt, Human
ccuugccuccauugcagccgca

SEQ ID NO: 558691 - RNA, 18 nt, Human
cggcucccugaacccccc

SEQ ID NO: 558692 - RNA, 24 nt, Human
cgugaaagcccuccccuccacugg

SEQ ID NO: 558693 - RNA, 18 nt, Human
cgugauggcucccccaca

SEQ ID NO: 558694 - RNA, 19 nt, Human
cuaccacagggagcaggga

SEQ ID NO: 558695 - RNA, 21 nt, Human
cuccagcagauccgccucccu

SEQ ID NO: 558696 - RNA, 20 nt, Human
cuccccuaccuuaggccaga

SEQ ID NO: 558697 - RNA, 23 nt, Human
cucccugaaccccccgaguaaac

SEQ ID NO: 558698 - RNA, 22 nt, Human
cucuaccacagggagcagggag

SEQ ID NO: 558699 - RNA, 18 nt, Human
cucuccccagcccaaccc

SEQ ID NO: 558700 - RNA, 23 nt, Human
cugaucaccagguaggaaaacac

SEQ ID NO: 558701 - RNA, 22 nt, Human
cuggcauccagagugggguggg

SEQ ID NO: 558702 - RNA, 18 nt, Human
gaaaaagccgcccccgga

SEQ ID NO: 558703 - RNA, 21 nt, Human
gaaguagccaccaaacucagg

SEQ ID NO: 558704 - RNA, 25 nt, Human
gaccuugauggaugguuuccagccc

SEQ ID NO: 558705 - RNA, 22 nt, Human
gagaggccacagccccaggucc

SEQ ID NO: 558706 - RNA, 24 nt, Human
gagcccccucccaucaucacacag

SEQ ID NO: 558707 - RNA, 18 nt, Human
gagcguggcagcugggag

SEQ ID NO: 558708 - RNA, 18 nt, Human
gaggcccaggcccuggcc

SEQ ID NO: 558709 - RNA, 20 nt, Human
gagguagggaagguccugga

SEQ ID NO: 558710 - RNA, 19 nt, Human
gaggugaggguggaaauaa

SEQ ID NO: 558711 - RNA, 21 nt, Human
gcuuggggaaauuggggcuuc

SEQ ID NO: 558712 - RNA, 22 nt, Human
ggaaauguuacccucacucccc

SEQ ID NO: 558713 - RNA, 21 nt, Human
ggaaauuggggcuucuggggu

SEQ ID NO: 558714 - RNA, 22 nt, Human
ggaagguccuggagccccaggg

SEQ ID NO: 558715 - RNA, 19 nt, Human
ggagcccccucccaucauc

SEQ ID NO: 558716 - RNA, 22 nt, Human
ggagcuggggcucugguggggg

SEQ ID NO: 558717 - RNA, 26 nt, Human
ggaggggcccaagcccagggcugccc

SEQ ID NO: 558718 - RNA, 20 nt, Human
ggcaggugcuccagggaaag

SEQ ID NO: 558719 - RNA, 22 nt, Human
ggcggcggcugcaucuccgcuc

SEQ ID NO: 558720 - RNA, 20 nt, Human
ggcugcccccugagaggcca

SEQ ID NO: 558721 - RNA, 20 nt, Human
gggacugcacugggcugggc

SEQ ID NO: 558722 - RNA, 24 nt, Human
ggggcuuggggaaauuggggcuuc

SEQ ID NO: 558723 - RNA, 21 nt, Human
ggggucugggggagggcagcc

SEQ ID NO: 558724 - RNA, 19 nt, Human
ggucacagccccucagucu

SEQ ID NO: 558725 - RNA, 24 nt, Human
uaaagcaauagcaccguaggcccc

SEQ ID NO: 558726 - RNA, 21 nt, Human
uacuuaaacuauuuaagccuu

SEQ ID NO: 558727 - RNA, 20 nt, Human
uacuuccaccuggaguugca

SEQ ID NO: 558728 - RNA, 18 nt, Human
uagauaaagacaagaaaa

SEQ ID NO: 558729 - RNA, 24 nt, Human
uaggaaaacacagccgggacugca

SEQ ID NO: 558730 - RNA, 27 nt, Human
uagggucaugacagaagagaagguagu

SEQ ID NO: 558731 - RNA, 21 nt, Human
ucacagccccucagucucuuc

SEQ ID NO: 558732 - RNA, 18 nt, Human
ucacugggggucaaggcu

SEQ ID NO: 558733 - RNA, 18 nt, Human
ucagaccauuacagcugc

SEQ ID NO: 558734 - RNA, 20 nt, Human
ucagaccauuacagcugcuu

SEQ ID NO: 558735 - RNA, 20 nt, Human
ucagucucuucuccuucccc

SEQ ID NO: 558736 - RNA, 18 nt, Human
ucauugaugguguggucu

SEQ ID NO: 558737 - RNA, 19 nt, Human
uccaaggaaggaaaaagcc

SEQ ID NO: 558738 - RNA, 27 nt, Human
ucccaaaagugggccuuggcucuuucc

SEQ ID NO: 558739 - RNA, 21 nt, Human
ucccaaggccuguuccucucc

SEQ ID NO: 558740 - RNA, 24 nt, Human
uccccagcccaaccccagugaccc

SEQ ID NO: 558741 - RNA, 22 nt, Human
ucggggcggcggcugcaucucc

SEQ ID NO: 558742 - RNA, 18 nt, Human
ucucauuguugaccccuc

SEQ ID NO: 558743 - RNA, 18 nt, Human
ucuccccagcccaacccu

SEQ ID NO: 558744 - RNA, 22 nt, Human
ucucuaccacagggagcaggga

SEQ ID NO: 558745 - RNA, 20 nt, Human
ucucugugggcagguggggc

SEQ ID NO: 558746 - RNA, 23 nt, Human
ucugggggagggcagcccaaggc

SEQ ID NO: 558747 - RNA, 21 nt, Human
ugaaggaugcucagcuguucc

SEQ ID NO: 558748 - RNA, 20 nt, Human
ugaagggaaauggaaauguu

SEQ ID NO: 558749 - RNA, 18 nt, Human
ugaccccuccccuuucuc

SEQ ID NO: 558750 - RNA, 21 nt, Human
ugacccuggcauccagagugg

SEQ ID NO: 558751 - RNA, 24 nt, Human
ugagaaggccuccccuaccuuagg

SEQ ID NO: 558752 - RNA, 22 nt, Human
ugagggccggagggaggggccc

SEQ ID NO: 558753 - RNA, 18 nt, Human
ugcacugggcugggcucu

SEQ ID NO: 558754 - RNA, 21 nt, Human
ugccaggucugaaggaugcuc

SEQ ID NO: 558755 - RNA, 19 nt, Human
ugccugccccgccuucccc

SEQ ID NO: 558756 - RNA, 18 nt, Human
ugcugaaagaacguaaga

SEQ ID NO: 558757 - RNA, 23 nt, Human
uggaaauguuacccucacucccc

SEQ ID NO: 558758 - RNA, 19 nt, Human
uggagccaggguggggaaa

SEQ ID NO: 558759 - RNA, 19 nt, Human
uggaguugcacagucucag

SEQ ID NO: 558760 - RNA, 21 nt, Human
uggcagggccagggggugggu

SEQ ID NO: 558761 - RNA, 18 nt, Human
uggcauccagaguggggu

SEQ ID NO: 558762 - RNA, 21 nt, Human
uggcauccagagugggguggg

SEQ ID NO: 558763 - RNA, 24 nt, Human
uggccuggccuucgugcccuuuau

SEQ ID NO: 558764 - RNA, 24 nt, Human
uggggaaauuggggcuucuggggu

SEQ ID NO: 558765 - RNA, 20 nt, Human
ugggggagggcagcccaagg

SEQ ID NO: 558766 - RNA, 23 nt, Human
ugguccuaaaccccaguguuccc

SEQ ID NO: 558767 - RNA, 21 nt, Human
uguggaugccaccuccagccu

SEQ ID NO: 558768 - RNA, 19 nt, Human
uucacuuuucggggcggcg

SEQ ID NO: 558769 - RNA, 24 nt, Human
uuccucuccccagcccaaccccag

SEQ ID NO: 558770 - RNA, 23 nt, Human
uuccucuccccagcccaaccccc

SEQ ID NO: 558771 - RNA, 22 nt, Human
uucgugcccuuuauucauuguc

SEQ ID NO: 558772 - RNA, 22 nt, Human
uugaugguguggucugacagcu

SEQ ID NO: 558773 - RNA, 18 nt, Human
aaccccaaccccugcaug

SEQ ID NO: 558774 - RNA, 20 nt, Human
aaggccagcuccagucccaa

SEQ ID NO: 558775 - RNA, 27 nt, Human
acaaagaaaaacuagcguaauccccca

SEQ ID NO: 558776 - RNA, 22 nt, Human
acuagcguaaucccccaaccca

SEQ ID NO: 558777 - RNA, 24 nt, Human
agaaaaacuagcguaaucccccaa

SEQ ID NO: 558778 - RNA, 24 nt, Human
agcuccagucccaaccccaacccc

SEQ ID NO: 558779 - RNA, 22 nt, Human
caaacaggccagguccugccag

SEQ ID NO: 558780 - RNA, 25 nt, Human
caaagaaaaacuagcguaauccccc

SEQ ID NO: 558781 - RNA, 28 nt, Human
caaccccaaccccugcauggcgccgaag

SEQ ID NO: 558782 - RNA, 24 nt, Human
caaggccagcuccagucccaaccc

SEQ ID NO: 558783 - RNA, 21 nt, Human
ccugccaggccuucuucccca

SEQ ID NO: 558784 - RNA, 21 nt, Human
cuccagucccaaccccaaccu

SEQ ID NO: 558785 - RNA, 18 nt, Human
ggcuucgggcaagagcuc

SEQ ID NO: 558786 - RNA, 28 nt, Human
uaaacaaacaggccagguccugcuguaa

SEQ ID NO: 558787 - RNA, 22 nt, Human
uacaaagaaaaacuagcguaau

SEQ ID NO: 558788 - RNA, 20 nt, Human
ucccaaccccaaccccugca

SEQ ID NO: 558789 - RNA, 24 nt, Human
ucccaaccccaaccccugcauggc

SEQ ID NO: 558790 - RNA, 21 nt, Human
uuaaacaaacaggccaggucc

SEQ ID NO: 558791 - RNA, 18 nt, Human
uuuuaaacaaacaggcca

SEQ ID NO: 558792 - RNA, 22 nt, Human
aacaaagaccugaguggagaag

SEQ ID NO: 558793 - RNA, 22 nt, Human
aacaugagcaaggaggcugaag

SEQ ID NO: 558794 - RNA, 19 nt, Human
aacccucccuccaccucug

SEQ ID NO: 558795 - RNA, 19 nt, Human
aagaggccaggcgacuggu

SEQ ID NO: 558796 - RNA, 26 nt, Human
aagccccuuuccauucuggggcacuc

SEQ ID NO: 558797 - RNA, 20 nt, Human
aauagcccuccucuuccuga

SEQ ID NO: 558798 - RNA, 19 nt, Human
aauccgccaacaucugccu

SEQ ID NO: 558799 - RNA, 18 nt, Human
aaucgcuugaaccuggga

SEQ ID NO: 558800 - RNA, 24 nt, Human
aaucgcuugaaccugggaggcaga

SEQ ID NO: 558801 - RNA, 25 nt, Human
acaaugggucaggacuaaguaagcc

SEQ ID NO: 558802 - RNA, 24 nt, Human
acagagccagacccugucuuaaaa

SEQ ID NO: 558803 - RNA, 19 nt, Human
accauugcacuccagccug

SEQ ID NO: 558804 - RNA, 24 nt, Human
accauugcacuccagccuggguga

SEQ ID NO: 558805 - RNA, 19 nt, Human
acccagagccugacugcac

SEQ ID NO: 558806 - RNA, 18 nt, Human
accccaacccucccucca

SEQ ID NO: 558807 - RNA, 19 nt, Human
accccaacccucccuccac

SEQ ID NO: 558808 - RNA, 19 nt, Human
acccgcuuccugaaccccc

SEQ ID NO: 558809 - RNA, 20 nt, Human
acgagcccugucuuggcccu

SEQ ID NO: 558810 - RNA, 18 nt, Human
acgauaagcccacccagc

SEQ ID NO: 558811 - RNA, 18 nt, Human
acgggugaagguggguca

SEQ ID NO: 558812 - RNA, 20 nt, Human
agaaaaaggagaggcaagga

SEQ ID NO: 558813 - RNA, 21 nt, Human
agaaaaaggagaggcaaggag

SEQ ID NO: 558814 - RNA, 24 nt, Human
agaaggaaaaagccacacaccugg

SEQ ID NO: 558815 - RNA, 20 nt, Human
agacagcacugcgucacgcg

SEQ ID NO: 558816 - RNA, 19 nt, Human
agacccgcuuccugaaccc

SEQ ID NO: 558817 - RNA, 18 nt, Human
agagaggggagaagaggc

SEQ ID NO: 558818 - RNA, 18 nt, Human
agagguugcagugagccg

SEQ ID NO: 558819 - RNA, 23 nt, Human
agagguugcagugagccgagauc

SEQ ID NO: 558820 - RNA, 24 nt, Human
agagguugcagugagccgagauca

SEQ ID NO: 558821 - RNA, 21 nt, Human
agauccgcccgcuggagaggg

SEQ ID NO: 558822 - RNA, 18 nt, Human
agcccacccagcccuccc

SEQ ID NO: 558823 - RNA, 18 nt, Human
agccugccucucuccucc

SEQ ID NO: 558824 - RNA, 21 nt, Human
agcgccacaaaucggcagcag

SEQ ID NO: 558825 - RNA, 18 nt, Human
agcgggugcagcagccca

SEQ ID NO: 558826 - RNA, 20 nt, Human
agcgggugcagcagcccagg

SEQ ID NO: 558827 - RNA, 19 nt, Human
agcugaaggucugguuugg

SEQ ID NO: 558828 - RNA, 25 nt, Human
aggaaaaagccacacaccuggagga

SEQ ID NO: 558829 - RNA, 23 nt, Human
aggaaacgcccacucuguccuca

SEQ ID NO: 558830 - RNA, 18 nt, Human
aggaagccuggggccugu

SEQ ID NO: 558831 - RNA, 18 nt, Human
aggcagaaucuaccugug

SEQ ID NO: 558832 - RNA, 18 nt, Human
aggcagaaucuaccugug

SEQ ID NO: 558833 - RNA, 21 nt, Human
aggcagagguugcagugagcc

SEQ ID NO: 558834 - RNA, 24 nt, Human
aggcagagguugcagugagccgag

SEQ ID NO: 558835 - RNA, 25 nt, Human
aggcagcucagacaaccucacuguc

SEQ ID NO: 558836 - RNA, 22 nt, Human
aggcaggagaaucgcuugaacc

SEQ ID NO: 558837 - RNA, 24 nt, Human
aggcaggagaaucgcuugaaccug

SEQ ID NO: 558838 - RNA, 20 nt, Human
aggcugaggcaggagaaucg

SEQ ID NO: 558839 - RNA, 24 nt, Human
aggcugaggcaggagaaucgcuug

SEQ ID NO: 558840 - RNA, 20 nt, Human
agggaaccugcaggcagcuc

SEQ ID NO: 558841 - RNA, 18 nt, Human
agggcaggaagcaaacuu

SEQ ID NO: 558842 - RNA, 18 nt, Human
agggcgcacguggggucu

SEQ ID NO: 558843 - RNA, 23 nt, Human
aggucggggagcucccagcugga

SEQ ID NO: 558844 - RNA, 23 nt, Human
aggugccgagagccggggaggcc

SEQ ID NO: 558845 - RNA, 22 nt, Human
aguaagcccuggagcuccagug

SEQ ID NO: 558846 - RNA, 25 nt, Human
aucagcucccccuccuccugccccu

SEQ ID NO: 558847 - RNA, 24 nt, Human
aucauaccauugcacuccagccug

SEQ ID NO: 558848 - RNA, 24 nt, Human
augagcaaggaggcugaaggagca

SEQ ID NO: 558849 - RNA, 21 nt, Human
auugcacuccagccuggguga

SEQ ID NO: 558850 - RNA, 24 nt, Human
auugcacuccagccugggugacag

SEQ ID NO: 558851 - RNA, 20 nt, Human
caacccucccuccaccucug

SEQ ID NO: 558852 - RNA, 22 nt, Human
caagacuucccuagagcuuggg

SEQ ID NO: 558853 - RNA, 24 nt, Human
caagcuggaaggagcguggcuuca

SEQ ID NO: 558854 - RNA, 19 nt, Human
cacacagugcuuacacuug

SEQ ID NO: 558855 - RNA, 21 nt, Human
cacaccuggaggaagggccag

SEQ ID NO: 558856 - RNA, 23 nt, Human
cacagccccucuccgcaggugca

SEQ ID NO: 558857 - RNA, 19 nt, Human
cacagugagauccgcccgc

SEQ ID NO: 558858 - RNA, 24 nt, Human
caccccccgccagagcucacagcc

SEQ ID NO: 558859 - RNA, 21 nt, Human
cacccugagggcgcacguggg

SEQ ID NO: 558860 - RNA, 19 nt, Human
cacccuucucccaagacaa

SEQ ID NO: 558861 - RNA, 24 nt, Human
caccgugccagccggcagcuccag

SEQ ID NO: 558862 - RNA, 21 nt, Human
caccuguugcucuccacugug

SEQ ID NO: 558863 - RNA, 22 nt, Human
cacuccagccugggugacagag

SEQ ID NO: 558864 - RNA, 23 nt, Human
cacuccagccugggugacagagc

SEQ ID NO: 558865 - RNA, 18 nt, Human
cacugugccagcccagcu

SEQ ID NO: 558866 - RNA, 19 nt, Human
cagcaaaauagcccuccuc

SEQ ID NO: 558867 - RNA, 25 nt, Human
cagcaaaauagcccuccucuuccug

SEQ ID NO: 558868 - RNA, 21 nt, Human
cagcagcccacagacaauccg

SEQ ID NO: 558869 - RNA, 18 nt, Human
cagcagcccaggguccac

SEQ ID NO: 558870 - RNA, 24 nt, Human
cagcaggcaggaugacaacagggu

SEQ ID NO: 558871 - RNA, 22 nt, Human
cagcagucaguggaagcuucug

SEQ ID NO: 558872 - RNA, 22 nt, Human
cagcaguguggaucugucucuu

SEQ ID NO: 558873 - RNA, 18 nt, Human
cagccacaggggccgggg

SEQ ID NO: 558874 - RNA, 18 nt, Human
cagccagccacaggggcc

SEQ ID NO: 558875 - RNA, 18 nt, Human
cagccccugaguacccag

SEQ ID NO: 558876 - RNA, 21 nt, Human
cagccccugaguacccagacu

SEQ ID NO: 558877 - RNA, 24 nt, Human
cagcuacucgggaggcugaggcag

SEQ ID NO: 558878 - RNA, 21 nt, Human
cagcucccccuccuccugccc

SEQ ID NO: 558879 - RNA, 22 nt, Human
cagcucccccuccuccugcccc

SEQ ID NO: 558880 - RNA, 18 nt, Human
cagcuggacaauggaaug

SEQ ID NO: 558881 - RNA, 24 nt, Human
cagcuuaaggcaaaaguuuggcaa

SEQ ID NO: 558882 - RNA, 21 nt, Human
caggacagccuccuggcacga

SEQ ID NO: 558883 - RNA, 19 nt, Human
caggaggaaugauuaggaa

SEQ ID NO: 558884 - RNA, 22 nt, Human
cagggccaaaucgucaccaggc

SEQ ID NO: 558885 - RNA, 21 nt, Human
caggggccagccagccacagg

SEQ ID NO: 558886 - RNA, 22 nt, Human
caggugcagggauacgaccugg

SEQ ID NO: 558887 - RNA, 19 nt, Human
caggugccgagagccgggg

SEQ ID NO: 558888 - RNA, 19 nt, Human
cagugggaggggugcuggc

SEQ ID NO: 558889 - RNA, 24 nt, Human
caguuagaagugugccucucccag

SEQ ID NO: 558890 - RNA, 19 nt, Human
cauugaggcugugugucgg

SEQ ID NO: 558891 - RNA, 19 nt, Human
cauugcacuccagccuggg

SEQ ID NO: 558892 - RNA, 21 nt, Human
cauugcacuccagccugggug

SEQ ID NO: 558893 - RNA, 22 nt, Human
cauugcacuccagccuggguga

SEQ ID NO: 558894 - RNA, 24 nt, Human
cauugcacuccagccugggugaca

SEQ ID NO: 558895 - RNA, 24 nt, Human
cauugcacuccagccugggugaca

SEQ ID NO: 558896 - RNA, 21 nt, Human
ccacagcagcaggcaggauga

SEQ ID NO: 558897 - RNA, 19 nt, Human
ccacccagcccucccagcc

SEQ ID NO: 558898 - RNA, 23 nt, Human
ccagacucagggaaccugcaggc

SEQ ID NO: 558899 - RNA, 21 nt, Human
ccagagcucacagccccucuc

SEQ ID NO: 558900 - RNA, 24 nt, Human
ccagcccagccuccagaguggaac
